United States Patent Application Publication US 2018/0305689 A1 - sequence listing, part 120

SEQ ID NO: 1730906 - RNA, 19 nt, Artificial Sequence
  Description of Artificial Sequence: Synthetic oligonucleotide
  Antisense strand to SEQ ID NO: 1730905
uuaucucgaacacuucccu

SEQ ID NO: 1730907 - RNA, 19 nt, Artificial Sequence
  Description of Artificial Sequence: Synthetic oligonucleotide
  Sense strand starting at position 908 of SEQ ID NO: 1562217
ggaaguguucgagauaacu

SEQ ID NO: 1730908 - RNA, 19 nt, Artificial Sequence
  Description of Artificial Sequence: Synthetic oligonucleotide
  Antisense strand to SEQ ID NO: 1730907
aguuaucucgaacacuucc

SEQ ID NO: 1730909 - RNA, 19 nt, Artificial Sequence
  Description of Artificial Sequence: Synthetic oligonucleotide
  Sense strand starting at position 1274 of SEQ ID NO: 1562217
aggguauacucaccagauc

SEQ ID NO: 1730910 - RNA, 19 nt, Artificial Sequence
  Description of Artificial Sequence: Synthetic oligonucleotide
  Antisense strand to SEQ ID NO: 1730909
gaucuggugaguauacccu

SEQ ID NO: 1730911 - RNA, 19 nt, Artificial Sequence
  Description of Artificial Sequence: Synthetic oligonucleotide
  Sense strand starting at position 1707 of SEQ ID NO: 1562217
ccuagaaaucuuugcucug

SEQ ID NO: 1730912 - RNA, 19 nt, Artificial Sequence
  Description of Artificial Sequence: Synthetic oligonucleotide
  Antisense strand to SEQ ID NO: 1730911
cagagcaaagauuucuagg

SEQ ID NO: 1730913 - RNA, 19 nt, Artificial Sequence
  Description of Artificial Sequence: Synthetic oligonucleotide
  Sense strand starting at position 1710 of SEQ ID NO: 1562217
agaaaucuuugcucugggu

SEQ ID NO: 1730914 - RNA, 19 nt, Artificial Sequence
  Description of Artificial Sequence: Synthetic oligonucleotide
  Antisense strand to SEQ ID NO: 1730913
acccagagcaaagauuucu

SEQ ID NO: 1730915 - RNA, 19 nt, Artificial Sequence
  Description of Artificial Sequence: Synthetic oligonucleotide
  Sense strand starting at position 1716 of SEQ ID NO: 1562217
cuuugcucuggguaccaau

SEQ ID NO: 1730916 - RNA, 19 nt, Artificial Sequence
  Description of Artificial Sequence: Synthetic oligonucleotide
  Antisense strand to SEQ ID NO: 1730915
auugguacccagagcaaag

SEQ ID NO: 1730917 - RNA, 19 nt, Artificial Sequence
  Description of Artificial Sequence: Synthetic oligonucleotide
  Sense strand starting at position 2008 of SEQ ID NO: 1562217
guuugauccagccaaugag

SEQ ID NO: 1730918 - RNA, 19 nt, Artificial Sequence
  Description of Artificial Sequence: Synthetic oligonucleotide
  Antisense strand to SEQ ID NO: 1730917
cucauuggcuggaucaaac

SEQ ID NO: 1730919 - RNA, 19 nt, Artificial Sequence
  Description of Artificial Sequence: Synthetic oligonucleotide
  Sense strand starting at position 2107 of SEQ ID NO: 1562217
cugacaaccgauugguaga

SEQ ID NO: 1730920 - RNA, 19 nt, Artificial Sequence
  Description of Artificial Sequence: Synthetic oligonucleotide
  Antisense strand to SEQ ID NO: 1730919
ucuaccaaucgguugucag

SEQ ID NO: 1730921 - RNA, 19 nt, Artificial Sequence
  Description of Artificial Sequence: Synthetic oligonucleotide
  Sense strand starting at position 2108 of SEQ ID NO: 1562217
ugacaaccgauugguagau

SEQ ID NO: 1730922 - RNA, 19 nt, Artificial Sequence
  Description of Artificial Sequence: Synthetic oligonucleotide
  Antisense strand to SEQ ID NO: 1730921
aucuaccaaucgguuguca

SEQ ID NO: 1730923 - RNA, 19 nt, Artificial Sequence
  Description of Artificial Sequence: Synthetic oligonucleotide
  Sense strand starting at position 2126 of SEQ ID NO: 1562217
ugaugcugccauuaacuaa

SEQ ID NO: 1730924 - RNA, 19 nt, Artificial Sequence
  Description of Artificial Sequence: Synthetic oligonucleotide
  Antisense strand to SEQ ID NO: 1730923
uuaguuaauggcagcauca

SEQ ID NO: 1730925 - RNA, 19 nt, Artificial Sequence
  Description of Artificial Sequence: Synthetic oligonucleotide
  Sense strand starting at position 2358 of SEQ ID NO: 1562217
cuuugcugcguccuaagua

SEQ ID NO: 1730926 - RNA, 19 nt, Artificial Sequence
  Description of Artificial Sequence: Synthetic oligonucleotide
  Antisense strand to SEQ ID NO: 1730925
uacuuaggacgcagcaaag

SEQ ID NO: 1730927 - RNA, 19 nt, Artificial Sequence
  Description of Artificial Sequence: Synthetic oligonucleotide
  Sense strand starting at position 2450 of SEQ ID NO: 1562217
guccauacaucuccgcaga

SEQ ID NO: 1730928 - RNA, 19 nt, Artificial Sequence
  Description of Artificial Sequence: Synthetic oligonucleotide
  Antisense strand to SEQ ID NO: 1730927
ucugcggagauguauggac

SEQ ID NO: 1730929 - RNA, 19 nt, Artificial Sequence
  Description of Artificial Sequence: Synthetic oligonucleotide
  Sense strand starting at position 2452 of SEQ ID NO: 1562217
ccauacaucuccgcagaga

SEQ ID NO: 1730930 - RNA, 19 nt, Artificial Sequence
  Description of Artificial Sequence: Synthetic oligonucleotide
  Antisense strand to SEQ ID NO: 1730929
ucucugcggagauguaugg

SEQ ID NO: 1730931 - RNA, 19 nt, Artificial Sequence
  Description of Artificial Sequence: Synthetic oligonucleotide
  Sense strand starting at position 2453 of SEQ ID NO: 1562217
cauacaucuccgcagagau

SEQ ID NO: 1730932 - RNA, 19 nt, Artificial Sequence
  Description of Artificial Sequence: Synthetic oligonucleotide
  Antisense strand to SEQ ID NO: 1730931
aucucugcggagauguaug

SEQ ID NO: 1730933 - RNA, 19 nt, Artificial Sequence
  Description of Artificial Sequence: Synthetic oligonucleotide
  Sense strand starting at position 2455 of SEQ ID NO: 1562217
uacaucuccgcagagauga

SEQ ID NO: 1730934 - RNA, 19 nt, Artificial Sequence
  Description of Artificial Sequence: Synthetic oligonucleotide
  Antisense strand to SEQ ID NO: 1730933
ucaucucugcggagaugua

SEQ ID NO: 1730935 - RNA, 19 nt, Artificial Sequence
  Description of Artificial Sequence: Synthetic oligonucleotide
  Sense strand starting at position 2523 of SEQ ID NO: 1562217
guccguaaucccgaacacu

SEQ ID NO: 1730936 - RNA, 19 nt, Artificial Sequence
  Description of Artificial Sequence: Synthetic oligonucleotide
  Antisense strand to SEQ ID NO: 1730935
aguguucgggauuacggac

SEQ ID NO: 1730937 - RNA, 19 nt, Artificial Sequence
  Description of Artificial Sequence: Synthetic oligonucleotide
  Sense strand starting at position 2609 of SEQ ID NO: 1562217
ggagaccugucucuacuua

SEQ ID NO: 1730938 - RNA, 19 nt, Artificial Sequence
  Description of Artificial Sequence: Synthetic oligonucleotide
  Antisense strand to SEQ ID NO: 1730937
uaaguagagacaggucucc

SEQ ID NO: 1730939 - RNA, 19 nt, Artificial Sequence
  Description of Artificial Sequence: Synthetic oligonucleotide
  Sense strand starting at position 2834 of SEQ ID NO: 1562217
guggguaguguguaaccuu

SEQ ID NO: 1730940 - RNA, 19 nt, Artificial Sequence
  Description of Artificial Sequence: Synthetic oligonucleotide
  Antisense strand to SEQ ID NO: 1730939
aagguuacacacuacccac

SEQ ID NO: 1730941 - RNA, 19 nt, Artificial Sequence
  Description of Artificial Sequence: Synthetic oligonucleotide
  Sense strand starting at position 2865 of SEQ ID NO: 1562217
uuaguaucuuaaccuguaa

SEQ ID NO: 1730942 - RNA, 19 nt, Artificial Sequence
  Description of Artificial Sequence: Synthetic oligonucleotide
  Antisense strand to SEQ ID NO: 1730941
uuacagguuaagauacuaa

SEQ ID NO: 1730943 - RNA, 19 nt, Artificial Sequence
  Description of Artificial Sequence: Synthetic oligonucleotide
  Sense strand starting at position 2945 of SEQ ID NO: 1562217
ucugccauguccuuacauu

SEQ ID NO: 1730944 - RNA, 19 nt, Artificial Sequence
  Description of Artificial Sequence: Synthetic oligonucleotide
  Antisense strand to SEQ ID NO: 1730943
aauguaaggacauggcaga

SEQ ID NO: 1730945 - RNA, 19 nt, Artificial Sequence
  Description of Artificial Sequence: Synthetic oligonucleotide
  Sense strand starting at position 2946 of SEQ ID NO: 1562217
cugccauguccuuacauua

SEQ ID NO: 1730946 - RNA, 19 nt, Artificial Sequence
  Description of Artificial Sequence: Synthetic oligonucleotide
  Antisense strand to SEQ ID NO: 1730945
uaauguaaggacauggcag

SEQ ID NO: 1730947 - RNA, 19 nt, Artificial Sequence
  Description of Artificial Sequence: Synthetic oligonucleotide
  Sense strand starting at position 2958 of SEQ ID NO: 1562217
uacauuagcuggguaagga

SEQ ID NO: 1730948 - RNA, 19 nt, Artificial Sequence
  Description of Artificial Sequence: Synthetic oligonucleotide
  Antisense strand to SEQ ID NO: 1730947
uccuuacccagcuaaugua

SEQ ID NO: 1730949 - RNA, 19 nt, Artificial Sequence
  Description of Artificial Sequence: Synthetic oligonucleotide
  Sense strand starting at position 3051 of SEQ ID NO: 1562217
uacuguuaugggugagggu

SEQ ID NO: 1730950 - RNA, 19 nt, Artificial Sequence
  Description of Artificial Sequence: Synthetic oligonucleotide
  Antisense strand to SEQ ID NO: 1730949
acccucacccauaacagua

SEQ ID NO: 1730951 - RNA, 19 nt, Artificial Sequence
  Description of Artificial Sequence: Synthetic oligonucleotide
  Sense strand starting at position 3052 of SEQ ID NO: 1562217
acuguuaugggugaggguu

SEQ ID NO: 1730952 - RNA, 19 nt, Artificial Sequence
  Description of Artificial Sequence: Synthetic oligonucleotide
  Antisense strand to SEQ ID NO: 1730951
aacccucacccauaacagu

SEQ ID NO: 1730953 - RNA, 19 nt, Artificial Sequence
  Description of Artificial Sequence: Synthetic oligonucleotide
  Sense strand starting at position 3106 of SEQ ID NO: 1562217
ccuugauguucugucaauu

SEQ ID NO: 1730954 - RNA, 19 nt, Artificial Sequence
  Description of Artificial Sequence: Synthetic oligonucleotide
  Antisense strand to SEQ ID NO: 1730953
aauugacagaacaucaagg

SEQ ID NO: 1730955 - RNA, 19 nt, Artificial Sequence
  Description of Artificial Sequence: Synthetic oligonucleotide
  Sense strand starting at position 3117 of SEQ ID NO: 1562217
ugucaauucccacaaggua

SEQ ID NO: 1730956 - RNA, 19 nt, Artificial Sequence
  Description of Artificial Sequence: Synthetic oligonucleotide
  Antisense strand to SEQ ID NO: 1730955
uaccuugugggaauugaca

SEQ ID NO: 1730957 - RNA, 19 nt, Artificial Sequence
  Description of Artificial Sequence: Synthetic oligonucleotide
  Sense strand starting at position 3510 of SEQ ID NO: 1562217
ccaggcauccucuggaaca

SEQ ID NO: 1730958 - RNA, 19 nt, Artificial Sequence
  Description of Artificial Sequence: Synthetic oligonucleotide
  Antisense strand to SEQ ID NO: 1730957
uguuccagaggaugccugg

SEQ ID NO: 1730959 - RNA, 19 nt, Artificial Sequence
  Description of Artificial Sequence: Synthetic oligonucleotide
  Sense strand starting at position 3710 of SEQ ID NO: 1562217
gagaguggucauugccuga

SEQ ID NO: 1730960 - RNA, 19 nt, Artificial Sequence
  Description of Artificial Sequence: Synthetic oligonucleotide
  Antisense strand to SEQ ID NO: 1730959
ucaggcaaugaccacucuc

SEQ ID NO: 1730961 - RNA, 19 nt, Artificial Sequence
  Description of Artificial Sequence: Synthetic oligonucleotide
  Sense strand starting at position 3804 of SEQ ID NO: 1562217
ggaugcgguuuacaauuua

SEQ ID NO: 1730962 - RNA, 19 nt, Artificial Sequence
  Description of Artificial Sequence: Synthetic oligonucleotide
  Antisense strand to SEQ ID NO: 1730961
uaaauuguaaaccgcaucc

SEQ ID NO: 1730963 - RNA, 19 nt, Artificial Sequence
  Description of Artificial Sequence: Synthetic oligonucleotide
  Sense strand starting at position 3812 of SEQ ID NO: 1562217
uuuacaauuuaguacggaa

SEQ ID NO: 1730964 - RNA, 19 nt, Artificial Sequence
  Description of Artificial Sequence: Synthetic oligonucleotide
  Antisense strand to SEQ ID NO: 1730963
uuccguacuaaauuguaaa

SEQ ID NO: 1730965 - RNA, 19 nt, Artificial Sequence
  Description of Artificial Sequence: Synthetic oligonucleotide
  Sense strand starting at position 3848 of SEQ ID NO: 1562217
ugggaaugguuccuugaga

SEQ ID NO: 1730966 - RNA, 19 nt, Artificial Sequence
  Description of Artificial Sequence: Synthetic oligonucleotide
  Antisense strand to SEQ ID NO: 1730965
ucucaaggaaccauuccca

SEQ ID NO: 1730967 - RNA, 19 nt, Artificial Sequence
  Description of Artificial Sequence: Synthetic oligonucleotide
  Sense strand starting at position 3849 of SEQ ID NO: 1562217
gggaaugguuccuugagac

SEQ ID NO: 1730968 - RNA, 19 nt, Artificial Sequence
  Description of Artificial Sequence: Synthetic oligonucleotide
  Antisense strand to SEQ ID NO: 1730967
gucucaaggaaccauuccc

SEQ ID NO: 1730969 - RNA, 19 nt, Artificial Sequence
  Description of Artificial Sequence: Synthetic oligonucleotide
  Sense strand starting at position 3886 of SEQ ID NO: 1562217
augcuucauggaugggaga

SEQ ID NO: 1730970 - RNA, 19 nt, Artificial Sequence
  Description of Artificial Sequence: Synthetic oligonucleotide
  Antisense strand to SEQ ID NO: 1730969
ucucccauccaugaagcau

SEQ ID NO: 1730971 - RNA, 19 nt, Artificial Sequence
  Description of Artificial Sequence: Synthetic oligonucleotide
  Sense strand starting at position 3915 of SEQ ID NO: 1562217
gugacuuauuuauagccuu

SEQ ID NO: 1730972 - RNA, 19 nt, Artificial Sequence
  Description of Artificial Sequence: Synthetic oligonucleotide
  Antisense strand to SEQ ID NO: 1730971
aaggcuauaaauaagucac

SEQ ID NO: 1730973 - RNA, 19 nt, Artificial Sequence
  Description of Artificial Sequence: Synthetic oligonucleotide
  Sense strand starting at position 3960 of SEQ ID NO: 1562217
ucuugaaugguguggugaa

SEQ ID NO: 1730974 - RNA, 19 nt, Artificial Sequence
  Description of Artificial Sequence: Synthetic oligonucleotide
  Antisense strand to SEQ ID NO: 1730973
uucaccacaccauucaaga

SEQ ID NO: 1730975 - RNA, 19 nt, Artificial Sequence
  Description of Artificial Sequence: Synthetic oligonucleotide
  Sense strand starting at position 285 of SEQ ID NO: 1562218
gaagcugccuucuugagau

SEQ ID NO: 1730976 - RNA, 19 nt, Artificial Sequence
  Description of Artificial Sequence: Synthetic oligonucleotide
  Antisense strand to SEQ ID NO: 1730975
aucucaagaaggcagcuuc

SEQ ID NO: 1730977 - RNA, 19 nt, Artificial Sequence
  Description of Artificial Sequence: Synthetic oligonucleotide
  Sense strand starting at position 427 of SEQ ID NO: 1562218
ggccacauggcucagagaa

SEQ ID NO: 1730978 - RNA, 19 nt, Artificial Sequence
  Description of Artificial Sequence: Synthetic oligonucleotide
  Antisense strand to SEQ ID NO: 1730977
uucucugagccauguggcc

SEQ ID NO: 1730979 - RNA, 19 nt, Artificial Sequence
  Description of Artificial Sequence: Synthetic oligonucleotide
  Sense strand starting at position 429 of SEQ ID NO: 1562218
ccacauggcucagagaaug

SEQ ID NO: 1730980 - RNA, 19 nt, Artificial Sequence
  Description of Artificial Sequence: Synthetic oligonucleotide
  Antisense strand to SEQ ID NO: 1730979
cauucucugagccaugugg

SEQ ID NO: 1730981 - RNA, 19 nt, Artificial Sequence
  Description of Artificial Sequence: Synthetic oligonucleotide
  Sense strand starting at position 464 of SEQ ID NO: 1562218
gagugucuugcuccgccaa

SEQ ID NO: 1730982 - RNA, 19 nt, Artificial Sequence
  Description of Artificial Sequence: Synthetic oligonucleotide
  Antisense strand to SEQ ID NO: 1730981
uuggcggagcaagacacuc

SEQ ID NO: 1730983 - RNA, 19 nt, Artificial Sequence
  Description of Artificial Sequence: Synthetic oligonucleotide
  Sense strand starting at position 465 of SEQ ID NO: 1562218
agugucuugcuccgccaaa

SEQ ID NO: 1730984 - RNA, 19 nt, Artificial Sequence
  Description of Artificial Sequence: Synthetic oligonucleotide
  Antisense strand to SEQ ID NO: 1730983
uuuggcggagcaagacacu

SEQ ID NO: 1730985 - RNA, 19 nt, Artificial Sequence
  Description of Artificial Sequence: Synthetic oligonucleotide
  Sense strand starting at position 466 of SEQ ID NO: 1562218
gugucuugcuccgccaaag

SEQ ID NO: 1730986 - RNA, 19 nt, Artificial Sequence
  Description of Artificial Sequence: Synthetic oligonucleotide
  Antisense strand to SEQ ID NO: 1730985
cuuuggcggagcaagacac

SEQ ID NO: 1730987 - RNA, 19 nt, Artificial Sequence
  Description of Artificial Sequence: Synthetic oligonucleotide
  Sense strand starting at position 1182 of SEQ ID NO: 1562218
gauuauaaggugugagcua

SEQ ID NO: 1730988 - RNA, 19 nt, Artificial Sequence
  Description of Artificial Sequence: Synthetic oligonucleotide
  Antisense strand to SEQ ID NO: 1730987
uagcucacaccuuauaauc

SEQ ID NO: 1730989 - RNA, 19 nt, Artificial Sequence
  Description of Artificial Sequence: Synthetic oligonucleotide
  Sense strand starting at position 1285 of SEQ ID NO: 1562218
gggaguuggguguggguaa

SEQ ID NO: 1730990 - RNA, 19 nt, Artificial Sequence
  Description of Artificial Sequence: Synthetic oligonucleotide
  Antisense strand to SEQ ID NO: 1730989
uuacccacacccaacuccc

SEQ ID NO: 1730991 - RNA, 19 nt, Artificial Sequence
  Description of Artificial Sequence: Synthetic oligonucleotide
  Sense strand starting at position 1340 of SEQ ID NO: 1562218
uagggagggucuuguauga

SEQ ID NO: 1730992 - RNA, 19 nt, Artificial Sequence
  Description of Artificial Sequence: Synthetic oligonucleotide
  Antisense strand to SEQ ID NO: 1730991
ucauacaagacccucccua

SEQ ID NO: 1730993 - RNA, 19 nt, Artificial Sequence
  Description of Artificial Sequence: Synthetic oligonucleotide
  Sense strand starting at position 1353 of SEQ ID NO: 1562218
guaugacuucagggaagug

SEQ ID NO: 1730994 - RNA, 19 nt, Artificial Sequence
  Description of Artificial Sequence: Synthetic oligonucleotide
  Antisense strand to SEQ ID NO: 1730993
cacuucccugaagucauac

SEQ ID NO: 1730995 - RNA, 19 nt, Artificial Sequence
  Description of Artificial Sequence: Synthetic oligonucleotide
  Sense strand starting at position 1362 of SEQ ID NO: 1562218
cagggaaguguucgagaua

SEQ ID NO: 1730996 - RNA, 19 nt, Artificial Sequence
  Description of Artificial Sequence: Synthetic oligonucleotide
  Antisense strand to SEQ ID NO: 1730995
uaucucgaacacuucccug

SEQ ID NO: 1730997 - RNA, 19 nt, Artificial Sequence
  Description of Artificial Sequence: Synthetic oligonucleotide
  Sense strand starting at position 1363 of SEQ ID NO: 1562218
agggaaguguucgagauaa

SEQ ID NO: 1730998 - RNA, 19 nt, Artificial Sequence
  Description of Artificial Sequence: Synthetic oligonucleotide
  Antisense strand to SEQ ID NO: 1730997
uuaucucgaacacuucccu

SEQ ID NO: 1730999 - RNA, 19 nt, Artificial Sequence
  Description of Artificial Sequence: Synthetic oligonucleotide
  Sense strand starting at position 1365 of SEQ ID NO: 1562218
ggaaguguucgagauaacu

SEQ ID NO: 1731000 - RNA, 19 nt, Artificial Sequence
  Description of Artificial Sequence: Synthetic oligonucleotide
  Antisense strand to SEQ ID NO: 1730999
aguuaucucgaacacuucc

SEQ ID NO: 1731001 - RNA, 19 nt, Artificial Sequence
  Description of Artificial Sequence: Synthetic oligonucleotide
  Sense strand starting at position 1731 of SEQ ID NO: 1562218
aggguauacucaccagauc

SEQ ID NO: 1731002 - RNA, 19 nt, Artificial Sequence
  Description of Artificial Sequence: Synthetic oligonucleotide
  Antisense strand to SEQ ID NO: 1731001
gaucuggugaguauacccu

SEQ ID NO: 1731003 - RNA, 19 nt, Artificial Sequence
  Description of Artificial Sequence: Synthetic oligonucleotide
  Sense strand starting at position 2164 of SEQ ID NO: 1562218
ccuagaaaucuuugcucug

SEQ ID NO: 1731004 - RNA, 19 nt, Artificial Sequence
  Description of Artificial Sequence: Synthetic oligonucleotide
  Antisense strand to SEQ ID NO: 1731003
cagagcaaagauuucuagg

SEQ ID NO: 1731005 - RNA, 19 nt, Artificial Sequence
  Description of Artificial Sequence: Synthetic oligonucleotide
  Sense strand starting at position 2167 of SEQ ID NO: 1562218
agaaaucuuugcucugggu

SEQ ID NO: 1731006 - RNA, 19 nt, Artificial Sequence
  Description of Artificial Sequence: Synthetic oligonucleotide
  Antisense strand to SEQ ID NO: 1731005
acccagagcaaagauuucu

SEQ ID NO: 1731007 - RNA, 19 nt, Artificial Sequence
  Description of Artificial Sequence: Synthetic oligonucleotide
  Sense strand starting at position 2173 of SEQ ID NO: 1562218
cuuugcucuggguaccaau

SEQ ID NO: 1731008 - RNA, 19 nt, Artificial Sequence
  Description of Artificial Sequence: Synthetic oligonucleotide
  Antisense strand to SEQ ID NO: 1731007
auugguacccagagcaaag

SEQ ID NO: 1731009 - RNA, 19 nt, Artificial Sequence
  Description of Artificial Sequence: Synthetic oligonucleotide
  Sense strand starting at position 2465 of SEQ ID NO: 1562218
guuugauccagccaaugag

SEQ ID NO: 1731010 - RNA, 19 nt, Artificial Sequence
  Description of Artificial Sequence: Synthetic oligonucleotide
  Antisense strand to SEQ ID NO: 1731009
cucauuggcuggaucaaac

SEQ ID NO: 1731011 - RNA, 19 nt, Artificial Sequence
  Description of Artificial Sequence: Synthetic oligonucleotide
  Sense strand starting at position 2564 of SEQ ID NO: 1562218
cugacaaccgauugguaga

SEQ ID NO: 1731012 - RNA, 19 nt, Artificial Sequence
  Description of Artificial Sequence: Synthetic oligonucleotide
  Antisense strand to SEQ ID NO: 1731011
ucuaccaaucgguugucag

SEQ ID NO: 1731013 - RNA, 19 nt, Artificial Sequence
  Description of Artificial Sequence: Synthetic oligonucleotide
  Sense strand starting at position 2565 of SEQ ID NO: 1562218
ugacaaccgauugguagau

SEQ ID NO: 1731014 - RNA, 19 nt, Artificial Sequence
  Description of Artificial Sequence: Synthetic oligonucleotide
  Antisense strand to SEQ ID NO: 1731013
aucuaccaaucgguuguca

SEQ ID NO: 1731015 - RNA, 19 nt, Artificial Sequence
  Description of Artificial Sequence: Synthetic oligonucleotide
  Sense strand starting at position 2580 of SEQ ID NO: 1562218
agaugaugcugccauuaac

SEQ ID NO: 1731016 - RNA, 19 nt, Artificial Sequence
  Description of Artificial Sequence: Synthetic oligonucleotide
  Antisense strand to SEQ ID NO: 1731015
guuaauggcagcaucaucu

SEQ ID NO: 1731017 - RNA, 19 nt, Artificial Sequence
  Description of Artificial Sequence: Synthetic oligonucleotide
  Sense strand starting at position 2583 of SEQ ID NO: 1562218
ugaugcugccauuaacuaa

SEQ ID NO: 1731018 - RNA, 19 nt, Artificial Sequence
  Description of Artificial Sequence: Synthetic oligonucleotide
  Antisense strand to SEQ ID NO: 1731017
uuaguuaauggcagcauca

SEQ ID NO: 1731019 - RNA, 19 nt, Artificial Sequence
  Description of Artificial Sequence: Synthetic oligonucleotide
  Sense strand starting at position 2815 of SEQ ID NO: 1562218
cuuugcugcguccuaagua

SEQ ID NO: 1731020 - RNA, 19 nt, Artificial Sequence
  Description of Artificial Sequence: Synthetic oligonucleotide
  Antisense strand to SEQ ID NO: 1731019
uacuuaggacgcagcaaag

SEQ ID NO: 1731021 - RNA, 19 nt, Artificial Sequence
  Description of Artificial Sequence: Synthetic oligonucleotide
  Sense strand starting at position 2907 of SEQ ID NO: 1562218
guccauacaucuccgcaga

SEQ ID NO: 1731022 - RNA, 19 nt, Artificial Sequence
  Description of Artificial Sequence: Synthetic oligonucleotide
  Antisense strand to SEQ ID NO: 1731021
ucugcggagauguauggac

SEQ ID NO: 1731023 - RNA, 19 nt, Artificial Sequence
  Description of Artificial Sequence: Synthetic oligonucleotide
  Sense strand starting at position 2909 of SEQ ID NO: 1562218
ccauacaucuccgcagaga

SEQ ID NO: 1731024 - RNA, 19 nt, Artificial Sequence
  Description of Artificial Sequence: Synthetic oligonucleotide
  Antisense strand to SEQ ID NO: 1731023
ucucugcggagauguaugg

SEQ ID NO: 1731025 - RNA, 19 nt, Artificial Sequence
  Description of Artificial Sequence: Synthetic oligonucleotide
  Sense strand starting at position 2910 of SEQ ID NO: 1562218
cauacaucuccgcagagau

SEQ ID NO: 1731026 - RNA, 19 nt, Artificial Sequence
  Description of Artificial Sequence: Synthetic oligonucleotide
  Antisense strand to SEQ ID NO: 1731025
aucucugcggagauguaug

SEQ ID NO: 1731027 - RNA, 19 nt, Artificial Sequence
  Description of Artificial Sequence: Synthetic oligonucleotide
  Sense strand starting at position 2912 of SEQ ID NO: 1562218
uacaucuccgcagagauga

SEQ ID NO: 1731028 - RNA, 19 nt, Artificial Sequence
  Description of Artificial Sequence: Synthetic oligonucleotide
  Antisense strand to SEQ ID NO: 1731027
ucaucucugcggagaugua

SEQ ID NO: 1731029 - RNA, 19 nt, Artificial Sequence
  Description of Artificial Sequence: Synthetic oligonucleotide
  Sense strand starting at position 2980 of SEQ ID NO: 1562218
guccguaaucccgaacacu

SEQ ID NO: 1731030 - RNA, 19 nt, Artificial Sequence
  Description of Artificial Sequence: Synthetic oligonucleotide
  Antisense strand to SEQ ID NO: 1731029
aguguucgggauuacggac

SEQ ID NO: 1731031 - RNA, 19 nt, Artificial Sequence
  Description of Artificial Sequence: Synthetic oligonucleotide
  Sense strand starting at position 3066 of SEQ ID NO: 1562218
ggagaccugucucuacuua

SEQ ID NO: 1731032 - RNA, 19 nt, Artificial Sequence
  Description of Artificial Sequence: Synthetic oligonucleotide
  Antisense strand to SEQ ID NO: 1731031
uaaguagagacaggucucc

SEQ ID NO: 1731033 - RNA, 19 nt, Artificial Sequence
  Description of Artificial Sequence: Synthetic oligonucleotide
  Sense strand starting at position 3291 of SEQ ID NO: 1562218
guggguaguguguaaccuu

SEQ ID NO: 1731034 - RNA, 19 nt, Artificial Sequence
  Description of Artificial Sequence: Synthetic oligonucleotide
  Antisense strand to SEQ ID NO: 1731033
aagguuacacacuacccac

SEQ ID NO: 1731035 - RNA, 19 nt, Artificial Sequence
  Description of Artificial Sequence: Synthetic oligonucleotide
  Sense strand starting at position 3322 of SEQ ID NO: 1562218
uuaguaucuuaaccuguaa

SEQ ID NO: 1731036 - RNA, 19 nt, Artificial Sequence
  Description of Artificial Sequence: Synthetic oligonucleotide
  Antisense strand to SEQ ID NO: 1731035
uuacagguuaagauacuaa

SEQ ID NO: 1731037 - RNA, 19 nt, Artificial Sequence
  Description of Artificial Sequence: Synthetic oligonucleotide
  Sense strand starting at position 3402 of SEQ ID NO: 1562218
ucugccauguccuuacauu

SEQ ID NO: 1731038 - RNA, 19 nt, Artificial Sequence
  Description of Artificial Sequence: Synthetic oligonucleotide
  Antisense strand to SEQ ID NO: 1731037
aauguaaggacauggcaga

SEQ ID NO: 1731039 - RNA, 19 nt, Artificial Sequence
  Description of Artificial Sequence: Synthetic oligonucleotide
  Sense strand starting at position 3403 of SEQ ID NO: 1562218
cugccauguccuuacauua

SEQ ID NO: 1731040 - RNA, 19 nt, Artificial Sequence
  Description of Artificial Sequence: Synthetic oligonucleotide
  Antisense strand to SEQ ID NO: 1731039
uaauguaaggacauggcag

SEQ ID NO: 1731041 - RNA, 19 nt, Artificial Sequence
  Description of Artificial Sequence: Synthetic oligonucleotide
  Sense strand starting at position 3415 of SEQ ID NO: 1562218
uacauuagcuggguaagga

SEQ ID NO: 1731042 - RNA, 19 nt, Artificial Sequence
  Description of Artificial Sequence: Synthetic oligonucleotide
  Antisense strand to SEQ ID NO: 1731041
uccuuacccagcuaaugua

SEQ ID NO: 1731043 - RNA, 19 nt, Artificial Sequence
  Description of Artificial Sequence: Synthetic oligonucleotide
  Sense strand starting at position 3479 of SEQ ID NO: 1562218
ccagguuggucuuaucaag

SEQ ID NO: 1731044 - RNA, 19 nt, Artificial Sequence
  Description of Artificial Sequence: Synthetic oligonucleotide
  Antisense strand to SEQ ID NO: 1731043
cuugauaagaccaaccugg

SEQ ID NO: 1731045 - RNA, 19 nt, Artificial Sequence
  Description of Artificial Sequence: Synthetic oligonucleotide
  Sense strand starting at position 3508 of SEQ ID NO: 1562218
uacuguuaugggugagggu

SEQ ID NO: 1731046 - RNA, 19 nt, Artificial Sequence
  Description of Artificial Sequence: Synthetic oligonucleotide
  Antisense strand to SEQ ID NO: 1731045
acccucacccauaacagua

SEQ ID NO: 1731047 - RNA, 19 nt, Artificial Sequence
  Description of Artificial Sequence: Synthetic oligonucleotide
  Sense strand starting at position 3509 of SEQ ID NO: 1562218
acuguuaugggugaggguu

SEQ ID NO: 1731048 - RNA, 19 nt, Artificial Sequence
  Description of Artificial Sequence: Synthetic oligonucleotide
  Antisense strand to SEQ ID NO: 1731047
aacccucacccauaacagu

SEQ ID NO: 1731049 - RNA, 19 nt, Artificial Sequence
  Description of Artificial Sequence: Synthetic oligonucleotide
  Sense strand starting at position 3563 of SEQ ID NO: 1562218
ccuugauguucugucaauu

SEQ ID NO: 1731050 - RNA, 19 nt, Artificial Sequence
  Description of Artificial Sequence: Synthetic oligonucleotide
  Antisense strand to SEQ ID NO: 1731049
aauugacagaacaucaagg

SEQ ID NO: 1731051 - RNA, 19 nt, Artificial Sequence
  Description of Artificial Sequence: Synthetic oligonucleotide
  Sense strand starting at position 3574 of SEQ ID NO: 1562218
ugucaauucccacaaggua

SEQ ID NO: 1731052 - RNA, 19 nt, Artificial Sequence
  Description of Artificial Sequence: Synthetic oligonucleotide
  Antisense strand to SEQ ID NO: 1731051
uaccuugugggaauugaca

SEQ ID NO: 1731053 - RNA, 19 nt, Artificial Sequence
  Description of Artificial Sequence: Synthetic oligonucleotide
  Sense strand starting at position 3967 of SEQ ID NO: 1562218
ccaggcauccucuggaaca

SEQ ID NO: 1731054 - RNA, 19 nt, Artificial Sequence
  Description of Artificial Sequence: Synthetic oligonucleotide
  Antisense strand to SEQ ID NO: 1731053
uguuccagaggaugccugg

SEQ ID NO: 1731055 - RNA, 19 nt, Artificial Sequence
  Description of Artificial Sequence: Synthetic oligonucleotide
  Sense strand starting at position 14 of SEQ ID NO: 1562219
ugccaagugcucuuguauu

SEQ ID NO: 1731056 - RNA, 19 nt, Artificial Sequence
  Description of Artificial Sequence: Synthetic oligonucleotide
  Antisense strand to SEQ ID NO: 1731055
aauacaagagcacuuggca

SEQ ID NO: 1731057 - RNA, 19 nt, Artificial Sequence
  Description of Artificial Sequence: Synthetic oligonucleotide
  Sense strand starting at position 20 of SEQ ID NO: 1562219
gugcucuuguauuccacua

SEQ ID NO: 1731058 - RNA, 19 nt, Artificial Sequence
  Description of Artificial Sequence: Synthetic oligonucleotide
  Antisense strand to SEQ ID NO: 1731057
uaguggaauacaagagcac

SEQ ID NO: 1731059 - RNA, 19 nt, Artificial Sequence
  Description of Artificial Sequence: Synthetic oligonucleotide
  Sense strand starting at position 25 of SEQ ID NO: 1562219
cuuguauuccacuagacag

SEQ ID NO: 1731060 - RNA, 19 nt, Artificial Sequence
  Description of Artificial Sequence: Synthetic oligonucleotide
  Antisense strand to SEQ ID NO: 1731059
cugucuaguggaauacaag

SEQ ID NO: 1731061 - RNA, 19 nt, Artificial Sequence
  Description of Artificial Sequence: Synthetic oligonucleotide
  Sense strand starting at position 130 of SEQ ID NO: 1562219
gcuguuaacccagauugua

SEQ ID NO: 1731062 - RNA, 19 nt, Artificial Sequence
  Description of Artificial Sequence: Synthetic oligonucleotide
  Antisense strand to SEQ ID NO: 1731061
uacaaucuggguuaacagc

SEQ ID NO: 1731063 - RNA, 19 nt, Artificial Sequence
  Description of Artificial Sequence: Synthetic oligonucleotide
  Sense strand starting at position 139 of SEQ ID NO: 1562219
ccagauuguagguagccaa

SEQ ID NO: 1731064 - RNA, 19 nt, Artificial Sequence
  Description of Artificial Sequence: Synthetic oligonucleotide
  Antisense strand to SEQ ID NO: 1731063
uuggcuaccuacaaucugg

SEQ ID NO: 1731065 - RNA, 19 nt, Artificial Sequence
  Description of Artificial Sequence: Synthetic oligonucleotide
  Sense strand starting at position 247 of SEQ ID NO: 1562219
guaggaguguuauucuggu

SEQ ID NO: 1731066 - RNA, 19 nt, Artificial Sequence
  Description of Artificial Sequence: Synthetic oligonucleotide
  Antisense strand to SEQ ID NO: 1731065
accagaauaacacuccuac

SEQ ID NO: 1731067 - RNA, 19 nt, Artificial Sequence
  Description of Artificial Sequence: Synthetic oligonucleotide
  Sense strand starting at position 254 of SEQ ID NO: 1562219
uguuauucuggugagaagu

SEQ ID NO: 1731068 - RNA, 19 nt, Artificial Sequence
  Description of Artificial Sequence: Synthetic oligonucleotide
  Antisense strand to SEQ ID NO: 1731067
acuucucaccagaauaaca

SEQ ID NO: 1731069 - RNA, 19 nt, Artificial Sequence
  Description of Artificial Sequence: Synthetic oligonucleotide
  Sense strand starting at position 341 of SEQ ID NO: 1562219
ugaauugacucagcacugu

SEQ ID NO: 1731070 - RNA, 19 nt, Artificial Sequence
  Description of Artificial Sequence: Synthetic oligonucleotide
  Antisense strand to SEQ ID NO: 1731069
acagugcugagucaauuca

SEQ ID NO: 1731071 - RNA, 19 nt, Artificial Sequence
  Description of Artificial Sequence: Synthetic oligonucleotide
  Sense strand starting at position 398 of SEQ ID NO: 1562219
cuccgcuauucugcaagaa

SEQ ID NO: 1731072 - RNA, 19 nt, Artificial Sequence
  Description of Artificial Sequence: Synthetic oligonucleotide
  Antisense strand to SEQ ID NO: 1731071
uucuugcagaauagcggag

SEQ ID NO: 1731073 - RNA, 19 nt, Artificial Sequence
  Description of Artificial Sequence: Synthetic oligonucleotide
  Sense strand starting at position 399 of SEQ ID NO: 1562219
uccgcuauucugcaagaag

SEQ ID NO: 1731074 - RNA, 19 nt, Artificial Sequence
  Description of Artificial Sequence: Synthetic oligonucleotide
  Antisense strand to SEQ ID NO: 1731073
cuucuugcagaauagcgga

SEQ ID NO: 1731075 - RNA, 19 nt, Artificial Sequence
  Description of Artificial Sequence: Synthetic oligonucleotide
  Sense strand starting at position 518 of SEQ ID NO: 1562219
aaguauggcuccuugagac

SEQ ID NO: 1731076 - RNA, 19 nt, Artificial Sequence
  Description of Artificial Sequence: Synthetic oligonucleotide
  Antisense strand to SEQ ID NO: 1731075
gucucaaggagccauacuu

SEQ ID NO: 1731077 - RNA, 19 nt, Artificial Sequence
  Description of Artificial Sequence: Synthetic oligonucleotide
  Sense strand starting at position 612 of SEQ ID NO: 1562219
cgcugcuguggccuuaaau

SEQ ID NO: 1731078 - RNA, 19 nt, Artificial Sequence
  Description of Artificial Sequence: Synthetic oligonucleotide
  Antisense strand to SEQ ID NO: 1731077
auuuaaggccacagcagcg

SEQ ID NO: 1731079 - RNA, 19 nt, Artificial Sequence
  Description of Artificial Sequence: Synthetic oligonucleotide
  Sense strand starting at position 632 of SEQ ID NO: 1562219
ugccaaugauugcuguacu

SEQ ID NO: 1731080 - RNA, 19 nt, Artificial Sequence
  Description of Artificial Sequence: Synthetic oligonucleotide
  Antisense strand to SEQ ID NO: 1731079
aguacagcaaucauuggca

SEQ ID NO: 1731081 - RNA, 19 nt, Artificial Sequence
  Description of Artificial Sequence: Synthetic oligonucleotide
  Sense strand starting at position 635 of SEQ ID NO: 1562219
caaugauugcuguacucag

SEQ ID NO: 1731082 - RNA, 19 nt, Artificial Sequence
  Description of Artificial Sequence: Synthetic oligonucleotide
  Antisense strand to SEQ ID NO: 1731081
cugaguacagcaaucauug

SEQ ID NO: 1731083 - RNA, 19 nt, Artificial Sequence
  Description of Artificial Sequence: Synthetic oligonucleotide
  Sense strand starting at position 695 of SEQ ID NO: 1562219
cuguuugcuuccuccauca

SEQ ID NO: 1731084 - RNA, 19 nt, Artificial Sequence
  Description of Artificial Sequence: Synthetic oligonucleotide
  Antisense strand to SEQ ID NO: 1731083
ugauggaggaagcaaacag

SEQ ID NO: 1731085 - RNA, 19 nt, Artificial Sequence
  Description of Artificial Sequence: Synthetic oligonucleotide
  Sense strand starting at position 697 of SEQ ID NO: 1562219
guuugcuuccuccaucaga

SEQ ID NO: 1731086 - RNA, 19 nt, Artificial Sequence
  Description of Artificial Sequence: Synthetic oligonucleotide
  Antisense strand to SEQ ID NO: 1731085
ucugauggaggaagcaaac

SEQ ID NO: 1731087 - RNA, 19 nt, Artificial Sequence
  Description of Artificial Sequence: Synthetic oligonucleotide
  Sense strand starting at position 845 of SEQ ID NO: 1562219
gggaacuucugagcugaac

SEQ ID NO: 1731088 - RNA, 19 nt, Artificial Sequence
  Description of Artificial Sequence: Synthetic oligonucleotide
  Antisense strand to SEQ ID NO: 1731087
guucagcucagaaguuccc

SEQ ID NO: 1731089 - RNA, 19 nt, Artificial Sequence
  Description of Artificial Sequence: Synthetic oligonucleotide
  Sense strand starting at position 900 of SEQ ID NO: 1562219
gagugagcgucuccacaga

SEQ ID NO: 1731090 - RNA, 19 nt, Artificial Sequence
  Description of Artificial Sequence: Synthetic oligonucleotide
  Antisense strand to SEQ ID NO: 1731089
ucuguggagacgcucacuc

SEQ ID NO: 1731091 - RNA, 19 nt, Artificial Sequence
  Description of Artificial Sequence: Synthetic oligonucleotide
  Sense strand starting at position 931 of SEQ ID NO: 1562219
aggauaugcuucccucacu

SEQ ID NO: 1731092 - RNA, 19 nt, Artificial Sequence
  Description of Artificial Sequence: Synthetic oligonucleotide
  Antisense strand to SEQ ID NO: 1731091
agugagggaagcauauccu

SEQ ID NO: 1731093 - RNA, 19 nt, Artificial Sequence
  Description of Artificial Sequence: Synthetic oligonucleotide
  Sense strand starting at position 1027 of SEQ ID NO: 1562219
gggcuucccucaguugaau

SEQ ID NO: 1731094 - RNA, 19 nt, Artificial Sequence
  Description of Artificial Sequence: Synthetic oligonucleotide
  Antisense strand to SEQ ID NO: 1731093
auucaacugagggaagccc

SEQ ID NO: 1731095 - RNA, 19 nt, Artificial Sequence
  Description of Artificial Sequence: Synthetic oligonucleotide
  Sense strand starting at position 1168 of SEQ ID NO: 1562219
ccaucuguauccucgaaca

SEQ ID NO: 1731096 - RNA, 19 nt, Artificial Sequence
  Description of Artificial Sequence: Synthetic oligonucleotide
  Antisense strand to SEQ ID NO: 1731095
uguucgaggauacagaugg

SEQ ID NO: 1731097 - RNA, 19 nt, Artificial Sequence
  Description of Artificial Sequence: Synthetic oligonucleotide
  Sense strand starting at position 1181 of SEQ ID NO: 1562219
cgaacaggagacugguaau

SEQ ID NO: 1731098 - RNA, 19 nt, Artificial Sequence
  Description of Artificial Sequence: Synthetic oligonucleotide
  Antisense strand to SEQ ID NO: 1731097
auuaccagucuccuguucg

SEQ ID NO: 1731099 - RNA, 19 nt, Artificial Sequence
  Description of Artificial Sequence: Synthetic oligonucleotide
  Sense strand starting at position 1184 of SEQ ID NO: 1562219
acaggagacugguaaugau

SEQ ID NO: 1731100 - RNA, 19 nt, Artificial Sequence
  Description of Artificial Sequence: Synthetic oligonucleotide
  Antisense strand to SEQ ID NO: 1731099
aucauuaccagucuccugu

SEQ ID NO: 1731101 - RNA, 19 nt, Artificial Sequence
  Description of Artificial Sequence: Synthetic oligonucleotide
  Sense strand starting at position 1264 of SEQ ID NO: 1562219
ucacuuaucaugcggagac

SEQ ID NO: 1731102 - RNA, 19 nt, Artificial Sequence
  Description of Artificial Sequence: Synthetic oligonucleotide
  Antisense strand to SEQ ID NO: 1731101
gucuccgcaugauaaguga

SEQ ID NO: 1731103 - RNA, 19 nt, Artificial Sequence
  Description of Artificial Sequence: Synthetic oligonucleotide
  Sense strand starting at position 2099 of SEQ ID NO: 1562219
aaggaaauaucugcgugcu

SEQ ID NO: 1731104 - RNA, 19 nt, Artificial Sequence
  Description of Artificial Sequence: Synthetic oligonucleotide
  Antisense strand to SEQ ID NO: 1731103
agcacgcagauauuuccuu

SEQ ID NO: 1731105 - RNA, 19 nt, Artificial Sequence
  Description of Artificial Sequence: Synthetic oligonucleotide
  Sense strand starting at position 2100 of SEQ ID NO: 1562219
aggaaauaucugcgugcuc

SEQ ID NO: 1731106 - RNA, 19 nt, Artificial Sequence
  Description of Artificial Sequence: Synthetic oligonucleotide
  Antisense strand to SEQ ID NO: 1731105
gagcacgcagauauuuccu

SEQ ID NO: 1731107 - RNA, 19 nt, Artificial Sequence
  Description of Artificial Sequence: Synthetic oligonucleotide
  Sense strand starting at position 2166 of SEQ ID NO: 1562219
uugugaugugcuuagugag

SEQ ID NO: 1731108 - RNA, 19 nt, Artificial Sequence
  Description of Artificial Sequence: Synthetic oligonucleotide
  Antisense strand to SEQ ID NO: 1731107
cucacuaagcacaucacaa

SEQ ID NO: 1731109 - RNA, 19 nt, Artificial Sequence
  Description of Artificial Sequence: Synthetic oligonucleotide
  Sense strand starting at position 2208 of SEQ ID NO: 1562219
ggaaggcgcgauugugaaa

SEQ ID NO: 1731110 - RNA, 19 nt, Artificial Sequence
  Description of Artificial Sequence: Synthetic oligonucleotide
  Antisense strand to SEQ ID NO: 1731109
uuucacaaucgcgccuucc

SEQ ID NO: 1731111 - RNA, 19 nt, Artificial Sequence
  Description of Artificial Sequence: Synthetic oligonucleotide
  Sense strand starting at position 2280 of SEQ ID NO: 1562219
ccugucuaguuccuaucua

SEQ ID NO: 1731112 - RNA, 19 nt, Artificial Sequence
  Description of Artificial Sequence: Synthetic oligonucleotide
  Antisense strand to SEQ ID NO: 1731111
uagauaggaacuagacagg

SEQ ID NO: 1731113 - RNA, 19 nt, Artificial Sequence
  Description of Artificial Sequence: Synthetic oligonucleotide
  Sense strand starting at position 2284 of SEQ ID NO: 1562219
ucuaguuccuaucuagauc

SEQ ID NO: 1731114 - RNA, 19 nt, Artificial Sequence
  Description of Artificial Sequence: Synthetic oligonucleotide
  Antisense strand to SEQ ID NO: 1731113
gaucuagauaggaacuaga

SEQ ID NO: 1731115 - RNA, 19 nt, Artificial Sequence
  Description of Artificial Sequence: Synthetic oligonucleotide
  Sense strand starting at position 2677 of SEQ ID NO: 1562219
auagacaucucugaagaag

SEQ ID NO: 1731116 - RNA, 19 nt, Artificial Sequence
  Description of Artificial Sequence: Synthetic oligonucleotide
  Antisense strand to SEQ ID NO: 1731115
cuucuucagagaugucuau

SEQ ID NO: 1731117 - RNA, 19 nt, Artificial Sequence
  Description of Artificial Sequence: Synthetic oligonucleotide
  Sense strand starting at position 2716 of SEQ ID NO: 1562219
cuuacauucuagucguaga

SEQ ID NO: 1731118 - RNA, 19 nt, Artificial Sequence
  Description of Artificial Sequence: Synthetic oligonucleotide
  Antisense strand to SEQ ID NO: 1731117
ucuacgacuagaauguaag

SEQ ID NO: 1731119 - RNA, 19 nt, Artificial Sequence
  Description of Artificial Sequence: Synthetic oligonucleotide
  Sense strand starting at position 2726 of SEQ ID NO: 1562219
agucguagacagcaaguaa

SEQ ID NO: 1731120 - RNA, 19 nt, Artificial Sequence
  Description of Artificial Sequence: Synthetic oligonucleotide
  Antisense strand to SEQ ID NO: 1731119
uuacuugcugucuacgacu

SEQ ID NO: 1731121 - RNA, 19 nt, Artificial Sequence
  Description of Artificial Sequence: Synthetic oligonucleotide
  Sense strand starting at position 2820 of SEQ ID NO: 1562219
cuccuaagguggucauauu

SEQ ID NO: 1731122 - RNA, 19 nt, Artificial Sequence
  Description of Artificial Sequence: Synthetic oligonucleotide
  Antisense strand to SEQ ID NO: 1731121
aauaugaccaccuuaggag

SEQ ID NO: 1731123 - RNA, 19 nt, Artificial Sequence
  Description of Artificial Sequence: Synthetic oligonucleotide
  Sense strand starting at position 2928 of SEQ ID NO: 1562219
agguacuccuccuuuauua

SEQ ID NO: 1731124 - RNA, 19 nt, Artificial Sequence
  Description of Artificial Sequence: Synthetic oligonucleotide
  Antisense strand to SEQ ID NO: 1731123
uaauaaaggaggaguaccu

SEQ ID NO: 1731125 - RNA, 19 nt, Artificial Sequence
  Description of Artificial Sequence: Synthetic oligonucleotide
  Sense strand starting at position 2944 of SEQ ID NO: 1562219
uuauaaauugucugagaag

SEQ ID NO: 1731126 - RNA, 19 nt, Artificial Sequence
  Description of Artificial Sequence: Synthetic oligonucleotide
  Antisense strand to SEQ ID NO: 1731125
cuucucagacaauuuauaa

SEQ ID NO: 1731127 - RNA, 19 nt, Artificial Sequence
  Description of Artificial Sequence: Synthetic oligonucleotide
  Sense strand starting at position 2963 of SEQ ID NO: 1562219
cccuuauauggauguagac

SEQ ID NO: 1731128 - RNA, 19 nt, Artificial Sequence
  Description of Artificial Sequence: Synthetic oligonucleotide
  Antisense strand to SEQ ID NO: 1731127
gucuacauccauauaaggg

SEQ ID NO: 1731129 - RNA, 19 nt, Artificial Sequence
  Description of Artificial Sequence: Synthetic oligonucleotide
  Sense strand starting at position 3104 of SEQ ID NO: 1562219
ucaucaccuuugucugaua

SEQ ID NO: 1731130 - RNA, 19 nt, Artificial Sequence
  Description of Artificial Sequence: Synthetic oligonucleotide
  Antisense strand to SEQ ID NO: 1731129
uaucagacaaaggugauga

SEQ ID NO: 1731131 - RNA, 19 nt, Artificial Sequence
  Description of Artificial Sequence: Synthetic oligonucleotide
  Sense strand starting at position 3359 of SEQ ID NO: 1562219
ggacacacaucagauuaaa

SEQ ID NO: 1731132 - RNA, 19 nt, Artificial Sequence
  Description of Artificial Sequence: Synthetic oligonucleotide
  Antisense strand to SEQ ID NO: 1731131
uuuaaucugaugugugucc

SEQ ID NO: 1731133 - RNA, 19 nt, Artificial Sequence
  Description of Artificial Sequence: Synthetic oligonucleotide
  Sense strand starting at position 3552 of SEQ ID NO: 1562219
gcaggugagugacuccuua

SEQ ID NO: 1731134 - RNA, 19 nt, Artificial Sequence
  Description of Artificial Sequence: Synthetic oligonucleotide
  Antisense strand to SEQ ID NO: 1731133
uaaggagucacucaccugc

SEQ ID NO: 1731135 - RNA, 19 nt, Artificial Sequence
  Description of Artificial Sequence: Synthetic oligonucleotide
  Sense strand starting at position 59 of SEQ ID NO: 1562220
cuccuaagguggucauauu

SEQ ID NO: 1731136 - RNA, 19 nt, Artificial Sequence
  Description of Artificial Sequence: Synthetic oligonucleotide
  Antisense strand to SEQ ID NO: 1731135
aauaugaccaccuuaggag

SEQ ID NO: 1731137 - RNA, 19 nt, Artificial Sequence
  Description of Artificial Sequence: Synthetic oligonucleotide
  Sense strand starting at position 167 of SEQ ID NO: 1562220
agguacuccuccuuuauua

SEQ ID NO: 1731138 - RNA, 19 nt, Artificial Sequence
  Description of Artificial Sequence: Synthetic oligonucleotide
  Antisense strand to SEQ ID NO: 1731137
uaauaaaggaggaguaccu

SEQ ID NO: 1731139 - RNA, 19 nt, Artificial Sequence
  Description of Artificial Sequence: Synthetic oligonucleotide
  Sense strand starting at position 183 of SEQ ID NO: 1562220
uuauaaauugucugagaag

SEQ ID NO: 1731140 - RNA, 19 nt, Artificial Sequence
  Description of Artificial Sequence: Synthetic oligonucleotide
  Antisense strand to SEQ ID NO: 1731139
cuucucagacaauuuauaa

SEQ ID NO: 1731141 - RNA, 19 nt, Artificial Sequence
  Description of Artificial Sequence: Synthetic oligonucleotide
  Sense strand starting at position 202 of SEQ ID NO: 1562220
cccuuauauggauguagac

SEQ ID NO: 1731142 - RNA, 19 nt, Artificial Sequence
  Description of Artificial Sequence: Synthetic oligonucleotide
  Antisense strand to SEQ ID NO: 1731141
gucuacauccauauaaggg

SEQ ID NO: 1731143 - RNA, 19 nt, Artificial Sequence
  Description of Artificial Sequence: Synthetic oligonucleotide
  Sense strand starting at position 343 of SEQ ID NO: 1562220
ucaucaccuuugucugaua

SEQ ID NO: 1731144 - RNA, 19 nt, Artificial Sequence
  Description of Artificial Sequence: Synthetic oligonucleotide
  Antisense strand to SEQ ID NO: 1731143
uaucagacaaaggugauga

SEQ ID NO: 1731145 - RNA, 19 nt, Artificial Sequence
  Description of Artificial Sequence: Synthetic oligonucleotide
  Sense strand starting at position 598 of SEQ ID NO: 1562220
ggacacacaucagauuaaa

SEQ ID NO: 1731146 - RNA, 19 nt, Artificial Sequence
  Description of Artificial Sequence: Synthetic oligonucleotide
  Antisense strand to SEQ ID NO: 1731145
uuuaaucugaugugugucc

SEQ ID NO: 1731147 - RNA, 19 nt, Artificial Sequence
  Description of Artificial Sequence: Synthetic oligonucleotide
  Sense strand starting at position 791 of SEQ ID NO: 1562220
gcaggugagugacuccuua

SEQ ID NO: 1731148 - RNA, 19 nt, Artificial Sequence
  Description of Artificial Sequence: Synthetic oligonucleotide
  Antisense strand to SEQ ID NO: 1731147
uaaggagucacucaccugc

SEQ ID NO: 1731149 - RNA, 19 nt, Artificial Sequence
  Description of Artificial Sequence: Synthetic oligonucleotide
  Sense strand starting at position 1310 of SEQ ID NO: 1562220
agggaagccuuccucgauu

SEQ ID NO: 1731150 - RNA, 19 nt, Artificial Sequence
  Description of Artificial Sequence: Synthetic oligonucleotide
  Antisense strand to SEQ ID NO: 1731149
aaucgaggaaggcuucccu

SEQ ID NO: 1731151 - RNA, 19 nt, Artificial Sequence
  Description of Artificial Sequence: Synthetic oligonucleotide
  Sense strand starting at position 1387 of SEQ ID NO: 1562220
ggugaagcaacuugacuuu

SEQ ID NO: 1731152 - RNA, 19 nt, Artificial Sequence
  Description of Artificial Sequence: Synthetic oligonucleotide
  Antisense strand to SEQ ID NO: 1731151
aaagucaaguugcuucacc

SEQ ID NO: 1731153 - RNA, 19 nt, Artificial Sequence
  Description of Artificial Sequence: Synthetic oligonucleotide
  Sense strand starting at position 1407 of SEQ ID NO: 1562220
cguguaucacgugauacaa

SEQ ID NO: 1731154 - RNA, 19 nt, Artificial Sequence
  Description of Artificial Sequence: Synthetic oligonucleotide
  Antisense strand to SEQ ID NO: 1731153
uuguaucacgugauacacg

SEQ ID NO: 1731155 - RNA, 19 nt, Artificial Sequence
  Description of Artificial Sequence: Synthetic oligonucleotide
  Sense strand starting at position 1499 of SEQ ID NO: 1562220
gcauuuggguuccuaaggu

SEQ ID NO: 1731156 - RNA, 19 nt, Artificial Sequence
  Description of Artificial Sequence: Synthetic oligonucleotide
  Antisense strand to SEQ ID NO: 1731155
accuuaggaacccaaaugc

SEQ ID NO: 1731157 - RNA, 19 nt, Artificial Sequence
  Description of Artificial Sequence: Synthetic oligonucleotide
  Sense strand starting at position 1522 of SEQ ID NO: 1562220
ucaccuuugcagugaaauu

SEQ ID NO: 1731158 - RNA, 19 nt, Artificial Sequence
  Description of Artificial Sequence: Synthetic oligonucleotide
  Antisense strand to SEQ ID NO: 1731157
aauuucacugcaaagguga

SEQ ID NO: 1731159 - RNA, 19 nt, Artificial Sequence
  Description of Artificial Sequence: Synthetic oligonucleotide
  Sense strand starting at position 1626 of SEQ ID NO: 1562220
cuucuaugaggauaguagu

SEQ ID NO: 1731160 - RNA, 19 nt, Artificial Sequence
  Description of Artificial Sequence: Synthetic oligonucleotide
  Antisense strand to SEQ ID NO: 1731159
acuacuauccucauagaag

SEQ ID NO: 1731161 - RNA, 19 nt, Artificial Sequence
  Description of Artificial Sequence: Synthetic oligonucleotide
  Sense strand starting at position 1904 of SEQ ID NO: 1562220
cauggauuccuuggcucuu

SEQ ID NO: 1731162 - RNA, 19 nt, Artificial Sequence
  Description of Artificial Sequence: Synthetic oligonucleotide
  Antisense strand to SEQ ID NO: 1731161
aagagccaaggaauccaug

SEQ ID NO: 1731163 - RNA, 19 nt, Artificial Sequence
  Description of Artificial Sequence: Synthetic oligonucleotide
  Sense strand starting at position 1923 of SEQ ID NO: 1562220
guaggaaacuucuugcaag

SEQ ID NO: 1731164 - RNA, 19 nt, Artificial Sequence
  Description of Artificial Sequence: Synthetic oligonucleotide
  Antisense strand to SEQ ID NO: 1731163
cuugcaagaaguuuccuac

SEQ ID NO: 1731165 - RNA, 19 nt, Artificial Sequence
  Description of Artificial Sequence: Synthetic oligonucleotide
  Sense strand starting at position 2042 of SEQ ID NO: 1562220
gugccugaugggaguugua

SEQ ID NO: 1731166 - RNA, 19 nt, Artificial Sequence
  Description of Artificial Sequence: Synthetic oligonucleotide
  Antisense strand to SEQ ID NO: 1731165
uacaacucccaucaggcac

SEQ ID NO: 1731167 - RNA, 19 nt, Artificial Sequence
  Description of Artificial Sequence: Synthetic oligonucleotide
  Sense strand starting at position 2045 of SEQ ID NO: 1562220
ccugaugggaguuguagua

SEQ ID NO: 1731168 - RNA, 19 nt, Artificial Sequence
  Description of Artificial Sequence: Synthetic oligonucleotide
  Antisense strand to SEQ ID NO: 1731167
uacuacaacucccaucagg

SEQ ID NO: 1731169 - RNA, 19 nt, Artificial Sequence
  Description of Artificial Sequence: Synthetic oligonucleotide
  Sense strand starting at position 2074 of SEQ ID NO: 1562220
acacgcucccucgaagagu

SEQ ID NO: 1731170 - RNA, 19 nt, Artificial Sequence
  Description of Artificial Sequence: Synthetic oligonucleotide
  Antisense strand to SEQ ID NO: 1731169
acucuucgagggagcgugu

SEQ ID NO: 1731171 - RNA, 19 nt, Artificial Sequence
  Description of Artificial Sequence: Synthetic oligonucleotide
  Sense strand starting at position 2179 of SEQ ID NO: 1562220
cugauaaacucagcugaug

SEQ ID NO: 1731172 - RNA, 19 nt, Artificial Sequence
  Description of Artificial Sequence: Synthetic oligonucleotide
  Antisense strand to SEQ ID NO: 1731171
caucagcugaguuuaucag

SEQ ID NO: 1731173 - RNA, 19 nt, Artificial Sequence
  Description of Artificial Sequence: Synthetic oligonucleotide
  Sense strand starting at position 2274 of SEQ ID NO: 1562220
uggcacuaagugcaauaua

SEQ ID NO: 1731174 - RNA, 19 nt, Artificial Sequence
  Description of Artificial Sequence: Synthetic oligonucleotide
  Antisense strand to SEQ ID NO: 1731173
uauauugcacuuagugcca

SEQ ID NO: 1731175 - RNA, 19 nt, Artificial Sequence
  Description of Artificial Sequence: Synthetic oligonucleotide
  Sense strand starting at position 2349 of SEQ ID NO: 1562220
cauuuccauuugugagaug

SEQ ID NO: 1731176 - RNA, 19 nt, Artificial Sequence
  Description of Artificial Sequence: Synthetic oligonucleotide
  Antisense strand to SEQ ID NO: 1731175
caucucacaaauggaaaug

SEQ ID NO: 1731177 - RNA, 19 nt, Artificial Sequence
  Description of Artificial Sequence: Synthetic oligonucleotide
  Sense strand starting at position 2352 of SEQ ID NO: 1562220
uuccauuugugagaugaga

SEQ ID NO: 1731178 - RNA, 19 nt, Artificial Sequence
  Description of Artificial Sequence: Synthetic oligonucleotide
  Antisense strand to SEQ ID NO: 1731177
ucucaucucacaaauggaa

SEQ ID NO: 1731179 - RNA, 19 nt, Artificial Sequence
  Description of Artificial Sequence: Synthetic oligonucleotide
  Sense strand starting at position 2383 of SEQ ID NO: 1562220
agaggaguuagauggcuuu

SEQ ID NO: 1731180 - RNA, 19 nt, Artificial Sequence
  Description of Artificial Sequence: Synthetic oligonucleotide
  Antisense strand to SEQ ID NO: 1731179
aaagccaucuaacuccucu

SEQ ID NO: 1731181 - RNA, 19 nt, Artificial Sequence
  Description of Artificial Sequence: Synthetic oligonucleotide
  Sense strand starting at position 2517 of SEQ ID NO: 1562220
gcuaaaugugggcagguuu

SEQ ID NO: 1731182 - RNA, 19 nt, Artificial Sequence
  Description of Artificial Sequence: Synthetic oligonucleotide
  Antisense strand to SEQ ID NO: 1731181
aaaccugcccacauuuagc

SEQ ID NO: 1731183 - RNA, 19 nt, Artificial Sequence
  Description of Artificial Sequence: Synthetic oligonucleotide
  Sense strand starting at position 2631 of SEQ ID NO: 1562220
agguguauugggcauguuu

SEQ ID NO: 1731184 - RNA, 19 nt, Artificial Sequence
  Description of Artificial Sequence: Synthetic oligonucleotide
  Antisense strand to SEQ ID NO: 1731183
aaacaugcccaauacaccu

SEQ ID NO: 1731185 - RNA, 19 nt, Artificial Sequence
  Description of Artificial Sequence: Synthetic oligonucleotide
  Sense strand starting at position 2682 of SEQ ID NO: 1562220
caagguggguguuuggaaa

SEQ ID NO: 1731186 - RNA, 19 nt, Artificial Sequence
  Description of Artificial Sequence: Synthetic oligonucleotide
  Antisense strand to SEQ ID NO: 1731185
uuuccaaacacccaccuug

SEQ ID NO: 1731187 - RNA, 19 nt, Artificial Sequence
  Description of Artificial Sequence: Synthetic oligonucleotide
  Sense strand starting at position 3063 of SEQ ID NO: 1562220
acaauaugagguuguaaug

SEQ ID NO: 1731188 - RNA, 19 nt, Artificial Sequence
  Description of Artificial Sequence: Synthetic oligonucleotide
  Antisense strand to SEQ ID NO: 1731187
cauuacaaccucauauugu

SEQ ID NO: 1731189 - RNA, 19 nt, Artificial Sequence
  Description of Artificial Sequence: Synthetic oligonucleotide
  Sense strand starting at position 3069 of SEQ ID NO: 1562220
ugagguuguaaugguuaga

SEQ ID NO: 1731190 - RNA, 19 nt, Artificial Sequence
  Description of Artificial Sequence: Synthetic oligonucleotide
  Antisense strand to SEQ ID NO: 1731189
ucuaaccauuacaaccuca

SEQ ID NO: 1731191 - RNA, 19 nt, Artificial Sequence
  Description of Artificial Sequence: Synthetic oligonucleotide
  Sense strand starting at position 3072 of SEQ ID NO: 1562220
gguuguaaugguuagaauu

SEQ ID NO: 1731192 - RNA, 19 nt, Artificial Sequence
  Description of Artificial Sequence: Synthetic oligonucleotide
  Antisense strand to SEQ ID NO: 1731191
aauucuaaccauuacaacc

SEQ ID NO: 1731193 - RNA, 19 nt, Artificial Sequence
  Description of Artificial Sequence: Synthetic oligonucleotide
  Sense strand starting at position 3088 of SEQ ID NO: 1562220
auuagaauccugggugaug

SEQ ID NO: 1731194 - RNA, 19 nt, Artificial Sequence
  Description of Artificial Sequence: Synthetic oligonucleotide
  Antisense strand to SEQ ID NO: 1731193
caucacccaggauucuaau

SEQ ID NO: 1731195 - RNA, 19 nt, Artificial Sequence
  Description of Artificial Sequence: Synthetic oligonucleotide
  Sense strand starting at position 3089 of SEQ ID NO: 1562220
uuagaauccugggugaugu

SEQ ID NO: 1731196 - RNA, 19 nt, Artificial Sequence
  Description of Artificial Sequence: Synthetic oligonucleotide
  Antisense strand to SEQ ID NO: 1731195
acaucacccaggauucuaa

SEQ ID NO: 1731197 - RNA, 19 nt, Artificial Sequence
  Description of Artificial Sequence: Synthetic oligonucleotide
  Sense strand starting at position 3274 of SEQ ID NO: 1562220
gcauguagaccugacagau

SEQ ID NO: 1731198 - RNA, 19 nt, Artificial Sequence
  Description of Artificial Sequence: Synthetic oligonucleotide
  Antisense strand to SEQ ID NO: 1731197
aucugucaggucuacaugc

SEQ ID NO: 1731199 - RNA, 19 nt, Artificial Sequence
  Description of Artificial Sequence: Synthetic oligonucleotide
  Sense strand starting at position 3347 of SEQ ID NO: 1562220
uuggaaucucugggaugua

SEQ ID NO: 1731200 - RNA, 19 nt, Artificial Sequence
  Description of Artificial Sequence: Synthetic oligonucleotide
  Antisense strand to SEQ ID NO: 1731199
uacaucccagagauuccaa

SEQ ID NO: 1731201 - RNA, 19 nt, Artificial Sequence
  Description of Artificial Sequence: Synthetic oligonucleotide
  Sense strand starting at position 3368 of SEQ ID NO: 1562220
aggcaugaguaguuugaaa

SEQ ID NO: 1731202 - RNA, 19 nt, Artificial Sequence
  Description of Artificial Sequence: Synthetic oligonucleotide
  Antisense strand to SEQ ID NO: 1731201
uuucaaacuacucaugccu

SEQ ID NO: 1731203 - RNA, 19 nt, Artificial Sequence
  Description of Artificial Sequence: Synthetic oligonucleotide
  Sense strand starting at position 3496 of SEQ ID NO: 1562220
gcauaagcugcagaaagua

SEQ ID NO: 1731204 - RNA, 19 nt, Artificial Sequence
  Description of Artificial Sequence: Synthetic oligonucleotide
  Antisense strand to SEQ ID NO: 1731203
uacuuucugcagcuuaugc

SEQ ID NO: 1731205 - RNA, 19 nt, Artificial Sequence
  Description of Artificial Sequence: Synthetic oligonucleotide
  Sense strand starting at position 3566 of SEQ ID NO: 1562220
ggagaagggaugugugguu

SEQ ID NO: 1731206 - RNA, 19 nt, Artificial Sequence
  Description of Artificial Sequence: Synthetic oligonucleotide
  Antisense strand to SEQ ID NO: 1731205
aaccacacaucccuucucc

SEQ ID NO: 1731207 - RNA, 19 nt, Artificial Sequence
  Description of Artificial Sequence: Synthetic oligonucleotide
  Sense strand starting at position 3571 of SEQ ID NO: 1562220
agggaugugugguuaacag

SEQ ID NO: 1731208 - RNA, 19 nt, Artificial Sequence
  Description of Artificial Sequence: Synthetic oligonucleotide
  Antisense strand to SEQ ID NO: 1731207
cuguuaaccacacaucccu

SEQ ID NO: 1731209 - RNA, 19 nt, Artificial Sequence
  Description of Artificial Sequence: Synthetic oligonucleotide
  Sense strand starting at position 3580 of SEQ ID NO: 1562220
ugguuaacagaguguguga

SEQ ID NO: 1731210 - RNA, 19 nt, Artificial Sequence
  Description of Artificial Sequence: Synthetic oligonucleotide
  Antisense strand to SEQ ID NO: 1731209
ucacacacucuguuaacca

SEQ ID NO: 1731211 - RNA, 19 nt, Artificial Sequence
  Description of Artificial Sequence: Synthetic oligonucleotide
  Sense strand starting at position 3909 of SEQ ID NO: 1562220
gugugaugcauuugcuagu

SEQ ID NO: 1731212 - RNA, 19 nt, Artificial Sequence
  Description of Artificial Sequence: Synthetic oligonucleotide
  Antisense strand to SEQ ID NO: 1731211
acuagcaaaugcaucacac

SEQ ID NO: 1731213 - RNA, 19 nt, Artificial Sequence
  Description of Artificial Sequence: Synthetic oligonucleotide
  Sense strand starting at position 3925 of SEQ ID NO: 1562220
agugaaauucuauggcauu

SEQ ID NO: 1731214 - RNA, 19 nt, Artificial Sequence
  Description of Artificial Sequence: Synthetic oligonucleotide
  Antisense strand to SEQ ID NO: 1731213
aaugccauagaauuucacu

SEQ ID NO: 1731215 - RNA, 19 nt, Artificial Sequence
  Description of Artificial Sequence: Synthetic oligonucleotide
  Sense strand starting at position 350 of SEQ ID NO: 1562221
cgcaccugaccuuagaauu

SEQ ID NO: 1731216 - RNA, 19 nt, Artificial Sequence
  Description of Artificial Sequence: Synthetic oligonucleotide
  Antisense strand to SEQ ID NO: 1731215
aauucuaaggucaggugcg

SEQ ID NO: 1731217 - RNA, 19 nt, Artificial Sequence
  Description of Artificial Sequence: Synthetic oligonucleotide
  Sense strand starting at position 874 of SEQ ID NO: 1562221
uuuagucuaccagguagua

SEQ ID NO: 1731218 - RNA, 19 nt, Artificial Sequence
  Description of Artificial Sequence: Synthetic oligonucleotide
  Antisense strand to SEQ ID NO: 1731217
uacuaccugguagacuaaa

SEQ ID NO: 1731219 - RNA, 19 nt, Artificial Sequence
  Description of Artificial Sequence: Synthetic oligonucleotide
  Sense strand starting at position 1101 of SEQ ID NO: 1562221
gggucugaucagugaagca

SEQ ID NO: 1731220 - RNA, 19 nt, Artificial Sequence
  Description of Artificial Sequence: Synthetic oligonucleotide
  Antisense strand to SEQ ID NO: 1731219
ugcuucacugaucagaccc

SEQ ID NO: 1731221 - RNA, 19 nt, Artificial Sequence
  Description of Artificial Sequence: Synthetic oligonucleotide
  Sense strand starting at position 1155 of SEQ ID NO: 1562221
gacccaaaguucccugagu

SEQ ID NO: 1731222 - RNA, 19 nt, Artificial Sequence
  Description of Artificial Sequence: Synthetic oligonucleotide
  Antisense strand to SEQ ID NO: 1731221
acucagggaacuuuggguc

SEQ ID NO: 1731223 - RNA, 19 nt, Artificial Sequence
  Description of Artificial Sequence: Synthetic oligonucleotide
  Sense strand starting at position 1157 of SEQ ID NO: 1562221
cccaaaguucccugaguca

SEQ ID NO: 1731224 - RNA, 19 nt, Artificial Sequence
  Description of Artificial Sequence: Synthetic oligonucleotide
  Antisense strand to SEQ ID NO: 1731223
ugacucagggaacuuuggg

SEQ ID NO: 1731225 - RNA, 19 nt, Artificial Sequence
  Description of Artificial Sequence: Synthetic oligonucleotide
  Sense strand starting at position 1160 of SEQ ID NO: 1562221
aaaguucccugagucaaga

SEQ ID NO: 1731226 - RNA, 19 nt, Artificial Sequence
  Description of Artificial Sequence: Synthetic oligonucleotide
  Antisense strand to SEQ ID NO: 1731225
ucuugacucagggaacuuu

SEQ ID NO: 1731227 - RNA, 19 nt, Artificial Sequence
  Description of Artificial Sequence: Synthetic oligonucleotide
  Sense strand starting at position 1224 of SEQ ID NO: 1562221
auucuuacccacggaaaga

SEQ ID NO: 1731228 - RNA, 19 nt, Artificial Sequence
  Description of Artificial Sequence: Synthetic oligonucleotide
  Antisense strand to SEQ ID NO: 1731227
ucuuuccguggguaagaau

SEQ ID NO: 1731229 - RNA, 19 nt, Artificial Sequence
  Description of Artificial Sequence: Synthetic oligonucleotide
  Sense strand starting at position 1273 of SEQ ID NO: 1562221
aggcuugugcaacgagaaa

SEQ ID NO: 1731230 - RNA, 19 nt, Artificial Sequence
  Description of Artificial Sequence: Synthetic oligonucleotide
  Antisense strand to SEQ ID NO: 1731229
uuucucguugcacaagccu

SEQ ID NO: 1731231 - RNA, 19 nt, Artificial Sequence
  Description of Artificial Sequence: Synthetic oligonucleotide
  Sense strand starting at position 1325 of SEQ ID NO: 1562221
cauacugauguuuaccgaa

SEQ ID NO: 1731232 - RNA, 19 nt, Artificial Sequence
  Description of Artificial Sequence: Synthetic oligonucleotide
  Antisense strand to SEQ ID NO: 1731231
uucgguaaacaucaguaug

SEQ ID NO: 1731233 - RNA, 19 nt, Artificial Sequence
  Description of Artificial Sequence: Synthetic oligonucleotide
  Sense strand starting at position 1327 of SEQ ID NO: 1562221
uacugauguuuaccgaaga

SEQ ID NO: 1731234 - RNA, 19 nt, Artificial Sequence
  Description of Artificial Sequence: Synthetic oligonucleotide
  Antisense strand to SEQ ID NO: 1731233
ucuucgguaaacaucagua

SEQ ID NO: 1731235 - RNA, 19 nt, Artificial Sequence
  Description of Artificial Sequence: Synthetic oligonucleotide
  Sense strand starting at position 1420 of SEQ ID NO: 1562221
cagccucgucuggaaucua

SEQ ID NO: 1731236 - RNA, 19 nt, Artificial Sequence
  Description of Artificial Sequence: Synthetic oligonucleotide
  Antisense strand to SEQ ID NO: 1731235
uagauuccagacgaggcug

SEQ ID NO: 1731237 - RNA, 19 nt, Artificial Sequence
  Description of Artificial Sequence: Synthetic oligonucleotide
  Sense strand starting at position 1428 of SEQ ID NO: 1562221
ucuggaaucuaguuaggaa

SEQ ID NO: 1731238 - RNA, 19 nt, Artificial Sequence
  Description of Artificial Sequence: Synthetic oligonucleotide
  Antisense strand to SEQ ID NO: 1731237
uuccuaacuagauuccaga

SEQ ID NO: 1731239 - RNA, 19 nt, Artificial Sequence
  Description of Artificial Sequence: Synthetic oligonucleotide
  Sense strand starting at position 1432 of SEQ ID NO: 1562221
gaaucuaguuaggaacaca

SEQ ID NO: 1731240 - RNA, 19 nt, Artificial Sequence
  Description of Artificial Sequence: Synthetic oligonucleotide
  Antisense strand to SEQ ID NO: 1731239
uguguuccuaacuagauuc

SEQ ID NO: 1731241 - RNA, 19 nt, Artificial Sequence
  Description of Artificial Sequence: Synthetic oligonucleotide
  Sense strand starting at position 1443 of SEQ ID NO: 1562221
ggaacacaguuaucucaga

SEQ ID NO: 1731242 - RNA, 19 nt, Artificial Sequence
  Description of Artificial Sequence: Synthetic oligonucleotide
  Antisense strand to SEQ ID NO: 1731241
ucugagauaacuguguucc

SEQ ID NO: 1731243 - RNA, 19 nt, Artificial Sequence
  Description of Artificial Sequence: Synthetic oligonucleotide
  Sense strand starting at position 1506 of SEQ ID NO: 1562221
ggcacaucaaagugugaug

SEQ ID NO: 1731244 - RNA, 19 nt, Artificial Sequence
  Description of Artificial Sequence: Synthetic oligonucleotide
  Antisense strand to SEQ ID NO: 1731243
caucacacuuugaugugcc

SEQ ID NO: 1731245 - RNA, 19 nt, Artificial Sequence
  Description of Artificial Sequence: Synthetic oligonucleotide
  Sense strand starting at position 1531 of SEQ ID NO: 1562221
gcggcagaauaucugacua

SEQ ID NO: 1731246 - RNA, 19 nt, Artificial Sequence
  Description of Artificial Sequence: Synthetic oligonucleotide
  Antisense strand to SEQ ID NO: 1731245
uagucagauauucugccgc

SEQ ID NO: 1731247 - RNA, 19 nt, Artificial Sequence
  Description of Artificial Sequence: Synthetic oligonucleotide
  Sense strand starting at position 1566 of SEQ ID NO: 1562221
ccgugagacaaguacuguu

SEQ ID NO: 1731248 - RNA, 19 nt, Artificial Sequence
  Description of Artificial Sequence: Synthetic oligonucleotide
  Antisense strand to SEQ ID NO: 1731247
aacaguacuugucucacgg

SEQ ID NO: 1731249 - RNA, 19 nt, Artificial Sequence
  Description of Artificial Sequence: Synthetic oligonucleotide
  Sense strand starting at position 1659 of SEQ ID NO: 1562221
cggcgagagucacugaagu

SEQ ID NO: 1731250 - RNA, 19 nt, Artificial Sequence
  Description of Artificial Sequence: Synthetic oligonucleotide
  Antisense strand to SEQ ID NO: 1731249
acuucagugacucucgccg

SEQ ID NO: 1731251 - RNA, 19 nt, Artificial Sequence
  Description of Artificial Sequence: Synthetic oligonucleotide
  Sense strand starting at position 1661 of SEQ ID NO: 1562221
gcgagagucacugaaguuc

SEQ ID NO: 1731252 - RNA, 19 nt, Artificial Sequence
  Description of Artificial Sequence: Synthetic oligonucleotide
  Antisense strand to SEQ ID NO: 1731251
gaacuucagugacucucgc

SEQ ID NO: 1731253 - RNA, 19 nt, Artificial Sequence
  Description of Artificial Sequence: Synthetic oligonucleotide
  Sense strand starting at position 2034 of SEQ ID NO: 1562221
agcguuucccaaggacauu

SEQ ID NO: 1731254 - RNA, 19 nt, Artificial Sequence
  Description of Artificial Sequence: Synthetic oligonucleotide
  Antisense strand to SEQ ID NO: 1731253
aauguccuugggaaacgcu

SEQ ID NO: 1731255 - RNA, 19 nt, Artificial Sequence
  Description of Artificial Sequence: Synthetic oligonucleotide
  Sense strand starting at position 2121 of SEQ ID NO: 1562221
gauggaucgcucuggaagu

SEQ ID NO: 1731256 - RNA, 19 nt, Artificial Sequence
  Description of Artificial Sequence: Synthetic oligonucleotide
  Antisense strand to SEQ ID NO: 1731255
acuuccagagcgauccauc

SEQ ID NO: 1731257 - RNA, 19 nt, Artificial Sequence
  Description of Artificial Sequence: Synthetic oligonucleotide
  Sense strand starting at position 2134 of SEQ ID NO: 1562221
ggaagucauuaagcagcuu

SEQ ID NO: 1731258 - RNA, 19 nt, Artificial Sequence
  Description of Artificial Sequence: Synthetic oligonucleotide
  Antisense strand to SEQ ID NO: 1731257
aagcugcuuaaugacuucc

SEQ ID NO: 1731259 - RNA, 19 nt, Artificial Sequence
  Description of Artificial Sequence: Synthetic oligonucleotide
  Sense strand starting at position 2731 of SEQ ID NO: 1562221
aagccuguacagugagaaa

SEQ ID NO: 1731260 - RNA, 19 nt, Artificial Sequence
  Description of Artificial Sequence: Synthetic oligonucleotide
  Antisense strand to SEQ ID NO: 1731259
uuucucacuguacaggcuu

SEQ ID NO: 1731261 - RNA, 19 nt, Artificial Sequence
  Description of Artificial Sequence: Synthetic oligonucleotide
  Sense strand starting at position 3238 of SEQ ID NO: 1562221
gagcuagugacaugaugga

SEQ ID NO: 1731262 - RNA, 19 nt, Artificial Sequence
  Description of Artificial Sequence: Synthetic oligonucleotide
  Antisense strand to SEQ ID NO: 1731261
uccaucaugucacuagcuc

SEQ ID NO: 1731263 - RNA, 19 nt, Artificial Sequence
  Description of Artificial Sequence: Synthetic oligonucleotide
  Sense strand starting at position 3331 of SEQ ID NO: 1562221
gugauucuccaccacccua

SEQ ID NO: 1731264 - RNA, 19 nt, Artificial Sequence
  Description of Artificial Sequence: Synthetic oligonucleotide
  Antisense strand to SEQ ID NO: 1731263
uagggugguggagaaucac

SEQ ID NO: 1731265 - RNA, 19 nt, Artificial Sequence
  Description of Artificial Sequence: Synthetic oligonucleotide
  Sense strand starting at position 3362 of SEQ ID NO: 1562221
ggguccuacuggguacaua

SEQ ID NO: 1731266 - RNA, 19 nt, Artificial Sequence
  Description of Artificial Sequence: Synthetic oligonucleotide
  Antisense strand to SEQ ID NO: 1731265
uauguacccaguaggaccc

SEQ ID NO: 1731267 - RNA, 19 nt, Artificial Sequence
  Description of Artificial Sequence: Synthetic oligonucleotide
  Sense strand starting at position 3363 of SEQ ID NO: 1562221
gguccuacuggguacauau

SEQ ID NO: 1731268 - RNA, 19 nt, Artificial Sequence
  Description of Artificial Sequence: Synthetic oligonucleotide
  Antisense strand to SEQ ID NO: 1731267
auauguacccaguaggacc

SEQ ID NO: 1731269 - RNA, 19 nt, Artificial Sequence
  Description of Artificial Sequence: Synthetic oligonucleotide
  Sense strand starting at position 3396 of SEQ ID NO: 1562221
caguauagguaccuagaca

SEQ ID NO: 1731270 - RNA, 19 nt, Artificial Sequence
  Description of Artificial Sequence: Synthetic oligonucleotide
  Antisense strand to SEQ ID NO: 1731269
ugucuagguaccuauacug

SEQ ID NO: 1731271 - RNA, 19 nt, Artificial Sequence
  Description of Artificial Sequence: Synthetic oligonucleotide
  Sense strand starting at position 3480 of SEQ ID NO: 1562221
gcacuugagaucugcugau

SEQ ID NO: 1731272 - RNA, 19 nt, Artificial Sequence
  Description of Artificial Sequence: Synthetic oligonucleotide
  Antisense strand to SEQ ID NO: 1731271
aucagcagaucucaagugc

SEQ ID NO: 1731273 - RNA, 19 nt, Artificial Sequence
  Description of Artificial Sequence: Synthetic oligonucleotide
  Sense strand starting at position 3516 of SEQ ID NO: 1562221
gucaaugccuuggcucuaa

SEQ ID NO: 1731274 - RNA, 19 nt, Artificial Sequence
  Description of Artificial Sequence: Synthetic oligonucleotide
  Antisense strand to SEQ ID NO: 1731273
uuagagccaaggcauugac

SEQ ID NO: 1731275 - RNA, 19 nt, Artificial Sequence
  Description of Artificial Sequence: Synthetic oligonucleotide
  Sense strand starting at position 3575 of SEQ ID NO: 1562221
gccuaucuuguagggaaga

SEQ ID NO: 1731276 - RNA, 19 nt, Artificial Sequence
  Description of Artificial Sequence: Synthetic oligonucleotide
  Antisense strand to SEQ ID NO: 1731275
ucuucccuacaagauaggc

SEQ ID NO: 1731277 - RNA, 19 nt, Artificial Sequence
  Description of Artificial Sequence: Synthetic oligonucleotide
  Sense strand starting at position 3662 of SEQ ID NO: 1562221
uggagacagcgcuguuuga

SEQ ID NO: 1731278 - RNA, 19 nt, Artificial Sequence
  Description of Artificial Sequence: Synthetic oligonucleotide
  Antisense strand to SEQ ID NO: 1731277
ucaaacagcgcugucucca

SEQ ID NO: 1731279 - RNA, 19 nt, Artificial Sequence
  Description of Artificial Sequence: Synthetic oligonucleotide
  Sense strand starting at position 3762 of SEQ ID NO: 1562221
uuguuaugacucuguccuu

SEQ ID NO: 1731280 - RNA, 19 nt, Artificial Sequence
  Description of Artificial Sequence: Synthetic oligonucleotide
  Antisense strand to SEQ ID NO: 1731279
aaggacagagucauaacaa

SEQ ID NO: 1731281 - RNA, 19 nt, Artificial Sequence
  Description of Artificial Sequence: Synthetic oligonucleotide
  Sense strand starting at position 3819 of SEQ ID NO: 1562221
aggaaugaaccauguuugu

SEQ ID NO: 1731282 - RNA, 19 nt, Artificial Sequence
  Description of Artificial Sequence: Synthetic oligonucleotide
  Antisense strand to SEQ ID NO: 1731281
acaaacaugguucauuccu

SEQ ID NO: 1731283 - RNA, 19 nt, Artificial Sequence
  Description of Artificial Sequence: Synthetic oligonucleotide
  Sense strand starting at position 3825 of SEQ ID NO: 1562221
gaaccauguuuguuccuag

SEQ ID NO: 1731284 - RNA, 19 nt, Artificial Sequence
  Description of Artificial Sequence: Synthetic oligonucleotide
  Antisense strand to SEQ ID NO: 1731283
cuaggaacaaacaugguuc

SEQ ID NO: 1731285 - RNA, 19 nt, Artificial Sequence
  Description of Artificial Sequence: Synthetic oligonucleotide
  Sense strand starting at position 3828 of SEQ ID NO: 1562221
ccauguuuguuccuaggca

SEQ ID NO: 1731286 - RNA, 19 nt, Artificial Sequence
  Description of Artificial Sequence: Synthetic oligonucleotide
  Antisense strand to SEQ ID NO: 1731285
ugccuaggaacaaacaugg

SEQ ID NO: 1731287 - RNA, 19 nt, Artificial Sequence
  Description of Artificial Sequence: Synthetic oligonucleotide
  Sense strand starting at position 3857 of SEQ ID NO: 1562221
uccuguuucucuuuguaau

SEQ ID NO: 1731288 - RNA, 19 nt, Artificial Sequence
  Description of Artificial Sequence: Synthetic oligonucleotide
  Antisense strand to SEQ ID NO: 1731287
auuacaaagagaaacagga

SEQ ID NO: 1731289 - RNA, 19 nt, Artificial Sequence
  Description of Artificial Sequence: Synthetic oligonucleotide
  Sense strand starting at position 3858 of SEQ ID NO: 1562221
ccuguuucucuuuguaaua

SEQ ID NO: 1731290 - RNA, 19 nt, Artificial Sequence
  Description of Artificial Sequence: Synthetic oligonucleotide
  Antisense strand to SEQ ID NO: 1731289
uauuacaaagagaaacagg

SEQ ID NO: 1731291 - RNA, 19 nt, Artificial Sequence
  Description of Artificial Sequence: Synthetic oligonucleotide
  Sense strand starting at position 3859 of SEQ ID NO: 1562221
cuguuucucuuuguaauac

SEQ ID NO: 1731292 - RNA, 19 nt, Artificial Sequence
  Description of Artificial Sequence: Synthetic oligonucleotide
  Antisense strand to SEQ ID NO: 1731291
guauuacaaagagaaacag

SEQ ID NO: 1731293 - RNA, 19 nt, Artificial Sequence
  Description of Artificial Sequence: Synthetic oligonucleotide
  Sense strand starting at position 3954 of SEQ ID NO: 1562221
cugggagggcucugggaaa

SEQ ID NO: 1731294 - RNA, 19 nt, Artificial Sequence
  Description of Artificial Sequence: Synthetic oligonucleotide
  Antisense strand to SEQ ID NO: 1731293
uuucccagagcccucccag

SEQ ID NO: 1731295 - RNA, 19 nt, Artificial Sequence
  Description of Artificial Sequence: Synthetic oligonucleotide
  Sense strand starting at position 27 of SEQ ID NO: 1562222
cggagaucguucuggagcu

SEQ ID NO: 1731296 - RNA, 19 nt, Artificial Sequence
  Description of Artificial Sequence: Synthetic oligonucleotide
  Antisense strand to SEQ ID NO: 1731295
agcuccagaacgaucuccg

SEQ ID NO: 1731297 - RNA, 19 nt, Artificial Sequence
  Description of Artificial Sequence: Synthetic oligonucleotide
  Sense strand starting at position 243 of SEQ ID NO: 1562222
gcugucagucaagaaggaa

SEQ ID NO: 1731298 - RNA, 19 nt, Artificial Sequence
  Description of Artificial Sequence: Synthetic oligonucleotide
  Antisense strand to SEQ ID NO: 1731297
uuccuucuugacugacagc

SEQ ID NO: 1731299 - RNA, 19 nt, Artificial Sequence
  Description of Artificial Sequence: Synthetic oligonucleotide
  Sense strand starting at position 824 of SEQ ID NO: 1562222
gugacucuuccucauccua

SEQ ID NO: 1731300 - RNA, 19 nt, Artificial Sequence
  Description of Artificial Sequence: Synthetic oligonucleotide
  Antisense strand to SEQ ID NO: 1731299
uaggaugaggaagagucac

SEQ ID NO: 1731301 - RNA, 19 nt, Artificial Sequence
  Description of Artificial Sequence: Synthetic oligonucleotide
  Sense strand starting at position 1052 of SEQ ID NO: 1562222
uggucugucucagagccaa

SEQ ID NO: 1731302 - RNA, 19 nt, Artificial Sequence
  Description of Artificial Sequence: Synthetic oligonucleotide
  Antisense strand to SEQ ID NO: 1731301
uuggcucugagacagacca

SEQ ID NO: 1731303 - RNA, 19 nt, Artificial Sequence
  Description of Artificial Sequence: Synthetic oligonucleotide
  Sense strand starting at position 1136 of SEQ ID NO: 1562222
ggcucaugccuugaacagu

SEQ ID NO: 1731304 - RNA, 19 nt, Artificial Sequence
  Description of Artificial Sequence: Synthetic oligonucleotide
  Antisense strand to SEQ ID NO: 1731303
acuguucaaggcaugagcc

SEQ ID NO: 1731305 - RNA, 19 nt, Artificial Sequence
  Description of Artificial Sequence: Synthetic oligonucleotide
  Sense strand starting at position 1276 of SEQ ID NO: 1562222
gagaaaguugcacagcaaa

SEQ ID NO: 1731306 - RNA, 19 nt, Artificial Sequence
  Description of Artificial Sequence: Synthetic oligonucleotide
  Antisense strand to SEQ ID NO: 1731305
uuugcugugcaacuuucuc

SEQ ID NO: 1731307 - RNA, 19 nt, Artificial Sequence
  Description of Artificial Sequence: Synthetic oligonucleotide
  Sense strand starting at position 1297 of SEQ ID NO: 1562222
ucacuuccugugcacagau

SEQ ID NO: 1731308 - RNA, 19 nt, Artificial Sequence
  Description of Artificial Sequence: Synthetic oligonucleotide
  Antisense strand to SEQ ID NO: 1731307
aucugugcacaggaaguga

SEQ ID NO: 1731309 - RNA, 19 nt, Artificial Sequence
  Description of Artificial Sequence: Synthetic oligonucleotide
  Sense strand starting at position 1320 of SEQ ID NO: 1562222
aggagugcuucuggccaca

SEQ ID NO: 1731310 - RNA, 19 nt, Artificial Sequence
  Description of Artificial Sequence: Synthetic oligonucleotide
  Antisense strand to SEQ ID NO: 1731309
uguggccagaagcacuccu

SEQ ID NO: 1731311 - RNA, 19 nt, Artificial Sequence
  Description of Artificial Sequence: Synthetic oligonucleotide
  Sense strand starting at position 1322 of SEQ ID NO: 1562222
gagugcuucuggccacaac

SEQ ID NO: 1731312 - RNA, 19 nt, Artificial Sequence
  Description of Artificial Sequence: Synthetic oligonucleotide
  Antisense strand to SEQ ID NO: 1731311
guuguggccagaagcacuc

SEQ ID NO: 1731313 - RNA, 19 nt, Artificial Sequence
  Description of Artificial Sequence: Synthetic oligonucleotide
  Sense strand starting at position 1323 of SEQ ID NO: 1562222
agugcuucuggccacaaca

SEQ ID NO: 1731314 - RNA, 19 nt, Artificial Sequence
  Description of Artificial Sequence: Synthetic oligonucleotide
  Antisense strand to SEQ ID NO: 1731313
uguuguggccagaagcacu

SEQ ID NO: 1731315 - RNA, 19 nt, Artificial Sequence
  Description of Artificial Sequence: Synthetic oligonucleotide
  Sense strand starting at position 1472 of SEQ ID NO: 1562222
cagccuguuugauuccuga

SEQ ID NO: 1731316 - RNA, 19 nt, Artificial Sequence
  Description of Artificial Sequence: Synthetic oligonucleotide
  Antisense strand to SEQ ID NO: 1731315
ucaggaaucaaacaggcug

SEQ ID NO: 1731317 - RNA, 19 nt, Artificial Sequence
  Description of Artificial Sequence: Synthetic oligonucleotide
  Sense strand starting at position 1475 of SEQ ID NO: 1562222
ccuguuugauuccugauau

SEQ ID NO: 1731318 - RNA, 19 nt, Artificial Sequence
  Description of Artificial Sequence: Synthetic oligonucleotide
  Antisense strand to SEQ ID NO: 1731317
auaucaggaaucaaacagg

SEQ ID NO: 1731319 - RNA, 19 nt, Artificial Sequence
  Description of Artificial Sequence: Synthetic oligonucleotide
  Sense strand starting at position 1476 of SEQ ID NO: 1562222
cuguuugauuccugauauc

SEQ ID NO: 1731320 - RNA, 19 nt, Artificial Sequence
  Description of Artificial Sequence: Synthetic oligonucleotide
  Antisense strand to SEQ ID NO: 1731319
gauaucaggaaucaaacag

SEQ ID NO: 1731321 - RNA, 19 nt, Artificial Sequence
  Description of Artificial Sequence: Synthetic oligonucleotide
  Sense strand starting at position 1611 of SEQ ID NO: 1562222
cccugagauccugaugcca

SEQ ID NO: 1731322 - RNA, 19 nt, Artificial Sequence
  Description of Artificial Sequence: Synthetic oligonucleotide
  Antisense strand to SEQ ID NO: 1731321
uggcaucaggaucucaggg

SEQ ID NO: 1731323 - RNA, 19 nt, Artificial Sequence
  Description of Artificial Sequence: Synthetic oligonucleotide
  Sense strand starting at position 2020 of SEQ ID NO: 1562222
gggcuuguguaugccugau

SEQ ID NO: 1731324 - RNA, 19 nt, Artificial Sequence
  Description of Artificial Sequence: Synthetic oligonucleotide
  Antisense strand to SEQ ID NO: 1731323
aucaggcauacacaagccc

SEQ ID NO: 1731325 - RNA, 19 nt, Artificial Sequence
  Description of Artificial Sequence: Synthetic oligonucleotide
  Sense strand starting at position 2022 of SEQ ID NO: 1562222
gcuuguguaugccugauau

SEQ ID NO: 1731326 - RNA, 19 nt, Artificial Sequence
  Description of Artificial Sequence: Synthetic oligonucleotide
  Antisense strand to SEQ ID NO: 1731325
auaucaggcauacacaagc

SEQ ID NO: 1731327 - RNA, 19 nt, Artificial Sequence
  Description of Artificial Sequence: Synthetic oligonucleotide
  Sense strand starting at position 2024 of SEQ ID NO: 1562222
uuguguaugccugauauua

SEQ ID NO: 1731328 - RNA, 19 nt, Artificial Sequence
  Description of Artificial Sequence: Synthetic oligonucleotide
  Antisense strand to SEQ ID NO: 1731327
uaauaucaggcauacacaa

SEQ ID NO: 1731329 - RNA, 19 nt, Artificial Sequence
  Description of Artificial Sequence: Synthetic oligonucleotide
  Sense strand starting at position 2026 of SEQ ID NO: 1562222
guguaugccugauauuaau

SEQ ID NO: 1731330 - RNA, 19 nt, Artificial Sequence
  Description of Artificial Sequence: Synthetic oligonucleotide
  Antisense strand to SEQ ID NO: 1731329
auuaauaucaggcauacac

SEQ ID NO: 1731331 - RNA, 19 nt, Artificial Sequence
  Description of Artificial Sequence: Synthetic oligonucleotide
  Sense strand starting at position 2032 of SEQ ID NO: 1562222
gccugauauuaauagcgcu

SEQ ID NO: 1731332 - RNA, 19 nt, Artificial Sequence
  Description of Artificial Sequence: Synthetic oligonucleotide
  Antisense strand to SEQ ID NO: 1731331
agcgcuauuaauaucaggc

SEQ ID NO: 1731333 - RNA, 19 nt, Artificial Sequence
  Description of Artificial Sequence: Synthetic oligonucleotide
  Sense strand starting at position 2038 of SEQ ID NO: 1562222
uauuaauagcgcuggcuuu

SEQ ID NO: 1731334 - RNA, 19 nt, Artificial Sequence
  Description of Artificial Sequence: Synthetic oligonucleotide
  Antisense strand to SEQ ID NO: 1731333
aaagccagcgcuauuaaua

SEQ ID NO: 1731335 - RNA, 19 nt, Artificial Sequence
  Description of Artificial Sequence: Synthetic oligonucleotide
  Sense strand starting at position 2341 of SEQ ID NO: 1562222
gagugcuuccgacaggcau

SEQ ID NO: 1731336 - RNA, 19 nt, Artificial Sequence
  Description of Artificial Sequence: Synthetic oligonucleotide
  Antisense strand to SEQ ID NO: 1731335
augccugucggaagcacuc

SEQ ID NO: 1731337 - RNA, 19 nt, Artificial Sequence
  Description of Artificial Sequence: Synthetic oligonucleotide
  Sense strand starting at position 2343 of SEQ ID NO: 1562222
gugcuuccgacaggcauaa

SEQ ID NO: 1731338 - RNA, 19 nt, Artificial Sequence
  Description of Artificial Sequence: Synthetic oligonucleotide
  Antisense strand to SEQ ID NO: 1731337
uuaugccugucggaagcac

SEQ ID NO: 1731339 - RNA, 19 nt, Artificial Sequence
  Description of Artificial Sequence: Synthetic oligonucleotide
  Sense strand starting at position 2667 of SEQ ID NO: 1562222
cgcagagucagucaaggau

SEQ ID NO: 1731340 - RNA, 19 nt, Artificial Sequence
  Description of Artificial Sequence: Synthetic oligonucleotide
  Antisense strand to SEQ ID NO: 1731339
auccuugacugacucugcg

SEQ ID NO: 1731341 - RNA, 19 nt, Artificial Sequence
  Description of Artificial Sequence: Synthetic oligonucleotide
  Sense strand starting at position 2842 of SEQ ID NO: 1562222
aggucauacuccucaauag

SEQ ID NO: 1731342 - RNA, 19 nt, Artificial Sequence
  Description of Artificial Sequence: Synthetic oligonucleotide
  Antisense strand to SEQ ID NO: 1731341
cuauugaggaguaugaccu

SEQ ID NO: 1731343 - RNA, 19 nt, Artificial Sequence
  Description of Artificial Sequence: Synthetic oligonucleotide
  Sense strand starting at position 2843 of SEQ ID NO: 1562222
ggucauacuccucaauagu

SEQ ID NO: 1731344 - RNA, 19 nt, Artificial Sequence
  Description of Artificial Sequence: Synthetic oligonucleotide
  Antisense strand to SEQ ID NO: 1731343
acuauugaggaguaugacc

SEQ ID NO: 1731345 - RNA, 19 nt, Artificial Sequence
  Description of Artificial Sequence: Synthetic oligonucleotide
  Sense strand starting at position 2919 of SEQ ID NO: 1562222
ggugcuuccucuccucauu

SEQ ID NO: 1731346 - RNA, 19 nt, Artificial Sequence
  Description of Artificial Sequence: Synthetic oligonucleotide
  Antisense strand to SEQ ID NO: 1731345
aaugaggagaggaagcacc

SEQ ID NO: 1731347 - RNA, 19 nt, Artificial Sequence
  Description of Artificial Sequence: Synthetic oligonucleotide
  Sense strand starting at position 3397 of SEQ ID NO: 1562222
guucuaacuuccugagcug

SEQ ID NO: 1731348 - RNA, 19 nt, Artificial Sequence
  Description of Artificial Sequence: Synthetic oligonucleotide
  Antisense strand to SEQ ID NO: 1731347
cagcucaggaaguuagaac

SEQ ID NO: 1731349 - RNA, 19 nt, Artificial Sequence
  Description of Artificial Sequence: Synthetic oligonucleotide
  Sense strand starting at position 3667 of SEQ ID NO: 1562222
ucaguuuccuccucaagga

SEQ ID NO: 1731350 - RNA, 19 nt, Artificial Sequence
  Description of Artificial Sequence: Synthetic oligonucleotide
  Antisense strand to SEQ ID NO: 1731349
uccuugaggaggaaacuga

SEQ ID NO: 1731351 - RNA, 19 nt, Artificial Sequence
  Description of Artificial Sequence: Synthetic oligonucleotide
  Sense strand starting at position 3703 of SEQ ID NO: 1562222
acaggugggucagcucaua

SEQ ID NO: 1731352 - RNA, 19 nt, Artificial Sequence
  Description of Artificial Sequence: Synthetic oligonucleotide
  Antisense strand to SEQ ID NO: 1731351
uaugagcugacccaccugu

SEQ ID NO: 1731353 - RNA, 19 nt, Artificial Sequence
  Description of Artificial Sequence: Synthetic oligonucleotide
  Sense strand starting at position 3731 of SEQ ID NO: 1562222
gcagaugccucaucgguga

SEQ ID NO: 1731354 - RNA, 19 nt, Artificial Sequence
  Description of Artificial Sequence: Synthetic oligonucleotide
  Antisense strand to SEQ ID NO: 1731353
ucaccgaugaggcaucugc

SEQ ID NO: 1731355 - RNA, 19 nt, Artificial Sequence
  Description of Artificial Sequence: Synthetic oligonucleotide
  Sense strand starting at position 3761 of SEQ ID NO: 1562222
aacugaugucaucgucaag

SEQ ID NO: 1731356 - RNA, 19 nt, Artificial Sequence
  Description of Artificial Sequence: Synthetic oligonucleotide
  Antisense strand to SEQ ID NO: 1731355
cuugacgaugacaucaguu

SEQ ID NO: 1731357 - RNA, 19 nt, Artificial Sequence
  Description of Artificial Sequence: Synthetic oligonucleotide
  Sense strand starting at position 3767 of SEQ ID NO: 1562222
ugucaucgucaagaaauag

SEQ ID NO: 1731358 - RNA, 19 nt, Artificial Sequence
  Description of Artificial Sequence: Synthetic oligonucleotide
  Antisense strand to SEQ ID NO: 1731357
cuauuucuugacgaugaca

SEQ ID NO: 1731359 - RNA, 19 nt, Artificial Sequence
  Description of Artificial Sequence: Synthetic oligonucleotide
  Sense strand starting at position 3130 of SEQ ID NO: 1562223
ggguuaaagugcuaaacau

SEQ ID NO: 1731360 - RNA, 19 nt, Artificial Sequence
  Description of Artificial Sequence: Synthetic oligonucleotide
  Antisense strand to SEQ ID NO: 1731359
auguuuagcacuuuaaccc

SEQ ID NO: 1731361 - RNA, 19 nt, Artificial Sequence
  Description of Artificial Sequence: Synthetic oligonucleotide
  Sense strand starting at position 3137 of SEQ ID NO: 1562223
agugcuaaacaucaaggua

SEQ ID NO: 1731362 - RNA, 19 nt, Artificial Sequence
  Description of Artificial Sequence: Synthetic oligonucleotide
  Antisense strand to SEQ ID NO: 1731361
uaccuugauguuuagcacu

SEQ ID NO: 1731363 - RNA, 19 nt, Artificial Sequence
  Description of Artificial Sequence: Synthetic oligonucleotide
  Sense strand starting at position 3179 of SEQ ID NO: 1562223
agggauuaucugugggcuu

SEQ ID NO: 1731364 - RNA, 19 nt, Artificial Sequence
  Description of Artificial Sequence: Synthetic oligonucleotide
  Antisense strand to SEQ ID NO: 1731363
aagcccacagauaaucccu

SEQ ID NO: 1731365 - RNA, 19 nt, Artificial Sequence
  Description of Artificial Sequence: Synthetic oligonucleotide
  Sense strand starting at position 3180 of SEQ ID NO: 1562223
gggauuaucugugggcuuu

SEQ ID NO: 1731366 - RNA, 19 nt, Artificial Sequence
  Description of Artificial Sequence: Synthetic oligonucleotide
  Antisense strand to SEQ ID NO: 1731365
aaagcccacagauaauccc

SEQ ID NO: 1731367 - RNA, 19 nt, Artificial Sequence
  Description of Artificial Sequence: Synthetic oligonucleotide
  Sense strand starting at position 3181 of SEQ ID NO: 1562223
ggauuaucugugggcuuug

SEQ ID NO: 1731368 - RNA, 19 nt, Artificial Sequence
  Description of Artificial Sequence: Synthetic oligonucleotide
  Antisense strand to SEQ ID NO: 1731367
caaagcccacagauaaucc

SEQ ID NO: 1731369 - RNA, 19 nt, Artificial Sequence
  Description of Artificial Sequence: Synthetic oligonucleotide
  Sense strand starting at position 3199 of SEQ ID NO: 1562223
gggagugucccggaaacuc

SEQ ID NO: 1731370 - RNA, 19 nt, Artificial Sequence
  Description of Artificial Sequence: Synthetic oligonucleotide
  Antisense strand to SEQ ID NO: 1731369
gaguuuccgggacacuccc

SEQ ID NO: 1731371 - RNA, 19 nt, Artificial Sequence
  Description of Artificial Sequence: Synthetic oligonucleotide
  Sense strand starting at position 3639 of SEQ ID NO: 1562223
agccuucuggcccaaggau

SEQ ID NO: 1731372 - RNA, 19 nt, Artificial Sequence
  Description of Artificial Sequence: Synthetic oligonucleotide
  Antisense strand to SEQ ID NO: 1731371
auccuugggccagaaggcu

SEQ ID NO: 1731373 - RNA, 19 nt, Artificial Sequence
  Description of Artificial Sequence: Synthetic oligonucleotide
  Sense strand starting at position 3696 of SEQ ID NO: 1562223
caaagugcuccuggaacuu

SEQ ID NO: 1731374 - RNA, 19 nt, Artificial Sequence
  Description of Artificial Sequence: Synthetic oligonucleotide
  Antisense strand to SEQ ID NO: 1731373
aaguuccaggagcacuuug

SEQ ID NO: 1731375 - RNA, 19 nt, Artificial Sequence
  Description of Artificial Sequence: Synthetic oligonucleotide
  Sense strand starting at position 3916 of SEQ ID NO: 1562223
gucggauugcgaguguuug

SEQ ID NO: 1731376 - RNA, 19 nt, Artificial Sequence
  Description of Artificial Sequence: Synthetic oligonucleotide
  Antisense strand to SEQ ID NO: 1731375
caaacacucgcaauccgac

SEQ ID NO: 1731377 - RNA, 19 nt, Artificial Sequence
  Description of Artificial Sequence: Synthetic oligonucleotide
  Sense strand starting at position 3917 of SEQ ID NO: 1562223
ucggauugcgaguguuugu

SEQ ID NO: 1731378 - RNA, 19 nt, Artificial Sequence
  Description of Artificial Sequence: Synthetic oligonucleotide
  Antisense strand to SEQ ID NO: 1731377
acaaacacucgcaauccga

SEQ ID NO: 1731379 - RNA, 19 nt, Artificial Sequence
  Description of Artificial Sequence: Synthetic oligonucleotide
  Sense strand starting at position 3918 of SEQ ID NO: 1562223
cggauugcgaguguuugua

SEQ ID NO: 1731380 - RNA, 19 nt, Artificial Sequence
  Description of Artificial Sequence: Synthetic oligonucleotide
  Antisense strand to SEQ ID NO: 1731379
uacaaacacucgcaauccg

SEQ ID NO: 1731381 - RNA, 19 nt, Artificial Sequence
  Description of Artificial Sequence: Synthetic oligonucleotide
  Sense strand starting at position 3920 of SEQ ID NO: 1562223
gauugcgaguguuuguaua

SEQ ID NO: 1731382 - RNA, 19 nt, Artificial Sequence
  Description of Artificial Sequence: Synthetic oligonucleotide
  Antisense strand to SEQ ID NO: 1731381
uauacaaacacucgcaauc

SEQ ID NO: 1731383 - RNA, 19 nt, Artificial Sequence
  Description of Artificial Sequence: Synthetic oligonucleotide
  Sense strand starting at position 3922 of SEQ ID NO: 1562223
uugcgaguguuuguauaaa

SEQ ID NO: 1731384 - RNA, 19 nt, Artificial Sequence
  Description of Artificial Sequence: Synthetic oligonucleotide
  Antisense strand to SEQ ID NO: 1731383
uuuauacaaacacucgcaa

SEQ ID NO: 1731385 - RNA, 19 nt, Artificial Sequence
  Description of Artificial Sequence: Synthetic oligonucleotide
  Sense strand starting at position 3958 of SEQ ID NO: 1562223
gguuguuacuugucacagc

SEQ ID NO: 1731386 - RNA, 19 nt, Artificial Sequence
  Description of Artificial Sequence: Synthetic oligonucleotide
  Antisense strand to SEQ ID NO: 1731385
gcugugacaaguaacaacc

SEQ ID NO: 1731387 - RNA, 19 nt, Artificial Sequence
  Description of Artificial Sequence: Synthetic oligonucleotide
  Sense strand starting at position 3959 of SEQ ID NO: 1562223
guuguuacuugucacagca

SEQ ID NO: 1731388 - RNA, 19 nt, Artificial Sequence
  Description of Artificial Sequence: Synthetic oligonucleotide
  Antisense strand to SEQ ID NO: 1731387
ugcugugacaaguaacaac

SEQ ID NO: 1731389 - RNA, 19 nt, Artificial Sequence
  Description of Artificial Sequence: Synthetic oligonucleotide
  Sense strand starting at position 26 of SEQ ID NO: 1562224
uuuccaaagggauguuaua

SEQ ID NO: 1731390 - RNA, 19 nt, Artificial Sequence
  Description of Artificial Sequence: Synthetic oligonucleotide
  Antisense strand to SEQ ID NO: 1731389
uauaacaucccuuuggaaa

SEQ ID NO: 1731391 - RNA, 19 nt, Artificial Sequence
  Description of Artificial Sequence: Synthetic oligonucleotide
  Sense strand starting at position 65 of SEQ ID NO: 1562224
aagugcuuagcacguagua

SEQ ID NO: 1731392 - RNA, 19 nt, Artificial Sequence
  Description of Artificial Sequence: Synthetic oligonucleotide
  Antisense strand to SEQ ID NO: 1731391
uacuacgugcuaagcacuu

SEQ ID NO: 1731393 - RNA, 19 nt, Artificial Sequence
  Description of Artificial Sequence: Synthetic oligonucleotide
  Sense strand starting at position 67 of SEQ ID NO: 1562224
gugcuuagcacguaguaag

SEQ ID NO: 1731394 - RNA, 19 nt, Artificial Sequence
  Description of Artificial Sequence: Synthetic oligonucleotide
  Antisense strand to SEQ ID NO: 1731393
cuuacuacgugcuaagcac

SEQ ID NO: 1731395 - RNA, 19 nt, Artificial Sequence
  Description of Artificial Sequence: Synthetic oligonucleotide
  Sense strand starting at position 77 of SEQ ID NO: 1562224
cguaguaagugcccuauaa

SEQ ID NO: 1731396 - RNA, 19 nt, Artificial Sequence
  Description of Artificial Sequence: Synthetic oligonucleotide
  Antisense strand to SEQ ID NO: 1731395
uuauagggcacuuacuacg

SEQ ID NO: 1731397 - RNA, 19 nt, Artificial Sequence
  Description of Artificial Sequence: Synthetic oligonucleotide
  Sense strand starting at position 727 of SEQ ID NO: 1562224
aggugaaucuuucuggcag

SEQ ID NO: 1731398 - RNA, 19 nt, Artificial Sequence
  Description of Artificial Sequence: Synthetic oligonucleotide
  Antisense strand to SEQ ID NO: 1731397
cugccagaaagauucaccu

SEQ ID NO: 1731399 - RNA, 19 nt, Artificial Sequence
  Description of Artificial Sequence: Synthetic oligonucleotide
  Sense strand starting at position 835 of SEQ ID NO: 1562224
aacugucguccuuguaaga

SEQ ID NO: 1731400 - RNA, 19 nt, Artificial Sequence
  Description of Artificial Sequence: Synthetic oligonucleotide
  Antisense strand to SEQ ID NO: 1731399
ucuuacaaggacgacaguu

SEQ ID NO: 1731401 - RNA, 19 nt, Artificial Sequence
  Description of Artificial Sequence: Synthetic oligonucleotide
  Sense strand starting at position 914 of SEQ ID NO: 1562224
aggaauagaccaugucuac

SEQ ID NO: 1731402 - RNA, 19 nt, Artificial Sequence
  Description of Artificial Sequence: Synthetic oligonucleotide
  Antisense strand to SEQ ID NO: 1731401
guagacauggucuauuccu

SEQ ID NO: 1731403 - RNA, 19 nt, Artificial Sequence
  Description of Artificial Sequence: Synthetic oligonucleotide
  Sense strand starting at position 1056 of SEQ ID NO: 1562224
cuccuuuaauugcuagaga

SEQ ID NO: 1731404 - RNA, 19 nt, Artificial Sequence
  Description of Artificial Sequence: Synthetic oligonucleotide
  Antisense strand to SEQ ID NO: 1731403
ucucuagcaauuaaaggag

SEQ ID NO: 1731405 - RNA, 19 nt, Artificial Sequence
  Description of Artificial Sequence: Synthetic oligonucleotide
  Sense strand starting at position 1057 of SEQ ID NO: 1562224
uccuuuaauugcuagagaa

SEQ ID NO: 1731406 - RNA, 19 nt, Artificial Sequence
  Description of Artificial Sequence: Synthetic oligonucleotide
  Antisense strand to SEQ ID NO: 1731405
uucucuagcaauuaaagga

SEQ ID NO: 1731407 - RNA, 19 nt, Artificial Sequence
  Description of Artificial Sequence: Synthetic oligonucleotide
  Sense strand starting at position 1076 of SEQ ID NO: 1562224
aagaguaugcuagaagggu

SEQ ID NO: 1731408 - RNA, 19 nt, Artificial Sequence
  Description of Artificial Sequence: Synthetic oligonucleotide
  Antisense strand to SEQ ID NO: 1731407
acccuucuagcauacucuu

SEQ ID NO: 1731409 - RNA, 19 nt, Artificial Sequence
  Description of Artificial Sequence: Synthetic oligonucleotide
  Sense strand starting at position 1085 of SEQ ID NO: 1562224
cuagaagggucaggacuaa

SEQ ID NO: 1731410 - RNA, 19 nt, Artificial Sequence
  Description of Artificial Sequence: Synthetic oligonucleotide
  Antisense strand to SEQ ID NO: 1731409
uuaguccugacccuucuag

SEQ ID NO: 1731411 - RNA, 19 nt, Artificial Sequence
  Description of Artificial Sequence: Synthetic oligonucleotide
  Sense strand starting at position 1136 of SEQ ID NO: 1562224
ugcuaaagagucugguagu

SEQ ID NO: 1731412 - RNA, 19 nt, Artificial Sequence
  Description of Artificial Sequence: Synthetic oligonucleotide
  Antisense strand to SEQ ID NO: 1731411
acuaccagacucuuuagca

SEQ ID NO: 1731413 - RNA, 19 nt, Artificial Sequence
  Description of Artificial Sequence: Synthetic oligonucleotide
  Sense strand starting at position 1147 of SEQ ID NO: 1562224
cugguagucuuuccuuacu

SEQ ID NO: 1731414 - RNA, 19 nt, Artificial Sequence
  Description of Artificial Sequence: Synthetic oligonucleotide
  Antisense strand to SEQ ID NO: 1731413
aguaaggaaagacuaccag

SEQ ID NO: 1731415 - RNA, 19 nt, Artificial Sequence
  Description of Artificial Sequence: Synthetic oligonucleotide
  Sense strand starting at position 1149 of SEQ ID NO: 1562224
gguagucuuuccuuacuuc

SEQ ID NO: 1731416 - RNA, 19 nt, Artificial Sequence
  Description of Artificial Sequence: Synthetic oligonucleotide
  Antisense strand to SEQ ID NO: 1731415
gaaguaaggaaagacuacc

SEQ ID NO: 1731417 - RNA, 19 nt, Artificial Sequence
  Description of Artificial Sequence: Synthetic oligonucleotide
  Sense strand starting at position 1343 of SEQ ID NO: 1562224
cccugagaaucucagaauc

SEQ ID NO: 1731418 - RNA, 19 nt, Artificial Sequence
  Description of Artificial Sequence: Synthetic oligonucleotide
  Antisense strand to SEQ ID NO: 1731417
gauucugagauucucaggg

SEQ ID NO: 1731419 - RNA, 19 nt, Artificial Sequence
  Description of Artificial Sequence: Synthetic oligonucleotide
  Sense strand starting at position 1345 of SEQ ID NO: 1562224
cugagaaucucagaaucua

SEQ ID NO: 1731420 - RNA, 19 nt, Artificial Sequence
  Description of Artificial Sequence: Synthetic oligonucleotide
  Antisense strand to SEQ ID NO: 1731419
uagauucugagauucucag

SEQ ID NO: 1731421 - RNA, 19 nt, Artificial Sequence
  Description of Artificial Sequence: Synthetic oligonucleotide
  Sense strand starting at position 1375 of SEQ ID NO: 1562224
ggagauaaauguccucguu

SEQ ID NO: 1731422 - RNA, 19 nt, Artificial Sequence
  Description of Artificial Sequence: Synthetic oligonucleotide
  Antisense strand to SEQ ID NO: 1731421
aacgaggacauuuaucucc

SEQ ID NO: 1731423 - RNA, 19 nt, Artificial Sequence
  Description of Artificial Sequence: Synthetic oligonucleotide
  Sense strand starting at position 1428 of SEQ ID NO: 1562224
ugcuuaaagucacuaugca

SEQ ID NO: 1731424 - RNA, 19 nt, Artificial Sequence
  Description of Artificial Sequence: Synthetic oligonucleotide
  Antisense strand to SEQ ID NO: 1731423
ugcauagugacuuuaagca

SEQ ID NO: 1731425 - RNA, 19 nt, Artificial Sequence
  Description of Artificial Sequence: Synthetic oligonucleotide
  Sense strand starting at position 1429 of SEQ ID NO: 1562224
gcuuaaagucacuaugcau

SEQ ID NO: 1731426 - RNA, 19 nt, Artificial Sequence
  Description of Artificial Sequence: Synthetic oligonucleotide
  Antisense strand to SEQ ID NO: 1731425
augcauagugacuuuaagc

SEQ ID NO: 1731427 - RNA, 19 nt, Artificial Sequence
  Description of Artificial Sequence: Synthetic oligonucleotide
  Sense strand starting at position 1487 of SEQ ID NO: 1562224
uccaaucaguguccuacau

SEQ ID NO: 1731428 - RNA, 19 nt, Artificial Sequence
  Description of Artificial Sequence: Synthetic oligonucleotide
  Antisense strand to SEQ ID NO: 1731427
auguaggacacugauugga

SEQ ID NO: 1731429 - RNA, 19 nt, Artificial Sequence
  Description of Artificial Sequence: Synthetic oligonucleotide
  Sense strand starting at position 1705 of SEQ ID NO: 1562224
uccugcgauuccuuccaau

SEQ ID NO: 1731430 - RNA, 19 nt, Artificial Sequence
  Description of Artificial Sequence: Synthetic oligonucleotide
  Antisense strand to SEQ ID NO: 1731429
auuggaaggaaucgcagga

SEQ ID NO: 1731431 - RNA, 19 nt, Artificial Sequence
  Description of Artificial Sequence: Synthetic oligonucleotide
  Sense strand starting at position 1815 of SEQ ID NO: 1562224
acgccauguuccucaauaa

SEQ ID NO: 1731432 - RNA, 19 nt, Artificial Sequence
  Description of Artificial Sequence: Synthetic oligonucleotide
  Antisense strand to SEQ ID NO: 1731431
uuauugaggaacauggcgu

SEQ ID NO: 1731433 - RNA, 19 nt, Artificial Sequence
  Description of Artificial Sequence: Synthetic oligonucleotide
  Sense strand starting at position 1816 of SEQ ID NO: 1562224
cgccauguuccucaauaac

SEQ ID NO: 1731434 - RNA, 19 nt, Artificial Sequence
  Description of Artificial Sequence: Synthetic oligonucleotide
  Antisense strand to SEQ ID NO: 1731433
guuauugaggaacauggcg

SEQ ID NO: 1731435 - RNA, 19 nt, Artificial Sequence
  Description of Artificial Sequence: Synthetic oligonucleotide
  Sense strand starting at position 1830 of SEQ ID NO: 1562224
auaaccauuuccgggugaa

SEQ ID NO: 1731436 - RNA, 19 nt, Artificial Sequence
  Description of Artificial Sequence: Synthetic oligonucleotide
  Antisense strand to SEQ ID NO: 1731435
uucacccggaaaugguuau

SEQ ID NO: 1731437 - RNA, 19 nt, Artificial Sequence
  Description of Artificial Sequence: Synthetic oligonucleotide
  Sense strand starting at position 1840 of SEQ ID NO: 1562224
ccgggugaagagugaguuu

SEQ ID NO: 1731438 - RNA, 19 nt, Artificial Sequence
  Description of Artificial Sequence: Synthetic oligonucleotide
  Antisense strand to SEQ ID NO: 1731437
aaacucacucuucacccgg

SEQ ID NO: 1731439 - RNA, 19 nt, Artificial Sequence
  Description of Artificial Sequence: Synthetic oligonucleotide
  Sense strand starting at position 2574 of SEQ ID NO: 1562224
cggucaugugccgaucuga

SEQ ID NO: 1731440 - RNA, 19 nt, Artificial Sequence
  Description of Artificial Sequence: Synthetic oligonucleotide
  Antisense strand to SEQ ID NO: 1731439
ucagaucggcacaugaccg

SEQ ID NO: 1731441 - RNA, 19 nt, Artificial Sequence
  Description of Artificial Sequence: Synthetic oligonucleotide
  Sense strand starting at position 2585 of SEQ ID NO: 1562224
cgaucugaagccugguaga

SEQ ID NO: 1731442 - RNA, 19 nt, Artificial Sequence
  Description of Artificial Sequence: Synthetic oligonucleotide
  Antisense strand to SEQ ID NO: 1731441
ucuaccaggcuucagaucg

SEQ ID NO: 1731443 - RNA, 19 nt, Artificial Sequence
  Description of Artificial Sequence: Synthetic oligonucleotide
  Sense strand starting at position 2643 of SEQ ID NO: 1562224
agggaaacaucuuugcaua

SEQ ID NO: 1731444 - RNA, 19 nt, Artificial Sequence
  Description of Artificial Sequence: Synthetic oligonucleotide
  Antisense strand to SEQ ID NO: 1731443
uaugcaaagauguuucccu

SEQ ID NO: 1731445 - RNA, 19 nt, Artificial Sequence
  Description of Artificial Sequence: Synthetic oligonucleotide
  Sense strand starting at position 2644 of SEQ ID NO: 1562224
gggaaacaucuuugcauau

SEQ ID NO: 1731446 - RNA, 19 nt, Artificial Sequence
  Description of Artificial Sequence: Synthetic oligonucleotide
  Antisense strand to SEQ ID NO: 1731445
auaugcaaagauguuuccc

SEQ ID NO: 1731447 - RNA, 19 nt, Artificial Sequence
  Description of Artificial Sequence: Synthetic oligonucleotide
  Sense strand starting at position 2645 of SEQ ID NO: 1562224
ggaaacaucuuugcauauu

SEQ ID NO: 1731448 - RNA, 19 nt, Artificial Sequence
  Description of Artificial Sequence: Synthetic oligonucleotide
  Antisense strand to SEQ ID NO: 1731447
aauaugcaaagauguuucc

SEQ ID NO: 1731449 - RNA, 19 nt, Artificial Sequence
  Description of Artificial Sequence: Synthetic oligonucleotide
  Sense strand starting at position 3064 of SEQ ID NO: 1562224
guagaagacuccucuucca

SEQ ID NO: 1731450 - RNA, 19 nt, Artificial Sequence
  Description of Artificial Sequence: Synthetic oligonucleotide
  Antisense strand to SEQ ID NO: 1731449
uggaagaggagucuucuac

SEQ ID NO: 1731451 - RNA, 19 nt, Artificial Sequence
  Description of Artificial Sequence: Synthetic oligonucleotide
  Sense strand starting at position 3189 of SEQ ID NO: 1562224
ccuauugagucuucccuau

SEQ ID NO: 1731452 - RNA, 19 nt, Artificial Sequence
  Description of Artificial Sequence: Synthetic oligonucleotide
  Antisense strand to SEQ ID NO: 1731451
auagggaagacucaauagg

SEQ ID NO: 1731453 - RNA, 19 nt, Artificial Sequence
  Description of Artificial Sequence: Synthetic oligonucleotide
  Sense strand starting at position 3201 of SEQ ID NO: 1562224
ucccuaugugcugaacaca

SEQ ID NO: 1731454 - RNA, 19 nt, Artificial Sequence
  Description of Artificial Sequence: Synthetic oligonucleotide
  Antisense strand to SEQ ID NO: 1731453
uguguucagcacauaggga

SEQ ID NO: 1731455 - RNA, 19 nt, Artificial Sequence
  Description of Artificial Sequence: Synthetic oligonucleotide
  Sense strand starting at position 3295 of SEQ ID NO: 1562224
gagcuacuuugguuagguu

SEQ ID NO: 1731456 - RNA, 19 nt, Artificial Sequence
  Description of Artificial Sequence: Synthetic oligonucleotide
  Antisense strand to SEQ ID NO: 1731455
aaccuaaccaaaguagcuc

SEQ ID NO: 1731457 - RNA, 19 nt, Artificial Sequence
  Description of Artificial Sequence: Synthetic oligonucleotide
  Sense strand starting at position 3326 of SEQ ID NO: 1562224
ccaagaaagugacauguaa

SEQ ID NO: 1731458 - RNA, 19 nt, Artificial Sequence
  Description of Artificial Sequence: Synthetic oligonucleotide
  Antisense strand to SEQ ID NO: 1731457
uuacaugucacuuucuugg

SEQ ID NO: 1731459 - RNA, 19 nt, Artificial Sequence
  Description of Artificial Sequence: Synthetic oligonucleotide
  Sense strand starting at position 3333 of SEQ ID NO: 1562224
agugacauguaagaugaaa

SEQ ID NO: 1731460 - RNA, 19 nt, Artificial Sequence
  Description of Artificial Sequence: Synthetic oligonucleotide
  Antisense strand to SEQ ID NO: 1731459
uuucaucuuacaugucacu

SEQ ID NO: 1731461 - RNA, 19 nt, Artificial Sequence
  Description of Artificial Sequence: Synthetic oligonucleotide
  Sense strand starting at position 3367 of SEQ ID NO: 1562224
ggagcuagucaugggaaau

SEQ ID NO: 1731462 - RNA, 19 nt, Artificial Sequence
  Description of Artificial Sequence: Synthetic oligonucleotide
  Antisense strand to SEQ ID NO: 1731461
auuucccaugacuagcucc

SEQ ID NO: 1731463 - RNA, 19 nt, Artificial Sequence
  Description of Artificial Sequence: Synthetic oligonucleotide
  Sense strand starting at position 3854 of SEQ ID NO: 1562224
uugugcuggaaauguuuaa

SEQ ID NO: 1731464 - RNA, 19 nt, Artificial Sequence
  Description of Artificial Sequence: Synthetic oligonucleotide
  Antisense strand to SEQ ID NO: 1731463
uuaaacauuuccagcacaa

SEQ ID NO: 1731465 - RNA, 19 nt, Artificial Sequence
  Description of Artificial Sequence: Synthetic oligonucleotide
  Sense strand starting at position 3919 of SEQ ID NO: 1562224
uggguauagucaccauguu

SEQ ID NO: 1731466 - RNA, 19 nt, Artificial Sequence
  Description of Artificial Sequence: Synthetic oligonucleotide
  Antisense strand to SEQ ID NO: 1731465
aacauggugacuauaccca

SEQ ID NO: 1731467 - RNA, 19 nt, Artificial Sequence
  Description of Artificial Sequence: Synthetic oligonucleotide
  Sense strand starting at position 3920 of SEQ ID NO: 1562224
ggguauagucaccauguua

SEQ ID NO: 1731468 - RNA, 19 nt, Artificial Sequence
  Description of Artificial Sequence: Synthetic oligonucleotide
  Antisense strand to SEQ ID NO: 1731467
uaacauggugacuauaccc

SEQ ID NO: 1731469 - RNA, 19 nt, Artificial Sequence
  Description of Artificial Sequence: Synthetic oligonucleotide
  Sense strand starting at position 179 of SEQ ID NO: 1562225
uuugguucucuguaaauuc

SEQ ID NO: 1731470 - RNA, 19 nt, Artificial Sequence
  Description of Artificial Sequence: Synthetic oligonucleotide
  Antisense strand to SEQ ID NO: 1731469
gaauuuacagagaaccaaa

SEQ ID NO: 1731471 - RNA, 19 nt, Artificial Sequence
  Description of Artificial Sequence: Synthetic oligonucleotide
  Sense strand starting at position 207 of SEQ ID NO: 1562225
ucacauuguuaacuuggaa

SEQ ID NO: 1731472 - RNA, 19 nt, Artificial Sequence
  Description of Artificial Sequence: Synthetic oligonucleotide
  Antisense strand to SEQ ID NO: 1731471
uuccaaguuaacaauguga

SEQ ID NO: 1731473 - RNA, 19 nt, Artificial Sequence
  Description of Artificial Sequence: Synthetic oligonucleotide
  Sense strand starting at position 251 of SEQ ID NO: 1562225
aguauuucccagcgaucag

SEQ ID NO: 1731474 - RNA, 19 nt, Artificial Sequence
  Description of Artificial Sequence: Synthetic oligonucleotide
  Antisense strand to SEQ ID NO: 1731473
cugaucgcugggaaauacu

SEQ ID NO: 1731475 - RNA, 19 nt, Artificial Sequence
  Description of Artificial Sequence: Synthetic oligonucleotide
  Sense strand starting at position 280 of SEQ ID NO: 1562225
gguuaagagcgugaacucu

SEQ ID NO: 1731476 - RNA, 19 nt, Artificial Sequence
  Description of Artificial Sequence: Synthetic oligonucleotide
  Antisense strand to SEQ ID NO: 1731475
agaguucacgcucuuaacc

SEQ ID NO: 1731477 - RNA, 19 nt, Artificial Sequence
  Description of Artificial Sequence: Synthetic oligonucleotide
  Sense strand starting at position 332 of SEQ ID NO: 1562225
ggguaacuuuggguaaguu

SEQ ID NO: 1731478 - RNA, 19 nt, Artificial Sequence
  Description of Artificial Sequence: Synthetic oligonucleotide
  Antisense strand to SEQ ID NO: 1731477
aacuuacccaaaguuaccc

SEQ ID NO: 1731479 - RNA, 19 nt, Artificial Sequence
  Description of Artificial Sequence: Synthetic oligonucleotide
  Sense strand starting at position 333 of SEQ ID NO: 1562225
gguaacuuuggguaaguua

SEQ ID NO: 1731480 - RNA, 19 nt, Artificial Sequence
  Description of Artificial Sequence: Synthetic oligonucleotide
  Antisense strand to SEQ ID NO: 1731479
uaacuuacccaaaguuacc

SEQ ID NO: 1731481 - RNA, 19 nt, Artificial Sequence
  Description of Artificial Sequence: Synthetic oligonucleotide
  Sense strand starting at position 562 of SEQ ID NO: 1562225
uugucuguccucgucggaa

SEQ ID NO: 1731482 - RNA, 19 nt, Artificial Sequence
  Description of Artificial Sequence: Synthetic oligonucleotide
  Antisense strand to SEQ ID NO: 1731481
uuccgacgaggacagacaa

SEQ ID NO: 1731483 - RNA, 19 nt, Artificial Sequence
  Description of Artificial Sequence: Synthetic oligonucleotide
  Sense strand starting at position 578 of SEQ ID NO: 1562225
gaagguaagcucugugaga

SEQ ID NO: 1731484 - RNA, 19 nt, Artificial Sequence
  Description of Artificial Sequence: Synthetic oligonucleotide
  Antisense strand to SEQ ID NO: 1731483
ucucacagagcuuaccuuc

SEQ ID NO: 1731485 - RNA, 19 nt, Artificial Sequence
  Description of Artificial Sequence: Synthetic oligonucleotide
  Sense strand starting at position 579 of SEQ ID NO: 1562225
aagguaagcucugugagag

SEQ ID NO: 1731486 - RNA, 19 nt, Artificial Sequence
  Description of Artificial Sequence: Synthetic oligonucleotide
  Antisense strand to SEQ ID NO: 1731485
cucucacagagcuuaccuu

SEQ ID NO: 1731487 - RNA, 19 nt, Artificial Sequence
  Description of Artificial Sequence: Synthetic oligonucleotide
  Sense strand starting at position 603 of SEQ ID NO: 1562225
gccuuaucugucuugugca

SEQ ID NO: 1731488 - RNA, 19 nt, Artificial Sequence
  Description of Artificial Sequence: Synthetic oligonucleotide
  Antisense strand to SEQ ID NO: 1731487
ugcacaagacagauaaggc

SEQ ID NO: 1731489 - RNA, 19 nt, Artificial Sequence
  Description of Artificial Sequence: Synthetic oligonucleotide
  Sense strand starting at position 670 of SEQ ID NO: 1562225
aaagaaugagcaugucaga

SEQ ID NO: 1731490 - RNA, 19 nt, Artificial Sequence
  Description of Artificial Sequence: Synthetic oligonucleotide
  Antisense strand to SEQ ID NO: 1731489
ucugacaugcucauucuuu

SEQ ID NO: 1731491 - RNA, 19 nt, Artificial Sequence
  Description of Artificial Sequence: Synthetic oligonucleotide
  Sense strand starting at position 783 of SEQ ID NO: 1562225
gguaauaguaucugggaga

SEQ ID NO: 1731492 - RNA, 19 nt, Artificial Sequence
  Description of Artificial Sequence: Synthetic oligonucleotide
  Antisense strand to SEQ ID NO: 1731491
ucucccagauacuauuacc

SEQ ID NO: 1731493 - RNA, 19 nt, Artificial Sequence
  Description of Artificial Sequence: Synthetic oligonucleotide
  Sense strand starting at position 938 of SEQ ID NO: 1562225
gcccaaucccaucagaagu

SEQ ID NO: 1731494 - RNA, 19 nt, Artificial Sequence
  Description of Artificial Sequence: Synthetic oligonucleotide
  Antisense strand to SEQ ID NO: 1731493
acuucugaugggauugggc

SEQ ID NO: 1731495 - RNA, 19 nt, Artificial Sequence
  Description of Artificial Sequence: Synthetic oligonucleotide
  Sense strand starting at position 962 of SEQ ID NO: 1562225
ggagguucauuuguugguu

SEQ ID NO: 1731496 - RNA, 19 nt, Artificial Sequence
  Description of Artificial Sequence: Synthetic oligonucleotide
  Antisense strand to SEQ ID NO: 1731495
aaccaacaaaugaaccucc

SEQ ID NO: 1731497 - RNA, 19 nt, Artificial Sequence
  Description of Artificial Sequence: Synthetic oligonucleotide
  Sense strand starting at position 1011 of SEQ ID NO: 1562225
uuuauuuacuaggcguaua

SEQ ID NO: 1731498 - RNA, 19 nt, Artificial Sequence
  Description of Artificial Sequence: Synthetic oligonucleotide
  Antisense strand to SEQ ID NO: 1731497
uauacgccuaguaaauaaa

SEQ ID NO: 1731499 - RNA, 19 nt, Artificial Sequence
  Description of Artificial Sequence: Synthetic oligonucleotide
  Sense strand starting at position 2168 of SEQ ID NO: 1562225
gccagcuucguguuaagug

SEQ ID NO: 1731500 - RNA, 19 nt, Artificial Sequence
  Description of Artificial Sequence: Synthetic oligonucleotide
  Antisense strand to SEQ ID NO: 1731499
cacuuaacacgaagcuggc

SEQ ID NO: 1731501 - RNA, 19 nt, Artificial Sequence
  Description of Artificial Sequence: Synthetic oligonucleotide
  Sense strand starting at position 2175 of SEQ ID NO: 1562225
ucguguuaagugcuuuauu

SEQ ID NO: 1731502 - RNA, 19 nt, Artificial Sequence
  Description of Artificial Sequence: Synthetic oligonucleotide
  Antisense strand to SEQ ID NO: 1731501
aauaaagcacuuaacacga

SEQ ID NO: 1731503 - RNA, 19 nt, Artificial Sequence
  Description of Artificial Sequence: Synthetic oligonucleotide
  Sense strand starting at position 2271 of SEQ ID NO: 1562225
uagugaaaguacuuaguau

SEQ ID NO: 1731504 - RNA, 19 nt, Artificial Sequence
  Description of Artificial Sequence: Synthetic oligonucleotide
  Antisense strand to SEQ ID NO: 1731503
auacuaaguacuuucacua

SEQ ID NO: 1731505 - RNA, 19 nt, Artificial Sequence
  Description of Artificial Sequence: Synthetic oligonucleotide
  Sense strand starting at position 2272 of SEQ ID NO: 1562225
agugaaaguacuuaguaua

SEQ ID NO: 1731506 - RNA, 19 nt, Artificial Sequence
  Description of Artificial Sequence: Synthetic oligonucleotide
  Antisense strand to SEQ ID NO: 1731505
uauacuaaguacuuucacu

SEQ ID NO: 1731507 - RNA, 19 nt, Artificial Sequence
  Description of Artificial Sequence: Synthetic oligonucleotide
  Sense strand starting at position 2296 of SEQ ID NO: 1562225
aauguuuaugggugaguga

SEQ ID NO: 1731508 - RNA, 19 nt, Artificial Sequence
  Description of Artificial Sequence: Synthetic oligonucleotide
  Antisense strand to SEQ ID NO: 1731507
ucacucacccauaaacauu

SEQ ID NO: 1731509 - RNA, 19 nt, Artificial Sequence
  Description of Artificial Sequence: Synthetic oligonucleotide
  Sense strand starting at position 2297 of SEQ ID NO: 1562225
auguuuaugggugagugau

SEQ ID NO: 1731510 - RNA, 19 nt, Artificial Sequence
  Description of Artificial Sequence: Synthetic oligonucleotide
  Antisense strand to SEQ ID NO: 1731509
aucacucacccauaaacau

SEQ ID NO: 1731511 - RNA, 19 nt, Artificial Sequence
  Description of Artificial Sequence: Synthetic oligonucleotide
  Sense strand starting at position 2299 of SEQ ID NO: 1562225
guuuaugggugagugauau

SEQ ID NO: 1731512 - RNA, 19 nt, Artificial Sequence
  Description of Artificial Sequence: Synthetic oligonucleotide
  Antisense strand to SEQ ID NO: 1731511
auaucacucacccauaaac

SEQ ID NO: 1731513 - RNA, 19 nt, Artificial Sequence
  Description of Artificial Sequence: Synthetic oligonucleotide
  Sense strand starting at position 2452 of SEQ ID NO: 1562225
acguuaaauguuuacuaug

SEQ ID NO: 1731514 - RNA, 19 nt, Artificial Sequence
  Description of Artificial Sequence: Synthetic oligonucleotide
  Antisense strand to SEQ ID NO: 1731513
cauaguaaacauuuaacgu

SEQ ID NO: 1731515 - RNA, 19 nt, Artificial Sequence
  Description of Artificial Sequence: Synthetic oligonucleotide
  Sense strand starting at position 2483 of SEQ ID NO: 1562225
ugcugaauucuuuacuagu

SEQ ID NO: 1731516 - RNA, 19 nt, Artificial Sequence
  Description of Artificial Sequence: Synthetic oligonucleotide
  Antisense strand to SEQ ID NO: 1731515
acuaguaaagaauucagca

SEQ ID NO: 1731517 - RNA, 19 nt, Artificial Sequence
  Description of Artificial Sequence: Synthetic oligonucleotide
  Sense strand starting at position 2573 of SEQ ID NO: 1562225
uuuacuauagccuagugaa

SEQ ID NO: 1731518 - RNA, 19 nt, Artificial Sequence
  Description of Artificial Sequence: Synthetic oligonucleotide
  Antisense strand to SEQ ID NO: 1731517
uucacuaggcuauaguaaa

SEQ ID NO: 1731519 - RNA, 19 nt, Artificial Sequence
  Description of Artificial Sequence: Synthetic oligonucleotide
  Sense strand starting at position 2614 of SEQ ID NO: 1562225
ccacacacguaaguuaaau

SEQ ID NO: 1731520 - RNA, 19 nt, Artificial Sequence
  Description of Artificial Sequence: Synthetic oligonucleotide
  Antisense strand to SEQ ID NO: 1731519
auuuaacuuacgugugugg

SEQ ID NO: 1731521 - RNA, 19 nt, Artificial Sequence
  Description of Artificial Sequence: Synthetic oligonucleotide
  Sense strand starting at position 2656 of SEQ ID NO: 1562225
agaucugcuugaccucaaa

SEQ ID NO: 1731522 - RNA, 19 nt, Artificial Sequence
  Description of Artificial Sequence: Synthetic oligonucleotide
  Antisense strand to SEQ ID NO: 1731521
uuugaggucaagcagaucu

SEQ ID NO: 1731523 - RNA, 19 nt, Artificial Sequence
  Description of Artificial Sequence: Synthetic oligonucleotide
  Sense strand starting at position 2687 of SEQ ID NO: 1562225
acaucaugauuaccguuua

SEQ ID NO: 1731524 - RNA, 19 nt, Artificial Sequence
  Description of Artificial Sequence: Synthetic oligonucleotide
  Antisense strand to SEQ ID NO: 1731523
uaaacgguaaucaugaugu

SEQ ID NO: 1731525 - RNA, 19 nt, Artificial Sequence
  Description of Artificial Sequence: Synthetic oligonucleotide
  Sense strand starting at position 2692 of SEQ ID NO: 1562225
augauuaccguuuaaauug

SEQ ID NO: 1731526 - RNA, 19 nt, Artificial Sequence
  Description of Artificial Sequence: Synthetic oligonucleotide
  Antisense strand to SEQ ID NO: 1731525
caauuuaaacgguaaucau

SEQ ID NO: 1731527 - RNA, 19 nt, Artificial Sequence
  Description of Artificial Sequence: Synthetic oligonucleotide
  Sense strand starting at position 2723 of SEQ ID NO: 1562225
uuauguuuacuauggaagu

SEQ ID NO: 1731528 - RNA, 19 nt, Artificial Sequence
  Description of Artificial Sequence: Synthetic oligonucleotide
  Antisense strand to SEQ ID NO: 1731527
acuuccauaguaaacauaa

SEQ ID NO: 1731529 - RNA, 19 nt, Artificial Sequence
  Description of Artificial Sequence: Synthetic oligonucleotide
  Sense strand starting at position 2784 of SEQ ID NO: 1562225
gugagacaaauguggcaaa

SEQ ID NO: 1731530 - RNA, 19 nt, Artificial Sequence
  Description of Artificial Sequence: Synthetic oligonucleotide
  Antisense strand to SEQ ID NO: 1731529
uuugccacauuugucucac

SEQ ID NO: 1731531 - RNA, 19 nt, Artificial Sequence
  Description of Artificial Sequence: Synthetic oligonucleotide
  Sense strand starting at position 3138 of SEQ ID NO: 1562225
gcauacuuaccuugugaaa

SEQ ID NO: 1731532 - RNA, 19 nt, Artificial Sequence
  Description of Artificial Sequence: Synthetic oligonucleotide
  Antisense strand to SEQ ID NO: 1731531
uuucacaagguaaguaugc

SEQ ID NO: 1731533 - RNA, 19 nt, Artificial Sequence
  Description of Artificial Sequence: Synthetic oligonucleotide
  Sense strand starting at position 3151 of SEQ ID NO: 1562225
gugaaaguccaauaucuuu

SEQ ID NO: 1731534 - RNA, 19 nt, Artificial Sequence
  Description of Artificial Sequence: Synthetic oligonucleotide
  Antisense strand to SEQ ID NO: 1731533
aaagauauuggacuuucac

SEQ ID NO: 1731535 - RNA, 19 nt, Artificial Sequence
  Description of Artificial Sequence: Synthetic oligonucleotide
  Sense strand starting at position 3218 of SEQ ID NO: 1562225
uuuggaguacuuuaaucac

SEQ ID NO: 1731536 - RNA, 19 nt, Artificial Sequence
  Description of Artificial Sequence: Synthetic oligonucleotide
  Antisense strand to SEQ ID NO: 1731535
gugauuaaaguacuccaaa

SEQ ID NO: 1731537 - RNA, 19 nt, Artificial Sequence
  Description of Artificial Sequence: Synthetic oligonucleotide
  Sense strand starting at position 3221 of SEQ ID NO: 1562225
ggaguacuuuaaucaccca

SEQ ID NO: 1731538 - RNA, 19 nt, Artificial Sequence
  Description of Artificial Sequence: Synthetic oligonucleotide
  Antisense strand to SEQ ID NO: 1731537
ugggugauuaaaguacucc

SEQ ID NO: 1731539 - RNA, 19 nt, Artificial Sequence
  Description of Artificial Sequence: Synthetic oligonucleotide
  Sense strand starting at position 3329 of SEQ ID NO: 1562225
agucaacauuaguuuagau

SEQ ID NO: 1731540 - RNA, 19 nt, Artificial Sequence
  Description of Artificial Sequence: Synthetic oligonucleotide
  Antisense strand to SEQ ID NO: 1731539
aucuaaacuaauguugacu

SEQ ID NO: 1731541 - RNA, 19 nt, Artificial Sequence
  Description of Artificial Sequence: Synthetic oligonucleotide
  Sense strand starting at position 3428 of SEQ ID NO: 1562225
ugagguaaauccuuuaaau

SEQ ID NO: 1731542 - RNA, 19 nt, Artificial Sequence
  Description of Artificial Sequence: Synthetic oligonucleotide
  Antisense strand to SEQ ID NO: 1731541
auuuaaaggauuuaccuca

SEQ ID NO: 1731543 - RNA, 19 nt, Artificial Sequence
  Description of Artificial Sequence: Synthetic oligonucleotide
  Sense strand starting at position 3832 of SEQ ID NO: 1562225
gcccuuguucuugacagau

SEQ ID NO: 1731544 - RNA, 19 nt, Artificial Sequence
  Description of Artificial Sequence: Synthetic oligonucleotide
  Antisense strand to SEQ ID NO: 1731543
aucugucaagaacaagggc

SEQ ID NO: 1731545 - RNA, 19 nt, Artificial Sequence
  Description of Artificial Sequence: Synthetic oligonucleotide
  Sense strand starting at position 3928 of SEQ ID NO: 1562225
cucauugcuccucaggagu

SEQ ID NO: 1731546 - RNA, 19 nt, Artificial Sequence
  Description of Artificial Sequence: Synthetic oligonucleotide
  Antisense strand to SEQ ID NO: 1731545
acuccugaggagcaaugag

SEQ ID NO: 1731547 - RNA, 19 nt, Artificial Sequence
  Description of Artificial Sequence: Synthetic oligonucleotide
  Sense strand starting at position 3939 of SEQ ID NO: 1562225
ucaggaguccagugacaau

SEQ ID NO: 1731548 - RNA, 19 nt, Artificial Sequence
  Description of Artificial Sequence: Synthetic oligonucleotide
  Antisense strand to SEQ ID NO: 1731547
auugucacuggacuccuga

SEQ ID NO: 1731549 - RNA, 19 nt, Artificial Sequence
  Description of Artificial Sequence: Synthetic oligonucleotide
  Sense strand starting at position 438 of SEQ ID NO: 1562226
guucuaacaucggucccua

SEQ ID NO: 1731550 - RNA, 19 nt, Artificial Sequence
  Description of Artificial Sequence: Synthetic oligonucleotide
  Antisense strand to SEQ ID NO: 1731549
uagggaccgauguuagaac

SEQ ID NO: 1731551 - RNA, 19 nt, Artificial Sequence
  Description of Artificial Sequence: Synthetic oligonucleotide
  Sense strand starting at position 532 of SEQ ID NO: 1562226
caaagcucggcccaguaaa

SEQ ID NO: 1731552 - RNA, 19 nt, Artificial Sequence
  Description of Artificial Sequence: Synthetic oligonucleotide
  Antisense strand to SEQ ID NO: 1731551
uuuacugggccgagcuuug

SEQ ID NO: 1731553 - RNA, 19 nt, Artificial Sequence
  Description of Artificial Sequence: Synthetic oligonucleotide
  Sense strand starting at position 600 of SEQ ID NO: 1562226
cuaaauaugcacuggugau

SEQ ID NO: 1731554 - RNA, 19 nt, Artificial Sequence
  Description of Artificial Sequence: Synthetic oligonucleotide
  Antisense strand to SEQ ID NO: 1731553
aucaccagugcauauuuag

SEQ ID NO: 1731555 - RNA, 19 nt, Artificial Sequence
  Description of Artificial Sequence: Synthetic oligonucleotide
  Sense strand starting at position 696 of SEQ ID NO: 1562226
uggauagauugcuuaaggu

SEQ ID NO: 1731556 - RNA, 19 nt, Artificial Sequence
  Description of Artificial Sequence: Synthetic oligonucleotide
  Antisense strand to SEQ ID NO: 1731555
accuuaagcaaucuaucca

SEQ ID NO: 1731557 - RNA, 19 nt, Artificial Sequence
  Description of Artificial Sequence: Synthetic oligonucleotide
  Sense strand starting at position 945 of SEQ ID NO: 1562226
ccugaaggagccugguuua

SEQ ID NO: 1731558 - RNA, 19 nt, Artificial Sequence
  Description of Artificial Sequence: Synthetic oligonucleotide
  Antisense strand to SEQ ID NO: 1731557
uaaaccaggcuccuucagg

SEQ ID NO: 1731559 - RNA, 19 nt, Artificial Sequence
  Description of Artificial Sequence: Synthetic oligonucleotide
  Sense strand starting at position 977 of SEQ ID NO: 1562226
auacaaaugucgccuaaau

SEQ ID NO: 1731560 - RNA, 19 nt, Artificial Sequence
  Description of Artificial Sequence: Synthetic oligonucleotide
  Antisense strand to SEQ ID NO: 1731559
auuuaggcgacauuuguau

SEQ ID NO: 1731561 - RNA, 19 nt, Artificial Sequence
  Description of Artificial Sequence: Synthetic oligonucleotide
  Sense strand starting at position 979 of SEQ ID NO: 1562226
acaaaugucgccuaaauau

SEQ ID NO: 1731562 - RNA, 19 nt, Artificial Sequence
  Description of Artificial Sequence: Synthetic oligonucleotide
  Antisense strand to SEQ ID NO: 1731561
auauuuaggcgacauuugu

SEQ ID NO: 1731563 - RNA, 19 nt, Artificial Sequence
  Description of Artificial Sequence: Synthetic oligonucleotide
  Sense strand starting at position 1036 of SEQ ID NO: 1562226
cagugaggcccacaggauu

SEQ ID NO: 1731564 - RNA, 19 nt, Artificial Sequence
  Description of Artificial Sequence: Synthetic oligonucleotide
  Antisense strand to SEQ ID NO: 1731563
aauccugugggccucacug

SEQ ID NO: 1731565 - RNA, 19 nt, Artificial Sequence
  Description of Artificial Sequence: Synthetic oligonucleotide
  Sense strand starting at position 1177 of SEQ ID NO: 1562226
ugguuagggccuuguaauu

SEQ ID NO: 1731566 - RNA, 19 nt, Artificial Sequence
  Description of Artificial Sequence: Synthetic oligonucleotide
  Antisense strand to SEQ ID NO: 1731565
aauuacaaggcccuaacca

SEQ ID NO: 1731567 - RNA, 19 nt, Artificial Sequence
  Description of Artificial Sequence: Synthetic oligonucleotide
  Sense strand starting at position 1200 of SEQ ID NO: 1562226
gcagcuggaacgcaagauu

SEQ ID NO: 1731568 - RNA, 19 nt, Artificial Sequence
  Description of Artificial Sequence: Synthetic oligonucleotide
  Antisense strand to SEQ ID NO: 1731567
aaucuugcguuccagcugc

SEQ ID NO: 1731569 - RNA, 19 nt, Artificial Sequence
  Description of Artificial Sequence: Synthetic oligonucleotide
  Sense strand starting at position 1325 of SEQ ID NO: 1562226
auccuaaucuggguaacga

SEQ ID NO: 1731570 - RNA, 19 nt, Artificial Sequence
  Description of Artificial Sequence: Synthetic oligonucleotide
  Antisense strand to SEQ ID NO: 1731569
ucguuacccagauuaggau

SEQ ID NO: 1731571 - RNA, 19 nt, Artificial Sequence
  Description of Artificial Sequence: Synthetic oligonucleotide
  Sense strand starting at position 1326 of SEQ ID NO: 1562226
uccuaaucuggguaacgau

SEQ ID NO: 1731572 - RNA, 19 nt, Artificial Sequence
  Description of Artificial Sequence: Synthetic oligonucleotide
  Antisense strand to SEQ ID NO: 1731571
aucguuacccagauuagga

SEQ ID NO: 1731573 - RNA, 19 nt, Artificial Sequence
  Description of Artificial Sequence: Synthetic oligonucleotide
  Sense strand starting at position 1338 of SEQ ID NO: 1562226
uaacgauguaacggguuua

SEQ ID NO: 1731574 - RNA, 19 nt, Artificial Sequence
  Description of Artificial Sequence: Synthetic oligonucleotide
  Antisense strand to SEQ ID NO: 1731573
uaaacccguuacaucguua

SEQ ID NO: 1731575 - RNA, 19 nt, Artificial Sequence
  Description of Artificial Sequence: Synthetic oligonucleotide
  Sense strand starting at position 1440 of SEQ ID NO: 1562226
ccgggauucacggacgacu

SEQ ID NO: 1731576 - RNA, 19 nt, Artificial Sequence
  Description of Artificial Sequence: Synthetic oligonucleotide
  Antisense strand to SEQ ID NO: 1731575
agucguccgugaaucccgg

SEQ ID NO: 1731577 - RNA, 19 nt, Artificial Sequence
  Description of Artificial Sequence: Synthetic oligonucleotide
  Sense strand starting at position 1550 of SEQ ID NO: 1562226
agcacuuuccggcaggaga

SEQ ID NO: 1731578 - RNA, 19 nt, Artificial Sequence
  Description of Artificial Sequence: Synthetic oligonucleotide
  Antisense strand to SEQ ID NO: 1731577
ucuccugccggaaagugcu

SEQ ID NO: 1731579 - RNA, 19 nt, Artificial Sequence
  Description of Artificial Sequence: Synthetic oligonucleotide
  Sense strand starting at position 1606 of SEQ ID NO: 1562226
gcgagaucugagcaucuuu

SEQ ID NO: 1731580 - RNA, 19 nt, Artificial Sequence
  Description of Artificial Sequence: Synthetic oligonucleotide
  Antisense strand to SEQ ID NO: 1731579
aaagaugcucagaucucgc

SEQ ID NO: 1731581 - RNA, 19 nt, Artificial Sequence
  Description of Artificial Sequence: Synthetic oligonucleotide
  Sense strand starting at position 1616 of SEQ ID NO: 1562226
agcaucuuuccggaggcua

SEQ ID NO: 1731582 - RNA, 19 nt, Artificial Sequence
  Description of Artificial Sequence: Synthetic oligonucleotide
  Antisense strand to SEQ ID NO: 1731581
uagccuccggaaagaugcu

SEQ ID NO: 1731583 - RNA, 19 nt, Artificial Sequence
  Description of Artificial Sequence: Synthetic oligonucleotide
  Sense strand starting at position 2354 of SEQ ID NO: 1562226
gggagcuuugcagaaccga

SEQ ID NO: 1731584 - RNA, 19 nt, Artificial Sequence
  Description of Artificial Sequence: Synthetic oligonucleotide
  Antisense strand to SEQ ID NO: 1731583
ucgguucugcaaagcuccc

SEQ ID NO: 1731585 - RNA, 19 nt, Artificial Sequence
  Description of Artificial Sequence: Synthetic oligonucleotide
  Sense strand starting at position 2878 of SEQ ID NO: 1562226
caacaaguucguggucauc

SEQ ID NO: 1731586 - RNA, 19 nt, Artificial Sequence
  Description of Artificial Sequence: Synthetic oligonucleotide
  Antisense strand to SEQ ID NO: 1731585
gaugaccacgaacuuguug

SEQ ID NO: 1731587 - RNA, 19 nt, Artificial Sequence
  Description of Artificial Sequence: Synthetic oligonucleotide
  Sense strand starting at position 3011 of SEQ ID NO: 1562226
uggucuguuccguccagua

SEQ ID NO: 1731588 - RNA, 19 nt, Artificial Sequence
  Description of Artificial Sequence: Synthetic oligonucleotide
  Antisense strand to SEQ ID NO: 1731587
uacuggacggaacagacca

SEQ ID NO: 1731589 - RNA, 19 nt, Artificial Sequence
  Description of Artificial Sequence: Synthetic oligonucleotide
  Sense strand starting at position 3065 of SEQ ID NO: 1562226
ggaguccugacagguguaa

SEQ ID NO: 1731590 - RNA, 19 nt, Artificial Sequence
  Description of Artificial Sequence: Synthetic oligonucleotide
  Antisense strand to SEQ ID NO: 1731589
uuacaccugucaggacucc

SEQ ID NO: 1731591 - RNA, 19 nt, Artificial Sequence
  Description of Artificial Sequence: Synthetic oligonucleotide
  Sense strand starting at position 3067 of SEQ ID NO: 1562226
aguccugacagguguaaua

SEQ ID NO: 1731592 - RNA, 19 nt, Artificial Sequence
  Description of Artificial Sequence: Synthetic oligonucleotide
  Antisense strand to SEQ ID NO: 1731591
uauuacaccugucaggacu

SEQ ID NO: 1731593 - RNA, 19 nt, Artificial Sequence
  Description of Artificial Sequence: Synthetic oligonucleotide
  Sense strand starting at position 3069 of SEQ ID NO: 1562226
uccugacagguguaauaac

SEQ ID NO: 1731594 - RNA, 19 nt, Artificial Sequence
  Description of Artificial Sequence: Synthetic oligonucleotide
  Antisense strand to SEQ ID NO: 1731593
guuauuacaccugucagga

SEQ ID NO: 1731595 - RNA, 19 nt, Artificial Sequence
  Description of Artificial Sequence: Synthetic oligonucleotide
  Sense strand starting at position 3077 of SEQ ID NO: 1562226
gguguaauaaccugugcac

SEQ ID NO: 1731596 - RNA, 19 nt, Artificial Sequence
  Description of Artificial Sequence: Synthetic oligonucleotide
  Antisense strand to SEQ ID NO: 1731595
gugcacagguuauuacacc

SEQ ID NO: 1731597 - RNA, 19 nt, Artificial Sequence
  Description of Artificial Sequence: Synthetic oligonucleotide
  Sense strand starting at position 3079 of SEQ ID NO: 1562226
uguaauaaccugugcacuu

SEQ ID NO: 1731598 - RNA, 19 nt, Artificial Sequence
  Description of Artificial Sequence: Synthetic oligonucleotide
  Antisense strand to SEQ ID NO: 1731597
aagugcacagguuauuaca

SEQ ID NO: 1731599 - RNA, 19 nt, Artificial Sequence
  Description of Artificial Sequence: Synthetic oligonucleotide
  Sense strand starting at position 3080 of SEQ ID NO: 1562226
guaauaaccugugcacuuu

SEQ ID NO: 1731600 - RNA, 19 nt, Artificial Sequence
  Description of Artificial Sequence: Synthetic oligonucleotide
  Antisense strand to SEQ ID NO: 1731599
aaagugcacagguuauuac

SEQ ID NO: 1731601 - RNA, 19 nt, Artificial Sequence
  Description of Artificial Sequence: Synthetic oligonucleotide
  Sense strand starting at position 3156 of SEQ ID NO: 1562226
gaaagcguugcauugugua

SEQ ID NO: 1731602 - RNA, 19 nt, Artificial Sequence
  Description of Artificial Sequence: Synthetic oligonucleotide
  Antisense strand to SEQ ID NO: 1731601
uacacaaugcaacgcuuuc

SEQ ID NO: 1731603 - RNA, 19 nt, Artificial Sequence
  Description of Artificial Sequence: Synthetic oligonucleotide
  Sense strand starting at position 3186 of SEQ ID NO: 1562226
gggugacuuggccgacuua

SEQ ID NO: 1731604 - RNA, 19 nt, Artificial Sequence
  Description of Artificial Sequence: Synthetic oligonucleotide
  Antisense strand to SEQ ID NO: 1731603
uaagucggccaagucaccc

SEQ ID NO: 1731605 - RNA, 19 nt, Artificial Sequence
  Description of Artificial Sequence: Synthetic oligonucleotide
  Sense strand starting at position 3187 of SEQ ID NO: 1562226
ggugacuuggccgacuuaa

SEQ ID NO: 1731606 - RNA, 19 nt, Artificial Sequence
  Description of Artificial Sequence: Synthetic oligonucleotide
  Antisense strand to SEQ ID NO: 1731605
uuaagucggccaagucacc

SEQ ID NO: 1731607 - RNA, 19 nt, Artificial Sequence
  Description of Artificial Sequence: Synthetic oligonucleotide
  Sense strand starting at position 3218 of SEQ ID NO: 1562226
gaucuugggucacuguaua

SEQ ID NO: 1731608 - RNA, 19 nt, Artificial Sequence
  Description of Artificial Sequence: Synthetic oligonucleotide
  Antisense strand to SEQ ID NO: 1731607
uauacagugacccaagauc

SEQ ID NO: 1731609 - RNA, 19 nt, Artificial Sequence
  Description of Artificial Sequence: Synthetic oligonucleotide
  Sense strand starting at position 3263 of SEQ ID NO: 1562226
gaggcaaugccaggacuuu

SEQ ID NO: 1731610 - RNA, 19 nt, Artificial Sequence
  Description of Artificial Sequence: Synthetic oligonucleotide
  Antisense strand to SEQ ID NO: 1731609
aaaguccuggcauugccuc

SEQ ID NO: 1731611 - RNA, 19 nt, Artificial Sequence
  Description of Artificial Sequence: Synthetic oligonucleotide
  Sense strand starting at position 3333 of SEQ ID NO: 1562226
gcaccucagcccugggaaa

SEQ ID NO: 1731612 - RNA, 19 nt, Artificial Sequence
  Description of Artificial Sequence: Synthetic oligonucleotide
  Antisense strand to SEQ ID NO: 1731611
uuucccagggcugaggugc

SEQ ID NO: 1731613 - RNA, 19 nt, Artificial Sequence
  Description of Artificial Sequence: Synthetic oligonucleotide
  Sense strand starting at position 3427 of SEQ ID NO: 1562226
uucagagggcuguguacaa

SEQ ID NO: 1731614 - RNA, 19 nt, Artificial Sequence
  Description of Artificial Sequence: Synthetic oligonucleotide
  Antisense strand to SEQ ID NO: 1731613
uuguacacagcccucugaa

SEQ ID NO: 1731615 - RNA, 19 nt, Artificial Sequence
  Description of Artificial Sequence: Synthetic oligonucleotide
  Sense strand starting at position 3453 of SEQ ID NO: 1562226
gugcucuugcuccagaaag

SEQ ID NO: 1731616 - RNA, 19 nt, Artificial Sequence
  Description of Artificial Sequence: Synthetic oligonucleotide
  Antisense strand to SEQ ID NO: 1731615
cuuucuggagcaagagcac

SEQ ID NO: 1731617 - RNA, 19 nt, Artificial Sequence
  Description of Artificial Sequence: Synthetic oligonucleotide
  Sense strand starting at position 3455 of SEQ ID NO: 1562226
gcucuugcuccagaaagac

SEQ ID NO: 1731618 - RNA, 19 nt, Artificial Sequence
  Description of Artificial Sequence: Synthetic oligonucleotide
  Antisense strand to SEQ ID NO: 1731617
gucuuucuggagcaagagc

SEQ ID NO: 1731619 - RNA, 19 nt, Artificial Sequence
  Description of Artificial Sequence: Synthetic oligonucleotide
  Sense strand starting at position 3771 of SEQ ID NO: 1562226
ccuugaggauguucuggaa

SEQ ID NO: 1731620 - RNA, 19 nt, Artificial Sequence
  Description of Artificial Sequence: Synthetic oligonucleotide
  Antisense strand to SEQ ID NO: 1731619
uuccagaacauccucaagg

SEQ ID NO: 1731621 - RNA, 19 nt, Artificial Sequence
  Description of Artificial Sequence: Synthetic oligonucleotide
  Sense strand starting at position 3932 of SEQ ID NO: 1562226
cccuguguguuauccaaca

SEQ ID NO: 1731622 - RNA, 19 nt, Artificial Sequence
  Description of Artificial Sequence: Synthetic oligonucleotide
  Antisense strand to SEQ ID NO: 1731621
uguuggauaacacacaggg

SEQ ID NO: 1731623 - RNA, 19 nt, Artificial Sequence
  Description of Artificial Sequence: Synthetic oligonucleotide
  Sense strand starting at position 3934 of SEQ ID NO: 1562226
cuguguguuauccaacaga

SEQ ID NO: 1731624 - RNA, 19 nt, Artificial Sequence
  Description of Artificial Sequence: Synthetic oligonucleotide
  Antisense strand to SEQ ID NO: 1731623
ucuguuggauaacacacag

SEQ ID NO: 1731625 - RNA, 19 nt, Artificial Sequence
  Description of Artificial Sequence: Synthetic oligonucleotide
  Sense strand starting at position 3937 of SEQ ID NO: 1562226
uguguuauccaacagauau

SEQ ID NO: 1731626 - RNA, 19 nt, Artificial Sequence
  Description of Artificial Sequence: Synthetic oligonucleotide
  Antisense strand to SEQ ID NO: 1731625
auaucuguuggauaacaca

SEQ ID NO: 1731627 - RNA, 19 nt, Artificial Sequence
  Description of Artificial Sequence: Synthetic oligonucleotide
  Sense strand starting at position 3956 of SEQ ID NO: 1562226
ggucgcugcucaauggaga

SEQ ID NO: 1731628 - RNA, 19 nt, Artificial Sequence
  Description of Artificial Sequence: Synthetic oligonucleotide
  Antisense strand to SEQ ID NO: 1731627
ucuccauugagcagcgacc

SEQ ID NO: 1731629 - RNA, 19 nt, Artificial Sequence
  Description of Artificial Sequence: Synthetic oligonucleotide
  Sense strand starting at position 89 of SEQ ID NO: 1562227
gguuucccuaucuguaagu

SEQ ID NO: 1731630 - RNA, 19 nt, Artificial Sequence
  Description of Artificial Sequence: Synthetic oligonucleotide
  Antisense strand to SEQ ID NO: 1731629
acuuacagauagggaaacc

SEQ ID NO: 1731631 - RNA, 19 nt, Artificial Sequence
  Description of Artificial Sequence: Synthetic oligonucleotide
  Sense strand starting at position 90 of SEQ ID NO: 1562227
guuucccuaucuguaaguu

SEQ ID NO: 1731632 - RNA, 19 nt, Artificial Sequence
  Description of Artificial Sequence: Synthetic oligonucleotide
  Antisense strand to SEQ ID NO: 1731631
aacuuacagauagggaaac

SEQ ID NO: 1731633 - RNA, 19 nt, Artificial Sequence
  Description of Artificial Sequence: Synthetic oligonucleotide
  Sense strand starting at position 96 of SEQ ID NO: 1562227
cuaucuguaaguugaggau

SEQ ID NO: 1731634 - RNA, 19 nt, Artificial Sequence
  Description of Artificial Sequence: Synthetic oligonucleotide
  Antisense strand to SEQ ID NO: 1731633
auccucaacuuacagauag

SEQ ID NO: 1731635 - RNA, 19 nt, Artificial Sequence
  Description of Artificial Sequence: Synthetic oligonucleotide
  Sense strand starting at position 147 of SEQ ID NO: 1562227
uagccaggucgguagaaau

SEQ ID NO: 1731636 - RNA, 19 nt, Artificial Sequence
  Description of Artificial Sequence: Synthetic oligonucleotide
  Antisense strand to SEQ ID NO: 1731635
auuucuaccgaccuggcua

SEQ ID NO: 1731637 - RNA, 19 nt, Artificial Sequence
  Description of Artificial Sequence: Synthetic oligonucleotide
  Sense strand starting at position 174 of SEQ ID NO: 1562227
gggcaugaaggguauguaa

SEQ ID NO: 1731638 - RNA, 19 nt, Artificial Sequence
  Description of Artificial Sequence: Synthetic oligonucleotide
  Antisense strand to SEQ ID NO: 1731637
uuacauacccuucaugccc

SEQ ID NO: 1731639 - RNA, 19 nt, Artificial Sequence
  Description of Artificial Sequence: Synthetic oligonucleotide
  Sense strand starting at position 176 of SEQ ID NO: 1562227
gcaugaaggguauguaaau

SEQ ID NO: 1731640 - RNA, 19 nt, Artificial Sequence
  Description of Artificial Sequence: Synthetic oligonucleotide
  Antisense strand to SEQ ID NO: 1731639
auuuacauacccuucaugc

SEQ ID NO: 1731641 - RNA, 19 nt, Artificial Sequence
  Description of Artificial Sequence: Synthetic oligonucleotide
  Sense strand starting at position 182 of SEQ ID NO: 1562227
aggguauguaaaugaugca

SEQ ID NO: 1731642 - RNA, 19 nt, Artificial Sequence
  Description of Artificial Sequence: Synthetic oligonucleotide
  Antisense strand to SEQ ID NO: 1731641
ugcaucauuuacauacccu

SEQ ID NO: 1731643 - RNA, 19 nt, Artificial Sequence
  Description of Artificial Sequence: Synthetic oligonucleotide
  Sense strand starting at position 397 of SEQ ID NO: 1562227
ccaauuaucuggccuuugu

SEQ ID NO: 1731644 - RNA, 19 nt, Artificial Sequence
  Description of Artificial Sequence: Synthetic oligonucleotide
  Antisense strand to SEQ ID NO: 1731643
acaaaggccagauaauugg

SEQ ID NO: 1731645 - RNA, 19 nt, Artificial Sequence
  Description of Artificial Sequence: Synthetic oligonucleotide
  Sense strand starting at position 953 of SEQ ID NO: 1562227
ggcgaccaguucucaagaa

SEQ ID NO: 1731646 - RNA, 19 nt, Artificial Sequence
  Description of Artificial Sequence: Synthetic oligonucleotide
  Antisense strand to SEQ ID NO: 1731645
uucuugagaacuggucgcc

SEQ ID NO: 1731647 - RNA, 19 nt, Artificial Sequence
  Description of Artificial Sequence: Synthetic oligonucleotide
  Sense strand starting at position 992 of SEQ ID NO: 1562227
ggaccuuuccagugguaua

SEQ ID NO: 1731648 - RNA, 19 nt, Artificial Sequence
  Description of Artificial Sequence: Synthetic oligonucleotide
  Antisense strand to SEQ ID NO: 1731647
uauaccacuggaaaggucc

SEQ ID NO: 1731649 - RNA, 19 nt, Artificial Sequence
  Description of Artificial Sequence: Synthetic oligonucleotide
  Sense strand starting at position 1048 of SEQ ID NO: 1562227
ugcgguuaaacccagaaga

SEQ ID NO: 1731650 - RNA, 19 nt, Artificial Sequence
  Description of Artificial Sequence: Synthetic oligonucleotide
  Antisense strand to SEQ ID NO: 1731649
ucuucuggguuuaaccgca

SEQ ID NO: 1731651 - RNA, 19 nt, Artificial Sequence
  Description of Artificial Sequence: Synthetic oligonucleotide
  Sense strand starting at position 1050 of SEQ ID NO: 1562227
cgguuaaacccagaagagu

SEQ ID NO: 1731652 - RNA, 19 nt, Artificial Sequence
  Description of Artificial Sequence: Synthetic oligonucleotide
  Antisense strand to SEQ ID NO: 1731651
acucuucuggguuuaaccg

SEQ ID NO: 1731653 - RNA, 19 nt, Artificial Sequence
  Description of Artificial Sequence: Synthetic oligonucleotide
  Sense strand starting at position 1087 of SEQ ID NO: 1562227
aggagugggugagcaaauu

SEQ ID NO: 1731654 - RNA, 19 nt, Artificial Sequence
  Description of Artificial Sequence: Synthetic oligonucleotide
  Antisense strand to SEQ ID NO: 1731653
aauuugcucacccacuccu

SEQ ID NO: 1731655 - RNA, 19 nt, Artificial Sequence
  Description of Artificial Sequence: Synthetic oligonucleotide
  Sense strand starting at position 1099 of SEQ ID NO: 1562227
gcaaauuguguucaugugu

SEQ ID NO: 1731656 - RNA, 19 nt, Artificial Sequence
  Description of Artificial Sequence: Synthetic oligonucleotide
  Antisense strand to SEQ ID NO: 1731655
acacaugaacacaauuugc

SEQ ID NO: 1731657 - RNA, 19 nt, Artificial Sequence
  Description of Artificial Sequence: Synthetic oligonucleotide
  Sense strand starting at position 1248 of SEQ ID NO: 1562227
guguguagugggcauaagu

SEQ ID NO: 1731658 - RNA, 19 nt, Artificial Sequence
  Description of Artificial Sequence: Synthetic oligonucleotide
  Antisense strand to SEQ ID NO: 1731657
acuuaugcccacuacacac

SEQ ID NO: 1731659 - RNA, 19 nt, Artificial Sequence
  Description of Artificial Sequence: Synthetic oligonucleotide
  Sense strand starting at position 1250 of SEQ ID NO: 1562227
guguagugggcauaagugu

SEQ ID NO: 1731660 - RNA, 19 nt, Artificial Sequence
  Description of Artificial Sequence: Synthetic oligonucleotide
  Antisense strand to SEQ ID NO: 1731659
acacuuaugcccacuacac

SEQ ID NO: 1731661 - RNA, 19 nt, Artificial Sequence
  Description of Artificial Sequence: Synthetic oligonucleotide
  Sense strand starting at position 1292 of SEQ ID NO: 1562227
accugagguguguggagau

SEQ ID NO: 1731662 - RNA, 19 nt, Artificial Sequence
  Description of Artificial Sequence: Synthetic oligonucleotide
  Antisense strand to SEQ ID NO: 1731661
aucuccacacaccucaggu

SEQ ID NO: 1731663 - RNA, 19 nt, Artificial Sequence
  Description of Artificial Sequence: Synthetic oligonucleotide
  Sense strand starting at position 1320 of SEQ ID NO: 1562227
aggaguugugagugugaga

SEQ ID NO: 1731664 - RNA, 19 nt, Artificial Sequence
  Description of Artificial Sequence: Synthetic oligonucleotide
  Antisense strand to SEQ ID NO: 1731663
ucucacacucacaacuccu

SEQ ID NO: 1731665 - RNA, 19 nt, Artificial Sequence
  Description of Artificial Sequence: Synthetic oligonucleotide
  Sense strand starting at position 2092 of SEQ ID NO: 1562227
ggaucugccgcuugauuua

SEQ ID NO: 1731666 - RNA, 19 nt, Artificial Sequence
  Description of Artificial Sequence: Synthetic oligonucleotide
  Antisense strand to SEQ ID NO: 1731665
uaaaucaagcggcagaucc

SEQ ID NO: 1731667 - RNA, 19 nt, Artificial Sequence
  Description of Artificial Sequence: Synthetic oligonucleotide
  Sense strand starting at position 2557 of SEQ ID NO: 1562227
uugcgaaaucgugcaugca

SEQ ID NO: 1731668 - RNA, 19 nt, Artificial Sequence
  Description of Artificial Sequence: Synthetic oligonucleotide
  Antisense strand to SEQ ID NO: 1731667
ugcaugcacgauuucgcaa

SEQ ID NO: 1731669 - RNA, 19 nt, Artificial Sequence
  Description of Artificial Sequence: Synthetic oligonucleotide
  Sense strand starting at position 2558 of SEQ ID NO: 1562227
ugcgaaaucgugcaugcaa

SEQ ID NO: 1731670 - RNA, 19 nt, Artificial Sequence
  Description of Artificial Sequence: Synthetic oligonucleotide
  Antisense strand to SEQ ID NO: 1731669
uugcaugcacgauuucgca

SEQ ID NO: 1731671 - RNA, 19 nt, Artificial Sequence
  Description of Artificial Sequence: Synthetic oligonucleotide
  Sense strand starting at position 2560 of SEQ ID NO: 1562227
cgaaaucgugcaugcaaag

SEQ ID NO: 1731672 - RNA, 19 nt, Artificial Sequence
  Description of Artificial Sequence: Synthetic oligonucleotide
  Antisense strand to SEQ ID NO: 1731671
cuuugcaugcacgauuucg

SEQ ID NO: 1731673 - RNA, 19 nt, Artificial Sequence
  Description of Artificial Sequence: Synthetic oligonucleotide
  Sense strand starting at position 2571 of SEQ ID NO: 1562227
augcaaagcgcuuagcaua

SEQ ID NO: 1731674 - RNA, 19 nt, Artificial Sequence
  Description of Artificial Sequence: Synthetic oligonucleotide
  Antisense strand to SEQ ID NO: 1731673
uaugcuaagcgcuuugcau

SEQ ID NO: 1731675 - RNA, 19 nt, Artificial Sequence
  Description of Artificial Sequence: Synthetic oligonucleotide
  Sense strand starting at position 2604 of SEQ ID NO: 1562227
guaggagcucaguaguuau

SEQ ID NO: 1731676 - RNA, 19 nt, Artificial Sequence
  Description of Artificial Sequence: Synthetic oligonucleotide
  Antisense strand to SEQ ID NO: 1731675
auaacuacugagcuccuac

SEQ ID NO: 1731677 - RNA, 19 nt, Artificial Sequence
  Description of Artificial Sequence: Synthetic oligonucleotide
  Sense strand starting at position 2607 of SEQ ID NO: 1562227
ggagcucaguaguuauuau

SEQ ID NO: 1731678 - RNA, 19 nt, Artificial Sequence
  Description of Artificial Sequence: Synthetic oligonucleotide
  Antisense strand to SEQ ID NO: 1731677
auaauaacuacugagcucc

SEQ ID NO: 1731679 - RNA, 19 nt, Artificial Sequence
  Description of Artificial Sequence: Synthetic oligonucleotide
  Sense strand starting at position 2661 of SEQ ID NO: 1562227
gucuuuguaaugggagaga

SEQ ID NO: 1731680 - RNA, 19 nt, Artificial Sequence
  Description of Artificial Sequence: Synthetic oligonucleotide
  Antisense strand to SEQ ID NO: 1731679
ucucucccauuacaaagac

SEQ ID NO: 1731681 - RNA, 19 nt, Artificial Sequence
  Description of Artificial Sequence: Synthetic oligonucleotide
  Sense strand starting at position 2780 of SEQ ID NO: 1562227
accaaugagccuugauggu

SEQ ID NO: 1731682 - RNA, 19 nt, Artificial Sequence
  Description of Artificial Sequence: Synthetic oligonucleotide
  Antisense strand to SEQ ID NO: 1731681
accaucaaggcucauuggu

SEQ ID NO: 1731683 - RNA, 19 nt, Artificial Sequence
  Description of Artificial Sequence: Synthetic oligonucleotide
  Sense strand starting at position 2921 of SEQ ID NO: 1562227
ccaacaaaguccuccaguu

SEQ ID NO: 1731684 - RNA, 19 nt, Artificial Sequence
  Description of Artificial Sequence: Synthetic oligonucleotide
  Antisense strand to SEQ ID NO: 1731683
aacuggaggacuuuguugg

SEQ ID NO: 1731685 - RNA, 19 nt, Artificial Sequence
  Description of Artificial Sequence: Synthetic oligonucleotide
  Sense strand starting at position 2984 of SEQ ID NO: 1562227
gcggaacuguggucccauu

SEQ ID NO: 1731686 - RNA, 19 nt, Artificial Sequence
  Description of Artificial Sequence: Synthetic oligonucleotide
  Antisense strand to SEQ ID NO: 1731685
aaugggaccacaguuccgc

SEQ ID NO: 1731687 - RNA, 19 nt, Artificial Sequence
  Description of Artificial Sequence: Synthetic oligonucleotide
  Sense strand starting at position 3010 of SEQ ID NO: 1562227
uaaggaagcgccugaaauc

SEQ ID NO: 1731688 - RNA, 19 nt, Artificial Sequence
  Description of Artificial Sequence: Synthetic oligonucleotide
  Antisense strand to SEQ ID NO: 1731687
gauuucaggcgcuuccuua

SEQ ID NO: 1731689 - RNA, 19 nt, Artificial Sequence
  Description of Artificial Sequence: Synthetic oligonucleotide
  Sense strand starting at position 3023 of SEQ ID NO: 1562227
gaaaucagguaauuagcuu

SEQ ID NO: 1731690 - RNA, 19 nt, Artificial Sequence
  Description of Artificial Sequence: Synthetic oligonucleotide
  Antisense strand to SEQ ID NO: 1731689
aagcuaauuaccugauuuc

SEQ ID NO: 1731691 - RNA, 19 nt, Artificial Sequence
  Description of Artificial Sequence: Synthetic oligonucleotide
  Sense strand starting at position 3032 of SEQ ID NO: 1562227
uaauuagcuucucugaggu

SEQ ID NO: 1731692 - RNA, 19 nt, Artificial Sequence
  Description of Artificial Sequence: Synthetic oligonucleotide
  Antisense strand to SEQ ID NO: 1731691
accucagagaagcuaauua

SEQ ID NO: 1731693 - RNA, 19 nt, Artificial Sequence
  Description of Artificial Sequence: Synthetic oligonucleotide
  Sense strand starting at position 3399 of SEQ ID NO: 1562227
gcccaaguuugagaacaag

SEQ ID NO: 1731694 - RNA, 19 nt, Artificial Sequence
  Description of Artificial Sequence: Synthetic oligonucleotide
  Antisense strand to SEQ ID NO: 1731693
cuuguucucaaacuugggc

SEQ ID NO: 1731695 - RNA, 19 nt, Artificial Sequence
  Description of Artificial Sequence: Synthetic oligonucleotide
  Sense strand starting at position 3405 of SEQ ID NO: 1562227
guuugagaacaagguuaga

SEQ ID NO: 1731696 - RNA, 19 nt, Artificial Sequence
  Description of Artificial Sequence: Synthetic oligonucleotide
  Antisense strand to SEQ ID NO: 1731695
ucuaaccuuguucucaaac

SEQ ID NO: 1731697 - RNA, 19 nt, Artificial Sequence
  Description of Artificial Sequence: Synthetic oligonucleotide
  Sense strand starting at position 3515 of SEQ ID NO: 1562227
cgugguagccagcaacaau

SEQ ID NO: 1731698 - RNA, 19 nt, Artificial Sequence
  Description of Artificial Sequence: Synthetic oligonucleotide
  Antisense strand to SEQ ID NO: 1731697
auuguugcuggcuaccacg

SEQ ID NO: 1731699 - RNA, 19 nt, Artificial Sequence
  Description of Artificial Sequence: Synthetic oligonucleotide
  Sense strand starting at position 3580 of SEQ ID NO: 1562227
uuacaagcacuguguucua

SEQ ID NO: 1731700 - RNA, 19 nt, Artificial Sequence
  Description of Artificial Sequence: Synthetic oligonucleotide
  Antisense strand to SEQ ID NO: 1731699
uagaacacagugcuuguaa

SEQ ID NO: 1731701 - RNA, 19 nt, Artificial Sequence
  Description of Artificial Sequence: Synthetic oligonucleotide
  Sense strand starting at position 3685 of SEQ ID NO: 1562227
accacaugccuuggaggaa

SEQ ID NO: 1731702 - RNA, 19 nt, Artificial Sequence
  Description of Artificial Sequence: Synthetic oligonucleotide
  Antisense strand to SEQ ID NO: 1731701
uuccuccaaggcauguggu

SEQ ID NO: 1731703 - RNA, 19 nt, Artificial Sequence
  Description of Artificial Sequence: Synthetic oligonucleotide
  Sense strand starting at position 3792 of SEQ ID NO: 1562227
ggacucuaugcacguguuu

SEQ ID NO: 1731704 - RNA, 19 nt, Artificial Sequence
  Description of Artificial Sequence: Synthetic oligonucleotide
  Antisense strand to SEQ ID NO: 1731703
aaacacgugcauagagucc

SEQ ID NO: 1731705 - RNA, 19 nt, Artificial Sequence
  Description of Artificial Sequence: Synthetic oligonucleotide
  Sense strand starting at position 3867 of SEQ ID NO: 1562227
ucauaaagauauggaaacu

SEQ ID NO: 1731706 - RNA, 19 nt, Artificial Sequence
  Description of Artificial Sequence: Synthetic oligonucleotide
  Antisense strand to SEQ ID NO: 1731705
aguuuccauaucuuuauga

SEQ ID NO: 1731707 - RNA, 19 nt, Artificial Sequence
  Description of Artificial Sequence: Synthetic oligonucleotide
  Sense strand starting at position 3914 of SEQ ID NO: 1562227
ccauguuagccagacuaaa

SEQ ID NO: 1731708 - RNA, 19 nt, Artificial Sequence
  Description of Artificial Sequence: Synthetic oligonucleotide
  Antisense strand to SEQ ID NO: 1731707
uuuagucuggcuaacaugg

SEQ ID NO: 1731709 - RNA, 19 nt, Artificial Sequence
  Description of Artificial Sequence: Synthetic oligonucleotide
  Sense strand starting at position 18 of SEQ ID NO: 1562228
caugaaauguggccaguaa

SEQ ID NO: 1731710 - RNA, 19 nt, Artificial Sequence
  Description of Artificial Sequence: Synthetic oligonucleotide
  Antisense strand to SEQ ID NO: 1731709
uuacuggccacauuucaug

SEQ ID NO: 1731711 - RNA, 19 nt, Artificial Sequence
  Description of Artificial Sequence: Synthetic oligonucleotide
  Sense strand starting at position 19 of SEQ ID NO: 1562228
augaaauguggccaguaag

SEQ ID NO: 1731712 - RNA, 19 nt, Artificial Sequence
  Description of Artificial Sequence: Synthetic oligonucleotide
  Antisense strand to SEQ ID NO: 1731711
cuuacuggccacauuucau

SEQ ID NO: 1731713 - RNA, 19 nt, Artificial Sequence
  Description of Artificial Sequence: Synthetic oligonucleotide
  Sense strand starting at position 22 of SEQ ID NO: 1562228
aaauguggccaguaagauc

SEQ ID NO: 1731714 - RNA, 19 nt, Artificial Sequence
  Description of Artificial Sequence: Synthetic oligonucleotide
  Antisense strand to SEQ ID NO: 1731713
gaucuuacuggccacauuu

SEQ ID NO: 1731715 - RNA, 19 nt, Artificial Sequence
  Description of Artificial Sequence: Synthetic oligonucleotide
  Sense strand starting at position 143 of SEQ ID NO: 1562228
gcuaucauuguuggguuaa

SEQ ID NO: 1731716 - RNA, 19 nt, Artificial Sequence
  Description of Artificial Sequence: Synthetic oligonucleotide
  Antisense strand to SEQ ID NO: 1731715
uuaacccaacaaugauagc

SEQ ID NO: 1731717 - RNA, 19 nt, Artificial Sequence
  Description of Artificial Sequence: Synthetic oligonucleotide
  Sense strand starting at position 192 of SEQ ID NO: 1562228
augugacugugagaaauuu

SEQ ID NO: 1731718 - RNA, 19 nt, Artificial Sequence
  Description of Artificial Sequence: Synthetic oligonucleotide
  Antisense strand to SEQ ID NO: 1731717
aaauuucucacagucacau

SEQ ID NO: 1731719 - RNA, 19 nt, Artificial Sequence
  Description of Artificial Sequence: Synthetic oligonucleotide
  Sense strand starting at position 273 of SEQ ID NO: 1562228
gcuggcagaguuggauuua

SEQ ID NO: 1731720 - RNA, 19 nt, Artificial Sequence
  Description of Artificial Sequence: Synthetic oligonucleotide
  Antisense strand to SEQ ID NO: 1731719
uaaauccaacucugccagc

SEQ ID NO: 1731721 - RNA, 19 nt, Artificial Sequence
  Description of Artificial Sequence: Synthetic oligonucleotide
  Sense strand starting at position 282 of SEQ ID NO: 1562228
guuggauuuagcugccuuu

SEQ ID NO: 1731722 - RNA, 19 nt, Artificial Sequence
  Description of Artificial Sequence: Synthetic oligonucleotide
  Antisense strand to SEQ ID NO: 1731721
aaaggcagcuaaauccaac

SEQ ID NO: 1731723 - RNA, 19 nt, Artificial Sequence
  Description of Artificial Sequence: Synthetic oligonucleotide
  Sense strand starting at position 373 of SEQ ID NO: 1562228
uuaucuuacguagagcuca

SEQ ID NO: 1731724 - RNA, 19 nt, Artificial Sequence
  Description of Artificial Sequence: Synthetic oligonucleotide
  Antisense strand to SEQ ID NO: 1731723
ugagcucuacguaagauaa

SEQ ID NO: 1731725 - RNA, 19 nt, Artificial Sequence
  Description of Artificial Sequence: Synthetic oligonucleotide
  Sense strand starting at position 378 of SEQ ID NO: 1562228
uuacguagagcucaugaaa

SEQ ID NO: 1731726 - RNA, 19 nt, Artificial Sequence
  Description of Artificial Sequence: Synthetic oligonucleotide
  Antisense strand to SEQ ID NO: 1731725
uuucaugagcucuacguaa

SEQ ID NO: 1731727 - RNA, 19 nt, Artificial Sequence
  Description of Artificial Sequence: Synthetic oligonucleotide
  Sense strand starting at position 381 of SEQ ID NO: 1562228
cguagagcucaugaaauaa

SEQ ID NO: 1731728 - RNA, 19 nt, Artificial Sequence
  Description of Artificial Sequence: Synthetic oligonucleotide
  Antisense strand to SEQ ID NO: 1731727
uuauuucaugagcucuacg

SEQ ID NO: 1731729 - RNA, 19 nt, Artificial Sequence
  Description of Artificial Sequence: Synthetic oligonucleotide
  Sense strand starting at position 428 of SEQ ID NO: 1562228
ccugccuauugaucugaca

SEQ ID NO: 1731730 - RNA, 19 nt, Artificial Sequence
  Description of Artificial Sequence: Synthetic oligonucleotide
  Antisense strand to SEQ ID NO: 1731729
ugucagaucaauaggcagg

SEQ ID NO: 1731731 - RNA, 19 nt, Artificial Sequence
  Description of Artificial Sequence: Synthetic oligonucleotide
  Sense strand starting at position 501 of SEQ ID NO: 1562228
gaugcucagcucuagauuc

SEQ ID NO: 1731732 - RNA, 19 nt, Artificial Sequence
  Description of Artificial Sequence: Synthetic oligonucleotide
  Antisense strand to SEQ ID NO: 1731731
gaaucuagagcugagcauc

SEQ ID NO: 1731733 - RNA, 19 nt, Artificial Sequence
  Description of Artificial Sequence: Synthetic oligonucleotide
  Sense strand starting at position 503 of SEQ ID NO: 1562228
ugcucagcucuagauucua

SEQ ID NO: 1731734 - RNA, 19 nt, Artificial Sequence
  Description of Artificial Sequence: Synthetic oligonucleotide
  Antisense strand to SEQ ID NO: 1731733
uagaaucuagagcugagca

SEQ ID NO: 1731735 - RNA, 19 nt, Artificial Sequence
  Description of Artificial Sequence: Synthetic oligonucleotide
  Sense strand starting at position 531 of SEQ ID NO: 1562228
auccuuucuuguguaauuc

SEQ ID NO: 1731736 - RNA, 19 nt, Artificial Sequence
  Description of Artificial Sequence: Synthetic oligonucleotide
  Antisense strand to SEQ ID NO: 1731735
gaauuacacaagaaaggau

SEQ ID NO: 1731737 - RNA, 19 nt, Artificial Sequence
  Description of Artificial Sequence: Synthetic oligonucleotide
  Sense strand starting at position 532 of SEQ ID NO: 1562228
uccuuucuuguguaauucu

SEQ ID NO: 1731738 - RNA, 19 nt, Artificial Sequence
  Description of Artificial Sequence: Synthetic oligonucleotide
  Antisense strand to SEQ ID NO: 1731737
agaauuacacaagaaagga

SEQ ID NO: 1731739 - RNA, 19 nt, Artificial Sequence
  Description of Artificial Sequence: Synthetic oligonucleotide
  Sense strand starting at position 590 of SEQ ID NO: 1562228
gcccuuguccuuuauagaa

SEQ ID NO: 1731740 - RNA, 19 nt, Artificial Sequence
  Description of Artificial Sequence: Synthetic oligonucleotide
  Antisense strand to SEQ ID NO: 1731739
uucuauaaaggacaagggc

SEQ ID NO: 1731741 - RNA, 19 nt, Artificial Sequence
  Description of Artificial Sequence: Synthetic oligonucleotide
  Sense strand starting at position 675 of SEQ ID NO: 1562228
aacacaucucuaggcguaa

SEQ ID NO: 1731742 - RNA, 19 nt, Artificial Sequence
  Description of Artificial Sequence: Synthetic oligonucleotide
  Antisense strand to SEQ ID NO: 1731741
uuacgccuagagauguguu

SEQ ID NO: 1731743 - RNA, 19 nt, Artificial Sequence
  Description of Artificial Sequence: Synthetic oligonucleotide
  Sense strand starting at position 992 of SEQ ID NO: 1562228
ucuggagaugguuguugaa

SEQ ID NO: 1731744 - RNA, 19 nt, Artificial Sequence
  Description of Artificial Sequence: Synthetic oligonucleotide
  Antisense strand to SEQ ID NO: 1731743
uucaacaaccaucuccaga

SEQ ID NO: 1731745 - RNA, 19 nt, Artificial Sequence
  Description of Artificial Sequence: Synthetic oligonucleotide
  Sense strand starting at position 994 of SEQ ID NO: 1562228
uggagaugguuguugaaga

SEQ ID NO: 1731746 - RNA, 19 nt, Artificial Sequence
  Description of Artificial Sequence: Synthetic oligonucleotide
  Antisense strand to SEQ ID NO: 1731745
ucuucaacaaccaucucca

SEQ ID NO: 1731747 - RNA, 19 nt, Artificial Sequence
  Description of Artificial Sequence: Synthetic oligonucleotide
  Sense strand starting at position 1059 of SEQ ID NO: 1562228
gucucacaucgcugaggga

SEQ ID NO: 1731748 - RNA, 19 nt, Artificial Sequence
  Description of Artificial Sequence: Synthetic oligonucleotide
  Antisense strand to SEQ ID NO: 1731747
ucccucagcgaugugagac

SEQ ID NO: 1731749 - RNA, 19 nt, Artificial Sequence
  Description of Artificial Sequence: Synthetic oligonucleotide
  Sense strand starting at position 1712 of SEQ ID NO: 1562228
ggucaugguuccuuagcaa

SEQ ID NO: 1731750 - RNA, 19 nt, Artificial Sequence
  Description of Artificial Sequence: Synthetic oligonucleotide
  Antisense strand to SEQ ID NO: 1731749
uugcuaaggaaccaugacc

SEQ ID NO: 1731751 - RNA, 19 nt, Artificial Sequence
  Description of Artificial Sequence: Synthetic oligonucleotide
  Sense strand starting at position 2136 of SEQ ID NO: 1562228
cccugaagcuucuuugaug

SEQ ID NO: 1731752 - RNA, 19 nt, Artificial Sequence
  Description of Artificial Sequence: Synthetic oligonucleotide
  Antisense strand to SEQ ID NO: 1731751
caucaaagaagcuucaggg

SEQ ID NO: 1731753 - RNA, 19 nt, Artificial Sequence
  Description of Artificial Sequence: Synthetic oligonucleotide
  Sense strand starting at position 2261 of SEQ ID NO: 1562228
aaggccuuccuguaagaag

SEQ ID NO: 1731754 - RNA, 19 nt, Artificial Sequence
  Description of Artificial Sequence: Synthetic oligonucleotide
  Antisense strand to SEQ ID NO: 1731753
cuucuuacaggaaggccuu

SEQ ID NO: 1731755 - RNA, 19 nt, Artificial Sequence
  Description of Artificial Sequence: Synthetic oligonucleotide
  Sense strand starting at position 2541 of SEQ ID NO: 1562228
ggcucagugaaaugugauu

SEQ ID NO: 1731756 - RNA, 19 nt, Artificial Sequence
  Description of Artificial Sequence: Synthetic oligonucleotide
  Antisense strand to SEQ ID NO: 1731755
aaucacauuucacugagcc

SEQ ID NO: 1731757 - RNA, 19 nt, Artificial Sequence
  Description of Artificial Sequence: Synthetic oligonucleotide
  Sense strand starting at position 2587 of SEQ ID NO: 1562228
uuuguaggaguauguauca

SEQ ID NO: 1731758 - RNA, 19 nt, Artificial Sequence
  Description of Artificial Sequence: Synthetic oligonucleotide
  Antisense strand to SEQ ID NO: 1731757
ugauacauacuccuacaaa

SEQ ID NO: 1731759 - RNA, 19 nt, Artificial Sequence
  Description of Artificial Sequence: Synthetic oligonucleotide
  Sense strand starting at position 2669 of SEQ ID NO: 1562228
gucugucuacuggaaagca

SEQ ID NO: 1731760 - RNA, 19 nt, Artificial Sequence
  Description of Artificial Sequence: Synthetic oligonucleotide
  Antisense strand to SEQ ID NO: 1731759
ugcuuuccaguagacagac

SEQ ID NO: 1731761 - RNA, 19 nt, Artificial Sequence
  Description of Artificial Sequence: Synthetic oligonucleotide
  Sense strand starting at position 2750 of SEQ ID NO: 1562228
uucuuugaauaaucaguga

SEQ ID NO: 1731762 - RNA, 19 nt, Artificial Sequence
  Description of Artificial Sequence: Synthetic oligonucleotide
  Antisense strand to SEQ ID NO: 1731761
ucacugauuauucaaagaa

SEQ ID NO: 1731763 - RNA, 19 nt, Artificial Sequence
  Description of Artificial Sequence: Synthetic oligonucleotide
  Sense strand starting at position 2772 of SEQ ID NO: 1562228
ucugauauucgcuaaaguu

SEQ ID NO: 1731764 - RNA, 19 nt, Artificial Sequence
  Description of Artificial Sequence: Synthetic oligonucleotide
  Antisense strand to SEQ ID NO: 1731763
aacuuuagcgaauaucaga

SEQ ID NO: 1731765 - RNA, 19 nt, Artificial Sequence
  Description of Artificial Sequence: Synthetic oligonucleotide
  Sense strand starting at position 3136 of SEQ ID NO: 1562228
gcgcauugacuuuccguua

SEQ ID NO: 1731766 - RNA, 19 nt, Artificial Sequence
  Description of Artificial Sequence: Synthetic oligonucleotide
  Antisense strand to SEQ ID NO: 1731765
uaacggaaagucaaugcgc

SEQ ID NO: 1731767 - RNA, 19 nt, Artificial Sequence
  Description of Artificial Sequence: Synthetic oligonucleotide
  Sense strand starting at position 3141 of SEQ ID NO: 1562228
uugacuuuccguuacuaaa

SEQ ID NO: 1731768 - RNA, 19 nt, Artificial Sequence
  Description of Artificial Sequence: Synthetic oligonucleotide
  Antisense strand to SEQ ID NO: 1731767
uuuaguaacggaaagucaa

SEQ ID NO: 1731769 - RNA, 19 nt, Artificial Sequence
  Description of Artificial Sequence: Synthetic oligonucleotide
  Sense strand starting at position 3183 of SEQ ID NO: 1562228
caagcuguucccgggauua

SEQ ID NO: 1731770 - RNA, 19 nt, Artificial Sequence
  Description of Artificial Sequence: Synthetic oligonucleotide
  Antisense strand to SEQ ID NO: 1731769
uaaucccgggaacagcuug

SEQ ID NO: 1731771 - RNA, 19 nt, Artificial Sequence
  Description of Artificial Sequence: Synthetic oligonucleotide
  Sense strand starting at position 3351 of SEQ ID NO: 1562228
gacugcguagucguuugua

SEQ ID NO: 1731772 - RNA, 19 nt, Artificial Sequence
  Description of Artificial Sequence: Synthetic oligonucleotide
  Antisense strand to SEQ ID NO: 1731771
uacaaacgacuacgcaguc

SEQ ID NO: 1731773 - RNA, 19 nt, Artificial Sequence
  Description of Artificial Sequence: Synthetic oligonucleotide
  Sense strand starting at position 3353 of SEQ ID NO: 1562228
cugcguagucguuuguaaa

SEQ ID NO: 1731774 - RNA, 19 nt, Artificial Sequence
  Description of Artificial Sequence: Synthetic oligonucleotide
  Antisense strand to SEQ ID NO: 1731773
uuuacaaacgacuacgcag

SEQ ID NO: 1731775 - RNA, 19 nt, Artificial Sequence
  Description of Artificial Sequence: Synthetic oligonucleotide
  Sense strand starting at position 3383 of SEQ ID NO: 1562228
gguagcaguuaagugagau

SEQ ID NO: 1731776 - RNA, 19 nt, Artificial Sequence
  Description of Artificial Sequence: Synthetic oligonucleotide
  Antisense strand to SEQ ID NO: 1731775
aucucacuuaacugcuacc

SEQ ID NO: 1731777 - RNA, 19 nt, Artificial Sequence
  Description of Artificial Sequence: Synthetic oligonucleotide
  Sense strand starting at position 3384 of SEQ ID NO: 1562228
guagcaguuaagugagaua

SEQ ID NO: 1731778 - RNA, 19 nt, Artificial Sequence
  Description of Artificial Sequence: Synthetic oligonucleotide
  Antisense strand to SEQ ID NO: 1731777
uaucucacuuaacugcuac

SEQ ID NO: 1731779 - RNA, 19 nt, Artificial Sequence
  Description of Artificial Sequence: Synthetic oligonucleotide
  Sense strand starting at position 3594 of SEQ ID NO: 1562228
uaggucucccuggaaggua

SEQ ID NO: 1731780 - RNA, 19 nt, Artificial Sequence
  Description of Artificial Sequence: Synthetic oligonucleotide
  Antisense strand to SEQ ID NO: 1731779
uaccuuccagggagaccua

SEQ ID NO: 1731781 - RNA, 19 nt, Artificial Sequence
  Description of Artificial Sequence: Synthetic oligonucleotide
  Sense strand starting at position 3637 of SEQ ID NO: 1562228
cgaguagauagccagugau

SEQ ID NO: 1731782 - RNA, 19 nt, Artificial Sequence
  Description of Artificial Sequence: Synthetic oligonucleotide
  Antisense strand to SEQ ID NO: 1731781
aucacuggcuaucuacucg

SEQ ID NO: 1731783 - RNA, 19 nt, Artificial Sequence
  Description of Artificial Sequence: Synthetic oligonucleotide
  Sense strand starting at position 3640 of SEQ ID NO: 1562228
guagauagccagugaucca

SEQ ID NO: 1731784 - RNA, 19 nt, Artificial Sequence
  Description of Artificial Sequence: Synthetic oligonucleotide
  Antisense strand to SEQ ID NO: 1731783
uggaucacuggcuaucuac

SEQ ID NO: 1731785 - RNA, 19 nt, Artificial Sequence
  Description of Artificial Sequence: Synthetic oligonucleotide
  Sense strand starting at position 3693 of SEQ ID NO: 1562228
cucagacacucucuauagu

SEQ ID NO: 1731786 - RNA, 19 nt, Artificial Sequence
  Description of Artificial Sequence: Synthetic oligonucleotide
  Antisense strand to SEQ ID NO: 1731785
acuauagagagugucugag

SEQ ID NO: 1731787 - RNA, 19 nt, Artificial Sequence
  Description of Artificial Sequence: Synthetic oligonucleotide
  Sense strand starting at position 3725 of SEQ ID NO: 1562228
cgggaaggaucgucuuaaa

SEQ ID NO: 1731788 - RNA, 19 nt, Artificial Sequence
  Description of Artificial Sequence: Synthetic oligonucleotide
  Antisense strand to SEQ ID NO: 1731787
uuuaagacgauccuucccg

SEQ ID NO: 1731789 - RNA, 19 nt, Artificial Sequence
  Description of Artificial Sequence: Synthetic oligonucleotide
  Sense strand starting at position 110 of SEQ ID NO: 1562229
ugggacucauuauccuaau

SEQ ID NO: 1731790 - RNA, 19 nt, Artificial Sequence
  Description of Artificial Sequence: Synthetic oligonucleotide
  Antisense strand to SEQ ID NO: 1731789
auuaggauaaugaguccca

SEQ ID NO: 1731791 - RNA, 19 nt, Artificial Sequence
  Description of Artificial Sequence: Synthetic oligonucleotide
  Sense strand starting at position 111 of SEQ ID NO: 1562229
gggacucauuauccuaaug

SEQ ID NO: 1731792 - RNA, 19 nt, Artificial Sequence
  Description of Artificial Sequence: Synthetic oligonucleotide
  Antisense strand to SEQ ID NO: 1731791
cauuaggauaaugaguccc

SEQ ID NO: 1731793 - RNA, 19 nt, Artificial Sequence
  Description of Artificial Sequence: Synthetic oligonucleotide
  Sense strand starting at position 275 of SEQ ID NO: 1562229
uucugacuccagggugaga

SEQ ID NO: 1731794 - RNA, 19 nt, Artificial Sequence
  Description of Artificial Sequence: Synthetic oligonucleotide
  Antisense strand to SEQ ID NO: 1731793
ucucacccuggagucagaa

SEQ ID NO: 1731795 - RNA, 19 nt, Artificial Sequence
  Description of Artificial Sequence: Synthetic oligonucleotide
  Sense strand starting at position 290 of SEQ ID NO: 1562229
gagaaauguucuccuuagc

SEQ ID NO: 1731796 - RNA, 19 nt, Artificial Sequence
  Description of Artificial Sequence: Synthetic oligonucleotide
  Antisense strand to SEQ ID NO: 1731795
gcuaaggagaacauuucuc

SEQ ID NO: 1731797 - RNA, 19 nt, Artificial Sequence
  Description of Artificial Sequence: Synthetic oligonucleotide
  Sense strand starting at position 346 of SEQ ID NO: 1562229
ggaguacugguucagugag

SEQ ID NO: 1731798 - RNA, 19 nt, Artificial Sequence
  Description of Artificial Sequence: Synthetic oligonucleotide
  Antisense strand to SEQ ID NO: 1731797
cucacugaaccaguacucc

SEQ ID NO: 1731799 - RNA, 19 nt, Artificial Sequence
  Description of Artificial Sequence: Synthetic oligonucleotide
  Sense strand starting at position 400 of SEQ ID NO: 1562229
cagggauacgugggccaaa

SEQ ID NO: 1731800 - RNA, 19 nt, Artificial Sequence
  Description of Artificial Sequence: Synthetic oligonucleotide
  Antisense strand to SEQ ID NO: 1731799
uuuggcccacguaucccug

SEQ ID NO: 1731801 - RNA, 19 nt, Artificial Sequence
  Description of Artificial Sequence: Synthetic oligonucleotide
  Sense strand starting at position 512 of SEQ ID NO: 1562229
ucucaaugaucaucuguag

SEQ ID NO: 1731802 - RNA, 19 nt, Artificial Sequence
  Description of Artificial Sequence: Synthetic oligonucleotide
  Antisense strand to SEQ ID NO: 1731801
cuacagaugaucauugaga

SEQ ID NO: 1731803 - RNA, 19 nt, Artificial Sequence
  Description of Artificial Sequence: Synthetic oligonucleotide
  Sense strand starting at position 873 of SEQ ID NO: 1562229
uguuucugacaaggagaau

SEQ ID NO: 1731804 - RNA, 19 nt, Artificial Sequence
  Description of Artificial Sequence: Synthetic oligonucleotide
  Antisense strand to SEQ ID NO: 1731803
auucuccuugucagaaaca

SEQ ID NO: 1731805 - RNA, 19 nt, Artificial Sequence
  Description of Artificial Sequence: Synthetic oligonucleotide
  Sense strand starting at position 904 of SEQ ID NO: 1562229
aaacgcaguuuccuagaga

SEQ ID NO: 1731806 - RNA, 19 nt, Artificial Sequence
  Description of Artificial Sequence: Synthetic oligonucleotide
  Antisense strand to SEQ ID NO: 1731805
ucucuaggaaacugcguuu

SEQ ID NO: 1731807 - RNA, 19 nt, Artificial Sequence
  Description of Artificial Sequence: Synthetic oligonucleotide
  Sense strand starting at position 907 of SEQ ID NO: 1562229
cgcaguuuccuagagaaca

SEQ ID NO: 1731808 - RNA, 19 nt, Artificial Sequence
  Description of Artificial Sequence: Synthetic oligonucleotide
  Antisense strand to SEQ ID NO: 1731807
uguucucuaggaaacugcg

SEQ ID NO: 1731809 - RNA, 19 nt, Artificial Sequence
  Description of Artificial Sequence: Synthetic oligonucleotide
  Sense strand starting at position 1027 of SEQ ID NO: 1562229
aaauccuagugauugguca

SEQ ID NO: 1731810 - RNA, 19 nt, Artificial Sequence
  Description of Artificial Sequence: Synthetic oligonucleotide
  Antisense strand to SEQ ID NO: 1731809
ugaccaaucacuaggauuu

SEQ ID NO: 1731811 - RNA, 19 nt, Artificial Sequence
  Description of Artificial Sequence: Synthetic oligonucleotide
  Sense strand starting at position 1028 of SEQ ID NO: 1562229
aauccuagugauuggucau

SEQ ID NO: 1731812 - RNA, 19 nt, Artificial Sequence
  Description of Artificial Sequence: Synthetic oligonucleotide
  Antisense strand to SEQ ID NO: 1731811
augaccaaucacuaggauu

SEQ ID NO: 1731813 - RNA, 19 nt, Artificial Sequence
  Description of Artificial Sequence: Synthetic oligonucleotide
  Sense strand starting at position 1031 of SEQ ID NO: 1562229
ccuagugauuggucauauu

SEQ ID NO: 1731814 - RNA, 19 nt, Artificial Sequence
  Description of Artificial Sequence: Synthetic oligonucleotide
  Antisense strand to SEQ ID NO: 1731813
aauaugaccaaucacuagg

SEQ ID NO: 1731815 - RNA, 19 nt, Artificial Sequence
  Description of Artificial Sequence: Synthetic oligonucleotide
  Sense strand starting at position 1192 of SEQ ID NO: 1562229
cagucugauccugagagcu

SEQ ID NO: 1731816 - RNA, 19 nt, Artificial Sequence
  Description of Artificial Sequence: Synthetic oligonucleotide
  Antisense strand to SEQ ID NO: 1731815
agcucucaggaucagacug

SEQ ID NO: 1731817 - RNA, 19 nt, Artificial Sequence
  Description of Artificial Sequence: Synthetic oligonucleotide
  Sense strand starting at position 1240 of SEQ ID NO: 1562229
ucuccuagucucugaauag

SEQ ID NO: 1731818 - RNA, 19 nt, Artificial Sequence
  Description of Artificial Sequence: Synthetic oligonucleotide
  Antisense strand to SEQ ID NO: 1731817
cuauucagagacuaggaga

SEQ ID NO: 1731819 - RNA, 19 nt, Artificial Sequence
  Description of Artificial Sequence: Synthetic oligonucleotide
  Sense strand starting at position 1244 of SEQ ID NO: 1562229
cuagucucugaauaguaga

SEQ ID NO: 1731820 - RNA, 19 nt, Artificial Sequence
  Description of Artificial Sequence: Synthetic oligonucleotide
  Antisense strand to SEQ ID NO: 1731819
ucuacuauucagagacuag

SEQ ID NO: 1731821 - RNA, 19 nt, Artificial Sequence
  Description of Artificial Sequence: Synthetic oligonucleotide
  Sense strand starting at position 1734 of SEQ ID NO: 1562229
gcuggauaugcagagaguu

SEQ ID NO: 1731822 - RNA, 19 nt, Artificial Sequence
  Description of Artificial Sequence: Synthetic oligonucleotide
  Antisense strand to SEQ ID NO: 1731821
aacucucugcauauccagc

SEQ ID NO: 1731823 - RNA, 19 nt, Artificial Sequence
  Description of Artificial Sequence: Synthetic oligonucleotide
  Sense strand starting at position 1993 of SEQ ID NO: 1562229
gcugucuacggagagugaa

SEQ ID NO: 1731824 - RNA, 19 nt, Artificial Sequence
  Description of Artificial Sequence: Synthetic oligonucleotide
  Antisense strand to SEQ ID NO: 1731823
uucacucuccguagacagc

SEQ ID NO: 1731825 - RNA, 19 nt, Artificial Sequence
  Description of Artificial Sequence: Synthetic oligonucleotide
  Sense strand starting at position 2112 of SEQ ID NO: 1562229
gucguucgucaugugggau

SEQ ID NO: 1731826 - RNA, 19 nt, Artificial Sequence
  Description of Artificial Sequence: Synthetic oligonucleotide
  Antisense strand to SEQ ID NO: 1731825
aucccacaugacgaacgac

SEQ ID NO: 1731827 - RNA, 19 nt, Artificial Sequence
  Description of Artificial Sequence: Synthetic oligonucleotide
  Sense strand starting at position 2174 of SEQ ID NO: 1562229
ucuuguguucuugccgaua

SEQ ID NO: 1731828 - RNA, 19 nt, Artificial Sequence
  Description of Artificial Sequence: Synthetic oligonucleotide
  Antisense strand to SEQ ID NO: 1731827
uaucggcaagaacacaaga

SEQ ID NO: 1731829 - RNA, 19 nt, Artificial Sequence
  Description of Artificial Sequence: Synthetic oligonucleotide
  Sense strand starting at position 2179 of SEQ ID NO: 1562229
uguucuugccgauagaaug

SEQ ID NO: 1731830 - RNA, 19 nt, Artificial Sequence
  Description of Artificial Sequence: Synthetic oligonucleotide
  Antisense strand to SEQ ID NO: 1731829
cauucuaucggcaagaaca

SEQ ID NO: 1731831 - RNA, 19 nt, Artificial Sequence
  Description of Artificial Sequence: Synthetic oligonucleotide
  Sense strand starting at position 2526 of SEQ ID NO: 1562229
uugauuucuuuagacuaag

SEQ ID NO: 1731832 - RNA, 19 nt, Artificial Sequence
  Description of Artificial Sequence: Synthetic oligonucleotide
  Antisense strand to SEQ ID NO: 1731831
cuuagucuaaagaaaucaa

SEQ ID NO: 1731833 - RNA, 19 nt, Artificial Sequence
  Description of Artificial Sequence: Synthetic oligonucleotide
  Sense strand starting at position 2548 of SEQ ID NO: 1562229
gcuagaauuccugagugaa

SEQ ID NO: 1731834 - RNA, 19 nt, Artificial Sequence
  Description of Artificial Sequence: Synthetic oligonucleotide
  Antisense strand to SEQ ID NO: 1731833
uucacucaggaauucuagc

SEQ ID NO: 1731835 - RNA, 19 nt, Artificial Sequence
  Description of Artificial Sequence: Synthetic oligonucleotide
  Sense strand starting at position 2774 of SEQ ID NO: 1562229
gguggucacugaccuugaa

SEQ ID NO: 1731836 - RNA, 19 nt, Artificial Sequence
  Description of Artificial Sequence: Synthetic oligonucleotide
  Antisense strand to SEQ ID NO: 1731835
uucaaggucagugaccacc

SEQ ID NO: 1731837 - RNA, 19 nt, Artificial Sequence
  Description of Artificial Sequence: Synthetic oligonucleotide
  Sense strand starting at position 2777 of SEQ ID NO: 1562229
ggucacugaccuugaauau

SEQ ID NO: 1731838 - RNA, 19 nt, Artificial Sequence
  Description of Artificial Sequence: Synthetic oligonucleotide
  Antisense strand to SEQ ID NO: 1731837
auauucaaggucagugacc

SEQ ID NO: 1731839 - RNA, 19 nt, Artificial Sequence
  Description of Artificial Sequence: Synthetic oligonucleotide
  Sense strand starting at position 2778 of SEQ ID NO: 1562229
gucacugaccuugaauauc

SEQ ID NO: 1731840 - RNA, 19 nt, Artificial Sequence
  Description of Artificial Sequence: Synthetic oligonucleotide
  Antisense strand to SEQ ID NO: 1731839
gauauucaaggucagugac

SEQ ID NO: 1731841 - RNA, 19 nt, Artificial Sequence
  Description of Artificial Sequence: Synthetic oligonucleotide
  Sense strand starting at position 2818 of SEQ ID NO: 1562229
aagugaagauguuucuucu

SEQ ID NO: 1731842 - RNA, 19 nt, Artificial Sequence
  Description of Artificial Sequence: Synthetic oligonucleotide
  Antisense strand to SEQ ID NO: 1731841
agaagaaacaucuucacuu

SEQ ID NO: 1731843 - RNA, 19 nt, Artificial Sequence
  Description of Artificial Sequence: Synthetic oligonucleotide
  Sense strand starting at position 3076 of SEQ ID NO: 1562229
ugcgauauccuuuauaauu

SEQ ID NO: 1731844 - RNA, 19 nt, Artificial Sequence
  Description of Artificial Sequence: Synthetic oligonucleotide
  Antisense strand to SEQ ID NO: 1731843
aauuauaaaggauaucgca

SEQ ID NO: 1731845 - RNA, 19 nt, Artificial Sequence
  Description of Artificial Sequence: Synthetic oligonucleotide
  Sense strand starting at position 3204 of SEQ ID NO: 1562229
gagacuggacacugucaua

SEQ ID NO: 1731846 - RNA, 19 nt, Artificial Sequence
  Description of Artificial Sequence: Synthetic oligonucleotide
  Antisense strand to SEQ ID NO: 1731845
uaugacaguguccagucuc

SEQ ID NO: 1731847 - RNA, 19 nt, Artificial Sequence
  Description of Artificial Sequence: Synthetic oligonucleotide
  Sense strand starting at position 3343 of SEQ ID NO: 1562229
ugucacuacuaggucaaga

SEQ ID NO: 1731848 - RNA, 19 nt, Artificial Sequence
  Description of Artificial Sequence: Synthetic oligonucleotide
  Antisense strand to SEQ ID NO: 1731847
ucuugaccuaguagugaca

SEQ ID NO: 1731849 - RNA, 19 nt, Artificial Sequence
  Description of Artificial Sequence: Synthetic oligonucleotide
  Sense strand starting at position 3404 of SEQ ID NO: 1562229
ccaccagcucaguauagau

SEQ ID NO: 1731850 - RNA, 19 nt, Artificial Sequence
  Description of Artificial Sequence: Synthetic oligonucleotide
  Antisense strand to SEQ ID NO: 1731849
aucuauacugagcuggugg

SEQ ID NO: 1731851 - RNA, 19 nt, Artificial Sequence
  Description of Artificial Sequence: Synthetic oligonucleotide
  Sense strand starting at position 3431 of SEQ ID NO: 1562229
gguucuagagccuagugaa

SEQ ID NO: 1731852 - RNA, 19 nt, Artificial Sequence
  Description of Artificial Sequence: Synthetic oligonucleotide
  Antisense strand to SEQ ID NO: 1731851
uucacuaggcucuagaacc

SEQ ID NO: 1731853 - RNA, 19 nt, Artificial Sequence
  Description of Artificial Sequence: Synthetic oligonucleotide
  Sense strand starting at position 3573 of SEQ ID NO: 1562229
ucaguuauuaugugaugga

SEQ ID NO: 1731854 - RNA, 19 nt, Artificial Sequence
  Description of Artificial Sequence: Synthetic oligonucleotide
  Antisense strand to SEQ ID NO: 1731853
uccaucacauaauaacuga

SEQ ID NO: 1731855 - RNA, 19 nt, Artificial Sequence
  Description of Artificial Sequence: Synthetic oligonucleotide
  Sense strand starting at position 3577 of SEQ ID NO: 1562229
uuauuaugugauggaggcu

SEQ ID NO: 1731856 - RNA, 19 nt, Artificial Sequence
  Description of Artificial Sequence: Synthetic oligonucleotide
  Antisense strand to SEQ ID NO: 1731855
agccuccaucacauaauaa

SEQ ID NO: 1731857 - RNA, 19 nt, Artificial Sequence
  Description of Artificial Sequence: Synthetic oligonucleotide
  Sense strand starting at position 3586 of SEQ ID NO: 1562229
gauggaggcuuucuguuaa

SEQ ID NO: 1731858 - RNA, 19 nt, Artificial Sequence
  Description of Artificial Sequence: Synthetic oligonucleotide
  Antisense strand to SEQ ID NO: 1731857
uuaacagaaagccuccauc

SEQ ID NO: 1731859 - RNA, 19 nt, Artificial Sequence
  Description of Artificial Sequence: Synthetic oligonucleotide
  Sense strand starting at position 3600 of SEQ ID NO: 1562229
guuaaagcagucuagucaa

SEQ ID NO: 1731860 - RNA, 19 nt, Artificial Sequence
  Description of Artificial Sequence: Synthetic oligonucleotide
  Antisense strand to SEQ ID NO: 1731859
uugacuagacugcuuuaac

SEQ ID NO: 1731861 - RNA, 19 nt, Artificial Sequence
  Description of Artificial Sequence: Synthetic oligonucleotide
  Sense strand starting at position 3653 of SEQ ID NO: 1562229
gggaaagauuuauggguau

SEQ ID NO: 1731862 - RNA, 19 nt, Artificial Sequence
  Description of Artificial Sequence: Synthetic oligonucleotide
  Antisense strand to SEQ ID NO: 1731861
auacccauaaaucuuuccc

SEQ ID NO: 1731863 - RNA, 19 nt, Artificial Sequence
  Description of Artificial Sequence: Synthetic oligonucleotide
  Sense strand starting at position 3666 of SEQ ID NO: 1562229
ggguauauagaaggucuau

SEQ ID NO: 1731864 - RNA, 19 nt, Artificial Sequence
  Description of Artificial Sequence: Synthetic oligonucleotide
  Antisense strand to SEQ ID NO: 1731863
auagaccuucuauauaccc

SEQ ID NO: 1731865 - RNA, 19 nt, Artificial Sequence
  Description of Artificial Sequence: Synthetic oligonucleotide
  Sense strand starting at position 3849 of SEQ ID NO: 1562229
gugacuauacauuaggcua

SEQ ID NO: 1731866 - RNA, 19 nt, Artificial Sequence
  Description of Artificial Sequence: Synthetic oligonucleotide
  Antisense strand to SEQ ID NO: 1731865
uagccuaauguauagucac

SEQ ID NO: 1731867 - RNA, 19 nt, Artificial Sequence
  Description of Artificial Sequence: Synthetic oligonucleotide
  Sense strand starting at position 3894 of SEQ ID NO: 1562229
agaauuacaucacaaagga

SEQ ID NO: 1731868 - RNA, 19 nt, Artificial Sequence
  Description of Artificial Sequence: Synthetic oligonucleotide
  Antisense strand to SEQ ID NO: 1731867
uccuuugugauguaauucu

SEQ ID NO: 1731869 - RNA, 19 nt, Artificial Sequence
  Description of Artificial Sequence: Synthetic oligonucleotide
  Sense strand starting at position 28 of SEQ ID NO: 1562230
gguagaguuaauuggagaa

SEQ ID NO: 1731870 - RNA, 19 nt, Artificial Sequence
  Description of Artificial Sequence: Synthetic oligonucleotide
  Antisense strand to SEQ ID NO: 1731869
uucuccaauuaacucuacc

SEQ ID NO: 1731871 - RNA, 19 nt, Artificial Sequence
  Description of Artificial Sequence: Synthetic oligonucleotide
  Sense strand starting at position 149 of SEQ ID NO: 1562230
gggugaccucucugagauc

SEQ ID NO: 1731872 - RNA, 19 nt, Artificial Sequence
  Description of Artificial Sequence: Synthetic oligonucleotide
  Antisense strand to SEQ ID NO: 1731871
gaucucagagaggucaccc

SEQ ID NO: 1731873 - RNA, 19 nt, Artificial Sequence
  Description of Artificial Sequence: Synthetic oligonucleotide
  Sense strand starting at position 158 of SEQ ID NO: 1562230
cucugagaucucuggauca

SEQ ID NO: 1731874 - RNA, 19 nt, Artificial Sequence
  Description of Artificial Sequence: Synthetic oligonucleotide
  Antisense strand to SEQ ID NO: 1731873
ugauccagagaucucagag

SEQ ID NO: 1731875 - RNA, 19 nt, Artificial Sequence
  Description of Artificial Sequence: Synthetic oligonucleotide
  Sense strand starting at position 178 of SEQ ID NO: 1562230
ggugucuaucucuaaacug

SEQ ID NO: 1731876 - RNA, 19 nt, Artificial Sequence
  Description of Artificial Sequence: Synthetic oligonucleotide
  Antisense strand to SEQ ID NO: 1731875
caguuuagagauagacacc

SEQ ID NO: 1731877 - RNA, 19 nt, Artificial Sequence
  Description of Artificial Sequence: Synthetic oligonucleotide
  Sense strand starting at position 253 of SEQ ID NO: 1562230
cccagugagcuauagaaua

SEQ ID NO: 1731878 - RNA, 19 nt, Artificial Sequence
  Description of Artificial Sequence: Synthetic oligonucleotide
  Antisense strand to SEQ ID NO: 1731877
uauucuauagcucacuggg

SEQ ID NO: 1731879 - RNA, 19 nt, Artificial Sequence
  Description of Artificial Sequence: Synthetic oligonucleotide
  Sense strand starting at position 307 of SEQ ID NO: 1562230
ucuguuaaauugucaacag

SEQ ID NO: 1731880 - RNA, 19 nt, Artificial Sequence
  Description of Artificial Sequence: Synthetic oligonucleotide
  Antisense strand to SEQ ID NO: 1731879
cuguugacaauuuaacaga

SEQ ID NO: 1731881 - RNA, 19 nt, Artificial Sequence
  Description of Artificial Sequence: Synthetic oligonucleotide
  Sense strand starting at position 869 of SEQ ID NO: 1562230
cccagaacuuacuugugaa

SEQ ID NO: 1731882 - RNA, 19 nt, Artificial Sequence
  Description of Artificial Sequence: Synthetic oligonucleotide
  Antisense strand to SEQ ID NO: 1731881
uucacaaguaaguucuggg

SEQ ID NO: 1731883 - RNA, 19 nt, Artificial Sequence
  Description of Artificial Sequence: Synthetic oligonucleotide
  Sense strand starting at position 1055 of SEQ ID NO: 1562230
cacaaugaaucagugcaga

SEQ ID NO: 1731884 - RNA, 19 nt, Artificial Sequence
  Description of Artificial Sequence: Synthetic oligonucleotide
  Antisense strand to SEQ ID NO: 1731883
ucugcacugauucauugug

SEQ ID NO: 1731885 - RNA, 19 nt, Artificial Sequence
  Description of Artificial Sequence: Synthetic oligonucleotide
  Sense strand starting at position 1060 of SEQ ID NO: 1562230
ugaaucagugcagaacgaa

SEQ ID NO: 1731886 - RNA, 19 nt, Artificial Sequence
  Description of Artificial Sequence: Synthetic oligonucleotide
  Antisense strand to SEQ ID NO: 1731885
uucguucugcacugauuca

SEQ ID NO: 1731887 - RNA, 19 nt, Artificial Sequence
  Description of Artificial Sequence: Synthetic oligonucleotide
  Sense strand starting at position 1361 of SEQ ID NO: 1562230
cugaguucugaacauuacu

SEQ ID NO: 1731888 - RNA, 19 nt, Artificial Sequence
  Description of Artificial Sequence: Synthetic oligonucleotide
  Antisense strand to SEQ ID NO: 1731887
aguaauguucagaacucag

SEQ ID NO: 1731889 - RNA, 19 nt, Artificial Sequence
  Description of Artificial Sequence: Synthetic oligonucleotide
  Sense strand starting at position 1420 of SEQ ID NO: 1562230
uccagaguauaucuuggaa

SEQ ID NO: 1731890 - RNA, 19 nt, Artificial Sequence
  Description of Artificial Sequence: Synthetic oligonucleotide
  Antisense strand to SEQ ID NO: 1731889
uuccaagauauacucugga

SEQ ID NO: 1731891 - RNA, 19 nt, Artificial Sequence
  Description of Artificial Sequence: Synthetic oligonucleotide
  Sense strand starting at position 1423 of SEQ ID NO: 1562230
agaguauaucuuggaaccu

SEQ ID NO: 1731892 - RNA, 19 nt, Artificial Sequence
  Description of Artificial Sequence: Synthetic oligonucleotide
  Antisense strand to SEQ ID NO: 1731891
agguuccaagauauacucu

SEQ ID NO: 1731893 - RNA, 19 nt, Artificial Sequence
  Description of Artificial Sequence: Synthetic oligonucleotide
  Sense strand starting at position 1585 of SEQ ID NO: 1562230
aucucauauccaggucuga

SEQ ID NO: 1731894 - RNA, 19 nt, Artificial Sequence
  Description of Artificial Sequence: Synthetic oligonucleotide
  Antisense strand to SEQ ID NO: 1731893
ucagaccuggauaugagau

SEQ ID NO: 1731895 - RNA, 19 nt, Artificial Sequence
  Description of Artificial Sequence: Synthetic oligonucleotide
  Sense strand starting at position 1713 of SEQ ID NO: 1562230
ucucuugaccaaggauaau

SEQ ID NO: 1731896 - RNA, 19 nt, Artificial Sequence
  Description of Artificial Sequence: Synthetic oligonucleotide
  Antisense strand to SEQ ID NO: 1731895
auuauccuuggucaagaga

SEQ ID NO: 1731897 - RNA, 19 nt, Artificial Sequence
  Description of Artificial Sequence: Synthetic oligonucleotide
  Sense strand starting at position 1876 of SEQ ID NO: 1562230
cccuuaucccagggacacu

SEQ ID NO: 1731898 - RNA, 19 nt, Artificial Sequence
  Description of Artificial Sequence: Synthetic oligonucleotide
  Antisense strand to SEQ ID NO: 1731897
agugucccugggauaaggg

SEQ ID NO: 1731899 - RNA, 19 nt, Artificial Sequence
  Description of Artificial Sequence: Synthetic oligonucleotide
  Sense strand starting at position 2023 of SEQ ID NO: 1562230
uuugauuaauuguccagac

SEQ ID NO: 1731900 - RNA, 19 nt, Artificial Sequence
  Description of Artificial Sequence: Synthetic oligonucleotide
  Antisense strand to SEQ ID NO: 1731899
gucuggacaauuaaucaaa

SEQ ID NO: 1731901 - RNA, 19 nt, Artificial Sequence
  Description of Artificial Sequence: Synthetic oligonucleotide
  Sense strand starting at position 2024 of SEQ ID NO: 1562230
uugauuaauuguccagaca

SEQ ID NO: 1731902 - RNA, 19 nt, Artificial Sequence
  Description of Artificial Sequence: Synthetic oligonucleotide
  Antisense strand to SEQ ID NO: 1731901
ugucuggacaauuaaucaa

SEQ ID NO: 1731903 - RNA, 19 nt, Artificial Sequence
  Description of Artificial Sequence: Synthetic oligonucleotide
  Sense strand starting at position 2106 of SEQ ID NO: 1562230
gcugaugagacauaugguu

SEQ ID NO: 1731904 - RNA, 19 nt, Artificial Sequence
  Description of Artificial Sequence: Synthetic oligonucleotide
  Antisense strand to SEQ ID NO: 1731903
aaccauaugucucaucagc

SEQ ID NO: 1731905 - RNA, 19 nt, Artificial Sequence
  Description of Artificial Sequence: Synthetic oligonucleotide
  Sense strand starting at position 2108 of SEQ ID NO: 1562230
ugaugagacauaugguuuc

SEQ ID NO: 1731906 - RNA, 19 nt, Artificial Sequence
  Description of Artificial Sequence: Synthetic oligonucleotide
  Antisense strand to SEQ ID NO: 1731905
gaaaccauaugucucauca

SEQ ID NO: 1731907 - RNA, 19 nt, Artificial Sequence
  Description of Artificial Sequence: Synthetic oligonucleotide
  Sense strand starting at position 2111 of SEQ ID NO: 1562230
ugagacauaugguuucuaa

SEQ ID NO: 1731908 - RNA, 19 nt, Artificial Sequence
  Description of Artificial Sequence: Synthetic oligonucleotide
  Antisense strand to SEQ ID NO: 1731907
uuagaaaccauaugucuca

SEQ ID NO: 1731909 - RNA, 19 nt, Artificial Sequence
  Description of Artificial Sequence: Synthetic oligonucleotide
  Sense strand starting at position 2150 of SEQ ID NO: 1562230
uuucuaugaccuugaguaa

SEQ ID NO: 1731910 - RNA, 19 nt, Artificial Sequence
  Description of Artificial Sequence: Synthetic oligonucleotide
  Antisense strand to SEQ ID NO: 1731909
uuacucaaggucauagaaa

SEQ ID NO: 1731911 - RNA, 19 nt, Artificial Sequence
  Description of Artificial Sequence: Synthetic oligonucleotide
  Sense strand starting at position 2153 of SEQ ID NO: 1562230
cuaugaccuugaguaagac

SEQ ID NO: 1731912 - RNA, 19 nt, Artificial Sequence
  Description of Artificial Sequence: Synthetic oligonucleotide
  Antisense strand to SEQ ID NO: 1731911
gucuuacucaaggucauag

SEQ ID NO: 1731913 - RNA, 19 nt, Artificial Sequence
  Description of Artificial Sequence: Synthetic oligonucleotide
  Sense strand starting at position 2235 of SEQ ID NO: 1562230
uugcaaggcccauaugaaa

SEQ ID NO: 1731914 - RNA, 19 nt, Artificial Sequence
  Description of Artificial Sequence: Synthetic oligonucleotide
  Antisense strand to SEQ ID NO: 1731913
uuucauaugggccuugcaa

SEQ ID NO: 1731915 - RNA, 19 nt, Artificial Sequence
  Description of Artificial Sequence: Synthetic oligonucleotide
  Sense strand starting at position 2284 of SEQ ID NO: 1562230
caaugagcccuuugaggga

SEQ ID NO: 1731916 - RNA, 19 nt, Artificial Sequence
  Description of Artificial Sequence: Synthetic oligonucleotide
  Antisense strand to SEQ ID NO: 1731915
ucccucaaagggcucauug

SEQ ID NO: 1731917 - RNA, 19 nt, Artificial Sequence
  Description of Artificial Sequence: Synthetic oligonucleotide
  Sense strand starting at position 2357 of SEQ ID NO: 1562230
augagauaaugugcagagu

SEQ ID NO: 1731918 - RNA, 19 nt, Artificial Sequence
  Description of Artificial Sequence: Synthetic oligonucleotide
  Antisense strand to SEQ ID NO: 1731917
acucugcacauuaucucau

SEQ ID NO: 1731919 - RNA, 19 nt, Artificial Sequence
  Description of Artificial Sequence: Synthetic oligonucleotide
  Sense strand starting at position 2360 of SEQ ID NO: 1562230
agauaaugugcagagugau

SEQ ID NO: 1731920 - RNA, 19 nt, Artificial Sequence
  Description of Artificial Sequence: Synthetic oligonucleotide
  Antisense strand to SEQ ID NO: 1731919
aucacucugcacauuaucu

SEQ ID NO: 1731921 - RNA, 19 nt, Artificial Sequence
  Description of Artificial Sequence: Synthetic oligonucleotide
  Sense strand starting at position 2376 of SEQ ID NO: 1562230
gauuaagcaugggcucaaa

SEQ ID NO: 1731922 - RNA, 19 nt, Artificial Sequence
  Description of Artificial Sequence: Synthetic oligonucleotide
  Antisense strand to SEQ ID NO: 1731921
uuugagcccaugcuuaauc

SEQ ID NO: 1731923 - RNA, 19 nt, Artificial Sequence
  Description of Artificial Sequence: Synthetic oligonucleotide
  Sense strand starting at position 2435 of SEQ ID NO: 1562230
gaccuuaagugaucuuaga

SEQ ID NO: 1731924 - RNA, 19 nt, Artificial Sequence
  Description of Artificial Sequence: Synthetic oligonucleotide
  Antisense strand to SEQ ID NO: 1731923
ucuaagaucacuuaagguc

SEQ ID NO: 1731925 - RNA, 19 nt, Artificial Sequence
  Description of Artificial Sequence: Synthetic oligonucleotide
  Sense strand starting at position 2561 of SEQ ID NO: 1562230
ccaacauaauugcugugaa

SEQ ID NO: 1731926 - RNA, 19 nt, Artificial Sequence
  Description of Artificial Sequence: Synthetic oligonucleotide
  Antisense strand to SEQ ID NO: 1731925
uucacagcaauuauguugg

SEQ ID NO: 1731927 - RNA, 19 nt, Artificial Sequence
  Description of Artificial Sequence: Synthetic oligonucleotide
  Sense strand starting at position 2596 of SEQ ID NO: 1562230
accacuucucuuugaagag

SEQ ID NO: 1731928 - RNA, 19 nt, Artificial Sequence
  Description of Artificial Sequence: Synthetic oligonucleotide
  Antisense strand to SEQ ID NO: 1731927
cucuucaaagagaaguggu

SEQ ID NO: 1731929 - RNA, 19 nt, Artificial Sequence
  Description of Artificial Sequence: Synthetic oligonucleotide
  Sense strand starting at position 2652 of SEQ ID NO: 1562230
ucuacauuggaaugcagaa

SEQ ID NO: 1731930 - RNA, 19 nt, Artificial Sequence
  Description of Artificial Sequence: Synthetic oligonucleotide
  Antisense strand to SEQ ID NO: 1731929
uucugcauuccaauguaga

SEQ ID NO: 1731931 - RNA, 19 nt, Artificial Sequence
  Description of Artificial Sequence: Synthetic oligonucleotide
  Sense strand starting at position 2752 of SEQ ID NO: 1562230
aauauuaaugguggaagua

SEQ ID NO: 1731932 - RNA, 19 nt, Artificial Sequence
  Description of Artificial Sequence: Synthetic oligonucleotide
  Antisense strand to SEQ ID NO: 1731931
uacuuccaccauuaauauu

SEQ ID NO: 1731933 - RNA, 19 nt, Artificial Sequence
  Description of Artificial Sequence: Synthetic oligonucleotide
  Sense strand starting at position 2943 of SEQ ID NO: 1562230
ugagauucccagggaugcu

SEQ ID NO: 1731934 - RNA, 19 nt, Artificial Sequence
  Description of Artificial Sequence: Synthetic oligonucleotide
  Antisense strand to SEQ ID NO: 1731933
agcaucccugggaaucuca

SEQ ID NO: 1731935 - RNA, 19 nt, Artificial Sequence
  Description of Artificial Sequence: Synthetic oligonucleotide
  Sense strand starting at position 3103 of SEQ ID NO: 1562230
gcaugaauucugcaacaca

SEQ ID NO: 1731936 - RNA, 19 nt, Artificial Sequence
  Description of Artificial Sequence: Synthetic oligonucleotide
  Antisense strand to SEQ ID NO: 1731935
uguguugcagaauucaugc

SEQ ID NO: 1731937 - RNA, 19 nt, Artificial Sequence
  Description of Artificial Sequence: Synthetic oligonucleotide
  Sense strand starting at position 3178 of SEQ ID NO: 1562230
aggcuuugucaaggaacaa

SEQ ID NO: 1731938 - RNA, 19 nt, Artificial Sequence
  Description of Artificial Sequence: Synthetic oligonucleotide
  Antisense strand to SEQ ID NO: 1731937
uuguuccuugacaaagccu

SEQ ID NO: 1731939 - RNA, 19 nt, Artificial Sequence
  Description of Artificial Sequence: Synthetic oligonucleotide
  Sense strand starting at position 3278 of SEQ ID NO: 1562230
acuguaccucucugagaca

SEQ ID NO: 1731940 - RNA, 19 nt, Artificial Sequence
  Description of Artificial Sequence: Synthetic oligonucleotide
  Antisense strand to SEQ ID NO: 1731939
ugucucagagagguacagu

SEQ ID NO: 1731941 - RNA, 19 nt, Artificial Sequence
  Description of Artificial Sequence: Synthetic oligonucleotide
  Sense strand starting at position 3363 of SEQ ID NO: 1562230
ggccauguagauggaagaa

SEQ ID NO: 1731942 - RNA, 19 nt, Artificial Sequence
  Description of Artificial Sequence: Synthetic oligonucleotide
  Antisense strand to SEQ ID NO: 1731941
uucuuccaucuacauggcc

SEQ ID NO: 1731943 - RNA, 19 nt, Artificial Sequence
  Description of Artificial Sequence: Synthetic oligonucleotide
  Sense strand starting at position 3773 of SEQ ID NO: 1562230
ugggaaucaucuuuauuau

SEQ ID NO: 1731944 - RNA, 19 nt, Artificial Sequence
  Description of Artificial Sequence: Synthetic oligonucleotide
  Antisense strand to SEQ ID NO: 1731943
auaauaaagaugauuccca

SEQ ID NO: 1731945 - RNA, 19 nt, Artificial Sequence
  Description of Artificial Sequence: Synthetic oligonucleotide
  Sense strand starting at position 3821 of SEQ ID NO: 1562230
aauggaguccuguggaauu

SEQ ID NO: 1731946 - RNA, 19 nt, Artificial Sequence
  Description of Artificial Sequence: Synthetic oligonucleotide
  Antisense strand to SEQ ID NO: 1731945
aauuccacaggacuccauu

SEQ ID NO: 1731947 - RNA, 19 nt, Artificial Sequence
  Description of Artificial Sequence: Synthetic oligonucleotide
  Sense strand starting at position 3936 of SEQ ID NO: 1562230
uucugaugucuccagaugu

SEQ ID NO: 1731948 - RNA, 19 nt, Artificial Sequence
  Description of Artificial Sequence: Synthetic oligonucleotide
  Antisense strand to SEQ ID NO: 1731947
acaucuggagacaucagaa

SEQ ID NO: 1731949 - RNA, 19 nt, Artificial Sequence
  Description of Artificial Sequence: Synthetic oligonucleotide
  Sense strand starting at position 25 of SEQ ID NO: 1562231
ggcucugaguaagucuuga

SEQ ID NO: 1731950 - RNA, 19 nt, Artificial Sequence
  Description of Artificial Sequence: Synthetic oligonucleotide
  Antisense strand to SEQ ID NO: 1731949
ucaagacuuacucagagcc

SEQ ID NO: 1731951 - RNA, 19 nt, Artificial Sequence
  Description of Artificial Sequence: Synthetic oligonucleotide
  Sense strand starting at position 50 of SEQ ID NO: 1562231
cuaggaauauucccagagu

SEQ ID NO: 1731952 - RNA, 19 nt, Artificial Sequence
  Description of Artificial Sequence: Synthetic oligonucleotide
  Antisense strand to SEQ ID NO: 1731951
acucugggaauauuccuag

SEQ ID NO: 1731953 - RNA, 19 nt, Artificial Sequence
  Description of Artificial Sequence: Synthetic oligonucleotide
  Sense strand starting at position 53 of SEQ ID NO: 1562231
ggaauauucccagaguugu

SEQ ID NO: 1731954 - RNA, 19 nt, Artificial Sequence
  Description of Artificial Sequence: Synthetic oligonucleotide
  Antisense strand to SEQ ID NO: 1731953
acaacucugggaauauucc

SEQ ID NO: 1731955 - RNA, 19 nt, Artificial Sequence
  Description of Artificial Sequence: Synthetic oligonucleotide
  Sense strand starting at position 63 of SEQ ID NO: 1562231
cagaguuguuugguuggga

SEQ ID NO: 1731956 - RNA, 19 nt, Artificial Sequence
  Description of Artificial Sequence: Synthetic oligonucleotide
  Antisense strand to SEQ ID NO: 1731955
ucccaaccaaacaacucug

SEQ ID NO: 1731957 - RNA, 19 nt, Artificial Sequence
  Description of Artificial Sequence: Synthetic oligonucleotide
  Sense strand starting at position 64 of SEQ ID NO: 1562231
agaguuguuugguugggau

SEQ ID NO: 1731958 - RNA, 19 nt, Artificial Sequence
  Description of Artificial Sequence: Synthetic oligonucleotide
  Antisense strand to SEQ ID NO: 1731957
aucccaaccaaacaacucu

SEQ ID NO: 1731959 - RNA, 19 nt, Artificial Sequence
  Description of Artificial Sequence: Synthetic oligonucleotide
  Sense strand starting at position 66 of SEQ ID NO: 1562231
aguuguuugguugggauga

SEQ ID NO: 1731960 - RNA, 19 nt, Artificial Sequence
  Description of Artificial Sequence: Synthetic oligonucleotide
  Antisense strand to SEQ ID NO: 1731959
ucaucccaaccaaacaacu

SEQ ID NO: 1731961 - RNA, 19 nt, Artificial Sequence
  Description of Artificial Sequence: Synthetic oligonucleotide
  Sense strand starting at position 104 of SEQ ID NO: 1562231
agaagcaaagccuguagau

SEQ ID NO: 1731962 - RNA, 19 nt, Artificial Sequence
  Description of Artificial Sequence: Synthetic oligonucleotide
  Antisense strand to SEQ ID NO: 1731961
aucuacaggcuuugcuucu

SEQ ID NO: 1731963 - RNA, 19 nt, Artificial Sequence
  Description of Artificial Sequence: Synthetic oligonucleotide
  Sense strand starting at position 114 of SEQ ID NO: 1562231
ccuguagauuguccuaaca

SEQ ID NO: 1731964 - RNA, 19 nt, Artificial Sequence
  Description of Artificial Sequence: Synthetic oligonucleotide
  Antisense strand to SEQ ID NO: 1731963
uguuaggacaaucuacagg

SEQ ID NO: 1731965 - RNA, 19 nt, Artificial Sequence
  Description of Artificial Sequence: Synthetic oligonucleotide
  Sense strand starting at position 145 of SEQ ID NO: 1562231
guucuauuuccuugccucu

SEQ ID NO: 1731966 - RNA, 19 nt, Artificial Sequence
  Description of Artificial Sequence: Synthetic oligonucleotide
  Antisense strand to SEQ ID NO: 1731965
agaggcaaggaaauagaac

SEQ ID NO: 1731967 - RNA, 19 nt, Artificial Sequence
  Description of Artificial Sequence: Synthetic oligonucleotide
  Sense strand starting at position 224 of SEQ ID NO: 1562231
ucauuuacuucucuccgua

SEQ ID NO: 1731968 - RNA, 19 nt, Artificial Sequence
  Description of Artificial Sequence: Synthetic oligonucleotide
  Antisense strand to SEQ ID NO: 1731967
uacggagagaaguaaauga

SEQ ID NO: 1731969 - RNA, 19 nt, Artificial Sequence
  Description of Artificial Sequence: Synthetic oligonucleotide
  Sense strand starting at position 227 of SEQ ID NO: 1562231
uuuacuucucuccguagga

SEQ ID NO: 1731970 - RNA, 19 nt, Artificial Sequence
  Description of Artificial Sequence: Synthetic oligonucleotide
  Antisense strand to SEQ ID NO: 1731969
uccuacggagagaaguaaa

SEQ ID NO: 1731971 - RNA, 19 nt, Artificial Sequence
  Description of Artificial Sequence: Synthetic oligonucleotide
  Sense strand starting at position 228 of SEQ ID NO: 1562231
uuacuucucuccguaggaa

SEQ ID NO: 1731972 - RNA, 19 nt, Artificial Sequence
  Description of Artificial Sequence: Synthetic oligonucleotide
  Antisense strand to SEQ ID NO: 1731971
uuccuacggagagaaguaa

SEQ ID NO: 1731973 - RNA, 19 nt, Artificial Sequence
  Description of Artificial Sequence: Synthetic oligonucleotide
  Sense strand starting at position 229 of SEQ ID NO: 1562231
uacuucucuccguaggaaa

SEQ ID NO: 1731974 - RNA, 19 nt, Artificial Sequence
  Description of Artificial Sequence: Synthetic oligonucleotide
  Antisense strand to SEQ ID NO: 1731973
uuuccuacggagagaagua

SEQ ID NO: 1731975 - RNA, 19 nt, Artificial Sequence
  Description of Artificial Sequence: Synthetic oligonucleotide
  Sense strand starting at position 312 of SEQ ID NO: 1562231
ucaugcuuagugcauaaau

SEQ ID NO: 1731976 - RNA, 19 nt, Artificial Sequence
  Description of Artificial Sequence: Synthetic oligonucleotide
  Antisense strand to SEQ ID NO: 1731975
auuuaugcacuaagcauga

SEQ ID NO: 1731977 - RNA, 19 nt, Artificial Sequence
  Description of Artificial Sequence: Synthetic oligonucleotide
  Sense strand starting at position 371 of SEQ ID NO: 1562231
uuguuaaucuugucaaccu

SEQ ID NO: 1731978 - RNA, 19 nt, Artificial Sequence
  Description of Artificial Sequence: Synthetic oligonucleotide
  Antisense strand to SEQ ID NO: 1731977
agguugacaagauuaacaa

SEQ ID NO: 1731979 - RNA, 19 nt, Artificial Sequence
  Description of Artificial Sequence: Synthetic oligonucleotide
  Sense strand starting at position 390 of SEQ ID NO: 1562231
augcuaacauuugugcaua

SEQ ID NO: 1731980 - RNA, 19 nt, Artificial Sequence
  Description of Artificial Sequence: Synthetic oligonucleotide
  Antisense strand to SEQ ID NO: 1731979
uaugcacaaauguuagcau

SEQ ID NO: 1731981 - RNA, 19 nt, Artificial Sequence
  Description of Artificial Sequence: Synthetic oligonucleotide
  Sense strand starting at position 392 of SEQ ID NO: 1562231
gcuaacauuugugcauaua

SEQ ID NO: 1731982 - RNA, 19 nt, Artificial Sequence
  Description of Artificial Sequence: Synthetic oligonucleotide
  Antisense strand to SEQ ID NO: 1731981
uauaugcacaaauguuagc

SEQ ID NO: 1731983 - RNA, 19 nt, Artificial Sequence
  Description of Artificial Sequence: Synthetic oligonucleotide
  Sense strand starting at position 400 of SEQ ID NO: 1562231
uugugcauauauucuagua

SEQ ID NO: 1731984 - RNA, 19 nt, Artificial Sequence
  Description of Artificial Sequence: Synthetic oligonucleotide
  Antisense strand to SEQ ID NO: 1731983
uacuagaauauaugcacaa

SEQ ID NO: 1731985 - RNA, 19 nt, Artificial Sequence
  Description of Artificial Sequence: Synthetic oligonucleotide
  Sense strand starting at position 454 of SEQ ID NO: 1562231
uggauaauccugugacuau

SEQ ID NO: 1731986 - RNA, 19 nt, Artificial Sequence
  Description of Artificial Sequence: Synthetic oligonucleotide
  Antisense strand to SEQ ID NO: 1731985
auagucacaggauuaucca

SEQ ID NO: 1731987 - RNA, 19 nt, Artificial Sequence
  Description of Artificial Sequence: Synthetic oligonucleotide
  Sense strand starting at position 541 of SEQ ID NO: 1562231
gguagauuacucugccaau

SEQ ID NO: 1731988 - RNA, 19 nt, Artificial Sequence
  Description of Artificial Sequence: Synthetic oligonucleotide
  Antisense strand to SEQ ID NO: 1731987
auuggcagaguaaucuacc

SEQ ID NO: 1731989 - RNA, 19 nt, Artificial Sequence
  Description of Artificial Sequence: Synthetic oligonucleotide
  Sense strand starting at position 542 of SEQ ID NO: 1562231
guagauuacucugccaauu

SEQ ID NO: 1731990 - RNA, 19 nt, Artificial Sequence
  Description of Artificial Sequence: Synthetic oligonucleotide
  Antisense strand to SEQ ID NO: 1731989
aauuggcagaguaaucuac

SEQ ID NO: 1731991 - RNA, 19 nt, Artificial Sequence
  Description of Artificial Sequence: Synthetic oligonucleotide
  Sense strand starting at position 555 of SEQ ID NO: 1562231
ccaauuaaucaccaguugu

SEQ ID NO: 1731992 - RNA, 19 nt, Artificial Sequence
  Description of Artificial Sequence: Synthetic oligonucleotide
  Antisense strand to SEQ ID NO: 1731991
acaacuggugauuaauugg

SEQ ID NO: 1731993 - RNA, 19 nt, Artificial Sequence
  Description of Artificial Sequence: Synthetic oligonucleotide
  Sense strand starting at position 829 of SEQ ID NO: 1562231
gaggauucagaugguaggu

SEQ ID NO: 1731994 - RNA, 19 nt, Artificial Sequence
  Description of Artificial Sequence: Synthetic oligonucleotide
  Antisense strand to SEQ ID NO: 1731993
accuaccaucugaauccuc

SEQ ID NO: 1731995 - RNA, 19 nt, Artificial Sequence
  Description of Artificial Sequence: Synthetic oligonucleotide
  Sense strand starting at position 908 of SEQ ID NO: 1562231
acacucauccgauguaaac

SEQ ID NO: 1731996 - RNA, 19 nt, Artificial Sequence
  Description of Artificial Sequence: Synthetic oligonucleotide
  Antisense strand to SEQ ID NO: 1731995
guuuacaucggaugagugu

SEQ ID NO: 1731997 - RNA, 19 nt, Artificial Sequence
  Description of Artificial Sequence: Synthetic oligonucleotide
  Sense strand starting at position 1002 of SEQ ID NO: 1562231
acuccaugaccuuggguaa

SEQ ID NO: 1731998 - RNA, 19 nt, Artificial Sequence
  Description of Artificial Sequence: Synthetic oligonucleotide
  Antisense strand to SEQ ID NO: 1731997
uuacccaaggucauggagu

SEQ ID NO: 1731999 - RNA, 19 nt, Artificial Sequence
  Description of Artificial Sequence: Synthetic oligonucleotide
  Sense strand starting at position 1175 of SEQ ID NO: 1562231
acuauacugugaucuacua

SEQ ID NO: 1732000 - RNA, 19 nt, Artificial Sequence
  Description of Artificial Sequence: Synthetic oligonucleotide
  Antisense strand to SEQ ID NO: 1731999
uaguagaucacaguauagu

SEQ ID NO: 1732001 - RNA, 19 nt, Artificial Sequence
  Description of Artificial Sequence: Synthetic oligonucleotide
  Sense strand starting at position 1184 of SEQ ID NO: 1562231
ugaucuacuaaguguguga

SEQ ID NO: 1732002 - RNA, 19 nt, Artificial Sequence
  Description of Artificial Sequence: Synthetic oligonucleotide
  Antisense strand to SEQ ID NO: 1732001
ucacacacuuaguagauca

SEQ ID NO: 1732003 - RNA, 19 nt, Artificial Sequence
  Description of Artificial Sequence: Synthetic oligonucleotide
  Sense strand starting at position 1197 of SEQ ID NO: 1562231
gugugacagcauuauguau

SEQ ID NO: 1732004 - RNA, 19 nt, Artificial Sequence
  Description of Artificial Sequence: Synthetic oligonucleotide
  Antisense strand to SEQ ID NO: 1732003
auacauaaugcugucacac

SEQ ID NO: 1732005 - RNA, 19 nt, Artificial Sequence
  Description of Artificial Sequence: Synthetic oligonucleotide
  Sense strand starting at position 1315 of SEQ ID NO: 1562231
gcuccuguuccugaaugac

SEQ ID NO: 1732006 - RNA, 19 nt, Artificial Sequence
  Description of Artificial Sequence: Synthetic oligonucleotide
  Antisense strand to SEQ ID NO: 1732005
gucauucaggaacaggagc

SEQ ID NO: 1732007 - RNA, 19 nt, Artificial Sequence
  Description of Artificial Sequence: Synthetic oligonucleotide
  Sense strand starting at position 1425 of SEQ ID NO: 1562231
caauuaaaccaguguugag

SEQ ID NO: 1732008 - RNA, 19 nt, Artificial Sequence
  Description of Artificial Sequence: Synthetic oligonucleotide
  Antisense strand to SEQ ID NO: 1732007
cucaacacugguuuaauug

SEQ ID NO: 1732009 - RNA, 19 nt, Artificial Sequence
  Description of Artificial Sequence: Synthetic oligonucleotide
  Sense strand starting at position 1641 of SEQ ID NO: 1562231
aaaguugguucuuuguaga

SEQ ID NO: 1732010 - RNA, 19 nt, Artificial Sequence
  Description of Artificial Sequence: Synthetic oligonucleotide
  Antisense strand to SEQ ID NO: 1732009
ucuacaaagaaccaacuuu

SEQ ID NO: 1732011 - RNA, 19 nt, Artificial Sequence
  Description of Artificial Sequence: Synthetic oligonucleotide
  Sense strand starting at position 1646 of SEQ ID NO: 1562231
ugguucuuuguagaauaaa

SEQ ID NO: 1732012 - RNA, 19 nt, Artificial Sequence
  Description of Artificial Sequence: Synthetic oligonucleotide
  Antisense strand to SEQ ID NO: 1732011
uuuauucuacaaagaacca

SEQ ID NO: 1732013 - RNA, 19 nt, Artificial Sequence
  Description of Artificial Sequence: Synthetic oligonucleotide
  Sense strand starting at position 1833 of SEQ ID NO: 1562231
ugauaaccucuuggaauca

SEQ ID NO: 1732014 - RNA, 19 nt, Artificial Sequence
  Description of Artificial Sequence: Synthetic oligonucleotide
  Antisense strand to SEQ ID NO: 1732013
ugauuccaagagguuauca

SEQ ID NO: 1732015 - RNA, 19 nt, Artificial Sequence
  Description of Artificial Sequence: Synthetic oligonucleotide
  Sense strand starting at position 2069 of SEQ ID NO: 1562231
cuaugaagucagcaucauu

SEQ ID NO: 1732016 - RNA, 19 nt, Artificial Sequence
  Description of Artificial Sequence: Synthetic oligonucleotide
  Antisense strand to SEQ ID NO: 1732015
aaugaugcugacuucauag

SEQ ID NO: 1732017 - RNA, 19 nt, Artificial Sequence
  Description of Artificial Sequence: Synthetic oligonucleotide
  Sense strand starting at position 2237 of SEQ ID NO: 1562231
uugggagcucccugcaaua

SEQ ID NO: 1732018 - RNA, 19 nt, Artificial Sequence
  Description of Artificial Sequence: Synthetic oligonucleotide
  Antisense strand to SEQ ID NO: 1732017
uauugcagggagcucccaa

SEQ ID NO: 1732019 - RNA, 19 nt, Artificial Sequence
  Description of Artificial Sequence: Synthetic oligonucleotide
  Sense strand starting at position 2688 of SEQ ID NO: 1562231
gaagucaaacuauguuuga

SEQ ID NO: 1732020 - RNA, 19 nt, Artificial Sequence
  Description of Artificial Sequence: Synthetic oligonucleotide
  Antisense strand to SEQ ID NO: 1732019
ucaaacauaguuugacuuc

SEQ ID NO: 1732021 - RNA, 19 nt, Artificial Sequence
  Description of Artificial Sequence: Synthetic oligonucleotide
  Sense strand starting at position 2692 of SEQ ID NO: 1562231
ucaaacuauguuugacaga

SEQ ID NO: 1732022 - RNA, 19 nt, Artificial Sequence
  Description of Artificial Sequence: Synthetic oligonucleotide
  Antisense strand to SEQ ID NO: 1732021
ucugucaaacauaguuuga

SEQ ID NO: 1732023 - RNA, 19 nt, Artificial Sequence
  Description of Artificial Sequence: Synthetic oligonucleotide
  Sense strand starting at position 2847 of SEQ ID NO: 1562231
ucguaugaaaugcauagaa

SEQ ID NO: 1732024 - RNA, 19 nt, Artificial Sequence
  Description of Artificial Sequence: Synthetic oligonucleotide
  Antisense strand to SEQ ID NO: 1732023
uucuaugcauuucauacga

SEQ ID NO: 1732025 - RNA, 19 nt, Artificial Sequence
  Description of Artificial Sequence: Synthetic oligonucleotide
  Sense strand starting at position 2860 of SEQ ID NO: 1562231
auagaaauauguccaagcu

SEQ ID NO: 1732026 - RNA, 19 nt, Artificial Sequence
  Description of Artificial Sequence: Synthetic oligonucleotide
  Antisense strand to SEQ ID NO: 1732025
agcuuggacauauuucuau

SEQ ID NO: 1732027 - RNA, 19 nt, Artificial Sequence
  Description of Artificial Sequence: Synthetic oligonucleotide
  Sense strand starting at position 2861 of SEQ ID NO: 1562231
uagaaauauguccaagcug

SEQ ID NO: 1732028 - RNA, 19 nt, Artificial Sequence
  Description of Artificial Sequence: Synthetic oligonucleotide
  Antisense strand to SEQ ID NO: 1732027
cagcuuggacauauuucua

SEQ ID NO: 1732029 - RNA, 19 nt, Artificial Sequence
  Description of Artificial Sequence: Synthetic oligonucleotide
  Sense strand starting at position 259 of SEQ ID NO: 1562232
uguugcuucccugugaugu

SEQ ID NO: 1732030 - RNA, 19 nt, Artificial Sequence
  Description of Artificial Sequence: Synthetic oligonucleotide
  Antisense strand to SEQ ID NO: 1732029
acaucacagggaagcaaca

SEQ ID NO: 1732031 - RNA, 19 nt, Artificial Sequence
  Description of Artificial Sequence: Synthetic oligonucleotide
  Sense strand starting at position 364 of SEQ ID NO: 1562232
ggagcccuucuugaaugau

SEQ ID NO: 1732032 - RNA, 19 nt, Artificial Sequence
  Description of Artificial Sequence: Synthetic oligonucleotide
  Antisense strand to SEQ ID NO: 1732031
aucauucaagaagggcucc

SEQ ID NO: 1732033 - RNA, 19 nt, Artificial Sequence
  Description of Artificial Sequence: Synthetic oligonucleotide
  Sense strand starting at position 576 of SEQ ID NO: 1562232
auggauaaucauugccaga

SEQ ID NO: 1732034 - RNA, 19 nt, Artificial Sequence
  Description of Artificial Sequence: Synthetic oligonucleotide
  Antisense strand to SEQ ID NO: 1732033
ucuggcaaugauuauccau

SEQ ID NO: 1732035 - RNA, 19 nt, Artificial Sequence
  Description of Artificial Sequence: Synthetic oligonucleotide
  Sense strand starting at position 578 of SEQ ID NO: 1562232
ggauaaucauugccagaau

SEQ ID NO: 1732036 - RNA, 19 nt, Artificial Sequence
  Description of Artificial Sequence: Synthetic oligonucleotide
  Antisense strand to SEQ ID NO: 1732035
auucuggcaaugauuaucc

SEQ ID NO: 1732037 - RNA, 19 nt, Artificial Sequence
  Description of Artificial Sequence: Synthetic oligonucleotide
  Sense strand starting at position 659 of SEQ ID NO: 1562232
aaauuaugcugaccaaggu

SEQ ID NO: 1732038 - RNA, 19 nt, Artificial Sequence
  Description of Artificial Sequence: Synthetic oligonucleotide
  Antisense strand to SEQ ID NO: 1732037
accuuggucagcauaauuu

SEQ ID NO: 1732039 - RNA, 19 nt, Artificial Sequence
  Description of Artificial Sequence: Synthetic oligonucleotide
  Sense strand starting at position 1078 of SEQ ID NO: 1562232
ucuagcugugaucacacau

SEQ ID NO: 1732040 - RNA, 19 nt, Artificial Sequence
  Description of Artificial Sequence: Synthetic oligonucleotide
  Antisense strand to SEQ ID NO: 1732039
augugugaucacagcuaga

SEQ ID NO: 1732041 - RNA, 19 nt, Artificial Sequence
  Description of Artificial Sequence: Synthetic oligonucleotide
  Sense strand starting at position 1085 of SEQ ID NO: 1562232
gugaucacacauugcagaa

SEQ ID NO: 1732042 - RNA, 19 nt, Artificial Sequence
  Description of Artificial Sequence: Synthetic oligonucleotide
  Antisense strand to SEQ ID NO: 1732041
uucugcaaugugugaucac

SEQ ID NO: 1732043 - RNA, 19 nt, Artificial Sequence
  Description of Artificial Sequence: Synthetic oligonucleotide
  Sense strand starting at position 1377 of SEQ ID NO: 1562232
agcaucauuucugaggaca

SEQ ID NO: 1732044 - RNA, 19 nt, Artificial Sequence
  Description of Artificial Sequence: Synthetic oligonucleotide
  Antisense strand to SEQ ID NO: 1732043
uguccucagaaaugaugcu

SEQ ID NO: 1732045 - RNA, 19 nt, Artificial Sequence
  Description of Artificial Sequence: Synthetic oligonucleotide
  Sense strand starting at position 1441 of SEQ ID NO: 1562232
aggguauggccuugacaca

SEQ ID NO: 1732046 - RNA, 19 nt, Artificial Sequence
  Description of Artificial Sequence: Synthetic oligonucleotide
  Antisense strand to SEQ ID NO: 1732045
ugugucaaggccauacccu

SEQ ID NO: 1732047 - RNA, 19 nt, Artificial Sequence
  Description of Artificial Sequence: Synthetic oligonucleotide
  Sense strand starting at position 1442 of SEQ ID NO: 1562232
ggguauggccuugacacau

SEQ ID NO: 1732048 - RNA, 19 nt, Artificial Sequence
  Description of Artificial Sequence: Synthetic oligonucleotide
  Antisense strand to SEQ ID NO: 1732047
augugucaaggccauaccc

SEQ ID NO: 1732049 - RNA, 19 nt, Artificial Sequence
  Description of Artificial Sequence: Synthetic oligonucleotide
  Sense strand starting at position 1560 of SEQ ID NO: 1562232
gggacuaauuccuccgaac

SEQ ID NO: 1732050 - RNA, 19 nt, Artificial Sequence
  Description of Artificial Sequence: Synthetic oligonucleotide
  Antisense strand to SEQ ID NO: 1732049
guucggaggaauuaguccc

SEQ ID NO: 1732051 - RNA, 19 nt, Artificial Sequence
  Description of Artificial Sequence: Synthetic oligonucleotide
  Sense strand starting at position 2150 of SEQ ID NO: 1562232
aaggcucugcacuggaaua

SEQ ID NO: 1732052 - RNA, 19 nt, Artificial Sequence
  Description of Artificial Sequence: Synthetic oligonucleotide
  Antisense strand to SEQ ID NO: 1732051
uauuccagugcagagccuu

SEQ ID NO: 1732053 - RNA, 19 nt, Artificial Sequence
  Description of Artificial Sequence: Synthetic oligonucleotide
  Sense strand starting at position 2152 of SEQ ID NO: 1562232
ggcucugcacuggaauaga

SEQ ID NO: 1732054 - RNA, 19 nt, Artificial Sequence
  Description of Artificial Sequence: Synthetic oligonucleotide
  Antisense strand to SEQ ID NO: 1732053
ucuauuccagugcagagcc

SEQ ID NO: 1732055 - RNA, 19 nt, Artificial Sequence
  Description of Artificial Sequence: Synthetic oligonucleotide
  Sense strand starting at position 2194 of SEQ ID NO: 1562232
cguucuucacacgaggaga

SEQ ID NO: 1732056 - RNA, 19 nt, Artificial Sequence
  Description of Artificial Sequence: Synthetic oligonucleotide
  Antisense strand to SEQ ID NO: 1732055
ucuccucgugugaagaacg

SEQ ID NO: 1732057 - RNA, 19 nt, Artificial Sequence
  Description of Artificial Sequence: Synthetic oligonucleotide
  Sense strand starting at position 2219 of SEQ ID NO: 1562232
ggacacgugauugaccauu

SEQ ID NO: 1732058 - RNA, 19 nt, Artificial Sequence
  Description of Artificial Sequence: Synthetic oligonucleotide
  Antisense strand to SEQ ID NO: 1732057
aauggucaaucacgugucc

SEQ ID NO: 1732059 - RNA, 19 nt, Artificial Sequence
  Description of Artificial Sequence: Synthetic oligonucleotide
  Sense strand starting at position 2293 of SEQ ID NO: 1562232
gcaugaaauuacucaaguu

SEQ ID NO: 1732060 - RNA, 19 nt, Artificial Sequence
  Description of Artificial Sequence: Synthetic oligonucleotide
  Antisense strand to SEQ ID NO: 1732059
aacuugaguaauuucaugc

SEQ ID NO: 1732061 - RNA, 19 nt, Artificial Sequence
  Description of Artificial Sequence: Synthetic oligonucleotide
  Sense strand starting at position 2331 of SEQ ID NO: 1562232
gggccagacuuccucaacu

SEQ ID NO: 1732062 - RNA, 19 nt, Artificial Sequence
  Description of Artificial Sequence: Synthetic oligonucleotide
  Antisense strand to SEQ ID NO: 1732061
aguugaggaagucuggccc

SEQ ID NO: 1732063 - RNA, 19 nt, Artificial Sequence
  Description of Artificial Sequence: Synthetic oligonucleotide
  Sense strand starting at position 2460 of SEQ ID NO: 1562232
gaagaaucugaauggcagu

SEQ ID NO: 1732064 - RNA, 19 nt, Artificial Sequence
  Description of Artificial Sequence: Synthetic oligonucleotide
  Antisense strand to SEQ ID NO: 1732063
acugccauucagauucuuc

SEQ ID NO: 1732065 - RNA, 19 nt, Artificial Sequence
  Description of Artificial Sequence: Synthetic oligonucleotide
  Sense strand starting at position 2724 of SEQ ID NO: 1562232
auuccuggauuuggaagaa

SEQ ID NO: 1732066 - RNA, 19 nt, Artificial Sequence
  Description of Artificial Sequence: Synthetic oligonucleotide
  Antisense strand to SEQ ID NO: 1732065
uucuuccaaauccaggaau

SEQ ID NO: 1732067 - RNA, 19 nt, Artificial Sequence
  Description of Artificial Sequence: Synthetic oligonucleotide
  Sense strand starting at position 2807 of SEQ ID NO: 1562232
ggguccuuucuuugaauga

SEQ ID NO: 1732068 - RNA, 19 nt, Artificial Sequence
  Description of Artificial Sequence: Synthetic oligonucleotide
  Antisense strand to SEQ ID NO: 1732067
ucauucaaagaaaggaccc

SEQ ID NO: 1732069 - RNA, 19 nt, Artificial Sequence
  Description of Artificial Sequence: Synthetic oligonucleotide
  Sense strand starting at position 2811 of SEQ ID NO: 1562232
ccuuucuuugaaugaguac

SEQ ID NO: 1732070 - RNA, 19 nt, Artificial Sequence
  Description of Artificial Sequence: Synthetic oligonucleotide
  Antisense strand to SEQ ID NO: 1732069
guacucauucaaagaaagg

SEQ ID NO: 1732071 - RNA, 19 nt, Artificial Sequence
  Description of Artificial Sequence: Synthetic oligonucleotide
  Sense strand starting at position 2814 of SEQ ID NO: 1562232
uucuuugaaugaguacuaa

SEQ ID NO: 1732072 - RNA, 19 nt, Artificial Sequence
  Description of Artificial Sequence: Synthetic oligonucleotide
  Antisense strand to SEQ ID NO: 1732071
uuaguacucauucaaagaa

SEQ ID NO: 1732073 - RNA, 19 nt, Artificial Sequence
  Description of Artificial Sequence: Synthetic oligonucleotide
  Sense strand starting at position 2912 of SEQ ID NO: 1562232
gagagaaauucugagaaga

SEQ ID NO: 1732074 - RNA, 19 nt, Artificial Sequence
  Description of Artificial Sequence: Synthetic oligonucleotide
  Antisense strand to SEQ ID NO: 1732073
ucuucucagaauuucucuc

SEQ ID NO: 1732075 - RNA, 19 nt, Artificial Sequence
  Description of Artificial Sequence: Synthetic oligonucleotide
  Sense strand starting at position 2914 of SEQ ID NO: 1562232
gagaaauucugagaagaua

SEQ ID NO: 1732076 - RNA, 19 nt, Artificial Sequence
  Description of Artificial Sequence: Synthetic oligonucleotide
  Antisense strand to SEQ ID NO: 1732075
uaucuucucagaauuucuc

SEQ ID NO: 1732077 - RNA, 19 nt, Artificial Sequence
  Description of Artificial Sequence: Synthetic oligonucleotide
  Sense strand starting at position 2971 of SEQ ID NO: 1562232
gggaguaauuuagaggaua

SEQ ID NO: 1732078 - RNA, 19 nt, Artificial Sequence
  Description of Artificial Sequence: Synthetic oligonucleotide
  Antisense strand to SEQ ID NO: 1732077
uauccucuaaauuacuccc

SEQ ID NO: 1732079 - RNA, 19 nt, Artificial Sequence
  Description of Artificial Sequence: Synthetic oligonucleotide
  Sense strand starting at position 3090 of SEQ ID NO: 1562232
uuggauuucugucauuuac

SEQ ID NO: 1732080 - RNA, 19 nt, Artificial Sequence
  Description of Artificial Sequence: Synthetic oligonucleotide
  Antisense strand to SEQ ID NO: 1732079
guaaaugacagaaauccaa

SEQ ID NO: 1732081 - RNA, 19 nt, Artificial Sequence
  Description of Artificial Sequence: Synthetic oligonucleotide
  Sense strand starting at position 3210 of SEQ ID NO: 1562232
ccuccauuccuggaaguga

SEQ ID NO: 1732082 - RNA, 19 nt, Artificial Sequence
  Description of Artificial Sequence: Synthetic oligonucleotide
  Antisense strand to SEQ ID NO: 1732081
ucacuuccaggaauggagg

SEQ ID NO: 1732083 - RNA, 19 nt, Artificial Sequence
  Description of Artificial Sequence: Synthetic oligonucleotide
  Sense strand starting at position 3238 of SEQ ID NO: 1562232
uuauuagguggugaaucuu

SEQ ID NO: 1732084 - RNA, 19 nt, Artificial Sequence
  Description of Artificial Sequence: Synthetic oligonucleotide
  Antisense strand to SEQ ID NO: 1732083
aagauucaccaccuaauaa

SEQ ID NO: 1732085 - RNA, 19 nt, Artificial Sequence
  Description of Artificial Sequence: Synthetic oligonucleotide
  Sense strand starting at position 3247 of SEQ ID NO: 1562232
ggugaaucuuugguuacaa

SEQ ID NO: 1732086 - RNA, 19 nt, Artificial Sequence
  Description of Artificial Sequence: Synthetic oligonucleotide
  Antisense strand to SEQ ID NO: 1732085
uuguaaccaaagauucacc

SEQ ID NO: 1732087 - RNA, 19 nt, Artificial Sequence
  Description of Artificial Sequence: Synthetic oligonucleotide
  Sense strand starting at position 3248 of SEQ ID NO: 1562232
gugaaucuuugguuacaau

SEQ ID NO: 1732088 - RNA, 19 nt, Artificial Sequence
  Description of Artificial Sequence: Synthetic oligonucleotide
  Antisense strand to SEQ ID NO: 1732087
auuguaaccaaagauucac

SEQ ID NO: 1732089 - RNA, 19 nt, Artificial Sequence
  Description of Artificial Sequence: Synthetic oligonucleotide
  Sense strand starting at position 3249 of SEQ ID NO: 1562232
ugaaucuuugguuacaauc

SEQ ID NO: 1732090 - RNA, 19 nt, Artificial Sequence
  Description of Artificial Sequence: Synthetic oligonucleotide
  Antisense strand to SEQ ID NO: 1732089
gauuguaaccaaagauuca

SEQ ID NO: 1732091 - RNA, 19 nt, Artificial Sequence
  Description of Artificial Sequence: Synthetic oligonucleotide
  Sense strand starting at position 3259 of SEQ ID NO: 1562232
guuacaaucucaccaguca

SEQ ID NO: 1732092 - RNA, 19 nt, Artificial Sequence
  Description of Artificial Sequence: Synthetic oligonucleotide
  Antisense strand to SEQ ID NO: 1732091
ugacuggugagauuguaac

SEQ ID NO: 1732093 - RNA, 19 nt, Artificial Sequence
  Description of Artificial Sequence: Synthetic oligonucleotide
  Sense strand starting at position 3271 of SEQ ID NO: 1562232
ccagucauaucacuggacu

SEQ ID NO: 1732094 - RNA, 19 nt, Artificial Sequence
  Description of Artificial Sequence: Synthetic oligonucleotide
  Antisense strand to SEQ ID NO: 1732093
aguccagugauaugacugg

SEQ ID NO: 1732095 - RNA, 19 nt, Artificial Sequence
  Description of Artificial Sequence: Synthetic oligonucleotide
  Sense strand starting at position 3696 of SEQ ID NO: 1562232
gucauuuguaauugacugu

SEQ ID NO: 1732096 - RNA, 19 nt, Artificial Sequence
  Description of Artificial Sequence: Synthetic oligonucleotide
  Antisense strand to SEQ ID NO: 1732095
acagucaauuacaaaugac

SEQ ID NO: 1732097 - RNA, 19 nt, Artificial Sequence
  Description of Artificial Sequence: Synthetic oligonucleotide
  Sense strand starting at position 3712 of SEQ ID NO: 1562232
uguugaugauacuucuuua

SEQ ID NO: 1732098 - RNA, 19 nt, Artificial Sequence
  Description of Artificial Sequence: Synthetic oligonucleotide
  Antisense strand to SEQ ID NO: 1732097
uaaagaaguaucaucaaca

SEQ ID NO: 1732099 - RNA, 19 nt, Artificial Sequence
  Description of Artificial Sequence: Synthetic oligonucleotide
  Sense strand starting at position 3884 of SEQ ID NO: 1562232
guuaaucauccucauguuu

SEQ ID NO: 1732100 - RNA, 19 nt, Artificial Sequence
  Description of Artificial Sequence: Synthetic oligonucleotide
  Antisense strand to SEQ ID NO: 1732099
aaacaugaggaugauuaac

SEQ ID NO: 1732101 - RNA, 19 nt, Artificial Sequence
  Description of Artificial Sequence: Synthetic oligonucleotide
  Sense strand starting at position 3923 of SEQ ID NO: 1562232
uugcuauggcuugcuuagu

SEQ ID NO: 1732102 - RNA, 19 nt, Artificial Sequence
  Description of Artificial Sequence: Synthetic oligonucleotide
  Antisense strand to SEQ ID NO: 1732101
acuaagcaagccauagcaa

SEQ ID NO: 1732103 - RNA, 19 nt, Artificial Sequence
  Description of Artificial Sequence: Synthetic oligonucleotide
  Sense strand starting at position 3950 of SEQ ID NO: 1562232
uuguuuaauuucguguaag

SEQ ID NO: 1732104 - RNA, 19 nt, Artificial Sequence
  Description of Artificial Sequence: Synthetic oligonucleotide
  Antisense strand to SEQ ID NO: 1732103
cuuacacgaaauuaaacaa

SEQ ID NO: 1732105 - RNA, 19 nt, Artificial Sequence
  Description of Artificial Sequence: Synthetic oligonucleotide
  Sense strand starting at position 3958 of SEQ ID NO: 1562232
uuucguguaagcguaauua

SEQ ID NO: 1732106 - RNA, 19 nt, Artificial Sequence
  Description of Artificial Sequence: Synthetic oligonucleotide
  Antisense strand to SEQ ID NO: 1732105
uaauuacgcuuacacgaaa

SEQ ID NO: 1732107 - RNA, 19 nt, Artificial Sequence
  Description of Artificial Sequence: Synthetic oligonucleotide
  Sense strand starting at position 3970 of SEQ ID NO: 1562232
guaauuauggccuaaguau

SEQ ID NO: 1732108 - RNA, 19 nt, Artificial Sequence
  Description of Artificial Sequence: Synthetic oligonucleotide
  Antisense strand to SEQ ID NO: 1732107
auacuuaggccauaauuac

SEQ ID NO: 1732109 - RNA, 19 nt, Artificial Sequence
  Description of Artificial Sequence: Synthetic oligonucleotide
  Sense strand starting at position 29 of SEQ ID NO: 1562233
gaaugagugaaagguaagu

SEQ ID NO: 1732110 - RNA, 19 nt, Artificial Sequence
  Description of Artificial Sequence: Synthetic oligonucleotide
  Antisense strand to SEQ ID NO: 1732109
acuuaccuuucacucauuc

SEQ ID NO: 1732111 - RNA, 19 nt, Artificial Sequence
  Description of Artificial Sequence: Synthetic oligonucleotide
  Sense strand starting at position 31 of SEQ ID NO: 1562233
augagugaaagguaaguuu

SEQ ID NO: 1732112 - RNA, 19 nt, Artificial Sequence
  Description of Artificial Sequence: Synthetic oligonucleotide
  Antisense strand to SEQ ID NO: 1732111
aaacuuaccuuucacucau

SEQ ID NO: 1732113 - RNA, 19 nt, Artificial Sequence
  Description of Artificial Sequence: Synthetic oligonucleotide
  Sense strand starting at position 116 of SEQ ID NO: 1562233
aaguaaguucugggaguga

SEQ ID NO: 1732114 - RNA, 19 nt, Artificial Sequence
  Description of Artificial Sequence: Synthetic oligonucleotide
  Antisense strand to SEQ ID NO: 1732113
ucacucccagaacuuacuu

SEQ ID NO: 1732115 - RNA, 19 nt, Artificial Sequence
  Description of Artificial Sequence: Synthetic oligonucleotide
  Sense strand starting at position 127 of SEQ ID NO: 1562233
gggagugacuucuuucaug

SEQ ID NO: 1732116 - RNA, 19 nt, Artificial Sequence
  Description of Artificial Sequence: Synthetic oligonucleotide
  Antisense strand to SEQ ID NO: 1732115
caugaaagaagucacuccc

SEQ ID NO: 1732117 - RNA, 19 nt, Artificial Sequence
  Description of Artificial Sequence: Synthetic oligonucleotide
  Sense strand starting at position 270 of SEQ ID NO: 1562233
ucauuauguugacuuccua

SEQ ID NO: 1732118 - RNA, 19 nt, Artificial Sequence
  Description of Artificial Sequence: Synthetic oligonucleotide
  Antisense strand to SEQ ID NO: 1732117
uaggaagucaacauaauga

SEQ ID NO: 1732119 - RNA, 19 nt, Artificial Sequence
  Description of Artificial Sequence: Synthetic oligonucleotide
  Sense strand starting at position 340 of SEQ ID NO: 1562233
cugggagagucuucccuaa

SEQ ID NO: 1732120 - RNA, 19 nt, Artificial Sequence
  Description of Artificial Sequence: Synthetic oligonucleotide
  Antisense strand to SEQ ID NO: 1732119
uuagggaagacucucccag

SEQ ID NO: 1732121 - RNA, 19 nt, Artificial Sequence
  Description of Artificial Sequence: Synthetic oligonucleotide
  Sense strand starting at position 342 of SEQ ID NO: 1562233
gggagagucuucccuaagu

SEQ ID NO: 1732122 - RNA, 19 nt, Artificial Sequence
  Description of Artificial Sequence: Synthetic oligonucleotide
  Antisense strand to SEQ ID NO: 1732121
acuuagggaagacucuccc

SEQ ID NO: 1732123 - RNA, 19 nt, Artificial Sequence
  Description of Artificial Sequence: Synthetic oligonucleotide
  Sense strand starting at position 344 of SEQ ID NO: 1562233
gagagucuucccuaagucc

SEQ ID NO: 1732124 - RNA, 19 nt, Artificial Sequence
  Description of Artificial Sequence: Synthetic oligonucleotide
  Antisense strand to SEQ ID NO: 1732123
ggacuuagggaagacucuc

SEQ ID NO: 1732125 - RNA, 19 nt, Artificial Sequence
  Description of Artificial Sequence: Synthetic oligonucleotide
  Sense strand starting at position 513 of SEQ ID NO: 1562233
agaggaauugugggucuau

SEQ ID NO: 1732126 - RNA, 19 nt, Artificial Sequence
  Description of Artificial Sequence: Synthetic oligonucleotide
  Antisense strand to SEQ ID NO: 1732125
auagacccacaauuccucu

SEQ ID NO: 1732127 - RNA, 19 nt, Artificial Sequence
  Description of Artificial Sequence: Synthetic oligonucleotide
  Sense strand starting at position 514 of SEQ ID NO: 1562233
gaggaauugugggucuauu

SEQ ID NO: 1732128 - RNA, 19 nt, Artificial Sequence
  Description of Artificial Sequence: Synthetic oligonucleotide
  Antisense strand to SEQ ID NO: 1732127
aauagacccacaauuccuc

SEQ ID NO: 1732129 - RNA, 19 nt, Artificial Sequence
  Description of Artificial Sequence: Synthetic oligonucleotide
  Sense strand starting at position 546 of SEQ ID NO: 1562233
uugcaauuagaaggaaauc

SEQ ID NO: 1732130 - RNA, 19 nt, Artificial Sequence
  Description of Artificial Sequence: Synthetic oligonucleotide
  Antisense strand to SEQ ID NO: 1732129
gauuuccuucuaauugcaa

SEQ ID NO: 1732131 - RNA, 19 nt, Artificial Sequence
  Description of Artificial Sequence: Synthetic oligonucleotide
  Sense strand starting at position 568 of SEQ ID NO: 1562233
aggauauuaugaugauuug

SEQ ID NO: 1732132 - RNA, 19 nt, Artificial Sequence
  Description of Artificial Sequence: Synthetic oligonucleotide
  Antisense strand to SEQ ID NO: 1732131
caaaucaucauaauauccu

SEQ ID NO: 1732133 - RNA, 19 nt, Artificial Sequence
  Description of Artificial Sequence: Synthetic oligonucleotide
  Sense strand starting at position 607 of SEQ ID NO: 1562233
aggucaugacuauaacugu

SEQ ID NO: 1732134 - RNA, 19 nt, Artificial Sequence
  Description of Artificial Sequence: Synthetic oligonucleotide
  Antisense strand to SEQ ID NO: 1732133
acaguuauagucaugaccu

SEQ ID NO: 1732135 - RNA, 19 nt, Artificial Sequence
  Description of Artificial Sequence: Synthetic oligonucleotide
  Sense strand starting at position 629 of SEQ ID NO: 1562233
agcaaauggcaccagaauu

SEQ ID NO: 1732136 - RNA, 19 nt, Artificial Sequence
  Description of Artificial Sequence: Synthetic oligonucleotide
  Antisense strand to SEQ ID NO: 1732135
aauucuggugccauuugcu

SEQ ID NO: 1732137 - RNA, 19 nt, Artificial Sequence
  Description of Artificial Sequence: Synthetic oligonucleotide
  Sense strand starting at position 1109 of SEQ ID NO: 1562233
caguauucugaagauguuu

SEQ ID NO: 1732138 - RNA, 19 nt, Artificial Sequence
  Description of Artificial Sequence: Synthetic oligonucleotide
  Antisense strand to SEQ ID NO: 1732137
aaacaucuucagaauacug

SEQ ID NO: 1732139 - RNA, 19 nt, Artificial Sequence
  Description of Artificial Sequence: Synthetic oligonucleotide
  Sense strand starting at position 1180 of SEQ ID NO: 1562233
auugguuaaggucaacauu

SEQ ID NO: 1732140 - RNA, 19 nt, Artificial Sequence
  Description of Artificial Sequence: Synthetic oligonucleotide
  Antisense strand to SEQ ID NO: 1732139
aauguugaccuuaaccaau

SEQ ID NO: 1732141 - RNA, 19 nt, Artificial Sequence
  Description of Artificial Sequence: Synthetic oligonucleotide
  Sense strand starting at position 1183 of SEQ ID NO: 1562233
gguuaaggucaacauuacu

SEQ ID NO: 1732142 - RNA, 19 nt, Artificial Sequence
  Description of Artificial Sequence: Synthetic oligonucleotide
  Antisense strand to SEQ ID NO: 1732141
aguaauguugaccuuaacc

SEQ ID NO: 1732143 - RNA, 19 nt, Artificial Sequence
  Description of Artificial Sequence: Synthetic oligonucleotide
  Sense strand starting at position 1371 of SEQ ID NO: 1562233
caagguuauguagauucua

SEQ ID NO: 1732144 - RNA, 19 nt, Artificial Sequence
  Description of Artificial Sequence: Synthetic oligonucleotide
  Antisense strand to SEQ ID NO: 1732143
uagaaucuacauaaccuug

SEQ ID NO: 1732145 - RNA, 19 nt, Artificial Sequence
  Description of Artificial Sequence: Synthetic oligonucleotide
  Sense strand starting at position 1488 of SEQ ID NO: 1562233
ugaugaggcugaucacauu

SEQ ID NO: 1732146 - RNA, 19 nt, Artificial Sequence
  Description of Artificial Sequence: Synthetic oligonucleotide
  Antisense strand to SEQ ID NO: 1732145
aaugugaucagccucauca

SEQ ID NO: 1732147 - RNA, 19 nt, Artificial Sequence
  Description of Artificial Sequence: Synthetic oligonucleotide
  Sense strand starting at position 1541 of SEQ ID NO: 1562233
uuuaguaagagugagcuau

SEQ ID NO: 1732148 - RNA, 19 nt, Artificial Sequence
  Description of Artificial Sequence: Synthetic oligonucleotide
  Antisense strand to SEQ ID NO: 1732147
auagcucacucuuacuaaa

SEQ ID NO: 1732149 - RNA, 19 nt, Artificial Sequence
  Description of Artificial Sequence: Synthetic oligonucleotide
  Sense strand starting at position 1545 of SEQ ID NO: 1562233
guaagagugagcuaugucu

SEQ ID NO: 1732150 - RNA, 19 nt, Artificial Sequence
  Description of Artificial Sequence: Synthetic oligonucleotide
  Antisense strand to SEQ ID NO: 1732149
agacauagcucacucuuac

SEQ ID NO: 1732151 - RNA, 19 nt, Artificial Sequence
  Description of Artificial Sequence: Synthetic oligonucleotide
  Sense strand starting at position 1717 of SEQ ID NO: 1562233
uuccaagaggugugacaga

SEQ ID NO: 1732152 - RNA, 19 nt, Artificial Sequence
  Description of Artificial Sequence: Synthetic oligonucleotide
  Antisense strand to SEQ ID NO: 1732151
ucugucacaccucuuggaa

SEQ ID NO: 1732153 - RNA, 19 nt, Artificial Sequence
  Description of Artificial Sequence: Synthetic oligonucleotide
  Sense strand starting at position 2194 of SEQ ID NO: 1562233
guggaaauuguacauguua

SEQ ID NO: 1732154 - RNA, 19 nt, Artificial Sequence
  Description of Artificial Sequence: Synthetic oligonucleotide
  Antisense strand to SEQ ID NO: 1732153
uaacauguacaauuuccac

SEQ ID NO: 1732155 - RNA, 19 nt, Artificial Sequence
  Description of Artificial Sequence: Synthetic oligonucleotide
  Sense strand starting at position 2608 of SEQ ID NO: 1562233
ugcuaauguagagaaguua

SEQ ID NO: 1732156 - RNA, 19 nt, Artificial Sequence
  Description of Artificial Sequence: Synthetic oligonucleotide
  Antisense strand to SEQ ID NO: 1732155
uaacuucucuacauuagca

SEQ ID NO: 1732157 - RNA, 19 nt, Artificial Sequence
  Description of Artificial Sequence: Synthetic oligonucleotide
  Sense strand starting at position 2743 of SEQ ID NO: 1562233
ucuuucuaucaauguagga

SEQ ID NO: 1732158 - RNA, 19 nt, Artificial Sequence
  Description of Artificial Sequence: Synthetic oligonucleotide
  Antisense strand to SEQ ID NO: 1732157
uccuacauugauagaaaga

SEQ ID NO: 1732159 - RNA, 19 nt, Artificial Sequence
  Description of Artificial Sequence: Synthetic oligonucleotide
  Sense strand starting at position 2849 of SEQ ID NO: 1562233
gcuugaaccuaggcagaua

SEQ ID NO: 1732160 - RNA, 19 nt, Artificial Sequence
  Description of Artificial Sequence: Synthetic oligonucleotide
  Antisense strand to SEQ ID NO: 1732159
uaucugccuagguucaagc

SEQ ID NO: 1732161 - RNA, 19 nt, Artificial Sequence
  Description of Artificial Sequence: Synthetic oligonucleotide
  Sense strand starting at position 3022 of SEQ ID NO: 1562233
ucuuuaaagcuuggaucuu

SEQ ID NO: 1732162 - RNA, 19 nt, Artificial Sequence
  Description of Artificial Sequence: Synthetic oligonucleotide
  Antisense strand to SEQ ID NO: 1732161
aagauccaagcuuuaaaga

SEQ ID NO: 1732163 - RNA, 19 nt, Artificial Sequence
  Description of Artificial Sequence: Synthetic oligonucleotide
  Sense strand starting at position 3056 of SEQ ID NO: 1562233
auuuguaacuaguuagcuu

SEQ ID NO: 1732164 - RNA, 19 nt, Artificial Sequence
  Description of Artificial Sequence: Synthetic oligonucleotide
  Antisense strand to SEQ ID NO: 1732163
aagcuaacuaguuacaaau

SEQ ID NO: 1732165 - RNA, 19 nt, Artificial Sequence
  Description of Artificial Sequence: Synthetic oligonucleotide
  Sense strand starting at position 3124 of SEQ ID NO: 1562233
uguuuaucauaggcaaaua

SEQ ID NO: 1732166 - RNA, 19 nt, Artificial Sequence
  Description of Artificial Sequence: Synthetic oligonucleotide
  Antisense strand to SEQ ID NO: 1732165
uauuugccuaugauaaaca

SEQ ID NO: 1732167 - RNA, 19 nt, Artificial Sequence
  Description of Artificial Sequence: Synthetic oligonucleotide
  Sense strand starting at position 3204 of SEQ ID NO: 1562233
ggcccuugaguacaucaua

SEQ ID NO: 1732168 - RNA, 19 nt, Artificial Sequence
  Description of Artificial Sequence: Synthetic oligonucleotide
  Antisense strand to SEQ ID NO: 1732167
uaugauguacucaagggcc

SEQ ID NO: 1732169 - RNA, 19 nt, Artificial Sequence
  Description of Artificial Sequence: Synthetic oligonucleotide
  Sense strand starting at position 3207 of SEQ ID NO: 1562233
ccuugaguacaucauaugu

SEQ ID NO: 1732170 - RNA, 19 nt, Artificial Sequence
  Description of Artificial Sequence: Synthetic oligonucleotide
  Antisense strand to SEQ ID NO: 1732169
acauaugauguacucaagg

SEQ ID NO: 1732171 - RNA, 19 nt, Artificial Sequence
  Description of Artificial Sequence: Synthetic oligonucleotide
  Sense strand starting at position 3216 of SEQ ID NO: 1562233
caucauauguaagugguga

SEQ ID NO: 1732172 - RNA, 19 nt, Artificial Sequence
  Description of Artificial Sequence: Synthetic oligonucleotide
  Antisense strand to SEQ ID NO: 1732171
ucaccacuuacauaugaug

SEQ ID NO: 1732173 - RNA, 19 nt, Artificial Sequence
  Description of Artificial Sequence: Synthetic oligonucleotide
  Sense strand starting at position 3217 of SEQ ID NO: 1562233
aucauauguaaguggugau

SEQ ID NO: 1732174 - RNA, 19 nt, Artificial Sequence
  Description of Artificial Sequence: Synthetic oligonucleotide
  Antisense strand to SEQ ID NO: 1732173
aucaccacuuacauaugau

SEQ ID NO: 1732175 - RNA, 19 nt, Artificial Sequence
  Description of Artificial Sequence: Synthetic oligonucleotide
  Sense strand starting at position 3218 of SEQ ID NO: 1562233
ucauauguaaguggugaua

SEQ ID NO: 1732176 - RNA, 19 nt, Artificial Sequence
  Description of Artificial Sequence: Synthetic oligonucleotide
  Antisense strand to SEQ ID NO: 1732175
uaucaccacuuacauauga

SEQ ID NO: 1732177 - RNA, 19 nt, Artificial Sequence
  Description of Artificial Sequence: Synthetic oligonucleotide
  Sense strand starting at position 3305 of SEQ ID NO: 1562233
acuuuagguuucucauaag

SEQ ID NO: 1732178 - RNA, 19 nt, Artificial Sequence
  Description of Artificial Sequence: Synthetic oligonucleotide
  Antisense strand to SEQ ID NO: 1732177
cuuaugagaaaccuaaagu

SEQ ID NO: 1732179 - RNA, 19 nt, Artificial Sequence
  Description of Artificial Sequence: Synthetic oligonucleotide
  Sense strand starting at position 3330 of SEQ ID NO: 1562233
cuaucagguuuagaaauuu

SEQ ID NO: 1732180 - RNA, 19 nt, Artificial Sequence
  Description of Artificial Sequence: Synthetic oligonucleotide
  Antisense strand to SEQ ID NO: 1732179
aaauuucuaaaccugauag

SEQ ID NO: 1732181 - RNA, 19 nt, Artificial Sequence
  Description of Artificial Sequence: Synthetic oligonucleotide
  Sense strand starting at position 3501 of SEQ ID NO: 1562233
gguaauauaaggugaucau

SEQ ID NO: 1732182 - RNA, 19 nt, Artificial Sequence
  Description of Artificial Sequence: Synthetic oligonucleotide
  Antisense strand to SEQ ID NO: 1732181
augaucaccuuauauuacc

SEQ ID NO: 1732183 - RNA, 19 nt, Artificial Sequence
  Description of Artificial Sequence: Synthetic oligonucleotide
  Sense strand starting at position 3508 of SEQ ID NO: 1562233
uaaggugaucauugaauau

SEQ ID NO: 1732184 - RNA, 19 nt, Artificial Sequence
  Description of Artificial Sequence: Synthetic oligonucleotide
  Antisense strand to SEQ ID NO: 1732183
auauucaaugaucaccuua

SEQ ID NO: 1732185 - RNA, 19 nt, Artificial Sequence
  Description of Artificial Sequence: Synthetic oligonucleotide
  Sense strand starting at position 3544 of SEQ ID NO: 1562233
uugguuuaguuugcuauuu

SEQ ID NO: 1732186 - RNA, 19 nt, Artificial Sequence
  Description of Artificial Sequence: Synthetic oligonucleotide
  Antisense strand to SEQ ID NO: 1732185
aaauagcaaacuaaaccaa

SEQ ID NO: 1732187 - RNA, 19 nt, Artificial Sequence
  Description of Artificial Sequence: Synthetic oligonucleotide
  Sense strand starting at position 3972 of SEQ ID NO: 1562233
uguauuguuggagguauaa

SEQ ID NO: 1732188 - RNA, 19 nt, Artificial Sequence
  Description of Artificial Sequence: Synthetic oligonucleotide
  Antisense strand to SEQ ID NO: 1732187
uuauaccuccaacaauaca

SEQ ID NO: 1732189 - RNA, 19 nt, Artificial Sequence
  Description of Artificial Sequence: Synthetic oligonucleotide
  Sense strand starting at position 303 of SEQ ID NO: 1562234
ggcuguauucuggauaaag

SEQ ID NO: 1732190 - RNA, 19 nt, Artificial Sequence
  Description of Artificial Sequence: Synthetic oligonucleotide
  Antisense strand to SEQ ID NO: 1732189
cuuuauccagaauacagcc

SEQ ID NO: 1732191 - RNA, 19 nt, Artificial Sequence
  Description of Artificial Sequence: Synthetic oligonucleotide
  Sense strand starting at position 499 of SEQ ID NO: 1562234
ucacucaauccuuagagug

SEQ ID NO: 1732192 - RNA, 19 nt, Artificial Sequence
  Description of Artificial Sequence: Synthetic oligonucleotide
  Antisense strand to SEQ ID NO: 1732191
cacucuaaggauugaguga

SEQ ID NO: 1732193 - RNA, 19 nt, Artificial Sequence
  Description of Artificial Sequence: Synthetic oligonucleotide
  Sense strand starting at position 550 of SEQ ID NO: 1562234
uacaguguccagggaggau

SEQ ID NO: 1732194 - RNA, 19 nt, Artificial Sequence
  Description of Artificial Sequence: Synthetic oligonucleotide
  Antisense strand to SEQ ID NO: 1732193
auccucccuggacacugua

SEQ ID NO: 1732195 - RNA, 19 nt, Artificial Sequence
  Description of Artificial Sequence: Synthetic oligonucleotide
  Sense strand starting at position 559 of SEQ ID NO: 1562234
cagggaggauuccucacuu

SEQ ID NO: 1732196 - RNA, 19 nt, Artificial Sequence
  Description of Artificial Sequence: Synthetic oligonucleotide
  Antisense strand to SEQ ID NO: 1732195
aagugaggaauccucccug

SEQ ID NO: 1732197 - RNA, 19 nt, Artificial Sequence
  Description of Artificial Sequence: Synthetic oligonucleotide
  Sense strand starting at position 727 of SEQ ID NO: 1562234
uuuccuaaaucuguaaagu

SEQ ID NO: 1732198 - RNA, 19 nt, Artificial Sequence
  Description of Artificial Sequence: Synthetic oligonucleotide
  Antisense strand to SEQ ID NO: 1732197
acuuuacagauuuaggaaa

SEQ ID NO: 1732199 - RNA, 19 nt, Artificial Sequence
  Description of Artificial Sequence: Synthetic oligonucleotide
  Sense strand starting at position 1453 of SEQ ID NO: 1562234
aaggaauucucagucucug

SEQ ID NO: 1732200 - RNA, 19 nt, Artificial Sequence
  Description of Artificial Sequence: Synthetic oligonucleotide
  Antisense strand to SEQ ID NO: 1732199
cagagacugagaauuccuu

SEQ ID NO: 1732201 - RNA, 19 nt, Artificial Sequence
  Description of Artificial Sequence: Synthetic oligonucleotide
  Sense strand starting at position 1498 of SEQ ID NO: 1562234
agagacuccuucuuccaga

SEQ ID NO: 1732202 - RNA, 19 nt, Artificial Sequence
  Description of Artificial Sequence: Synthetic oligonucleotide
  Antisense strand to SEQ ID NO: 1732201
ucuggaagaaggagucucu

SEQ ID NO: 1732203 - RNA, 19 nt, Artificial Sequence
  Description of Artificial Sequence: Synthetic oligonucleotide
  Sense strand starting at position 1542 of SEQ ID NO: 1562234
acgagagcucccuaacccu

SEQ ID NO: 1732204 - RNA, 19 nt, Artificial Sequence
  Description of Artificial Sequence: Synthetic oligonucleotide
  Antisense strand to SEQ ID NO: 1732203
aggguuagggagcucucgu

SEQ ID NO: 1732205 - RNA, 19 nt, Artificial Sequence
  Description of Artificial Sequence: Synthetic oligonucleotide
  Sense strand starting at position 2287 of SEQ ID NO: 1562234
cuggguuucuauuccaaga

SEQ ID NO: 1732206 - RNA, 19 nt, Artificial Sequence
  Description of Artificial Sequence: Synthetic oligonucleotide
  Antisense strand to SEQ ID NO: 1732205
ucuuggaauagaaacccag

SEQ ID NO: 1732207 - RNA, 19 nt, Artificial Sequence
  Description of Artificial Sequence: Synthetic oligonucleotide
  Sense strand starting at position 2300 of SEQ ID NO: 1562234
ccaagacuccgagguuucu

SEQ ID NO: 1732208 - RNA, 19 nt, Artificial Sequence
  Description of Artificial Sequence: Synthetic oligonucleotide
  Antisense strand to SEQ ID NO: 1732207
agaaaccucggagucuugg

SEQ ID NO: 1732209 - RNA, 19 nt, Artificial Sequence
  Description of Artificial Sequence: Synthetic oligonucleotide
  Sense strand starting at position 2310 of SEQ ID NO: 1562234
gagguuucuccagaguguc

SEQ ID NO: 1732210 - RNA, 19 nt, Artificial Sequence
  Description of Artificial Sequence: Synthetic oligonucleotide
  Antisense strand to SEQ ID NO: 1732209
gacacucuggagaaaccuc

SEQ ID NO: 1732211 - RNA, 19 nt, Artificial Sequence
  Description of Artificial Sequence: Synthetic oligonucleotide
  Sense strand starting at position 2451 of SEQ ID NO: 1562234
gguagugauacagagcaca

SEQ ID NO: 1732212 - RNA, 19 nt, Artificial Sequence
  Description of Artificial Sequence: Synthetic oligonucleotide
  Antisense strand to SEQ ID NO: 1732211
ugugcucuguaucacuacc

SEQ ID NO: 1732213 - RNA, 19 nt, Artificial Sequence
  Description of Artificial Sequence: Synthetic oligonucleotide
  Sense strand starting at position 2682 of SEQ ID NO: 1562234
gaguuacuguuaucagcug

SEQ ID NO: 1732214 - RNA, 19 nt, Artificial Sequence
  Description of Artificial Sequence: Synthetic oligonucleotide
  Antisense strand to SEQ ID NO: 1732213
cagcugauaacaguaacuc

SEQ ID NO: 1732215 - RNA, 19 nt, Artificial Sequence
  Description of Artificial Sequence: Synthetic oligonucleotide
  Sense strand starting at position 2689 of SEQ ID NO: 1562234
uguuaucagcuguauauga

SEQ ID NO: 1732216 - RNA, 19 nt, Artificial Sequence
  Description of Artificial Sequence: Synthetic oligonucleotide
  Antisense strand to SEQ ID NO: 1732215
ucauauacagcugauaaca

SEQ ID NO: 1732217 - RNA, 19 nt, Artificial Sequence
  Description of Artificial Sequence: Synthetic oligonucleotide
  Sense strand starting at position 2691 of SEQ ID NO: 1562234
uuaucagcuguauaugaca

SEQ ID NO: 1732218 - RNA, 19 nt, Artificial Sequence
  Description of Artificial Sequence: Synthetic oligonucleotide
  Antisense strand to SEQ ID NO: 1732217
ugucauauacagcugauaa

SEQ ID NO: 1732219 - RNA, 19 nt, Artificial Sequence
  Description of Artificial Sequence: Synthetic oligonucleotide
  Sense strand starting at position 2709 of SEQ ID NO: 1562234
aaaggaacugaguguuuag

SEQ ID NO: 1732220 - RNA, 19 nt, Artificial Sequence
  Description of Artificial Sequence: Synthetic oligonucleotide
  Antisense strand to SEQ ID NO: 1732219
cuaaacacucaguuccuuu

SEQ ID NO: 1732221 - RNA, 19 nt, Artificial Sequence
  Description of Artificial Sequence: Synthetic oligonucleotide
  Sense strand starting at position 2712 of SEQ ID NO: 1562234
ggaacugaguguuuaggga

SEQ ID NO: 1732222 - RNA, 19 nt, Artificial Sequence
  Description of Artificial Sequence: Synthetic oligonucleotide
  Antisense strand to SEQ ID NO: 1732221
ucccuaaacacucaguucc

SEQ ID NO: 1732223 - RNA, 19 nt, Artificial Sequence
  Description of Artificial Sequence: Synthetic oligonucleotide
  Sense strand starting at position 2760 of SEQ ID NO: 1562234
ccugcaaagcuguacaaau

SEQ ID NO: 1732224 - RNA, 19 nt, Artificial Sequence
  Description of Artificial Sequence: Synthetic oligonucleotide
  Antisense strand to SEQ ID NO: 1732223
auuuguacagcuuugcagg

SEQ ID NO: 1732225 - RNA, 19 nt, Artificial Sequence
  Description of Artificial Sequence: Synthetic oligonucleotide
  Sense strand starting at position 2762 of SEQ ID NO: 1562234
ugcaaagcuguacaaauaa

SEQ ID NO: 1732226 - RNA, 19 nt, Artificial Sequence
  Description of Artificial Sequence: Synthetic oligonucleotide
  Antisense strand to SEQ ID NO: 1732225
uuauuuguacagcuuugca

SEQ ID NO: 1732227 - RNA, 19 nt, Artificial Sequence
  Description of Artificial Sequence: Synthetic oligonucleotide
  Sense strand starting at position 2859 of SEQ ID NO: 1562234
ugacauaugcagggcaaga

SEQ ID NO: 1732228 - RNA, 19 nt, Artificial Sequence
  Description of Artificial Sequence: Synthetic oligonucleotide
  Antisense strand to SEQ ID NO: 1732227
ucuugcccugcauauguca

SEQ ID NO: 1732229 - RNA, 19 nt, Artificial Sequence
  Description of Artificial Sequence: Synthetic oligonucleotide
  Sense strand starting at position 2870 of SEQ ID NO: 1562234
gggcaagacgcuuggugaa

SEQ ID NO: 1732230 - RNA, 19 nt, Artificial Sequence
  Description of Artificial Sequence: Synthetic oligonucleotide
  Antisense strand to SEQ ID NO: 1732229
uucaccaagcgucuugccc

SEQ ID NO: 1732231 - RNA, 19 nt, Artificial Sequence
  Description of Artificial Sequence: Synthetic oligonucleotide
  Sense strand starting at position 2872 of SEQ ID NO: 1562234
gcaagacgcuuggugaaga

SEQ ID NO: 1732232 - RNA, 19 nt, Artificial Sequence
  Description of Artificial Sequence: Synthetic oligonucleotide
  Antisense strand to SEQ ID NO: 1732231
ucuucaccaagcgucuugc

SEQ ID NO: 1732233 - RNA, 19 nt, Artificial Sequence
  Description of Artificial Sequence: Synthetic oligonucleotide
  Sense strand starting at position 2885 of SEQ ID NO: 1562234
ugaagagaaagucgucaaa

SEQ ID NO: 1732234 - RNA, 19 nt, Artificial Sequence
  Description of Artificial Sequence: Synthetic oligonucleotide
  Antisense strand to SEQ ID NO: 1732233
uuugacgacuuucucuuca

SEQ ID NO: 1732235 - RNA, 19 nt, Artificial Sequence
  Description of Artificial Sequence: Synthetic oligonucleotide
  Sense strand starting at position 3014 of SEQ ID NO: 1562234
cugccacaucaucagugaa

SEQ ID NO: 1732236 - RNA, 19 nt, Artificial Sequence
  Description of Artificial Sequence: Synthetic oligonucleotide
  Antisense strand to SEQ ID NO: 1732235
uucacugaugauguggcag

SEQ ID NO: 1732237 - RNA, 19 nt, Artificial Sequence
  Description of Artificial Sequence: Synthetic oligonucleotide
  Sense strand starting at position 3119 of SEQ ID NO: 1562234
guagauccacacugauuga

SEQ ID NO: 1732238 - RNA, 19 nt, Artificial Sequence
  Description of Artificial Sequence: Synthetic oligonucleotide
  Antisense strand to SEQ ID NO: 1732237
ucaaucaguguggaucuac

SEQ ID NO: 1732239 - RNA, 19 nt, Artificial Sequence
  Description of Artificial Sequence: Synthetic oligonucleotide
  Sense strand starting at position 3172 of SEQ ID NO: 1562234
uggauacauggccaugagu

SEQ ID NO: 1732240 - RNA, 19 nt, Artificial Sequence
  Description of Artificial Sequence: Synthetic oligonucleotide
  Antisense strand to SEQ ID NO: 1732239
acucauggccauguaucca

SEQ ID NO: 1732241 - RNA, 19 nt, Artificial Sequence
  Description of Artificial Sequence: Synthetic oligonucleotide
  Sense strand starting at position 3183 of SEQ ID NO: 1562234
ccaugagugcuccacagau

SEQ ID NO: 1732242 - RNA, 19 nt, Artificial Sequence
  Description of Artificial Sequence: Synthetic oligonucleotide
  Antisense strand to SEQ ID NO: 1732241
aucuguggagcacucaugg

SEQ ID NO: 1732243 - RNA, 19 nt, Artificial Sequence
  Description of Artificial Sequence: Synthetic oligonucleotide
  Sense strand starting at position 3185 of SEQ ID NO: 1562234
augagugcuccacagauaa

SEQ ID NO: 1732244 - RNA, 19 nt, Artificial Sequence
  Description of Artificial Sequence: Synthetic oligonucleotide
  Antisense strand to SEQ ID NO: 1732243
uuaucuguggagcacucau

SEQ ID NO: 1732245 - RNA, 19 nt, Artificial Sequence
  Description of Artificial Sequence: Synthetic oligonucleotide
  Sense strand starting at position 3198 of SEQ ID NO: 1562234
agauaagugucuccuguga

SEQ ID NO: 1732246 - RNA, 19 nt, Artificial Sequence
  Description of Artificial Sequence: Synthetic oligonucleotide
  Antisense strand to SEQ ID NO: 1732245
ucacaggagacacuuaucu

SEQ ID NO: 1732247 - RNA, 19 nt, Artificial Sequence
  Description of Artificial Sequence: Synthetic oligonucleotide
  Sense strand starting at position 3202 of SEQ ID NO: 1562234
aagugucuccugugacgaa

SEQ ID NO: 1732248 - RNA, 19 nt, Artificial Sequence
  Description of Artificial Sequence: Synthetic oligonucleotide
  Antisense strand to SEQ ID NO: 1732247
uucgucacaggagacacuu

SEQ ID NO: 1732249 - RNA, 19 nt, Artificial Sequence
  Description of Artificial Sequence: Synthetic oligonucleotide
  Sense strand starting at position 3275 of SEQ ID NO: 1562234
cagaguuacccagggaguu

SEQ ID NO: 1732250 - RNA, 19 nt, Artificial Sequence
  Description of Artificial Sequence: Synthetic oligonucleotide
  Antisense strand to SEQ ID NO: 1732249
aacucccuggguaacucug

SEQ ID NO: 1732251 - RNA, 19 nt, Artificial Sequence
  Description of Artificial Sequence: Synthetic oligonucleotide
  Sense strand starting at position 3276 of SEQ ID NO: 1562234
agaguuacccagggaguua

SEQ ID NO: 1732252 - RNA, 19 nt, Artificial Sequence
  Description of Artificial Sequence: Synthetic oligonucleotide
  Antisense strand to SEQ ID NO: 1732251
uaacucccuggguaacucu

SEQ ID NO: 1732253 - RNA, 19 nt, Artificial Sequence
  Description of Artificial Sequence: Synthetic oligonucleotide
  Sense strand starting at position 3304 of SEQ ID NO: 1562234
ugcuuccugcuccaaugau

SEQ ID NO: 1732254 - RNA, 19 nt, Artificial Sequence
  Description of Artificial Sequence: Synthetic oligonucleotide
  Antisense strand to SEQ ID NO: 1732253
aucauuggagcaggaagca

SEQ ID NO: 1732255 - RNA, 19 nt, Artificial Sequence
  Description of Artificial Sequence: Synthetic oligonucleotide
  Sense strand starting at position 3382 of SEQ ID NO: 1562234
agugaacacugggaugaua

SEQ ID NO: 1732256 - RNA, 19 nt, Artificial Sequence
  Description of Artificial Sequence: Synthetic oligonucleotide
  Antisense strand to SEQ ID NO: 1732255
uaucaucccaguguucacu

SEQ ID NO: 1732257 - RNA, 19 nt, Artificial Sequence
  Description of Artificial Sequence: Synthetic oligonucleotide
  Sense strand starting at position 3408 of SEQ ID NO: 1562234
gugaguaggguuuggugau

SEQ ID NO: 1732258 - RNA, 19 nt, Artificial Sequence
  Description of Artificial Sequence: Synthetic oligonucleotide
  Antisense strand to SEQ ID NO: 1732257
aucaccaaacccuacucac

SEQ ID NO: 1732259 - RNA, 19 nt, Artificial Sequence
  Description of Artificial Sequence: Synthetic oligonucleotide
  Sense strand starting at position 3420 of SEQ ID NO: 1562234
uggugaugugaguacaucu

SEQ ID NO: 1732260 - RNA, 19 nt, Artificial Sequence
  Description of Artificial Sequence: Synthetic oligonucleotide
  Antisense strand to SEQ ID NO: 1732259
agauguacucacaucacca

SEQ ID NO: 1732261 - RNA, 19 nt, Artificial Sequence
  Description of Artificial Sequence: Synthetic oligonucleotide
  Sense strand starting at position 3529 of SEQ ID NO: 1562234
ggcuauuuacucugagcuc

SEQ ID NO: 1732262 - RNA, 19 nt, Artificial Sequence
  Description of Artificial Sequence: Synthetic oligonucleotide
  Antisense strand to SEQ ID NO: 1732261
gagcucagaguaaauagcc

SEQ ID NO: 1732263 - RNA, 19 nt, Artificial Sequence
  Description of Artificial Sequence: Synthetic oligonucleotide
  Sense strand starting at position 3774 of SEQ ID NO: 1562234
uuaugagcacccuauugau

SEQ ID NO: 1732264 - RNA, 19 nt, Artificial Sequence
  Description of Artificial Sequence: Synthetic oligonucleotide
  Antisense strand to SEQ ID NO: 1732263
aucaauagggugcucauaa

SEQ ID NO: 1732265 - RNA, 19 nt, Artificial Sequence
  Description of Artificial Sequence: Synthetic oligonucleotide
  Sense strand starting at position 3869 of SEQ ID NO: 1562234
agucaauggcaucagaugu

SEQ ID NO: 1732266 - RNA, 19 nt, Artificial Sequence
  Description of Artificial Sequence: Synthetic oligonucleotide
  Antisense strand to SEQ ID NO: 1732265
acaucugaugccauugacu

SEQ ID NO: 1732267 - RNA, 19 nt, Artificial Sequence
  Description of Artificial Sequence: Synthetic oligonucleotide
  Sense strand starting at position 3877 of SEQ ID NO: 1562234
gcaucagauguuuagcuuu

SEQ ID NO: 1732268 - RNA, 19 nt, Artificial Sequence
  Description of Artificial Sequence: Synthetic oligonucleotide
  Antisense strand to SEQ ID NO: 1732267
aaagcuaaacaucugaugc

SEQ ID NO: 1732269 - RNA, 19 nt, Artificial Sequence
  Description of Artificial Sequence: Synthetic oligonucleotide
  Sense strand starting at position 65 of SEQ ID NO: 1562235
caugaugaugcugagaguu

SEQ ID NO: 1732270 - RNA, 19 nt, Artificial Sequence
  Description of Artificial Sequence: Synthetic oligonucleotide
  Antisense strand to SEQ ID NO: 1732269
aacucucagcaucaucaug

SEQ ID NO: 1732271 - RNA, 19 nt, Artificial Sequence
  Description of Artificial Sequence: Synthetic oligonucleotide
  Sense strand starting at position 125 of SEQ ID NO: 1562235
cagaguaucagcugaggua

SEQ ID NO: 1732272 - RNA, 19 nt, Artificial Sequence
  Description of Artificial Sequence: Synthetic oligonucleotide
  Antisense strand to SEQ ID NO: 1732271
uaccucagcugauacucug

SEQ ID NO: 1732273 - RNA, 19 nt, Artificial Sequence
  Description of Artificial Sequence: Synthetic oligonucleotide
  Sense strand starting at position 126 of SEQ ID NO: 1562235
agaguaucagcugagguau

SEQ ID NO: 1732274 - RNA, 19 nt, Artificial Sequence
  Description of Artificial Sequence: Synthetic oligonucleotide
  Antisense strand to SEQ ID NO: 1732273
auaccucagcugauacucu

SEQ ID NO: 1732275 - RNA, 19 nt, Artificial Sequence
  Description of Artificial Sequence: Synthetic oligonucleotide
  Sense strand starting at position 424 of SEQ ID NO: 1562235
auggcuuuagcccaaauaa

SEQ ID NO: 1732276 - RNA, 19 nt, Artificial Sequence
  Description of Artificial Sequence: Synthetic oligonucleotide
  Antisense strand to SEQ ID NO: 1732275
uuauuugggcuaaagccau

SEQ ID NO: 1732277 - RNA, 19 nt, Artificial Sequence
  Description of Artificial Sequence: Synthetic oligonucleotide
  Sense strand starting at position 868 of SEQ ID NO: 1562235
guaguugaguuuguuaaga

SEQ ID NO: 1732278 - RNA, 19 nt, Artificial Sequence
  Description of Artificial Sequence: Synthetic oligonucleotide
  Antisense strand to SEQ ID NO: 1732277
ucuuaacaaacucaacuac

SEQ ID NO: 1732279 - RNA, 19 nt, Artificial Sequence
  Description of Artificial Sequence: Synthetic oligonucleotide
  Sense strand starting at position 939 of SEQ ID NO: 1562235
ccauucuuggacuguauga

SEQ ID NO: 1732280 - RNA, 19 nt, Artificial Sequence
  Description of Artificial Sequence: Synthetic oligonucleotide
  Antisense strand to SEQ ID NO: 1732279
ucauacaguccaagaaugg

SEQ ID NO: 1732281 - RNA, 19 nt, Artificial Sequence
  Description of Artificial Sequence: Synthetic oligonucleotide
  Sense strand starting at position 955 of SEQ ID NO: 1562235
ugaagucuagcuggcagaa

SEQ ID NO: 1732282 - RNA, 19 nt, Artificial Sequence
  Description of Artificial Sequence: Synthetic oligonucleotide
  Antisense strand to SEQ ID NO: 1732281
uucugccagcuagacuuca

SEQ ID NO: 1732283 - RNA, 19 nt, Artificial Sequence
  Description of Artificial Sequence: Synthetic oligonucleotide
  Sense strand starting at position 980 of SEQ ID NO: 1562235
agaaguugcuauguaugac

SEQ ID NO: 1732284 - RNA, 19 nt, Artificial Sequence
  Description of Artificial Sequence: Synthetic oligonucleotide
  Antisense strand to SEQ ID NO: 1732283
gucauacauagcaacuucu

SEQ ID NO: 1732285 - RNA, 19 nt, Artificial Sequence
  Description of Artificial Sequence: Synthetic oligonucleotide
  Sense strand starting at position 986 of SEQ ID NO: 1562235
ugcuauguaugacucaaau

SEQ ID NO: 1732286 - RNA, 19 nt, Artificial Sequence
  Description of Artificial Sequence: Synthetic oligonucleotide
  Antisense strand to SEQ ID NO: 1732285
auuugagucauacauagca

SEQ ID NO: 1732287 - RNA, 19 nt, Artificial Sequence
  Description of Artificial Sequence: Synthetic oligonucleotide
  Sense strand starting at position 1085 of SEQ ID NO: 1562235
agcugugauaccuaauggu

SEQ ID NO: 1732288 - RNA, 19 nt, Artificial Sequence
  Description of Artificial Sequence: Synthetic oligonucleotide
  Antisense strand to SEQ ID NO: 1732287
accauuagguaucacagcu

SEQ ID NO: 1732289 - RNA, 19 nt, Artificial Sequence
  Description of Artificial Sequence: Synthetic oligonucleotide
  Sense strand starting at position 1194 of SEQ ID NO: 1562235
ugguuagaaggcugauguu

SEQ ID NO: 1732290 - RNA, 19 nt, Artificial Sequence
  Description of Artificial Sequence: Synthetic oligonucleotide
  Antisense strand to SEQ ID NO: 1732289
aacaucagccuucuaacca

SEQ ID NO: 1732291 - RNA, 19 nt, Artificial Sequence
  Description of Artificial Sequence: Synthetic oligonucleotide
  Sense strand starting at position 1246 of SEQ ID NO: 1562235
cucauaugugccuaauaug

SEQ ID NO: 1732292 - RNA, 19 nt, Artificial Sequence
  Description of Artificial Sequence: Synthetic oligonucleotide
  Antisense strand to SEQ ID NO: 1732291
cauauuaggcacauaugag

SEQ ID NO: 1732293 - RNA, 19 nt, Artificial Sequence
  Description of Artificial Sequence: Synthetic oligonucleotide
  Sense strand starting at position 1337 of SEQ ID NO: 1562235
gcgaucucggcauaauuaa

SEQ ID NO: 1732294 - RNA, 19 nt, Artificial Sequence
  Description of Artificial Sequence: Synthetic oligonucleotide
  Antisense strand to SEQ ID NO: 1732293
uuaauuaugccgagaucgc

SEQ ID NO: 1732295 - RNA, 19 nt, Artificial Sequence
  Description of Artificial Sequence: Synthetic oligonucleotide
  Sense strand starting at position 1344 of SEQ ID NO: 1562235
cggcauaauuaacauuuga

SEQ ID NO: 1732296 - RNA, 19 nt, Artificial Sequence
  Description of Artificial Sequence: Synthetic oligonucleotide
  Antisense strand to SEQ ID NO: 1732295
ucaaauguuaauuaugccg

SEQ ID NO: 1732297 - RNA, 19 nt, Artificial Sequence
  Description of Artificial Sequence: Synthetic oligonucleotide
  Sense strand starting at position 1828 of SEQ ID NO: 1562235
cgggaaacaucccuugacu

SEQ ID NO: 1732298 - RNA, 19 nt, Artificial Sequence
  Description of Artificial Sequence: Synthetic oligonucleotide
  Antisense strand to SEQ ID NO: 1732297
agucaagggauguuucccg

SEQ ID NO: 1732299 - RNA, 19 nt, Artificial Sequence
  Description of Artificial Sequence: Synthetic oligonucleotide
  Sense strand starting at position 2324 of SEQ ID NO: 1562235
gcccgacgaccuggauuua

SEQ ID NO: 1732300 - RNA, 19 nt, Artificial Sequence
  Description of Artificial Sequence: Synthetic oligonucleotide
  Antisense strand to SEQ ID NO: 1732299
uaaauccaggucgucgggc

SEQ ID NO: 1732301 - RNA, 19 nt, Artificial Sequence
  Description of Artificial Sequence: Synthetic oligonucleotide
  Sense strand starting at position 2432 of SEQ ID NO: 1562235
auuaguaccugucucauaa

SEQ ID NO: 1732302 - RNA, 19 nt, Artificial Sequence
  Description of Artificial Sequence: Synthetic oligonucleotide
  Antisense strand to SEQ ID NO: 1732301
uuaugagacagguacuaau

SEQ ID NO: 1732303 - RNA, 19 nt, Artificial Sequence
  Description of Artificial Sequence: Synthetic oligonucleotide
  Sense strand starting at position 2510 of SEQ ID NO: 1562235
agaguugacccucgguaaa

SEQ ID NO: 1732304 - RNA, 19 nt, Artificial Sequence
  Description of Artificial Sequence: Synthetic oligonucleotide
  Antisense strand to SEQ ID NO: 1732303
uuuaccgagggucaacucu

SEQ ID NO: 1732305 - RNA, 19 nt, Artificial Sequence
  Description of Artificial Sequence: Synthetic oligonucleotide
  Sense strand starting at position 2512 of SEQ ID NO: 1562235
aguugacccucgguaaaua

SEQ ID NO: 1732306 - RNA, 19 nt, Artificial Sequence
  Description of Artificial Sequence: Synthetic oligonucleotide
  Antisense strand to SEQ ID NO: 1732305
uauuuaccgagggucaacu

SEQ ID NO: 1732307 - RNA, 19 nt, Artificial Sequence
  Description of Artificial Sequence: Synthetic oligonucleotide
  Sense strand starting at position 2523 of SEQ ID NO: 1562235
gguaaauacugcuucccuu

SEQ ID NO: 1732308 - RNA, 19 nt, Artificial Sequence
  Description of Artificial Sequence: Synthetic oligonucleotide
  Antisense strand to SEQ ID NO: 1732307
aagggaagcaguauuuacc

SEQ ID NO: 1732309 - RNA, 19 nt, Artificial Sequence
  Description of Artificial Sequence: Synthetic oligonucleotide
  Sense strand starting at position 2581 of SEQ ID NO: 1562235
gcaggaaacuuccucaguu

SEQ ID NO: 1732310 - RNA, 19 nt, Artificial Sequence
  Description of Artificial Sequence: Synthetic oligonucleotide
  Antisense strand to SEQ ID NO: 1732309
aacugaggaaguuuccugc

SEQ ID NO: 1732311 - RNA, 19 nt, Artificial Sequence
  Description of Artificial Sequence: Synthetic oligonucleotide
  Sense strand starting at position 2654 of SEQ ID NO: 1562235
uggugacggaucugagaag

SEQ ID NO: 1732312 - RNA, 19 nt, Artificial Sequence
  Description of Artificial Sequence: Synthetic oligonucleotide
  Antisense strand to SEQ ID NO: 1732311
cuucucagauccgucacca

SEQ ID NO: 1732313 - RNA, 19 nt, Artificial Sequence
  Description of Artificial Sequence: Synthetic oligonucleotide
  Sense strand starting at position 2673 of SEQ ID NO: 1562235
cagggauguccagguuuaa

SEQ ID NO: 1732314 - RNA, 19 nt, Artificial Sequence
  Description of Artificial Sequence: Synthetic oligonucleotide
  Antisense strand to SEQ ID NO: 1732313
uuaaaccuggacaucccug

SEQ ID NO: 1732315 - RNA, 19 nt, Artificial Sequence
  Description of Artificial Sequence: Synthetic oligonucleotide
  Sense strand starting at position 2739 of SEQ ID NO: 1562235
cagugacauuuguuccguu

SEQ ID NO: 1732316 - RNA, 19 nt, Artificial Sequence
  Description of Artificial Sequence: Synthetic oligonucleotide
  Antisense strand to SEQ ID NO: 1732315
aacggaacaaaugucacug

SEQ ID NO: 1732317 - RNA, 19 nt, Artificial Sequence
  Description of Artificial Sequence: Synthetic oligonucleotide
  Sense strand starting at position 2765 of SEQ ID NO: 1562235
acagaacccuuggaacaua

SEQ ID NO: 1732318 - RNA, 19 nt, Artificial Sequence
  Description of Artificial Sequence: Synthetic oligonucleotide
  Antisense strand to SEQ ID NO: 1732317
uauguuccaaggguucugu

SEQ ID NO: 1732319 - RNA, 19 nt, Artificial Sequence
  Description of Artificial Sequence: Synthetic oligonucleotide
  Sense strand starting at position 2922 of SEQ ID NO: 1562235
gagaucuacagccgguaga

SEQ ID NO: 1732320 - RNA, 19 nt, Artificial Sequence
  Description of Artificial Sequence: Synthetic oligonucleotide
  Antisense strand to SEQ ID NO: 1732319
ucuaccggcuguagaucuc

SEQ ID NO: 1732321 - RNA, 19 nt, Artificial Sequence
  Description of Artificial Sequence: Synthetic oligonucleotide
  Sense strand starting at position 2923 of SEQ ID NO: 1562235
agaucuacagccgguagaa

SEQ ID NO: 1732322 - RNA, 19 nt, Artificial Sequence
  Description of Artificial Sequence: Synthetic oligonucleotide
  Antisense strand to SEQ ID NO: 1732321
uucuaccggcuguagaucu

SEQ ID NO: 1732323 - RNA, 19 nt, Artificial Sequence
  Description of Artificial Sequence: Synthetic oligonucleotide
  Sense strand starting at position 2980 of SEQ ID NO: 1562235
aacucugugugaucuugaa

SEQ ID NO: 1732324 - RNA, 19 nt, Artificial Sequence
  Description of Artificial Sequence: Synthetic oligonucleotide
  Antisense strand to SEQ ID NO: 1732323
uucaagaucacacagaguu

SEQ ID NO: 1732325 - RNA, 19 nt, Artificial Sequence
  Description of Artificial Sequence: Synthetic oligonucleotide
  Sense strand starting at position 2984 of SEQ ID NO: 1562235
cugugugaucuugaacuag

SEQ ID NO: 1732326 - RNA, 19 nt, Artificial Sequence
  Description of Artificial Sequence: Synthetic oligonucleotide
  Antisense strand to SEQ ID NO: 1732325
cuaguucaagaucacacag

SEQ ID NO: 1732327 - RNA, 19 nt, Artificial Sequence
  Description of Artificial Sequence: Synthetic oligonucleotide
  Sense strand starting at position 3128 of SEQ ID NO: 1562235
ucaguuagcauggaguuua

SEQ ID NO: 1732328 - RNA, 19 nt, Artificial Sequence
  Description of Artificial Sequence: Synthetic oligonucleotide
  Antisense strand to SEQ ID NO: 1732327
uaaacuccaugcuaacuga

SEQ ID NO: 1732329 - RNA, 19 nt, Artificial Sequence
  Description of Artificial Sequence: Synthetic oligonucleotide
  Sense strand starting at position 3167 of SEQ ID NO: 1562235
agacaacuguguucucauc

SEQ ID NO: 1732330 - RNA, 19 nt, Artificial Sequence
  Description of Artificial Sequence: Synthetic oligonucleotide
  Antisense strand to SEQ ID NO: 1732329
gaugagaacacaguugucu

SEQ ID NO: 1732331 - RNA, 19 nt, Artificial Sequence
  Description of Artificial Sequence: Synthetic oligonucleotide
  Sense strand starting at position 3169 of SEQ ID NO: 1562235
acaacuguguucucaucaa

SEQ ID NO: 1732332 - RNA, 19 nt, Artificial Sequence
  Description of Artificial Sequence: Synthetic oligonucleotide
  Antisense strand to SEQ ID NO: 1732331
uugaugagaacacaguugu

SEQ ID NO: 1732333 - RNA, 19 nt, Artificial Sequence
  Description of Artificial Sequence: Synthetic oligonucleotide
  Sense strand starting at position 3173 of SEQ ID NO: 1562235
cuguguucucaucaacaga

SEQ ID NO: 1732334 - RNA, 19 nt, Artificial Sequence
  Description of Artificial Sequence: Synthetic oligonucleotide
  Antisense strand to SEQ ID NO: 1732333
ucuguugaugagaacacag

SEQ ID NO: 1732335 - RNA, 19 nt, Artificial Sequence
  Description of Artificial Sequence: Synthetic oligonucleotide
  Sense strand starting at position 3225 of SEQ ID NO: 1562235
ggauuaauaguaugcaugu

SEQ ID NO: 1732336 - RNA, 19 nt, Artificial Sequence
  Description of Artificial Sequence: Synthetic oligonucleotide
  Antisense strand to SEQ ID NO: 1732335
acaugcauacuauuaaucc

SEQ ID NO: 1732337 - RNA, 19 nt, Artificial Sequence
  Description of Artificial Sequence: Synthetic oligonucleotide
  Sense strand starting at position 3278 of SEQ ID NO: 1562235
gaugcugauaguggugaaa

SEQ ID NO: 1732338 - RNA, 19 nt, Artificial Sequence
  Description of Artificial Sequence: Synthetic oligonucleotide
  Antisense strand to SEQ ID NO: 1732337
uuucaccacuaucagcauc

SEQ ID NO: 1732339 - RNA, 19 nt, Artificial Sequence
  Description of Artificial Sequence: Synthetic oligonucleotide
  Sense strand starting at position 3289 of SEQ ID NO: 1562235
uggugaaauggauguucac

SEQ ID NO: 1732340 - RNA, 19 nt, Artificial Sequence
  Description of Artificial Sequence: Synthetic oligonucleotide
  Antisense strand to SEQ ID NO: 1732339
gugaacauccauuucacca

SEQ ID NO: 1732341 - RNA, 19 nt, Artificial Sequence
  Description of Artificial Sequence: Synthetic oligonucleotide
  Sense strand starting at position 3828 of SEQ ID NO: 1562235
gaguuauuaugagaaagaa

SEQ ID NO: 1732342 - RNA, 19 nt, Artificial Sequence
  Description of Artificial Sequence: Synthetic oligonucleotide
  Antisense strand to SEQ ID NO: 1732341
uucuuucucauaauaacuc

SEQ ID NO: 1732343 - RNA, 19 nt, Artificial Sequence
  Description of Artificial Sequence: Synthetic oligonucleotide
  Sense strand starting at position 3851 of SEQ ID NO: 1562235
agucaugccucugugauuu

SEQ ID NO: 1732344 - RNA, 19 nt, Artificial Sequence
  Description of Artificial Sequence: Synthetic oligonucleotide
  Antisense strand to SEQ ID NO: 1732343
aaaucacagaggcaugacu

SEQ ID NO: 1732345 - RNA, 19 nt, Artificial Sequence
  Description of Artificial Sequence: Synthetic oligonucleotide
  Sense strand starting at position 3909 of SEQ ID NO: 1562235
ugucuaguauuguuaagga

SEQ ID NO: 1732346 - RNA, 19 nt, Artificial Sequence
  Description of Artificial Sequence: Synthetic oligonucleotide
  Antisense strand to SEQ ID NO: 1732345
uccuuaacaauacuagaca

SEQ ID NO: 1732347 - RNA, 19 nt, Artificial Sequence
  Description of Artificial Sequence: Synthetic oligonucleotide
  Sense strand starting at position 3925 of SEQ ID NO: 1562235
ggaauucuauguccauaau

SEQ ID NO: 1732348 - RNA, 19 nt, Artificial Sequence
  Description of Artificial Sequence: Synthetic oligonucleotide
  Antisense strand to SEQ ID NO: 1732347
auuauggacauagaauucc

SEQ ID NO: 1732349 - RNA, 19 nt, Artificial Sequence
  Description of Artificial Sequence: Synthetic oligonucleotide
  Sense strand starting at position 19 of SEQ ID NO: 1562236
ccagacguuugagugagaa

SEQ ID NO: 1732350 - RNA, 19 nt, Artificial Sequence
  Description of Artificial Sequence: Synthetic oligonucleotide
  Antisense strand to SEQ ID NO: 1732349
uucucacucaaacgucugg

SEQ ID NO: 1732351 - RNA, 19 nt, Artificial Sequence
  Description of Artificial Sequence: Synthetic oligonucleotide
  Sense strand starting at position 214 of SEQ ID NO: 1562236
gagagacaagcuugucaca

SEQ ID NO: 1732352 - RNA, 19 nt, Artificial Sequence
  Description of Artificial Sequence: Synthetic oligonucleotide
  Antisense strand to SEQ ID NO: 1732351
ugugacaagcuugucucuc

SEQ ID NO: 1732353 - RNA, 19 nt, Artificial Sequence
  Description of Artificial Sequence: Synthetic oligonucleotide
  Sense strand starting at position 295 of SEQ ID NO: 1562236
agcagcugggcugaauauu

SEQ ID NO: 1732354 - RNA, 19 nt, Artificial Sequence
  Description of Artificial Sequence: Synthetic oligonucleotide
  Antisense strand to SEQ ID NO: 1732353
aauauucagcccagcugcu

SEQ ID NO: 1732355 - RNA, 19 nt, Artificial Sequence
  Description of Artificial Sequence: Synthetic oligonucleotide
  Sense strand starting at position 385 of SEQ ID NO: 1562236
cccuuauuccucgagacac

SEQ ID NO: 1732356 - RNA, 19 nt, Artificial Sequence
  Description of Artificial Sequence: Synthetic oligonucleotide
  Antisense strand to SEQ ID NO: 1732355
gugucucgaggaauaaggg

SEQ ID NO: 1732357 - RNA, 19 nt, Artificial Sequence
  Description of Artificial Sequence: Synthetic oligonucleotide
  Sense strand starting at position 387 of SEQ ID NO: 1562236
cuuauuccucgagacacca

SEQ ID NO: 1732358 - RNA, 19 nt, Artificial Sequence
  Description of Artificial Sequence: Synthetic oligonucleotide
  Antisense strand to SEQ ID NO: 1732357
uggugucucgaggaauaag

SEQ ID NO: 1732359 - RNA, 19 nt, Artificial Sequence
  Description of Artificial Sequence: Synthetic oligonucleotide
  Sense strand starting at position 402 of SEQ ID NO: 1562236
accauuuacuccugagaga

SEQ ID NO: 1732360 - RNA, 19 nt, Artificial Sequence
  Description of Artificial Sequence: Synthetic oligonucleotide
  Antisense strand to SEQ ID NO: 1732359
ucucucaggaguaaauggu

SEQ ID NO: 1732361 - RNA, 19 nt, Artificial Sequence
  Description of Artificial Sequence: Synthetic oligonucleotide
  Sense strand starting at position 445 of SEQ ID NO: 1562236
ggaguaagucuccagaccu

SEQ ID NO: 1732362 - RNA, 19 nt, Artificial Sequence
  Description of Artificial Sequence: Synthetic oligonucleotide
  Antisense strand to SEQ ID NO: 1732361
aggucuggagacuuacucc

SEQ ID NO: 1732363 - RNA, 19 nt, Artificial Sequence
  Description of Artificial Sequence: Synthetic oligonucleotide
  Sense strand starting at position 521 of SEQ ID NO: 1562236
ccaaucuggccuugucuaa

SEQ ID NO: 1732364 - RNA, 19 nt, Artificial Sequence
  Description of Artificial Sequence: Synthetic oligonucleotide
  Antisense strand to SEQ ID NO: 1732363
uuagacaaggccagauugg

SEQ ID NO: 1732365 - RNA, 19 nt, Artificial Sequence
  Description of Artificial Sequence: Synthetic oligonucleotide
  Sense strand starting at position 608 of SEQ ID NO: 1562236
gcuguaauaguugguaaag

SEQ ID NO: 1732366 - RNA, 19 nt, Artificial Sequence
  Description of Artificial Sequence: Synthetic oligonucleotide
  Antisense strand to SEQ ID NO: 1732365
cuuuaccaacuauuacagc

SEQ ID NO: 1732367 - RNA, 19 nt, Artificial Sequence
  Description of Artificial Sequence: Synthetic oligonucleotide
  Sense strand starting at position 609 of SEQ ID NO: 1562236
cuguaauaguugguaaagu

SEQ ID NO: 1732368 - RNA, 19 nt, Artificial Sequence
  Description of Artificial Sequence: Synthetic oligonucleotide
  Antisense strand to SEQ ID NO: 1732367
acuuuaccaacuauuacag

SEQ ID NO: 1732369 - RNA, 19 nt, Artificial Sequence
  Description of Artificial Sequence: Synthetic oligonucleotide
  Sense strand starting at position 724 of SEQ ID NO: 1562236
gugcauuguccuguacagu

SEQ ID NO: 1732370 - RNA, 19 nt, Artificial Sequence
  Description of Artificial Sequence: Synthetic oligonucleotide
  Antisense strand to SEQ ID NO: 1732369
acuguacaggacaaugcac

SEQ ID NO: 1732371 - RNA, 19 nt, Artificial Sequence
  Description of Artificial Sequence: Synthetic oligonucleotide
  Sense strand starting at position 755 of SEQ ID NO: 1562236
cuguaauaguugguaaggu

SEQ ID NO: 1732372 - RNA, 19 nt, Artificial Sequence
  Description of Artificial Sequence: Synthetic oligonucleotide
  Antisense strand to SEQ ID NO: 1732371
accuuaccaacuauuacag

SEQ ID NO: 1732373 - RNA, 19 nt, Artificial Sequence
  Description of Artificial Sequence: Synthetic oligonucleotide
  Sense strand starting at position 768 of SEQ ID NO: 1562236
uaaggugaaucuuucugau

SEQ ID NO: 1732374 - RNA, 19 nt, Artificial Sequence
  Description of Artificial Sequence: Synthetic oligonucleotide
  Antisense strand to SEQ ID NO: 1732373
aucagaaagauucaccuua

SEQ ID NO: 1732375 - RNA, 19 nt, Artificial Sequence
  Description of Artificial Sequence: Synthetic oligonucleotide
  Sense strand starting at position 828 of SEQ ID NO: 1562236
agagucagucuuugaccuu

SEQ ID NO: 1732376 - RNA, 19 nt, Artificial Sequence
  Description of Artificial Sequence: Synthetic oligonucleotide
  Antisense strand to SEQ ID NO: 1732375
aaggucaaagacugacucu

SEQ ID NO: 1732377 - RNA, 19 nt, Artificial Sequence
  Description of Artificial Sequence: Synthetic oligonucleotide
  Sense strand starting at position 834 of SEQ ID NO: 1562236
agucuuugaccuuguuaag

SEQ ID NO: 1732378 - RNA, 19 nt, Artificial Sequence
  Description of Artificial Sequence: Synthetic oligonucleotide
  Antisense strand to SEQ ID NO: 1732377
cuuaacaaggucaaagacu

SEQ ID NO: 1732379 - RNA, 19 nt, Artificial Sequence
  Description of Artificial Sequence: Synthetic oligonucleotide
  Sense strand starting at position 928 of SEQ ID NO: 1562236
ucgaggaguuacgugauga

SEQ ID NO: 1732380 - RNA, 19 nt, Artificial Sequence
  Description of Artificial Sequence: Synthetic oligonucleotide
  Antisense strand to SEQ ID NO: 1732379
ucaucacguaacuccucga

SEQ ID NO: 1732381 - RNA, 19 nt, Artificial Sequence
  Description of Artificial Sequence: Synthetic oligonucleotide
  Sense strand starting at position 929 of SEQ ID NO: 1562236
cgaggaguuacgugaugau

SEQ ID NO: 1732382 - RNA, 19 nt, Artificial Sequence
  Description of Artificial Sequence: Synthetic oligonucleotide
  Antisense strand to SEQ ID NO: 1732381
aucaucacguaacuccucg

SEQ ID NO: 1732383 - RNA, 19 nt, Artificial Sequence
  Description of Artificial Sequence: Synthetic oligonucleotide
  Sense strand starting at position 942 of SEQ ID NO: 1562236
gaugauggugcaugaauca

SEQ ID NO: 1732384 - RNA, 19 nt, Artificial Sequence
  Description of Artificial Sequence: Synthetic oligonucleotide
  Antisense strand to SEQ ID NO: 1732383
ugauucaugcaccaucauc

SEQ ID NO: 1732385 - RNA, 19 nt, Artificial Sequence
  Description of Artificial Sequence: Synthetic oligonucleotide
  Sense strand starting at position 1051 of SEQ ID NO: 1562236
aaggguugcacaggugaau

SEQ ID NO: 1732386 - RNA, 19 nt, Artificial Sequence
  Description of Artificial Sequence: Synthetic oligonucleotide
  Antisense strand to SEQ ID NO: 1732385
auucaccugugcaacccuu

SEQ ID NO: 1732387 - RNA, 19 nt, Artificial Sequence
  Description of Artificial Sequence: Synthetic oligonucleotide
  Sense strand starting at position 1125 of SEQ ID NO: 1562236
ucaggagucaccugucuag

SEQ ID NO: 1732388 - RNA, 19 nt, Artificial Sequence
  Description of Artificial Sequence: Synthetic oligonucleotide
  Antisense strand to SEQ ID NO: 1732387
cuagacaggugacuccuga

SEQ ID NO: 1732389 - RNA, 19 nt, Artificial Sequence
  Description of Artificial Sequence: Synthetic oligonucleotide
  Sense strand starting at position 1223 of SEQ ID NO: 1562236
ggcgaugagaguuagagac

SEQ ID NO: 1732390 - RNA, 19 nt, Artificial Sequence
  Description of Artificial Sequence: Synthetic oligonucleotide
  Antisense strand to SEQ ID NO: 1732389
gucucuaacucucaucgcc

SEQ ID NO: 1732391 - RNA, 19 nt, Artificial Sequence
  Description of Artificial Sequence: Synthetic oligonucleotide
  Sense strand starting at position 1764 of SEQ ID NO: 1562236
uuacucucccuagagaagu

SEQ ID NO: 1732392 - RNA, 19 nt, Artificial Sequence
  Description of Artificial Sequence: Synthetic oligonucleotide
  Antisense strand to SEQ ID NO: 1732391
acuucucuagggagaguaa

SEQ ID NO: 1732393 - RNA, 19 nt, Artificial Sequence
  Description of Artificial Sequence: Synthetic oligonucleotide
  Sense strand starting at position 2157 of SEQ ID NO: 1562236
ugacuugggcugugaucuu

SEQ ID NO: 1732394 - RNA, 19 nt, Artificial Sequence
  Description of Artificial Sequence: Synthetic oligonucleotide
  Antisense strand to SEQ ID NO: 1732393
aagaucacagcccaaguca

SEQ ID NO: 1732395 - RNA, 19 nt, Artificial Sequence
  Description of Artificial Sequence: Synthetic oligonucleotide
  Sense strand starting at position 2257 of SEQ ID NO: 1562236
ggcucucaaagauguugaa

SEQ ID NO: 1732396 - RNA, 19 nt, Artificial Sequence
  Description of Artificial Sequence: Synthetic oligonucleotide
  Antisense strand to SEQ ID NO: 1732395
uucaacaucuuugagagcc

SEQ ID NO: 1732397 - RNA, 19 nt, Artificial Sequence
  Description of Artificial Sequence: Synthetic oligonucleotide
  Sense strand starting at position 2302 of SEQ ID NO: 1562236
agaggucagcuuugaauag

SEQ ID NO: 1732398 - RNA, 19 nt, Artificial Sequence
  Description of Artificial Sequence: Synthetic oligonucleotide
  Antisense strand to SEQ ID NO: 1732397
cuauucaaagcugaccucu

SEQ ID NO: 1732399 - RNA, 19 nt, Artificial Sequence
  Description of Artificial Sequence: Synthetic oligonucleotide
  Sense strand starting at position 2306 of SEQ ID NO: 1562236
gucagcuuugaauagcaaa

SEQ ID NO: 1732400 - RNA, 19 nt, Artificial Sequence
  Description of Artificial Sequence: Synthetic oligonucleotide
  Antisense strand to SEQ ID NO: 1732399
uuugcuauucaaagcugac

SEQ ID NO: 1732401 - RNA, 19 nt, Artificial Sequence
  Description of Artificial Sequence: Synthetic oligonucleotide
  Sense strand starting at position 2709 of SEQ ID NO: 1562236
uccugcauuugguagaaga

SEQ ID NO: 1732402 - RNA, 19 nt, Artificial Sequence
  Description of Artificial Sequence: Synthetic oligonucleotide
  Antisense strand to SEQ ID NO: 1732401
ucuucuaccaaaugcagga

SEQ ID NO: 1732403 - RNA, 19 nt, Artificial Sequence
  Description of Artificial Sequence: Synthetic oligonucleotide
  Sense strand starting at position 2767 of SEQ ID NO: 1562236
cagaaacuccaucgaagua

SEQ ID NO: 1732404 - RNA, 19 nt, Artificial Sequence
  Description of Artificial Sequence: Synthetic oligonucleotide
  Antisense strand to SEQ ID NO: 1732403
uacuucgauggaguuucug

SEQ ID NO: 1732405 - RNA, 19 nt, Artificial Sequence
  Description of Artificial Sequence: Synthetic oligonucleotide
  Sense strand starting at position 2864 of SEQ ID NO: 1562236
gcuaauuccugacuaagcu

SEQ ID NO: 1732406 - RNA, 19 nt, Artificial Sequence
  Description of Artificial Sequence: Synthetic oligonucleotide
  Antisense strand to SEQ ID NO: 1732405
agcuuagucaggaauuagc

SEQ ID NO: 1732407 - RNA, 19 nt, Artificial Sequence
  Description of Artificial Sequence: Synthetic oligonucleotide
  Sense strand starting at position 2953 of SEQ ID NO: 1562236
aucugauccugagaaagga

SEQ ID NO: 1732408 - RNA, 19 nt, Artificial Sequence
  Description of Artificial Sequence: Synthetic oligonucleotide
  Antisense strand to SEQ ID NO: 1732407
uccuuucucaggaucagau

SEQ ID NO: 1732409 - RNA, 19 nt, Artificial Sequence
  Description of Artificial Sequence: Synthetic oligonucleotide
  Sense strand starting at position 2966 of SEQ ID NO: 1562236
aaaggagggugauauuaca

SEQ ID NO: 1732410 - RNA, 19 nt, Artificial Sequence
  Description of Artificial Sequence: Synthetic oligonucleotide
  Antisense strand to SEQ ID NO: 1732409
uguaauaucacccuccuuu

SEQ ID NO: 1732411 - RNA, 19 nt, Artificial Sequence
  Description of Artificial Sequence: Synthetic oligonucleotide
  Sense strand starting at position 3032 of SEQ ID NO: 1562236
ggaaguucuuccuuggguu

SEQ ID NO: 1732412 - RNA, 19 nt, Artificial Sequence
  Description of Artificial Sequence: Synthetic oligonucleotide
  Antisense strand to SEQ ID NO: 1732411
aacccaaggaagaacuucc

SEQ ID NO: 1732413 - RNA, 19 nt, Artificial Sequence
  Description of Artificial Sequence: Synthetic oligonucleotide
  Sense strand starting at position 3033 of SEQ ID NO: 1562236
gaaguucuuccuuggguuu

SEQ ID NO: 1732414 - RNA, 19 nt, Artificial Sequence
  Description of Artificial Sequence: Synthetic oligonucleotide
  Antisense strand to SEQ ID NO: 1732413
aaacccaaggaagaacuuc

SEQ ID NO: 1732415 - RNA, 19 nt, Artificial Sequence
  Description of Artificial Sequence: Synthetic oligonucleotide
  Sense strand starting at position 3034 of SEQ ID NO: 1562236
aaguucuuccuuggguuua

SEQ ID NO: 1732416 - RNA, 19 nt, Artificial Sequence
  Description of Artificial Sequence: Synthetic oligonucleotide
  Antisense strand to SEQ ID NO: 1732415
uaaacccaaggaagaacuu

SEQ ID NO: 1732417 - RNA, 19 nt, Artificial Sequence
  Description of Artificial Sequence: Synthetic oligonucleotide
  Sense strand starting at position 3044 of SEQ ID NO: 1562236
uuggguuuaaugugaaucu

SEQ ID NO: 1732418 - RNA, 19 nt, Artificial Sequence
  Description of Artificial Sequence: Synthetic oligonucleotide
  Antisense strand to SEQ ID NO: 1732417
agauucacauuaaacccaa

SEQ ID NO: 1732419 - RNA, 19 nt, Artificial Sequence
  Description of Artificial Sequence: Synthetic oligonucleotide
  Sense strand starting at position 3054 of SEQ ID NO: 1562236
ugugaaucucucgugcugu

SEQ ID NO: 1732420 - RNA, 19 nt, Artificial Sequence
  Description of Artificial Sequence: Synthetic oligonucleotide
  Antisense strand to SEQ ID NO: 1732419
acagcacgagagauucaca

SEQ ID NO: 1732421 - RNA, 19 nt, Artificial Sequence
  Description of Artificial Sequence: Synthetic oligonucleotide
  Sense strand starting at position 3095 of SEQ ID NO: 1562236
gaggcucugucuucuauga

SEQ ID NO: 1732422 - RNA, 19 nt, Artificial Sequence
  Description of Artificial Sequence: Synthetic oligonucleotide
  Antisense strand to SEQ ID NO: 1732421
ucauagaagacagagccuc

SEQ ID NO: 1732423 - RNA, 19 nt, Artificial Sequence
  Description of Artificial Sequence: Synthetic oligonucleotide
  Sense strand starting at position 3509 of SEQ ID NO: 1562236
ucucucugucuuugacaga

SEQ ID NO: 1732424 - RNA, 19 nt, Artificial Sequence
  Description of Artificial Sequence: Synthetic oligonucleotide
  Antisense strand to SEQ ID NO: 1732423
ucugucaaagacagagaga

SEQ ID NO: 1732425 - RNA, 19 nt, Artificial Sequence
  Description of Artificial Sequence: Synthetic oligonucleotide
  Sense strand starting at position 3523 of SEQ ID NO: 1562236
acagaaugucgcuauguca

SEQ ID NO: 1732426 - RNA, 19 nt, Artificial Sequence
  Description of Artificial Sequence: Synthetic oligonucleotide
  Antisense strand to SEQ ID NO: 1732425
ugacauagcgacauucugu

SEQ ID NO: 1732427 - RNA, 19 nt, Artificial Sequence
  Description of Artificial Sequence: Synthetic oligonucleotide
  Sense strand starting at position 3652 of SEQ ID NO: 1562236
cccaauauuuggcuaguuu

SEQ ID NO: 1732428 - RNA, 19 nt, Artificial Sequence
  Description of Artificial Sequence: Synthetic oligonucleotide
  Antisense strand to SEQ ID NO: 1732427
aaacuagccaaauauuggg

SEQ ID NO: 1732429 - RNA, 19 nt, Artificial Sequence
  Description of Artificial Sequence: Synthetic oligonucleotide
  Sense strand starting at position 156 of SEQ ID NO: 1562237
uuggcaucucgagaaucac

SEQ ID NO: 1732430 - RNA, 19 nt, Artificial Sequence
  Description of Artificial Sequence: Synthetic oligonucleotide
  Antisense strand to SEQ ID NO: 1732429
gugauucucgagaugccaa

SEQ ID NO: 1732431 - RNA, 19 nt, Artificial Sequence
  Description of Artificial Sequence: Synthetic oligonucleotide
  Sense strand starting at position 162 of SEQ ID NO: 1562237
ucucgagaaucacugaaga

SEQ ID NO: 1732432 - RNA, 19 nt, Artificial Sequence
  Description of Artificial Sequence: Synthetic oligonucleotide
  Antisense strand to SEQ ID NO: 1732431
ucuucagugauucucgaga

SEQ ID NO: 1732433 - RNA, 19 nt, Artificial Sequence
  Description of Artificial Sequence: Synthetic oligonucleotide
  Sense strand starting at position 189 of SEQ ID NO: 1562237
gagaccaugugguccauua

SEQ ID NO: 1732434 - RNA, 19 nt, Artificial Sequence
  Description of Artificial Sequence: Synthetic oligonucleotide
  Antisense strand to SEQ ID NO: 1732433
uaauggaccacauggucuc

SEQ ID NO: 1732435 - RNA, 19 nt, Artificial Sequence
  Description of Artificial Sequence: Synthetic oligonucleotide
  Sense strand starting at position 191 of SEQ ID NO: 1562237
gaccaugugguccauuauc

SEQ ID NO: 1732436 - RNA, 19 nt, Artificial Sequence
  Description of Artificial Sequence: Synthetic oligonucleotide
  Antisense strand to SEQ ID NO: 1732435
gauaauggaccacaugguc

SEQ ID NO: 1732437 - RNA, 19 nt, Artificial Sequence
  Description of Artificial Sequence: Synthetic oligonucleotide
  Sense strand starting at position 355 of SEQ ID NO: 1562237
accuaaacucuuggucaga

SEQ ID NO: 1732438 - RNA, 19 nt, Artificial Sequence
  Description of Artificial Sequence: Synthetic oligonucleotide
  Antisense strand to SEQ ID NO: 1732437
ucugaccaagaguuuaggu

SEQ ID NO: 1732439 - RNA, 19 nt, Artificial Sequence
  Description of Artificial Sequence: Synthetic oligonucleotide
  Sense strand starting at position 357 of SEQ ID NO: 1562237
cuaaacucuuggucagaga

SEQ ID NO: 1732440 - RNA, 19 nt, Artificial Sequence
  Description of Artificial Sequence: Synthetic oligonucleotide
  Antisense strand to SEQ ID NO: 1732439
ucucugaccaagaguuuag

SEQ ID NO: 1732441 - RNA, 19 nt, Artificial Sequence
  Description of Artificial Sequence: Synthetic oligonucleotide
  Sense strand starting at position 375 of SEQ ID NO: 1562237
accagccaucagugaacua

SEQ ID NO: 1732442 - RNA, 19 nt, Artificial Sequence
  Description of Artificial Sequence: Synthetic oligonucleotide
  Antisense strand to SEQ ID NO: 1732441
uaguucacugauggcuggu

SEQ ID NO: 1732443 - RNA, 19 nt, Artificial Sequence
  Description of Artificial Sequence: Synthetic oligonucleotide
  Sense strand starting at position 449 of SEQ ID NO: 1562237
uuaggaagcaucugaguua

SEQ ID NO: 1732444 - RNA, 19 nt, Artificial Sequence
  Description of Artificial Sequence: Synthetic oligonucleotide
  Antisense strand to SEQ ID NO: 1732443
uaacucagaugcuuccuaa

SEQ ID NO: 1732445 - RNA, 19 nt, Artificial Sequence
  Description of Artificial Sequence: Synthetic oligonucleotide
  Sense strand starting at position 452 of SEQ ID NO: 1562237
ggaagcaucugaguuaccu

SEQ ID NO: 1732446 - RNA, 19 nt, Artificial Sequence
  Description of Artificial Sequence: Synthetic oligonucleotide
  Antisense strand to SEQ ID NO: 1732445
agguaacucagaugcuucc

SEQ ID NO: 1732447 - RNA, 19 nt, Artificial Sequence
  Description of Artificial Sequence: Synthetic oligonucleotide
  Sense strand starting at position 486 of SEQ ID NO: 1562237
auuucuuuccacggcugaa

SEQ ID NO: 1732448 - RNA, 19 nt, Artificial Sequence
  Description of Artificial Sequence: Synthetic oligonucleotide
  Antisense strand to SEQ ID NO: 1732447
uucagccguggaaagaaau

SEQ ID NO: 1732449 - RNA, 19 nt, Artificial Sequence
  Description of Artificial Sequence: Synthetic oligonucleotide
  Sense strand starting at position 685 of SEQ ID NO: 1562237
agagaacuuuguuuccacu

SEQ ID NO: 1732450 - RNA, 19 nt, Artificial Sequence
  Description of Artificial Sequence: Synthetic oligonucleotide
  Antisense strand to SEQ ID NO: 1732449
aguggaaacaaaguucucu

SEQ ID NO: 1732451 - RNA, 19 nt, Artificial Sequence
  Description of Artificial Sequence: Synthetic oligonucleotide
  Sense strand starting at position 923 of SEQ ID NO: 1562237
ggcucucgaugauugagau

SEQ ID NO: 1732452 - RNA, 19 nt, Artificial Sequence
  Description of Artificial Sequence: Synthetic oligonucleotide
  Antisense strand to SEQ ID NO: 1732451
aucucaaucaucgagagcc

SEQ ID NO: 1732453 - RNA, 19 nt, Artificial Sequence
  Description of Artificial Sequence: Synthetic oligonucleotide
  Sense strand starting at position 1099 of SEQ ID NO: 1562237
ggcaauguaacguaacaau

SEQ ID NO: 1732454 - RNA, 19 nt, Artificial Sequence
  Description of Artificial Sequence: Synthetic oligonucleotide
  Antisense strand to SEQ ID NO: 1732453
auuguuacguuacauugcc

SEQ ID NO: 1732455 - RNA, 19 nt, Artificial Sequence
  Description of Artificial Sequence: Synthetic oligonucleotide
  Sense strand starting at position 1108 of SEQ ID NO: 1562237
acguaacaaugaguaauau

SEQ ID NO: 1732456 - RNA, 19 nt, Artificial Sequence
  Description of Artificial Sequence: Synthetic oligonucleotide
  Antisense strand to SEQ ID NO: 1732455
auauuacucauuguuacgu

SEQ ID NO: 1732457 - RNA, 19 nt, Artificial Sequence
  Description of Artificial Sequence: Synthetic oligonucleotide
  Sense strand starting at position 1118 of SEQ ID NO: 1562237
gaguaauauggaugaagca

SEQ ID NO: 1732458 - RNA, 19 nt, Artificial Sequence
  Description of Artificial Sequence: Synthetic oligonucleotide
  Antisense strand to SEQ ID NO: 1732457
ugcuucauccauauuacuc

SEQ ID NO: 1732459 - RNA, 19 nt, Artificial Sequence
  Description of Artificial Sequence: Synthetic oligonucleotide
  Sense strand starting at position 1173 of SEQ ID NO: 1562237
acaaaucuauggguaagua

SEQ ID NO: 1732460 - RNA, 19 nt, Artificial Sequence
  Description of Artificial Sequence: Synthetic oligonucleotide
  Antisense strand to SEQ ID NO: 1732459
uacuuacccauagauuugu

SEQ ID NO: 1732461 - RNA, 19 nt, Artificial Sequence
  Description of Artificial Sequence: Synthetic oligonucleotide
  Sense strand starting at position 1181 of SEQ ID NO: 1562237
auggguaaguacucuuaau

SEQ ID NO: 1732462 - RNA, 19 nt, Artificial Sequence
  Description of Artificial Sequence: Synthetic oligonucleotide
  Antisense strand to SEQ ID NO: 1732461
auuaagaguacuuacccau

SEQ ID NO: 1732463 - RNA, 19 nt, Artificial Sequence
  Description of Artificial Sequence: Synthetic oligonucleotide
  Sense strand starting at position 1235 of SEQ ID NO: 1562237
aggagauuaugugaauuug

SEQ ID NO: 1732464 - RNA, 19 nt, Artificial Sequence
  Description of Artificial Sequence: Synthetic oligonucleotide
  Antisense strand to SEQ ID NO: 1732463
caaauucacauaaucuccu

SEQ ID NO: 1732465 - RNA, 19 nt, Artificial Sequence
  Description of Artificial Sequence: Synthetic oligonucleotide
  Sense strand starting at position 1385 of SEQ ID NO: 1562237
ucagcauuccaagggacuu

SEQ ID NO: 1732466 - RNA, 19 nt, Artificial Sequence
  Description of Artificial Sequence: Synthetic oligonucleotide
  Antisense strand to SEQ ID NO: 1732465
aagucccuuggaaugcuga

SEQ ID NO: 1732467 - RNA, 19 nt, Artificial Sequence
  Description of Artificial Sequence: Synthetic oligonucleotide
  Sense strand starting at position 1466 of SEQ ID NO: 1562237
augagaacauuuggaaguu

SEQ ID NO: 1732468 - RNA, 19 nt, Artificial Sequence
  Description of Artificial Sequence: Synthetic oligonucleotide
  Antisense strand to SEQ ID NO: 1732467
aacuuccaaauguucucau

SEQ ID NO: 1732469 - RNA, 19 nt, Artificial Sequence
  Description of Artificial Sequence: Synthetic oligonucleotide
  Sense strand starting at position 1525 of SEQ ID NO: 1562237
gggagacuuccuugggcuu

SEQ ID NO: 1732470 - RNA, 19 nt, Artificial Sequence
  Description of Artificial Sequence: Synthetic oligonucleotide
  Antisense strand to SEQ ID NO: 1732469
aagcccaaggaagucuccc

SEQ ID NO: 1732471 - RNA, 19 nt, Artificial Sequence
  Description of Artificial Sequence: Synthetic oligonucleotide
  Sense strand starting at position 1526 of SEQ ID NO: 1562237
ggagacuuccuugggcuua

SEQ ID NO: 1732472 - RNA, 19 nt, Artificial Sequence
  Description of Artificial Sequence: Synthetic oligonucleotide
  Antisense strand to SEQ ID NO: 1732471
uaagcccaaggaagucucc

SEQ ID NO: 1732473 - RNA, 19 nt, Artificial Sequence
  Description of Artificial Sequence: Synthetic oligonucleotide
  Sense strand starting at position 1618 of SEQ ID NO: 1562237
aggagucacuugccacaga

SEQ ID NO: 1732474 - RNA, 19 nt, Artificial Sequence
  Description of Artificial Sequence: Synthetic oligonucleotide
  Antisense strand to SEQ ID NO: 1732473
ucuguggcaagugacuccu

SEQ ID NO: 1732475 - RNA, 19 nt, Artificial Sequence
  Description of Artificial Sequence: Synthetic oligonucleotide
  Sense strand starting at position 1659 of SEQ ID NO: 1562237
gggagucucuuaccaagag

SEQ ID NO: 1732476 - RNA, 19 nt, Artificial Sequence
  Description of Artificial Sequence: Synthetic oligonucleotide
  Antisense strand to SEQ ID NO: 1732475
cucuugguaagagacuccc

SEQ ID NO: 1732477 - RNA, 19 nt, Artificial Sequence
  Description of Artificial Sequence: Synthetic oligonucleotide
  Sense strand starting at position 1663 of SEQ ID NO: 1562237
gucucuuaccaagagacuu

SEQ ID NO: 1732478 - RNA, 19 nt, Artificial Sequence
  Description of Artificial Sequence: Synthetic oligonucleotide
  Antisense strand to SEQ ID NO: 1732477
aagucucuugguaagagac

SEQ ID NO: 1732479 - RNA, 19 nt, Artificial Sequence
  Description of Artificial Sequence: Synthetic oligonucleotide
  Sense strand starting at position 1803 of SEQ ID NO: 1562237
cggaguucccaauacuuac

SEQ ID NO: 1732480 - RNA, 19 nt, Artificial Sequence
  Description of Artificial Sequence: Synthetic oligonucleotide
  Antisense strand to SEQ ID NO: 1732479
guaaguauugggaacuccg

SEQ ID NO: 1732481 - RNA, 19 nt, Artificial Sequence
  Description of Artificial Sequence: Synthetic oligonucleotide
  Sense strand starting at position 1890 of SEQ ID NO: 1562237
ggcagaaguccugagaguc

SEQ ID NO: 1732482 - RNA, 19 nt, Artificial Sequence
  Description of Artificial Sequence: Synthetic oligonucleotide
  Antisense strand to SEQ ID NO: 1732481
gacucucaggacuucugcc

SEQ ID NO: 1732483 - RNA, 19 nt, Artificial Sequence
  Description of Artificial Sequence: Synthetic oligonucleotide
  Sense strand starting at position 2211 of SEQ ID NO: 1562237
gagguuuaacuccagaguc

SEQ ID NO: 1732484 - RNA, 19 nt, Artificial Sequence
  Description of Artificial Sequence: Synthetic oligonucleotide
  Antisense strand to SEQ ID NO: 1732483
gacucuggaguuaaaccuc

SEQ ID NO: 1732485 - RNA, 19 nt, Artificial Sequence
  Description of Artificial Sequence: Synthetic oligonucleotide
  Sense strand starting at position 2213 of SEQ ID NO: 1562237
gguuuaacuccagagucuu

SEQ ID NO: 1732486 - RNA, 19 nt, Artificial Sequence
  Description of Artificial Sequence: Synthetic oligonucleotide
  Antisense strand to SEQ ID NO: 1732485
aagacucuggaguuaaacc

SEQ ID NO: 1732487 - RNA, 19 nt, Artificial Sequence
  Description of Artificial Sequence: Synthetic oligonucleotide
  Sense strand starting at position 2246 of SEQ ID NO: 1562237
gaguuugcagguuaacagu

SEQ ID NO: 1732488 - RNA, 19 nt, Artificial Sequence
  Description of Artificial Sequence: Synthetic oligonucleotide
  Antisense strand to SEQ ID NO: 1732487
acuguuaaccugcaaacuc

SEQ ID NO: 1732489 - RNA, 19 nt, Artificial Sequence
  Description of Artificial Sequence: Synthetic oligonucleotide
  Sense strand starting at position 2302 of SEQ ID NO: 1562237
uccugacaugucuauucuu

SEQ ID NO: 1732490 - RNA, 19 nt, Artificial Sequence
  Description of Artificial Sequence: Synthetic oligonucleotide
  Antisense strand to SEQ ID NO: 1732489
aagaauagacaugucagga

SEQ ID NO: 1732491 - RNA, 19 nt, Artificial Sequence
  Description of Artificial Sequence: Synthetic oligonucleotide
  Sense strand starting at position 2305 of SEQ ID NO: 1562237
ugacaugucuauucuuaug

SEQ ID NO: 1732492 - RNA, 19 nt, Artificial Sequence
  Description of Artificial Sequence: Synthetic oligonucleotide
  Antisense strand to SEQ ID NO: 1732491
cauaagaauagacauguca

SEQ ID NO: 1732493 - RNA, 19 nt, Artificial Sequence
  Description of Artificial Sequence: Synthetic oligonucleotide
  Sense strand starting at position 2458 of SEQ ID NO: 1562237
uucguauguaaagaucagu

SEQ ID NO: 1732494 - RNA, 19 nt, Artificial Sequence
  Description of Artificial Sequence: Synthetic oligonucleotide
  Antisense strand to SEQ ID NO: 1732493
acugaucuuuacauacgaa

SEQ ID NO: 1732495 - RNA, 19 nt, Artificial Sequence
  Description of Artificial Sequence: Synthetic oligonucleotide
  Sense strand starting at position 2641 of SEQ ID NO: 1562237
uuuauauccuugguauaag

SEQ ID NO: 1732496 - RNA, 19 nt, Artificial Sequence
  Description of Artificial Sequence: Synthetic oligonucleotide
  Antisense strand to SEQ ID NO: 1732495
cuuauaccaaggauauaaa

SEQ ID NO: 1732497 - RNA, 19 nt, Artificial Sequence
  Description of Artificial Sequence: Synthetic oligonucleotide
  Sense strand starting at position 2725 of SEQ ID NO: 1562237
ggaagcauuucugcagggu

SEQ ID NO: 1732498 - RNA, 19 nt, Artificial Sequence
  Description of Artificial Sequence: Synthetic oligonucleotide
  Antisense strand to SEQ ID NO: 1732497
acccugcagaaaugcuucc

SEQ ID NO: 1732499 - RNA, 19 nt, Artificial Sequence
  Description of Artificial Sequence: Synthetic oligonucleotide
  Sense strand starting at position 2917 of SEQ ID NO: 1562237
aguauaacaguuugaaaga

SEQ ID NO: 1732500 - RNA, 19 nt, Artificial Sequence
  Description of Artificial Sequence: Synthetic oligonucleotide
  Antisense strand to SEQ ID NO: 1732499
ucuuucaaacuguuauacu

SEQ ID NO: 1732501 - RNA, 19 nt, Artificial Sequence
  Description of Artificial Sequence: Synthetic oligonucleotide
  Sense strand starting at position 2983 of SEQ ID NO: 1562237
ggacaaauagcuuagcuuu

SEQ ID NO: 1732502 - RNA, 19 nt, Artificial Sequence
  Description of Artificial Sequence: Synthetic oligonucleotide
  Antisense strand to SEQ ID NO: 1732501
aaagcuaagcuauuugucc

SEQ ID NO: 1732503 - RNA, 19 nt, Artificial Sequence
  Description of Artificial Sequence: Synthetic oligonucleotide
  Sense strand starting at position 3032 of SEQ ID NO: 1562237
guggucugauauccagaau

SEQ ID NO: 1732504 - RNA, 19 nt, Artificial Sequence
  Description of Artificial Sequence: Synthetic oligonucleotide
  Antisense strand to SEQ ID NO: 1732503
auucuggauaucagaccac

SEQ ID NO: 1732505 - RNA, 19 nt, Artificial Sequence
  Description of Artificial Sequence: Synthetic oligonucleotide
  Sense strand starting at position 3361 of SEQ ID NO: 1562237
gugccaauuccugaaagau

SEQ ID NO: 1732506 - RNA, 19 nt, Artificial Sequence
  Description of Artificial Sequence: Synthetic oligonucleotide
  Antisense strand to SEQ ID NO: 1732505
aucuuucaggaauuggcac

SEQ ID NO: 1732507 - RNA, 19 nt, Artificial Sequence
  Description of Artificial Sequence: Synthetic oligonucleotide
  Sense strand starting at position 3966 of SEQ ID NO: 1562237
aggauugagccacaguagu

SEQ ID NO: 1732508 - RNA, 19 nt, Artificial Sequence
  Description of Artificial Sequence: Synthetic oligonucleotide
  Antisense strand to SEQ ID NO: 1732507
acuacuguggcucaauccu

SEQ ID NO: 1732509 - RNA, 19 nt, Artificial Sequence
  Description of Artificial Sequence: Synthetic oligonucleotide
  Sense strand starting at position 779 of SEQ ID NO: 1562238
gccagcuucccagaagucu

SEQ ID NO: 1732510 - RNA, 19 nt, Artificial Sequence
  Description of Artificial Sequence: Synthetic oligonucleotide
  Antisense strand to SEQ ID NO: 1732509
agacuucugggaagcuggc

SEQ ID NO: 1732511 - RNA, 19 nt, Artificial Sequence
  Description of Artificial Sequence: Synthetic oligonucleotide
  Sense strand starting at position 895 of SEQ ID NO: 1562238
uggucagaggcuugcauuu

SEQ ID NO: 1732512 - RNA, 19 nt, Artificial Sequence
  Description of Artificial Sequence: Synthetic oligonucleotide
  Antisense strand to SEQ ID NO: 1732511
aaaugcaagccucugacca

SEQ ID NO: 1732513 - RNA, 19 nt, Artificial Sequence
  Description of Artificial Sequence: Synthetic oligonucleotide
  Sense strand starting at position 1008 of SEQ ID NO: 1562238
uuuauuacuuugguguaca

SEQ ID NO: 1732514 - RNA, 19 nt, Artificial Sequence
  Description of Artificial Sequence: Synthetic oligonucleotide
  Antisense strand to SEQ ID NO: 1732513
uguacaccaaaguaauaaa

SEQ ID NO: 1732515 - RNA, 19 nt, Artificial Sequence
  Description of Artificial Sequence: Synthetic oligonucleotide
  Sense strand starting at position 1011 of SEQ ID NO: 1562238
auuacuuugguguacaaag

SEQ ID NO: 1732516 - RNA, 19 nt, Artificial Sequence
  Description of Artificial Sequence: Synthetic oligonucleotide
  Antisense strand to SEQ ID NO: 1732515
cuuuguacaccaaaguaau

SEQ ID NO: 1732517 - RNA, 19 nt, Artificial Sequence
  Description of Artificial Sequence: Synthetic oligonucleotide
  Sense strand starting at position 1347 of SEQ ID NO: 1562238
acaggaguguccucuuaaa

SEQ ID NO: 1732518 - RNA, 19 nt, Artificial Sequence
  Description of Artificial Sequence: Synthetic oligonucleotide
  Antisense strand to SEQ ID NO: 1732517
uuuaagaggacacuccugu

SEQ ID NO: 1732519 - RNA, 19 nt, Artificial Sequence
  Description of Artificial Sequence: Synthetic oligonucleotide
  Sense strand starting at position 1373 of SEQ ID NO: 1562238
uggaaugaauaguugugaa

SEQ ID NO: 1732520 - RNA, 19 nt, Artificial Sequence
  Description of Artificial Sequence: Synthetic oligonucleotide
  Antisense strand to SEQ ID NO: 1732519
uucacaacuauucauucca

SEQ ID NO: 1732521 - RNA, 19 nt, Artificial Sequence
  Description of Artificial Sequence: Synthetic oligonucleotide
  Sense strand starting at position 1687 of SEQ ID NO: 1562238
aggagaaucgcuggaugca

SEQ ID NO: 1732522 - RNA, 19 nt, Artificial Sequence
  Description of Artificial Sequence: Synthetic oligonucleotide
  Antisense strand to SEQ ID NO: 1732521
ugcauccagcgauucuccu

SEQ ID NO: 1732523 - RNA, 19 nt, Artificial Sequence
  Description of Artificial Sequence: Synthetic oligonucleotide
  Sense strand starting at position 1688 of SEQ ID NO: 1562238
ggagaaucgcuggaugcau

SEQ ID NO: 1732524 - RNA, 19 nt, Artificial Sequence
  Description of Artificial Sequence: Synthetic oligonucleotide
  Antisense strand to SEQ ID NO: 1732523
augcauccagcgauucucc

SEQ ID NO: 1732525 - RNA, 19 nt, Artificial Sequence
  Description of Artificial Sequence: Synthetic oligonucleotide
  Sense strand starting at position 1938 of SEQ ID NO: 1562238
ggagacagcuuccucacuu

SEQ ID NO: 1732526 - RNA, 19 nt, Artificial Sequence
  Description of Artificial Sequence: Synthetic oligonucleotide
  Antisense strand to SEQ ID NO: 1732525
aagugaggaagcugucucc

SEQ ID NO: 1732527 - RNA, 19 nt, Artificial Sequence
  Description of Artificial Sequence: Synthetic oligonucleotide
  Sense strand starting at position 2264 of SEQ ID NO: 1562238
gcuaaaugugccuaucuaa

SEQ ID NO: 1732528 - RNA, 19 nt, Artificial Sequence
  Description of Artificial Sequence: Synthetic oligonucleotide
  Antisense strand to SEQ ID NO: 1732527
uuagauaggcacauuuagc

SEQ ID NO: 1732529 - RNA, 19 nt, Artificial Sequence
  Description of Artificial Sequence: Synthetic oligonucleotide
  Sense strand starting at position 2277 of SEQ ID NO: 1562238
aucuaauggcuuuaggacu

SEQ ID NO: 1732530 - RNA, 19 nt, Artificial Sequence
  Description of Artificial Sequence: Synthetic oligonucleotide
  Antisense strand to SEQ ID NO: 1732529
aguccuaaagccauuagau

SEQ ID NO: 1732531 - RNA, 19 nt, Artificial Sequence
  Description of Artificial Sequence: Synthetic oligonucleotide
  Sense strand starting at position 2284 of SEQ ID NO: 1562238
ggcuuuaggacugacuagu

SEQ ID NO: 1732532 - RNA, 19 nt, Artificial Sequence
  Description of Artificial Sequence: Synthetic oligonucleotide
  Antisense strand to SEQ ID NO: 1732531
acuagucaguccuaaagcc

SEQ ID NO: 1732533 - RNA, 19 nt, Artificial Sequence
  Description of Artificial Sequence: Synthetic oligonucleotide
  Sense strand starting at position 2627 of SEQ ID NO: 1562238
guucuauaucaauggaguc

SEQ ID NO: 1732534 - RNA, 19 nt, Artificial Sequence
  Description of Artificial Sequence: Synthetic oligonucleotide
  Antisense strand to SEQ ID NO: 1732533
gacuccauugauauagaac

SEQ ID NO: 1732535 - RNA, 19 nt, Artificial Sequence
  Description of Artificial Sequence: Synthetic oligonucleotide
  Sense strand starting at position 2757 of SEQ ID NO: 1562238
ucuauuguaugacuacaca

SEQ ID NO: 1732536 - RNA, 19 nt, Artificial Sequence
  Description of Artificial Sequence: Synthetic oligonucleotide
  Antisense strand to SEQ ID NO: 1732535
uguguagucauacaauaga

SEQ ID NO: 1732537 - RNA, 19 nt, Artificial Sequence
  Description of Artificial Sequence: Synthetic oligonucleotide
  Sense strand starting at position 2780 of SEQ ID NO: 1562238
ucuacugaguuguuuauag

SEQ ID NO: 1732538 - RNA, 19 nt, Artificial Sequence
  Description of Artificial Sequence: Synthetic oligonucleotide
  Antisense strand to SEQ ID NO: 1732537
cuauaaacaacucaguaga

SEQ ID NO: 1732539 - RNA, 19 nt, Artificial Sequence
  Description of Artificial Sequence: Synthetic oligonucleotide
  Sense strand starting at position 2782 of SEQ ID NO: 1562238
uacugaguuguuuauaguu

SEQ ID NO: 1732540 - RNA, 19 nt, Artificial Sequence
  Description of Artificial Sequence: Synthetic oligonucleotide
  Antisense strand to SEQ ID NO: 1732539
aacuauaaacaacucagua

SEQ ID NO: 1732541 - RNA, 19 nt, Artificial Sequence
  Description of Artificial Sequence: Synthetic oligonucleotide
  Sense strand starting at position 2804 of SEQ ID NO: 1562238
agcuguuaagaauaaagcu

SEQ ID NO: 1732542 - RNA, 19 nt, Artificial Sequence
  Description of Artificial Sequence: Synthetic oligonucleotide
  Antisense strand to SEQ ID NO: 1732541
agcuuuauucuuaacagcu

SEQ ID NO: 1732543 - RNA, 19 nt, Artificial Sequence
  Description of Artificial Sequence: Synthetic oligonucleotide
  Sense strand starting at position 3034 of SEQ ID NO: 1562238
gaacacucugugugcauuu

SEQ ID NO: 1732544 - RNA, 19 nt, Artificial Sequence
  Description of Artificial Sequence: Synthetic oligonucleotide
  Antisense strand to SEQ ID NO: 1732543
aaaugcacacagaguguuc

SEQ ID NO: 1732545 - RNA, 19 nt, Artificial Sequence
  Description of Artificial Sequence: Synthetic oligonucleotide
  Sense strand starting at position 3067 of SEQ ID NO: 1562238
gcagguguucuuguagguu

SEQ ID NO: 1732546 - RNA, 19 nt, Artificial Sequence
  Description of Artificial Sequence: Synthetic oligonucleotide
  Antisense strand to SEQ ID NO: 1732545
aaccuacaagaacaccugc

SEQ ID NO: 1732547 - RNA, 19 nt, Artificial Sequence
  Description of Artificial Sequence: Synthetic oligonucleotide
  Sense strand starting at position 3073 of SEQ ID NO: 1562238
guucuuguagguuauacau

SEQ ID NO: 1732548 - RNA, 19 nt, Artificial Sequence
  Description of Artificial Sequence: Synthetic oligonucleotide
  Antisense strand to SEQ ID NO: 1732547
auguauaaccuacaagaac

SEQ ID NO: 1732549 - RNA, 19 nt, Artificial Sequence
  Description of Artificial Sequence: Synthetic oligonucleotide
  Sense strand starting at position 3160 of SEQ ID NO: 1562238
ucccaaagaguuuguacca

SEQ ID NO: 1732550 - RNA, 19 nt, Artificial Sequence
  Description of Artificial Sequence: Synthetic oligonucleotide
  Antisense strand to SEQ ID NO: 1732549
ugguacaaacucuuuggga

SEQ ID NO: 1732551 - RNA, 19 nt, Artificial Sequence
  Description of Artificial Sequence: Synthetic oligonucleotide
  Sense strand starting at position 3161 of SEQ ID NO: 1562238
cccaaagaguuuguaccaa

SEQ ID NO: 1732552 - RNA, 19 nt, Artificial Sequence
  Description of Artificial Sequence: Synthetic oligonucleotide
  Antisense strand to SEQ ID NO: 1732551
uugguacaaacucuuuggg

SEQ ID NO: 1732553 - RNA, 19 nt, Artificial Sequence
  Description of Artificial Sequence: Synthetic oligonucleotide
  Sense strand starting at position 3200 of SEQ ID NO: 1562238
aguugagaguuccuauugu

SEQ ID NO: 1732554 - RNA, 19 nt, Artificial Sequence
  Description of Artificial Sequence: Synthetic oligonucleotide
  Antisense strand to SEQ ID NO: 1732553
acaauaggaacucucaacu

SEQ ID NO: 1732555 - RNA, 19 nt, Artificial Sequence
  Description of Artificial Sequence: Synthetic oligonucleotide
  Sense strand starting at position 3207 of SEQ ID NO: 1562238
aguuccuauuguuccauaa

SEQ ID NO: 1732556 - RNA, 19 nt, Artificial Sequence
  Description of Artificial Sequence: Synthetic oligonucleotide
  Antisense strand to SEQ ID NO: 1732555
uuauggaacaauaggaacu

SEQ ID NO: 1732557 - RNA, 19 nt, Artificial Sequence
  Description of Artificial Sequence: Synthetic oligonucleotide
  Sense strand starting at position 3224 of SEQ ID NO: 1562238
aaccaugcuguauguagaa

SEQ ID NO: 1732558 - RNA, 19 nt, Artificial Sequence
  Description of Artificial Sequence: Synthetic oligonucleotide
  Antisense strand to SEQ ID NO: 1732557
uucuacauacagcaugguu

SEQ ID NO: 1732559 - RNA, 19 nt, Artificial Sequence
  Description of Artificial Sequence: Synthetic oligonucleotide
  Sense strand starting at position 3269 of SEQ ID NO: 1562238
uccugcuacgaguauggaa

SEQ ID NO: 1732560 - RNA, 19 nt, Artificial Sequence
  Description of Artificial Sequence: Synthetic oligonucleotide
  Antisense strand to SEQ ID NO: 1732559
uuccauacucguagcagga

SEQ ID NO: 1732561 - RNA, 19 nt, Artificial Sequence
  Description of Artificial Sequence: Synthetic oligonucleotide
  Sense strand starting at position 3271 of SEQ ID NO: 1562238
cugcuacgaguauggaaau

SEQ ID NO: 1732562 - RNA, 19 nt, Artificial Sequence
  Description of Artificial Sequence: Synthetic oligonucleotide
  Antisense strand to SEQ ID NO: 1732561
auuuccauacucguagcag

SEQ ID NO: 1732563 - RNA, 19 nt, Artificial Sequence
  Description of Artificial Sequence: Synthetic oligonucleotide
  Sense strand starting at position 3285 of SEQ ID NO: 1562238
gaaauacaucacuguggac

SEQ ID NO: 1732564 - RNA, 19 nt, Artificial Sequence
  Description of Artificial Sequence: Synthetic oligonucleotide
  Antisense strand to SEQ ID NO: 1732563
guccacagugauguauuuc

SEQ ID NO: 1732565 - RNA, 19 nt, Artificial Sequence
  Description of Artificial Sequence: Synthetic oligonucleotide
  Sense strand starting at position 3451 of SEQ ID NO: 1562238
ggagucaugucuuuccuca

SEQ ID NO: 1732566 - RNA, 19 nt, Artificial Sequence
  Description of Artificial Sequence: Synthetic oligonucleotide
  Antisense strand to SEQ ID NO: 1732565
ugaggaaagacaugacucc

SEQ ID NO: 1732567 - RNA, 19 nt, Artificial Sequence
  Description of Artificial Sequence: Synthetic oligonucleotide
  Sense strand starting at position 3497 of SEQ ID NO: 1562238
gaucaaggguaaucuucua

SEQ ID NO: 1732568 - RNA, 19 nt, Artificial Sequence
  Description of Artificial Sequence: Synthetic oligonucleotide
  Antisense strand to SEQ ID NO: 1732567
uagaagauuacccuugauc

SEQ ID NO: 1732569 - RNA, 19 nt, Artificial Sequence
  Description of Artificial Sequence: Synthetic oligonucleotide
  Sense strand starting at position 3663 of SEQ ID NO: 1562238
aucugaagucuuuguggac

SEQ ID NO: 1732570 - RNA, 19 nt, Artificial Sequence
  Description of Artificial Sequence: Synthetic oligonucleotide
  Antisense strand to SEQ ID NO: 1732569
guccacaaagacuucagau

SEQ ID NO: 1732571 - RNA, 19 nt, Artificial Sequence
  Description of Artificial Sequence: Synthetic oligonucleotide
  Sense strand starting at position 3723 of SEQ ID NO: 1562238
uucuuaagaucugugugau

SEQ ID NO: 1732572 - RNA, 19 nt, Artificial Sequence
  Description of Artificial Sequence: Synthetic oligonucleotide
  Antisense strand to SEQ ID NO: 1732571
aucacacagaucuuaagaa

SEQ ID NO: 1732573 - RNA, 19 nt, Artificial Sequence
  Description of Artificial Sequence: Synthetic oligonucleotide
  Sense strand starting at position 3724 of SEQ ID NO: 1562238
ucuuaagaucugugugauu

SEQ ID NO: 1732574 - RNA, 19 nt, Artificial Sequence
  Description of Artificial Sequence: Synthetic oligonucleotide
  Antisense strand to SEQ ID NO: 1732573
aaucacacagaucuuaaga

SEQ ID NO: 1732575 - RNA, 19 nt, Artificial Sequence
  Description of Artificial Sequence: Synthetic oligonucleotide
  Sense strand starting at position 3769 of SEQ ID NO: 1562238
auggaaguuuauguaugua

SEQ ID NO: 1732576 - RNA, 19 nt, Artificial Sequence
  Description of Artificial Sequence: Synthetic oligonucleotide
  Antisense strand to SEQ ID NO: 1732575
uacauacauaaacuuccau

SEQ ID NO: 1732577 - RNA, 19 nt, Artificial Sequence
  Description of Artificial Sequence: Synthetic oligonucleotide
  Sense strand starting at position 3772 of SEQ ID NO: 1562238
gaaguuuauguauguaaca

SEQ ID NO: 1732578 - RNA, 19 nt, Artificial Sequence
  Description of Artificial Sequence: Synthetic oligonucleotide
  Antisense strand to SEQ ID NO: 1732577
uguuacauacauaaacuuc

SEQ ID NO: 1732579 - RNA, 19 nt, Artificial Sequence
  Description of Artificial Sequence: Synthetic oligonucleotide
  Sense strand starting at position 3785 of SEQ ID NO: 1562238
guaacaauacuuuguggaa

SEQ ID NO: 1732580 - RNA, 19 nt, Artificial Sequence
  Description of Artificial Sequence: Synthetic oligonucleotide
  Antisense strand to SEQ ID NO: 1732579
uuccacaaaguauuguuac

SEQ ID NO: 1732581 - RNA, 19 nt, Artificial Sequence
  Description of Artificial Sequence: Synthetic oligonucleotide
  Sense strand starting at position 3808 of SEQ ID NO: 1562238
uuggauuccuguguuuaaa

SEQ ID NO: 1732582 - RNA, 19 nt, Artificial Sequence
  Description of Artificial Sequence: Synthetic oligonucleotide
  Antisense strand to SEQ ID NO: 1732581
uuuaaacacaggaauccaa

SEQ ID NO: 1732583 - RNA, 19 nt, Artificial Sequence
  Description of Artificial Sequence: Synthetic oligonucleotide
  Sense strand starting at position 3811 of SEQ ID NO: 1562238
gauuccuguguuuaaagga

SEQ ID NO: 1732584 - RNA, 19 nt, Artificial Sequence
  Description of Artificial Sequence: Synthetic oligonucleotide
  Antisense strand to SEQ ID NO: 1732583
uccuuuaaacacaggaauc

SEQ ID NO: 1732585 - RNA, 19 nt, Artificial Sequence
  Description of Artificial Sequence: Synthetic oligonucleotide
  Sense strand starting at position 3839 of SEQ ID NO: 1562238
cgaaucaacuuguccucaa

SEQ ID NO: 1732586 - RNA, 19 nt, Artificial Sequence
  Description of Artificial Sequence: Synthetic oligonucleotide
  Antisense strand to SEQ ID NO: 1732585
uugaggacaaguugauucg

SEQ ID NO: 1732587 - RNA, 19 nt, Artificial Sequence
  Description of Artificial Sequence: Synthetic oligonucleotide
  Sense strand starting at position 3902 of SEQ ID NO: 1562238
uuagauuuaucagaccaug

SEQ ID NO: 1732588 - RNA, 19 nt, Artificial Sequence
  Description of Artificial Sequence: Synthetic oligonucleotide
  Antisense strand to SEQ ID NO: 1732587
cauggucugauaaaucuaa

SEQ ID NO: 1732589 - RNA, 19 nt, Artificial Sequence
  Description of Artificial Sequence: Synthetic oligonucleotide
  Sense strand starting at position 28 of SEQ ID NO: 1562239
gcauuugagagcugugcaa

SEQ ID NO: 1732590 - RNA, 19 nt, Artificial Sequence
  Description of Artificial Sequence: Synthetic oligonucleotide
  Antisense strand to SEQ ID NO: 1732589
uugcacagcucucaaaugc

SEQ ID NO: 1732591 - RNA, 19 nt, Artificial Sequence
  Description of Artificial Sequence: Synthetic oligonucleotide
  Sense strand starting at position 30 of SEQ ID NO: 1562239
auuugagagcugugcaauu

SEQ ID NO: 1732592 - RNA, 19 nt, Artificial Sequence
  Description of Artificial Sequence: Synthetic oligonucleotide
  Antisense strand to SEQ ID NO: 1732591
aauugcacagcucucaaau

SEQ ID NO: 1732593 - RNA, 19 nt, Artificial Sequence
  Description of Artificial Sequence: Synthetic oligonucleotide
  Sense strand starting at position 32 of SEQ ID NO: 1562239
uugagagcugugcaauuau

SEQ ID NO: 1732594 - RNA, 19 nt, Artificial Sequence
  Description of Artificial Sequence: Synthetic oligonucleotide
  Antisense strand to SEQ ID NO: 1732593
auaauugcacagcucucaa

SEQ ID NO: 1732595 - RNA, 19 nt, Artificial Sequence
  Description of Artificial Sequence: Synthetic oligonucleotide
  Sense strand starting at position 82 of SEQ ID NO: 1562239
auuaaauaaggguggcaaa

SEQ ID NO: 1732596 - RNA, 19 nt, Artificial Sequence
  Description of Artificial Sequence: Synthetic oligonucleotide
  Antisense strand to SEQ ID NO: 1732595
uuugccacccuuauuuaau

SEQ ID NO: 1732597 - RNA, 19 nt, Artificial Sequence
  Description of Artificial Sequence: Synthetic oligonucleotide
  Sense strand starting at position 281 of SEQ ID NO: 1562239
ucauucuaucggcaagaac

SEQ ID NO: 1732598 - RNA, 19 nt, Artificial Sequence
  Description of Artificial Sequence: Synthetic oligonucleotide
  Antisense strand to SEQ ID NO: 1732597
guucuugccgauagaauga

SEQ ID NO: 1732599 - RNA, 19 nt, Artificial Sequence
  Description of Artificial Sequence: Synthetic oligonucleotide
  Sense strand starting at position 298 of SEQ ID NO: 1562239
acacaagacugguuaugug

SEQ ID NO: 1732600 - RNA, 19 nt, Artificial Sequence
  Description of Artificial Sequence: Synthetic oligonucleotide
  Antisense strand to SEQ ID NO: 1732599
cacauaaccagucuugugu

SEQ ID NO: 1732601 - RNA, 19 nt, Artificial Sequence
  Description of Artificial Sequence: Synthetic oligonucleotide
  Sense strand starting at position 691 of SEQ ID NO: 1562239
gccuguguccagucugagu

SEQ ID NO: 1732602 - RNA, 19 nt, Artificial Sequence
  Description of Artificial Sequence: Synthetic oligonucleotide
  Antisense strand to SEQ ID NO: 1732601
acucagacuggacacaggc

SEQ ID NO: 1732603 - RNA, 19 nt, Artificial Sequence
  Description of Artificial Sequence: Synthetic oligonucleotide
  Sense strand starting at position 721 of SEQ ID NO: 1562239
guuggaaacucucugcaua

SEQ ID NO: 1732604 - RNA, 19 nt, Artificial Sequence
  Description of Artificial Sequence: Synthetic oligonucleotide
  Antisense strand to SEQ ID NO: 1732603
uaugcagagaguuuccaac

SEQ ID NO: 1732605 - RNA, 19 nt, Artificial Sequence
  Description of Artificial Sequence: Synthetic oligonucleotide
  Sense strand starting at position 722 of SEQ ID NO: 1562239
uuggaaacucucugcauau

SEQ ID NO: 1732606 - RNA, 19 nt, Artificial Sequence
  Description of Artificial Sequence: Synthetic oligonucleotide
  Antisense strand to SEQ ID NO: 1732605
auaugcagagaguuuccaa

SEQ ID NO: 1732607 - RNA, 19 nt, Artificial Sequence
  Description of Artificial Sequence: Synthetic oligonucleotide
  Sense strand starting at position 723 of SEQ ID NO: 1562239
uggaaacucucugcauauc

SEQ ID NO: 1732608 - RNA, 19 nt, Artificial Sequence
  Description of Artificial Sequence: Synthetic oligonucleotide
  Antisense strand to SEQ ID NO: 1732607
gauaugcagagaguuucca

SEQ ID NO: 1732609 - RNA, 19 nt, Artificial Sequence
  Description of Artificial Sequence: Synthetic oligonucleotide
  Sense strand starting at position 885 of SEQ ID NO: 1562239
uggcacaucccauagugaa

SEQ ID NO: 1732610 - RNA, 19 nt, Artificial Sequence
  Description of Artificial Sequence: Synthetic oligonucleotide
  Antisense strand to SEQ ID NO: 1732609
uucacuaugggaugugcca

SEQ ID NO: 1732611 - RNA, 19 nt, Artificial Sequence
  Description of Artificial Sequence: Synthetic oligonucleotide
  Sense strand starting at position 993 of SEQ ID NO: 1562239
gguuaugacgguaggugua

SEQ ID NO: 1732612 - RNA, 19 nt, Artificial Sequence
  Description of Artificial Sequence: Synthetic oligonucleotide
  Antisense strand to SEQ ID NO: 1732611
uacaccuaccgucauaacc

SEQ ID NO: 1732613 - RNA, 19 nt, Artificial Sequence
  Description of Artificial Sequence: Synthetic oligonucleotide
  Sense strand starting at position 1011 of SEQ ID NO: 1562239
agguguagaauggguauaa

SEQ ID NO: 1732614 - RNA, 19 nt, Artificial Sequence
  Description of Artificial Sequence: Synthetic oligonucleotide
  Antisense strand to SEQ ID NO: 1732613
uuauacccauucuacaccu

SEQ ID NO: 1732615 - RNA, 19 nt, Artificial Sequence
  Description of Artificial Sequence: Synthetic oligonucleotide
  Sense strand starting at position 1012 of SEQ ID NO: 1562239
gguguagaauggguauaag

SEQ ID NO: 1732616 - RNA, 19 nt, Artificial Sequence
  Description of Artificial Sequence: Synthetic oligonucleotide
  Antisense strand to SEQ ID NO: 1732615
cuuauacccauucuacacc

SEQ ID NO: 1732617 - RNA, 19 nt, Artificial Sequence
  Description of Artificial Sequence: Synthetic oligonucleotide
  Sense strand starting at position 1015 of SEQ ID NO: 1562239
guagaauggguauaagugu

SEQ ID NO: 1732618 - RNA, 19 nt, Artificial Sequence
  Description of Artificial Sequence: Synthetic oligonucleotide
  Antisense strand to SEQ ID NO: 1732617
acacuuauacccauucuac

SEQ ID NO: 1732619 - RNA, 19 nt, Artificial Sequence
  Description of Artificial Sequence: Synthetic oligonucleotide
  Sense strand starting at position 1023 of SEQ ID NO: 1562239
gguauaaguguagggaaau

SEQ ID NO: 1732620 - RNA, 19 nt, Artificial Sequence
  Description of Artificial Sequence: Synthetic oligonucleotide
  Antisense strand to SEQ ID NO: 1732619
auuucccuacacuuauacc

SEQ ID NO: 1732621 - RNA, 19 nt, Artificial Sequence
  Description of Artificial Sequence: Synthetic oligonucleotide
  Sense strand starting at position 1078 of SEQ ID NO: 1562239
ccaaguuaagguuaucauc

SEQ ID NO: 1732622 - RNA, 19 nt, Artificial Sequence
  Description of Artificial Sequence: Synthetic oligonucleotide
  Antisense strand to SEQ ID NO: 1732621
gaugauaaccuuaacuugg

SEQ ID NO: 1732623 - RNA, 19 nt, Artificial Sequence
  Description of Artificial Sequence: Synthetic oligonucleotide
  Sense strand starting at position 1184 of SEQ ID NO: 1562239
agacaagaggcauguugau

SEQ ID NO: 1732624 - RNA, 19 nt, Artificial Sequence
  Description of Artificial Sequence: Synthetic oligonucleotide
  Antisense strand to SEQ ID NO: 1732623
aucaacaugccucuugucu

SEQ ID NO: 1732625 - RNA, 19 nt, Artificial Sequence
  Description of Artificial Sequence: Synthetic oligonucleotide
  Sense strand starting at position 1196 of SEQ ID NO: 1562239
uguugauccucaucucuga

SEQ ID NO: 1732626 - RNA, 19 nt, Artificial Sequence
  Description of Artificial Sequence: Synthetic oligonucleotide
  Antisense strand to SEQ ID NO: 1732625
ucagagaugaggaucaaca

SEQ ID NO: 1732627 - RNA, 19 nt, Artificial Sequence
  Description of Artificial Sequence: Synthetic oligonucleotide
  Sense strand starting at position 1274 of SEQ ID NO: 1562239
ucaggaucagacuguagau

SEQ ID NO: 1732628 - RNA, 19 nt, Artificial Sequence
  Description of Artificial Sequence: Synthetic oligonucleotide
  Antisense strand to SEQ ID NO: 1732627
aucuacagucugauccuga

SEQ ID NO: 1732629 - RNA, 19 nt, Artificial Sequence
  Description of Artificial Sequence: Synthetic oligonucleotide
  Sense strand starting at position 1466 of SEQ ID NO: 1562239
aagguaguucuaugaagaa

SEQ ID NO: 1732630 - RNA, 19 nt, Artificial Sequence
  Description of Artificial Sequence: Synthetic oligonucleotide
  Antisense strand to SEQ ID NO: 1732629
uucuucauagaacuaccuu

SEQ ID NO: 1732631 - RNA, 19 nt, Artificial Sequence
  Description of Artificial Sequence: Synthetic oligonucleotide
  Sense strand starting at position 1945 of SEQ ID NO: 1562239
gccacuacagaugaucauu

SEQ ID NO: 1732632 - RNA, 19 nt, Artificial Sequence
  Description of Artificial Sequence: Synthetic oligonucleotide
  Antisense strand to SEQ ID NO: 1732631
aaugaucaucuguaguggc

SEQ ID NO: 1732633 - RNA, 19 nt, Artificial Sequence
  Description of Artificial Sequence: Synthetic oligonucleotide
  Sense strand starting at position 2002 of SEQ ID NO: 1562239
uugcguccugguguucaau

SEQ ID NO: 1732634 - RNA, 19 nt, Artificial Sequence
  Description of Artificial Sequence: Synthetic oligonucleotide
  Antisense strand to SEQ ID NO: 1732633
auugaacaccaggacgcaa

SEQ ID NO: 1732635 - RNA, 19 nt, Artificial Sequence
  Description of Artificial Sequence: Synthetic oligonucleotide
  Sense strand starting at position 2003 of SEQ ID NO: 1562239
ugcguccugguguucaauu

SEQ ID NO: 1732636 - RNA, 19 nt, Artificial Sequence
  Description of Artificial Sequence: Synthetic oligonucleotide
  Antisense strand to SEQ ID NO: 1732635
aauugaacaccaggacgca

SEQ ID NO: 1732637 - RNA, 19 nt, Artificial Sequence
  Description of Artificial Sequence: Synthetic oligonucleotide
  Sense strand starting at position 2207 of SEQ ID NO: 1562239
acccauuaagcaugagaug

SEQ ID NO: 1732638 - RNA, 19 nt, Artificial Sequence
  Description of Artificial Sequence: Synthetic oligonucleotide
  Antisense strand to SEQ ID NO: 1732637
caucucaugcuuaaugggu

SEQ ID NO: 1732639 - RNA, 19 nt, Artificial Sequence
  Description of Artificial Sequence: Synthetic oligonucleotide
  Sense strand starting at position 2230 of SEQ ID NO: 1562239
gcaguuagaacccgagaua

SEQ ID NO: 1732640 - RNA, 19 nt, Artificial Sequence
  Description of Artificial Sequence: Synthetic oligonucleotide
  Antisense strand to SEQ ID NO: 1732639
uaucucggguucuaacugc

SEQ ID NO: 1732641 - RNA, 19 nt, Artificial Sequence
  Description of Artificial Sequence: Synthetic oligonucleotide
  Sense strand starting at position 2316 of SEQ ID NO: 1562239
ccaaucucucuguaagguu

SEQ ID NO: 1732642 - RNA, 19 nt, Artificial Sequence
  Description of Artificial Sequence: Synthetic oligonucleotide
  Antisense strand to SEQ ID NO: 1732641
aaccuuacagagagauugg

SEQ ID NO: 1732643 - RNA, 19 nt, Artificial Sequence
  Description of Artificial Sequence: Synthetic oligonucleotide
  Sense strand starting at position 2334 of SEQ ID NO: 1562239
ucagauuacugucuaucau

SEQ ID NO: 1732644 - RNA, 19 nt, Artificial Sequence
  Description of Artificial Sequence: Synthetic oligonucleotide
  Antisense strand to SEQ ID NO: 1732643
augauagacaguaaucuga

SEQ ID NO: 1732645 - RNA, 19 nt, Artificial Sequence
  Description of Artificial Sequence: Synthetic oligonucleotide
  Sense strand starting at position 2358 of SEQ ID NO: 1562239
uaaugagucccaggaaguc

SEQ ID NO: 1732646 - RNA, 19 nt, Artificial Sequence
  Description of Artificial Sequence: Synthetic oligonucleotide
  Antisense strand to SEQ ID NO: 1732645
gacuuccugggacucauua

SEQ ID NO: 1732647 - RNA, 19 nt, Artificial Sequence
  Description of Artificial Sequence: Synthetic oligonucleotide
  Sense strand starting at position 2426 of SEQ ID NO: 1562239
gaggguguuuccucuagga

SEQ ID NO: 1732648 - RNA, 19 nt, Artificial Sequence
  Description of Artificial Sequence: Synthetic oligonucleotide
  Antisense strand to SEQ ID NO: 1732647
uccuagaggaaacacccuc

SEQ ID NO: 1732649 - RNA, 19 nt, Artificial Sequence
  Description of Artificial Sequence: Synthetic oligonucleotide
  Sense strand starting at position 2428 of SEQ ID NO: 1562239
ggguguuuccucuaggauc

SEQ ID NO: 1732650 - RNA, 19 nt, Artificial Sequence
  Description of Artificial Sequence: Synthetic oligonucleotide
  Antisense strand to SEQ ID NO: 1732649
gauccuagaggaaacaccc

SEQ ID NO: 1732651 - RNA, 19 nt, Artificial Sequence
  Description of Artificial Sequence: Synthetic oligonucleotide
  Sense strand starting at position 2734 of SEQ ID NO: 1562239
gaguaauuggcacagagug

SEQ ID NO: 1732652 - RNA, 19 nt, Artificial Sequence
  Description of Artificial Sequence: Synthetic oligonucleotide
  Antisense strand to SEQ ID NO: 1732651
cacucugugccaauuacuc

SEQ ID NO: 1732653 - RNA, 19 nt, Artificial Sequence
  Description of Artificial Sequence: Synthetic oligonucleotide
  Sense strand starting at position 2776 of SEQ ID NO: 1562239
uacugugaguugguggaaa

SEQ ID NO: 1732654 - RNA, 19 nt, Artificial Sequence
  Description of Artificial Sequence: Synthetic oligonucleotide
  Antisense strand to SEQ ID NO: 1732653
uuuccaccaacucacagua

SEQ ID NO: 1732655 - RNA, 19 nt, Artificial Sequence
  Description of Artificial Sequence: Synthetic oligonucleotide
  Sense strand starting at position 2787 of SEQ ID NO: 1562239
gguggaaauuaaucagugu

SEQ ID NO: 1732656 - RNA, 19 nt, Artificial Sequence
  Description of Artificial Sequence: Synthetic oligonucleotide
  Antisense strand to SEQ ID NO: 1732655
acacugauuaauuuccacc

SEQ ID NO: 1732657 - RNA, 19 nt, Artificial Sequence
  Description of Artificial Sequence: Synthetic oligonucleotide
  Sense strand starting at position 2790 of SEQ ID NO: 1562239
ggaaauuaaucaguguggu

SEQ ID NO: 1732658 - RNA, 19 nt, Artificial Sequence
  Description of Artificial Sequence: Synthetic oligonucleotide
  Antisense strand to SEQ ID NO: 1732657
accacacugauuaauuucc

SEQ ID NO: 1732659 - RNA, 19 nt, Artificial Sequence
  Description of Artificial Sequence: Synthetic oligonucleotide
  Sense strand starting at position 2791 of SEQ ID NO: 1562239
gaaauuaaucaguguggua

SEQ ID NO: 1732660 - RNA, 19 nt, Artificial Sequence
  Description of Artificial Sequence: Synthetic oligonucleotide
  Antisense strand to SEQ ID NO: 1732659
uaccacacugauuaauuuc

SEQ ID NO: 1732661 - RNA, 19 nt, Artificial Sequence
  Description of Artificial Sequence: Synthetic oligonucleotide
  Sense strand starting at position 2793 of SEQ ID NO: 1562239
aauuaaucagugugguaca

SEQ ID NO: 1732662 - RNA, 19 nt, Artificial Sequence
  Description of Artificial Sequence: Synthetic oligonucleotide
  Antisense strand to SEQ ID NO: 1732661
uguaccacacugauuaauu

SEQ ID NO: 1732663 - RNA, 19 nt, Artificial Sequence
  Description of Artificial Sequence: Synthetic oligonucleotide
  Sense strand starting at position 2901 of SEQ ID NO: 1562239
gccaaaugugaagagguuu

SEQ ID NO: 1732664 - RNA, 19 nt, Artificial Sequence
  Description of Artificial Sequence: Synthetic oligonucleotide
  Antisense strand to SEQ ID NO: 1732663
aaaccucuucacauuuggc

SEQ ID NO: 1732665 - RNA, 19 nt, Artificial Sequence
  Description of Artificial Sequence: Synthetic oligonucleotide
  Sense strand starting at position 2951 of SEQ ID NO: 1562239
ugcaguguuaugcuccagu

SEQ ID NO: 1732666 - RNA, 19 nt, Artificial Sequence
  Description of Artificial Sequence: Synthetic oligonucleotide
  Antisense strand to SEQ ID NO: 1732665
acuggagcauaacacugca

SEQ ID NO: 1732667 - RNA, 19 nt, Artificial Sequence
  Description of Artificial Sequence: Synthetic oligonucleotide
  Sense strand starting at position 3781 of SEQ ID NO: 1562239
auuaucauaucuguuguga

SEQ ID NO: 1732668 - RNA, 19 nt, Artificial Sequence
  Description of Artificial Sequence: Synthetic oligonucleotide
  Antisense strand to SEQ ID NO: 1732667
ucacaacagauaugauaau

SEQ ID NO: 1732669 - RNA, 19 nt, Artificial Sequence
  Description of Artificial Sequence: Synthetic oligonucleotide
  Sense strand starting at position 61 of SEQ ID NO: 1562240
gcucaaaccguguaguaac

SEQ ID NO: 1732670 - RNA, 19 nt, Artificial Sequence
  Description of Artificial Sequence: Synthetic oligonucleotide
  Antisense strand to SEQ ID NO: 1732669
guuacuacacgguuugagc

SEQ ID NO: 1732671 - RNA, 19 nt, Artificial Sequence
  Description of Artificial Sequence: Synthetic oligonucleotide
  Sense strand starting at position 252 of SEQ ID NO: 1562240
uugggcaagaguugagauu

SEQ ID NO: 1732672 - RNA, 19 nt, Artificial Sequence
  Description of Artificial Sequence: Synthetic oligonucleotide
  Antisense strand to SEQ ID NO: 1732671
aaucucaacucuugcccaa

SEQ ID NO: 1732673 - RNA, 19 nt, Artificial Sequence
  Description of Artificial Sequence: Synthetic oligonucleotide
  Sense strand starting at position 284 of SEQ ID NO: 1562240
ugacuugcuacgugacuga

SEQ ID NO: 1732674 - RNA, 19 nt, Artificial Sequence
  Description of Artificial Sequence: Synthetic oligonucleotide
  Antisense strand to SEQ ID NO: 1732673
ucagucacguagcaaguca

SEQ ID NO: 1732675 - RNA, 19 nt, Artificial Sequence
  Description of Artificial Sequence: Synthetic oligonucleotide
  Sense strand starting at position 288 of SEQ ID NO: 1562240
uugcuacgugacugaacau

SEQ ID NO: 1732676 - RNA, 19 nt, Artificial Sequence
  Description of Artificial Sequence: Synthetic oligonucleotide
  Antisense strand to SEQ ID NO: 1732675
auguucagucacguagcaa

SEQ ID NO: 1732677 - RNA, 19 nt, Artificial Sequence
  Description of Artificial Sequence: Synthetic oligonucleotide
  Sense strand starting at position 369 of SEQ ID NO: 1562240
gagacaaccuguuucugag

SEQ ID NO: 1732678 - RNA, 19 nt, Artificial Sequence
  Description of Artificial Sequence: Synthetic oligonucleotide
  Antisense strand to SEQ ID NO: 1732677
cucagaaacagguugucuc

SEQ ID NO: 1732679 - RNA, 19 nt, Artificial Sequence
  Description of Artificial Sequence: Synthetic oligonucleotide
  Sense strand starting at position 375 of SEQ ID NO: 1562240
accuguuucugagugauga

SEQ ID NO: 1732680 - RNA, 19 nt, Artificial Sequence
  Description of Artificial Sequence: Synthetic oligonucleotide
  Antisense strand to SEQ ID NO: 1732679
ucaucacucagaaacaggu

SEQ ID NO: 1732681 - RNA, 19 nt, Artificial Sequence
  Description of Artificial Sequence: Synthetic oligonucleotide
  Sense strand starting at position 377 of SEQ ID NO: 1562240
cuguuucugagugaugaug

SEQ ID NO: 1732682 - RNA, 19 nt, Artificial Sequence
  Description of Artificial Sequence: Synthetic oligonucleotide
  Antisense strand to SEQ ID NO: 1732681
caucaucacucagaaacag

SEQ ID NO: 1732683 - RNA, 19 nt, Artificial Sequence
  Description of Artificial Sequence: Synthetic oligonucleotide
  Sense strand starting at position 383 of SEQ ID NO: 1562240
cugagugaugauggagauu

SEQ ID NO: 1732684 - RNA, 19 nt, Artificial Sequence
  Description of Artificial Sequence: Synthetic oligonucleotide
  Antisense strand to SEQ ID NO: 1732683
aaucuccaucaucacucag

SEQ ID NO: 1732685 - RNA, 19 nt, Artificial Sequence
  Description of Artificial Sequence: Synthetic oligonucleotide
  Sense strand starting at position 412 of SEQ ID NO: 1562240
cuggccaguccuugaucaa

SEQ ID NO: 1732686 - RNA, 19 nt, Artificial Sequence
  Description of Artificial Sequence: Synthetic oligonucleotide
  Antisense strand to SEQ ID NO: 1732685
uugaucaaggacuggccag

SEQ ID NO: 1732687 - RNA, 19 nt, Artificial Sequence
  Description of Artificial Sequence: Synthetic oligonucleotide
  Sense strand starting at position 413 of SEQ ID NO: 1562240
uggccaguccuugaucaau

SEQ ID NO: 1732688 - RNA, 19 nt, Artificial Sequence
  Description of Artificial Sequence: Synthetic oligonucleotide
  Antisense strand to SEQ ID NO: 1732687
auugaucaaggacuggcca

SEQ ID NO: 1732689 - RNA, 19 nt, Artificial Sequence
  Description of Artificial Sequence: Synthetic oligonucleotide
  Sense strand starting at position 419 of SEQ ID NO: 1562240
guccuugaucaaugugauu

SEQ ID NO: 1732690 - RNA, 19 nt, Artificial Sequence
  Description of Artificial Sequence: Synthetic oligonucleotide
  Antisense strand to SEQ ID NO: 1732689
aaucacauugaucaaggac

SEQ ID NO: 1732691 - RNA, 19 nt, Artificial Sequence
  Description of Artificial Sequence: Synthetic oligonucleotide
  Sense strand starting at position 605 of SEQ ID NO: 1562240
agggaagaauggucccgua

SEQ ID NO: 1732692 - RNA, 19 nt, Artificial Sequence
  Description of Artificial Sequence: Synthetic oligonucleotide
  Antisense strand to SEQ ID NO: 1732691
uacgggaccauucuucccu

SEQ ID NO: 1732693 - RNA, 19 nt, Artificial Sequence
  Description of Artificial Sequence: Synthetic oligonucleotide
  Sense strand starting at position 619 of SEQ ID NO: 1562240
ccguaagucucacccuaau

SEQ ID NO: 1732694 - RNA, 19 nt, Artificial Sequence
  Description of Artificial Sequence: Synthetic oligonucleotide
  Antisense strand to SEQ ID NO: 1732693
auuagggugagacuuacgg

SEQ ID NO: 1732695 - RNA, 19 nt, Artificial Sequence
  Description of Artificial Sequence: Synthetic oligonucleotide
  Sense strand starting at position 1194 of SEQ ID NO: 1562240
gggauuguugugcauguua

SEQ ID NO: 1732696 - RNA, 19 nt, Artificial Sequence
  Description of Artificial Sequence: Synthetic oligonucleotide
  Antisense strand to SEQ ID NO: 1732695
uaacaugcacaacaauccc

SEQ ID NO: 1732697 - RNA, 19 nt, Artificial Sequence
  Description of Artificial Sequence: Synthetic oligonucleotide
  Sense strand starting at position 1203 of SEQ ID NO: 1562240
gugcauguuagacaaggua

SEQ ID NO: 1732698 - RNA, 19 nt, Artificial Sequence
  Description of Artificial Sequence: Synthetic oligonucleotide
  Antisense strand to SEQ ID NO: 1732697
uaccuugucuaacaugcac

SEQ ID NO: 1732699 - RNA, 19 nt, Artificial Sequence
  Description of Artificial Sequence: Synthetic oligonucleotide
  Sense strand starting at position 1206 of SEQ ID NO: 1562240
cauguuagacaagguagau

SEQ ID NO: 1732700 - RNA, 19 nt, Artificial Sequence
  Description of Artificial Sequence: Synthetic oligonucleotide
  Antisense strand to SEQ ID NO: 1732699
aucuaccuugucuaacaug

SEQ ID NO: 1732701 - RNA, 19 nt, Artificial Sequence
  Description of Artificial Sequence: Synthetic oligonucleotide
  Sense strand starting at position 1273 of SEQ ID NO: 1562240
gccauuacuccacagaggu

SEQ ID NO: 1732702 - RNA, 19 nt, Artificial Sequence
  Description of Artificial Sequence: Synthetic oligonucleotide
  Antisense strand to SEQ ID NO: 1732701
accucuguggaguaauggc

SEQ ID NO: 1732703 - RNA, 19 nt, Artificial Sequence
  Description of Artificial Sequence: Synthetic oligonucleotide
  Sense strand starting at position 1325 of SEQ ID NO: 1562240
ucacucacugccuaagagu

SEQ ID NO: 1732704 - RNA, 19 nt, Artificial Sequence
  Description of Artificial Sequence: Synthetic oligonucleotide
  Antisense strand to SEQ ID NO: 1732703
acucuuaggcagugaguga

SEQ ID NO: 1732705 - RNA, 19 nt, Artificial Sequence
  Description of Artificial Sequence: Synthetic oligonucleotide
  Sense strand starting at position 1336 of SEQ ID NO: 1562240
cuaagaguccaacagcauu

SEQ ID NO: 1732706 - RNA, 19 nt, Artificial Sequence
  Description of Artificial Sequence: Synthetic oligonucleotide
  Antisense strand to SEQ ID NO: 1732705
aaugcuguuggacucuuag

SEQ ID NO: 1732707 - RNA, 19 nt, Artificial Sequence
  Description of Artificial Sequence: Synthetic oligonucleotide
  Sense strand starting at position 2405 of SEQ ID NO: 1562240
gcgguuucuggcaggcaga

SEQ ID NO: 1732708 - RNA, 19 nt, Artificial Sequence
  Description of Artificial Sequence: Synthetic oligonucleotide
  Antisense strand to SEQ ID NO: 1732707
ucugccugccagaaaccgc

SEQ ID NO: 1732709 - RNA, 19 nt, Artificial Sequence
  Description of Artificial Sequence: Synthetic oligonucleotide
  Sense strand starting at position 2443 of SEQ ID NO: 1562240
gggugugacccagagcaaa

SEQ ID NO: 1732710 - RNA, 19 nt, Artificial Sequence
  Description of Artificial Sequence: Synthetic oligonucleotide
  Antisense strand to SEQ ID NO: 1732709
uuugcucugggucacaccc

SEQ ID NO: 1732711 - RNA, 19 nt, Artificial Sequence
  Description of Artificial Sequence: Synthetic oligonucleotide
  Sense strand starting at position 2475 of SEQ ID NO: 1562240
gccuguuugcucuuggcaa

SEQ ID NO: 1732712 - RNA, 19 nt, Artificial Sequence
  Description of Artificial Sequence: Synthetic oligonucleotide
  Antisense strand to SEQ ID NO: 1732711
uugccaagagcaaacaggc

SEQ ID NO: 1732713 - RNA, 19 nt, Artificial Sequence
  Description of Artificial Sequence: Synthetic oligonucleotide
  Sense strand starting at position 2839 of SEQ ID NO: 1562240
cagaauguuccaggccaag

SEQ ID NO: 1732714 - RNA, 19 nt, Artificial Sequence
  Description of Artificial Sequence: Synthetic oligonucleotide
  Antisense strand to SEQ ID NO: 1732713
cuuggccuggaacauucug

SEQ ID NO: 1732715 - RNA, 19 nt, Artificial Sequence
  Description of Artificial Sequence: Synthetic oligonucleotide
  Sense strand starting at position 2878 of SEQ ID NO: 1562240
cuagaugucggacauagca

SEQ ID NO: 1732716 - RNA, 19 nt, Artificial Sequence
  Description of Artificial Sequence: Synthetic oligonucleotide
  Antisense strand to SEQ ID NO: 1732715
ugcuauguccgacaucuag

SEQ ID NO: 1732717 - RNA, 19 nt, Artificial Sequence
  Description of Artificial Sequence: Synthetic oligonucleotide
  Sense strand starting at position 2904 of SEQ ID NO: 1562240
cugcuuauucugggagcca

SEQ ID NO: 1732718 - RNA, 19 nt, Artificial Sequence
  Description of Artificial Sequence: Synthetic oligonucleotide
  Antisense strand to SEQ ID NO: 1732717
uggcucccagaauaagcag

SEQ ID NO: 1732719 - RNA, 19 nt, Artificial Sequence
  Description of Artificial Sequence: Synthetic oligonucleotide
  Sense strand starting at position 2961 of SEQ ID NO: 1562240
aauggugaugucugugaag

SEQ ID NO: 1732720 - RNA, 19 nt, Artificial Sequence
  Description of Artificial Sequence: Synthetic oligonucleotide
  Antisense strand to SEQ ID NO: 1732719
cuucacagacaucaccauu

SEQ ID NO: 1732721 - RNA, 19 nt, Artificial Sequence
  Description of Artificial Sequence: Synthetic oligonucleotide
  Sense strand starting at position 3060 of SEQ ID NO: 1562240
augggcuuuguuuguagaa

SEQ ID NO: 1732722 - RNA, 19 nt, Artificial Sequence
  Description of Artificial Sequence: Synthetic oligonucleotide
  Antisense strand to SEQ ID NO: 1732721
uucuacaaacaaagcccau

SEQ ID NO: 1732723 - RNA, 19 nt, Artificial Sequence
  Description of Artificial Sequence: Synthetic oligonucleotide
  Sense strand starting at position 3136 of SEQ ID NO: 1562240
ccaguaguuguccaaaccu

SEQ ID NO: 1732724 - RNA, 19 nt, Artificial Sequence
  Description of Artificial Sequence: Synthetic oligonucleotide
  Antisense strand to SEQ ID NO: 1732723
agguuuggacaacuacugg

SEQ ID NO: 1732725 - RNA, 19 nt, Artificial Sequence
  Description of Artificial Sequence: Synthetic oligonucleotide
  Sense strand starting at position 3151 of SEQ ID NO: 1562240
accucaaagugaucuagcu

SEQ ID NO: 1732726 - RNA, 19 nt, Artificial Sequence
  Description of Artificial Sequence: Synthetic oligonucleotide
  Antisense strand to SEQ ID NO: 1732725
agcuagaucacuuugaggu

SEQ ID NO: 1732727 - RNA, 19 nt, Artificial Sequence
  Description of Artificial Sequence: Synthetic oligonucleotide
  Sense strand starting at position 3159 of SEQ ID NO: 1562240
gugaucuagcuggauagca

SEQ ID NO: 1732728 - RNA, 19 nt, Artificial Sequence
  Description of Artificial Sequence: Synthetic oligonucleotide
  Antisense strand to SEQ ID NO: 1732727
ugcuauccagcuagaucac

SEQ ID NO: 1732729 - RNA, 19 nt, Artificial Sequence
  Description of Artificial Sequence: Synthetic oligonucleotide
  Sense strand starting at position 3205 of SEQ ID NO: 1562240
gaagaagugugacuugaua

SEQ ID NO: 1732730 - RNA, 19 nt, Artificial Sequence
  Description of Artificial Sequence: Synthetic oligonucleotide
  Antisense strand to SEQ ID NO: 1732729
uaucaagucacacuucuuc

SEQ ID NO: 1732731 - RNA, 19 nt, Artificial Sequence
  Description of Artificial Sequence: Synthetic oligonucleotide
  Sense strand starting at position 3207 of SEQ ID NO: 1562240
agaagugugacuugauaua

SEQ ID NO: 1732732 - RNA, 19 nt, Artificial Sequence
  Description of Artificial Sequence: Synthetic oligonucleotide
  Antisense strand to SEQ ID NO: 1732731
uauaucaagucacacuucu

SEQ ID NO: 1732733 - RNA, 19 nt, Artificial Sequence
  Description of Artificial Sequence: Synthetic oligonucleotide
  Sense strand starting at position 3216 of SEQ ID NO: 1562240
acuugauauaguggcaaga

SEQ ID NO: 1732734 - RNA, 19 nt, Artificial Sequence
  Description of Artificial Sequence: Synthetic oligonucleotide
  Antisense strand to SEQ ID NO: 1732733
ucuugccacuauaucaagu

SEQ ID NO: 1732735 - RNA, 19 nt, Artificial Sequence
  Description of Artificial Sequence: Synthetic oligonucleotide
  Sense strand starting at position 3309 of SEQ ID NO: 1562240
agaugaaagugugggauuu

SEQ ID NO: 1732736 - RNA, 19 nt, Artificial Sequence
  Description of Artificial Sequence: Synthetic oligonucleotide
  Antisense strand to SEQ ID NO: 1732735
aaaucccacacuuucaucu

SEQ ID NO: 1732737 - RNA, 19 nt, Artificial Sequence
  Description of Artificial Sequence: Synthetic oligonucleotide
  Sense strand starting at position 3311 of SEQ ID NO: 1562240
augaaagugugggauuuga

SEQ ID NO: 1732738 - RNA, 19 nt, Artificial Sequence
  Description of Artificial Sequence: Synthetic oligonucleotide
  Antisense strand to SEQ ID NO: 1732737
ucaaaucccacacuuucau

SEQ ID NO: 1732739 - RNA, 19 nt, Artificial Sequence
  Description of Artificial Sequence: Synthetic oligonucleotide
  Sense strand starting at position 3328 of SEQ ID NO: 1562240
gauuauuuauggcaggaag

SEQ ID NO: 1732740 - RNA, 19 nt, Artificial Sequence
  Description of Artificial Sequence: Synthetic oligonucleotide
  Antisense strand to SEQ ID NO: 1732739
cuuccugccauaaauaauc

SEQ ID NO: 1732741 - RNA, 19 nt, Artificial Sequence
  Description of Artificial Sequence: Synthetic oligonucleotide
  Sense strand starting at position 3371 of SEQ ID NO: 1562240
ucuggaaacuuggaggaaa

SEQ ID NO: 1732742 - RNA, 19 nt, Artificial Sequence
  Description of Artificial Sequence: Synthetic oligonucleotide
  Antisense strand to SEQ ID NO: 1732741
uuuccuccaaguuuccaga

SEQ ID NO: 1732743 - RNA, 19 nt, Artificial Sequence
  Description of Artificial Sequence: Synthetic oligonucleotide
  Sense strand starting at position 3459 of SEQ ID NO: 1562240
ucagaagcaugccuagaau

SEQ ID NO: 1732744 - RNA, 19 nt, Artificial Sequence
  Description of Artificial Sequence: Synthetic oligonucleotide
  Antisense strand to SEQ ID NO: 1732743
auucuaggcaugcuucuga

SEQ ID NO: 1732745 - RNA, 19 nt, Artificial Sequence
  Description of Artificial Sequence: Synthetic oligonucleotide
  Sense strand starting at position 3698 of SEQ ID NO: 1562240
uugaaauacccuuaucguc

SEQ ID NO: 1732746 - RNA, 19 nt, Artificial Sequence
  Description of Artificial Sequence: Synthetic oligonucleotide
  Antisense strand to SEQ ID NO: 1732745
gacgauaaggguauuucaa

SEQ ID NO: 1732747 - RNA, 19 nt, Artificial Sequence
  Description of Artificial Sequence: Synthetic oligonucleotide
  Sense strand starting at position 3703 of SEQ ID NO: 1562240
auacccuuaucgucaucuu

SEQ ID NO: 1732748 - RNA, 19 nt, Artificial Sequence
  Description of Artificial Sequence: Synthetic oligonucleotide
  Antisense strand to SEQ ID NO: 1732747
aagaugacgauaaggguau

SEQ ID NO: 1732749 - RNA, 19 nt, Artificial Sequence
  Description of Artificial Sequence: Synthetic oligonucleotide
  Sense strand starting at position 81 of SEQ ID NO: 1562241
uucugaguuaggcagaaug

SEQ ID NO: 1732750 - RNA, 19 nt, Artificial Sequence
  Description of Artificial Sequence: Synthetic oligonucleotide
  Antisense strand to SEQ ID NO: 1732749
cauucugccuaacucagaa

SEQ ID NO: 1732751 - RNA, 19 nt, Artificial Sequence
  Description of Artificial Sequence: Synthetic oligonucleotide
  Sense strand starting at position 89 of SEQ ID NO: 1562241
uaggcagaauguguuaaca

SEQ ID NO: 1732752 - RNA, 19 nt, Artificial Sequence
  Description of Artificial Sequence: Synthetic oligonucleotide
  Antisense strand to SEQ ID NO: 1732751
uguuaacacauucugccua

SEQ ID NO: 1732753 - RNA, 19 nt, Artificial Sequence
  Description of Artificial Sequence: Synthetic oligonucleotide
  Sense strand starting at position 98 of SEQ ID NO: 1562241
uguguuaacaaguagcaga

SEQ ID NO: 1732754 - RNA, 19 nt, Artificial Sequence
  Description of Artificial Sequence: Synthetic oligonucleotide
  Antisense strand to SEQ ID NO: 1732753
ucugcuacuuguuaacaca

SEQ ID NO: 1732755 - RNA, 19 nt, Artificial Sequence
  Description of Artificial Sequence: Synthetic oligonucleotide
  Sense strand starting at position 142 of SEQ ID NO: 1562241
cccuuuauaucucuagagu

SEQ ID NO: 1732756 - RNA, 19 nt, Artificial Sequence
  Description of Artificial Sequence: Synthetic oligonucleotide
  Antisense strand to SEQ ID NO: 1732755
acucuagagauauaaaggg

SEQ ID NO: 1732757 - RNA, 19 nt, Artificial Sequence
  Description of Artificial Sequence: Synthetic oligonucleotide
  Sense strand starting at position 143 of SEQ ID NO: 1562241
ccuuuauaucucuagagug

SEQ ID NO: 1732758 - RNA, 19 nt, Artificial Sequence
  Description of Artificial Sequence: Synthetic oligonucleotide
  Antisense strand to SEQ ID NO: 1732757
cacucuagagauauaaagg

SEQ ID NO: 1732759 - RNA, 19 nt, Artificial Sequence
  Description of Artificial Sequence: Synthetic oligonucleotide
  Sense strand starting at position 145 of SEQ ID NO: 1562241
uuuauaucucuagagugac

SEQ ID NO: 1732760 - RNA, 19 nt, Artificial Sequence
  Description of Artificial Sequence: Synthetic oligonucleotide
  Antisense strand to SEQ ID NO: 1732759
gucacucuagagauauaaa

SEQ ID NO: 1732761 - RNA, 19 nt, Artificial Sequence
  Description of Artificial Sequence: Synthetic oligonucleotide
  Sense strand starting at position 148 of SEQ ID NO: 1562241
auaucucuagagugacuuu

SEQ ID NO: 1732762 - RNA, 19 nt, Artificial Sequence
  Description of Artificial Sequence: Synthetic oligonucleotide
  Antisense strand to SEQ ID NO: 1732761
aaagucacucuagagauau

SEQ ID NO: 1732763 - RNA, 19 nt, Artificial Sequence
  Description of Artificial Sequence: Synthetic oligonucleotide
  Sense strand starting at position 264 of SEQ ID NO: 1562241
auaagacaaugagauaaga

SEQ ID NO: 1732764 - RNA, 19 nt, Artificial Sequence
  Description of Artificial Sequence: Synthetic oligonucleotide
  Antisense strand to SEQ ID NO: 1732763
ucuuaucucauugucuuau

SEQ ID NO: 1732765 - RNA, 19 nt, Artificial Sequence
  Description of Artificial Sequence: Synthetic oligonucleotide
  Sense strand starting at position 431 of SEQ ID NO: 1562241
gagcccuagguuuagaauu

SEQ ID NO: 1732766 - RNA, 19 nt, Artificial Sequence
  Description of Artificial Sequence: Synthetic oligonucleotide
  Antisense strand to SEQ ID NO: 1732765
aauucuaaaccuagggcuc

SEQ ID NO: 1732767 - RNA, 19 nt, Artificial Sequence
  Description of Artificial Sequence: Synthetic oligonucleotide
  Sense strand starting at position 548 of SEQ ID NO: 1562241
uuaccaguucgggauuaaa

SEQ ID NO: 1732768 - RNA, 19 nt, Artificial Sequence
  Description of Artificial Sequence: Synthetic oligonucleotide
  Antisense strand to SEQ ID NO: 1732767
uuuaaucccgaacugguaa

SEQ ID NO: 1732769 - RNA, 19 nt, Artificial Sequence
  Description of Artificial Sequence: Synthetic oligonucleotide
  Sense strand starting at position 576 of SEQ ID NO: 1562241
guggccaucuaaucucaga

SEQ ID NO: 1732770 - RNA, 19 nt, Artificial Sequence
  Description of Artificial Sequence: Synthetic oligonucleotide
  Antisense strand to SEQ ID NO: 1732769
ucugagauuagauggccac

SEQ ID NO: 1732771 - RNA, 19 nt, Artificial Sequence
  Description of Artificial Sequence: Synthetic oligonucleotide
  Sense strand starting at position 689 of SEQ ID NO: 1562241
cccaguuggguccagcaua

SEQ ID NO: 1732772 - RNA, 19 nt, Artificial Sequence
  Description of Artificial Sequence: Synthetic oligonucleotide
  Antisense strand to SEQ ID NO: 1732771
uaugcuggacccaacuggg

SEQ ID NO: 1732773 - RNA, 19 nt, Artificial Sequence
  Description of Artificial Sequence: Synthetic oligonucleotide
  Sense strand starting at position 725 of SEQ ID NO: 1562241
caagaaguuuaggcgggau

SEQ ID NO: 1732774 - RNA, 19 nt, Artificial Sequence
  Description of Artificial Sequence: Synthetic oligonucleotide
  Antisense strand to SEQ ID NO: 1732773
aucccgccuaaacuucuug

SEQ ID NO: 1732775 - RNA, 19 nt, Artificial Sequence
  Description of Artificial Sequence: Synthetic oligonucleotide
  Sense strand starting at position 727 of SEQ ID NO: 1562241
agaaguuuaggcgggauau

SEQ ID NO: 1732776 - RNA, 19 nt, Artificial Sequence
  Description of Artificial Sequence: Synthetic oligonucleotide
  Antisense strand to SEQ ID NO: 1732775
auaucccgccuaaacuucu

SEQ ID NO: 1732777 - RNA, 19 nt, Artificial Sequence
  Description of Artificial Sequence: Synthetic oligonucleotide
  Sense strand starting at position 728 of SEQ ID NO: 1562241
gaaguuuaggcgggauauu

SEQ ID NO: 1732778 - RNA, 19 nt, Artificial Sequence
  Description of Artificial Sequence: Synthetic oligonucleotide
  Antisense strand to SEQ ID NO: 1732777
aauaucccgccuaaacuuc

SEQ ID NO: 1732779 - RNA, 19 nt, Artificial Sequence
  Description of Artificial Sequence: Synthetic oligonucleotide
  Sense strand starting at position 774 of SEQ ID NO: 1562241
cuccuugcagguugugaau

SEQ ID NO: 1732780 - RNA, 19 nt, Artificial Sequence
  Description of Artificial Sequence: Synthetic oligonucleotide
  Antisense strand to SEQ ID NO: 1732779
auucacaaccugcaaggag

SEQ ID NO: 1732781 - RNA, 19 nt, Artificial Sequence
  Description of Artificial Sequence: Synthetic oligonucleotide
  Sense strand starting at position 783 of SEQ ID NO: 1562241
gguugugaaugagcugcaa

SEQ ID NO: 1732782 - RNA, 19 nt, Artificial Sequence
  Description of Artificial Sequence: Synthetic oligonucleotide
  Antisense strand to SEQ ID NO: 1732781
uugcagcucauucacaacc

SEQ ID NO: 1732783 - RNA, 19 nt, Artificial Sequence
  Description of Artificial Sequence: Synthetic oligonucleotide
  Sense strand starting at position 785 of SEQ ID NO: 1562241
uugugaaugagcugcaauu

SEQ ID NO: 1732784 - RNA, 19 nt, Artificial Sequence
  Description of Artificial Sequence: Synthetic oligonucleotide
  Antisense strand to SEQ ID NO: 1732783
aauugcagcucauucacaa

SEQ ID NO: 1732785 - RNA, 19 nt, Artificial Sequence
  Description of Artificial Sequence: Synthetic oligonucleotide
  Sense strand starting at position 787 of SEQ ID NO: 1562241
gugaaugagcugcaauucu

SEQ ID NO: 1732786 - RNA, 19 nt, Artificial Sequence
  Description of Artificial Sequence: Synthetic oligonucleotide
  Antisense strand to SEQ ID NO: 1732785
agaauugcagcucauucac

SEQ ID NO: 1732787 - RNA, 19 nt, Artificial Sequence
  Description of Artificial Sequence: Synthetic oligonucleotide
  Sense strand starting at position 814 of SEQ ID NO: 1562241
gaucuuugcgagcaggaaa

SEQ ID NO: 1732788 - RNA, 19 nt, Artificial Sequence
  Description of Artificial Sequence: Synthetic oligonucleotide
  Antisense strand to SEQ ID NO: 1732787
uuuccugcucgcaaagauc

SEQ ID NO: 1732789 - RNA, 19 nt, Artificial Sequence
  Description of Artificial Sequence: Synthetic oligonucleotide
  Sense strand starting at position 841 of SEQ ID NO: 1562241
gagaucuuuccugagccca

SEQ ID NO: 1732790 - RNA, 19 nt, Artificial Sequence
  Description of Artificial Sequence: Synthetic oligonucleotide
  Antisense strand to SEQ ID NO: 1732789
ugggcucaggaaagaucuc

SEQ ID NO: 1732791 - RNA, 19 nt, Artificial Sequence
  Description of Artificial Sequence: Synthetic oligonucleotide
  Sense strand starting at position 2285 of SEQ ID NO: 1562241
ccaguaacccuuuagcagu

SEQ ID NO: 1732792 - RNA, 19 nt, Artificial Sequence
  Description of Artificial Sequence: Synthetic oligonucleotide
  Antisense strand to SEQ ID NO: 1732791
acugcuaaaggguuacugg

SEQ ID NO: 1732793 - RNA, 19 nt, Artificial Sequence
  Description of Artificial Sequence: Synthetic oligonucleotide
  Sense strand starting at position 2330 of SEQ ID NO: 1562241
uuuccugagugcucacaua

SEQ ID NO: 1732794 - RNA, 19 nt, Artificial Sequence
  Description of Artificial Sequence: Synthetic oligonucleotide
  Antisense strand to SEQ ID NO: 1732793
uaugugagcacucaggaaa

SEQ ID NO: 1732795 - RNA, 19 nt, Artificial Sequence
  Description of Artificial Sequence: Synthetic oligonucleotide
  Sense strand starting at position 2680 of SEQ ID NO: 1562241
gaguucugaggaugagauc

SEQ ID NO: 1732796 - RNA, 19 nt, Artificial Sequence
  Description of Artificial Sequence: Synthetic oligonucleotide
  Antisense strand to SEQ ID NO: 1732795
gaucucauccucagaacuc

SEQ ID NO: 1732797 - RNA, 19 nt, Artificial Sequence
  Description of Artificial Sequence: Synthetic oligonucleotide
  Sense strand starting at position 2706 of SEQ ID NO: 1562241
gccagaagguggccuuuau

SEQ ID NO: 1732798 - RNA, 19 nt, Artificial Sequence
  Description of Artificial Sequence: Synthetic oligonucleotide
  Antisense strand to SEQ ID NO: 1732797
auaaaggccaccuucuggc

SEQ ID NO: 1732799 - RNA, 19 nt, Artificial Sequence
  Description of Artificial Sequence: Synthetic oligonucleotide
  Sense strand starting at position 2717 of SEQ ID NO: 1562241
gccuuuauccagcaggcaa

SEQ ID NO: 1732800 - RNA, 19 nt, Artificial Sequence
  Description of Artificial Sequence: Synthetic oligonucleotide
  Antisense strand to SEQ ID NO: 1732799
uugccugcuggauaaaggc

SEQ ID NO: 1732801 - RNA, 19 nt, Artificial Sequence
  Description of Artificial Sequence: Synthetic oligonucleotide
  Sense strand starting at position 2764 of SEQ ID NO: 1562241
ggaguuauguggucacauc

SEQ ID NO: 1732802 - RNA, 19 nt, Artificial Sequence
  Description of Artificial Sequence: Synthetic oligonucleotide
  Antisense strand to SEQ ID NO: 1732801
gaugugaccacauaacucc

SEQ ID NO: 1732803 - RNA, 19 nt, Artificial Sequence
  Description of Artificial Sequence: Synthetic oligonucleotide
  Sense strand starting at position 2765 of SEQ ID NO: 1562241
gaguuauguggucacauca

SEQ ID NO: 1732804 - RNA, 19 nt, Artificial Sequence
  Description of Artificial Sequence: Synthetic oligonucleotide
  Antisense strand to SEQ ID NO: 1732803
ugaugugaccacauaacuc

SEQ ID NO: 1732805 - RNA, 19 nt, Artificial Sequence
  Description of Artificial Sequence: Synthetic oligonucleotide
  Sense strand starting at position 2863 of SEQ ID NO: 1562241
agauuauagcaguaaccua

SEQ ID NO: 1732806 - RNA, 19 nt, Artificial Sequence
  Description of Artificial Sequence: Synthetic oligonucleotide
  Antisense strand to SEQ ID NO: 1732805
uagguuacugcuauaaucu

SEQ ID NO: 1732807 - RNA, 19 nt, Artificial Sequence
  Description of Artificial Sequence: Synthetic oligonucleotide
  Sense strand starting at position 2935 of SEQ ID NO: 1562241
cucugccuuugaucagauu

SEQ ID NO: 1732808 - RNA, 19 nt, Artificial Sequence
  Description of Artificial Sequence: Synthetic oligonucleotide
  Antisense strand to SEQ ID NO: 1732807
aaucugaucaaaggcagag

SEQ ID NO: 1732809 - RNA, 19 nt, Artificial Sequence
  Description of Artificial Sequence: Synthetic oligonucleotide
  Sense strand starting at position 2941 of SEQ ID NO: 1562241
cuuugaucagauuggaugu

SEQ ID NO: 1732810 - RNA, 19 nt, Artificial Sequence
  Description of Artificial Sequence: Synthetic oligonucleotide
  Antisense strand to SEQ ID NO: 1732809
acauccaaucugaucaaag

SEQ ID NO: 1732811 - RNA, 19 nt, Artificial Sequence
  Description of Artificial Sequence: Synthetic oligonucleotide
  Sense strand starting at position 2942 of SEQ ID NO: 1562241
uuugaucagauuggaugua

SEQ ID NO: 1732812 - RNA, 19 nt, Artificial Sequence
  Description of Artificial Sequence: Synthetic oligonucleotide
  Antisense strand to SEQ ID NO: 1732811
uacauccaaucugaucaaa

SEQ ID NO: 1732813 - RNA, 19 nt, Artificial Sequence
  Description of Artificial Sequence: Synthetic oligonucleotide
  Sense strand starting at position 2951 of SEQ ID NO: 1562241
auuggauguauccaggcau

SEQ ID NO: 1732814 - RNA, 19 nt, Artificial Sequence
  Description of Artificial Sequence: Synthetic oligonucleotide
  Antisense strand to SEQ ID NO: 1732813
augccuggauacauccaau

SEQ ID NO: 1732815 - RNA, 19 nt, Artificial Sequence
  Description of Artificial Sequence: Synthetic oligonucleotide
  Sense strand starting at position 3168 of SEQ ID NO: 1562241
aucaucuggcuccagaaua

SEQ ID NO: 1732816 - RNA, 19 nt, Artificial Sequence
  Description of Artificial Sequence: Synthetic oligonucleotide
  Antisense strand to SEQ ID NO: 1732815
uauucuggagccagaugau

SEQ ID NO: 1732817 - RNA, 19 nt, Artificial Sequence
  Description of Artificial Sequence: Synthetic oligonucleotide
  Sense strand starting at position 3490 of SEQ ID NO: 1562241
ggauucaaggcugacaguu

SEQ ID NO: 1732818 - RNA, 19 nt, Artificial Sequence
  Description of Artificial Sequence: Synthetic oligonucleotide
  Antisense strand to SEQ ID NO: 1732817
aacugucagccuugaaucc

SEQ ID NO: 1732819 - RNA, 19 nt, Artificial Sequence
  Description of Artificial Sequence: Synthetic oligonucleotide
  Sense strand starting at position 3499 of SEQ ID NO: 1562241
gcugacaguugccuauuga

SEQ ID NO: 1732820 - RNA, 19 nt, Artificial Sequence
  Description of Artificial Sequence: Synthetic oligonucleotide
  Antisense strand to SEQ ID NO: 1732819
ucaauaggcaacugucagc

SEQ ID NO: 1732821 - RNA, 19 nt, Artificial Sequence
  Description of Artificial Sequence: Synthetic oligonucleotide
  Sense strand starting at position 3500 of SEQ ID NO: 1562241
cugacaguugccuauugac

SEQ ID NO: 1732822 - RNA, 19 nt, Artificial Sequence
  Description of Artificial Sequence: Synthetic oligonucleotide
  Antisense strand to SEQ ID NO: 1732821
gucaauaggcaacugucag

SEQ ID NO: 1732823 - RNA, 19 nt, Artificial Sequence
  Description of Artificial Sequence: Synthetic oligonucleotide
  Sense strand starting at position 3573 of SEQ ID NO: 1562241
caguguaauuuagaaagga

SEQ ID NO: 1732824 - RNA, 19 nt, Artificial Sequence
  Description of Artificial Sequence: Synthetic oligonucleotide
  Antisense strand to SEQ ID NO: 1732823
uccuuucuaaauuacacug

SEQ ID NO: 1732825 - RNA, 19 nt, Artificial Sequence
  Description of Artificial Sequence: Synthetic oligonucleotide
  Sense strand starting at position 3720 of SEQ ID NO: 1562241
cuuggaugugucuggaucu

SEQ ID NO: 1732826 - RNA, 19 nt, Artificial Sequence
  Description of Artificial Sequence: Synthetic oligonucleotide
  Antisense strand to SEQ ID NO: 1732825
agauccagacacauccaag

SEQ ID NO: 1732827 - RNA, 19 nt, Artificial Sequence
  Description of Artificial Sequence: Synthetic oligonucleotide
  Sense strand starting at position 3906 of SEQ ID NO: 1562241
ccaggaaaucuggguuuaa

SEQ ID NO: 1732828 - RNA, 19 nt, Artificial Sequence
  Description of Artificial Sequence: Synthetic oligonucleotide
  Antisense strand to SEQ ID NO: 1732827
uuaaacccagauuuccugg

SEQ ID NO: 1732829 - RNA, 19 nt, Artificial Sequence
  Description of Artificial Sequence: Synthetic oligonucleotide
  Sense strand starting at position 135 of SEQ ID NO: 1562242
ccagcaagccuacagaaua

SEQ ID NO: 1732830 - RNA, 19 nt, Artificial Sequence
  Description of Artificial Sequence: Synthetic oligonucleotide
  Antisense strand to SEQ ID NO: 1732829
uauucuguaggcuugcugg

SEQ ID NO: 1732831 - RNA, 19 nt, Artificial Sequence
  Description of Artificial Sequence: Synthetic oligonucleotide
  Sense strand starting at position 146 of SEQ ID NO: 1562242
acagaauagccagguguga

SEQ ID NO: 1732832 - RNA, 19 nt, Artificial Sequence
  Description of Artificial Sequence: Synthetic oligonucleotide
  Antisense strand to SEQ ID NO: 1732831
ucacaccuggcuauucugu

SEQ ID NO: 1732833 - RNA, 19 nt, Artificial Sequence
  Description of Artificial Sequence: Synthetic oligonucleotide
  Sense strand starting at position 148 of SEQ ID NO: 1562242
agaauagccaggugugaca

SEQ ID NO: 1732834 - RNA, 19 nt, Artificial Sequence
  Description of Artificial Sequence: Synthetic oligonucleotide
  Antisense strand to SEQ ID NO: 1732833
ugucacaccuggcuauucu

SEQ ID NO: 1732835 - RNA, 19 nt, Artificial Sequence
  Description of Artificial Sequence: Synthetic oligonucleotide
  Sense strand starting at position 221 of SEQ ID NO: 1562242
uugauagacuaccugguaa

SEQ ID NO: 1732836 - RNA, 19 nt, Artificial Sequence
  Description of Artificial Sequence: Synthetic oligonucleotide
  Antisense strand to SEQ ID NO: 1732835
uuaccagguagucuaucaa

SEQ ID NO: 1732837 - RNA, 19 nt, Artificial Sequence
  Description of Artificial Sequence: Synthetic oligonucleotide
  Sense strand starting at position 403 of SEQ ID NO: 1562242
agucaaagcccugaucauu

SEQ ID NO: 1732838 - RNA, 19 nt, Artificial Sequence
  Description of Artificial Sequence: Synthetic oligonucleotide
  Antisense strand to SEQ ID NO: 1732837
aaugaucagggcuuugacu

SEQ ID NO: 1732839 - RNA, 19 nt, Artificial Sequence
  Description of Artificial Sequence: Synthetic oligonucleotide
  Sense strand starting at position 496 of SEQ ID NO: 1562242
cuuagaaagcauugaguca

SEQ ID NO: 1732840 - RNA, 19 nt, Artificial Sequence
  Description of Artificial Sequence: Synthetic oligonucleotide
  Antisense strand to SEQ ID NO: 1732839
ugacucaaugcuuucuaag

SEQ ID NO: 1732841 - RNA, 19 nt, Artificial Sequence
  Description of Artificial Sequence: Synthetic oligonucleotide
  Sense strand starting at position 508 of SEQ ID NO: 1562242
ugagucaagggauacguua

SEQ ID NO: 1732842 - RNA, 19 nt, Artificial Sequence
  Description of Artificial Sequence: Synthetic oligonucleotide
  Antisense strand to SEQ ID NO: 1732841
uaacguaucccuugacuca

SEQ ID NO: 1732843 - RNA, 19 nt, Artificial Sequence
  Description of Artificial Sequence: Synthetic oligonucleotide
  Sense strand starting at position 627 of SEQ ID NO: 1562242
cugaauaggugacuaaauc

SEQ ID NO: 1732844 - RNA, 19 nt, Artificial Sequence
  Description of Artificial Sequence: Synthetic oligonucleotide
  Antisense strand to SEQ ID NO: 1732843
gauuuagucaccuauucag

SEQ ID NO: 1732845 - RNA, 19 nt, Artificial Sequence
  Description of Artificial Sequence: Synthetic oligonucleotide
  Sense strand starting at position 681 of SEQ ID NO: 1562242
agugauaacguauaaguau

SEQ ID NO: 1732846 - RNA, 19 nt, Artificial Sequence
  Description of Artificial Sequence: Synthetic oligonucleotide
  Antisense strand to SEQ ID NO: 1732845
auacuuauacguuaucacu

SEQ ID NO: 1732847 - RNA, 19 nt, Artificial Sequence
  Description of Artificial Sequence: Synthetic oligonucleotide
  Sense strand starting at position 687 of SEQ ID NO: 1562242
aacguauaaguaugauacu

SEQ ID NO: 1732848 - RNA, 19 nt, Artificial Sequence
  Description of Artificial Sequence: Synthetic oligonucleotide
  Antisense strand to SEQ ID NO: 1732847
aguaucauacuuauacguu

SEQ ID NO: 1732849 - RNA, 19 nt, Artificial Sequence
  Description of Artificial Sequence: Synthetic oligonucleotide
  Sense strand starting at position 882 of SEQ ID NO: 1562242
gugggaaugucacuaagac

SEQ ID NO: 1732850 - RNA, 19 nt, Artificial Sequence
  Description of Artificial Sequence: Synthetic oligonucleotide
  Antisense strand to SEQ ID NO: 1732849
gucuuagugacauucccac

SEQ ID NO: 1732851 - RNA, 19 nt, Artificial Sequence
  Description of Artificial Sequence: Synthetic oligonucleotide
  Sense strand starting at position 909 of SEQ ID NO: 1562242
ugguuccuccuuggauaga

SEQ ID NO: 1732852 - RNA, 19 nt, Artificial Sequence
  Description of Artificial Sequence: Synthetic oligonucleotide
  Antisense strand to SEQ ID NO: 1732851
ucuauccaaggaggaacca

SEQ ID NO: 1732853 - RNA, 19 nt, Artificial Sequence
  Description of Artificial Sequence: Synthetic oligonucleotide
  Sense strand starting at position 1017 of SEQ ID NO: 1562242
gcgugaugugccucugaac

SEQ ID NO: 1732854 - RNA, 19 nt, Artificial Sequence
  Description of Artificial Sequence: Synthetic oligonucleotide
  Antisense strand to SEQ ID NO: 1732853
guucagaggcacaucacgc

SEQ ID NO: 1732855 - RNA, 19 nt, Artificial Sequence
  Description of Artificial Sequence: Synthetic oligonucleotide
  Sense strand starting at position 1391 of SEQ ID NO: 1562242
ccuuuacaagguugucaaa

SEQ ID NO: 1732856 - RNA, 19 nt, Artificial Sequence
  Description of Artificial Sequence: Synthetic oligonucleotide
  Antisense strand to SEQ ID NO: 1732855
uuugacaaccuuguaaagg

SEQ ID NO: 1732857 - RNA, 19 nt, Artificial Sequence
  Description of Artificial Sequence: Synthetic oligonucleotide
  Sense strand starting at position 1483 of SEQ ID NO: 1562242
cucugaaccucuuccgaga

SEQ ID NO: 1732858 - RNA, 19 nt, Artificial Sequence
  Description of Artificial Sequence: Synthetic oligonucleotide
  Antisense strand to SEQ ID NO: 1732857
ucucggaagagguucagag

SEQ ID NO: 1732859 - RNA, 19 nt, Artificial Sequence
  Description of Artificial Sequence: Synthetic oligonucleotide
  Sense strand starting at position 2333 of SEQ ID NO: 1562242
ucaccucuuguuuggaaga

SEQ ID NO: 1732860 - RNA, 19 nt, Artificial Sequence
  Description of Artificial Sequence: Synthetic oligonucleotide
  Antisense strand to SEQ ID NO: 1732859
ucuuccaaacaagagguga

SEQ ID NO: 1732861 - RNA, 19 nt, Artificial Sequence
  Description of Artificial Sequence: Synthetic oligonucleotide
  Sense strand starting at position 2395 of SEQ ID NO: 1562242
guagaaucgaagcauccaa

SEQ ID NO: 1732862 - RNA, 19 nt, Artificial Sequence
  Description of Artificial Sequence: Synthetic oligonucleotide
  Antisense strand to SEQ ID NO: 1732861
uuggaugcuucgauucuac

SEQ ID NO: 1732863 - RNA, 19 nt, Artificial Sequence
  Description of Artificial Sequence: Synthetic oligonucleotide
  Sense strand starting at position 2555 of SEQ ID NO: 1562242
uaauuaugauaguuaccga

SEQ ID NO: 1732864 - RNA, 19 nt, Artificial Sequence
  Description of Artificial Sequence: Synthetic oligonucleotide
  Antisense strand to SEQ ID NO: 1732863
ucgguaacuaucauaauua

SEQ ID NO: 1732865 - RNA, 19 nt, Artificial Sequence
  Description of Artificial Sequence: Synthetic oligonucleotide
  Sense strand starting at position 2558 of SEQ ID NO: 1562242
uuaugauaguuaccgaaug

SEQ ID NO: 1732866 - RNA, 19 nt, Artificial Sequence
  Description of Artificial Sequence: Synthetic oligonucleotide
  Antisense strand to SEQ ID NO: 1732865
cauucgguaacuaucauaa

SEQ ID NO: 1732867 - RNA, 19 nt, Artificial Sequence
  Description of Artificial Sequence: Synthetic oligonucleotide
  Sense strand starting at position 2563 of SEQ ID NO: 1562242
auaguuaccgaauggaauc

SEQ ID NO: 1732868 - RNA, 19 nt, Artificial Sequence
  Description of Artificial Sequence: Synthetic oligonucleotide
  Antisense strand to SEQ ID NO: 1732867
gauuccauucgguaacuau

SEQ ID NO: 1732869 - RNA, 19 nt, Artificial Sequence
  Description of Artificial Sequence: Synthetic oligonucleotide
  Sense strand starting at position 2575 of SEQ ID NO: 1562242
uggaaucuagccgguauuu

SEQ ID NO: 1732870 - RNA, 19 nt, Artificial Sequence
  Description of Artificial Sequence: Synthetic oligonucleotide
  Antisense strand to SEQ ID NO: 1732869
aaauaccggcuagauucca

SEQ ID NO: 1732871 - RNA, 19 nt, Artificial Sequence
  Description of Artificial Sequence: Synthetic oligonucleotide
  Sense strand starting at position 2615 of SEQ ID NO: 1562242
gcuacaauuacggguauaa

SEQ ID NO: 1732872 - RNA, 19 nt, Artificial Sequence
  Description of Artificial Sequence: Synthetic oligonucleotide
  Antisense strand to SEQ ID NO: 1732871
uuauacccguaauuguagc

SEQ ID NO: 1732873 - RNA, 19 nt, Artificial Sequence
  Description of Artificial Sequence: Synthetic oligonucleotide
  Sense strand starting at position 2692 of SEQ ID NO: 1562242
ugacuaagggauuguccua

SEQ ID NO: 1732874 - RNA, 19 nt, Artificial Sequence
  Description of Artificial Sequence: Synthetic oligonucleotide
  Antisense strand to SEQ ID NO: 1732873
uaggacaaucccuuaguca

SEQ ID NO: 1732875 - RNA, 19 nt, Artificial Sequence
  Description of Artificial Sequence: Synthetic oligonucleotide
  Sense strand starting at position 2699 of SEQ ID NO: 1562242
gggauuguccuauguaauc

SEQ ID NO: 1732876 - RNA, 19 nt, Artificial Sequence
  Description of Artificial Sequence: Synthetic oligonucleotide
  Antisense strand to SEQ ID NO: 1732875
gauuacauaggacaauccc

SEQ ID NO: 1732877 - RNA, 19 nt, Artificial Sequence
  Description of Artificial Sequence: Synthetic oligonucleotide
  Sense strand starting at position 2751 of SEQ ID NO: 1562242
ccucguguaaaugauaaga

SEQ ID NO: 1732878 - RNA, 19 nt, Artificial Sequence
  Description of Artificial Sequence: Synthetic oligonucleotide
  Antisense strand to SEQ ID NO: 1732877
ucuuaucauuuacacgagg

SEQ ID NO: 1732879 - RNA, 19 nt, Artificial Sequence
  Description of Artificial Sequence: Synthetic oligonucleotide
  Sense strand starting at position 2773 of SEQ ID NO: 1562242
ccaaguuacagaggaguua

SEQ ID NO: 1732880 - RNA, 19 nt, Artificial Sequence
  Description of Artificial Sequence: Synthetic oligonucleotide
  Antisense strand to SEQ ID NO: 1732879
uaacuccucuguaacuugg

SEQ ID NO: 1732881 - RNA, 19 nt, Artificial Sequence
  Description of Artificial Sequence: Synthetic oligonucleotide
  Sense strand starting at position 2851 of SEQ ID NO: 1562242
uuguucuaacacgauacuu

SEQ ID NO: 1732882 - RNA, 19 nt, Artificial Sequence
  Description of Artificial Sequence: Synthetic oligonucleotide
  Antisense strand to SEQ ID NO: 1732881
aaguaucguguuagaacaa

SEQ ID NO: 1732883 - RNA, 19 nt, Artificial Sequence
  Description of Artificial Sequence: Synthetic oligonucleotide
  Sense strand starting at position 2934 of SEQ ID NO: 1562242
ggagguauauuuguccguu

SEQ ID NO: 1732884 - RNA, 19 nt, Artificial Sequence
  Description of Artificial Sequence: Synthetic oligonucleotide
  Antisense strand to SEQ ID NO: 1732883
aacggacaaauauaccucc

SEQ ID NO: 1732885 - RNA, 19 nt, Artificial Sequence
  Description of Artificial Sequence: Synthetic oligonucleotide
  Sense strand starting at position 2935 of SEQ ID NO: 1562242
gagguauauuuguccguuu

SEQ ID NO: 1732886 - RNA, 19 nt, Artificial Sequence
  Description of Artificial Sequence: Synthetic oligonucleotide
  Antisense strand to SEQ ID NO: 1732885
aaacggacaaauauaccuc

SEQ ID NO: 1732887 - RNA, 19 nt, Artificial Sequence
  Description of Artificial Sequence: Synthetic oligonucleotide
  Sense strand starting at position 2962 of SEQ ID NO: 1562242
cuggaagucucccugaauc

SEQ ID NO: 1732888 - RNA, 19 nt, Artificial Sequence
  Description of Artificial Sequence: Synthetic oligonucleotide
  Antisense strand to SEQ ID NO: 1732887
gauucagggagacuuccag

SEQ ID NO: 1732889 - RNA, 19 nt, Artificial Sequence
  Description of Artificial Sequence: Synthetic oligonucleotide
  Sense strand starting at position 3026 of SEQ ID NO: 1562242
ucaugaggccucugugaaa

SEQ ID NO: 1732890 - RNA, 19 nt, Artificial Sequence
  Description of Artificial Sequence: Synthetic oligonucleotide
  Antisense strand to SEQ ID NO: 1732889
uuucacagaggccucauga

SEQ ID NO: 1732891 - RNA, 19 nt, Artificial Sequence
  Description of Artificial Sequence: Synthetic oligonucleotide
  Sense strand starting at position 3041 of SEQ ID NO: 1562242
gaaaguauuucgccgaguu

SEQ ID NO: 1732892 - RNA, 19 nt, Artificial Sequence
  Description of Artificial Sequence: Synthetic oligonucleotide
  Antisense strand to SEQ ID NO: 1732891
aacucggcgaaauacuuuc

SEQ ID NO: 1732893 - RNA, 19 nt, Artificial Sequence
  Description of Artificial Sequence: Synthetic oligonucleotide
  Sense strand starting at position 3042 of SEQ ID NO: 1562242
aaaguauuucgccgaguua

SEQ ID NO: 1732894 - RNA, 19 nt, Artificial Sequence
  Description of Artificial Sequence: Synthetic oligonucleotide
  Antisense strand to SEQ ID NO: 1732893
uaacucggcgaaauacuuu

SEQ ID NO: 1732895 - RNA, 19 nt, Artificial Sequence
  Description of Artificial Sequence: Synthetic oligonucleotide
  Sense strand starting at position 3043 of SEQ ID NO: 1562242
aaguauuucgccgaguuac

SEQ ID NO: 1732896 - RNA, 19 nt, Artificial Sequence
  Description of Artificial Sequence: Synthetic oligonucleotide
  Antisense strand to SEQ ID NO: 1732895
guaacucggcgaaauacuu

SEQ ID NO: 1732897 - RNA, 19 nt, Artificial Sequence
  Description of Artificial Sequence: Synthetic oligonucleotide
  Sense strand starting at position 3099 of SEQ ID NO: 1562242
ugaugacuacuuuguuuaa

SEQ ID NO: 1732898 - RNA, 19 nt, Artificial Sequence
  Description of Artificial Sequence: Synthetic oligonucleotide
  Antisense strand to SEQ ID NO: 1732897
uuaaacaaaguagucauca

SEQ ID NO: 1732899 - RNA, 19 nt, Artificial Sequence
  Description of Artificial Sequence: Synthetic oligonucleotide
  Sense strand starting at position 3116 of SEQ ID NO: 1562242
aaacuacuaguguggaaau

SEQ ID NO: 1732900 - RNA, 19 nt, Artificial Sequence
  Description of Artificial Sequence: Synthetic oligonucleotide
  Antisense strand to SEQ ID NO: 1732899
auuuccacacuaguaguuu

SEQ ID NO: 1732901 - RNA, 19 nt, Artificial Sequence
  Description of Artificial Sequence: Synthetic oligonucleotide
  Sense strand starting at position 3137 of SEQ ID NO: 1562242
gagaaauagucaucccgug

SEQ ID NO: 1732902 - RNA, 19 nt, Artificial Sequence
  Description of Artificial Sequence: Synthetic oligonucleotide
  Antisense strand to SEQ ID NO: 1732901
cacgggaugacuauuucuc

SEQ ID NO: 1732903 - RNA, 19 nt, Artificial Sequence
  Description of Artificial Sequence: Synthetic oligonucleotide
  Sense strand starting at position 3185 of SEQ ID NO: 1562242
aaaguauuaugucuauggu

SEQ ID NO: 1732904 - RNA, 19 nt, Artificial Sequence
  Description of Artificial Sequence: Synthetic oligonucleotide
  Antisense strand to SEQ ID NO: 1732903
accauagacauaauacuuu

SEQ ID NO: 1732905 - RNA, 19 nt, Artificial Sequence
  Description of Artificial Sequence: Synthetic oligonucleotide
  Sense strand starting at position 3749 of SEQ ID NO: 1562242
gccaguaggcaaugagaga

SEQ ID NO: 1732906 - RNA, 19 nt, Artificial Sequence
  Description of Artificial Sequence: Synthetic oligonucleotide
  Antisense strand to SEQ ID NO: 1732905
ucucucauugccuacuggc

SEQ ID NO: 1732907 - RNA, 19 nt, Artificial Sequence
  Description of Artificial Sequence: Synthetic oligonucleotide
  Sense strand starting at position 3833 of SEQ ID NO: 1562242
uugauucugugagccaaau

SEQ ID NO: 1732908 - RNA, 19 nt, Artificial Sequence
  Description of Artificial Sequence: Synthetic oligonucleotide
  Antisense strand to SEQ ID NO: 1732907
auuuggcucacagaaucaa

SEQ ID NO: 1732909 - RNA, 19 nt, Artificial Sequence
  Description of Artificial Sequence: Synthetic oligonucleotide
  Sense strand starting at position 63 of SEQ ID NO: 1562243
agaagacuuauguguggca

SEQ ID NO: 1732910 - RNA, 19 nt, Artificial Sequence
  Description of Artificial Sequence: Synthetic oligonucleotide
  Antisense strand to SEQ ID NO: 1732909
ugccacacauaagucuucu

SEQ ID NO: 1732911 - RNA, 19 nt, Artificial Sequence
  Description of Artificial Sequence: Synthetic oligonucleotide
  Sense strand starting at position 64 of SEQ ID NO: 1562243
gaagacuuauguguggcaa

SEQ ID NO: 1732912 - RNA, 19 nt, Artificial Sequence
  Description of Artificial Sequence: Synthetic oligonucleotide
  Antisense strand to SEQ ID NO: 1732911
uugccacacauaagucuuc

SEQ ID NO: 1732913 - RNA, 19 nt, Artificial Sequence
  Description of Artificial Sequence: Synthetic oligonucleotide
  Sense strand starting at position 65 of SEQ ID NO: 1562243
aagacuuauguguggcaaa

SEQ ID NO: 1732914 - RNA, 19 nt, Artificial Sequence
  Description of Artificial Sequence: Synthetic oligonucleotide
  Antisense strand to SEQ ID NO: 1732913
uuugccacacauaagucuu

SEQ ID NO: 1732915 - RNA, 19 nt, Artificial Sequence
  Description of Artificial Sequence: Synthetic oligonucleotide
  Sense strand starting at position 111 of SEQ ID NO: 1562243
ugcagaauguaugcccaaa

SEQ ID NO: 1732916 - RNA, 19 nt, Artificial Sequence
  Description of Artificial Sequence: Synthetic oligonucleotide
  Antisense strand to SEQ ID NO: 1732915
uuugggcauacauucugca

SEQ ID NO: 1732917 - RNA, 19 nt, Artificial Sequence
  Description of Artificial Sequence: Synthetic oligonucleotide
  Sense strand starting at position 122 of SEQ ID NO: 1562243
ugcccaaacguauggagaa

SEQ ID NO: 1732918 - RNA, 19 nt, Artificial Sequence
  Description of Artificial Sequence: Synthetic oligonucleotide
  Antisense strand to SEQ ID NO: 1732917
uucuccauacguuugggca

SEQ ID NO: 1732919 - RNA, 19 nt, Artificial Sequence
  Description of Artificial Sequence: Synthetic oligonucleotide
  Sense strand starting at position 184 of SEQ ID NO: 1562243
acuguugggagcuauuauc

SEQ ID NO: 1732920 - RNA, 19 nt, Artificial Sequence
  Description of Artificial Sequence: Synthetic oligonucleotide
  Antisense strand to SEQ ID NO: 1732919
gauaauagcucccaacagu

SEQ ID NO: 1732921 - RNA, 19 nt, Artificial Sequence
  Description of Artificial Sequence: Synthetic oligonucleotide
  Sense strand starting at position 201 of SEQ ID NO: 1562243
ucugacucuccacagugaa

SEQ ID NO: 1732922 - RNA, 19 nt, Artificial Sequence
  Description of Artificial Sequence: Synthetic oligonucleotide
  Antisense strand to SEQ ID NO: 1732921
uucacuguggagagucaga

SEQ ID NO: 1732923 - RNA, 19 nt, Artificial Sequence
  Description of Artificial Sequence: Synthetic oligonucleotide
  Sense strand starting at position 472 of SEQ ID NO: 1562243
ggcugcauucuuucgaguu

SEQ ID NO: 1732924 - RNA, 19 nt, Artificial Sequence
  Description of Artificial Sequence: Synthetic oligonucleotide
  Antisense strand to SEQ ID NO: 1732923
aacucgaaagaaugcagcc

SEQ ID NO: 1732925 - RNA, 19 nt, Artificial Sequence
  Description of Artificial Sequence: Synthetic oligonucleotide
  Sense strand starting at position 543 of SEQ ID NO: 1562243
caggaaugacucugaguuc

SEQ ID NO: 1732926 - RNA, 19 nt, Artificial Sequence
  Description of Artificial Sequence: Synthetic oligonucleotide
  Antisense strand to SEQ ID NO: 1732925
gaacucagagucauuccug

SEQ ID NO: 1732927 - RNA, 19 nt, Artificial Sequence
  Description of Artificial Sequence: Synthetic oligonucleotide
  Sense strand starting at position 546 of SEQ ID NO: 1562243
gaaugacucugaguucugu

SEQ ID NO: 1732928 - RNA, 19 nt, Artificial Sequence
  Description of Artificial Sequence: Synthetic oligonucleotide
  Antisense strand to SEQ ID NO: 1732927
acagaacucagagucauuc

SEQ ID NO: 1732929 - RNA, 19 nt, Artificial Sequence
  Description of Artificial Sequence: Synthetic oligonucleotide
  Sense strand starting at position 677 of SEQ ID NO: 1562243
gcaguucucagcguagcuu

SEQ ID NO: 1732930 - RNA, 19 nt, Artificial Sequence
  Description of Artificial Sequence: Synthetic oligonucleotide
  Antisense strand to SEQ ID NO: 1732929
aagcuacgcugagaacugc

SEQ ID NO: 1732931 - RNA, 19 nt, Artificial Sequence
  Description of Artificial Sequence: Synthetic oligonucleotide
  Sense strand starting at position 697 of SEQ ID NO: 1562243
cucccuuuggcucagugau

SEQ ID NO: 1732932 - RNA, 19 nt, Artificial Sequence
  Description of Artificial Sequence: Synthetic oligonucleotide
  Antisense strand to SEQ ID NO: 1732931
aucacugagccaaagggag

SEQ ID NO: 1732933 - RNA, 19 nt, Artificial Sequence
  Description of Artificial Sequence: Synthetic oligonucleotide
  Sense strand starting at position 766 of SEQ ID NO: 1562243
uuauuaugcucagccagaa

SEQ ID NO: 1732934 - RNA, 19 nt, Artificial Sequence
  Description of Artificial Sequence: Synthetic oligonucleotide
  Antisense strand to SEQ ID NO: 1732933
uucuggcugagcauaauaa

SEQ ID NO: 1732935 - RNA, 19 nt, Artificial Sequence
  Description of Artificial Sequence: Synthetic oligonucleotide
  Sense strand starting at position 892 of SEQ ID NO: 1562243
ccaaguaaacgugaagugu

SEQ ID NO: 1732936 - RNA, 19 nt, Artificial Sequence
  Description of Artificial Sequence: Synthetic oligonucleotide
  Antisense strand to SEQ ID NO: 1732935
acacuucacguuuacuugg

SEQ ID NO: 1732937 - RNA, 19 nt, Artificial Sequence
  Description of Artificial Sequence: Synthetic oligonucleotide
  Sense strand starting at position 901 of SEQ ID NO: 1562243
cgugaagugucacuuaaca

SEQ ID NO: 1732938 - RNA, 19 nt, Artificial Sequence
  Description of Artificial Sequence: Synthetic oligonucleotide
  Antisense strand to SEQ ID NO: 1732937
uguuaagugacacuucacg

SEQ ID NO: 1732939 - RNA, 19 nt, Artificial Sequence
  Description of Artificial Sequence: Synthetic oligonucleotide
  Sense strand starting at position 1235 of SEQ ID NO: 1562243
ucaaaucucccagaaucgu

SEQ ID NO: 1732940 - RNA, 19 nt, Artificial Sequence
  Description of Artificial Sequence: Synthetic oligonucleotide
  Antisense strand to SEQ ID NO: 1732939
acgauucugggagauuuga

SEQ ID NO: 1732941 - RNA, 19 nt, Artificial Sequence
  Description of Artificial Sequence: Synthetic oligonucleotide
  Sense strand starting at position 2053 of SEQ ID NO: 1562243
cccgucuuacgggauggau

SEQ ID NO: 1732942 - RNA, 19 nt, Artificial Sequence
  Description of Artificial Sequence: Synthetic oligonucleotide
  Antisense strand to SEQ ID NO: 1732941
auccaucccguaagacggg

SEQ ID NO: 1732943 - RNA, 19 nt, Artificial Sequence
  Description of Artificial Sequence: Synthetic oligonucleotide
  Sense strand starting at position 2055 of SEQ ID NO: 1562243
cgucuuacgggauggauuu

SEQ ID NO: 1732944 - RNA, 19 nt, Artificial Sequence
  Description of Artificial Sequence: Synthetic oligonucleotide
  Antisense strand to SEQ ID NO: 1732943
aaauccaucccguaagacg

SEQ ID NO: 1732945 - RNA, 19 nt, Artificial Sequence
  Description of Artificial Sequence: Synthetic oligonucleotide
  Sense strand starting at position 2271 of SEQ ID NO: 1562243
cacugaggccucuguaguu

SEQ ID NO: 1732946 - RNA, 19 nt, Artificial Sequence
  Description of Artificial Sequence: Synthetic oligonucleotide
  Antisense strand to SEQ ID NO: 1732945
aacuacagaggccucagug

SEQ ID NO: 1732947 - RNA, 19 nt, Artificial Sequence
  Description of Artificial Sequence: Synthetic oligonucleotide
  Sense strand starting at position 2554 of SEQ ID NO: 1562243
agaggcucgccggcuuaua

SEQ ID NO: 1732948 - RNA, 19 nt, Artificial Sequence
  Description of Artificial Sequence: Synthetic oligonucleotide
  Antisense strand to SEQ ID NO: 1732947
uauaagccggcgagccucu

SEQ ID NO: 1732949 - RNA, 19 nt, Artificial Sequence
  Description of Artificial Sequence: Synthetic oligonucleotide
  Sense strand starting at position 2555 of SEQ ID NO: 1562243
gaggcucgccggcuuauaa

SEQ ID NO: 1732950 - RNA, 19 nt, Artificial Sequence
  Description of Artificial Sequence: Synthetic oligonucleotide
  Antisense strand to SEQ ID NO: 1732949
uuauaagccggcgagccuc

SEQ ID NO: 1732951 - RNA, 19 nt, Artificial Sequence
  Description of Artificial Sequence: Synthetic oligonucleotide
  Sense strand starting at position 2665 of SEQ ID NO: 1562243
ugucaucuuuguucgagga

SEQ ID NO: 1732952 - RNA, 19 nt, Artificial Sequence
  Description of Artificial Sequence: Synthetic oligonucleotide
  Antisense strand to SEQ ID NO: 1732951
uccucgaacaaagaugaca

SEQ ID NO: 1732953 - RNA, 19 nt, Artificial Sequence
  Description of Artificial Sequence: Synthetic oligonucleotide
  Sense strand starting at position 2666 of SEQ ID NO: 1562243
gucaucuuuguucgaggau

SEQ ID NO: 1732954 - RNA, 19 nt, Artificial Sequence
  Description of Artificial Sequence: Synthetic oligonucleotide
  Antisense strand to SEQ ID NO: 1732953
auccucgaacaaagaugac

SEQ ID NO: 1732955 - RNA, 19 nt, Artificial Sequence
  Description of Artificial Sequence: Synthetic oligonucleotide
  Sense strand starting at position 2669 of SEQ ID NO: 1562243
aucuuuguucgaggaugga

SEQ ID NO: 1732956 - RNA, 19 nt, Artificial Sequence
  Description of Artificial Sequence: Synthetic oligonucleotide
  Antisense strand to SEQ ID NO: 1732955
uccauccucgaacaaagau

SEQ ID NO: 1732957 - RNA, 19 nt, Artificial Sequence
  Description of Artificial Sequence: Synthetic oligonucleotide
  Sense strand starting at position 2827 of SEQ ID NO: 1562243
guggcuaacucccuacaga

SEQ ID NO: 1732958 - RNA, 19 nt, Artificial Sequence
  Description of Artificial Sequence: Synthetic oligonucleotide
  Antisense strand to SEQ ID NO: 1732957
ucuguagggaguuagccac

SEQ ID NO: 1732959 - RNA, 19 nt, Artificial Sequence
  Description of Artificial Sequence: Synthetic oligonucleotide
  Sense strand starting at position 2845 of SEQ ID NO: 1562243
aggcuuccagguugauauu

SEQ ID NO: 1732960 - RNA, 19 nt, Artificial Sequence
  Description of Artificial Sequence: Synthetic oligonucleotide
  Antisense strand to SEQ ID NO: 1732959
aauaucaaccuggaagccu

SEQ ID NO: 1732961 - RNA, 19 nt, Artificial Sequence
  Description of Artificial Sequence: Synthetic oligonucleotide
  Sense strand starting at position 2952 of SEQ ID NO: 1562243
gcagguugacgucaaauga

SEQ ID NO: 1732962 - RNA, 19 nt, Artificial Sequence
  Description of Artificial Sequence: Synthetic oligonucleotide
  Antisense strand to SEQ ID NO: 1732961
ucauuugacgucaaccugc

SEQ ID NO: 1732963 - RNA, 19 nt, Artificial Sequence
  Description of Artificial Sequence: Synthetic oligonucleotide
  Sense strand starting at position 3155 of SEQ ID NO: 1562243
gaggacugcugcuccaagu

SEQ ID NO: 1732964 - RNA, 19 nt, Artificial Sequence
  Description of Artificial Sequence: Synthetic oligonucleotide
  Antisense strand to SEQ ID NO: 1732963
acuuggagcagcaguccuc

SEQ ID NO: 1732965 - RNA, 19 nt, Artificial Sequence
  Description of Artificial Sequence: Synthetic oligonucleotide
  Sense strand starting at position 3226 of SEQ ID NO: 1562243
ugggcuuguuucccuggaa

SEQ ID NO: 1732966 - RNA, 19 nt, Artificial Sequence
  Description of Artificial Sequence: Synthetic oligonucleotide
  Antisense strand to SEQ ID NO: 1732965
uuccagggaaacaagccca

SEQ ID NO: 1732967 - RNA, 19 nt, Artificial Sequence
  Description of Artificial Sequence: Synthetic oligonucleotide
  Sense strand starting at position 3229 of SEQ ID NO: 1562243
gcuuguuucccuggaacag

SEQ ID NO: 1732968 - RNA, 19 nt, Artificial Sequence
  Description of Artificial Sequence: Synthetic oligonucleotide
  Antisense strand to SEQ ID NO: 1732967
cuguuccagggaaacaagc

SEQ ID NO: 1732969 - RNA, 19 nt, Artificial Sequence
  Description of Artificial Sequence: Synthetic oligonucleotide
  Sense strand starting at position 3230 of SEQ ID NO: 1562243
cuuguuucccuggaacaga

SEQ ID NO: 1732970 - RNA, 19 nt, Artificial Sequence
  Description of Artificial Sequence: Synthetic oligonucleotide
  Antisense strand to SEQ ID NO: 1732969
ucuguuccagggaaacaag

SEQ ID NO: 1732971 - RNA, 19 nt, Artificial Sequence
  Description of Artificial Sequence: Synthetic oligonucleotide
  Sense strand starting at position 3296 of SEQ ID NO: 1562243
cuuugauguguuugggcca

SEQ ID NO: 1732972 - RNA, 19 nt, Artificial Sequence
  Description of Artificial Sequence: Synthetic oligonucleotide
  Antisense strand to SEQ ID NO: 1732971
uggcccaaacacaucaaag

SEQ ID NO: 1732973 - RNA, 19 nt, Artificial Sequence
  Description of Artificial Sequence: Synthetic oligonucleotide
  Sense strand starting at position 3457 of SEQ ID NO: 1562243
accugcuucugugugauaa

SEQ ID NO: 1732974 - RNA, 19 nt, Artificial Sequence
  Description of Artificial Sequence: Synthetic oligonucleotide
  Antisense strand to SEQ ID NO: 1732973
uuaucacacagaagcaggu

SEQ ID NO: 1732975 - RNA, 19 nt, Artificial Sequence
  Description of Artificial Sequence: Synthetic oligonucleotide
  Sense strand starting at position 3458 of SEQ ID NO: 1562243
ccugcuucugugugauaag

SEQ ID NO: 1732976 - RNA, 19 nt, Artificial Sequence
  Description of Artificial Sequence: Synthetic oligonucleotide
  Antisense strand to SEQ ID NO: 1732975
cuuaucacacagaagcagg

SEQ ID NO: 1732977 - RNA, 19 nt, Artificial Sequence
  Description of Artificial Sequence: Synthetic oligonucleotide
  Sense strand starting at position 3555 of SEQ ID NO: 1562243
gggugucuggguggucaga

SEQ ID NO: 1732978 - RNA, 19 nt, Artificial Sequence
  Description of Artificial Sequence: Synthetic oligonucleotide
  Antisense strand to SEQ ID NO: 1732977
ucugaccacccagacaccc

SEQ ID NO: 1732979 - RNA, 19 nt, Artificial Sequence
  Description of Artificial Sequence: Synthetic oligonucleotide
  Sense strand starting at position 3645 of SEQ ID NO: 1562243
aguggucaccacuggaguu

SEQ ID NO: 1732980 - RNA, 19 nt, Artificial Sequence
  Description of Artificial Sequence: Synthetic oligonucleotide
  Antisense strand to SEQ ID NO: 1732979
aacuccaguggugaccacu

SEQ ID NO: 1732981 - RNA, 19 nt, Artificial Sequence
  Description of Artificial Sequence: Synthetic oligonucleotide
  Sense strand starting at position 3744 of SEQ ID NO: 1562243
acaggaugaguguguggaa

SEQ ID NO: 1732982 - RNA, 19 nt, Artificial Sequence
  Description of Artificial Sequence: Synthetic oligonucleotide
  Antisense strand to SEQ ID NO: 1732981
uuccacacacucauccugu

SEQ ID NO: 1732983 - RNA, 19 nt, Artificial Sequence
  Description of Artificial Sequence: Synthetic oligonucleotide
  Sense strand starting at position 3746 of SEQ ID NO: 1562243
aggaugaguguguggaaga

SEQ ID NO: 1732984 - RNA, 19 nt, Artificial Sequence
  Description of Artificial Sequence: Synthetic oligonucleotide
  Antisense strand to SEQ ID NO: 1732983
ucuuccacacacucauccu

SEQ ID NO: 1732985 - RNA, 19 nt, Artificial Sequence
  Description of Artificial Sequence: Synthetic oligonucleotide
  Sense strand starting at position 3902 of SEQ ID NO: 1562243
ggccuucuuagauggcuga

SEQ ID NO: 1732986 - RNA, 19 nt, Artificial Sequence
  Description of Artificial Sequence: Synthetic oligonucleotide
  Antisense strand to SEQ ID NO: 1732985
ucagccaucuaagaaggcc

SEQ ID NO: 1732987 - RNA, 19 nt, Artificial Sequence
  Description of Artificial Sequence: Synthetic oligonucleotide
  Sense strand starting at position 3942 of SEQ ID NO: 1562243
ggagguguuucaguuuccu

SEQ ID NO: 1732988 - RNA, 19 nt, Artificial Sequence
  Description of Artificial Sequence: Synthetic oligonucleotide
  Antisense strand to SEQ ID NO: 1732987
aggaaacugaaacaccucc

SEQ ID NO: 1732989 - RNA, 19 nt, Artificial Sequence
  Description of Artificial Sequence: Synthetic oligonucleotide
  Sense strand starting at position 52 of SEQ ID NO: 1562244
agcacugcaagaugugaaa

SEQ ID NO: 1732990 - RNA, 19 nt, Artificial Sequence
  Description of Artificial Sequence: Synthetic oligonucleotide
  Antisense strand to SEQ ID NO: 1732989
uuucacaucuugcagugcu

SEQ ID NO: 1732991 - RNA, 19 nt, Artificial Sequence
  Description of Artificial Sequence: Synthetic oligonucleotide
  Sense strand starting at position 109 of SEQ ID NO: 1562244
gcuggcaauccauaaauau

SEQ ID NO: 1732992 - RNA, 19 nt, Artificial Sequence
  Description of Artificial Sequence: Synthetic oligonucleotide
  Antisense strand to SEQ ID NO: 1732991
auauuuauggauugccagc

SEQ ID NO: 1732993 - RNA, 19 nt, Artificial Sequence
  Description of Artificial Sequence: Synthetic oligonucleotide
  Sense strand starting at position 130 of SEQ ID NO: 1562244
gcuacugaugaaugaggau

SEQ ID NO: 1732994 - RNA, 19 nt, Artificial Sequence
  Description of Artificial Sequence: Synthetic oligonucleotide
  Antisense strand to SEQ ID NO: 1732993
auccucauucaucaguagc

SEQ ID NO: 1732995 - RNA, 19 nt, Artificial Sequence
  Description of Artificial Sequence: Synthetic oligonucleotide
  Sense strand starting at position 171 of SEQ ID NO: 1562244
uguauagucuaggccaaau

SEQ ID NO: 1732996 - RNA, 19 nt, Artificial Sequence
  Description of Artificial Sequence: Synthetic oligonucleotide
  Antisense strand to SEQ ID NO: 1732995
auuuggccuagacuauaca

SEQ ID NO: 1732997 - RNA, 19 nt, Artificial Sequence
  Description of Artificial Sequence: Synthetic oligonucleotide
  Sense strand starting at position 214 of SEQ ID NO: 1562244
aucugcaagauaggugaau

SEQ ID NO: 1732998 - RNA, 19 nt, Artificial Sequence
  Description of Artificial Sequence: Synthetic oligonucleotide
  Antisense strand to SEQ ID NO: 1732997
auucaccuaucuugcagau

SEQ ID NO: 1732999 - RNA, 19 nt, Artificial Sequence
  Description of Artificial Sequence: Synthetic oligonucleotide
  Sense strand starting at position 223 of SEQ ID NO: 1562244
auaggugaaugguuucuua

SEQ ID NO: 1733000 - RNA, 19 nt, Artificial Sequence
  Description of Artificial Sequence: Synthetic oligonucleotide
  Antisense strand to SEQ ID NO: 1732999
uaagaaaccauucaccuau

SEQ ID NO: 1733001 - RNA, 19 nt, Artificial Sequence
  Description of Artificial Sequence: Synthetic oligonucleotide
  Sense strand starting at position 226 of SEQ ID NO: 1562244
ggugaaugguuucuuaucu

SEQ ID NO: 1733002 - RNA, 19 nt, Artificial Sequence
  Description of Artificial Sequence: Synthetic oligonucleotide
  Antisense strand to SEQ ID NO: 1733001
agauaagaaaccauucacc

SEQ ID NO: 1733003 - RNA, 19 nt, Artificial Sequence
  Description of Artificial Sequence: Synthetic oligonucleotide
  Sense strand starting at position 227 of SEQ ID NO: 1562244
gugaaugguuucuuaucuc

SEQ ID NO: 1733004 - RNA, 19 nt, Artificial Sequence
  Description of Artificial Sequence: Synthetic oligonucleotide
  Antisense strand to SEQ ID NO: 1733003
gagauaagaaaccauucac

SEQ ID NO: 1733005 - RNA, 19 nt, Artificial Sequence
  Description of Artificial Sequence: Synthetic oligonucleotide
  Sense strand starting at position 235 of SEQ ID NO: 1562244
uuucuuaucucauuggaag

SEQ ID NO: 1733006 - RNA, 19 nt, Artificial Sequence
  Description of Artificial Sequence: Synthetic oligonucleotide
  Antisense strand to SEQ ID NO: 1733005
cuuccaaugagauaagaaa

SEQ ID NO: 1733007 - RNA, 19 nt, Artificial Sequence
  Description of Artificial Sequence: Synthetic oligonucleotide
  Sense strand starting at position 775 of SEQ ID NO: 1562244
uacagaaagguuggcaaau

SEQ ID NO: 1733008 - RNA, 19 nt, Artificial Sequence
  Description of Artificial Sequence: Synthetic oligonucleotide
  Antisense strand to SEQ ID NO: 1733007
auuugccaaccuuucugua

SEQ ID NO: 1733009 - RNA, 19 nt, Artificial Sequence
  Description of Artificial Sequence: Synthetic oligonucleotide
  Sense strand starting at position 776 of SEQ ID NO: 1562244
acagaaagguuggcaaauu

SEQ ID NO: 1733010 - RNA, 19 nt, Artificial Sequence
  Description of Artificial Sequence: Synthetic oligonucleotide
  Antisense strand to SEQ ID NO: 1733009
aauuugccaaccuuucugu

SEQ ID NO: 1733011 - RNA, 19 nt, Artificial Sequence
  Description of Artificial Sequence: Synthetic oligonucleotide
  Sense strand starting at position 785 of SEQ ID NO: 1562244
uuggcaaauugcuuaccaa

SEQ ID NO: 1733012 - RNA, 19 nt, Artificial Sequence
  Description of Artificial Sequence: Synthetic oligonucleotide
  Antisense strand to SEQ ID NO: 1733011
uugguaagcaauuugccaa

SEQ ID NO: 1733013 - RNA, 19 nt, Artificial Sequence
  Description of Artificial Sequence: Synthetic oligonucleotide
  Sense strand starting at position 786 of SEQ ID NO: 1562244
uggcaaauugcuuaccaag

SEQ ID NO: 1733014 - RNA, 19 nt, Artificial Sequence
  Description of Artificial Sequence: Synthetic oligonucleotide
  Antisense strand to SEQ ID NO: 1733013
cuugguaagcaauuugcca

SEQ ID NO: 1733015 - RNA, 19 nt, Artificial Sequence
  Description of Artificial Sequence: Synthetic oligonucleotide
  Sense strand starting at position 992 of SEQ ID NO: 1562244
gcauuaaaugacgguaaau

SEQ ID NO: 1733016 - RNA, 19 nt, Artificial Sequence
  Description of Artificial Sequence: Synthetic oligonucleotide
  Antisense strand to SEQ ID NO: 1733015
auuuaccgucauuuaaugc

SEQ ID NO: 1733017 - RNA, 19 nt, Artificial Sequence
  Description of Artificial Sequence: Synthetic oligonucleotide
  Sense strand starting at position 1003 of SEQ ID NO: 1562244
cgguaaauacugugagaaa

SEQ ID NO: 1733018 - RNA, 19 nt, Artificial Sequence
  Description of Artificial Sequence: Synthetic oligonucleotide
  Antisense strand to SEQ ID NO: 1733017
uuucucacaguauuuaccg

SEQ ID NO: 1733019 - RNA, 19 nt, Artificial Sequence
  Description of Artificial Sequence: Synthetic oligonucleotide
  Sense strand starting at position 1150 of SEQ ID NO: 1562244
cuccauaaccagugaagga

SEQ ID NO: 1733020 - RNA, 19 nt, Artificial Sequence
  Description of Artificial Sequence: Synthetic oligonucleotide
  Antisense strand to SEQ ID NO: 1733019
uccuucacugguuauggag

SEQ ID NO: 1733021 - RNA, 19 nt, Artificial Sequence
  Description of Artificial Sequence: Synthetic oligonucleotide
  Sense strand starting at position 1213 of SEQ ID NO: 1562244
gcugucucccaagguuaaa

SEQ ID NO: 1733022 - RNA, 19 nt, Artificial Sequence
  Description of Artificial Sequence: Synthetic oligonucleotide
  Antisense strand to SEQ ID NO: 1733021
uuuaaccuugggagacagc

SEQ ID NO: 1733023 - RNA, 19 nt, Artificial Sequence
  Description of Artificial Sequence: Synthetic oligonucleotide
  Sense strand starting at position 1501 of SEQ ID NO: 1562244
gagccucuccaagagguaa

SEQ ID NO: 1733024 - RNA, 19 nt, Artificial Sequence
  Description of Artificial Sequence: Synthetic oligonucleotide
  Antisense strand to SEQ ID NO: 1733023
uuaccucuuggagaggcuc

SEQ ID NO: 1733025 - RNA, 19 nt, Artificial Sequence
  Description of Artificial Sequence: Synthetic oligonucleotide
  Sense strand starting at position 2197 of SEQ ID NO: 1562244
cuaggaguguggucuggau

SEQ ID NO: 1733026 - RNA, 19 nt, Artificial Sequence
  Description of Artificial Sequence: Synthetic oligonucleotide
  Antisense strand to SEQ ID NO: 1733025
auccagaccacacuccuag

SEQ ID NO: 1733027 - RNA, 19 nt, Artificial Sequence
  Description of Artificial Sequence: Synthetic oligonucleotide
  Sense strand starting at position 2476 of SEQ ID NO: 1562244
ccaggaauccaaugcacaa

SEQ ID NO: 1733028 - RNA, 19 nt, Artificial Sequence
  Description of Artificial Sequence: Synthetic oligonucleotide
  Antisense strand to SEQ ID NO: 1733027
uugugcauuggauuccugg

SEQ ID NO: 1733029 - RNA, 19 nt, Artificial Sequence
  Description of Artificial Sequence: Synthetic oligonucleotide
  Sense strand starting at position 2797 of SEQ ID NO: 1562244
auucuacuccucugaaggu

SEQ ID NO: 1733030 - RNA, 19 nt, Artificial Sequence
  Description of Artificial Sequence: Synthetic oligonucleotide
  Antisense strand to SEQ ID NO: 1733029
accuucagaggaguagaau

SEQ ID NO: 1733031 - RNA, 19 nt, Artificial Sequence
  Description of Artificial Sequence: Synthetic oligonucleotide
  Sense strand starting at position 3479 of SEQ ID NO: 1562244
agaccuagaugacaauaua

SEQ ID NO: 1733032 - RNA, 19 nt, Artificial Sequence
  Description of Artificial Sequence: Synthetic oligonucleotide
  Antisense strand to SEQ ID NO: 1733031
uauauugucaucuaggucu

SEQ ID NO: 1733033 - RNA, 19 nt, Artificial Sequence
  Description of Artificial Sequence: Synthetic oligonucleotide
  Sense strand starting at position 3493 of SEQ ID NO: 1562244
auauauaaguuccuugagu

SEQ ID NO: 1733034 - RNA, 19 nt, Artificial Sequence
  Description of Artificial Sequence: Synthetic oligonucleotide
  Antisense strand to SEQ ID NO: 1733033
acucaaggaacuuauauau

SEQ ID NO: 1733035 - RNA, 19 nt, Artificial Sequence
  Description of Artificial Sequence: Synthetic oligonucleotide
  Sense strand starting at position 3494 of SEQ ID NO: 1562244
uauauaaguuccuugagug

SEQ ID NO: 1733036 - RNA, 19 nt, Artificial Sequence
  Description of Artificial Sequence: Synthetic oligonucleotide
  Antisense strand to SEQ ID NO: 1733035
cacucaaggaacuuauaua

SEQ ID NO: 1733037 - RNA, 19 nt, Artificial Sequence
  Description of Artificial Sequence: Synthetic oligonucleotide
  Sense strand starting at position 3495 of SEQ ID NO: 1562244
auauaaguuccuugagugu

SEQ ID NO: 1733038 - RNA, 19 nt, Artificial Sequence
  Description of Artificial Sequence: Synthetic oligonucleotide
  Antisense strand to SEQ ID NO: 1733037
acacucaaggaacuuauau

SEQ ID NO: 1733039 - RNA, 19 nt, Artificial Sequence
  Description of Artificial Sequence: Synthetic oligonucleotide
  Sense strand starting at position 3499 of SEQ ID NO: 1562244
aaguuccuugagugugaca

SEQ ID NO: 1733040 - RNA, 19 nt, Artificial Sequence
  Description of Artificial Sequence: Synthetic oligonucleotide
  Antisense strand to SEQ ID NO: 1733039
ugucacacucaaggaacuu

SEQ ID NO: 1733041 - RNA, 19 nt, Artificial Sequence
  Description of Artificial Sequence: Synthetic oligonucleotide
  Sense strand starting at position 3501 of SEQ ID NO: 1562244
guuccuugagugugacaau

SEQ ID NO: 1733042 - RNA, 19 nt, Artificial Sequence
  Description of Artificial Sequence: Synthetic oligonucleotide
  Antisense strand to SEQ ID NO: 1733041
auugucacacucaaggaac

SEQ ID NO: 1733043 - RNA, 19 nt, Artificial Sequence
  Description of Artificial Sequence: Synthetic oligonucleotide
  Sense strand starting at position 3508 of SEQ ID NO: 1562244
gagugugacaaucaggguu

SEQ ID NO: 1733044 - RNA, 19 nt, Artificial Sequence
  Description of Artificial Sequence: Synthetic oligonucleotide
  Antisense strand to SEQ ID NO: 1733043
aacccugauugucacacuc

SEQ ID NO: 1733045 - RNA, 19 nt, Artificial Sequence
  Description of Artificial Sequence: Synthetic oligonucleotide
  Sense strand starting at position 3586 of SEQ ID NO: 1562244
ucaauuggaugauuccuua

SEQ ID NO: 1733046 - RNA, 19 nt, Artificial Sequence
  Description of Artificial Sequence: Synthetic oligonucleotide
  Antisense strand to SEQ ID NO: 1733045
uaaggaaucauccaauuga

SEQ ID NO: 1733047 - RNA, 19 nt, Artificial Sequence
  Description of Artificial Sequence: Synthetic oligonucleotide
  Sense strand starting at position 3590 of SEQ ID NO: 1562244
uuggaugauuccuuacccu

SEQ ID NO: 1733048 - RNA, 19 nt, Artificial Sequence
  Description of Artificial Sequence: Synthetic oligonucleotide
  Antisense strand to SEQ ID NO: 1733047
aggguaaggaaucauccaa

SEQ ID NO: 1733049 - RNA, 19 nt, Artificial Sequence
  Description of Artificial Sequence: Synthetic oligonucleotide
  Sense strand starting at position 3613 of SEQ ID NO: 1562244
auaugccaucuccaguauu

SEQ ID NO: 1733050 - RNA, 19 nt, Artificial Sequence
  Description of Artificial Sequence: Synthetic oligonucleotide
  Antisense strand to SEQ ID NO: 1733049
aauacuggagauggcauau

SEQ ID NO: 1733051 - RNA, 19 nt, Artificial Sequence
  Description of Artificial Sequence: Synthetic oligonucleotide
  Sense strand starting at position 3631 of SEQ ID NO: 1562244
uucuaagcaguuugacuua

SEQ ID NO: 1733052 - RNA, 19 nt, Artificial Sequence
  Description of Artificial Sequence: Synthetic oligonucleotide
  Antisense strand to SEQ ID NO: 1733051
uaagucaaacugcuuagaa

SEQ ID NO: 1733053 - RNA, 19 nt, Artificial Sequence
  Description of Artificial Sequence: Synthetic oligonucleotide
  Sense strand starting at position 3634 of SEQ ID NO: 1562244
uaagcaguuugacuuaguu

SEQ ID NO: 1733054 - RNA, 19 nt, Artificial Sequence
  Description of Artificial Sequence: Synthetic oligonucleotide
  Antisense strand to SEQ ID NO: 1733053
aacuaagucaaacugcuua

SEQ ID NO: 1733055 - RNA, 19 nt, Artificial Sequence
  Description of Artificial Sequence: Synthetic oligonucleotide
  Sense strand starting at position 3674 of SEQ ID NO: 1562244
aaaguuucugugugaacag

SEQ ID NO: 1733056 - RNA, 19 nt, Artificial Sequence
  Description of Artificial Sequence: Synthetic oligonucleotide
  Antisense strand to SEQ ID NO: 1733055
cuguucacacagaaacuuu

SEQ ID NO: 1733057 - RNA, 19 nt, Artificial Sequence
  Description of Artificial Sequence: Synthetic oligonucleotide
  Sense strand starting at position 3717 of SEQ ID NO: 1562244
guaacacuguguccacauu

SEQ ID NO: 1733058 - RNA, 19 nt, Artificial Sequence
  Description of Artificial Sequence: Synthetic oligonucleotide
  Antisense strand to SEQ ID NO: 1733057
aauguggacacaguguuac

SEQ ID NO: 1733059 - RNA, 19 nt, Artificial Sequence
  Description of Artificial Sequence: Synthetic oligonucleotide
  Sense strand starting at position 3728 of SEQ ID NO: 1562244
uccacauuucuguguggca

SEQ ID NO: 1733060 - RNA, 19 nt, Artificial Sequence
  Description of Artificial Sequence: Synthetic oligonucleotide
  Antisense strand to SEQ ID NO: 1733059
ugccacacagaaaugugga

SEQ ID NO: 1733061 - RNA, 19 nt, Artificial Sequence
  Description of Artificial Sequence: Synthetic oligonucleotide
  Sense strand starting at position 3729 of SEQ ID NO: 1562244
ccacauuucuguguggcaa

SEQ ID NO: 1733062 - RNA, 19 nt, Artificial Sequence
  Description of Artificial Sequence: Synthetic oligonucleotide
  Antisense strand to SEQ ID NO: 1733061
uugccacacagaaaugugg

SEQ ID NO: 1733063 - RNA, 19 nt, Artificial Sequence
  Description of Artificial Sequence: Synthetic oligonucleotide
  Sense strand starting at position 3730 of SEQ ID NO: 1562244
cacauuucuguguggcaac

SEQ ID NO: 1733064 - RNA, 19 nt, Artificial Sequence
  Description of Artificial Sequence: Synthetic oligonucleotide
  Antisense strand to SEQ ID NO: 1733063
guugccacacagaaaugug

SEQ ID NO: 1733065 - RNA, 19 nt, Artificial Sequence
  Description of Artificial Sequence: Synthetic oligonucleotide
  Sense strand starting at position 3842 of SEQ ID NO: 1562244
ucacuuauguuaucuguca

SEQ ID NO: 1733066 - RNA, 19 nt, Artificial Sequence
  Description of Artificial Sequence: Synthetic oligonucleotide
  Antisense strand to SEQ ID NO: 1733065
ugacagauaacauaaguga

SEQ ID NO: 1733067 - RNA, 19 nt, Artificial Sequence
  Description of Artificial Sequence: Synthetic oligonucleotide
  Sense strand starting at position 3974 of SEQ ID NO: 1562244
gaauccuggagagguuagu

SEQ ID NO: 1733068 - RNA, 19 nt, Artificial Sequence
  Description of Artificial Sequence: Synthetic oligonucleotide
  Antisense strand to SEQ ID NO: 1733067
acuaaccucuccaggauuc

SEQ ID NO: 1733069 - RNA, 19 nt, Artificial Sequence
  Description of Artificial Sequence: Synthetic oligonucleotide
  Sense strand starting at position 627 of SEQ ID NO: 1562245
gggccacacccugacauua

SEQ ID NO: 1733070 - RNA, 19 nt, Artificial Sequence
  Description of Artificial Sequence: Synthetic oligonucleotide
  Antisense strand to SEQ ID NO: 1733069
uaaugucaggguguggccc

SEQ ID NO: 1733071 - RNA, 19 nt, Artificial Sequence
  Description of Artificial Sequence: Synthetic oligonucleotide
  Sense strand starting at position 690 of SEQ ID NO: 1562245
ggcugauuuccuggguuug

SEQ ID NO: 1733072 - RNA, 19 nt, Artificial Sequence
  Description of Artificial Sequence: Synthetic oligonucleotide
  Antisense strand to SEQ ID NO: 1733071
caaacccaggaaaucagcc

SEQ ID NO: 1733073 - RNA, 19 nt, Artificial Sequence
  Description of Artificial Sequence: Synthetic oligonucleotide
  Sense strand starting at position 691 of SEQ ID NO: 1562245
gcugauuuccuggguuuga

SEQ ID NO: 1733074 - RNA, 19 nt, Artificial Sequence
  Description of Artificial Sequence: Synthetic oligonucleotide
  Antisense strand to SEQ ID NO: 1733073
ucaaacccaggaaaucagc

SEQ ID NO: 1733075 - RNA, 19 nt, Artificial Sequence
  Description of Artificial Sequence: Synthetic oligonucleotide
  Sense strand starting at position 902 of SEQ ID NO: 1562245
gcaauuacucgauacacua

SEQ ID NO: 1733076 - RNA, 19 nt, Artificial Sequence
  Description of Artificial Sequence: Synthetic oligonucleotide
  Antisense strand to SEQ ID NO: 1733075
uaguguaucgaguaauugc

SEQ ID NO: 1733077 - RNA, 19 nt, Artificial Sequence
  Description of Artificial Sequence: Synthetic oligonucleotide
  Sense strand starting at position 933 of SEQ ID NO: 1562245
gcaacucuuccaggaauaa

SEQ ID NO: 1733078 - RNA, 19 nt, Artificial Sequence
  Description of Artificial Sequence: Synthetic oligonucleotide
  Antisense strand to SEQ ID NO: 1733077
uuauuccuggaagaguugc

SEQ ID NO: 1733079 - RNA, 19 nt, Artificial Sequence
  Description of Artificial Sequence: Synthetic oligonucleotide
  Sense strand starting at position 957 of SEQ ID NO: 1562245
augaaauguuaguugagga

SEQ ID NO: 1733080 - RNA, 19 nt, Artificial Sequence
  Description of Artificial Sequence: Synthetic oligonucleotide
  Antisense strand to SEQ ID NO: 1733079
uccucaacuaacauuucau

SEQ ID NO: 1733081 - RNA, 19 nt, Artificial Sequence
  Description of Artificial Sequence: Synthetic oligonucleotide
  Sense strand starting at position 958 of SEQ ID NO: 1562245
ugaaauguuaguugaggaa

SEQ ID NO: 1733082 - RNA, 19 nt, Artificial Sequence
  Description of Artificial Sequence: Synthetic oligonucleotide
  Antisense strand to SEQ ID NO: 1733081
uuccucaacuaacauuuca

SEQ ID NO: 1733083 - RNA, 19 nt, Artificial Sequence
  Description of Artificial Sequence: Synthetic oligonucleotide
  Sense strand starting at position 1030 of SEQ ID NO: 1562245
cuuuguucucgauaugacu

SEQ ID NO: 1733084 - RNA, 19 nt, Artificial Sequence
  Description of Artificial Sequence: Synthetic oligonucleotide
  Antisense strand to SEQ ID NO: 1733083
agucauaucgagaacaaag

SEQ ID NO: 1733085 - RNA, 19 nt, Artificial Sequence
  Description of Artificial Sequence: Synthetic oligonucleotide
  Sense strand starting at position 1036 of SEQ ID NO: 1562245
ucucgauaugacugugaca

SEQ ID NO: 1733086 - RNA, 19 nt, Artificial Sequence
  Description of Artificial Sequence: Synthetic oligonucleotide
  Antisense strand to SEQ ID NO: 1733085
ugucacagucauaucgaga

SEQ ID NO: 1733087 - RNA, 19 nt, Artificial Sequence
  Description of Artificial Sequence: Synthetic oligonucleotide
  Sense strand starting at position 1038 of SEQ ID NO: 1562245
ucgauaugacugugacaug

SEQ ID NO: 1733088 - RNA, 19 nt, Artificial Sequence
  Description of Artificial Sequence: Synthetic oligonucleotide
  Antisense strand to SEQ ID NO: 1733087
caugucacagucauaucga

SEQ ID NO: 1733089 - RNA, 19 nt, Artificial Sequence
  Description of Artificial Sequence: Synthetic oligonucleotide
  Sense strand starting at position 1089 of SEQ ID NO: 1562245
cuguguuacccugagagug

SEQ ID NO: 1733090 - RNA, 19 nt, Artificial Sequence
  Description of Artificial Sequence: Synthetic oligonucleotide
  Antisense strand to SEQ ID NO: 1733089
cacucucaggguaacacag

SEQ ID NO: 1733091 - RNA, 19 nt, Artificial Sequence
  Description of Artificial Sequence: Synthetic oligonucleotide
  Sense strand starting at position 1094 of SEQ ID NO: 1562245
uuacccugagagugucauu

SEQ ID NO: 1733092 - RNA, 19 nt, Artificial Sequence
  Description of Artificial Sequence: Synthetic oligonucleotide
  Antisense strand to SEQ ID NO: 1733091
aaugacacucucaggguaa

SEQ ID NO: 1733093 - RNA, 19 nt, Artificial Sequence
  Description of Artificial Sequence: Synthetic oligonucleotide
  Sense strand starting at position 1117 of SEQ ID NO: 1562245
cucucagggccucaguuau

SEQ ID NO: 1733094 - RNA, 19 nt, Artificial Sequence
  Description of Artificial Sequence: Synthetic oligonucleotide
  Antisense strand to SEQ ID NO: 1733093
auaacugaggcccugagag

SEQ ID NO: 1733095 - RNA, 19 nt, Artificial Sequence
  Description of Artificial Sequence: Synthetic oligonucleotide
  Sense strand starting at position 1123 of SEQ ID NO: 1562245
gggccucaguuaucuauaa

SEQ ID NO: 1733096 - RNA, 19 nt, Artificial Sequence
  Description of Artificial Sequence: Synthetic oligonucleotide
  Antisense strand to SEQ ID NO: 1733095
uuauagauaacugaggccc

SEQ ID NO: 1733097 - RNA, 19 nt, Artificial Sequence
  Description of Artificial Sequence: Synthetic oligonucleotide
  Sense strand starting at position 1124 of SEQ ID NO: 1562245
ggccucaguuaucuauaaa

SEQ ID NO: 1733098 - RNA, 19 nt, Artificial Sequence
  Description of Artificial Sequence: Synthetic oligonucleotide
  Antisense strand to SEQ ID NO: 1733097
uuuauagauaacugaggcc

SEQ ID NO: 1733099 - RNA, 19 nt, Artificial Sequence
  Description of Artificial Sequence: Synthetic oligonucleotide
  Sense strand starting at position 1560 of SEQ ID NO: 1562245
ggucuacuauucuuuagga

SEQ ID NO: 1733100 - RNA, 19 nt, Artificial Sequence
  Description of Artificial Sequence: Synthetic oligonucleotide
  Antisense strand to SEQ ID NO: 1733099
uccuaaagaauaguagacc

SEQ ID NO: 1733101 - RNA, 19 nt, Artificial Sequence
  Description of Artificial Sequence: Synthetic oligonucleotide
  Sense strand starting at position 1561 of SEQ ID NO: 1562245
gucuacuauucuuuaggau

SEQ ID NO: 1733102 - RNA, 19 nt, Artificial Sequence
  Description of Artificial Sequence: Synthetic oligonucleotide
  Antisense strand to SEQ ID NO: 1733101
auccuaaagaauaguagac

SEQ ID NO: 1733103 - RNA, 19 nt, Artificial Sequence
  Description of Artificial Sequence: Synthetic oligonucleotide
  Sense strand starting at position 1581 of SEQ ID NO: 1562245
cugcuauugucaucaugau

SEQ ID NO: 1733104 - RNA, 19 nt, Artificial Sequence
  Description of Artificial Sequence: Synthetic oligonucleotide
  Antisense strand to SEQ ID NO: 1733103
aucaugaugacaauagcag

SEQ ID NO: 1733105 - RNA, 19 nt, Artificial Sequence
  Description of Artificial Sequence: Synthetic oligonucleotide
  Sense strand starting at position 1582 of SEQ ID NO: 1562245
ugcuauugucaucaugauc

SEQ ID NO: 1733106 - RNA, 19 nt, Artificial Sequence
  Description of Artificial Sequence: Synthetic oligonucleotide
  Antisense strand to SEQ ID NO: 1733105
gaucaugaugacaauagca

SEQ ID NO: 1733107 - RNA, 19 nt, Artificial Sequence
  Description of Artificial Sequence: Synthetic oligonucleotide
  Sense strand starting at position 2062 of SEQ ID NO: 1562245
agcuguaaacuuggcaaga

SEQ ID NO: 1733108 - RNA, 19 nt, Artificial Sequence
  Description of Artificial Sequence: Synthetic oligonucleotide
  Antisense strand to SEQ ID NO: 1733107
ucuugccaaguuuacagcu

SEQ ID NO: 1733109 - RNA, 19 nt, Artificial Sequence
  Description of Artificial Sequence: Synthetic oligonucleotide
  Sense strand starting at position 2063 of SEQ ID NO: 1562245
gcuguaaacuuggcaagac

SEQ ID NO: 1733110 - RNA, 19 nt, Artificial Sequence
  Description of Artificial Sequence: Synthetic oligonucleotide
  Antisense strand to SEQ ID NO: 1733109
gucuugccaaguuuacagc

SEQ ID NO: 1733111 - RNA, 19 nt, Artificial Sequence
  Description of Artificial Sequence: Synthetic oligonucleotide
  Sense strand starting at position 2094 of SEQ ID NO: 1562245
cgaagaggccuuugagaca

SEQ ID NO: 1733112 - RNA, 19 nt, Artificial Sequence
  Description of Artificial Sequence: Synthetic oligonucleotide
  Antisense strand to SEQ ID NO: 1733111
ugucucaaaggccucuucg

SEQ ID NO: 1733113 - RNA, 19 nt, Artificial Sequence
  Description of Artificial Sequence: Synthetic oligonucleotide
  Sense strand starting at position 2253 of SEQ ID NO: 1562245
guggcaucacucugaugau

SEQ ID NO: 1733114 - RNA, 19 nt, Artificial Sequence
  Description of Artificial Sequence: Synthetic oligonucleotide
  Antisense strand to SEQ ID NO: 1733113
aucaucagagugaugccac

SEQ ID NO: 1733115 - RNA, 19 nt, Artificial Sequence
  Description of Artificial Sequence: Synthetic oligonucleotide
  Sense strand starting at position 2321 of SEQ ID NO: 1562245
gagacaggguuucugucau

SEQ ID NO: 1733116 - RNA, 19 nt, Artificial Sequence
  Description of Artificial Sequence: Synthetic oligonucleotide
  Antisense strand to SEQ ID NO: 1733115
augacagaaacccugucuc

SEQ ID NO: 1733117 - RNA, 19 nt, Artificial Sequence
  Description of Artificial Sequence: Synthetic oligonucleotide
  Sense strand starting at position 2722 of SEQ ID NO: 1562245
agaacauuuaggugcguga

SEQ ID NO: 1733118 - RNA, 19 nt, Artificial Sequence
  Description of Artificial Sequence: Synthetic oligonucleotide
  Antisense strand to SEQ ID NO: 1733117
ucacgcaccuaaauguucu

SEQ ID NO: 1733119 - RNA, 19 nt, Artificial Sequence
  Description of Artificial Sequence: Synthetic oligonucleotide
  Sense strand starting at position 2724 of SEQ ID NO: 1562245
aacauuuaggugcgugaag

SEQ ID NO: 1733120 - RNA, 19 nt, Artificial Sequence
  Description of Artificial Sequence: Synthetic oligonucleotide
  Antisense strand to SEQ ID NO: 1733119
cuucacgcaccuaaauguu

SEQ ID NO: 1733121 - RNA, 19 nt, Artificial Sequence
  Description of Artificial Sequence: Synthetic oligonucleotide
  Sense strand starting at position 2744 of SEQ ID NO: 1562245
cccugagauuguucuugug

SEQ ID NO: 1733122 - RNA, 19 nt, Artificial Sequence
  Description of Artificial Sequence: Synthetic oligonucleotide
  Antisense strand to SEQ ID NO: 1733121
cacaagaacaaucucaggg

SEQ ID NO: 1733123 - RNA, 19 nt, Artificial Sequence
  Description of Artificial Sequence: Synthetic oligonucleotide
  Sense strand starting at position 2770 of SEQ ID NO: 1562245
augugagccucuuuaauga

SEQ ID NO: 1733124 - RNA, 19 nt, Artificial Sequence
  Description of Artificial Sequence: Synthetic oligonucleotide
  Antisense strand to SEQ ID NO: 1733123
ucauuaaagaggcucacau

SEQ ID NO: 1733125 - RNA, 19 nt, Artificial Sequence
  Description of Artificial Sequence: Synthetic oligonucleotide
  Sense strand starting at position 2955 of SEQ ID NO: 1562245
uguguuuccugaucuauaa

SEQ ID NO: 1733126 - RNA, 19 nt, Artificial Sequence
  Description of Artificial Sequence: Synthetic oligonucleotide
  Antisense strand to SEQ ID NO: 1733125
uuauagaucaggaaacaca

SEQ ID NO: 1733127 - RNA, 19 nt, Artificial Sequence
  Description of Artificial Sequence: Synthetic oligonucleotide
  Sense strand starting at position 2976 of SEQ ID NO: 1562245
cccagaagucacuggugaa

SEQ ID NO: 1733128 - RNA, 19 nt, Artificial Sequence
  Description of Artificial Sequence: Synthetic oligonucleotide
  Antisense strand to SEQ ID NO: 1733127
uucaccagugacuucuggg

SEQ ID NO: 1733129 - RNA, 19 nt, Artificial Sequence
  Description of Artificial Sequence: Synthetic oligonucleotide
  Sense strand starting at position 2977 of SEQ ID NO: 1562245
ccagaagucacuggugaau

SEQ ID NO: 1733130 - RNA, 19 nt, Artificial Sequence
  Description of Artificial Sequence: Synthetic oligonucleotide
  Antisense strand to SEQ ID NO: 1733129
auucaccagugacuucugg

SEQ ID NO: 1733131 - RNA, 19 nt, Artificial Sequence
  Description of Artificial Sequence: Synthetic oligonucleotide
  Sense strand starting at position 2990 of SEQ ID NO: 1562245
gugaaucacccuuagugca

SEQ ID NO: 1733132 - RNA, 19 nt, Artificial Sequence
  Description of Artificial Sequence: Synthetic oligonucleotide
  Antisense strand to SEQ ID NO: 1733131
ugcacuaagggugauucac

SEQ ID NO: 1733133 - RNA, 19 nt, Artificial Sequence
  Description of Artificial Sequence: Synthetic oligonucleotide
  Sense strand starting at position 3351 of SEQ ID NO: 1562245
ggacccguugcuuacauaa

SEQ ID NO: 1733134 - RNA, 19 nt, Artificial Sequence
  Description of Artificial Sequence: Synthetic oligonucleotide
  Antisense strand to SEQ ID NO: 1733133
uuauguaagcaacgggucc

SEQ ID NO: 1733135 - RNA, 19 nt, Artificial Sequence
  Description of Artificial Sequence: Synthetic oligonucleotide
  Sense strand starting at position 3411 of SEQ ID NO: 1562245
uguucucuuccagaucaca

SEQ ID NO: 1733136 - RNA, 19 nt, Artificial Sequence
  Description of Artificial Sequence: Synthetic oligonucleotide
  Antisense strand to SEQ ID NO: 1733135
ugugaucuggaagagaaca

SEQ ID NO: 1733137 - RNA, 19 nt, Artificial Sequence
  Description of Artificial Sequence: Synthetic oligonucleotide
  Sense strand starting at position 3453 of SEQ ID NO: 1562245
aggugaaugcuguguacaa

SEQ ID NO: 1733138 - RNA, 19 nt, Artificial Sequence
  Description of Artificial Sequence: Synthetic oligonucleotide
  Antisense strand to SEQ ID NO: 1733137
uuguacacagcauucaccu

SEQ ID NO: 1733139 - RNA, 19 nt, Artificial Sequence
  Description of Artificial Sequence: Synthetic oligonucleotide
  Sense strand starting at position 3454 of SEQ ID NO: 1562245
ggugaaugcuguguacaag

SEQ ID NO: 1733140 - RNA, 19 nt, Artificial Sequence
  Description of Artificial Sequence: Synthetic oligonucleotide
  Antisense strand to SEQ ID NO: 1733139
cuuguacacagcauucacc

SEQ ID NO: 1733141 - RNA, 19 nt, Artificial Sequence
  Description of Artificial Sequence: Synthetic oligonucleotide
  Sense strand starting at position 3646 of SEQ ID NO: 1562245
uccggagguuuauccugaa

SEQ ID NO: 1733142 - RNA, 19 nt, Artificial Sequence
  Description of Artificial Sequence: Synthetic oligonucleotide
  Antisense strand to SEQ ID NO: 1733141
uucaggauaaaccuccgga

SEQ ID NO: 1733143 - RNA, 19 nt, Artificial Sequence
  Description of Artificial Sequence: Synthetic oligonucleotide
  Sense strand starting at position 3650 of SEQ ID NO: 1562245
gagguuuauccugaagcua

SEQ ID NO: 1733144 - RNA, 19 nt, Artificial Sequence
  Description of Artificial Sequence: Synthetic oligonucleotide
  Antisense strand to SEQ ID NO: 1733143
uagcuucaggauaaaccuc

SEQ ID NO: 1733145 - RNA, 19 nt, Artificial Sequence
  Description of Artificial Sequence: Synthetic oligonucleotide
  Sense strand starting at position 3839 of SEQ ID NO: 1562245
ccugcuuccagguggagaa

SEQ ID NO: 1733146 - RNA, 19 nt, Artificial Sequence
  Description of Artificial Sequence: Synthetic oligonucleotide
  Antisense strand to SEQ ID NO: 1733145
uucuccaccuggaagcagg

SEQ ID NO: 1733147 - RNA, 19 nt, Artificial Sequence
  Description of Artificial Sequence: Synthetic oligonucleotide
  Sense strand starting at position 3937 of SEQ ID NO: 1562245
gguaucacccuaugaaaua

SEQ ID NO: 1733148 - RNA, 19 nt, Artificial Sequence
  Description of Artificial Sequence: Synthetic oligonucleotide
  Antisense strand to SEQ ID NO: 1733147
uauuucauagggugauacc

SEQ ID NO: 1733149 - RNA, 19 nt, Artificial Sequence
  Description of Artificial Sequence: Synthetic oligonucleotide
  Sense strand starting at position 821 of SEQ ID NO: 1562246
gagcuccuagucugucauu

SEQ ID NO: 1733150 - RNA, 19 nt, Artificial Sequence
  Description of Artificial Sequence: Synthetic oligonucleotide
  Antisense strand to SEQ ID NO: 1733149
aaugacagacuaggagcuc

SEQ ID NO: 1733151 - RNA, 19 nt, Artificial Sequence
  Description of Artificial Sequence: Synthetic oligonucleotide
  Sense strand starting at position 830 of SEQ ID NO: 1562246
gucugucauuuggguuaua

SEQ ID NO: 1733152 - RNA, 19 nt, Artificial Sequence
  Description of Artificial Sequence: Synthetic oligonucleotide
  Antisense strand to SEQ ID NO: 1733151
uauaacccaaaugacagac

SEQ ID NO: 1733153 - RNA, 19 nt, Artificial Sequence
  Description of Artificial Sequence: Synthetic oligonucleotide
  Sense strand starting at position 835 of SEQ ID NO: 1562246
ucauuuggguuauagauga

SEQ ID NO: 1733154 - RNA, 19 nt, Artificial Sequence
  Description of Artificial Sequence: Synthetic oligonucleotide
  Antisense strand to SEQ ID NO: 1733153
ucaucuauaacccaaauga

SEQ ID NO: 1733155 - RNA, 19 nt, Artificial Sequence
  Description of Artificial Sequence: Synthetic oligonucleotide
  Sense strand starting at position 839 of SEQ ID NO: 1562246
uuggguuauagaugacaca

SEQ ID NO: 1733156 - RNA, 19 nt, Artificial Sequence
  Description of Artificial Sequence: Synthetic oligonucleotide
  Antisense strand to SEQ ID NO: 1733155
ugugucaucuauaacccaa

SEQ ID NO: 1733157 - RNA, 19 nt, Artificial Sequence
  Description of Artificial Sequence: Synthetic oligonucleotide
  Sense strand starting at position 863 of SEQ ID NO: 1562246
acaggucagaucuguaaag

SEQ ID NO: 1733158 - RNA, 19 nt, Artificial Sequence
  Description of Artificial Sequence: Synthetic oligonucleotide
  Antisense strand to SEQ ID NO: 1733157
cuuuacagaucugaccugu

SEQ ID NO: 1733159 - RNA, 19 nt, Artificial Sequence
  Description of Artificial Sequence: Synthetic oligonucleotide
  Sense strand starting at position 881 of SEQ ID NO: 1562246
ggcgaauccugccaugaau

SEQ ID NO: 1733160 - RNA, 19 nt, Artificial Sequence
  Description of Artificial Sequence: Synthetic oligonucleotide
  Antisense strand to SEQ ID NO: 1733159
auucauggcaggauucgcc

SEQ ID NO: 1733161 - RNA, 19 nt, Artificial Sequence
  Description of Artificial Sequence: Synthetic oligonucleotide
  Sense strand starting at position 883 of SEQ ID NO: 1562246
cgaauccugccaugaauca

SEQ ID NO: 1733162 - RNA, 19 nt, Artificial Sequence
  Description of Artificial Sequence: Synthetic oligonucleotide
  Antisense strand to SEQ ID NO: 1733161
ugauucauggcaggauucg

SEQ ID NO: 1733163 - RNA, 19 nt, Artificial Sequence
  Description of Artificial Sequence: Synthetic oligonucleotide
  Sense strand starting at position 965 of SEQ ID NO: 1562246
ccgggcgucacuguucuua

SEQ ID NO: 1733164 - RNA, 19 nt, Artificial Sequence
  Description of Artificial Sequence: Synthetic oligonucleotide
  Antisense strand to SEQ ID NO: 1733163
uaagaacagugacgcccgg

SEQ ID NO: 1733165 - RNA, 19 nt, Artificial Sequence
  Description of Artificial Sequence: Synthetic oligonucleotide
  Sense strand starting at position 967 of SEQ ID NO: 1562246
gggcgucacuguucuuaca

SEQ ID NO: 1733166 - RNA, 19 nt, Artificial Sequence
  Description of Artificial Sequence: Synthetic oligonucleotide
  Antisense strand to SEQ ID NO: 1733165
uguaagaacagugacgccc

SEQ ID NO: 1733167 - RNA, 19 nt, Artificial Sequence
  Description of Artificial Sequence: Synthetic oligonucleotide
  Sense strand starting at position 969 of SEQ ID NO: 1562246
gcgucacuguucuuacacu

SEQ ID NO: 1733168 - RNA, 19 nt, Artificial Sequence
  Description of Artificial Sequence: Synthetic oligonucleotide
  Antisense strand to SEQ ID NO: 1733167
aguguaagaacagugacgc

SEQ ID NO: 1733169 - RNA, 19 nt, Artificial Sequence
  Description of Artificial Sequence: Synthetic oligonucleotide
  Sense strand starting at position 1771 of SEQ ID NO: 1562246
gucucauacuaagugcuga

SEQ ID NO: 1733170 - RNA, 19 nt, Artificial Sequence
  Description of Artificial Sequence: Synthetic oligonucleotide
  Antisense strand to SEQ ID NO: 1733169
ucagcacuuaguaugagac

SEQ ID NO: 1733171 - RNA, 19 nt, Artificial Sequence
  Description of Artificial Sequence: Synthetic oligonucleotide
  Sense strand starting at position 1775 of SEQ ID NO: 1562246
cauacuaagugcugauaga

SEQ ID NO: 1733172 - RNA, 19 nt, Artificial Sequence
  Description of Artificial Sequence: Synthetic oligonucleotide
  Antisense strand to SEQ ID NO: 1733171
ucuaucagcacuuaguaug

SEQ ID NO: 1733173 - RNA, 19 nt, Artificial Sequence
  Description of Artificial Sequence: Synthetic oligonucleotide
  Sense strand starting at position 2608 of SEQ ID NO: 1562246
uaaucagcuggcugggaaa

SEQ ID NO: 1733174 - RNA, 19 nt, Artificial Sequence
  Description of Artificial Sequence: Synthetic oligonucleotide
  Antisense strand to SEQ ID NO: 1733173
uuucccagccagcugauua

SEQ ID NO: 1733175 - RNA, 19 nt, Artificial Sequence
  Description of Artificial Sequence: Synthetic oligonucleotide
  Sense strand starting at position 2933 of SEQ ID NO: 1562246
agcuaaucagcuuaacaag

SEQ ID NO: 1733176 - RNA, 19 nt, Artificial Sequence
  Description of Artificial Sequence: Synthetic oligonucleotide
  Antisense strand to SEQ ID NO: 1733175
cuuguuaagcugauuagcu

SEQ ID NO: 1733177 - RNA, 19 nt, Artificial Sequence
  Description of Artificial Sequence: Synthetic oligonucleotide
  Sense strand starting at position 2982 of SEQ ID NO: 1562246
cugagauacugcuauggcu

SEQ ID NO: 1733178 - RNA, 19 nt, Artificial Sequence
  Description of Artificial Sequence: Synthetic oligonucleotide
  Antisense strand to SEQ ID NO: 1733177
agccauagcaguaucucag

SEQ ID NO: 1733179 - RNA, 19 nt, Artificial Sequence
  Description of Artificial Sequence: Synthetic oligonucleotide
  Sense strand starting at position 2984 of SEQ ID NO: 1562246
gagauacugcuauggcuaa

SEQ ID NO: 1733180 - RNA, 19 nt, Artificial Sequence
  Description of Artificial Sequence: Synthetic oligonucleotide
  Antisense strand to SEQ ID NO: 1733179
uuagccauagcaguaucuc

SEQ ID NO: 1733181 - RNA, 19 nt, Artificial Sequence
  Description of Artificial Sequence: Synthetic oligonucleotide
  Sense strand starting at position 2997 of SEQ ID NO: 1562246
ggcuaacucugaccugaaa

SEQ ID NO: 1733182 - RNA, 19 nt, Artificial Sequence
  Description of Artificial Sequence: Synthetic oligonucleotide
  Antisense strand to SEQ ID NO: 1733181
uuucaggucagaguuagcc

SEQ ID NO: 1733183 - RNA, 19 nt, Artificial Sequence
  Description of Artificial Sequence: Synthetic oligonucleotide
  Sense strand starting at position 3039 of SEQ ID NO: 1562246
ccuaaauaagaagguugua

SEQ ID NO: 1733184 - RNA, 19 nt, Artificial Sequence
  Description of Artificial Sequence: Synthetic oligonucleotide
  Antisense strand to SEQ ID NO: 1733183
uacaaccuucuuauuuagg

SEQ ID NO: 1733185 - RNA, 19 nt, Artificial Sequence
  Description of Artificial Sequence: Synthetic oligonucleotide
  Sense strand starting at position 3080 of SEQ ID NO: 1562246
acacuaugcucucaaggaa

SEQ ID NO: 1733186 - RNA, 19 nt, Artificial Sequence
  Description of Artificial Sequence: Synthetic oligonucleotide
  Antisense strand to SEQ ID NO: 1733185
uuccuugagagcauagugu

SEQ ID NO: 1733187 - RNA, 19 nt, Artificial Sequence
  Description of Artificial Sequence: Synthetic oligonucleotide
  Sense strand starting at position 3083 of SEQ ID NO: 1562246
cuaugcucucaaggaauau

SEQ ID NO: 1733188 - RNA, 19 nt, Artificial Sequence
  Description of Artificial Sequence: Synthetic oligonucleotide
  Antisense strand to SEQ ID NO: 1733187
auauuccuugagagcauag

SEQ ID NO: 1733189 - RNA, 19 nt, Artificial Sequence
  Description of Artificial Sequence: Synthetic oligonucleotide
  Sense strand starting at position 3092 of SEQ ID NO: 1562246
caaggaauaugauggaauc

SEQ ID NO: 1733190 - RNA, 19 nt, Artificial Sequence
  Description of Artificial Sequence: Synthetic oligonucleotide
  Antisense strand to SEQ ID NO: 1733189
gauuccaucauauuccuug

SEQ ID NO: 1733191 - RNA, 19 nt, Artificial Sequence
  Description of Artificial Sequence: Synthetic oligonucleotide
  Sense strand starting at position 3167 of SEQ ID NO: 1562246
gcgaccuuggcucacuaaa

SEQ ID NO: 1733192 - RNA, 19 nt, Artificial Sequence
  Description of Artificial Sequence: Synthetic oligonucleotide
  Antisense strand to SEQ ID NO: 1733191
uuuagugagccaaggucgc

SEQ ID NO: 1733193 - RNA, 19 nt, Artificial Sequence
  Description of Artificial Sequence: Synthetic oligonucleotide
  Sense strand starting at position 3578 of SEQ ID NO: 1562246
caggauugguguuaauucu

SEQ ID NO: 1733194 - RNA, 19 nt, Artificial Sequence
  Description of Artificial Sequence: Synthetic oligonucleotide
  Antisense strand to SEQ ID NO: 1733193
agaauuaacaccaauccug

SEQ ID NO: 1733195 - RNA, 19 nt, Artificial Sequence
  Description of Artificial Sequence: Synthetic oligonucleotide
  Sense strand starting at position 3751 of SEQ ID NO: 1562246
guacaauaacuguagugaa

SEQ ID NO: 1733196 - RNA, 19 nt, Artificial Sequence
  Description of Artificial Sequence: Synthetic oligonucleotide
  Antisense strand to SEQ ID NO: 1733195
uucacuacaguuauuguac

SEQ ID NO: 1733197 - RNA, 19 nt, Artificial Sequence
  Description of Artificial Sequence: Synthetic oligonucleotide
  Sense strand starting at position 3754 of SEQ ID NO: 1562246
caauaacuguagugaaagu

SEQ ID NO: 1733198 - RNA, 19 nt, Artificial Sequence
  Description of Artificial Sequence: Synthetic oligonucleotide
  Antisense strand to SEQ ID NO: 1733197
acuuucacuacaguuauug

SEQ ID NO: 1733199 - RNA, 19 nt, Artificial Sequence
  Description of Artificial Sequence: Synthetic oligonucleotide
  Sense strand starting at position 2273 of SEQ ID NO: 1562247
ggccucgcucucgaggauu

SEQ ID NO: 1733200 - RNA, 19 nt, Artificial Sequence
  Description of Artificial Sequence: Synthetic oligonucleotide
  Antisense strand to SEQ ID NO: 1733199
aauccucgagagcgaggcc

SEQ ID NO: 1733201 - RNA, 19 nt, Artificial Sequence
  Description of Artificial Sequence: Synthetic oligonucleotide
  Sense strand starting at position 2363 of SEQ ID NO: 1562247
gacggaguucggcaacauc

SEQ ID NO: 1733202 - RNA, 19 nt, Artificial Sequence
  Description of Artificial Sequence: Synthetic oligonucleotide
  Antisense strand to SEQ ID NO: 1733201
gauguugccgaacuccguc

SEQ ID NO: 1733203 - RNA, 19 nt, Artificial Sequence
  Description of Artificial Sequence: Synthetic oligonucleotide
  Sense strand starting at position 2676 of SEQ ID NO: 1562247
aaagacuuucgucguauuu

SEQ ID NO: 1733204 - RNA, 19 nt, Artificial Sequence
  Description of Artificial Sequence: Synthetic oligonucleotide
  Antisense strand to SEQ ID NO: 1733203
aaauacgacgaaagucuuu

SEQ ID NO: 1733205 - RNA, 19 nt, Artificial Sequence
  Description of Artificial Sequence: Synthetic oligonucleotide
  Sense strand starting at position 2685 of SEQ ID NO: 1562247
cgucguauuuaggaugaag

SEQ ID NO: 1733206 - RNA, 19 nt, Artificial Sequence
  Description of Artificial Sequence: Synthetic oligonucleotide
  Antisense strand to SEQ ID NO: 1733205
cuucauccuaaauacgacg

SEQ ID NO: 1733207 - RNA, 19 nt, Artificial Sequence
  Description of Artificial Sequence: Synthetic oligonucleotide
  Sense strand starting at position 2703 of SEQ ID NO: 1562247
gugugagugcugcuuaagu

SEQ ID NO: 1733208 - RNA, 19 nt, Artificial Sequence
  Description of Artificial Sequence: Synthetic oligonucleotide
  Antisense strand to SEQ ID NO: 1733207
acuuaagcagcacucacac

SEQ ID NO: 1733209 - RNA, 19 nt, Artificial Sequence
  Description of Artificial Sequence: Synthetic oligonucleotide
  Sense strand starting at position 2705 of SEQ ID NO: 1562247
gugagugcugcuuaaguuc

SEQ ID NO: 1733210 - RNA, 19 nt, Artificial Sequence
  Description of Artificial Sequence: Synthetic oligonucleotide
  Antisense strand to SEQ ID NO: 1733209
gaacuuaagcagcacucac

SEQ ID NO: 1733211 - RNA, 19 nt, Artificial Sequence
  Description of Artificial Sequence: Synthetic oligonucleotide
  Sense strand starting at position 2721 of SEQ ID NO: 1562247
uucccaguacuguguuaag

SEQ ID NO: 1733212 - RNA, 19 nt, Artificial Sequence
  Description of Artificial Sequence: Synthetic oligonucleotide
  Antisense strand to SEQ ID NO: 1733211
cuuaacacaguacugggaa

SEQ ID NO: 1733213 - RNA, 19 nt, Artificial Sequence
  Description of Artificial Sequence: Synthetic oligonucleotide
  Sense strand starting at position 2780 of SEQ ID NO: 1562247
ugcuguaauuaugcccauu

SEQ ID NO: 1733214 - RNA, 19 nt, Artificial Sequence
  Description of Artificial Sequence: Synthetic oligonucleotide
  Antisense strand to SEQ ID NO: 1733213
aaugggcauaauuacagca

SEQ ID NO: 1733215 - RNA, 19 nt, Artificial Sequence
  Description of Artificial Sequence: Synthetic oligonucleotide
  Sense strand starting at position 2822 of SEQ ID NO: 1562247
aagucacuuggcggaguua

SEQ ID NO: 1733216 - RNA, 19 nt, Artificial Sequence
  Description of Artificial Sequence: Synthetic oligonucleotide
  Antisense strand to SEQ ID NO: 1733215
uaacuccgccaagugacuu

SEQ ID NO: 1733217 - RNA, 19 nt, Artificial Sequence
  Description of Artificial Sequence: Synthetic oligonucleotide
  Sense strand starting at position 2823 of SEQ ID NO: 1562247
agucacuuggcggaguuaa

SEQ ID NO: 1733218 - RNA, 19 nt, Artificial Sequence
  Description of Artificial Sequence: Synthetic oligonucleotide
  Antisense strand to SEQ ID NO: 1733217
uuaacuccgccaagugacu

SEQ ID NO: 1733219 - RNA, 19 nt, Artificial Sequence
  Description of Artificial Sequence: Synthetic oligonucleotide
  Sense strand starting at position 2853 of SEQ ID NO: 1562247
acguauagguagcuuauau

SEQ ID NO: 1733220 - RNA, 19 nt, Artificial Sequence
  Description of Artificial Sequence: Synthetic oligonucleotide
  Antisense strand to SEQ ID NO: 1733219
auauaagcuaccuauacgu

SEQ ID NO: 1733221 - RNA, 19 nt, Artificial Sequence
  Description of Artificial Sequence: Synthetic oligonucleotide
  Sense strand starting at position 3215 of SEQ ID NO: 1562247
gaucaagaacugugcauca

SEQ ID NO: 1733222 - RNA, 19 nt, Artificial Sequence
  Description of Artificial Sequence: Synthetic oligonucleotide
  Antisense strand to SEQ ID NO: 1733221
ugaugcacaguucuugauc

SEQ ID NO: 1733223 - RNA, 19 nt, Artificial Sequence
  Description of Artificial Sequence: Synthetic oligonucleotide
  Sense strand starting at position 3217 of SEQ ID NO: 1562247
ucaagaacugugcaucaga

SEQ ID NO: 1733224 - RNA, 19 nt, Artificial Sequence
  Description of Artificial Sequence: Synthetic oligonucleotide
  Antisense strand to SEQ ID NO: 1733223
ucugaugcacaguucuuga

SEQ ID NO: 1733225 - RNA, 19 nt, Artificial Sequence
  Description of Artificial Sequence: Synthetic oligonucleotide
  Sense strand starting at position 3227 of SEQ ID NO: 1562247
ugcaucagauccuaggaaa

SEQ ID NO: 1733226 - RNA, 19 nt, Artificial Sequence
  Description of Artificial Sequence: Synthetic oligonucleotide
  Antisense strand to SEQ ID NO: 1733225
uuuccuaggaucugaugca

SEQ ID NO: 1733227 - RNA, 19 nt, Artificial Sequence
  Description of Artificial Sequence: Synthetic oligonucleotide
  Sense strand starting at position 3239 of SEQ ID NO: 1562247
uaggaaaccuuguuaacag

SEQ ID NO: 1733228 - RNA, 19 nt, Artificial Sequence
  Description of Artificial Sequence: Synthetic oligonucleotide
  Antisense strand to SEQ ID NO: 1733227
cuguuaacaagguuuccua

SEQ ID NO: 1733229 - RNA, 19 nt, Artificial Sequence
  Description of Artificial Sequence: Synthetic oligonucleotide
  Sense strand starting at position 3381 of SEQ ID NO: 1562247
cacgcauucccgugaucau

SEQ ID NO: 1733230 - RNA, 19 nt, Artificial Sequence
  Description of Artificial Sequence: Synthetic oligonucleotide
  Antisense strand to SEQ ID NO: 1733229
augaucacgggaaugcgug

SEQ ID NO: 1733231 - RNA, 19 nt, Artificial Sequence
  Description of Artificial Sequence: Synthetic oligonucleotide
  Sense strand starting at position 3382 of SEQ ID NO: 1562247
acgcauucccgugaucaua

SEQ ID NO: 1733232 - RNA, 19 nt, Artificial Sequence
  Description of Artificial Sequence: Synthetic oligonucleotide
  Antisense strand to SEQ ID NO: 1733231
uaugaucacgggaaugcgu

SEQ ID NO: 1733233 - RNA, 19 nt, Artificial Sequence
  Description of Artificial Sequence: Synthetic oligonucleotide
  Sense strand starting at position 3384 of SEQ ID NO: 1562247
gcauucccgugaucauacu

SEQ ID NO: 1733234 - RNA, 19 nt, Artificial Sequence
  Description of Artificial Sequence: Synthetic oligonucleotide
  Antisense strand to SEQ ID NO: 1733233
aguaugaucacgggaaugc

SEQ ID NO: 1733235 - RNA, 19 nt, Artificial Sequence
  Description of Artificial Sequence: Synthetic oligonucleotide
  Sense strand starting at position 3390 of SEQ ID NO: 1562247
ccgugaucauacucggaac

SEQ ID NO: 1733236 - RNA, 19 nt, Artificial Sequence
  Description of Artificial Sequence: Synthetic oligonucleotide
  Antisense strand to SEQ ID NO: 1733235
guuccgaguaugaucacgg

SEQ ID NO: 1733237 - RNA, 19 nt, Artificial Sequence
  Description of Artificial Sequence: Synthetic oligonucleotide
  Sense strand starting at position 3391 of SEQ ID NO: 1562247
cgugaucauacucggaacu

SEQ ID NO: 1733238 - RNA, 19 nt, Artificial Sequence
  Description of Artificial Sequence: Synthetic oligonucleotide
  Antisense strand to SEQ ID NO: 1733237
aguuccgaguaugaucacg

SEQ ID NO: 1733239 - RNA, 19 nt, Artificial Sequence
  Description of Artificial Sequence: Synthetic oligonucleotide
  Sense strand starting at position 3392 of SEQ ID NO: 1562247
gugaucauacucggaacuu

SEQ ID NO: 1733240 - RNA, 19 nt, Artificial Sequence
  Description of Artificial Sequence: Synthetic oligonucleotide
  Antisense strand to SEQ ID NO: 1733239
aaguuccgaguaugaucac

SEQ ID NO: 1733241 - RNA, 19 nt, Artificial Sequence
  Description of Artificial Sequence: Synthetic oligonucleotide
  Sense strand starting at position 3454 of SEQ ID NO: 1562247
cuguuauucuuucuacuug

SEQ ID NO: 1733242 - RNA, 19 nt, Artificial Sequence
  Description of Artificial Sequence: Synthetic oligonucleotide
  Antisense strand to SEQ ID NO: 1733241
caaguagaaagaauaacag

SEQ ID NO: 1733243 - RNA, 19 nt, Artificial Sequence
  Description of Artificial Sequence: Synthetic oligonucleotide
  Sense strand starting at position 3463 of SEQ ID NO: 1562247
uuucuacuugccuggucaa

SEQ ID NO: 1733244 - RNA, 19 nt, Artificial Sequence
  Description of Artificial Sequence: Synthetic oligonucleotide
  Antisense strand to SEQ ID NO: 1733243
uugaccaggcaaguagaaa

SEQ ID NO: 1733245 - RNA, 19 nt, Artificial Sequence
  Description of Artificial Sequence: Synthetic oligonucleotide
  Sense strand starting at position 3466 of SEQ ID NO: 1562247
cuacuugccuggucaaguu

SEQ ID NO: 1733246 - RNA, 19 nt, Artificial Sequence
  Description of Artificial Sequence: Synthetic oligonucleotide
  Antisense strand to SEQ ID NO: 1733245
aacuugaccaggcaaguag

SEQ ID NO: 1733247 - RNA, 19 nt, Artificial Sequence
  Description of Artificial Sequence: Synthetic oligonucleotide
  Sense strand starting at position 3588 of SEQ ID NO: 1562247
aucaaauaucugcaagggu

SEQ ID NO: 1733248 - RNA, 19 nt, Artificial Sequence
  Description of Artificial Sequence: Synthetic oligonucleotide
  Antisense strand to SEQ ID NO: 1733247
acccuugcagauauuugau

SEQ ID NO: 1733249 - RNA, 19 nt, Artificial Sequence
  Description of Artificial Sequence: Synthetic oligonucleotide
  Sense strand starting at position 3614 of SEQ ID NO: 1562247
gugccuuaaguagaagaua

SEQ ID NO: 1733250 - RNA, 19 nt, Artificial Sequence
  Description of Artificial Sequence: Synthetic oligonucleotide
  Antisense strand to SEQ ID NO: 1733249
uaucuucuacuuaaggcac

SEQ ID NO: 1733251 - RNA, 19 nt, Artificial Sequence
  Description of Artificial Sequence: Synthetic oligonucleotide
  Sense strand starting at position 3652 of SEQ ID NO: 1562247
cgaauauucuaucugaagg

SEQ ID NO: 1733252 - RNA, 19 nt, Artificial Sequence
  Description of Artificial Sequence: Synthetic oligonucleotide
  Antisense strand to SEQ ID NO: 1733251
ccuucagauagaauauucg

SEQ ID NO: 1733253 - RNA, 19 nt, Artificial Sequence
  Description of Artificial Sequence: Synthetic oligonucleotide
  Sense strand starting at position 3681 of SEQ ID NO: 1562247
agucaacuguagcugaaua

SEQ ID NO: 1733254 - RNA, 19 nt, Artificial Sequence
  Description of Artificial Sequence: Synthetic oligonucleotide
  Antisense strand to SEQ ID NO: 1733253
uauucagcuacaguugacu

SEQ ID NO: 1733255 - RNA, 19 nt, Artificial Sequence
  Description of Artificial Sequence: Synthetic oligonucleotide
  Sense strand starting at position 3683 of SEQ ID NO: 1562247
ucaacuguagcugaauauu

SEQ ID NO: 1733256 - RNA, 19 nt, Artificial Sequence
  Description of Artificial Sequence: Synthetic oligonucleotide
  Antisense strand to SEQ ID NO: 1733255
aauauucagcuacaguuga

SEQ ID NO: 1733257 - RNA, 19 nt, Artificial Sequence
  Description of Artificial Sequence: Synthetic oligonucleotide
  Sense strand starting at position 3692 of SEQ ID NO: 1562247
gcugaauauuccucuccag

SEQ ID NO: 1733258 - RNA, 19 nt, Artificial Sequence
  Description of Artificial Sequence: Synthetic oligonucleotide
  Antisense strand to SEQ ID NO: 1733257
cuggagaggaauauucagc

SEQ ID NO: 1733259 - RNA, 19 nt, Artificial Sequence
  Description of Artificial Sequence: Synthetic oligonucleotide
  Sense strand starting at position 3782 of SEQ ID NO: 1562247
gggaaacauucuucucucu

SEQ ID NO: 1733260 - RNA, 19 nt, Artificial Sequence
  Description of Artificial Sequence: Synthetic oligonucleotide
  Antisense strand to SEQ ID NO: 1733259
agagagaagaauguuuccc

SEQ ID NO: 1733261 - RNA, 19 nt, Artificial Sequence
  Description of Artificial Sequence: Synthetic oligonucleotide
  Sense strand starting at position 3800 of SEQ ID NO: 1562247
ucuuucgucuucuuuaaga

SEQ ID NO: 1733262 - RNA, 19 nt, Artificial Sequence
  Description of Artificial Sequence: Synthetic oligonucleotide
  Antisense strand to SEQ ID NO: 1733261
ucuuaaagaagacgaaaga

SEQ ID NO: 1733263 - RNA, 19 nt, Artificial Sequence
  Description of Artificial Sequence: Synthetic oligonucleotide
  Sense strand starting at position 3802 of SEQ ID NO: 1562247
uuucgucuucuuuaagaug

SEQ ID NO: 1733264 - RNA, 19 nt, Artificial Sequence
  Description of Artificial Sequence: Synthetic oligonucleotide
  Antisense strand to SEQ ID NO: 1733263
caucuuaaagaagacgaaa

SEQ ID NO: 1733265 - RNA, 19 nt, Artificial Sequence
  Description of Artificial Sequence: Synthetic oligonucleotide
  Sense strand starting at position 3864 of SEQ ID NO: 1562247
ccuacuaaguuccaggaaa

SEQ ID NO: 1733266 - RNA, 19 nt, Artificial Sequence
  Description of Artificial Sequence: Synthetic oligonucleotide
  Antisense strand to SEQ ID NO: 1733265
uuuccuggaacuuaguagg

SEQ ID NO: 1733267 - RNA, 19 nt, Artificial Sequence
  Description of Artificial Sequence: Synthetic oligonucleotide
  Sense strand starting at position 3875 of SEQ ID NO: 1562247
ccaggaaacuaugagaucu

SEQ ID NO: 1733268 - RNA, 19 nt, Artificial Sequence
  Description of Artificial Sequence: Synthetic oligonucleotide
  Antisense strand to SEQ ID NO: 1733267
agaucucauaguuuccugg

SEQ ID NO: 1733269 - RNA, 19 nt, Artificial Sequence
  Description of Artificial Sequence: Synthetic oligonucleotide
  Sense strand starting at position 3877 of SEQ ID NO: 1562247
aggaaacuaugagaucuua

SEQ ID NO: 1733270 - RNA, 19 nt, Artificial Sequence
  Description of Artificial Sequence: Synthetic oligonucleotide
  Antisense strand to SEQ ID NO: 1733269
uaagaucucauaguuuccu

SEQ ID NO: 1733271 - RNA, 19 nt, Artificial Sequence
  Description of Artificial Sequence: Synthetic oligonucleotide
  Sense strand starting at position 3885 of SEQ ID NO: 1562247
augagaucuuaauuggcgu

SEQ ID NO: 1733272 - RNA, 19 nt, Artificial Sequence
  Description of Artificial Sequence: Synthetic oligonucleotide
  Antisense strand to SEQ ID NO: 1733271
acgccaauuaagaucucau

SEQ ID NO: 1733273 - RNA, 19 nt, Artificial Sequence
  Description of Artificial Sequence: Synthetic oligonucleotide
  Sense strand starting at position 3886 of SEQ ID NO: 1562247
ugagaucuuaauuggcguu

SEQ ID NO: 1733274 - RNA, 19 nt, Artificial Sequence
  Description of Artificial Sequence: Synthetic oligonucleotide
  Antisense strand to SEQ ID NO: 1733273
aacgccaauuaagaucuca

SEQ ID NO: 1733275 - RNA, 19 nt, Artificial Sequence
  Description of Artificial Sequence: Synthetic oligonucleotide
  Sense strand starting at position 3891 of SEQ ID NO: 1562247
ucuuaauuggcguugcacu

SEQ ID NO: 1733276 - RNA, 19 nt, Artificial Sequence
  Description of Artificial Sequence: Synthetic oligonucleotide
  Antisense strand to SEQ ID NO: 1733275
agugcaacgccaauuaaga

SEQ ID NO: 1733277 - RNA, 19 nt, Artificial Sequence
  Description of Artificial Sequence: Synthetic oligonucleotide
  Sense strand starting at position 3938 of SEQ ID NO: 1562247
cacggagucuuuccaucaa

SEQ ID NO: 1733278 - RNA, 19 nt, Artificial Sequence
  Description of Artificial Sequence: Synthetic oligonucleotide
  Antisense strand to SEQ ID NO: 1733277
uugauggaaagacuccgug

SEQ ID NO: 1733279 - RNA, 19 nt, Artificial Sequence
  Description of Artificial Sequence: Synthetic oligonucleotide
  Sense strand starting at position 80 of SEQ ID NO: 1562248
agaaauacaguuugguuga

SEQ ID NO: 1733280 - RNA, 19 nt, Artificial Sequence
  Description of Artificial Sequence: Synthetic oligonucleotide
  Antisense strand to SEQ ID NO: 1733279
ucaaccaaacuguauuucu

SEQ ID NO: 1733281 - RNA, 19 nt, Artificial Sequence
  Description of Artificial Sequence: Synthetic oligonucleotide
  Sense strand starting at position 83 of SEQ ID NO: 1562248
aauacaguuugguugacuu

SEQ ID NO: 1733282 - RNA, 19 nt, Artificial Sequence
  Description of Artificial Sequence: Synthetic oligonucleotide
  Antisense strand to SEQ ID NO: 1733281
aagucaaccaaacuguauu

SEQ ID NO: 1733283 - RNA, 19 nt, Artificial Sequence
  Description of Artificial Sequence: Synthetic oligonucleotide
  Sense strand starting at position 91 of SEQ ID NO: 1562248
uugguugacuugcuaagga

SEQ ID NO: 1733284 - RNA, 19 nt, Artificial Sequence
  Description of Artificial Sequence: Synthetic oligonucleotide
  Antisense strand to SEQ ID NO: 1733283
uccuuagcaagucaaccaa

SEQ ID NO: 1733285 - RNA, 19 nt, Artificial Sequence
  Description of Artificial Sequence: Synthetic oligonucleotide
  Sense strand starting at position 115 of SEQ ID NO: 1562248
ggcugagcacugugauaag

SEQ ID NO: 1733286 - RNA, 19 nt, Artificial Sequence
  Description of Artificial Sequence: Synthetic oligonucleotide
  Antisense strand to SEQ ID NO: 1733285
cuuaucacagugcucagcc

SEQ ID NO: 1733287 - RNA, 19 nt, Artificial Sequence
  Description of Artificial Sequence: Synthetic oligonucleotide
  Sense strand starting at position 133 of SEQ ID NO: 1562248
gccaucuugcagggauaca

SEQ ID NO: 1733288 - RNA, 19 nt, Artificial Sequence
  Description of Artificial Sequence: Synthetic oligonucleotide
  Antisense strand to SEQ ID NO: 1733287
uguaucccugcaagauggc

SEQ ID NO: 1733289 - RNA, 19 nt, Artificial Sequence
  Description of Artificial Sequence: Synthetic oligonucleotide
  Sense strand starting at position 271 of SEQ ID NO: 1562248
gcugacgauuccuuaauga

SEQ ID NO: 1733290 - RNA, 19 nt, Artificial Sequence
  Description of Artificial Sequence: Synthetic oligonucleotide
  Antisense strand to SEQ ID NO: 1733289
ucauuaaggaaucgucagc

SEQ ID NO: 1733291 - RNA, 19 nt, Artificial Sequence
  Description of Artificial Sequence: Synthetic oligonucleotide
  Sense strand starting at position 330 of SEQ ID NO: 1562248
cagauaaugucacugguau

SEQ ID NO: 1733292 - RNA, 19 nt, Artificial Sequence
  Description of Artificial Sequence: Synthetic oligonucleotide
  Antisense strand to SEQ ID NO: 1733291
auaccagugacauuaucug

SEQ ID NO: 1733293 - RNA, 19 nt, Artificial Sequence
  Description of Artificial Sequence: Synthetic oligonucleotide
  Sense strand starting at position 331 of SEQ ID NO: 1562248
agauaaugucacugguaug

SEQ ID NO: 1733294 - RNA, 19 nt, Artificial Sequence
  Description of Artificial Sequence: Synthetic oligonucleotide
  Antisense strand to SEQ ID NO: 1733293
cauaccagugacauuaucu

SEQ ID NO: 1733295 - RNA, 19 nt, Artificial Sequence
  Description of Artificial Sequence: Synthetic oligonucleotide
  Sense strand starting at position 336 of SEQ ID NO: 1562248
augucacugguauguggaa

SEQ ID NO: 1733296 - RNA, 19 nt, Artificial Sequence
  Description of Artificial Sequence: Synthetic oligonucleotide
  Antisense strand to SEQ ID NO: 1733295
uuccacauaccagugacau

SEQ ID NO: 1733297 - RNA, 19 nt, Artificial Sequence
  Description of Artificial Sequence: Synthetic oligonucleotide
  Sense strand starting at position 337 of SEQ ID NO: 1562248
ugucacugguauguggaaa

SEQ ID NO: 1733298 - RNA, 19 nt, Artificial Sequence
  Description of Artificial Sequence: Synthetic oligonucleotide
  Antisense strand to SEQ ID NO: 1733297
uuuccacauaccagugaca

SEQ ID NO: 1733299 - RNA, 19 nt, Artificial Sequence
  Description of Artificial Sequence: Synthetic oligonucleotide
  Sense strand starting at position 369 of SEQ ID NO: 1562248
gacauagaccuucguuaga

SEQ ID NO: 1733300 - RNA, 19 nt, Artificial Sequence
  Description of Artificial Sequence: Synthetic oligonucleotide
  Antisense strand to SEQ ID NO: 1733299
ucuaacgaaggucuauguc

SEQ ID NO: 1733301 - RNA, 19 nt, Artificial Sequence
  Description of Artificial Sequence: Synthetic oligonucleotide
  Sense strand starting at position 371 of SEQ ID NO: 1562248
cauagaccuucguuagaau

SEQ ID NO: 1733302 - RNA, 19 nt, Artificial Sequence
  Description of Artificial Sequence: Synthetic oligonucleotide
  Antisense strand to SEQ ID NO: 1733301
auucuaacgaaggucuaug

SEQ ID NO: 1733303 - RNA, 19 nt, Artificial Sequence
  Description of Artificial Sequence: Synthetic oligonucleotide
  Sense strand starting at position 372 of SEQ ID NO: 1562248
auagaccuucguuagaauc

SEQ ID NO: 1733304 - RNA, 19 nt, Artificial Sequence
  Description of Artificial Sequence: Synthetic oligonucleotide
  Antisense strand to SEQ ID NO: 1733303
gauucuaacgaaggucuau

SEQ ID NO: 1733305 - RNA, 19 nt, Artificial Sequence
  Description of Artificial Sequence: Synthetic oligonucleotide
  Sense strand starting at position 393 of SEQ ID NO: 1562248
gacacugucgcuuaacaac

SEQ ID NO: 1733306 - RNA, 19 nt, Artificial Sequence
  Description of Artificial Sequence: Synthetic oligonucleotide
  Antisense strand to SEQ ID NO: 1733305
guuguuaagcgacaguguc

SEQ ID NO: 1733307 - RNA, 19 nt, Artificial Sequence
  Description of Artificial Sequence: Synthetic oligonucleotide
  Sense strand starting at position 402 of SEQ ID NO: 1562248
gcuuaacaacagugacuuu

SEQ ID NO: 1733308 - RNA, 19 nt, Artificial Sequence
  Description of Artificial Sequence: Synthetic oligonucleotide
  Antisense strand to SEQ ID NO: 1733307
aaagucacuguuguuaagc

SEQ ID NO: 1733309 - RNA, 19 nt, Artificial Sequence
  Description of Artificial Sequence: Synthetic oligonucleotide
  Sense strand starting at position 710 of SEQ ID NO: 1562248
acaguaaugcaaggaauac

SEQ ID NO: 1733310 - RNA, 19 nt, Artificial Sequence
  Description of Artificial Sequence: Synthetic oligonucleotide
  Antisense strand to SEQ ID NO: 1733309
guauuccuugcauuacugu

SEQ ID NO: 1733311 - RNA, 19 nt, Artificial Sequence
  Description of Artificial Sequence: Synthetic oligonucleotide
  Sense strand starting at position 722 of SEQ ID NO: 1562248
ggaauacaccgccaaguuu

SEQ ID NO: 1733312 - RNA, 19 nt, Artificial Sequence
  Description of Artificial Sequence: Synthetic oligonucleotide
  Antisense strand to SEQ ID NO: 1733311
aaacuuggcgguguauucc

SEQ ID NO: 1733313 - RNA, 19 nt, Artificial Sequence
  Description of Artificial Sequence: Synthetic oligonucleotide
  Sense strand starting at position 825 of SEQ ID NO: 1562248
guagauggguucucaaacu

SEQ ID NO: 1733314 - RNA, 19 nt, Artificial Sequence
  Description of Artificial Sequence: Synthetic oligonucleotide
  Antisense strand to SEQ ID NO: 1733313
aguuugagaacccaucuac

SEQ ID NO: 1733315 - RNA, 19 nt, Artificial Sequence
  Description of Artificial Sequence: Synthetic oligonucleotide
  Sense strand starting at position 1001 of SEQ ID NO: 1562248
aacaaugcaccgggagaaa

SEQ ID NO: 1733316 - RNA, 19 nt, Artificial Sequence
  Description of Artificial Sequence: Synthetic oligonucleotide
  Antisense strand to SEQ ID NO: 1733315
uuucucccggugcauuguu

SEQ ID NO: 1733317 - RNA, 19 nt, Artificial Sequence
  Description of Artificial Sequence: Synthetic oligonucleotide
  Sense strand starting at position 1043 of SEQ ID NO: 1562248
guccuccucgguuaaauaa

SEQ ID NO: 1733318 - RNA, 19 nt, Artificial Sequence
  Description of Artificial Sequence: Synthetic oligonucleotide
  Antisense strand to SEQ ID NO: 1733317
uuauuuaaccgaggaggac

SEQ ID NO: 1733319 - RNA, 19 nt, Artificial Sequence
  Description of Artificial Sequence: Synthetic oligonucleotide
  Sense strand starting at position 1242 of SEQ ID NO: 1562248
ccguuuacccuagauuccu

SEQ ID NO: 1733320 - RNA, 19 nt, Artificial Sequence
  Description of Artificial Sequence: Synthetic oligonucleotide
  Antisense strand to SEQ ID NO: 1733319
aggaaucuaggguaaacgg

SEQ ID NO: 1733321 - RNA, 19 nt, Artificial Sequence
  Description of Artificial Sequence: Synthetic oligonucleotide
  Sense strand starting at position 2350 of SEQ ID NO: 1562248
gccugaaaggcuuguuaga

SEQ ID NO: 1733322 - RNA, 19 nt, Artificial Sequence
  Description of Artificial Sequence: Synthetic oligonucleotide
  Antisense strand to SEQ ID NO: 1733321
ucuaacaagccuuucaggc

SEQ ID NO: 1733323 - RNA, 19 nt, Artificial Sequence
  Description of Artificial Sequence: Synthetic oligonucleotide
  Sense strand starting at position 2352 of SEQ ID NO: 1562248
cugaaaggcuuguuagaac

SEQ ID NO: 1733324 - RNA, 19 nt, Artificial Sequence
  Description of Artificial Sequence: Synthetic oligonucleotide
  Antisense strand to SEQ ID NO: 1733323
guucuaacaagccuuucag

SEQ ID NO: 1733325 - RNA, 19 nt, Artificial Sequence
  Description of Artificial Sequence: Synthetic oligonucleotide
  Sense strand starting at position 2421 of SEQ ID NO: 1562248
aggcgugagaacgagcauu

SEQ ID NO: 1733326 - RNA, 19 nt, Artificial Sequence
  Description of Artificial Sequence: Synthetic oligonucleotide
  Antisense strand to SEQ ID NO: 1733325
aaugcucguucucacgccu

SEQ ID NO: 1733327 - RNA, 19 nt, Artificial Sequence
  Description of Artificial Sequence: Synthetic oligonucleotide
  Sense strand starting at position 2675 of SEQ ID NO: 1562248
ccaugcuuggccuaaucua

SEQ ID NO: 1733328 - RNA, 19 nt, Artificial Sequence
  Description of Artificial Sequence: Synthetic oligonucleotide
  Antisense strand to SEQ ID NO: 1733327
uagauuaggccaagcaugg

SEQ ID NO: 1733329 - RNA, 19 nt, Artificial Sequence
  Description of Artificial Sequence: Synthetic oligonucleotide
  Sense strand starting at position 3152 of SEQ ID NO: 1562248
cauauuauguaucucgagu

SEQ ID NO: 1733330 - RNA, 19 nt, Artificial Sequence
  Description of Artificial Sequence: Synthetic oligonucleotide
  Antisense strand to SEQ ID NO: 1733329
acucgagauacauaauaug

SEQ ID NO: 1733331 - RNA, 19 nt, Artificial Sequence
  Description of Artificial Sequence: Synthetic oligonucleotide
  Sense strand starting at position 3158 of SEQ ID NO: 1562248
auguaucucgaguauaucu

SEQ ID NO: 1733332 - RNA, 19 nt, Artificial Sequence
  Description of Artificial Sequence: Synthetic oligonucleotide
  Antisense strand to SEQ ID NO: 1733331
agauauacucgagauacau

SEQ ID NO: 1733333 - RNA, 19 nt, Artificial Sequence
  Description of Artificial Sequence: Synthetic oligonucleotide
  Sense strand starting at position 3165 of SEQ ID NO: 1562248
ucgaguauaucugcuuaga

SEQ ID NO: 1733334 - RNA, 19 nt, Artificial Sequence
  Description of Artificial Sequence: Synthetic oligonucleotide
  Antisense strand to SEQ ID NO: 1733333
ucuaagcagauauacucga

SEQ ID NO: 1733335 - RNA, 19 nt, Artificial Sequence
  Description of Artificial Sequence: Synthetic oligonucleotide
  Sense strand starting at position 3167 of SEQ ID NO: 1562248
gaguauaucugcuuagaua

SEQ ID NO: 1733336 - RNA, 19 nt, Artificial Sequence
  Description of Artificial Sequence: Synthetic oligonucleotide
  Antisense strand to SEQ ID NO: 1733335
uaucuaagcagauauacuc

SEQ ID NO: 1733337 - RNA, 19 nt, Artificial Sequence
  Description of Artificial Sequence: Synthetic oligonucleotide
  Sense strand starting at position 3168 of SEQ ID NO: 1562248
aguauaucugcuuagauau

SEQ ID NO: 1733338 - RNA, 19 nt, Artificial Sequence
  Description of Artificial Sequence: Synthetic oligonucleotide
  Antisense strand to SEQ ID NO: 1733337
auaucuaagcagauauacu

SEQ ID NO: 1733339 - RNA, 19 nt, Artificial Sequence
  Description of Artificial Sequence: Synthetic oligonucleotide
  Sense strand starting at position 3278 of SEQ ID NO: 1562248
gauguaguccagugacuug

SEQ ID NO: 1733340 - RNA, 19 nt, Artificial Sequence
  Description of Artificial Sequence: Synthetic oligonucleotide
  Antisense strand to SEQ ID NO: 1733339
caagucacuggacuacauc

SEQ ID NO: 1733341 - RNA, 19 nt, Artificial Sequence
  Description of Artificial Sequence: Synthetic oligonucleotide
  Sense strand starting at position 3312 of SEQ ID NO: 1562248
auaguaggcuuaguaaaua

SEQ ID NO: 1733342 - RNA, 19 nt, Artificial Sequence
  Description of Artificial Sequence: Synthetic oligonucleotide
  Antisense strand to SEQ ID NO: 1733341
uauuuacuaagccuacuau

SEQ ID NO: 1733343 - RNA, 19 nt, Artificial Sequence
  Description of Artificial Sequence: Synthetic oligonucleotide
  Sense strand starting at position 3324 of SEQ ID NO: 1562248
guaaauauggcuuguauaa

SEQ ID NO: 1733344 - RNA, 19 nt, Artificial Sequence
  Description of Artificial Sequence: Synthetic oligonucleotide
  Antisense strand to SEQ ID NO: 1733343
uuauacaagccauauuuac

SEQ ID NO: 1733345 - RNA, 19 nt, Artificial Sequence
  Description of Artificial Sequence: Synthetic oligonucleotide
  Sense strand starting at position 3335 of SEQ ID NO: 1562248
uuguauaaugaaugggauu

SEQ ID NO: 1733346 - RNA, 19 nt, Artificial Sequence
  Description of Artificial Sequence: Synthetic oligonucleotide
  Antisense strand to SEQ ID NO: 1733345
aaucccauucauuauacaa

SEQ ID NO: 1733347 - RNA, 19 nt, Artificial Sequence
  Description of Artificial Sequence: Synthetic oligonucleotide
  Sense strand starting at position 3403 of SEQ ID NO: 1562248
auucucaaguguuugugaa

SEQ ID NO: 1733348 - RNA, 19 nt, Artificial Sequence
  Description of Artificial Sequence: Synthetic oligonucleotide
  Antisense strand to SEQ ID NO: 1733347
uucacaaacacuugagaau

SEQ ID NO: 1733349 - RNA, 19 nt, Artificial Sequence
  Description of Artificial Sequence: Synthetic oligonucleotide
  Sense strand starting at position 3404 of SEQ ID NO: 1562248
uucucaaguguuugugaag

SEQ ID NO: 1733350 - RNA, 19 nt, Artificial Sequence
  Description of Artificial Sequence: Synthetic oligonucleotide
  Antisense strand to SEQ ID NO: 1733349
cuucacaaacacuugagaa

SEQ ID NO: 1733351 - RNA, 19 nt, Artificial Sequence
  Description of Artificial Sequence: Synthetic oligonucleotide
  Sense strand starting at position 3928 of SEQ ID NO: 1562248
uguaauaguggcuguagaa

SEQ ID NO: 1733352 - RNA, 19 nt, Artificial Sequence
  Description of Artificial Sequence: Synthetic oligonucleotide
  Antisense strand to SEQ ID NO: 1733351
uucuacagccacuauuaca

SEQ ID NO: 1733353 - RNA, 19 nt, Artificial Sequence
  Description of Artificial Sequence: Synthetic oligonucleotide
  Sense strand starting at position 3937 of SEQ ID NO: 1562248
ggcuguagaacuggucaua

SEQ ID NO: 1733354 - RNA, 19 nt, Artificial Sequence
  Description of Artificial Sequence: Synthetic oligonucleotide
  Antisense strand to SEQ ID NO: 1733353
uaugaccaguucuacagcc

SEQ ID NO: 1733355 - RNA, 19 nt, Artificial Sequence
  Description of Artificial Sequence: Synthetic oligonucleotide
  Sense strand starting at position 3940 of SEQ ID NO: 1562248
uguagaacuggucauagca

SEQ ID NO: 1733356 - RNA, 19 nt, Artificial Sequence
  Description of Artificial Sequence: Synthetic oligonucleotide
  Antisense strand to SEQ ID NO: 1733355
ugcuaugaccaguucuaca

SEQ ID NO: 1733357 - RNA, 19 nt, Artificial Sequence
  Description of Artificial Sequence: Synthetic oligonucleotide
  Sense strand starting at position 3959 of SEQ ID NO: 1562248
ggccuuuccgagcagguaa

SEQ ID NO: 1733358 - RNA, 19 nt, Artificial Sequence
  Description of Artificial Sequence: Synthetic oligonucleotide
  Antisense strand to SEQ ID NO: 1733357
uuaccugcucggaaaggcc

SEQ ID NO: 1733359 - RNA, 19 nt, Artificial Sequence
  Description of Artificial Sequence: Synthetic oligonucleotide
  Sense strand starting at position 251 of SEQ ID NO: 1562249
guuggcaucugacaacaaa

SEQ ID NO: 1733360 - RNA, 19 nt, Artificial Sequence
  Description of Artificial Sequence: Synthetic oligonucleotide
  Antisense strand to SEQ ID NO: 1733359
uuuguugucagaugccaac

SEQ ID NO: 1733361 - RNA, 19 nt, Artificial Sequence
  Description of Artificial Sequence: Synthetic oligonucleotide
  Sense strand starting at position 2054 of SEQ ID NO: 1562249
ggcugagcucacugugaac

SEQ ID NO: 1733362 - RNA, 19 nt, Artificial Sequence
  Description of Artificial Sequence: Synthetic oligonucleotide
  Antisense strand to SEQ ID NO: 1733361
guucacagugagcucagcc

SEQ ID NO: 1733363 - RNA, 19 nt, Artificial Sequence
  Description of Artificial Sequence: Synthetic oligonucleotide
  Sense strand starting at position 2105 of SEQ ID NO: 1562249
ggccggaaccgauguguau

SEQ ID NO: 1733364 - RNA, 19 nt, Artificial Sequence
  Description of Artificial Sequence: Synthetic oligonucleotide
  Antisense strand to SEQ ID NO: 1733363
auacacaucgguuccggcc

SEQ ID NO: 1733365 - RNA, 19 nt, Artificial Sequence
  Description of Artificial Sequence: Synthetic oligonucleotide
  Sense strand starting at position 2124 of SEQ ID NO: 1562249
gcggagaggucgcagucau

SEQ ID NO: 1733366 - RNA, 19 nt, Artificial Sequence
  Description of Artificial Sequence: Synthetic oligonucleotide
  Antisense strand to SEQ ID NO: 1733365
augacugcgaccucuccgc

SEQ ID NO: 1733367 - RNA, 19 nt, Artificial Sequence
  Description of Artificial Sequence: Synthetic oligonucleotide
  Sense strand starting at position 2125 of SEQ ID NO: 1562249
cggagaggucgcagucauu

SEQ ID NO: 1733368 - RNA, 19 nt, Artificial Sequence
  Description of Artificial Sequence: Synthetic oligonucleotide
  Antisense strand to SEQ ID NO: 1733367
aaugacugcgaccucuccg

SEQ ID NO: 1733369 - RNA, 19 nt, Artificial Sequence
  Description of Artificial Sequence: Synthetic oligonucleotide
  Sense strand starting at position 2135 of SEQ ID NO: 1562249
gcagucauugcugugagca

SEQ ID NO: 1733370 - RNA, 19 nt, Artificial Sequence
  Description of Artificial Sequence: Synthetic oligonucleotide
  Antisense strand to SEQ ID NO: 1733369
ugcucacagcaaugacugc

SEQ ID NO: 1733371 - RNA, 19 nt, Artificial Sequence
  Description of Artificial Sequence: Synthetic oligonucleotide
  Sense strand starting at position 2136 of SEQ ID NO: 1562249
cagucauugcugugagcag

SEQ ID NO: 1733372 - RNA, 19 nt, Artificial Sequence
  Description of Artificial Sequence: Synthetic oligonucleotide
  Antisense strand to SEQ ID NO: 1733371
cugcucacagcaaugacug

SEQ ID NO: 1733373 - RNA, 19 nt, Artificial Sequence
  Description of Artificial Sequence: Synthetic oligonucleotide
  Sense strand starting at position 2175 of SEQ ID NO: 1562249
gggagaaguuacagaggga

SEQ ID NO: 1733374 - RNA, 19 nt, Artificial Sequence
  Description of Artificial Sequence: Synthetic oligonucleotide
  Antisense strand to SEQ ID NO: 1733373
ucccucuguaacuucuccc

SEQ ID NO: 1733375 - RNA, 19 nt, Artificial Sequence
  Description of Artificial Sequence: Synthetic oligonucleotide
  Sense strand starting at position 2304 of SEQ ID NO: 1562249
ggugcuuucuggcugcaca

SEQ ID NO: 1733376 - RNA, 19 nt, Artificial Sequence
  Description of Artificial Sequence: Synthetic oligonucleotide
  Antisense strand to SEQ ID NO: 1733375
ugugcagccagaaagcacc

SEQ ID NO: 1733377 - RNA, 19 nt, Artificial Sequence
  Description of Artificial Sequence: Synthetic oligonucleotide
  Sense strand starting at position 2362 of SEQ ID NO: 1562249
ugcugucgggcuuguacaa

SEQ ID NO: 1733378 - RNA, 19 nt, Artificial Sequence
  Description of Artificial Sequence: Synthetic oligonucleotide
  Antisense strand to SEQ ID NO: 1733377
uuguacaagcccgacagca

SEQ ID NO: 1733379 - RNA, 19 nt, Artificial Sequence
  Description of Artificial Sequence: Synthetic oligonucleotide
  Sense strand starting at position 2590 of SEQ ID NO: 1562249
agcagaguguugcucuguu

SEQ ID NO: 1733380 - RNA, 19 nt, Artificial Sequence
  Description of Artificial Sequence: Synthetic oligonucleotide
  Antisense strand to SEQ ID NO: 1733379
aacagagcaacacucugcu

SEQ ID NO: 1733381 - RNA, 19 nt, Artificial Sequence
  Description of Artificial Sequence: Synthetic oligonucleotide
  Sense strand starting at position 2632 of SEQ ID NO: 1562249
agaccugaguaaggauauu

SEQ ID NO: 1733382 - RNA, 19 nt, Artificial Sequence
  Description of Artificial Sequence: Synthetic oligonucleotide
  Antisense strand to SEQ ID NO: 1733381
aauauccuuacucaggucu

SEQ ID NO: 1733383 - RNA, 19 nt, Artificial Sequence
  Description of Artificial Sequence: Synthetic oligonucleotide
  Sense strand starting at position 2641 of SEQ ID NO: 1562249
uaaggauauuuggaagcca

SEQ ID NO: 1733384 - RNA, 19 nt, Artificial Sequence
  Description of Artificial Sequence: Synthetic oligonucleotide
  Antisense strand to SEQ ID NO: 1733383
uggcuuccaaauauccuua

SEQ ID NO: 1733385 - RNA, 19 nt, Artificial Sequence
  Description of Artificial Sequence: Synthetic oligonucleotide
  Sense strand starting at position 2827 of SEQ ID NO: 1562249
ccuugaggaugccgugaua

SEQ ID NO: 1733386 - RNA, 19 nt, Artificial Sequence
  Description of Artificial Sequence: Synthetic oligonucleotide
  Antisense strand to SEQ ID NO: 1733385
uaucacggcauccucaagg

SEQ ID NO: 1733387 - RNA, 19 nt, Artificial Sequence
  Description of Artificial Sequence: Synthetic oligonucleotide
  Sense strand starting at position 2830 of SEQ ID NO: 1562249
ugaggaugccgugauauuc

SEQ ID NO: 1733388 - RNA, 19 nt, Artificial Sequence
  Description of Artificial Sequence: Synthetic oligonucleotide
  Antisense strand to SEQ ID NO: 1733387
gaauaucacggcauccuca

SEQ ID NO: 1733389 - RNA, 19 nt, Artificial Sequence
  Description of Artificial Sequence: Synthetic oligonucleotide
  Sense strand starting at position 3031 of SEQ ID NO: 1562249
ggcucauguucugggacuu

SEQ ID NO: 1733390 - RNA, 19 nt, Artificial Sequence
  Description of Artificial Sequence: Synthetic oligonucleotide
  Antisense strand to SEQ ID NO: 1733389
aagucccagaacaugagcc

SEQ ID NO: 1733391 - RNA, 19 nt, Artificial Sequence
  Description of Artificial Sequence: Synthetic oligonucleotide
  Sense strand starting at position 3032 of SEQ ID NO: 1562249
gcucauguucugggacuua

SEQ ID NO: 1733392 - RNA, 19 nt, Artificial Sequence
  Description of Artificial Sequence: Synthetic oligonucleotide
  Antisense strand to SEQ ID NO: 1733391
uaagucccagaacaugagc

SEQ ID NO: 1733393 - RNA, 19 nt, Artificial Sequence
  Description of Artificial Sequence: Synthetic oligonucleotide
  Sense strand starting at position 3064 of SEQ ID NO: 1562249
agcugcagucuuuguggga

SEQ ID NO: 1733394 - RNA, 19 nt, Artificial Sequence
  Description of Artificial Sequence: Synthetic oligonucleotide
  Antisense strand to SEQ ID NO: 1733393
ucccacaaagacugcagcu

SEQ ID NO: 1733395 - RNA, 19 nt, Artificial Sequence
  Description of Artificial Sequence: Synthetic oligonucleotide
  Sense strand starting at position 3067 of SEQ ID NO: 1562249
ugcagucuuugugggacaa

SEQ ID NO: 1733396 - RNA, 19 nt, Artificial Sequence
  Description of Artificial Sequence: Synthetic oligonucleotide
  Antisense strand to SEQ ID NO: 1733395
uugucccacaaagacugca

SEQ ID NO: 1733397 - RNA, 19 nt, Artificial Sequence
  Description of Artificial Sequence: Synthetic oligonucleotide
  Sense strand starting at position 3068 of SEQ ID NO: 1562249
gcagucuuugugggacaag

SEQ ID NO: 1733398 - RNA, 19 nt, Artificial Sequence
  Description of Artificial Sequence: Synthetic oligonucleotide
  Antisense strand to SEQ ID NO: 1733397
cuugucccacaaagacugc

SEQ ID NO: 1733399 - RNA, 19 nt, Artificial Sequence
  Description of Artificial Sequence: Synthetic oligonucleotide
  Sense strand starting at position 3071 of SEQ ID NO: 1562249
gucuuugugggacaaggua

SEQ ID NO: 1733400 - RNA, 19 nt, Artificial Sequence
  Description of Artificial Sequence: Synthetic oligonucleotide
  Antisense strand to SEQ ID NO: 1733399
uaccuugucccacaaagac

SEQ ID NO: 1733401 - RNA, 19 nt, Artificial Sequence
  Description of Artificial Sequence: Synthetic oligonucleotide
  Sense strand starting at position 3294 of SEQ ID NO: 1562249
gaguuucccacuugggagu

SEQ ID NO: 1733402 - RNA, 19 nt, Artificial Sequence
  Description of Artificial Sequence: Synthetic oligonucleotide
  Antisense strand to SEQ ID NO: 1733401
acucccaagugggaaacuc

SEQ ID NO: 1733403 - RNA, 19 nt, Artificial Sequence
  Description of Artificial Sequence: Synthetic oligonucleotide
  Sense strand starting at position 3305 of SEQ ID NO: 1562249
uugggaguucccugcgaug

SEQ ID NO: 1733404 - RNA, 19 nt, Artificial Sequence
  Description of Artificial Sequence: Synthetic oligonucleotide
  Antisense strand to SEQ ID NO: 1733403
caucgcagggaacucccaa

SEQ ID NO: 1733405 - RNA, 19 nt, Artificial Sequence
  Description of Artificial Sequence: Synthetic oligonucleotide
  Sense strand starting at position 3329 of SEQ ID NO: 1562249
aguggagaauuccagggaa

SEQ ID NO: 1733406 - RNA, 19 nt, Artificial Sequence
  Description of Artificial Sequence: Synthetic oligonucleotide
  Antisense strand to SEQ ID NO: 1733405
uucccuggaauucuccacu

SEQ ID NO: 1733407 - RNA, 19 nt, Artificial Sequence
  Description of Artificial Sequence: Synthetic oligonucleotide
  Sense strand starting at position 3370 of SEQ ID NO: 1562249
aucagaucagagcauguau

SEQ ID NO: 1733408 - RNA, 19 nt, Artificial Sequence
  Description of Artificial Sequence: Synthetic oligonucleotide
  Antisense strand to SEQ ID NO: 1733407
auacaugcucugaucugau

SEQ ID NO: 1733409 - RNA, 19 nt, Artificial Sequence
  Description of Artificial Sequence: Synthetic oligonucleotide
  Sense strand starting at position 3372 of SEQ ID NO: 1562249
cagaucagagcauguauua

SEQ ID NO: 1733410 - RNA, 19 nt, Artificial Sequence
  Description of Artificial Sequence: Synthetic oligonucleotide
  Antisense strand to SEQ ID NO: 1733409
uaauacaugcucugaucug

SEQ ID NO: 1733411 - RNA, 19 nt, Artificial Sequence
  Description of Artificial Sequence: Synthetic oligonucleotide
  Sense strand starting at position 3420 of SEQ ID NO: 1562249
ucaggugaccagugagaga

SEQ ID NO: 1733412 - RNA, 19 nt, Artificial Sequence
  Description of Artificial Sequence: Synthetic oligonucleotide
  Antisense strand to SEQ ID NO: 1733411
ucucucacuggucaccuga

SEQ ID NO: 1733413 - RNA, 19 nt, Artificial Sequence
  Description of Artificial Sequence: Synthetic oligonucleotide
  Sense strand starting at position 3440 of SEQ ID NO: 1562249
gggcguguucacuggucau

SEQ ID NO: 1733414 - RNA, 19 nt, Artificial Sequence
  Description of Artificial Sequence: Synthetic oligonucleotide
  Antisense strand to SEQ ID NO: 1733413
augaccagugaacacgccc

SEQ ID NO: 1733415 - RNA, 19 nt, Artificial Sequence
  Description of Artificial Sequence: Synthetic oligonucleotide
  Sense strand starting at position 3549 of SEQ ID NO: 1562249
cuuacaagugucugggaau

SEQ ID NO: 1733416 - RNA, 19 nt, Artificial Sequence
  Description of Artificial Sequence: Synthetic oligonucleotide
  Antisense strand to SEQ ID NO: 1733415
auucccagacacuuguaag

SEQ ID NO: 1733417 - RNA, 19 nt, Artificial Sequence
  Description of Artificial Sequence: Synthetic oligonucleotide
  Sense strand starting at position 3550 of SEQ ID NO: 1562249
uuacaagugucugggaaug

SEQ ID NO: 1733418 - RNA, 19 nt, Artificial Sequence
  Description of Artificial Sequence: Synthetic oligonucleotide
  Antisense strand to SEQ ID NO: 1733417
cauucccagacacuuguaa

SEQ ID NO: 1733419 - RNA, 19 nt, Artificial Sequence
  Description of Artificial Sequence: Synthetic oligonucleotide
  Sense strand starting at position 3552 of SEQ ID NO: 1562249
acaagugucugggaauguu

SEQ ID NO: 1733420 - RNA, 19 nt, Artificial Sequence
  Description of Artificial Sequence: Synthetic oligonucleotide
  Antisense strand to SEQ ID NO: 1733419
aacauucccagacacuugu

SEQ ID NO: 1733421 - RNA, 19 nt, Artificial Sequence
  Description of Artificial Sequence: Synthetic oligonucleotide
  Sense strand starting at position 3632 of SEQ ID NO: 1562249
gcagucuguuucuuucuca

SEQ ID NO: 1733422 - RNA, 19 nt, Artificial Sequence
  Description of Artificial Sequence: Synthetic oligonucleotide
  Antisense strand to SEQ ID NO: 1733421
ugagaaagaaacagacugc

SEQ ID NO: 1733423 - RNA, 19 nt, Artificial Sequence
  Description of Artificial Sequence: Synthetic oligonucleotide
  Sense strand starting at position 3636 of SEQ ID NO: 1562249
ucuguuucuuucucaguca

SEQ ID NO: 1733424 - RNA, 19 nt, Artificial Sequence
  Description of Artificial Sequence: Synthetic oligonucleotide
  Antisense strand to SEQ ID NO: 1733423
ugacugagaaagaaacaga

SEQ ID NO: 1733425 - RNA, 19 nt, Artificial Sequence
  Description of Artificial Sequence: Synthetic oligonucleotide
  Sense strand starting at position 3639 of SEQ ID NO: 1562249
guuucuuucucagucagga

SEQ ID NO: 1733426 - RNA, 19 nt, Artificial Sequence
  Description of Artificial Sequence: Synthetic oligonucleotide
  Antisense strand to SEQ ID NO: 1733425
uccugacugagaaagaaac

SEQ ID NO: 1733427 - RNA, 19 nt, Artificial Sequence
  Description of Artificial Sequence: Synthetic oligonucleotide
  Sense strand starting at position 3833 of SEQ ID NO: 1562249
uuuguucuuccaugaucac

SEQ ID NO: 1733428 - RNA, 19 nt, Artificial Sequence
  Description of Artificial Sequence: Synthetic oligonucleotide
  Antisense strand to SEQ ID NO: 1733427
gugaucauggaagaacaaa

SEQ ID NO: 1733429 - RNA, 19 nt, Artificial Sequence
  Description of Artificial Sequence: Synthetic oligonucleotide
  Sense strand starting at position 3851 of SEQ ID NO: 1562249
ccagaagacuccucagggu

SEQ ID NO: 1733430 - RNA, 19 nt, Artificial Sequence
  Description of Artificial Sequence: Synthetic oligonucleotide
  Antisense strand to SEQ ID NO: 1733429
acccugaggagucuucugg

SEQ ID NO: 1733431 - RNA, 19 nt, Artificial Sequence
  Description of Artificial Sequence: Synthetic oligonucleotide
  Sense strand starting at position 3906 of SEQ ID NO: 1562249
gggcauuucugagauccca

SEQ ID NO: 1733432 - RNA, 19 nt, Artificial Sequence
  Description of Artificial Sequence: Synthetic oligonucleotide
  Antisense strand to SEQ ID NO: 1733431
ugggaucucagaaaugccc

SEQ ID NO: 1733433 - RNA, 19 nt, Artificial Sequence
  Description of Artificial Sequence: Synthetic oligonucleotide
  Sense strand starting at position 192 of SEQ ID NO: 1562250
gguguaguagcgugagucu

SEQ ID NO: 1733434 - RNA, 19 nt, Artificial Sequence
  Description of Artificial Sequence: Synthetic oligonucleotide
  Antisense strand to SEQ ID NO: 1733433
agacucacgcuacuacacc

SEQ ID NO: 1733435 - RNA, 19 nt, Artificial Sequence
  Description of Artificial Sequence: Synthetic oligonucleotide
  Sense strand starting at position 195 of SEQ ID NO: 1562250
guaguagcgugagucugua

SEQ ID NO: 1733436 - RNA, 19 nt, Artificial Sequence
  Description of Artificial Sequence: Synthetic oligonucleotide
  Antisense strand to SEQ ID NO: 1733435
uacagacucacgcuacuac

SEQ ID NO: 1733437 - RNA, 19 nt, Artificial Sequence
  Description of Artificial Sequence: Synthetic oligonucleotide
  Sense strand starting at position 271 of SEQ ID NO: 1562250
ugcagugagccaggacuau

SEQ ID NO: 1733438 - RNA, 19 nt, Artificial Sequence
  Description of Artificial Sequence: Synthetic oligonucleotide
  Antisense strand to SEQ ID NO: 1733437
auaguccuggcucacugca

SEQ ID NO: 1733439 - RNA, 19 nt, Artificial Sequence
  Description of Artificial Sequence: Synthetic oligonucleotide
  Sense strand starting at position 302 of SEQ ID NO: 1562250
cagccugguugacaaagua

SEQ ID NO: 1733440 - RNA, 19 nt, Artificial Sequence
  Description of Artificial Sequence: Synthetic oligonucleotide
  Antisense strand to SEQ ID NO: 1733439
uacuuugucaaccaggcug

SEQ ID NO: 1733441 - RNA, 19 nt, Artificial Sequence
  Description of Artificial Sequence: Synthetic oligonucleotide
  Sense strand starting at position 837 of SEQ ID NO: 1562250
guuggcaucugacaacaaa

SEQ ID NO: 1733442 - RNA, 19 nt, Artificial Sequence
  Description of Artificial Sequence: Synthetic oligonucleotide
  Antisense strand to SEQ ID NO: 1733441
uuuguugucagaugccaac

SEQ ID NO: 1733443 - RNA, 19 nt, Artificial Sequence
  Description of Artificial Sequence: Synthetic oligonucleotide
  Sense strand starting at position 2640 of SEQ ID NO: 1562250
ggcugagcucacugugaac

SEQ ID NO: 1733444 - RNA, 19 nt, Artificial Sequence
  Description of Artificial Sequence: Synthetic oligonucleotide
  Antisense strand to SEQ ID NO: 1733443
guucacagugagcucagcc

SEQ ID NO: 1733445 - RNA, 19 nt, Artificial Sequence
  Description of Artificial Sequence: Synthetic oligonucleotide
  Sense strand starting at position 2691 of SEQ ID NO: 1562250
ggccggaaccgauguguau

SEQ ID NO: 1733446 - RNA, 19 nt, Artificial Sequence
  Description of Artificial Sequence: Synthetic oligonucleotide
  Antisense strand to SEQ ID NO: 1733445
auacacaucgguuccggcc

SEQ ID NO: 1733447 - RNA, 19 nt, Artificial Sequence
  Description of Artificial Sequence: Synthetic oligonucleotide
  Sense strand starting at position 2710 of SEQ ID NO: 1562250
gcggagaggucgcagucau

SEQ ID NO: 1733448 - RNA, 19 nt, Artificial Sequence
  Description of Artificial Sequence: Synthetic oligonucleotide
  Antisense strand to SEQ ID NO: 1733447
augacugcgaccucuccgc

SEQ ID NO: 1733449 - RNA, 19 nt, Artificial Sequence
  Description of Artificial Sequence: Synthetic oligonucleotide
  Sense strand starting at position 2711 of SEQ ID NO: 1562250
cggagaggucgcagucauu

SEQ ID NO: 1733450 - RNA, 19 nt, Artificial Sequence
  Description of Artificial Sequence: Synthetic oligonucleotide
  Antisense strand to SEQ ID NO: 1733449
aaugacugcgaccucuccg

SEQ ID NO: 1733451 - RNA, 19 nt, Artificial Sequence
  Description of Artificial Sequence: Synthetic oligonucleotide
  Sense strand starting at position 2721 of SEQ ID NO: 1562250
gcagucauugcugugagca

SEQ ID NO: 1733452 - RNA, 19 nt, Artificial Sequence
  Description of Artificial Sequence: Synthetic oligonucleotide
  Antisense strand to SEQ ID NO: 1733451
ugcucacagcaaugacugc

SEQ ID NO: 1733453 - RNA, 19 nt, Artificial Sequence
  Description of Artificial Sequence: Synthetic oligonucleotide
  Sense strand starting at position 2722 of SEQ ID NO: 1562250
cagucauugcugugagcag

SEQ ID NO: 1733454 - RNA, 19 nt, Artificial Sequence
  Description of Artificial Sequence: Synthetic oligonucleotide
  Antisense strand to SEQ ID NO: 1733453
cugcucacagcaaugacug

SEQ ID NO: 1733455 - RNA, 19 nt, Artificial Sequence
  Description of Artificial Sequence: Synthetic oligonucleotide
  Sense strand starting at position 2761 of SEQ ID NO: 1562250
gggagaaguuacagaggga

SEQ ID NO: 1733456 - RNA, 19 nt, Artificial Sequence
  Description of Artificial Sequence: Synthetic oligonucleotide
  Antisense strand to SEQ ID NO: 1733455
ucccucuguaacuucuccc

SEQ ID NO: 1733457 - RNA, 19 nt, Artificial Sequence
  Description of Artificial Sequence: Synthetic oligonucleotide
  Sense strand starting at position 2890 of SEQ ID NO: 1562250
ggugcuuucuggcugcaca

SEQ ID NO: 1733458 - RNA, 19 nt, Artificial Sequence
  Description of Artificial Sequence: Synthetic oligonucleotide
  Antisense strand to SEQ ID NO: 1733457
ugugcagccagaaagcacc

SEQ ID NO: 1733459 - RNA, 19 nt, Artificial Sequence
  Description of Artificial Sequence: Synthetic oligonucleotide
  Sense strand starting at position 2948 of SEQ ID NO: 1562250
ugcugucgggcuuguacaa

SEQ ID NO: 1733460 - RNA, 19 nt, Artificial Sequence
  Description of Artificial Sequence: Synthetic oligonucleotide
  Antisense strand to SEQ ID NO: 1733459
uuguacaagcccgacagca

SEQ ID NO: 1733461 - RNA, 19 nt, Artificial Sequence
  Description of Artificial Sequence: Synthetic oligonucleotide
  Sense strand starting at position 3176 of SEQ ID NO: 1562250
agcagaguguugcucuguu

SEQ ID NO: 1733462 - RNA, 19 nt, Artificial Sequence
  Description of Artificial Sequence: Synthetic oligonucleotide
  Antisense strand to SEQ ID NO: 1733461
aacagagcaacacucugcu

SEQ ID NO: 1733463 - RNA, 19 nt, Artificial Sequence
  Description of Artificial Sequence: Synthetic oligonucleotide
  Sense strand starting at position 3218 of SEQ ID NO: 1562250
agaccugaguaaggauauu

SEQ ID NO: 1733464 - RNA, 19 nt, Artificial Sequence
  Description of Artificial Sequence: Synthetic oligonucleotide
  Antisense strand to SEQ ID NO: 1733463
aauauccuuacucaggucu

SEQ ID NO: 1733465 - RNA, 19 nt, Artificial Sequence
  Description of Artificial Sequence: Synthetic oligonucleotide
  Sense strand starting at position 3227 of SEQ ID NO: 1562250
uaaggauauuuggaagcca

SEQ ID NO: 1733466 - RNA, 19 nt, Artificial Sequence
  Description of Artificial Sequence: Synthetic oligonucleotide
  Antisense strand to SEQ ID NO: 1733465
uggcuuccaaauauccuua

SEQ ID NO: 1733467 - RNA, 19 nt, Artificial Sequence
  Description of Artificial Sequence: Synthetic oligonucleotide
  Sense strand starting at position 3413 of SEQ ID NO: 1562250
ccuugaggaugccgugaua

SEQ ID NO: 1733468 - RNA, 19 nt, Artificial Sequence
  Description of Artificial Sequence: Synthetic oligonucleotide
  Antisense strand to SEQ ID NO: 1733467
uaucacggcauccucaagg

SEQ ID NO: 1733469 - RNA, 19 nt, Artificial Sequence
  Description of Artificial Sequence: Synthetic oligonucleotide
  Sense strand starting at position 3416 of SEQ ID NO: 1562250
ugaggaugccgugauauuc

SEQ ID NO: 1733470 - RNA, 19 nt, Artificial Sequence
  Description of Artificial Sequence: Synthetic oligonucleotide
  Antisense strand to SEQ ID NO: 1733469
gaauaucacggcauccuca

SEQ ID NO: 1733471 - RNA, 19 nt, Artificial Sequence
  Description of Artificial Sequence: Synthetic oligonucleotide
  Sense strand starting at position 3617 of SEQ ID NO: 1562250
ggcucauguucugggacuu

SEQ ID NO: 1733472 - RNA, 19 nt, Artificial Sequence
  Description of Artificial Sequence: Synthetic oligonucleotide
  Antisense strand to SEQ ID NO: 1733471
aagucccagaacaugagcc

SEQ ID NO: 1733473 - RNA, 19 nt, Artificial Sequence
  Description of Artificial Sequence: Synthetic oligonucleotide
  Sense strand starting at position 3618 of SEQ ID NO: 1562250
gcucauguucugggacuua

SEQ ID NO: 1733474 - RNA, 19 nt, Artificial Sequence
  Description of Artificial Sequence: Synthetic oligonucleotide
  Antisense strand to SEQ ID NO: 1733473
uaagucccagaacaugagc

SEQ ID NO: 1733475 - RNA, 19 nt, Artificial Sequence
  Description of Artificial Sequence: Synthetic oligonucleotide
  Sense strand starting at position 3650 of SEQ ID NO: 1562250
agcugcagucuuuguggga

SEQ ID NO: 1733476 - RNA, 19 nt, Artificial Sequence
  Description of Artificial Sequence: Synthetic oligonucleotide
  Antisense strand to SEQ ID NO: 1733475
ucccacaaagacugcagcu

SEQ ID NO: 1733477 - RNA, 19 nt, Artificial Sequence
  Description of Artificial Sequence: Synthetic oligonucleotide
  Sense strand starting at position 3653 of SEQ ID NO: 1562250
ugcagucuuugugggacaa

SEQ ID NO: 1733478 - RNA, 19 nt, Artificial Sequence
  Description of Artificial Sequence: Synthetic oligonucleotide
  Antisense strand to SEQ ID NO: 1733477
uugucccacaaagacugca

SEQ ID NO: 1733479 - RNA, 19 nt, Artificial Sequence
  Description of Artificial Sequence: Synthetic oligonucleotide
  Sense strand starting at position 3654 of SEQ ID NO: 1562250
gcagucuuugugggacaag

SEQ ID NO: 1733480 - RNA, 19 nt, Artificial Sequence
  Description of Artificial Sequence: Synthetic oligonucleotide
  Antisense strand to SEQ ID NO: 1733479
cuugucccacaaagacugc

SEQ ID NO: 1733481 - RNA, 19 nt, Artificial Sequence
  Description of Artificial Sequence: Synthetic oligonucleotide
  Sense strand starting at position 3657 of SEQ ID NO: 1562250
gucuuugugggacaaggua

SEQ ID NO: 1733482 - RNA, 19 nt, Artificial Sequence
  Description of Artificial Sequence: Synthetic oligonucleotide
  Antisense strand to SEQ ID NO: 1733481
uaccuugucccacaaagac

SEQ ID NO: 1733483 - RNA, 19 nt, Artificial Sequence
  Description of Artificial Sequence: Synthetic oligonucleotide
  Sense strand starting at position 3880 of SEQ ID NO: 1562250
gaguuucccacuugggagu

SEQ ID NO: 1733484 - RNA, 19 nt, Artificial Sequence
  Description of Artificial Sequence: Synthetic oligonucleotide
  Antisense strand to SEQ ID NO: 1733483
acucccaagugggaaacuc

SEQ ID NO: 1733485 - RNA, 19 nt, Artificial Sequence
  Description of Artificial Sequence: Synthetic oligonucleotide
  Sense strand starting at position 3891 of SEQ ID NO: 1562250
uugggaguucccugcgaug

SEQ ID NO: 1733486 - RNA, 19 nt, Artificial Sequence
  Description of Artificial Sequence: Synthetic oligonucleotide
  Antisense strand to SEQ ID NO: 1733485
caucgcagggaacucccaa

SEQ ID NO: 1733487 - RNA, 19 nt, Artificial Sequence
  Description of Artificial Sequence: Synthetic oligonucleotide
  Sense strand starting at position 3915 of SEQ ID NO: 1562250
aguggagaauuccagggaa

SEQ ID NO: 1733488 - RNA, 19 nt, Artificial Sequence
  Description of Artificial Sequence: Synthetic oligonucleotide
  Antisense strand to SEQ ID NO: 1733487
uucccuggaauucuccacu

SEQ ID NO: 1733489 - RNA, 19 nt, Artificial Sequence
  Description of Artificial Sequence: Synthetic oligonucleotide
  Sense strand starting at position 3956 of SEQ ID NO: 1562250
aucagaucagagcauguau

SEQ ID NO: 1733490 - RNA, 19 nt, Artificial Sequence
  Description of Artificial Sequence: Synthetic oligonucleotide
  Antisense strand to SEQ ID NO: 1733489
auacaugcucugaucugau

SEQ ID NO: 1733491 - RNA, 19 nt, Artificial Sequence
  Description of Artificial Sequence: Synthetic oligonucleotide
  Sense strand starting at position 3958 of SEQ ID NO: 1562250
cagaucagagcauguauua

SEQ ID NO: 1733492 - RNA, 19 nt, Artificial Sequence
  Description of Artificial Sequence: Synthetic oligonucleotide
  Antisense strand to SEQ ID NO: 1733491
uaauacaugcucugaucug

SEQ ID NO: 1733493 - RNA, 19 nt, Artificial Sequence
  Description of Artificial Sequence: Synthetic oligonucleotide
  Sense strand starting at position 62 of SEQ ID NO: 1562251
gcaggaaggcauuaaagca

SEQ ID NO: 1733494 - RNA, 19 nt, Artificial Sequence
  Description of Artificial Sequence: Synthetic oligonucleotide
  Antisense strand to SEQ ID NO: 1733493
ugcuuuaaugccuuccugc

SEQ ID NO: 1733495 - RNA, 19 nt, Artificial Sequence
  Description of Artificial Sequence: Synthetic oligonucleotide
  Sense strand starting at position 224 of SEQ ID NO: 1562251
cuauuaacacaggguuaau

SEQ ID NO: 1733496 - RNA, 19 nt, Artificial Sequence
  Description of Artificial Sequence: Synthetic oligonucleotide
  Antisense strand to SEQ ID NO: 1733495
auuaacccuguguuaauag

SEQ ID NO: 1733497 - RNA, 19 nt, Artificial Sequence
  Description of Artificial Sequence: Synthetic oligonucleotide
  Sense strand starting at position 266 of SEQ ID NO: 1562251
cagugagugacaugcuaug

SEQ ID NO: 1733498 - RNA, 19 nt, Artificial Sequence
  Description of Artificial Sequence: Synthetic oligonucleotide
  Antisense strand to SEQ ID NO: 1733497
cauagcaugucacucacug

SEQ ID NO: 1733499 - RNA, 19 nt, Artificial Sequence
  Description of Artificial Sequence: Synthetic oligonucleotide
  Sense strand starting at position 477 of SEQ ID NO: 1562251
cuaguaagaucacugagcu

SEQ ID NO: 1733500 - RNA, 19 nt, Artificial Sequence
  Description of Artificial Sequence: Synthetic oligonucleotide
  Antisense strand to SEQ ID NO: 1733499
agcucagugaucuuacuag

SEQ ID NO: 1733501 - RNA, 19 nt, Artificial Sequence
  Description of Artificial Sequence: Synthetic oligonucleotide
  Sense strand starting at position 478 of SEQ ID NO: 1562251
uaguaagaucacugagcua

SEQ ID NO: 1733502 - RNA, 19 nt, Artificial Sequence
  Description of Artificial Sequence: Synthetic oligonucleotide
  Antisense strand to SEQ ID NO: 1733501
uagcucagugaucuuacua

SEQ ID NO: 1733503 - RNA, 19 nt, Artificial Sequence
  Description of Artificial Sequence: Synthetic oligonucleotide
  Sense strand starting at position 557 of SEQ ID NO: 1562251
gggugucagccaggaguaa

SEQ ID NO: 1733504 - RNA, 19 nt, Artificial Sequence
  Description of Artificial Sequence: Synthetic oligonucleotide
  Antisense strand to SEQ ID NO: 1733503
uuacuccuggcugacaccc

SEQ ID NO: 1733505 - RNA, 19 nt, Artificial Sequence
  Description of Artificial Sequence: Synthetic oligonucleotide
  Sense strand starting at position 682 of SEQ ID NO: 1562251
gauccagaaucugaagaga

SEQ ID NO: 1733506 - RNA, 19 nt, Artificial Sequence
  Description of Artificial Sequence: Synthetic oligonucleotide
  Antisense strand to SEQ ID NO: 1733505
ucucuucagauucuggauc

SEQ ID NO: 1733507 - RNA, 19 nt, Artificial Sequence
  Description of Artificial Sequence: Synthetic oligonucleotide
  Sense strand starting at position 746 of SEQ ID NO: 1562251
aggguugcauauguuauau

SEQ ID NO: 1733508 - RNA, 19 nt, Artificial Sequence
  Description of Artificial Sequence: Synthetic oligonucleotide
  Antisense strand to SEQ ID NO: 1733507
auauaacauaugcaacccu

SEQ ID NO: 1733509 - RNA, 19 nt, Artificial Sequence
  Description of Artificial Sequence: Synthetic oligonucleotide
  Sense strand starting at position 818 of SEQ ID NO: 1562251
uguggcuuccuaugaggaa

SEQ ID NO: 1733510 - RNA, 19 nt, Artificial Sequence
  Description of Artificial Sequence: Synthetic oligonucleotide
  Antisense strand to SEQ ID NO: 1733509
uuccucauaggaagccaca

SEQ ID NO: 1733511 - RNA, 19 nt, Artificial Sequence
  Description of Artificial Sequence: Synthetic oligonucleotide
  Sense strand starting at position 831 of SEQ ID NO: 1562251
gaggaagacuguucuugug

SEQ ID NO: 1733512 - RNA, 19 nt, Artificial Sequence
  Description of Artificial Sequence: Synthetic oligonucleotide
  Antisense strand to SEQ ID NO: 1733511
cacaagaacagucuuccuc

SEQ ID NO: 1733513 - RNA, 19 nt, Artificial Sequence
  Description of Artificial Sequence: Synthetic oligonucleotide
  Sense strand starting at position 872 of SEQ ID NO: 1562251
guaagaugaugaguuggca

SEQ ID NO: 1733514 - RNA, 19 nt, Artificial Sequence
  Description of Artificial Sequence: Synthetic oligonucleotide
  Antisense strand to SEQ ID NO: 1733513
ugccaacucaucaucuuac

SEQ ID NO: 1733515 - RNA, 19 nt, Artificial Sequence
  Description of Artificial Sequence: Synthetic oligonucleotide
  Sense strand starting at position 934 of SEQ ID NO: 1562251
ccugaaagucugcaauccu

SEQ ID NO: 1733516 - RNA, 19 nt, Artificial Sequence
  Description of Artificial Sequence: Synthetic oligonucleotide
  Antisense strand to SEQ ID NO: 1733515
aggauugcagacuuucagg

SEQ ID NO: 1733517 - RNA, 19 nt, Artificial Sequence
  Description of Artificial Sequence: Synthetic oligonucleotide
  Sense strand starting at position 1068 of SEQ ID NO: 1562251
gcucaaauuuagucugcua

SEQ ID NO: 1733518 - RNA, 19 nt, Artificial Sequence
  Description of Artificial Sequence: Synthetic oligonucleotide
  Antisense strand to SEQ ID NO: 1733517
uagcagacuaaauuugagc

SEQ ID NO: 1733519 - RNA, 19 nt, Artificial Sequence
  Description of Artificial Sequence: Synthetic oligonucleotide
  Sense strand starting at position 1120 of SEQ ID NO: 1562251
gaggcauucuaguuaaagg

SEQ ID NO: 1733520 - RNA, 19 nt, Artificial Sequence
  Description of Artificial Sequence: Synthetic oligonucleotide
  Antisense strand to SEQ ID NO: 1733519
ccuuuaacuagaaugccuc

SEQ ID NO: 1733521 - RNA, 19 nt, Artificial Sequence
  Description of Artificial Sequence: Synthetic oligonucleotide
  Sense strand starting at position 1121 of SEQ ID NO: 1562251
aggcauucuaguuaaaggu

SEQ ID NO: 1733522 - RNA, 19 nt, Artificial Sequence
  Description of Artificial Sequence: Synthetic oligonucleotide
  Antisense strand to SEQ ID NO: 1733521
accuuuaacuagaaugccu

SEQ ID NO: 1733523 - RNA, 19 nt, Artificial Sequence
  Description of Artificial Sequence: Synthetic oligonucleotide
  Sense strand starting at position 1983 of SEQ ID NO: 1562251
gccuuugacggcuaucaca

SEQ ID NO: 1733524 - RNA, 19 nt, Artificial Sequence
  Description of Artificial Sequence: Synthetic oligonucleotide
  Antisense strand to SEQ ID NO: 1733523
ugugauagccgucaaaggc

SEQ ID NO: 1733525 - RNA, 19 nt, Artificial Sequence
  Description of Artificial Sequence: Synthetic oligonucleotide
  Sense strand starting at position 2011 of SEQ ID NO: 1562251
acaagaauguuagugcuca

SEQ ID NO: 1733526 - RNA, 19 nt, Artificial Sequence
  Description of Artificial Sequence: Synthetic oligonucleotide
  Antisense strand to SEQ ID NO: 1733525
ugagcacuaacauucuugu

SEQ ID NO: 1733527 - RNA, 19 nt, Artificial Sequence
  Description of Artificial Sequence: Synthetic oligonucleotide
  Sense strand starting at position 2129 of SEQ ID NO: 1562251
uccaaauuaccaggcaaga

SEQ ID NO: 1733528 - RNA, 19 nt, Artificial Sequence
  Description of Artificial Sequence: Synthetic oligonucleotide
  Antisense strand to SEQ ID NO: 1733527
ucuugccugguaauuugga

SEQ ID NO: 1733529 - RNA, 19 nt, Artificial Sequence
  Description of Artificial Sequence: Synthetic oligonucleotide
  Sense strand starting at position 2294 of SEQ ID NO: 1562251
gugagaaaugaaugcacua

SEQ ID NO: 1733530 - RNA, 19 nt, Artificial Sequence
  Description of Artificial Sequence: Synthetic oligonucleotide
  Antisense strand to SEQ ID NO: 1733529
uagugcauucauuucucac

SEQ ID NO: 1733531 - RNA, 19 nt, Artificial Sequence
  Description of Artificial Sequence: Synthetic oligonucleotide
  Sense strand starting at position 2380 of SEQ ID NO: 1562251
agcaaucuuuguccuagau

SEQ ID NO: 1733532 - RNA, 19 nt, Artificial Sequence
  Description of Artificial Sequence: Synthetic oligonucleotide
  Antisense strand to SEQ ID NO: 1733531
aucuaggacaaagauugcu

SEQ ID NO: 1733533 - RNA, 19 nt, Artificial Sequence
  Description of Artificial Sequence: Synthetic oligonucleotide
  Sense strand starting at position 2470 of SEQ ID NO: 1562251
agugcuaucacagagguaa

SEQ ID NO: 1733534 - RNA, 19 nt, Artificial Sequence
  Description of Artificial Sequence: Synthetic oligonucleotide
  Antisense strand to SEQ ID NO: 1733533
uuaccucugugauagcacu

SEQ ID NO: 1733535 - RNA, 19 nt, Artificial Sequence
  Description of Artificial Sequence: Synthetic oligonucleotide
  Sense strand starting at position 2482 of SEQ ID NO: 1562251
gagguaaucuacuuuaugc

SEQ ID NO: 1733536 - RNA, 19 nt, Artificial Sequence
  Description of Artificial Sequence: Synthetic oligonucleotide
  Antisense strand to SEQ ID NO: 1733535
gcauaaaguagauuaccuc

SEQ ID NO: 1733537 - RNA, 19 nt, Artificial Sequence
  Description of Artificial Sequence: Synthetic oligonucleotide
  Sense strand starting at position 2491 of SEQ ID NO: 1562251
uacuuuaugcuccaggaga

SEQ ID NO: 1733538 - RNA, 19 nt, Artificial Sequence
  Description of Artificial Sequence: Synthetic oligonucleotide
  Antisense strand to SEQ ID NO: 1733537
ucuccuggagcauaaagua

SEQ ID NO: 1733539 - RNA, 19 nt, Artificial Sequence
  Description of Artificial Sequence: Synthetic oligonucleotide
  Sense strand starting at position 2493 of SEQ ID NO: 1562251
cuuuaugcuccaggagaaa

SEQ ID NO: 1733540 - RNA, 19 nt, Artificial Sequence
  Description of Artificial Sequence: Synthetic oligonucleotide
  Antisense strand to SEQ ID NO: 1733539
uuucuccuggagcauaaag

SEQ ID NO: 1733541 - RNA, 19 nt, Artificial Sequence
  Description of Artificial Sequence: Synthetic oligonucleotide
  Sense strand starting at position 2626 of SEQ ID NO: 1562251
ggguuuauucuaugcagag

SEQ ID NO: 1733542 - RNA, 19 nt, Artificial Sequence
  Description of Artificial Sequence: Synthetic oligonucleotide
  Antisense strand to SEQ ID NO: 1733541
cucugcauagaauaaaccc

SEQ ID NO: 1733543 - RNA, 19 nt, Artificial Sequence
  Description of Artificial Sequence: Synthetic oligonucleotide
  Sense strand starting at position 2627 of SEQ ID NO: 1562251
gguuuauucuaugcagagg

SEQ ID NO: 1733544 - RNA, 19 nt, Artificial Sequence
  Description of Artificial Sequence: Synthetic oligonucleotide
  Antisense strand to SEQ ID NO: 1733543
ccucugcauagaauaaacc

SEQ ID NO: 1733545 - RNA, 19 nt, Artificial Sequence
  Description of Artificial Sequence: Synthetic oligonucleotide
  Sense strand starting at position 2749 of SEQ ID NO: 1562251
aaugaugggucagaaagac

SEQ ID NO: 1733546 - RNA, 19 nt, Artificial Sequence
  Description of Artificial Sequence: Synthetic oligonucleotide
  Antisense strand to SEQ ID NO: 1733545
gucuuucugacccaucauu

SEQ ID NO: 1733547 - RNA, 19 nt, Artificial Sequence
  Description of Artificial Sequence: Synthetic oligonucleotide
  Sense strand starting at position 2914 of SEQ ID NO: 1562251
ugagacauuucagggaagu

SEQ ID NO: 1733548 - RNA, 19 nt, Artificial Sequence
  Description of Artificial Sequence: Synthetic oligonucleotide
  Antisense strand to SEQ ID NO: 1733547
acuucccugaaaugucuca

SEQ ID NO: 1733549 - RNA, 19 nt, Artificial Sequence
  Description of Artificial Sequence: Synthetic oligonucleotide
  Sense strand starting at position 2965 of SEQ ID NO: 1562251
guuaaauugcaggagguga

SEQ ID NO: 1733550 - RNA, 19 nt, Artificial Sequence
  Description of Artificial Sequence: Synthetic oligonucleotide
  Antisense strand to SEQ ID NO: 1733549
ucaccuccugcaauuuaac

SEQ ID NO: 1733551 - RNA, 19 nt, Artificial Sequence
  Description of Artificial Sequence: Synthetic oligonucleotide
  Sense strand starting at position 3014 of SEQ ID NO: 1562251
caggaagccuggcuaagaa

SEQ ID NO: 1733552 - RNA, 19 nt, Artificial Sequence
  Description of Artificial Sequence: Synthetic oligonucleotide
  Antisense strand to SEQ ID NO: 1733551
uucuuagccaggcuuccug

SEQ ID NO: 1733553 - RNA, 19 nt, Artificial Sequence
  Description of Artificial Sequence: Synthetic oligonucleotide
  Sense strand starting at position 3262 of SEQ ID NO: 1562251
gcuucucacugaccuuaga

SEQ ID NO: 1733554 - RNA, 19 nt, Artificial Sequence
  Description of Artificial Sequence: Synthetic oligonucleotide
  Antisense strand to SEQ ID NO: 1733553
ucuaaggucagugagaagc

SEQ ID NO: 1733555 - RNA, 19 nt, Artificial Sequence
  Description of Artificial Sequence: Synthetic oligonucleotide
  Sense strand starting at position 3297 of SEQ ID NO: 1562251
uugcuaugcccuguaaguu

SEQ ID NO: 1733556 - RNA, 19 nt, Artificial Sequence
  Description of Artificial Sequence: Synthetic oligonucleotide
  Antisense strand to SEQ ID NO: 1733555
aacuuacagggcauagcaa

SEQ ID NO: 1733557 - RNA, 19 nt, Artificial Sequence
  Description of Artificial Sequence: Synthetic oligonucleotide
  Sense strand starting at position 3307 of SEQ ID NO: 1562251
cuguaaguucuugagugau

SEQ ID NO: 1733558 - RNA, 19 nt, Artificial Sequence
  Description of Artificial Sequence: Synthetic oligonucleotide
  Antisense strand to SEQ ID NO: 1733557
aucacucaagaacuuacag

SEQ ID NO: 1733559 - RNA, 19 nt, Artificial Sequence
  Description of Artificial Sequence: Synthetic oligonucleotide
  Sense strand starting at position 3309 of SEQ ID NO: 1562251
guaaguucuugagugauau

SEQ ID NO: 1733560 - RNA, 19 nt, Artificial Sequence
  Description of Artificial Sequence: Synthetic oligonucleotide
  Antisense strand to SEQ ID NO: 1733559
auaucacucaagaacuuac

SEQ ID NO: 1733561 - RNA, 19 nt, Artificial Sequence
  Description of Artificial Sequence: Synthetic oligonucleotide
  Sense strand starting at position 3310 of SEQ ID NO: 1562251
uaaguucuugagugauaug

SEQ ID NO: 1733562 - RNA, 19 nt, Artificial Sequence
  Description of Artificial Sequence: Synthetic oligonucleotide
  Antisense strand to SEQ ID NO: 1733561
cauaucacucaagaacuua

SEQ ID NO: 1733563 - RNA, 19 nt, Artificial Sequence
  Description of Artificial Sequence: Synthetic oligonucleotide
  Sense strand starting at position 3332 of SEQ ID NO: 1562251
ccugcuuugcgcuccagua

SEQ ID NO: 1733564 - RNA, 19 nt, Artificial Sequence
  Description of Artificial Sequence: Synthetic oligonucleotide
  Antisense strand to SEQ ID NO: 1733563
uacuggagcgcaaagcagg

SEQ ID NO: 1733565 - RNA, 19 nt, Artificial Sequence
  Description of Artificial Sequence: Synthetic oligonucleotide
  Sense strand starting at position 3333 of SEQ ID NO: 1562251
cugcuuugcgcuccaguau

SEQ ID NO: 1733566 - RNA, 19 nt, Artificial Sequence
  Description of Artificial Sequence: Synthetic oligonucleotide
  Antisense strand to SEQ ID NO: 1733565
auacuggagcgcaaagcag

SEQ ID NO: 1733567 - RNA, 19 nt, Artificial Sequence
  Description of Artificial Sequence: Synthetic oligonucleotide
  Sense strand starting at position 3424 of SEQ ID NO: 1562251
acaguccugccuuaggauu

SEQ ID NO: 1733568 - RNA, 19 nt, Artificial Sequence
  Description of Artificial Sequence: Synthetic oligonucleotide
  Antisense strand to SEQ ID NO: 1733567
aauccuaaggcaggacugu

SEQ ID NO: 1733569 - RNA, 19 nt, Artificial Sequence
  Description of Artificial Sequence: Synthetic oligonucleotide
  Sense strand starting at position 3636 of SEQ ID NO: 1562251
gcaggcaaagggugaguua

SEQ ID NO: 1733570 - RNA, 19 nt, Artificial Sequence
  Description of Artificial Sequence: Synthetic oligonucleotide
  Antisense strand to SEQ ID NO: 1733569
uaacucacccuuugccugc

SEQ ID NO: 1733571 - RNA, 19 nt, Artificial Sequence
  Description of Artificial Sequence: Synthetic oligonucleotide
  Sense strand starting at position 3643 of SEQ ID NO: 1562251
aagggugaguuaccuauaa

SEQ ID NO: 1733572 - RNA, 19 nt, Artificial Sequence
  Description of Artificial Sequence: Synthetic oligonucleotide
  Antisense strand to SEQ ID NO: 1733571
uuauagguaacucacccuu

SEQ ID NO: 1733573 - RNA, 19 nt, Artificial Sequence
  Description of Artificial Sequence: Synthetic oligonucleotide
  Sense strand starting at position 77 of SEQ ID NO: 1562252
ucuggugguagaugagauu

SEQ ID NO: 1733574 - RNA, 19 nt, Artificial Sequence
  Description of Artificial Sequence: Synthetic oligonucleotide
  Antisense strand to SEQ ID NO: 1733573
aaucucaucuaccaccaga

SEQ ID NO: 1733575 - RNA, 19 nt, Artificial Sequence
  Description of Artificial Sequence: Synthetic oligonucleotide
  Sense strand starting at position 281 of SEQ ID NO: 1562252
ccauuaaaggucuagaguc

SEQ ID NO: 1733576 - RNA, 19 nt, Artificial Sequence
  Description of Artificial Sequence: Synthetic oligonucleotide
  Antisense strand to SEQ ID NO: 1733575
gacucuagaccuuuaaugg

SEQ ID NO: 1733577 - RNA, 19 nt, Artificial Sequence
  Description of Artificial Sequence: Synthetic oligonucleotide
  Sense strand starting at position 537 of SEQ ID NO: 1562252
gaggaaauggauugcuuua

SEQ ID NO: 1733578 - RNA, 19 nt, Artificial Sequence
  Description of Artificial Sequence: Synthetic oligonucleotide
  Antisense strand to SEQ ID NO: 1733577
uaaagcaauccauuuccuc

SEQ ID NO: 1733579 - RNA, 19 nt, Artificial Sequence
  Description of Artificial Sequence: Synthetic oligonucleotide
  Sense strand starting at position 539 of SEQ ID NO: 1562252
ggaaauggauugcuuuacu

SEQ ID NO: 1733580 - RNA, 19 nt, Artificial Sequence
  Description of Artificial Sequence: Synthetic oligonucleotide
  Antisense strand to SEQ ID NO: 1733579
aguaaagcaauccauuucc

SEQ ID NO: 1733581 - RNA, 19 nt, Artificial Sequence
  Description of Artificial Sequence: Synthetic oligonucleotide
  Sense strand starting at position 728 of SEQ ID NO: 1562252
ugucaugagccacagacau

SEQ ID NO: 1733582 - RNA, 19 nt, Artificial Sequence
  Description of Artificial Sequence: Synthetic oligonucleotide
  Antisense strand to SEQ ID NO: 1733581
augucuguggcucaugaca

SEQ ID NO: 1733583 - RNA, 19 nt, Artificial Sequence
  Description of Artificial Sequence: Synthetic oligonucleotide
  Sense strand starting at position 885 of SEQ ID NO: 1562252
ucagaauccuugcagauuu

SEQ ID NO: 1733584 - RNA, 19 nt, Artificial Sequence
  Description of Artificial Sequence: Synthetic oligonucleotide
  Antisense strand to SEQ ID NO: 1733583
aaaucugcaaggauucuga

SEQ ID NO: 1733585 - RNA, 19 nt, Artificial Sequence
  Description of Artificial Sequence: Synthetic oligonucleotide
  Sense strand starting at position 922 of SEQ ID NO: 1562252
gcaggauguuguccaagau

SEQ ID NO: 1733586 - RNA, 19 nt, Artificial Sequence
  Description of Artificial Sequence: Synthetic oligonucleotide
  Antisense strand to SEQ ID NO: 1733585
aucuuggacaacauccugc

SEQ ID NO: 1733587 - RNA, 19 nt, Artificial Sequence
  Description of Artificial Sequence: Synthetic oligonucleotide
  Sense strand starting at position 926 of SEQ ID NO: 1562252
gauguuguccaagaucucu

SEQ ID NO: 1733588 - RNA, 19 nt, Artificial Sequence
  Description of Artificial Sequence: Synthetic oligonucleotide
  Antisense strand to SEQ ID NO: 1733587
agagaucuuggacaacauc

SEQ ID NO: 1733589 - RNA, 19 nt, Artificial Sequence
  Description of Artificial Sequence: Synthetic oligonucleotide
  Sense strand starting at position 1011 of SEQ ID NO: 1562252
gaaacauuugcuggcugua

SEQ ID NO: 1733590 - RNA, 19 nt, Artificial Sequence
  Description of Artificial Sequence: Synthetic oligonucleotide
  Antisense strand to SEQ ID NO: 1733589
uacagccagcaaauguuuc

SEQ ID NO: 1733591 - RNA, 19 nt, Artificial Sequence
  Description of Artificial Sequence: Synthetic oligonucleotide
  Sense strand starting at position 1039 of SEQ ID NO: 1562252
gcagaacacucuguagcaa

SEQ ID NO: 1733592 - RNA, 19 nt, Artificial Sequence
  Description of Artificial Sequence: Synthetic oligonucleotide
  Antisense strand to SEQ ID NO: 1733591
uugcuacagaguguucugc

SEQ ID NO: 1733593 - RNA, 19 nt, Artificial Sequence
  Description of Artificial Sequence: Synthetic oligonucleotide
  Sense strand starting at position 1097 of SEQ ID NO: 1562252
ugcagaagcucuguagaau

SEQ ID NO: 1733594 - RNA, 19 nt, Artificial Sequence
  Description of Artificial Sequence: Synthetic oligonucleotide
  Antisense strand to SEQ ID NO: 1733593
auucuacagagcuucugca

SEQ ID NO: 1733595 - RNA, 19 nt, Artificial Sequence
  Description of Artificial Sequence: Synthetic oligonucleotide
  Sense strand starting at position 1098 of SEQ ID NO: 1562252
gcagaagcucuguagaaua

SEQ ID NO: 1733596 - RNA, 19 nt, Artificial Sequence
  Description of Artificial Sequence: Synthetic oligonucleotide
  Antisense strand to SEQ ID NO: 1733595
uauucuacagagcuucugc

SEQ ID NO: 1733597 - RNA, 19 nt, Artificial Sequence
  Description of Artificial Sequence: Synthetic oligonucleotide
  Sense strand starting at position 1246 of SEQ ID NO: 1562252
cccagaaccucuuuggaga

SEQ ID NO: 1733598 - RNA, 19 nt, Artificial Sequence
  Description of Artificial Sequence: Synthetic oligonucleotide
  Antisense strand to SEQ ID NO: 1733597
ucuccaaagagguucuggg

SEQ ID NO: 1733599 - RNA, 19 nt, Artificial Sequence
  Description of Artificial Sequence: Synthetic oligonucleotide
  Sense strand starting at position 1552 of SEQ ID NO: 1562252
ggcccuugccaguuugcaa

SEQ ID NO: 1733600 - RNA, 19 nt, Artificial Sequence
  Description of Artificial Sequence: Synthetic oligonucleotide
  Antisense strand to SEQ ID NO: 1733599
uugcaaacuggcaagggcc

SEQ ID NO: 1733601 - RNA, 19 nt, Artificial Sequence
  Description of Artificial Sequence: Synthetic oligonucleotide
  Sense strand starting at position 1709 of SEQ ID NO: 1562252
ccacaauucggaugucuca

SEQ ID NO: 1733602 - RNA, 19 nt, Artificial Sequence
  Description of Artificial Sequence: Synthetic oligonucleotide
  Antisense strand to SEQ ID NO: 1733601
ugagacauccgaauugugg

SEQ ID NO: 1733603 - RNA, 19 nt, Artificial Sequence
  Description of Artificial Sequence: Synthetic oligonucleotide
  Sense strand starting at position 1781 of SEQ ID NO: 1562252
uuguuaacacuguguaaug

SEQ ID NO: 1733604 - RNA, 19 nt, Artificial Sequence
  Description of Artificial Sequence: Synthetic oligonucleotide
  Antisense strand to SEQ ID NO: 1733603
cauuacacaguguuaacaa

SEQ ID NO: 1733605 - RNA, 19 nt, Artificial Sequence
  Description of Artificial Sequence: Synthetic oligonucleotide
  Sense strand starting at position 1792 of SEQ ID NO: 1562252
guguaaugucaauacuuau

SEQ ID NO: 1733606 - RNA, 19 nt, Artificial Sequence
  Description of Artificial Sequence: Synthetic oligonucleotide
  Antisense strand to SEQ ID NO: 1733605
auaaguauugacauuacac

SEQ ID NO: 1733607 - RNA, 19 nt, Artificial Sequence
  Description of Artificial Sequence: Synthetic oligonucleotide
  Sense strand starting at position 1826 of SEQ ID NO: 1562252
ggcuccuaguucucacaga

SEQ ID NO: 1733608 - RNA, 19 nt, Artificial Sequence
  Description of Artificial Sequence: Synthetic oligonucleotide
  Antisense strand to SEQ ID NO: 1733607
ucugugagaacuaggagcc

SEQ ID NO: 1733609 - RNA, 19 nt, Artificial Sequence
  Description of Artificial Sequence: Synthetic oligonucleotide
  Sense strand starting at position 1911 of SEQ ID NO: 1562252
ccggcaaaucggaguguaa

SEQ ID NO: 1733610 - RNA, 19 nt, Artificial Sequence
  Description of Artificial Sequence: Synthetic oligonucleotide
  Antisense strand to SEQ ID NO: 1733609
uuacacuccgauuugccgg

SEQ ID NO: 1733611 - RNA, 19 nt, Artificial Sequence
  Description of Artificial Sequence: Synthetic oligonucleotide
  Sense strand starting at position 1913 of SEQ ID NO: 1562252
ggcaaaucggaguguaaag

SEQ ID NO: 1733612 - RNA, 19 nt, Artificial Sequence
  Description of Artificial Sequence: Synthetic oligonucleotide
  Antisense strand to SEQ ID NO: 1733611
cuuuacacuccgauuugcc

SEQ ID NO: 1733613 - RNA, 19 nt, Artificial Sequence
  Description of Artificial Sequence: Synthetic oligonucleotide
  Sense strand starting at position 1948 of SEQ ID NO: 1562252
gaaacacuuccugagcgau

SEQ ID NO: 1733614 - RNA, 19 nt, Artificial Sequence
  Description of Artificial Sequence: Synthetic oligonucleotide
  Antisense strand to SEQ ID NO: 1733613
aucgcucaggaaguguuuc

SEQ ID NO: 1733615 - RNA, 19 nt, Artificial Sequence
  Description of Artificial Sequence: Synthetic oligonucleotide
  Sense strand starting at position 1951 of SEQ ID NO: 1562252
acacuuccugagcgauuau

SEQ ID NO: 1733616 - RNA, 19 nt, Artificial Sequence
  Description of Artificial Sequence: Synthetic oligonucleotide
  Antisense strand to SEQ ID NO: 1733615
auaaucgcucaggaagugu

SEQ ID NO: 1733617 - RNA, 19 nt, Artificial Sequence
  Description of Artificial Sequence: Synthetic oligonucleotide
  Sense strand starting at position 1960 of SEQ ID NO: 1562252
gagcgauuaucuuugugag

SEQ ID NO: 1733618 - RNA, 19 nt, Artificial Sequence
  Description of Artificial Sequence: Synthetic oligonucleotide
  Antisense strand to SEQ ID NO: 1733617
cucacaaagauaaucgcuc

SEQ ID NO: 1733619 - RNA, 19 nt, Artificial Sequence
  Description of Artificial Sequence: Synthetic oligonucleotide
  Sense strand starting at position 2230 of SEQ ID NO: 1562252
gcccuuguccagggaggaa

SEQ ID NO: 1733620 - RNA, 19 nt, Artificial Sequence
  Description of Artificial Sequence: Synthetic oligonucleotide
  Antisense strand to SEQ ID NO: 1733619
uuccucccuggacaagggc

SEQ ID NO: 1733621 - RNA, 19 nt, Artificial Sequence
  Description of Artificial Sequence: Synthetic oligonucleotide
  Sense strand starting at position 2358 of SEQ ID NO: 1562252
gaggcaggccucugagaag

SEQ ID NO: 1733622 - RNA, 19 nt, Artificial Sequence
  Description of Artificial Sequence: Synthetic oligonucleotide
  Antisense strand to SEQ ID NO: 1733621
cuucucagaggccugccuc

SEQ ID NO: 1733623 - RNA, 19 nt, Artificial Sequence
  Description of Artificial Sequence: Synthetic oligonucleotide
  Sense strand starting at position 2474 of SEQ ID NO: 1562252
ggagcagaguggucaaguu

SEQ ID NO: 1733624 - RNA, 19 nt, Artificial Sequence
  Description of Artificial Sequence: Synthetic oligonucleotide
  Antisense strand to SEQ ID NO: 1733623
aacuugaccacucugcucc

SEQ ID NO: 1733625 - RNA, 19 nt, Artificial Sequence
  Description of Artificial Sequence: Synthetic oligonucleotide
  Sense strand starting at position 2632 of SEQ ID NO: 1562252
cgguccuuacccuaagaaa

SEQ ID NO: 1733626 - RNA, 19 nt, Artificial Sequence
  Description of Artificial Sequence: Synthetic oligonucleotide
  Antisense strand to SEQ ID NO: 1733625
uuucuuaggguaaggaccg

SEQ ID NO: 1733627 - RNA, 19 nt, Artificial Sequence
  Description of Artificial Sequence: Synthetic oligonucleotide
  Sense strand starting at position 2671 of SEQ ID NO: 1562252
ggccacaugccuggaucua

SEQ ID NO: 1733628 - RNA, 19 nt, Artificial Sequence
  Description of Artificial Sequence: Synthetic oligonucleotide
  Antisense strand to SEQ ID NO: 1733627
uagauccaggcauguggcc

SEQ ID NO: 1733629 - RNA, 19 nt, Artificial Sequence
  Description of Artificial Sequence: Synthetic oligonucleotide
  Sense strand starting at position 2735 of SEQ ID NO: 1562252
cuaaaccugucaguuaaac

SEQ ID NO: 1733630 - RNA, 19 nt, Artificial Sequence
  Description of Artificial Sequence: Synthetic oligonucleotide
  Antisense strand to SEQ ID NO: 1733629
guuuaacugacagguuuag

SEQ ID NO: 1733631 - RNA, 19 nt, Artificial Sequence
  Description of Artificial Sequence: Synthetic oligonucleotide
  Sense strand starting at position 2765 of SEQ ID NO: 1562252
uuccguauuagccugcgau

SEQ ID NO: 1733632 - RNA, 19 nt, Artificial Sequence
  Description of Artificial Sequence: Synthetic oligonucleotide
  Antisense strand to SEQ ID NO: 1733631
aucgcaggcuaauacggaa

SEQ ID NO: 1733633 - RNA, 19 nt, Artificial Sequence
  Description of Artificial Sequence: Synthetic oligonucleotide
  Sense strand starting at position 3389 of SEQ ID NO: 1562252
uggucuccucccuaaagcu

SEQ ID NO: 1733634 - RNA, 19 nt, Artificial Sequence
  Description of Artificial Sequence: Synthetic oligonucleotide
  Antisense strand to SEQ ID NO: 1733633
agcuuuagggaggagacca

SEQ ID NO: 1733635 - RNA, 19 nt, Artificial Sequence
  Description of Artificial Sequence: Synthetic oligonucleotide
  Sense strand starting at position 3417 of SEQ ID NO: 1562252
guuggucuguacccagaga

SEQ ID NO: 1733636 - RNA, 19 nt, Artificial Sequence
  Description of Artificial Sequence: Synthetic oligonucleotide
  Antisense strand to SEQ ID NO: 1733635
ucucuggguacagaccaac

SEQ ID NO: 1733637 - RNA, 19 nt, Artificial Sequence
  Description of Artificial Sequence: Synthetic oligonucleotide
  Sense strand starting at position 3418 of SEQ ID NO: 1562252
uuggucuguacccagagau

SEQ ID NO: 1733638 - RNA, 19 nt, Artificial Sequence
  Description of Artificial Sequence: Synthetic oligonucleotide
  Antisense strand to SEQ ID NO: 1733637
aucucuggguacagaccaa

SEQ ID NO: 1733639 - RNA, 19 nt, Artificial Sequence
  Description of Artificial Sequence: Synthetic oligonucleotide
  Sense strand starting at position 3497 of SEQ ID NO: 1562252
augacaaggugcuuaauua

SEQ ID NO: 1733640 - RNA, 19 nt, Artificial Sequence
  Description of Artificial Sequence: Synthetic oligonucleotide
  Antisense strand to SEQ ID NO: 1733639
uaauuaagcaccuugucau

SEQ ID NO: 1733641 - RNA, 19 nt, Artificial Sequence
  Description of Artificial Sequence: Synthetic oligonucleotide
  Sense strand starting at position 3498 of SEQ ID NO: 1562252
ugacaaggugcuuaauuaa

SEQ ID NO: 1733642 - RNA, 19 nt, Artificial Sequence
  Description of Artificial Sequence: Synthetic oligonucleotide
  Antisense strand to SEQ ID NO: 1733641
uuaauuaagcaccuuguca

SEQ ID NO: 1733643 - RNA, 19 nt, Artificial Sequence
  Description of Artificial Sequence: Synthetic oligonucleotide
  Sense strand starting at position 3568 of SEQ ID NO: 1562252
uucuuuagaggcuggagaa

SEQ ID NO: 1733644 - RNA, 19 nt, Artificial Sequence
  Description of Artificial Sequence: Synthetic oligonucleotide
  Antisense strand to SEQ ID NO: 1733643
uucuccagccucuaaagaa

SEQ ID NO: 1733645 - RNA, 19 nt, Artificial Sequence
  Description of Artificial Sequence: Synthetic oligonucleotide
  Sense strand starting at position 3569 of SEQ ID NO: 1562252
ucuuuagaggcuggagaaa

SEQ ID NO: 1733646 - RNA, 19 nt, Artificial Sequence
  Description of Artificial Sequence: Synthetic oligonucleotide
  Antisense strand to SEQ ID NO: 1733645
uuucuccagccucuaaaga

SEQ ID NO: 1733647 - RNA, 19 nt, Artificial Sequence
  Description of Artificial Sequence: Synthetic oligonucleotide
  Sense strand starting at position 3581 of SEQ ID NO: 1562252
ggagaaagcguccagaguu

SEQ ID NO: 1733648 - RNA, 19 nt, Artificial Sequence
  Description of Artificial Sequence: Synthetic oligonucleotide
  Antisense strand to SEQ ID NO: 1733647
aacucuggacgcuuucucc

SEQ ID NO: 1733649 - RNA, 19 nt, Artificial Sequence
  Description of Artificial Sequence: Synthetic oligonucleotide
  Sense strand starting at position 3606 of SEQ ID NO: 1562252
gccauaugccaggaggcau

SEQ ID NO: 1733650 - RNA, 19 nt, Artificial Sequence
  Description of Artificial Sequence: Synthetic oligonucleotide
  Antisense strand to SEQ ID NO: 1733649
augccuccuggcauauggc

SEQ ID NO: 1733651 - RNA, 19 nt, Artificial Sequence
  Description of Artificial Sequence: Synthetic oligonucleotide
  Sense strand starting at position 3620 of SEQ ID NO: 1562252
ggcauaacuccggagcaau

SEQ ID NO: 1733652 - RNA, 19 nt, Artificial Sequence
  Description of Artificial Sequence: Synthetic oligonucleotide
  Antisense strand to SEQ ID NO: 1733651
auugcuccggaguuaugcc

SEQ ID NO: 1733653 - RNA, 19 nt, Artificial Sequence
  Description of Artificial Sequence: Synthetic oligonucleotide
  Sense strand starting at position 17 of SEQ ID NO: 1562253
gguguaaugaaugagagca

SEQ ID NO: 1733654 - RNA, 19 nt, Artificial Sequence
  Description of Artificial Sequence: Synthetic oligonucleotide
  Antisense strand to SEQ ID NO: 1733653
ugcucucauucauuacacc

SEQ ID NO: 1733655 - RNA, 19 nt, Artificial Sequence
  Description of Artificial Sequence: Synthetic oligonucleotide
  Sense strand starting at position 135 of SEQ ID NO: 1562253
guagaacacagacgucaaa

SEQ ID NO: 1733656 - RNA, 19 nt, Artificial Sequence
  Description of Artificial Sequence: Synthetic oligonucleotide
  Antisense strand to SEQ ID NO: 1733655
uuugacgucuguguucuac

SEQ ID NO: 1733657 - RNA, 19 nt, Artificial Sequence
  Description of Artificial Sequence: Synthetic oligonucleotide
  Sense strand starting at position 168 of SEQ ID NO: 1562253
acccacucaugguucgaaa

SEQ ID NO: 1733658 - RNA, 19 nt, Artificial Sequence
  Description of Artificial Sequence: Synthetic oligonucleotide
  Antisense strand to SEQ ID NO: 1733657
uuucgaaccaugagugggu

SEQ ID NO: 1733659 - RNA, 19 nt, Artificial Sequence
  Description of Artificial Sequence: Synthetic oligonucleotide
  Sense strand starting at position 170 of SEQ ID NO: 1562253
ccacucaugguucgaaaug

SEQ ID NO: 1733660 - RNA, 19 nt, Artificial Sequence
  Description of Artificial Sequence: Synthetic oligonucleotide
  Antisense strand to SEQ ID NO: 1733659
cauuucgaaccaugagugg

SEQ ID NO: 1733661 - RNA, 19 nt, Artificial Sequence
  Description of Artificial Sequence: Synthetic oligonucleotide
  Sense strand starting at position 722 of SEQ ID NO: 1562253
gaggaaauguggcugugga

SEQ ID NO: 1733662 - RNA, 19 nt, Artificial Sequence
  Description of Artificial Sequence: Synthetic oligonucleotide
  Antisense strand to SEQ ID NO: 1733661
uccacagccacauuuccuc

SEQ ID NO: 1733663 - RNA, 19 nt, Artificial Sequence
  Description of Artificial Sequence: Synthetic oligonucleotide
  Sense strand starting at position 769 of SEQ ID NO: 1562253
gacggugaacucuggauug

SEQ ID NO: 1733664 - RNA, 19 nt, Artificial Sequence
  Description of Artificial Sequence: Synthetic oligonucleotide
  Antisense strand to SEQ ID NO: 1733663
caauccagaguucaccguc

SEQ ID NO: 1733665 - RNA, 19 nt, Artificial Sequence
  Description of Artificial Sequence: Synthetic oligonucleotide
  Sense strand starting at position 771 of SEQ ID NO: 1562253
cggugaacucuggauugca

SEQ ID NO: 1733666 - RNA, 19 nt, Artificial Sequence
  Description of Artificial Sequence: Synthetic oligonucleotide
  Antisense strand to SEQ ID NO: 1733665
ugcaauccagaguucaccg

SEQ ID NO: 1733667 - RNA, 19 nt, Artificial Sequence
  Description of Artificial Sequence: Synthetic oligonucleotide
  Sense strand starting at position 779 of SEQ ID NO: 1562253
ucuggauugcaaggauucu

SEQ ID NO: 1733668 - RNA, 19 nt, Artificial Sequence
  Description of Artificial Sequence: Synthetic oligonucleotide
  Antisense strand to SEQ ID NO: 1733667
agaauccuugcaauccaga

SEQ ID NO: 1733669 - RNA, 19 nt, Artificial Sequence
  Description of Artificial Sequence: Synthetic oligonucleotide
  Sense strand starting at position 841 of SEQ ID NO: 1562253
aaguguugaaucuggguga

SEQ ID NO: 1733670 - RNA, 19 nt, Artificial Sequence
  Description of Artificial Sequence: Synthetic oligonucleotide
  Antisense strand to SEQ ID NO: 1733669
ucacccagauucaacacuu

SEQ ID NO: 1733671 - RNA, 19 nt, Artificial Sequence
  Description of Artificial Sequence: Synthetic oligonucleotide
  Sense strand starting at position 863 of SEQ ID NO: 1562253
agaucuggucuauagaguu

SEQ ID NO: 1733672 - RNA, 19 nt, Artificial Sequence
  Description of Artificial Sequence: Synthetic oligonucleotide
  Antisense strand to SEQ ID NO: 1733671
aacucuauagaccagaucu

SEQ ID NO: 1733673 - RNA, 19 nt, Artificial Sequence
  Description of Artificial Sequence: Synthetic oligonucleotide
  Sense strand starting at position 898 of SEQ ID NO: 1562253
guuugaaauuucuccgcaa

SEQ ID NO: 1733674 - RNA, 19 nt, Artificial Sequence
  Description of Artificial Sequence: Synthetic oligonucleotide
  Antisense strand to SEQ ID NO: 1733673
uugcggagaaauuucaaac

SEQ ID NO: 1733675 - RNA, 19 nt, Artificial Sequence
  Description of Artificial Sequence: Synthetic oligonucleotide
  Sense strand starting at position 2247 of SEQ ID NO: 1562253
ggcgaacgucaugucguau

SEQ ID NO: 1733676 - RNA, 19 nt, Artificial Sequence
  Description of Artificial Sequence: Synthetic oligonucleotide
  Antisense strand to SEQ ID NO: 1733675
auacgacaugacguucgcc

SEQ ID NO: 1733677 - RNA, 19 nt, Artificial Sequence
  Description of Artificial Sequence: Synthetic oligonucleotide
  Sense strand starting at position 2248 of SEQ ID NO: 1562253
gcgaacgucaugucguaua

SEQ ID NO: 1733678 - RNA, 19 nt, Artificial Sequence
  Description of Artificial Sequence: Synthetic oligonucleotide
  Antisense strand to SEQ ID NO: 1733677
uauacgacaugacguucgc

SEQ ID NO: 1733679 - RNA, 19 nt, Artificial Sequence
  Description of Artificial Sequence: Synthetic oligonucleotide
  Sense strand starting at position 2408 of SEQ ID NO: 1562253
uuugaaauccacgaaguua

SEQ ID NO: 1733680 - RNA, 19 nt, Artificial Sequence
  Description of Artificial Sequence: Synthetic oligonucleotide
  Antisense strand to SEQ ID NO: 1733679
uaacuucguggauuucaaa

SEQ ID NO: 1733681 - RNA, 19 nt, Artificial Sequence
  Description of Artificial Sequence: Synthetic oligonucleotide
  Sense strand starting at position 2515 of SEQ ID NO: 1562253
ccgggauccugguugagaa

SEQ ID NO: 1733682 - RNA, 19 nt, Artificial Sequence
  Description of Artificial Sequence: Synthetic oligonucleotide
  Antisense strand to SEQ ID NO: 1733681
uucucaaccaggaucccgg

SEQ ID NO: 1733683 - RNA, 19 nt, Artificial Sequence
  Description of Artificial Sequence: Synthetic oligonucleotide
  Sense strand starting at position 2516 of SEQ ID NO: 1562253
cgggauccugguugagaac

SEQ ID NO: 1733684 - RNA, 19 nt, Artificial Sequence
  Description of Artificial Sequence: Synthetic oligonucleotide
  Antisense strand to SEQ ID NO: 1733683
guucucaaccaggaucccg

SEQ ID NO: 1733685 - RNA, 19 nt, Artificial Sequence
  Description of Artificial Sequence: Synthetic oligonucleotide
  Sense strand starting at position 2669 of SEQ ID NO: 1562253
cuuugucauucucuuggaa

SEQ ID NO: 1733686 - RNA, 19 nt, Artificial Sequence
  Description of Artificial Sequence: Synthetic oligonucleotide
  Antisense strand to SEQ ID NO: 1733685
uuccaagagaaugacaaag

SEQ ID NO: 1733687 - RNA, 19 nt, Artificial Sequence
  Description of Artificial Sequence: Synthetic oligonucleotide
  Sense strand starting at position 2750 of SEQ ID NO: 1562253
uagcucucagagggugaau

SEQ ID NO: 1733688 - RNA, 19 nt, Artificial Sequence
  Description of Artificial Sequence: Synthetic oligonucleotide
  Antisense strand to SEQ ID NO: 1733687
auucacccucugagagcua

SEQ ID NO: 1733689 - RNA, 19 nt, Artificial Sequence
  Description of Artificial Sequence: Synthetic oligonucleotide
  Sense strand starting at position 2881 of SEQ ID NO: 1562253
ccucaugagucagucauca

SEQ ID NO: 1733690 - RNA, 19 nt, Artificial Sequence
  Description of Artificial Sequence: Synthetic oligonucleotide
  Antisense strand to SEQ ID NO: 1733689
ugaugacugacucaugagg

SEQ ID NO: 1733691 - RNA, 19 nt, Artificial Sequence
  Description of Artificial Sequence: Synthetic oligonucleotide
  Sense strand starting at position 2885 of SEQ ID NO: 1562253
augagucagucaucaccaa

SEQ ID NO: 1733692 - RNA, 19 nt, Artificial Sequence
  Description of Artificial Sequence: Synthetic oligonucleotide
  Antisense strand to SEQ ID NO: 1733691
uuggugaugacugacucau

SEQ ID NO: 1733693 - RNA, 19 nt, Artificial Sequence
  Description of Artificial Sequence: Synthetic oligonucleotide
  Sense strand starting at position 2900 of SEQ ID NO: 1562253
ccaagaaauuaguuguuaa

SEQ ID NO: 1733694 - RNA, 19 nt, Artificial Sequence
  Description of Artificial Sequence: Synthetic oligonucleotide
  Antisense strand to SEQ ID NO: 1733693
uuaacaacuaauuucuugg

SEQ ID NO: 1733695 - RNA, 19 nt, Artificial Sequence
  Description of Artificial Sequence: Synthetic oligonucleotide
  Sense strand starting at position 3010 of SEQ ID NO: 1562253
aucucuuaagccuggaaau

SEQ ID NO: 1733696 - RNA, 19 nt, Artificial Sequence
  Description of Artificial Sequence: Synthetic oligonucleotide
  Antisense strand to SEQ ID NO: 1733695
auuuccaggcuuaagagau

SEQ ID NO: 1733697 - RNA, 19 nt, Artificial Sequence
  Description of Artificial Sequence: Synthetic oligonucleotide
  Sense strand starting at position 3011 of SEQ ID NO: 1562253
ucucuuaagccuggaaaug

SEQ ID NO: 1733698 - RNA, 19 nt, Artificial Sequence
  Description of Artificial Sequence: Synthetic oligonucleotide
  Antisense strand to SEQ ID NO: 1733697
cauuuccaggcuuaagaga

SEQ ID NO: 1733699 - RNA, 19 nt, Artificial Sequence
  Description of Artificial Sequence: Synthetic oligonucleotide
  Sense strand starting at position 3122 of SEQ ID NO: 1562253
acagaaucucagggucuga

SEQ ID NO: 1733700 - RNA, 19 nt, Artificial Sequence
  Description of Artificial Sequence: Synthetic oligonucleotide
  Antisense strand to SEQ ID NO: 1733699
ucagacccugagauucugu

SEQ ID NO: 1733701 - RNA, 19 nt, Artificial Sequence
  Description of Artificial Sequence: Synthetic oligonucleotide
  Sense strand starting at position 3157 of SEQ ID NO: 1562253
ucaugaccacagugagauu

SEQ ID NO: 1733702 - RNA, 19 nt, Artificial Sequence
  Description of Artificial Sequence: Synthetic oligonucleotide
  Antisense strand to SEQ ID NO: 1733701
aaucucacuguggucauga

SEQ ID NO: 1733703 - RNA, 19 nt, Artificial Sequence
  Description of Artificial Sequence: Synthetic oligonucleotide
  Sense strand starting at position 3298 of SEQ ID NO: 1562253
uuugacagaccucagcauu

SEQ ID NO: 1733704 - RNA, 19 nt, Artificial Sequence
  Description of Artificial Sequence: Synthetic oligonucleotide
  Antisense strand to SEQ ID NO: 1733703
aaugcugaggucugucaaa

SEQ ID NO: 1733705 - RNA, 19 nt, Artificial Sequence
  Description of Artificial Sequence: Synthetic oligonucleotide
  Sense strand starting at position 3419 of SEQ ID NO: 1562253
ugccauaccucaucuggaa

SEQ ID NO: 1733706 - RNA, 19 nt, Artificial Sequence
  Description of Artificial Sequence: Synthetic oligonucleotide
  Antisense strand to SEQ ID NO: 1733705
uuccagaugagguauggca

SEQ ID NO: 1733707 - RNA, 19 nt, Artificial Sequence
  Description of Artificial Sequence: Synthetic oligonucleotide
  Sense strand starting at position 3497 of SEQ ID NO: 1562253
gugaaaccuucccugauca

SEQ ID NO: 1733708 - RNA, 19 nt, Artificial Sequence
  Description of Artificial Sequence: Synthetic oligonucleotide
  Antisense strand to SEQ ID NO: 1733707
ugaucagggaagguuucac

SEQ ID NO: 1733709 - RNA, 19 nt, Artificial Sequence
  Description of Artificial Sequence: Synthetic oligonucleotide
  Sense strand starting at position 3668 of SEQ ID NO: 1562253
ggaagauguuguguaauaa

SEQ ID NO: 1733710 - RNA, 19 nt, Artificial Sequence
  Description of Artificial Sequence: Synthetic oligonucleotide
  Antisense strand to SEQ ID NO: 1733709
uuauuacacaacaucuucc

SEQ ID NO: 1733711 - RNA, 19 nt, Artificial Sequence
  Description of Artificial Sequence: Synthetic oligonucleotide
  Sense strand starting at position 3669 of SEQ ID NO: 1562253
gaagauguuguguaauaau

SEQ ID NO: 1733712 - RNA, 19 nt, Artificial Sequence
  Description of Artificial Sequence: Synthetic oligonucleotide
  Antisense strand to SEQ ID NO: 1733711
auuauuacacaacaucuuc

SEQ ID NO: 1733713 - RNA, 19 nt, Artificial Sequence
  Description of Artificial Sequence: Synthetic oligonucleotide
  Sense strand starting at position 3732 of SEQ ID NO: 1562253
gguuguugcuauuucugaa

SEQ ID NO: 1733714 - RNA, 19 nt, Artificial Sequence
  Description of Artificial Sequence: Synthetic oligonucleotide
  Antisense strand to SEQ ID NO: 1733713
uucagaaauagcaacaacc

SEQ ID NO: 1733715 - RNA, 19 nt, Artificial Sequence
  Description of Artificial Sequence: Synthetic oligonucleotide
  Sense strand starting at position 3749 of SEQ ID NO: 1562253
aaccauauaccucgguaga

SEQ ID NO: 1733716 - RNA, 19 nt, Artificial Sequence
  Description of Artificial Sequence: Synthetic oligonucleotide
  Antisense strand to SEQ ID NO: 1733715
ucuaccgagguauaugguu

SEQ ID NO: 1733717 - RNA, 19 nt, Artificial Sequence
  Description of Artificial Sequence: Synthetic oligonucleotide
  Sense strand starting at position 3750 of SEQ ID NO: 1562253
accauauaccucgguagau

SEQ ID NO: 1733718 - RNA, 19 nt, Artificial Sequence
  Description of Artificial Sequence: Synthetic oligonucleotide
  Antisense strand to SEQ ID NO: 1733717
aucuaccgagguauauggu

SEQ ID NO: 1733719 - RNA, 19 nt, Artificial Sequence
  Description of Artificial Sequence: Synthetic oligonucleotide
  Sense strand starting at position 3751 of SEQ ID NO: 1562253
ccauauaccucgguagauc

SEQ ID NO: 1733720 - RNA, 19 nt, Artificial Sequence
  Description of Artificial Sequence: Synthetic oligonucleotide
  Antisense strand to SEQ ID NO: 1733719
gaucuaccgagguauaugg

SEQ ID NO: 1733721 - RNA, 19 nt, Artificial Sequence
  Description of Artificial Sequence: Synthetic oligonucleotide
  Sense strand starting at position 3752 of SEQ ID NO: 1562253
cauauaccucgguagauca

SEQ ID NO: 1733722 - RNA, 19 nt, Artificial Sequence
  Description of Artificial Sequence: Synthetic oligonucleotide
  Antisense strand to SEQ ID NO: 1733721
ugaucuaccgagguauaug

SEQ ID NO: 1733723 - RNA, 19 nt, Artificial Sequence
  Description of Artificial Sequence: Synthetic oligonucleotide
  Sense strand starting at position 3796 of SEQ ID NO: 1562253
gcauacaugucacuuggga

SEQ ID NO: 1733724 - RNA, 19 nt, Artificial Sequence
  Description of Artificial Sequence: Synthetic oligonucleotide
  Antisense strand to SEQ ID NO: 1733723
ucccaagugacauguaugc

SEQ ID NO: 1733725 - RNA, 19 nt, Artificial Sequence
  Description of Artificial Sequence: Synthetic oligonucleotide
  Sense strand starting at position 3812 of SEQ ID NO: 1562253
ggaucuuguaagcagcaaa

SEQ ID NO: 1733726 - RNA, 19 nt, Artificial Sequence
  Description of Artificial Sequence: Synthetic oligonucleotide
  Antisense strand to SEQ ID NO: 1733725
uuugcugcuuacaagaucc

SEQ ID NO: 1733727 - RNA, 19 nt, Artificial Sequence
  Description of Artificial Sequence: Synthetic oligonucleotide
  Sense strand starting at position 3924 of SEQ ID NO: 1562253
guaacaaggcuuuaaacca

SEQ ID NO: 1733728 - RNA, 19 nt, Artificial Sequence
  Description of Artificial Sequence: Synthetic oligonucleotide
  Antisense strand to SEQ ID NO: 1733727
ugguuuaaagccuuguuac

SEQ ID NO: 1733729 - RNA, 19 nt, Artificial Sequence
  Description of Artificial Sequence: Synthetic oligonucleotide
  Sense strand starting at position 3948 of SEQ ID NO: 1562253
gggcucagaucuuuaaauu

SEQ ID NO: 1733730 - RNA, 19 nt, Artificial Sequence
  Description of Artificial Sequence: Synthetic oligonucleotide
  Antisense strand to SEQ ID NO: 1733729
aauuuaaagaucugagccc

SEQ ID NO: 1733731 - RNA, 19 nt, Artificial Sequence
  Description of Artificial Sequence: Synthetic oligonucleotide
  Sense strand starting at position 3949 of SEQ ID NO: 1562253
ggcucagaucuuuaaauug

SEQ ID NO: 1733732 - RNA, 19 nt, Artificial Sequence
  Description of Artificial Sequence: Synthetic oligonucleotide
  Antisense strand to SEQ ID NO: 1733731
caauuuaaagaucugagcc

SEQ ID NO: 1733733 - RNA, 19 nt, Artificial Sequence
  Description of Artificial Sequence: Synthetic oligonucleotide
  Sense strand starting at position 1 of SEQ ID NO: 1562254
agauacugauugggaacaa

SEQ ID NO: 1733734 - RNA, 19 nt, Artificial Sequence
  Description of Artificial Sequence: Synthetic oligonucleotide
  Antisense strand to SEQ ID NO: 1733733
uuguucccaaucaguaucu

SEQ ID NO: 1733735 - RNA, 19 nt, Artificial Sequence
  Description of Artificial Sequence: Synthetic oligonucleotide
  Sense strand starting at position 274 of SEQ ID NO: 1562254
gcguugucuggagauggga

SEQ ID NO: 1733736 - RNA, 19 nt, Artificial Sequence
  Description of Artificial Sequence: Synthetic oligonucleotide
  Antisense strand to SEQ ID NO: 1733735
ucccaucuccagacaacgc

SEQ ID NO: 1733737 - RNA, 19 nt, Artificial Sequence
  Description of Artificial Sequence: Synthetic oligonucleotide
  Sense strand starting at position 276 of SEQ ID NO: 1562254
guugucuggagaugggaau

SEQ ID NO: 1733738 - RNA, 19 nt, Artificial Sequence
  Description of Artificial Sequence: Synthetic oligonucleotide
  Antisense strand to SEQ ID NO: 1733737
auucccaucuccagacaac

SEQ ID NO: 1733739 - RNA, 19 nt, Artificial Sequence
  Description of Artificial Sequence: Synthetic oligonucleotide
  Sense strand starting at position 355 of SEQ ID NO: 1562254
gcagcuuacccagauggau

SEQ ID NO: 1733740 - RNA, 19 nt, Artificial Sequence
  Description of Artificial Sequence: Synthetic oligonucleotide
  Antisense strand to SEQ ID NO: 1733739
auccaucuggguaagcugc

SEQ ID NO: 1733741 - RNA, 19 nt, Artificial Sequence
  Description of Artificial Sequence: Synthetic oligonucleotide
  Sense strand starting at position 367 of SEQ ID NO: 1562254
gauggauuccuucgggaag

SEQ ID NO: 1733742 - RNA, 19 nt, Artificial Sequence
  Description of Artificial Sequence: Synthetic oligonucleotide
  Antisense strand to SEQ ID NO: 1733741
cuucccgaaggaauccauc

SEQ ID NO: 1733743 - RNA, 19 nt, Artificial Sequence
  Description of Artificial Sequence: Synthetic oligonucleotide
  Sense strand starting at position 713 of SEQ ID NO: 1562254
gcccuuauuuguuucucca

SEQ ID NO: 1733744 - RNA, 19 nt, Artificial Sequence
  Description of Artificial Sequence: Synthetic oligonucleotide
  Antisense strand to SEQ ID NO: 1733743
uggagaaacaaauaagggc

SEQ ID NO: 1733745 - RNA, 19 nt, Artificial Sequence
  Description of Artificial Sequence: Synthetic oligonucleotide
  Sense strand starting at position 891 of SEQ ID NO: 1562254
cccguuucagggugagauu

SEQ ID NO: 1733746 - RNA, 19 nt, Artificial Sequence
  Description of Artificial Sequence: Synthetic oligonucleotide
  Antisense strand to SEQ ID NO: 1733745
aaucucacccugaaacggg

SEQ ID NO: 1733747 - RNA, 19 nt, Artificial Sequence
  Description of Artificial Sequence: Synthetic oligonucleotide
  Sense strand starting at position 1183 of SEQ ID NO: 1562254
ccgauuugccauuaugugu

SEQ ID NO: 1733748 - RNA, 19 nt, Artificial Sequence
  Description of Artificial Sequence: Synthetic oligonucleotide
  Antisense strand to SEQ ID NO: 1733747
acacauaauggcaaaucgg

SEQ ID NO: 1733749 - RNA, 19 nt, Artificial Sequence
  Description of Artificial Sequence: Synthetic oligonucleotide
  Sense strand starting at position 1189 of SEQ ID NO: 1562254
ugccauuauguguccgcau

SEQ ID NO: 1733750 - RNA, 19 nt, Artificial Sequence
  Description of Artificial Sequence: Synthetic oligonucleotide
  Antisense strand to SEQ ID NO: 1733749
augcggacacauaauggca

SEQ ID NO: 1733751 - RNA, 19 nt, Artificial Sequence
  Description of Artificial Sequence: Synthetic oligonucleotide
  Sense strand starting at position 1231 of SEQ ID NO: 1562254
ccuugaaucuucuuccgca

SEQ ID NO: 1733752 - RNA, 19 nt, Artificial Sequence
  Description of Artificial Sequence: Synthetic oligonucleotide
  Antisense strand to SEQ ID NO: 1733751
ugcggaagaagauucaagg

SEQ ID NO: 1733753 - RNA, 19 nt, Artificial Sequence
  Description of Artificial Sequence: Synthetic oligonucleotide
  Sense strand starting at position 1238 of SEQ ID NO: 1562254
ucuucuuccgcacauguua

SEQ ID NO: 1733754 - RNA, 19 nt, Artificial Sequence
  Description of Artificial Sequence: Synthetic oligonucleotide
  Antisense strand to SEQ ID NO: 1733753
uaacaugugcggaagaaga

SEQ ID NO: 1733755 - RNA, 19 nt, Artificial Sequence
  Description of Artificial Sequence: Synthetic oligonucleotide
  Sense strand starting at position 1249 of SEQ ID NO: 1562254
acauguuacacccguaagu

SEQ ID NO: 1733756 - RNA, 19 nt, Artificial Sequence
  Description of Artificial Sequence: Synthetic oligonucleotide
  Antisense strand to SEQ ID NO: 1733755
acuuacggguguaacaugu

SEQ ID NO: 1733757 - RNA, 19 nt, Artificial Sequence
  Description of Artificial Sequence: Synthetic oligonucleotide
  Sense strand starting at position 1251 of SEQ ID NO: 1562254
auguuacacccguaaguga

SEQ ID NO: 1733758 - RNA, 19 nt, Artificial Sequence
  Description of Artificial Sequence: Synthetic oligonucleotide
  Antisense strand to SEQ ID NO: 1733757
ucacuuacggguguaacau

SEQ ID NO: 1733759 - RNA, 19 nt, Artificial Sequence
  Description of Artificial Sequence: Synthetic oligonucleotide
  Sense strand starting at position 1260 of SEQ ID NO: 1562254
ccguaagugaaagaaucuu

SEQ ID NO: 1733760 - RNA, 19 nt, Artificial Sequence
  Description of Artificial Sequence: Synthetic oligonucleotide
  Antisense strand to SEQ ID NO: 1733759
aagauucuuucacuuacgg

SEQ ID NO: 1733761 - RNA, 19 nt, Artificial Sequence
  Description of Artificial Sequence: Synthetic oligonucleotide
  Sense strand starting at position 1266 of SEQ ID NO: 1562254
gugaaagaaucuuugugug

SEQ ID NO: 1733762 - RNA, 19 nt, Artificial Sequence
  Description of Artificial Sequence: Synthetic oligonucleotide
  Antisense strand to SEQ ID NO: 1733761
cacacaaagauucuuucac

SEQ ID NO: 1733763 - RNA, 19 nt, Artificial Sequence
  Description of Artificial Sequence: Synthetic oligonucleotide
  Sense strand starting at position 1268 of SEQ ID NO: 1562254
gaaagaaucuuuguguguu

SEQ ID NO: 1733764 - RNA, 19 nt, Artificial Sequence
  Description of Artificial Sequence: Synthetic oligonucleotide
  Antisense strand to SEQ ID NO: 1733763
aacacacaaagauucuuuc

SEQ ID NO: 1733765 - RNA, 19 nt, Artificial Sequence
  Description of Artificial Sequence: Synthetic oligonucleotide
  Sense strand starting at position 1272 of SEQ ID NO: 1562254
gaaucuuuguguguucuca

SEQ ID NO: 1733766 - RNA, 19 nt, Artificial Sequence
  Description of Artificial Sequence: Synthetic oligonucleotide
  Antisense strand to SEQ ID NO: 1733765
ugagaacacacaaagauuc

SEQ ID NO: 1733767 - RNA, 19 nt, Artificial Sequence
  Description of Artificial Sequence: Synthetic oligonucleotide
  Sense strand starting at position 1402 of SEQ ID NO: 1562254
uaucaagcggacugagaua

SEQ ID NO: 1733768 - RNA, 19 nt, Artificial Sequence
  Description of Artificial Sequence: Synthetic oligonucleotide
  Antisense strand to SEQ ID NO: 1733767
uaucucaguccgcuugaua

SEQ ID NO: 1733769 - RNA, 19 nt, Artificial Sequence
  Description of Artificial Sequence: Synthetic oligonucleotide
  Sense strand starting at position 1476 of SEQ ID NO: 1562254
aagacauguuuauuaaggu

SEQ ID NO: 1733770 - RNA, 19 nt, Artificial Sequence
  Description of Artificial Sequence: Synthetic oligonucleotide
  Antisense strand to SEQ ID NO: 1733769
accuuaauaaacaugucuu

SEQ ID NO: 1733771 - RNA, 19 nt, Artificial Sequence
  Description of Artificial Sequence: Synthetic oligonucleotide
  Sense strand starting at position 1485 of SEQ ID NO: 1562254
uuauuaaggucuucugaau

SEQ ID NO: 1733772 - RNA, 19 nt, Artificial Sequence
  Description of Artificial Sequence: Synthetic oligonucleotide
  Antisense strand to SEQ ID NO: 1733771
auucagaagaccuuaauaa

SEQ ID NO: 1733773 - RNA, 19 nt, Artificial Sequence
  Description of Artificial Sequence: Synthetic oligonucleotide
  Sense strand starting at position 1493 of SEQ ID NO: 1562254
gucuucugaaugugugaag

SEQ ID NO: 1733774 - RNA, 19 nt, Artificial Sequence
  Description of Artificial Sequence: Synthetic oligonucleotide
  Antisense strand to SEQ ID NO: 1733773
cuucacacauucagaagac

SEQ ID NO: 1733775 - RNA, 19 nt, Artificial Sequence
  Description of Artificial Sequence: Synthetic oligonucleotide
  Sense strand starting at position 1688 of SEQ ID NO: 1562254
gagggauugaguuggcaug

SEQ ID NO: 1733776 - RNA, 19 nt, Artificial Sequence
  Description of Artificial Sequence: Synthetic oligonucleotide
  Antisense strand to SEQ ID NO: 1733775
caugccaacucaaucccuc

SEQ ID NO: 1733777 - RNA, 19 nt, Artificial Sequence
  Description of Artificial Sequence: Synthetic oligonucleotide
  Sense strand starting at position 1690 of SEQ ID NO: 1562254
gggauugaguuggcauguu

SEQ ID NO: 1733778 - RNA, 19 nt, Artificial Sequence
  Description of Artificial Sequence: Synthetic oligonucleotide
  Antisense strand to SEQ ID NO: 1733777
aacaugccaacucaauccc

SEQ ID NO: 1733779 - RNA, 19 nt, Artificial Sequence
  Description of Artificial Sequence: Synthetic oligonucleotide
  Sense strand starting at position 1713 of SEQ ID NO: 1562254
gucacuuucgauugcauau

SEQ ID NO: 1733780 - RNA, 19 nt, Artificial Sequence
  Description of Artificial Sequence: Synthetic oligonucleotide
  Antisense strand to SEQ ID NO: 1733779
auaugcaaucgaaagugac

SEQ ID NO: 1733781 - RNA, 19 nt, Artificial Sequence
  Description of Artificial Sequence: Synthetic oligonucleotide
  Sense strand starting at position 1737 of SEQ ID NO: 1562254
caaaguuccguugggcaau

SEQ ID NO: 1733782 - RNA, 19 nt, Artificial Sequence
  Description of Artificial Sequence: Synthetic oligonucleotide
  Antisense strand to SEQ ID NO: 1733781
auugcccaacggaacuuug

SEQ ID NO: 1733783 - RNA, 19 nt, Artificial Sequence
  Description of Artificial Sequence: Synthetic oligonucleotide
  Sense strand starting at position 1779 of SEQ ID NO: 1562254
uuguaagacuugucacuca

SEQ ID NO: 1733784 - RNA, 19 nt, Artificial Sequence
  Description of Artificial Sequence: Synthetic oligonucleotide
  Antisense strand to SEQ ID NO: 1733783
ugagugacaagucuuacaa

SEQ ID NO: 1733785 - RNA, 19 nt, Artificial Sequence
  Description of Artificial Sequence: Synthetic oligonucleotide
  Sense strand starting at position 1858 of SEQ ID NO: 1562254
gaaaguguauaguccucua

SEQ ID NO: 1733786 - RNA, 19 nt, Artificial Sequence
  Description of Artificial Sequence: Synthetic oligonucleotide
  Antisense strand to SEQ ID NO: 1733785
uagaggacuauacacuuuc

SEQ ID NO: 1733787 - RNA, 19 nt, Artificial Sequence
  Description of Artificial Sequence: Synthetic oligonucleotide
  Sense strand starting at position 1861 of SEQ ID NO: 1562254
aguguauaguccucuaacu

SEQ ID NO: 1733788 - RNA, 19 nt, Artificial Sequence
  Description of Artificial Sequence: Synthetic oligonucleotide
  Antisense strand to SEQ ID NO: 1733787
aguuagaggacuauacacu

SEQ ID NO: 1733789 - RNA, 19 nt, Artificial Sequence
  Description of Artificial Sequence: Synthetic oligonucleotide
  Sense strand starting at position 1863 of SEQ ID NO: 1562254
uguauaguccucuaacuuc

SEQ ID NO: 1733790 - RNA, 19 nt, Artificial Sequence
  Description of Artificial Sequence: Synthetic oligonucleotide
  Antisense strand to SEQ ID NO: 1733789
gaaguuagaggacuauaca

SEQ ID NO: 1733791 - RNA, 19 nt, Artificial Sequence
  Description of Artificial Sequence: Synthetic oligonucleotide
  Sense strand starting at position 1892 of SEQ ID NO: 1562254
uaggaagcucagugauggu

SEQ ID NO: 1733792 - RNA, 19 nt, Artificial Sequence
  Description of Artificial Sequence: Synthetic oligonucleotide
  Antisense strand to SEQ ID NO: 1733791
accaucacugagcuuccua

SEQ ID NO: 1733793 - RNA, 19 nt, Artificial Sequence
  Description of Artificial Sequence: Synthetic oligonucleotide
  Sense strand starting at position 1905 of SEQ ID NO: 1562254
gauggugucacugguucuu

SEQ ID NO: 1733794 - RNA, 19 nt, Artificial Sequence
  Description of Artificial Sequence: Synthetic oligonucleotide
  Antisense strand to SEQ ID NO: 1733793
aagaaccagugacaccauc

SEQ ID NO: 1733795 - RNA, 19 nt, Artificial Sequence
  Description of Artificial Sequence: Synthetic oligonucleotide
  Sense strand starting at position 1911 of SEQ ID NO: 1562254
gucacugguucuuuccaca

SEQ ID NO: 1733796 - RNA, 19 nt, Artificial Sequence
  Description of Artificial Sequence: Synthetic oligonucleotide
  Antisense strand to SEQ ID NO: 1733795
uguggaaagaaccagugac

SEQ ID NO: 1733797 - RNA, 19 nt, Artificial Sequence
  Description of Artificial Sequence: Synthetic oligonucleotide
  Sense strand starting at position 1990 of SEQ ID NO: 1562254
uucucuuugucuccauuga

SEQ ID NO: 1733798 - RNA, 19 nt, Artificial Sequence
  Description of Artificial Sequence: Synthetic oligonucleotide
  Antisense strand to SEQ ID NO: 1733797
ucaauggagacaaagagaa

SEQ ID NO: 1733799 - RNA, 19 nt, Artificial Sequence
  Description of Artificial Sequence: Synthetic oligonucleotide
  Sense strand starting at position 1994 of SEQ ID NO: 1562254
cuuugucuccauugaauga

SEQ ID NO: 1733800 - RNA, 19 nt, Artificial Sequence
  Description of Artificial Sequence: Synthetic oligonucleotide
  Antisense strand to SEQ ID NO: 1733799
ucauucaauggagacaaag

SEQ ID NO: 1733801 - RNA, 19 nt, Artificial Sequence
  Description of Artificial Sequence: Synthetic oligonucleotide
  Sense strand starting at position 2122 of SEQ ID NO: 1562254
gcuggugugggugagucau

SEQ ID NO: 1733802 - RNA, 19 nt, Artificial Sequence
  Description of Artificial Sequence: Synthetic oligonucleotide
  Antisense strand to SEQ ID NO: 1733801
augacucacccacaccagc

SEQ ID NO: 1733803 - RNA, 19 nt, Artificial Sequence
  Description of Artificial Sequence: Synthetic oligonucleotide
  Sense strand starting at position 2130 of SEQ ID NO: 1562254
gggugagucauacggucuu

SEQ ID NO: 1733804 - RNA, 19 nt, Artificial Sequence
  Description of Artificial Sequence: Synthetic oligonucleotide
  Antisense strand to SEQ ID NO: 1733803
aagaccguaugacucaccc

SEQ ID NO: 1733805 - RNA, 19 nt, Artificial Sequence
  Description of Artificial Sequence: Synthetic oligonucleotide
  Sense strand starting at position 2671 of SEQ ID NO: 1562254
ucagaauggucacucaucu

SEQ ID NO: 1733806 - RNA, 19 nt, Artificial Sequence
  Description of Artificial Sequence: Synthetic oligonucleotide
  Antisense strand to SEQ ID NO: 1733805
agaugagugaccauucuga

SEQ ID NO: 1733807 - RNA, 19 nt, Artificial Sequence
  Description of Artificial Sequence: Synthetic oligonucleotide
  Sense strand starting at position 3368 of SEQ ID NO: 1562254
ucuaaauaagacugcagau

SEQ ID NO: 1733808 - RNA, 19 nt, Artificial Sequence
  Description of Artificial Sequence: Synthetic oligonucleotide
  Antisense strand to SEQ ID NO: 1733807
aucugcagucuuauuuaga

SEQ ID NO: 1733809 - RNA, 19 nt, Artificial Sequence
  Description of Artificial Sequence: Synthetic oligonucleotide
  Sense strand starting at position 3570 of SEQ ID NO: 1562254
aacgcaguugguuaaacua

SEQ ID NO: 1733810 - RNA, 19 nt, Artificial Sequence
  Description of Artificial Sequence: Synthetic oligonucleotide
  Antisense strand to SEQ ID NO: 1733809
uaguuuaaccaacugcguu

SEQ ID NO: 1733811 - RNA, 19 nt, Artificial Sequence
  Description of Artificial Sequence: Synthetic oligonucleotide
  Sense strand starting at position 3852 of SEQ ID NO: 1562254
ucauuuauuugagguccuu

SEQ ID NO: 1733812 - RNA, 19 nt, Artificial Sequence
  Description of Artificial Sequence: Synthetic oligonucleotide
  Antisense strand to SEQ ID NO: 1733811
aaggaccucaaauaaauga

SEQ ID NO: 1733813 - RNA, 19 nt, Artificial Sequence
  Description of Artificial Sequence: Synthetic oligonucleotide
  Sense strand starting at position 71 of SEQ ID NO: 1562255
aggucuuaucacuggauca

SEQ ID NO: 1733814 - RNA, 19 nt, Artificial Sequence
  Description of Artificial Sequence: Synthetic oligonucleotide
  Antisense strand to SEQ ID NO: 1733813
ugauccagugauaagaccu

SEQ ID NO: 1733815 - RNA, 19 nt, Artificial Sequence
  Description of Artificial Sequence: Synthetic oligonucleotide
  Sense strand starting at position 73 of SEQ ID NO: 1562255
gucuuaucacuggaucaua

SEQ ID NO: 1733816 - RNA, 19 nt, Artificial Sequence
  Description of Artificial Sequence: Synthetic oligonucleotide
  Antisense strand to SEQ ID NO: 1733815
uaugauccagugauaagac

SEQ ID NO: 1733817 - RNA, 19 nt, Artificial Sequence
  Description of Artificial Sequence: Synthetic oligonucleotide
  Sense strand starting at position 498 of SEQ ID NO: 1562255
agaaguaaaucccugagca

SEQ ID NO: 1733818 - RNA, 19 nt, Artificial Sequence
  Description of Artificial Sequence: Synthetic oligonucleotide
  Antisense strand to SEQ ID NO: 1733817
ugcucagggauuuacuucu

SEQ ID NO: 1733819 - RNA, 19 nt, Artificial Sequence
  Description of Artificial Sequence: Synthetic oligonucleotide
  Sense strand starting at position 510 of SEQ ID NO: 1562255
cugagcaacuuaccugaaa

SEQ ID NO: 1733820 - RNA, 19 nt, Artificial Sequence
  Description of Artificial Sequence: Synthetic oligonucleotide
  Antisense strand to SEQ ID NO: 1733819
uuucagguaaguugcucag

SEQ ID NO: 1733821 - RNA, 19 nt, Artificial Sequence
  Description of Artificial Sequence: Synthetic oligonucleotide
  Sense strand starting at position 511 of SEQ ID NO: 1562255
ugagcaacuuaccugaaau

SEQ ID NO: 1733822 - RNA, 19 nt, Artificial Sequence
  Description of Artificial Sequence: Synthetic oligonucleotide
  Antisense strand to SEQ ID NO: 1733821
auuucagguaaguugcuca

SEQ ID NO: 1733823 - RNA, 19 nt, Artificial Sequence
  Description of Artificial Sequence: Synthetic oligonucleotide
  Sense strand starting at position 609 of SEQ ID NO: 1562255
ucaugagcgauuuggcuca

SEQ ID NO: 1733824 - RNA, 19 nt, Artificial Sequence
  Description of Artificial Sequence: Synthetic oligonucleotide
  Antisense strand to SEQ ID NO: 1733823
ugagccaaaucgcucauga

SEQ ID NO: 1733825 - RNA, 19 nt, Artificial Sequence
  Description of Artificial Sequence: Synthetic oligonucleotide
  Sense strand starting at position 714 of SEQ ID NO: 1562255
ugaggaaacguucacuugu

SEQ ID NO: 1733826 - RNA, 19 nt, Artificial Sequence
  Description of Artificial Sequence: Synthetic oligonucleotide
  Antisense strand to SEQ ID NO: 1733825
acaagugaacguuuccuca

SEQ ID NO: 1733827 - RNA, 19 nt, Artificial Sequence
  Description of Artificial Sequence: Synthetic oligonucleotide
  Sense strand starting at position 843 of SEQ ID NO: 1562255
aacgucugaguccaauuaa

SEQ ID NO: 1733828 - RNA, 19 nt, Artificial Sequence
  Description of Artificial Sequence: Synthetic oligonucleotide
  Antisense strand to SEQ ID NO: 1733827
uuaauuggacucagacguu

SEQ ID NO: 1733829 - RNA, 19 nt, Artificial Sequence
  Description of Artificial Sequence: Synthetic oligonucleotide
  Sense strand starting at position 866 of SEQ ID NO: 1562255
agacuaggucaacgaaagu

SEQ ID NO: 1733830 - RNA, 19 nt, Artificial Sequence
  Description of Artificial Sequence: Synthetic oligonucleotide
  Antisense strand to SEQ ID NO: 1733829
acuuucguugaccuagucu

SEQ ID NO: 1733831 - RNA, 19 nt, Artificial Sequence
  Description of Artificial Sequence: Synthetic oligonucleotide
  Sense strand starting at position 873 of SEQ ID NO: 1562255
gucaacgaaaguuaguaua

SEQ ID NO: 1733832 - RNA, 19 nt, Artificial Sequence
  Description of Artificial Sequence: Synthetic oligonucleotide
  Antisense strand to SEQ ID NO: 1733831
uauacuaacuuucguugac

SEQ ID NO: 1733833 - RNA, 19 nt, Artificial Sequence
  Description of Artificial Sequence: Synthetic oligonucleotide
  Sense strand starting at position 875 of SEQ ID NO: 1562255
caacgaaaguuaguauaua

SEQ ID NO: 1733834 - RNA, 19 nt, Artificial Sequence
  Description of Artificial Sequence: Synthetic oligonucleotide
  Antisense strand to SEQ ID NO: 1733833
uauauacuaacuuucguug

SEQ ID NO: 1733835 - RNA, 19 nt, Artificial Sequence
  Description of Artificial Sequence: Synthetic oligonucleotide
  Sense strand starting at position 1035 of SEQ ID NO: 1562255
gaaugaaagugcuuuaagg

SEQ ID NO: 1733836 - RNA, 19 nt, Artificial Sequence
  Description of Artificial Sequence: Synthetic oligonucleotide
  Antisense strand to SEQ ID NO: 1733835
ccuuaaagcacuuucauuc

SEQ ID NO: 1733837 - RNA, 19 nt, Artificial Sequence
  Description of Artificial Sequence: Synthetic oligonucleotide
  Sense strand starting at position 1037 of SEQ ID NO: 1562255
augaaagugcuuuaaggug

SEQ ID NO: 1733838 - RNA, 19 nt, Artificial Sequence
  Description of Artificial Sequence: Synthetic oligonucleotide
  Antisense strand to SEQ ID NO: 1733837
caccuuaaagcacuuucau

SEQ ID NO: 1733839 - RNA, 19 nt, Artificial Sequence
  Description of Artificial Sequence: Synthetic oligonucleotide
  Sense strand starting at position 1139 of SEQ ID NO: 1562255
guaaaugugguagaugaca

SEQ ID NO: 1733840 - RNA, 19 nt, Artificial Sequence
  Description of Artificial Sequence: Synthetic oligonucleotide
  Antisense strand to SEQ ID NO: 1733839
ugucaucuaccacauuuac

SEQ ID NO: 1733841 - RNA, 19 nt, Artificial Sequence
  Description of Artificial Sequence: Synthetic oligonucleotide
  Sense strand starting at position 1199 of SEQ ID NO: 1562255
uggaucugucacuagcaaa

SEQ ID NO: 1733842 - RNA, 19 nt, Artificial Sequence
  Description of Artificial Sequence: Synthetic oligonucleotide
  Antisense strand to SEQ ID NO: 1733841
uuugcuagugacagaucca

SEQ ID NO: 1733843 - RNA, 19 nt, Artificial Sequence
  Description of Artificial Sequence: Synthetic oligonucleotide
  Sense strand starting at position 1212 of SEQ ID NO: 1562255
agcaaacugcauuacugaa

SEQ ID NO: 1733844 - RNA, 19 nt, Artificial Sequence
  Description of Artificial Sequence: Synthetic oligonucleotide
  Antisense strand to SEQ ID NO: 1733843
uucaguaaugcaguuugcu

SEQ ID NO: 1733845 - RNA, 19 nt, Artificial Sequence
  Description of Artificial Sequence: Synthetic oligonucleotide
  Sense strand starting at position 1391 of SEQ ID NO: 1562255
uagggaaugacauguaugu

SEQ ID NO: 1733846 - RNA, 19 nt, Artificial Sequence
  Description of Artificial Sequence: Synthetic oligonucleotide
  Antisense strand to SEQ ID NO: 1733845
acauacaugucauucccua

SEQ ID NO: 1733847 - RNA, 19 nt, Artificial Sequence
  Description of Artificial Sequence: Synthetic oligonucleotide
  Sense strand starting at position 1393 of SEQ ID NO: 1562255
gggaaugacauguaugugu

SEQ ID NO: 1733848 - RNA, 19 nt, Artificial Sequence
  Description of Artificial Sequence: Synthetic oligonucleotide
  Antisense strand to SEQ ID NO: 1733847
acacauacaugucauuccc

SEQ ID NO: 1733849 - RNA, 19 nt, Artificial Sequence
  Description of Artificial Sequence: Synthetic oligonucleotide
  Sense strand starting at position 1401 of SEQ ID NO: 1562255
cauguauguguuuaggaag

SEQ ID NO: 1733850 - RNA, 19 nt, Artificial Sequence
  Description of Artificial Sequence: Synthetic oligonucleotide
  Antisense strand to SEQ ID NO: 1733849
cuuccuaaacacauacaug

SEQ ID NO: 1733851 - RNA, 19 nt, Artificial Sequence
  Description of Artificial Sequence: Synthetic oligonucleotide
  Sense strand starting at position 1408 of SEQ ID NO: 1562255
guguuuaggaagugaugaa

SEQ ID NO: 1733852 - RNA, 19 nt, Artificial Sequence
  Description of Artificial Sequence: Synthetic oligonucleotide
  Antisense strand to SEQ ID NO: 1733851
uucaucacuuccuaaacac

SEQ ID NO: 1733853 - RNA, 19 nt, Artificial Sequence
  Description of Artificial Sequence: Synthetic oligonucleotide
  Sense strand starting at position 1483 of SEQ ID NO: 1562255
agauaccuccagugaagug

SEQ ID NO: 1733854 - RNA, 19 nt, Artificial Sequence
  Description of Artificial Sequence: Synthetic oligonucleotide
  Antisense strand to SEQ ID NO: 1733853
cacuucacuggagguaucu

SEQ ID NO: 1733855 - RNA, 19 nt, Artificial Sequence
  Description of Artificial Sequence: Synthetic oligonucleotide
  Sense strand starting at position 1570 of SEQ ID NO: 1562255
uuugcugagcuauaauaau

SEQ ID NO: 1733856 - RNA, 19 nt, Artificial Sequence
  Description of Artificial Sequence: Synthetic oligonucleotide
  Antisense strand to SEQ ID NO: 1733855
auuauuauagcucagcaaa

SEQ ID NO: 1733857 - RNA, 19 nt, Artificial Sequence
  Description of Artificial Sequence: Synthetic oligonucleotide
  Sense strand starting at position 1584 of SEQ ID NO: 1562255
auaaucaauggcugcaaga

SEQ ID NO: 1733858 - RNA, 19 nt, Artificial Sequence
  Description of Artificial Sequence: Synthetic oligonucleotide
  Antisense strand to SEQ ID NO: 1733857
ucuugcagccauugauuau

SEQ ID NO: 1733859 - RNA, 19 nt, Artificial Sequence
  Description of Artificial Sequence: Synthetic oligonucleotide
  Sense strand starting at position 1676 of SEQ ID NO: 1562255
cgccuucuucgggcaaauc

SEQ ID NO: 1733860 - RNA, 19 nt, Artificial Sequence
  Description of Artificial Sequence: Synthetic oligonucleotide
  Antisense strand to SEQ ID NO: 1733859
gauuugcccgaagaaggcg

SEQ ID NO: 1733861 - RNA, 19 nt, Artificial Sequence
  Description of Artificial Sequence: Synthetic oligonucleotide
  Sense strand starting at position 2169 of SEQ ID NO: 1562255
cugcuuuaacuacagaguu

SEQ ID NO: 1733862 - RNA, 19 nt, Artificial Sequence
  Description of Artificial Sequence: Synthetic oligonucleotide
  Antisense strand to SEQ ID NO: 1733861
aacucuguaguuaaagcag

SEQ ID NO: 1733863 - RNA, 19 nt, Artificial Sequence
  Description of Artificial Sequence: Synthetic oligonucleotide
  Sense strand starting at position 2449 of SEQ ID NO: 1562255
gauauccgaguuuaacauu

SEQ ID NO: 1733864 - RNA, 19 nt, Artificial Sequence
  Description of Artificial Sequence: Synthetic oligonucleotide
  Antisense strand to SEQ ID NO: 1733863
aauguuaaacucggauauc

SEQ ID NO: 1733865 - RNA, 19 nt, Artificial Sequence
  Description of Artificial Sequence: Synthetic oligonucleotide
  Sense strand starting at position 2480 of SEQ ID NO: 1562255
uucugacagcuuuacaaag

SEQ ID NO: 1733866 - RNA, 19 nt, Artificial Sequence
  Description of Artificial Sequence: Synthetic oligonucleotide
  Antisense strand to SEQ ID NO: 1733865
cuuuguaaagcugucagaa

SEQ ID NO: 1733867 - RNA, 19 nt, Artificial Sequence
  Description of Artificial Sequence: Synthetic oligonucleotide
  Sense strand starting at position 2504 of SEQ ID NO: 1562255
cucauauaggucuaguaau

SEQ ID NO: 1733868 - RNA, 19 nt, Artificial Sequence
  Description of Artificial Sequence: Synthetic oligonucleotide
  Antisense strand to SEQ ID NO: 1733867
auuacuagaccuauaugag

SEQ ID NO: 1733869 - RNA, 19 nt, Artificial Sequence
  Description of Artificial Sequence: Synthetic oligonucleotide
  Sense strand starting at position 2512 of SEQ ID NO: 1562255
ggucuaguaauuuguuauu

SEQ ID NO: 1733870 - RNA, 19 nt, Artificial Sequence
  Description of Artificial Sequence: Synthetic oligonucleotide
  Antisense strand to SEQ ID NO: 1733869
aauaacaaauuacuagacc

SEQ ID NO: 1733871 - RNA, 19 nt, Artificial Sequence
  Description of Artificial Sequence: Synthetic oligonucleotide
  Sense strand starting at position 2686 of SEQ ID NO: 1562255
ggcaaucucgucuuugugu

SEQ ID NO: 1733872 - RNA, 19 nt, Artificial Sequence
  Description of Artificial Sequence: Synthetic oligonucleotide
  Antisense strand to SEQ ID NO: 1733871
acacaaagacgagauugcc

SEQ ID NO: 1733873 - RNA, 19 nt, Artificial Sequence
  Description of Artificial Sequence: Synthetic oligonucleotide
  Sense strand starting at position 2711 of SEQ ID NO: 1562255
cauggaggguucuuacaca

SEQ ID NO: 1733874 - RNA, 19 nt, Artificial Sequence
  Description of Artificial Sequence: Synthetic oligonucleotide
  Antisense strand to SEQ ID NO: 1733873
uguguaagaacccuccaug

SEQ ID NO: 1733875 - RNA, 19 nt, Artificial Sequence
  Description of Artificial Sequence: Synthetic oligonucleotide
  Sense strand starting at position 2941 of SEQ ID NO: 1562255
caucguugacuggaacauu

SEQ ID NO: 1733876 - RNA, 19 nt, Artificial Sequence
  Description of Artificial Sequence: Synthetic oligonucleotide
  Antisense strand to SEQ ID NO: 1733875
aauguuccagucaacgaug

SEQ ID NO: 1733877 - RNA, 19 nt, Artificial Sequence
  Description of Artificial Sequence: Synthetic oligonucleotide
  Sense strand starting at position 2967 of SEQ ID NO: 1562255
uaugcaugacuguauauga

SEQ ID NO: 1733878 - RNA, 19 nt, Artificial Sequence
  Description of Artificial Sequence: Synthetic oligonucleotide
  Antisense strand to SEQ ID NO: 1733877
ucauauacagucaugcaua

SEQ ID NO: 1733879 - RNA, 19 nt, Artificial Sequence
  Description of Artificial Sequence: Synthetic oligonucleotide
  Sense strand starting at position 3038 of SEQ ID NO: 1562255
gcaugaaaguuucugacaa

SEQ ID NO: 1733880 - RNA, 19 nt, Artificial Sequence
  Description of Artificial Sequence: Synthetic oligonucleotide
  Antisense strand to SEQ ID NO: 1733879
uugucagaaacuuucaugc

SEQ ID NO: 1733881 - RNA, 19 nt, Artificial Sequence
  Description of Artificial Sequence: Synthetic oligonucleotide
  Sense strand starting at position 3482 of SEQ ID NO: 1562255
aacauucuaggccagugaa

SEQ ID NO: 1733882 - RNA, 19 nt, Artificial Sequence
  Description of Artificial Sequence: Synthetic oligonucleotide
  Antisense strand to SEQ ID NO: 1733881
uucacuggccuagaauguu

SEQ ID NO: 1733883 - RNA, 19 nt, Artificial Sequence
  Description of Artificial Sequence: Synthetic oligonucleotide
  Sense strand starting at position 3495 of SEQ ID NO: 1562255
agugaaguuccuggaugac

SEQ ID NO: 1733884 - RNA, 19 nt, Artificial Sequence
  Description of Artificial Sequence: Synthetic oligonucleotide
  Antisense strand to SEQ ID NO: 1733883
gucauccaggaacuucacu

SEQ ID NO: 1733885 - RNA, 19 nt, Artificial Sequence
  Description of Artificial Sequence: Synthetic oligonucleotide
  Sense strand starting at position 3537 of SEQ ID NO: 1562255
agcugaugccaguaaacau

SEQ ID NO: 1733886 - RNA, 19 nt, Artificial Sequence
  Description of Artificial Sequence: Synthetic oligonucleotide
  Antisense strand to SEQ ID NO: 1733885
auguuuacuggcaucagcu

SEQ ID NO: 1733887 - RNA, 19 nt, Artificial Sequence
  Description of Artificial Sequence: Synthetic oligonucleotide
  Sense strand starting at position 3694 of SEQ ID NO: 1562255
uugagaaaggcuuauuguu

SEQ ID NO: 1733888 - RNA, 19 nt, Artificial Sequence
  Description of Artificial Sequence: Synthetic oligonucleotide
  Antisense strand to SEQ ID NO: 1733887
aacaauaagccuuucucaa

SEQ ID NO: 1733889 - RNA, 19 nt, Artificial Sequence
  Description of Artificial Sequence: Synthetic oligonucleotide
  Sense strand starting at position 3696 of SEQ ID NO: 1562255
gagaaaggcuuauuguuaa

SEQ ID NO: 1733890 - RNA, 19 nt, Artificial Sequence
  Description of Artificial Sequence: Synthetic oligonucleotide
  Antisense strand to SEQ ID NO: 1733889
uuaacaauaagccuuucuc

SEQ ID NO: 1733891 - RNA, 19 nt, Artificial Sequence
  Description of Artificial Sequence: Synthetic oligonucleotide
  Sense strand starting at position 3748 of SEQ ID NO: 1562255
acuaaccauuuggaguaaa

SEQ ID NO: 1733892 - RNA, 19 nt, Artificial Sequence
  Description of Artificial Sequence: Synthetic oligonucleotide
  Antisense strand to SEQ ID NO: 1733891
uuuacuccaaaugguuagu

SEQ ID NO: 1733893 - RNA, 19 nt, Artificial Sequence
  Description of Artificial Sequence: Synthetic oligonucleotide
  Sense strand starting at position 46 of SEQ ID NO: 1562256
gcuguauuuccagggccca

SEQ ID NO: 1733894 - RNA, 19 nt, Artificial Sequence
  Description of Artificial Sequence: Synthetic oligonucleotide
  Antisense strand to SEQ ID NO: 1733893
ugggcccuggaaauacagc

SEQ ID NO: 1733895 - RNA, 19 nt, Artificial Sequence
  Description of Artificial Sequence: Synthetic oligonucleotide
  Sense strand starting at position 149 of SEQ ID NO: 1562256
cuucuaucacgugauauac

SEQ ID NO: 1733896 - RNA, 19 nt, Artificial Sequence
  Description of Artificial Sequence: Synthetic oligonucleotide
  Antisense strand to SEQ ID NO: 1733895
guauaucacgugauagaag

SEQ ID NO: 1733897 - RNA, 19 nt, Artificial Sequence
  Description of Artificial Sequence: Synthetic oligonucleotide
  Sense strand starting at position 186 of SEQ ID NO: 1562256
ugcauauaagaauggcuaa

SEQ ID NO: 1733898 - RNA, 19 nt, Artificial Sequence
  Description of Artificial Sequence: Synthetic oligonucleotide
  Antisense strand to SEQ ID NO: 1733897
uuagccauucuuauaugca

SEQ ID NO: 1733899 - RNA, 19 nt, Artificial Sequence
  Description of Artificial Sequence: Synthetic oligonucleotide
  Sense strand starting at position 207 of SEQ ID NO: 1562256
cuuacugagugcuuacaau

SEQ ID NO: 1733900 - RNA, 19 nt, Artificial Sequence
  Description of Artificial Sequence: Synthetic oligonucleotide
  Antisense strand to SEQ ID NO: 1733899
auuguaagcacucaguaag

SEQ ID NO: 1733901 - RNA, 19 nt, Artificial Sequence
  Description of Artificial Sequence: Synthetic oligonucleotide
  Sense strand starting at position 247 of SEQ ID NO: 1562256
auuagcuuugcauauguua

SEQ ID NO: 1733902 - RNA, 19 nt, Artificial Sequence
  Description of Artificial Sequence: Synthetic oligonucleotide
  Antisense strand to SEQ ID NO: 1733901
uaacauaugcaaagcuaau

SEQ ID NO: 1733903 - RNA, 19 nt, Artificial Sequence
  Description of Artificial Sequence: Synthetic oligonucleotide
  Sense strand starting at position 288 of SEQ ID NO: 1562256
cucuaugaggcagguauau

SEQ ID NO: 1733904 - RNA, 19 nt, Artificial Sequence
  Description of Artificial Sequence: Synthetic oligonucleotide
  Antisense strand to SEQ ID NO: 1733903
auauaccugccucauagag

SEQ ID NO: 1733905 - RNA, 19 nt, Artificial Sequence
  Description of Artificial Sequence: Synthetic oligonucleotide
  Sense strand starting at position 348 of SEQ ID NO: 1562256
uuggguagcuugcucaaga

SEQ ID NO: 1733906 - RNA, 19 nt, Artificial Sequence
  Description of Artificial Sequence: Synthetic oligonucleotide
  Antisense strand to SEQ ID NO: 1733905
ucuugagcaagcuacccaa

SEQ ID NO: 1733907 - RNA, 19 nt, Artificial Sequence
  Description of Artificial Sequence: Synthetic oligonucleotide
  Sense strand starting at position 349 of SEQ ID NO: 1562256
uggguagcuugcucaagau

SEQ ID NO: 1733908 - RNA, 19 nt, Artificial Sequence
  Description of Artificial Sequence: Synthetic oligonucleotide
  Antisense strand to SEQ ID NO: 1733907
aucuugagcaagcuaccca

SEQ ID NO: 1733909 - RNA, 19 nt, Artificial Sequence
  Description of Artificial Sequence: Synthetic oligonucleotide
  Sense strand starting at position 464 of SEQ ID NO: 1562256
gcaaguauuucugcuuuac

SEQ ID NO: 1733910 - RNA, 19 nt, Artificial Sequence
  Description of Artificial Sequence: Synthetic oligonucleotide
  Antisense strand to SEQ ID NO: 1733909
guaaagcagaaauacuugc

SEQ ID NO: 1733911 - RNA, 19 nt, Artificial Sequence
  Description of Artificial Sequence: Synthetic oligonucleotide
  Sense strand starting at position 477 of SEQ ID NO: 1562256
cuuuacuuuagccgggaua

SEQ ID NO: 1733912 - RNA, 19 nt, Artificial Sequence
  Description of Artificial Sequence: Synthetic oligonucleotide
  Antisense strand to SEQ ID NO: 1733911
uaucccggcuaaaguaaag

SEQ ID NO: 1733913 - RNA, 19 nt, Artificial Sequence
  Description of Artificial Sequence: Synthetic oligonucleotide
  Sense strand starting at position 479 of SEQ ID NO: 1562256
uuacuuuagccgggauacu

SEQ ID NO: 1733914 - RNA, 19 nt, Artificial Sequence
  Description of Artificial Sequence: Synthetic oligonucleotide
  Antisense strand to SEQ ID NO: 1733913
aguaucccggcuaaaguaa

SEQ ID NO: 1733915 - RNA, 19 nt, Artificial Sequence
  Description of Artificial Sequence: Synthetic oligonucleotide
  Sense strand starting at position 508 of SEQ ID NO: 1562256
gaggucucccaguaaacug

SEQ ID NO: 1733916 - RNA, 19 nt, Artificial Sequence
  Description of Artificial Sequence: Synthetic oligonucleotide
  Antisense strand to SEQ ID NO: 1733915
caguuuacugggagaccuc

SEQ ID NO: 1733917 - RNA, 19 nt, Artificial Sequence
  Description of Artificial Sequence: Synthetic oligonucleotide
  Sense strand starting at position 719 of SEQ ID NO: 1562256
gugaggacuguggguagua

SEQ ID NO: 1733918 - RNA, 19 nt, Artificial Sequence
  Description of Artificial Sequence: Synthetic oligonucleotide
  Antisense strand to SEQ ID NO: 1733917
uacuacccacaguccucac

SEQ ID NO: 1733919 - RNA, 19 nt, Artificial Sequence
  Description of Artificial Sequence: Synthetic oligonucleotide
  Sense strand starting at position 720 of SEQ ID NO: 1562256
ugaggacuguggguaguau

SEQ ID NO: 1733920 - RNA, 19 nt, Artificial Sequence
  Description of Artificial Sequence: Synthetic oligonucleotide
  Antisense strand to SEQ ID NO: 1733919
auacuacccacaguccuca

SEQ ID NO: 1733921 - RNA, 19 nt, Artificial Sequence
  Description of Artificial Sequence: Synthetic oligonucleotide
  Sense strand starting at position 721 of SEQ ID NO: 1562256
gaggacuguggguaguaua

SEQ ID NO: 1733922 - RNA, 19 nt, Artificial Sequence
  Description of Artificial Sequence: Synthetic oligonucleotide
  Antisense strand to SEQ ID NO: 1733921
uauacuacccacaguccuc

SEQ ID NO: 1733923 - RNA, 19 nt, Artificial Sequence
  Description of Artificial Sequence: Synthetic oligonucleotide
  Sense strand starting at position 825 of SEQ ID NO: 1562256
aaugguaugugucuuagaa

SEQ ID NO: 1733924 - RNA, 19 nt, Artificial Sequence
  Description of Artificial Sequence: Synthetic oligonucleotide
  Antisense strand to SEQ ID NO: 1733923
uucuaagacacauaccauu

SEQ ID NO: 1733925 - RNA, 19 nt, Artificial Sequence
  Description of Artificial Sequence: Synthetic oligonucleotide
  Sense strand starting at position 832 of SEQ ID NO: 1562256
ugugucuuagaagguauga

SEQ ID NO: 1733926 - RNA, 19 nt, Artificial Sequence
  Description of Artificial Sequence: Synthetic oligonucleotide
  Antisense strand to SEQ ID NO: 1733925
ucauaccuucuaagacaca

SEQ ID NO: 1733927 - RNA, 19 nt, Artificial Sequence
  Description of Artificial Sequence: Synthetic oligonucleotide
  Sense strand starting at position 1477 of SEQ ID NO: 1562256
uggucaauggcugguaauc

SEQ ID NO: 1733928 - RNA, 19 nt, Artificial Sequence
  Description of Artificial Sequence: Synthetic oligonucleotide
  Antisense strand to SEQ ID NO: 1733927
gauuaccagccauugacca

SEQ ID NO: 1733929 - RNA, 19 nt, Artificial Sequence
  Description of Artificial Sequence: Synthetic oligonucleotide
  Sense strand starting at position 1486 of SEQ ID NO: 1562256
gcugguaaucuugacccuu

SEQ ID NO: 1733930 - RNA, 19 nt, Artificial Sequence
  Description of Artificial Sequence: Synthetic oligonucleotide
  Antisense strand to SEQ ID NO: 1733929
aagggucaagauuaccagc

SEQ ID NO: 1733931 - RNA, 19 nt, Artificial Sequence
  Description of Artificial Sequence: Synthetic oligonucleotide
  Sense strand starting at position 1528 of SEQ ID NO: 1562256
ggagcguuccgcucuguga

SEQ ID NO: 1733932 - RNA, 19 nt, Artificial Sequence
  Description of Artificial Sequence: Synthetic oligonucleotide
  Antisense strand to SEQ ID NO: 1733931
ucacagagcggaacgcucc

SEQ ID NO: 1733933 - RNA, 19 nt, Artificial Sequence
  Description of Artificial Sequence: Synthetic oligonucleotide
  Sense strand starting at position 2005 of SEQ ID NO: 1562256
aacccaucggccuauugua

SEQ ID NO: 1733934 - RNA, 19 nt, Artificial Sequence
  Description of Artificial Sequence: Synthetic oligonucleotide
  Antisense strand to SEQ ID NO: 1733933
uacaauaggccgauggguu

SEQ ID NO: 1733935 - RNA, 19 nt, Artificial Sequence
  Description of Artificial Sequence: Synthetic oligonucleotide
  Sense strand starting at position 2066 of SEQ ID NO: 1562256
uucaguguuccggaagguc

SEQ ID NO: 1733936 - RNA, 19 nt, Artificial Sequence
  Description of Artificial Sequence: Synthetic oligonucleotide
  Antisense strand to SEQ ID NO: 1733935
gaccuuccggaacacugaa

SEQ ID NO: 1733937 - RNA, 19 nt, Artificial Sequence
  Description of Artificial Sequence: Synthetic oligonucleotide
  Sense strand starting at position 2185 of SEQ ID NO: 1562256
uuaucucggcggaguguua

SEQ ID NO: 1733938 - RNA, 19 nt, Artificial Sequence
  Description of Artificial Sequence: Synthetic oligonucleotide
  Antisense strand to SEQ ID NO: 1733937
uaacacuccgccgagauaa

SEQ ID NO: 1733939 - RNA, 19 nt, Artificial Sequence
  Description of Artificial Sequence: Synthetic oligonucleotide
  Sense strand starting at position 2194 of SEQ ID NO: 1562256
cggaguguuacguaggaag

SEQ ID NO: 1733940 - RNA, 19 nt, Artificial Sequence
  Description of Artificial Sequence: Synthetic oligonucleotide
  Antisense strand to SEQ ID NO: 1733939
cuuccuacguaacacuccg

SEQ ID NO: 1733941 - RNA, 19 nt, Artificial Sequence
  Description of Artificial Sequence: Synthetic oligonucleotide
  Sense strand starting at position 2196 of SEQ ID NO: 1562256
gaguguuacguaggaagug

SEQ ID NO: 1733942 - RNA, 19 nt, Artificial Sequence
  Description of Artificial Sequence: Synthetic oligonucleotide
  Antisense strand to SEQ ID NO: 1733941
cacuuccuacguaacacuc

SEQ ID NO: 1733943 - RNA, 19 nt, Artificial Sequence
  Description of Artificial Sequence: Synthetic oligonucleotide
  Sense strand starting at position 2212 of SEQ ID NO: 1562256
gugguugugacgucauucu

SEQ ID NO: 1733944 - RNA, 19 nt, Artificial Sequence
  Description of Artificial Sequence: Synthetic oligonucleotide
  Antisense strand to SEQ ID NO: 1733943
agaaugacgucacaaccac

SEQ ID NO: 1733945 - RNA, 19 nt, Artificial Sequence
  Description of Artificial Sequence: Synthetic oligonucleotide
  Sense strand starting at position 2463 of SEQ ID NO: 1562256
gagcucugcccguuagguu

SEQ ID NO: 1733946 - RNA, 19 nt, Artificial Sequence
  Description of Artificial Sequence: Synthetic oligonucleotide
  Antisense strand to SEQ ID NO: 1733945
aaccuaacgggcagagcuc

SEQ ID NO: 1733947 - RNA, 19 nt, Artificial Sequence
  Description of Artificial Sequence: Synthetic oligonucleotide
  Sense strand starting at position 2472 of SEQ ID NO: 1562256
ccguuagguuugauguguu

SEQ ID NO: 1733948 - RNA, 19 nt, Artificial Sequence
  Description of Artificial Sequence: Synthetic oligonucleotide
  Antisense strand to SEQ ID NO: 1733947
aacacaucaaaccuaacgg

SEQ ID NO: 1733949 - RNA, 19 nt, Artificial Sequence
  Description of Artificial Sequence: Synthetic oligonucleotide
  Sense strand starting at position 2501 of SEQ ID NO: 1562256
gggaauguauaauuauugu

SEQ ID NO: 1733950 - RNA, 19 nt, Artificial Sequence
  Description of Artificial Sequence: Synthetic oligonucleotide
  Antisense strand to SEQ ID NO: 1733949
acaauaauuauacauuccc

SEQ ID NO: 1733951 - RNA, 19 nt, Artificial Sequence
  Description of Artificial Sequence: Synthetic oligonucleotide
  Sense strand starting at position 2529 of SEQ ID NO: 1562256
gaaacugaggucuggguau

SEQ ID NO: 1733952 - RNA, 19 nt, Artificial Sequence
  Description of Artificial Sequence: Synthetic oligonucleotide
  Antisense strand to SEQ ID NO: 1733951
auacccagaccucaguuuc

SEQ ID NO: 1733953 - RNA, 19 nt, Artificial Sequence
  Description of Artificial Sequence: Synthetic oligonucleotide
  Sense strand starting at position 2635 of SEQ ID NO: 1562256
augcuugucccuuagguuu

SEQ ID NO: 1733954 - RNA, 19 nt, Artificial Sequence
  Description of Artificial Sequence: Synthetic oligonucleotide
  Antisense strand to SEQ ID NO: 1733953
aaaccuaagggacaagcau

SEQ ID NO: 1733955 - RNA, 19 nt, Artificial Sequence
  Description of Artificial Sequence: Synthetic oligonucleotide
  Sense strand starting at position 2642 of SEQ ID NO: 1562256
ucccuuagguuuguauaca

SEQ ID NO: 1733956 - RNA, 19 nt, Artificial Sequence
  Description of Artificial Sequence: Synthetic oligonucleotide
  Antisense strand to SEQ ID NO: 1733955
uguauacaaaccuaaggga

SEQ ID NO: 1733957 - RNA, 19 nt, Artificial Sequence
  Description of Artificial Sequence: Synthetic oligonucleotide
  Sense strand starting at position 3066 of SEQ ID NO: 1562256
auguccuuccuccggaaau

SEQ ID NO: 1733958 - RNA, 19 nt, Artificial Sequence
  Description of Artificial Sequence: Synthetic oligonucleotide
  Antisense strand to SEQ ID NO: 1733957
auuuccggaggaaggacau

SEQ ID NO: 1733959 - RNA, 19 nt, Artificial Sequence
  Description of Artificial Sequence: Synthetic oligonucleotide
  Sense strand starting at position 3068 of SEQ ID NO: 1562256
guccuuccuccggaaaugu

SEQ ID NO: 1733960 - RNA, 19 nt, Artificial Sequence
  Description of Artificial Sequence: Synthetic oligonucleotide
  Antisense strand to SEQ ID NO: 1733959
acauuuccggaggaaggac

SEQ ID NO: 1733961 - RNA, 19 nt, Artificial Sequence
  Description of Artificial Sequence: Synthetic oligonucleotide
  Sense strand starting at position 3109 of SEQ ID NO: 1562256
agcaguuugcaguggaaga

SEQ ID NO: 1733962 - RNA, 19 nt, Artificial Sequence
  Description of Artificial Sequence: Synthetic oligonucleotide
  Antisense strand to SEQ ID NO: 1733961
ucuuccacugcaaacugcu

SEQ ID NO: 1733963 - RNA, 19 nt, Artificial Sequence
  Description of Artificial Sequence: Synthetic oligonucleotide
  Sense strand starting at position 3170 of SEQ ID NO: 1562256
ucuguaguuccauaggcua

SEQ ID NO: 1733964 - RNA, 19 nt, Artificial Sequence
  Description of Artificial Sequence: Synthetic oligonucleotide
  Antisense strand to SEQ ID NO: 1733963
uagccuauggaacuacaga

SEQ ID NO: 1733965 - RNA, 19 nt, Artificial Sequence
  Description of Artificial Sequence: Synthetic oligonucleotide
  Sense strand starting at position 3517 of SEQ ID NO: 1562256
cggaaacucuugucucaaa

SEQ ID NO: 1733966 - RNA, 19 nt, Artificial Sequence
  Description of Artificial Sequence: Synthetic oligonucleotide
  Antisense strand to SEQ ID NO: 1733965
uuugagacaagaguuuccg

SEQ ID NO: 1733967 - RNA, 19 nt, Artificial Sequence
  Description of Artificial Sequence: Synthetic oligonucleotide
  Sense strand starting at position 3814 of SEQ ID NO: 1562256
gugccauugcgacaagaga

SEQ ID NO: 1733968 - RNA, 19 nt, Artificial Sequence
  Description of Artificial Sequence: Synthetic oligonucleotide
  Antisense strand to SEQ ID NO: 1733967
ucucuugucgcaauggcac

SEQ ID NO: 1733969 - RNA, 19 nt, Artificial Sequence
  Description of Artificial Sequence: Synthetic oligonucleotide
  Sense strand starting at position 3894 of SEQ ID NO: 1562256
gcuguuauuugugugcacu

SEQ ID NO: 1733970 - RNA, 19 nt, Artificial Sequence
  Description of Artificial Sequence: Synthetic oligonucleotide
  Antisense strand to SEQ ID NO: 1733969
agugcacacaaauaacagc

SEQ ID NO: 1733971 - RNA, 19 nt, Artificial Sequence
  Description of Artificial Sequence: Synthetic oligonucleotide
  Sense strand starting at position 3895 of SEQ ID NO: 1562256
cuguuauuugugugcacuu

SEQ ID NO: 1733972 - RNA, 19 nt, Artificial Sequence
  Description of Artificial Sequence: Synthetic oligonucleotide
  Antisense strand to SEQ ID NO: 1733971
aagugcacacaaauaacag

SEQ ID NO: 1733973 - RNA, 19 nt, Artificial Sequence
  Description of Artificial Sequence: Synthetic oligonucleotide
  Sense strand starting at position 332 of SEQ ID NO: 1562257
gggcaauagacuuaggcuu

SEQ ID NO: 1733974 - RNA, 19 nt, Artificial Sequence
  Description of Artificial Sequence: Synthetic oligonucleotide
  Antisense strand to SEQ ID NO: 1733973
aagccuaagucuauugccc

SEQ ID NO: 1733975 - RNA, 19 nt, Artificial Sequence
  Description of Artificial Sequence: Synthetic oligonucleotide
  Sense strand starting at position 697 of SEQ ID NO: 1562257
ugaguucugguuuagaaug

SEQ ID NO: 1733976 - RNA, 19 nt, Artificial Sequence
  Description of Artificial Sequence: Synthetic oligonucleotide
  Antisense strand to SEQ ID NO: 1733975
cauucuaaaccagaacuca

SEQ ID NO: 1733977 - RNA, 19 nt, Artificial Sequence
  Description of Artificial Sequence: Synthetic oligonucleotide
  Sense strand starting at position 716 of SEQ ID NO: 1562257
gagaauuccugcucacagg

SEQ ID NO: 1733978 - RNA, 19 nt, Artificial Sequence
  Description of Artificial Sequence: Synthetic oligonucleotide
  Antisense strand to SEQ ID NO: 1733977
ccugugagcaggaauucuc

SEQ ID NO: 1733979 - RNA, 19 nt, Artificial Sequence
  Description of Artificial Sequence: Synthetic oligonucleotide
  Sense strand starting at position 835 of SEQ ID NO: 1562257
ggaggacccugucuaccau

SEQ ID NO: 1733980 - RNA, 19 nt, Artificial Sequence
  Description of Artificial Sequence: Synthetic oligonucleotide
  Antisense strand to SEQ ID NO: 1733979
augguagacaggguccucc

SEQ ID NO: 1733981 - RNA, 19 nt, Artificial Sequence
  Description of Artificial Sequence: Synthetic oligonucleotide
  Sense strand starting at position 845 of SEQ ID NO: 1562257
gucuaccaugcucagagua

SEQ ID NO: 1733982 - RNA, 19 nt, Artificial Sequence
  Description of Artificial Sequence: Synthetic oligonucleotide
  Antisense strand to SEQ ID NO: 1733981
uacucugagcaugguagac

SEQ ID NO: 1733983 - RNA, 19 nt, Artificial Sequence
  Description of Artificial Sequence: Synthetic oligonucleotide
  Sense strand starting at position 912 of SEQ ID NO: 1562257
aguggcagucaguaugaaa

SEQ ID NO: 1733984 - RNA, 19 nt, Artificial Sequence
  Description of Artificial Sequence: Synthetic oligonucleotide
  Antisense strand to SEQ ID NO: 1733983
uuucauacugacugccacu

SEQ ID NO: 1733985 - RNA, 19 nt, Artificial Sequence
  Description of Artificial Sequence: Synthetic oligonucleotide
  Sense strand starting at position 1026 of SEQ ID NO: 1562257
aaauguuaggcucgaggga

SEQ ID NO: 1733986 - RNA, 19 nt, Artificial Sequence
  Description of Artificial Sequence: Synthetic oligonucleotide
  Antisense strand to SEQ ID NO: 1733985
ucccucgagccuaacauuu

SEQ ID NO: 1733987 - RNA, 19 nt, Artificial Sequence
  Description of Artificial Sequence: Synthetic oligonucleotide
  Sense strand starting at position 1027 of SEQ ID NO: 1562257
aauguuaggcucgagggaa

SEQ ID NO: 1733988 - RNA, 19 nt, Artificial Sequence
  Description of Artificial Sequence: Synthetic oligonucleotide
  Antisense strand to SEQ ID NO: 1733987
uucccucgagccuaacauu

SEQ ID NO: 1733989 - RNA, 19 nt, Artificial Sequence
  Description of Artificial Sequence: Synthetic oligonucleotide
  Sense strand starting at position 1133 of SEQ ID NO: 1562257
ccauuccuucugggugaaa

SEQ ID NO: 1733990 - RNA, 19 nt, Artificial Sequence
  Description of Artificial Sequence: Synthetic oligonucleotide
  Antisense strand to SEQ ID NO: 1733989
uuucacccagaaggaaugg

SEQ ID NO: 1733991 - RNA, 19 nt, Artificial Sequence
  Description of Artificial Sequence: Synthetic oligonucleotide
  Sense strand starting at position 1134 of SEQ ID NO: 1562257
cauuccuucugggugaaau

SEQ ID NO: 1733992 - RNA, 19 nt, Artificial Sequence
  Description of Artificial Sequence: Synthetic oligonucleotide
  Antisense strand to SEQ ID NO: 1733991
auuucacccagaaggaaug

SEQ ID NO: 1733993 - RNA, 19 nt, Artificial Sequence
  Description of Artificial Sequence: Synthetic oligonucleotide
  Sense strand starting at position 1135 of SEQ ID NO: 1562257
auuccuucugggugaaauc

SEQ ID NO: 1733994 - RNA, 19 nt, Artificial Sequence
  Description of Artificial Sequence: Synthetic oligonucleotide
  Antisense strand to SEQ ID NO: 1733993
gauuucacccagaaggaau

SEQ ID NO: 1733995 - RNA, 19 nt, Artificial Sequence
  Description of Artificial Sequence: Synthetic oligonucleotide
  Sense strand starting at position 1254 of SEQ ID NO: 1562257
cugccaucuguacacagau

SEQ ID NO: 1733996 - RNA, 19 nt, Artificial Sequence
  Description of Artificial Sequence: Synthetic oligonucleotide
  Antisense strand to SEQ ID NO: 1733995
aucuguguacagauggcag

SEQ ID NO: 1733997 - RNA, 19 nt, Artificial Sequence
  Description of Artificial Sequence: Synthetic oligonucleotide
  Sense strand starting at position 1429 of SEQ ID NO: 1562257
acgacaguucugggaaguc

SEQ ID NO: 1733998 - RNA, 19 nt, Artificial Sequence
  Description of Artificial Sequence: Synthetic oligonucleotide
  Antisense strand to SEQ ID NO: 1733997
gacuucccagaacugucgu

SEQ ID NO: 1733999 - RNA, 19 nt, Artificial Sequence
  Description of Artificial Sequence: Synthetic oligonucleotide
  Sense strand starting at position 1591 of SEQ ID NO: 1562257
gugugauuccaauaccaac

SEQ ID NO: 1734000 - RNA, 19 nt, Artificial Sequence
  Description of Artificial Sequence: Synthetic oligonucleotide
  Antisense strand to SEQ ID NO: 1733999
guugguauuggaaucacac

SEQ ID NO: 1734001 - RNA, 19 nt, Artificial Sequence
  Description of Artificial Sequence: Synthetic oligonucleotide
  Sense strand starting at position 1808 of SEQ ID NO: 1562257
aagguuagggcucagaguu

SEQ ID NO: 1734002 - RNA, 19 nt, Artificial Sequence
  Description of Artificial Sequence: Synthetic oligonucleotide
  Antisense strand to SEQ ID NO: 1734001
aacucugagcccuaaccuu

SEQ ID NO: 1734003 - RNA, 19 nt, Artificial Sequence
  Description of Artificial Sequence: Synthetic oligonucleotide
  Sense strand starting at position 1892 of SEQ ID NO: 1562257
cggguuugaagucaggaua

SEQ ID NO: 1734004 - RNA, 19 nt, Artificial Sequence
  Description of Artificial Sequence: Synthetic oligonucleotide
  Antisense strand to SEQ ID NO: 1734003
uauccugacuucaaacccg

SEQ ID NO: 1734005 - RNA, 19 nt, Artificial Sequence
  Description of Artificial Sequence: Synthetic oligonucleotide
  Sense strand starting at position 2016 of SEQ ID NO: 1562257
gugagcugucaggaauaaa

SEQ ID NO: 1734006 - RNA, 19 nt, Artificial Sequence
  Description of Artificial Sequence: Synthetic oligonucleotide
  Antisense strand to SEQ ID NO: 1734005
uuuauuccugacagcucac

SEQ ID NO: 1734007 - RNA, 19 nt, Artificial Sequence
  Description of Artificial Sequence: Synthetic oligonucleotide
  Sense strand starting at position 2054 of SEQ ID NO: 1562257
aaucuaaggcaaugaguga

SEQ ID NO: 1734008 - RNA, 19 nt, Artificial Sequence
  Description of Artificial Sequence: Synthetic oligonucleotide
  Antisense strand to SEQ ID NO: 1734007
ucacucauugccuuagauu

SEQ ID NO: 1734009 - RNA, 19 nt, Artificial Sequence
  Description of Artificial Sequence: Synthetic oligonucleotide
  Sense strand starting at position 2061 of SEQ ID NO: 1562257
ggcaaugagugauccaaug

SEQ ID NO: 1734010 - RNA, 19 nt, Artificial Sequence
  Description of Artificial Sequence: Synthetic oligonucleotide
  Antisense strand to SEQ ID NO: 1734009
cauuggaucacucauugcc

SEQ ID NO: 1734011 - RNA, 19 nt, Artificial Sequence
  Description of Artificial Sequence: Synthetic oligonucleotide
  Sense strand starting at position 2083 of SEQ ID NO: 1562257
uuuggauccugauugcaac

SEQ ID NO: 1734012 - RNA, 19 nt, Artificial Sequence
  Description of Artificial Sequence: Synthetic oligonucleotide
  Antisense strand to SEQ ID NO: 1734011
guugcaaucaggauccaaa

SEQ ID NO: 1734013 - RNA, 19 nt, Artificial Sequence
  Description of Artificial Sequence: Synthetic oligonucleotide
  Sense strand starting at position 2264 of SEQ ID NO: 1562257
ucuggaugugcuuaaacac

SEQ ID NO: 1734014 - RNA, 19 nt, Artificial Sequence
  Description of Artificial Sequence: Synthetic oligonucleotide
  Antisense strand to SEQ ID NO: 1734013
guguuuaagcacauccaga

SEQ ID NO: 1734015 - RNA, 19 nt, Artificial Sequence
  Description of Artificial Sequence: Synthetic oligonucleotide
  Sense strand starting at position 2428 of SEQ ID NO: 1562257
aauuaaaguggugggugua

SEQ ID NO: 1734016 - RNA, 19 nt, Artificial Sequence
  Description of Artificial Sequence: Synthetic oligonucleotide
  Antisense strand to SEQ ID NO: 1734015
uacacccaccacuuuaauu

SEQ ID NO: 1734017 - RNA, 19 nt, Artificial Sequence
  Description of Artificial Sequence: Synthetic oligonucleotide
  Sense strand starting at position 2429 of SEQ ID NO: 1562257
auuaaagugguggguguaa

SEQ ID NO: 1734018 - RNA, 19 nt, Artificial Sequence
  Description of Artificial Sequence: Synthetic oligonucleotide
  Antisense strand to SEQ ID NO: 1734017
uuacacccaccacuuuaau

SEQ ID NO: 1734019 - RNA, 19 nt, Artificial Sequence
  Description of Artificial Sequence: Synthetic oligonucleotide
  Sense strand starting at position 2562 of SEQ ID NO: 1562257
cuaucauguggugauuaug

SEQ ID NO: 1734020 - RNA, 19 nt, Artificial Sequence
  Description of Artificial Sequence: Synthetic oligonucleotide
  Antisense strand to SEQ ID NO: 1734019
cauaaucaccacaugauag

SEQ ID NO: 1734021 - RNA, 19 nt, Artificial Sequence
  Description of Artificial Sequence: Synthetic oligonucleotide
  Sense strand starting at position 2627 of SEQ ID NO: 1562257
gaacaaauacuaugguguu

SEQ ID NO: 1734022 - RNA, 19 nt, Artificial Sequence
  Description of Artificial Sequence: Synthetic oligonucleotide
  Antisense strand to SEQ ID NO: 1734021
aacaccauaguauuuguuc

SEQ ID NO: 1734023 - RNA, 19 nt, Artificial Sequence
  Description of Artificial Sequence: Synthetic oligonucleotide
  Sense strand starting at position 2772 of SEQ ID NO: 1562257
guuaaauaucuccauagua

SEQ ID NO: 1734024 - RNA, 19 nt, Artificial Sequence
  Description of Artificial Sequence: Synthetic oligonucleotide
  Antisense strand to SEQ ID NO: 1734023
uacuauggagauauuuaac

SEQ ID NO: 1734025 - RNA, 19 nt, Artificial Sequence
  Description of Artificial Sequence: Synthetic oligonucleotide
  Sense strand starting at position 2880 of SEQ ID NO: 1562257
ucuugucacagguggauua

SEQ ID NO: 1734026 - RNA, 19 nt, Artificial Sequence
  Description of Artificial Sequence: Synthetic oligonucleotide
  Antisense strand to SEQ ID NO: 1734025
uaauccaccugugacaaga

SEQ ID NO: 1734027 - RNA, 19 nt, Artificial Sequence
  Description of Artificial Sequence: Synthetic oligonucleotide
  Sense strand starting at position 2890 of SEQ ID NO: 1562257
gguggauuaccacaccuuu

SEQ ID NO: 1734028 - RNA, 19 nt, Artificial Sequence
  Description of Artificial Sequence: Synthetic oligonucleotide
  Antisense strand to SEQ ID NO: 1734027
aaaggugugguaauccacc

SEQ ID NO: 1734029 - RNA, 19 nt, Artificial Sequence
  Description of Artificial Sequence: Synthetic oligonucleotide
  Sense strand starting at position 3033 of SEQ ID NO: 1562257
gguacuugacucugauacu

SEQ ID NO: 1734030 - RNA, 19 nt, Artificial Sequence
  Description of Artificial Sequence: Synthetic oligonucleotide
  Antisense strand to SEQ ID NO: 1734029
aguaucagagucaaguacc

SEQ ID NO: 1734031 - RNA, 19 nt, Artificial Sequence
  Description of Artificial Sequence: Synthetic oligonucleotide
  Sense strand starting at position 3057 of SEQ ID NO: 1562257
guuuacauguaguuggaga

SEQ ID NO: 1734032 - RNA, 19 nt, Artificial Sequence
  Description of Artificial Sequence: Synthetic oligonucleotide
  Antisense strand to SEQ ID NO: 1734031
ucuccaacuacauguaaac

SEQ ID NO: 1734033 - RNA, 19 nt, Artificial Sequence
  Description of Artificial Sequence: Synthetic oligonucleotide
  Sense strand starting at position 3058 of SEQ ID NO: 1562257
uuuacauguaguuggagaa

SEQ ID NO: 1734034 - RNA, 19 nt, Artificial Sequence
  Description of Artificial Sequence: Synthetic oligonucleotide
  Antisense strand to SEQ ID NO: 1734033
uucuccaacuacauguaaa

SEQ ID NO: 1734035 - RNA, 19 nt, Artificial Sequence
  Description of Artificial Sequence: Synthetic oligonucleotide
  Sense strand starting at position 3497 of SEQ ID NO: 1562257
uuagcuaguuauucuagga

SEQ ID NO: 1734036 - RNA, 19 nt, Artificial Sequence
  Description of Artificial Sequence: Synthetic oligonucleotide
  Antisense strand to SEQ ID NO: 1734035
uccuagaauaacuagcuaa

SEQ ID NO: 1734037 - RNA, 19 nt, Artificial Sequence
  Description of Artificial Sequence: Synthetic oligonucleotide
  Sense strand starting at position 3501 of SEQ ID NO: 1562257
cuaguuauucuaggauaau

SEQ ID NO: 1734038 - RNA, 19 nt, Artificial Sequence
  Description of Artificial Sequence: Synthetic oligonucleotide
  Antisense strand to SEQ ID NO: 1734037
auuauccuagaauaacuag

SEQ ID NO: 1734039 - RNA, 19 nt, Artificial Sequence
  Description of Artificial Sequence: Synthetic oligonucleotide
  Sense strand starting at position 3520 of SEQ ID NO: 1562257
gcuaaauaagagugauaag

SEQ ID NO: 1734040 - RNA, 19 nt, Artificial Sequence
  Description of Artificial Sequence: Synthetic oligonucleotide
  Antisense strand to SEQ ID NO: 1734039
cuuaucacucuuauuuagc

SEQ ID NO: 1734041 - RNA, 19 nt, Artificial Sequence
  Description of Artificial Sequence: Synthetic oligonucleotide
  Sense strand starting at position 3550 of SEQ ID NO: 1562257
augcuuguuccugaucuua

SEQ ID NO: 1734042 - RNA, 19 nt, Artificial Sequence
  Description of Artificial Sequence: Synthetic oligonucleotide
  Antisense strand to SEQ ID NO: 1734041
uaagaucaggaacaagcau

SEQ ID NO: 1734043 - RNA, 19 nt, Artificial Sequence
  Description of Artificial Sequence: Synthetic oligonucleotide
  Sense strand starting at position 3640 of SEQ ID NO: 1562257
gggaaauucuuucuauucc

SEQ ID NO: 1734044 - RNA, 19 nt, Artificial Sequence
  Description of Artificial Sequence: Synthetic oligonucleotide
  Antisense strand to SEQ ID NO: 1734043
ggaauagaaagaauuuccc

SEQ ID NO: 1734045 - RNA, 19 nt, Artificial Sequence
  Description of Artificial Sequence: Synthetic oligonucleotide
  Sense strand starting at position 3680 of SEQ ID NO: 1562257
ccugaauaggugugaaaug

SEQ ID NO: 1734046 - RNA, 19 nt, Artificial Sequence
  Description of Artificial Sequence: Synthetic oligonucleotide
  Antisense strand to SEQ ID NO: 1734045
cauuucacaccuauucagg

SEQ ID NO: 1734047 - RNA, 19 nt, Artificial Sequence
  Description of Artificial Sequence: Synthetic oligonucleotide
  Sense strand starting at position 3685 of SEQ ID NO: 1562257
auaggugugaaauguuauc

SEQ ID NO: 1734048 - RNA, 19 nt, Artificial Sequence
  Description of Artificial Sequence: Synthetic oligonucleotide
  Antisense strand to SEQ ID NO: 1734047
gauaacauuucacaccuau

SEQ ID NO: 1734049 - RNA, 19 nt, Artificial Sequence
  Description of Artificial Sequence: Synthetic oligonucleotide
  Sense strand starting at position 3690 of SEQ ID NO: 1562257
ugugaaauguuaucaagua

SEQ ID NO: 1734050 - RNA, 19 nt, Artificial Sequence
  Description of Artificial Sequence: Synthetic oligonucleotide
  Antisense strand to SEQ ID NO: 1734049
uacuugauaacauuucaca

SEQ ID NO: 1734051 - RNA, 19 nt, Artificial Sequence
  Description of Artificial Sequence: Synthetic oligonucleotide
  Sense strand starting at position 3884 of SEQ ID NO: 1562257
agguuaaguaaggguaagu

SEQ ID NO: 1734052 - RNA, 19 nt, Artificial Sequence
  Description of Artificial Sequence: Synthetic oligonucleotide
  Antisense strand to SEQ ID NO: 1734051
acuuacccuuacuuaaccu

SEQ ID NO: 1734053 - RNA, 19 nt, Artificial Sequence
  Description of Artificial Sequence: Synthetic oligonucleotide
  Sense strand starting at position 15 of SEQ ID NO: 1562258
gcgaaucuccauuaaugua

SEQ ID NO: 1734054 - RNA, 19 nt, Artificial Sequence
  Description of Artificial Sequence: Synthetic oligonucleotide
  Antisense strand to SEQ ID NO: 1734053
uacauuaauggagauucgc

SEQ ID NO: 1734055 - RNA, 19 nt, Artificial Sequence
  Description of Artificial Sequence: Synthetic oligonucleotide
  Sense strand starting at position 35 of SEQ ID NO: 1562258
ccagaccuccuuuguucua

SEQ ID NO: 1734056 - RNA, 19 nt, Artificial Sequence
  Description of Artificial Sequence: Synthetic oligonucleotide
  Antisense strand to SEQ ID NO: 1734055
uagaacaaaggaggucugg

SEQ ID NO: 1734057 - RNA, 19 nt, Artificial Sequence
  Description of Artificial Sequence: Synthetic oligonucleotide
  Sense strand starting at position 57 of SEQ ID NO: 1562258
cuuucuuaggucuggaaga

SEQ ID NO: 1734058 - RNA, 19 nt, Artificial Sequence
  Description of Artificial Sequence: Synthetic oligonucleotide
  Antisense strand to SEQ ID NO: 1734057
ucuuccagaccuaagaaag

SEQ ID NO: 1734059 - RNA, 19 nt, Artificial Sequence
  Description of Artificial Sequence: Synthetic oligonucleotide
  Sense strand starting at position 424 of SEQ ID NO: 1562258
uucugagaguugccaacua

SEQ ID NO: 1734060 - RNA, 19 nt, Artificial Sequence
  Description of Artificial Sequence: Synthetic oligonucleotide
  Antisense strand to SEQ ID NO: 1734059
uaguuggcaacucucagaa

SEQ ID NO: 1734061 - RNA, 19 nt, Artificial Sequence
  Description of Artificial Sequence: Synthetic oligonucleotide
  Sense strand starting at position 582 of SEQ ID NO: 1562258
guguaaacccuuuggagau

SEQ ID NO: 1734062 - RNA, 19 nt, Artificial Sequence
  Description of Artificial Sequence: Synthetic oligonucleotide
  Antisense strand to SEQ ID NO: 1734061
aucuccaaaggguuuacac

SEQ ID NO: 1734063 - RNA, 19 nt, Artificial Sequence
  Description of Artificial Sequence: Synthetic oligonucleotide
  Sense strand starting at position 616 of SEQ ID NO: 1562258
gaggaacccguguauaucu

SEQ ID NO: 1734064 - RNA, 19 nt, Artificial Sequence
  Description of Artificial Sequence: Synthetic oligonucleotide
  Antisense strand to SEQ ID NO: 1734063
agauauacacggguuccuc

SEQ ID NO: 1734065 - RNA, 19 nt, Artificial Sequence
  Description of Artificial Sequence: Synthetic oligonucleotide
  Sense strand starting at position 625 of SEQ ID NO: 1562258
guguauaucuuucucuuau

SEQ ID NO: 1734066 - RNA, 19 nt, Artificial Sequence
  Description of Artificial Sequence: Synthetic oligonucleotide
  Antisense strand to SEQ ID NO: 1734065
auaagagaaagauauacac

SEQ ID NO: 1734067 - RNA, 19 nt, Artificial Sequence
  Description of Artificial Sequence: Synthetic oligonucleotide
  Sense strand starting at position 627 of SEQ ID NO: 1562258
guauaucuuucucuuauug

SEQ ID NO: 1734068 - RNA, 19 nt, Artificial Sequence
  Description of Artificial Sequence: Synthetic oligonucleotide
  Antisense strand to SEQ ID NO: 1734067
caauaagagaaagauauac

SEQ ID NO: 1734069 - RNA, 19 nt, Artificial Sequence
  Description of Artificial Sequence: Synthetic oligonucleotide
  Sense strand starting at position 914 of SEQ ID NO: 1562258
ugcucagccugauuuauga

SEQ ID NO: 1734070 - RNA, 19 nt, Artificial Sequence
  Description of Artificial Sequence: Synthetic oligonucleotide
  Antisense strand to SEQ ID NO: 1734069
ucauaaaucaggcugagca

SEQ ID NO: 1734071 - RNA, 19 nt, Artificial Sequence
  Description of Artificial Sequence: Synthetic oligonucleotide
  Sense strand starting at position 946 of SEQ ID NO: 1562258
uccugucucccugaauugu

SEQ ID NO: 1734072 - RNA, 19 nt, Artificial Sequence
  Description of Artificial Sequence: Synthetic oligonucleotide
  Antisense strand to SEQ ID NO: 1734071
acaauucagggagacagga

SEQ ID NO: 1734073 - RNA, 19 nt, Artificial Sequence
  Description of Artificial Sequence: Synthetic oligonucleotide
  Sense strand starting at position 1010 of SEQ ID NO: 1562258
accucuugaggcugaauaa

SEQ ID NO: 1734074 - RNA, 19 nt, Artificial Sequence
  Description of Artificial Sequence: Synthetic oligonucleotide
  Antisense strand to SEQ ID NO: 1734073
uuauucagccucaagaggu

SEQ ID NO: 1734075 - RNA, 19 nt, Artificial Sequence
  Description of Artificial Sequence: Synthetic oligonucleotide
  Sense strand starting at position 1248 of SEQ ID NO: 1562258
cacuccuauccgcggaaga

SEQ ID NO: 1734076 - RNA, 19 nt, Artificial Sequence
  Description of Artificial Sequence: Synthetic oligonucleotide
  Antisense strand to SEQ ID NO: 1734075
ucuuccgcggauaggagug

SEQ ID NO: 1734077 - RNA, 19 nt, Artificial Sequence
  Description of Artificial Sequence: Synthetic oligonucleotide
  Sense strand starting at position 1249 of SEQ ID NO: 1562258
acuccuauccgcggaagau

SEQ ID NO: 1734078 - RNA, 19 nt, Artificial Sequence
  Description of Artificial Sequence: Synthetic oligonucleotide
  Antisense strand to SEQ ID NO: 1734077
aucuuccgcggauaggagu

SEQ ID NO: 1734079 - RNA, 19 nt, Artificial Sequence
  Description of Artificial Sequence: Synthetic oligonucleotide
  Sense strand starting at position 1250 of SEQ ID NO: 1562258
cuccuauccgcggaagauc

SEQ ID NO: 1734080 - RNA, 19 nt, Artificial Sequence
  Description of Artificial Sequence: Synthetic oligonucleotide
  Antisense strand to SEQ ID NO: 1734079
gaucuuccgcggauaggag

SEQ ID NO: 1734081 - RNA, 19 nt, Artificial Sequence
  Description of Artificial Sequence: Synthetic oligonucleotide
  Sense strand starting at position 2084 of SEQ ID NO: 1562258
gggagucguccagguacac

SEQ ID NO: 1734082 - RNA, 19 nt, Artificial Sequence
  Description of Artificial Sequence: Synthetic oligonucleotide
  Antisense strand to SEQ ID NO: 1734081
guguaccuggacgacuccc

SEQ ID NO: 1734083 - RNA, 19 nt, Artificial Sequence
  Description of Artificial Sequence: Synthetic oligonucleotide
  Sense strand starting at position 2105 of SEQ ID NO: 1562258
cccagaauauuggucauag

SEQ ID NO: 1734084 - RNA, 19 nt, Artificial Sequence
  Description of Artificial Sequence: Synthetic oligonucleotide
  Antisense strand to SEQ ID NO: 1734083
cuaugaccaauauucuggg

SEQ ID NO: 1734085 - RNA, 19 nt, Artificial Sequence
  Description of Artificial Sequence: Synthetic oligonucleotide
  Sense strand starting at position 2106 of SEQ ID NO: 1562258
ccagaauauuggucauagc

SEQ ID NO: 1734086 - RNA, 19 nt, Artificial Sequence
  Description of Artificial Sequence: Synthetic oligonucleotide
  Antisense strand to SEQ ID NO: 1734085
gcuaugaccaauauucugg

SEQ ID NO: 1734087 - RNA, 19 nt, Artificial Sequence
  Description of Artificial Sequence: Synthetic oligonucleotide
  Sense strand starting at position 2146 of SEQ ID NO: 1562258
cccggaauccuuggaagga

SEQ ID NO: 1734088 - RNA, 19 nt, Artificial Sequence
  Description of Artificial Sequence: Synthetic oligonucleotide
  Antisense strand to SEQ ID NO: 1734087
uccuuccaaggauuccggg

SEQ ID NO: 1734089 - RNA, 19 nt, Artificial Sequence
  Description of Artificial Sequence: Synthetic oligonucleotide
  Sense strand starting at position 2291 of SEQ ID NO: 1562258
ccauuucuaugauauaggu

SEQ ID NO: 1734090 - RNA, 19 nt, Artificial Sequence
  Description of Artificial Sequence: Synthetic oligonucleotide
  Antisense strand to SEQ ID NO: 1734089
accuauaucauagaaaugg

SEQ ID NO: 1734091 - RNA, 19 nt, Artificial Sequence
  Description of Artificial Sequence: Synthetic oligonucleotide
  Sense strand starting at position 2332 of SEQ ID NO: 1562258
ugauuauggguaugucuuu

SEQ ID NO: 1734092 - RNA, 19 nt, Artificial Sequence
  Description of Artificial Sequence: Synthetic oligonucleotide
  Antisense strand to SEQ ID NO: 1734091
aaagacauacccauaauca

SEQ ID NO: 1734093 - RNA, 19 nt, Artificial Sequence
  Description of Artificial Sequence: Synthetic oligonucleotide
  Sense strand starting at position 2464 of SEQ ID NO: 1562258
ccagguacacacuguaaau

SEQ ID NO: 1734094 - RNA, 19 nt, Artificial Sequence
  Description of Artificial Sequence: Synthetic oligonucleotide
  Antisense strand to SEQ ID NO: 1734093
auuuacaguguguaccugg

SEQ ID NO: 1734095 - RNA, 19 nt, Artificial Sequence
  Description of Artificial Sequence: Synthetic oligonucleotide
  Sense strand starting at position 2647 of SEQ ID NO: 1562258
gcaucaaugccagaauucu

SEQ ID NO: 1734096 - RNA, 19 nt, Artificial Sequence
  Description of Artificial Sequence: Synthetic oligonucleotide
  Antisense strand to SEQ ID NO: 1734095
agaauucuggcauugaugc

SEQ ID NO: 1734097 - RNA, 19 nt, Artificial Sequence
  Description of Artificial Sequence: Synthetic oligonucleotide
  Sense strand starting at position 2668 of SEQ ID NO: 1562258
cauuauguaggguguauaa

SEQ ID NO: 1734098 - RNA, 19 nt, Artificial Sequence
  Description of Artificial Sequence: Synthetic oligonucleotide
  Antisense strand to SEQ ID NO: 1734097
uuauacacccuacauaaug

SEQ ID NO: 1734099 - RNA, 19 nt, Artificial Sequence
  Description of Artificial Sequence: Synthetic oligonucleotide
  Sense strand starting at position 2670 of SEQ ID NO: 1562258
uuauguaggguguauaaua

SEQ ID NO: 1734100 - RNA, 19 nt, Artificial Sequence
  Description of Artificial Sequence: Synthetic oligonucleotide
  Antisense strand to SEQ ID NO: 1734099
uauuauacacccuacauaa

SEQ ID NO: 1734101 - RNA, 19 nt, Artificial Sequence
  Description of Artificial Sequence: Synthetic oligonucleotide
  Sense strand starting at position 2677 of SEQ ID NO: 1562258
ggguguauaauaugcugau

SEQ ID NO: 1734102 - RNA, 19 nt, Artificial Sequence
  Description of Artificial Sequence: Synthetic oligonucleotide
  Antisense strand to SEQ ID NO: 1734101
aucagcauauuauacaccc

SEQ ID NO: 1734103 - RNA, 19 nt, Artificial Sequence
  Description of Artificial Sequence: Synthetic oligonucleotide
  Sense strand starting at position 2678 of SEQ ID NO: 1562258
gguguauaauaugcugaua

SEQ ID NO: 1734104 - RNA, 19 nt, Artificial Sequence
  Description of Artificial Sequence: Synthetic oligonucleotide
  Antisense strand to SEQ ID NO: 1734103
uaucagcauauuauacacc

SEQ ID NO: 1734105 - RNA, 19 nt, Artificial Sequence
  Description of Artificial Sequence: Synthetic oligonucleotide
  Sense strand starting at position 2681 of SEQ ID NO: 1562258
guauaauaugcugauaucu

SEQ ID NO: 1734106 - RNA, 19 nt, Artificial Sequence
  Description of Artificial Sequence: Synthetic oligonucleotide
  Antisense strand to SEQ ID NO: 1734105
agauaucagcauauuauac

SEQ ID NO: 1734107 - RNA, 19 nt, Artificial Sequence
  Description of Artificial Sequence: Synthetic oligonucleotide
  Sense strand starting at position 2737 of SEQ ID NO: 1562258
ggccuuuacuagguauacu

SEQ ID NO: 1734108 - RNA, 19 nt, Artificial Sequence
  Description of Artificial Sequence: Synthetic oligonucleotide
  Antisense strand to SEQ ID NO: 1734107
aguauaccuaguaaaggcc

SEQ ID NO: 1734109 - RNA, 19 nt, Artificial Sequence
  Description of Artificial Sequence: Synthetic oligonucleotide
  Sense strand starting at position 2802 of SEQ ID NO: 1562258
ggauaaauauuaguuguac

SEQ ID NO: 1734110 - RNA, 19 nt, Artificial Sequence
  Description of Artificial Sequence: Synthetic oligonucleotide
  Antisense strand to SEQ ID NO: 1734109
guacaacuaauauuuaucc

SEQ ID NO: 1734111 - RNA, 19 nt, Artificial Sequence
  Description of Artificial Sequence: Synthetic oligonucleotide
  Sense strand starting at position 2851 of SEQ ID NO: 1562258
acaggcauacaguguuuaa

SEQ ID NO: 1734112 - RNA, 19 nt, Artificial Sequence
  Description of Artificial Sequence: Synthetic oligonucleotide
  Antisense strand to SEQ ID NO: 1734111
uuaaacacuguaugccugu

SEQ ID NO: 1734113 - RNA, 19 nt, Artificial Sequence
  Description of Artificial Sequence: Synthetic oligonucleotide
  Sense strand starting at position 2855 of SEQ ID NO: 1562258
gcauacaguguuuaauggu

SEQ ID NO: 1734114 - RNA, 19 nt, Artificial Sequence
  Description of Artificial Sequence: Synthetic oligonucleotide
  Antisense strand to SEQ ID NO: 1734113
accauuaaacacuguaugc

SEQ ID NO: 1734115 - RNA, 19 nt, Artificial Sequence
  Description of Artificial Sequence: Synthetic oligonucleotide
  Sense strand starting at position 2861 of SEQ ID NO: 1562258
aguguuuaauggucaaaug

SEQ ID NO: 1734116 - RNA, 19 nt, Artificial Sequence
  Description of Artificial Sequence: Synthetic oligonucleotide
  Antisense strand to SEQ ID NO: 1734115
cauuugaccauuaaacacu

SEQ ID NO: 1734117 - RNA, 19 nt, Artificial Sequence
  Description of Artificial Sequence: Synthetic oligonucleotide
  Sense strand starting at position 2862 of SEQ ID NO: 1562258
guguuuaauggucaaauga

SEQ ID NO: 1734118 - RNA, 19 nt, Artificial Sequence
  Description of Artificial Sequence: Synthetic oligonucleotide
  Antisense strand to SEQ ID NO: 1734117
ucauuugaccauuaaacac

SEQ ID NO: 1734119 - RNA, 19 nt, Artificial Sequence
  Description of Artificial Sequence: Synthetic oligonucleotide
  Sense strand starting at position 2870 of SEQ ID NO: 1562258
uggucaaaugagggugauu

SEQ ID NO: 1734120 - RNA, 19 nt, Artificial Sequence
  Description of Artificial Sequence: Synthetic oligonucleotide
  Antisense strand to SEQ ID NO: 1734119
aaucacccucauuugacca

SEQ ID NO: 1734121 - RNA, 19 nt, Artificial Sequence
  Description of Artificial Sequence: Synthetic oligonucleotide
  Sense strand starting at position 3186 of SEQ ID NO: 1562258
ugccucauuucgcuuaaca

SEQ ID NO: 1734122 - RNA, 19 nt, Artificial Sequence
  Description of Artificial Sequence: Synthetic oligonucleotide
  Antisense strand to SEQ ID NO: 1734121
uguuaagcgaaaugaggca

SEQ ID NO: 1734123 - RNA, 19 nt, Artificial Sequence
  Description of Artificial Sequence: Synthetic oligonucleotide
  Sense strand starting at position 3256 of SEQ ID NO: 1562258
uuuaaugacuggcuaauau

SEQ ID NO: 1734124 - RNA, 19 nt, Artificial Sequence
  Description of Artificial Sequence: Synthetic oligonucleotide
  Antisense strand to SEQ ID NO: 1734123
auauuagccagucauuaaa

SEQ ID NO: 1734125 - RNA, 19 nt, Artificial Sequence
  Description of Artificial Sequence: Synthetic oligonucleotide
  Sense strand starting at position 3268 of SEQ ID NO: 1562258
cuaauaucccauuguguua

SEQ ID NO: 1734126 - RNA, 19 nt, Artificial Sequence
  Description of Artificial Sequence: Synthetic oligonucleotide
  Antisense strand to SEQ ID NO: 1734125
uaacacaaugggauauuag

SEQ ID NO: 1734127 - RNA, 19 nt, Artificial Sequence
  Description of Artificial Sequence: Synthetic oligonucleotide
  Sense strand starting at position 3913 of SEQ ID NO: 1562258
ggucucauuuguccacuuu

SEQ ID NO: 1734128 - RNA, 19 nt, Artificial Sequence
  Description of Artificial Sequence: Synthetic oligonucleotide
  Antisense strand to SEQ ID NO: 1734127
aaaguggacaaaugagacc

SEQ ID NO: 1734129 - RNA, 19 nt, Artificial Sequence
  Description of Artificial Sequence: Synthetic oligonucleotide
  Sense strand starting at position 3951 of SEQ ID NO: 1562258
uuugcagucuuacucaaga

SEQ ID NO: 1734130 - RNA, 19 nt, Artificial Sequence
  Description of Artificial Sequence: Synthetic oligonucleotide
  Antisense strand to SEQ ID NO: 1734129
ucuugaguaagacugcaaa

SEQ ID NO: 1734131 - RNA, 19 nt, Artificial Sequence
  Description of Artificial Sequence: Synthetic oligonucleotide
  Sense strand starting at position 3982 of SEQ ID NO: 1562258
caccaauguccuggagugu

SEQ ID NO: 1734132 - RNA, 19 nt, Artificial Sequence
  Description of Artificial Sequence: Synthetic oligonucleotide
  Antisense strand to SEQ ID NO: 1734131
acacuccaggacauuggug

SEQ ID NO: 1734133 - RNA, 19 nt, Artificial Sequence
  Description of Artificial Sequence: Synthetic oligonucleotide
  Sense strand starting at position 45 of SEQ ID NO: 1562259
cccauuuccuggugcgaau

SEQ ID NO: 1734134 - RNA, 19 nt, Artificial Sequence
  Description of Artificial Sequence: Synthetic oligonucleotide
  Antisense strand to SEQ ID NO: 1734133
auucgcaccaggaaauggg

SEQ ID NO: 1734135 - RNA, 19 nt, Artificial Sequence
  Description of Artificial Sequence: Synthetic oligonucleotide
  Sense strand starting at position 724 of SEQ ID NO: 1562259
ugagaucuccuaggaagcu

SEQ ID NO: 1734136 - RNA, 19 nt, Artificial Sequence
  Description of Artificial Sequence: Synthetic oligonucleotide
  Antisense strand to SEQ ID NO: 1734135
agcuuccuaggagaucuca

SEQ ID NO: 1734137 - RNA, 19 nt, Artificial Sequence
  Description of Artificial Sequence: Synthetic oligonucleotide
  Sense strand starting at position 774 of SEQ ID NO: 1562259
aguccaguacuucgaguuu

SEQ ID NO: 1734138 - RNA, 19 nt, Artificial Sequence
  Description of Artificial Sequence: Synthetic oligonucleotide
  Antisense strand to SEQ ID NO: 1734137
aaacucgaaguacuggacu

SEQ ID NO: 1734139 - RNA, 19 nt, Artificial Sequence
  Description of Artificial Sequence: Synthetic oligonucleotide
  Sense strand starting at position 787 of SEQ ID NO: 1562259
gaguuugcacccuaucugu

SEQ ID NO: 1734140 - RNA, 19 nt, Artificial Sequence
  Description of Artificial Sequence: Synthetic oligonucleotide
  Antisense strand to SEQ ID NO: 1734139
acagauagggugcaaacuc

SEQ ID NO: 1734141 - RNA, 19 nt, Artificial Sequence
  Description of Artificial Sequence: Synthetic oligonucleotide
  Sense strand starting at position 831 of SEQ ID NO: 1562259
agaccauucuuggucugua

SEQ ID NO: 1734142 - RNA, 19 nt, Artificial Sequence
  Description of Artificial Sequence: Synthetic oligonucleotide
  Antisense strand to SEQ ID NO: 1734141
uacagaccaagaauggucu

SEQ ID NO: 1734143 - RNA, 19 nt, Artificial Sequence
  Description of Artificial Sequence: Synthetic oligonucleotide
  Sense strand starting at position 832 of SEQ ID NO: 1562259
gaccauucuuggucuguau

SEQ ID NO: 1734144 - RNA, 19 nt, Artificial Sequence
  Description of Artificial Sequence: Synthetic oligonucleotide
  Antisense strand to SEQ ID NO: 1734143
auacagaccaagaaugguc

SEQ ID NO: 1734145 - RNA, 19 nt, Artificial Sequence
  Description of Artificial Sequence: Synthetic oligonucleotide
  Sense strand starting at position 834 of SEQ ID NO: 1562259
ccauucuuggucuguauuu

SEQ ID NO: 1734146 - RNA, 19 nt, Artificial Sequence
  Description of Artificial Sequence: Synthetic oligonucleotide
  Antisense strand to SEQ ID NO: 1734145
aaauacagaccaagaaugg

SEQ ID NO: 1734147 - RNA, 19 nt, Artificial Sequence
  Description of Artificial Sequence: Synthetic oligonucleotide
  Sense strand starting at position 843 of SEQ ID NO: 1562259
gucuguauuucccacaaua

SEQ ID NO: 1734148 - RNA, 19 nt, Artificial Sequence
  Description of Artificial Sequence: Synthetic oligonucleotide
  Antisense strand to SEQ ID NO: 1734147
uauugugggaaauacagac

SEQ ID NO: 1734149 - RNA, 19 nt, Artificial Sequence
  Description of Artificial Sequence: Synthetic oligonucleotide
  Sense strand starting at position 929 of SEQ ID NO: 1562259
cauggaggugcucaguguu

SEQ ID NO: 1734150 - RNA, 19 nt, Artificial Sequence
  Description of Artificial Sequence: Synthetic oligonucleotide
  Antisense strand to SEQ ID NO: 1734149
aacacugagcaccuccaug

SEQ ID NO: 1734151 - RNA, 19 nt, Artificial Sequence
  Description of Artificial Sequence: Synthetic oligonucleotide
  Sense strand starting at position 942 of SEQ ID NO: 1562259
aguguuugcugucuccaaa

SEQ ID NO: 1734152 - RNA, 19 nt, Artificial Sequence
  Description of Artificial Sequence: Synthetic oligonucleotide
  Antisense strand to SEQ ID NO: 1734151
uuuggagacagcaaacacu

SEQ ID NO: 1734153 - RNA, 19 nt, Artificial Sequence
  Description of Artificial Sequence: Synthetic oligonucleotide
  Sense strand starting at position 1099 of SEQ ID NO: 1562259
gugucaguuuaauuuguaa

SEQ ID NO: 1734154 - RNA, 19 nt, Artificial Sequence
  Description of Artificial Sequence: Synthetic oligonucleotide
  Antisense strand to SEQ ID NO: 1734153
uuacaaauuaaacugacac

SEQ ID NO: 1734155 - RNA, 19 nt, Artificial Sequence
  Description of Artificial Sequence: Synthetic oligonucleotide
  Sense strand starting at position 1270 of SEQ ID NO: 1562259
cgcagaaguucuucguggu

SEQ ID NO: 1734156 - RNA, 19 nt, Artificial Sequence
  Description of Artificial Sequence: Synthetic oligonucleotide
  Antisense strand to SEQ ID NO: 1734155
accacgaagaacuucugcg

SEQ ID NO: 1734157 - RNA, 19 nt, Artificial Sequence
  Description of Artificial Sequence: Synthetic oligonucleotide
  Sense strand starting at position 1271 of SEQ ID NO: 1562259
gcagaaguucuucgugguc

SEQ ID NO: 1734158 - RNA, 19 nt, Artificial Sequence
  Description of Artificial Sequence: Synthetic oligonucleotide
  Antisense strand to SEQ ID NO: 1734157
gaccacgaagaacuucugc

SEQ ID NO: 1734159 - RNA, 19 nt, Artificial Sequence
  Description of Artificial Sequence: Synthetic oligonucleotide
  Sense strand starting at position 1273 of SEQ ID NO: 1562259
agaaguucuucguggucag

SEQ ID NO: 1734160 - RNA, 19 nt, Artificial Sequence
  Description of Artificial Sequence: Synthetic oligonucleotide
  Antisense strand to SEQ ID NO: 1734159
cugaccacgaagaacuucu

SEQ ID NO: 1734161 - RNA, 19 nt, Artificial Sequence
  Description of Artificial Sequence: Synthetic oligonucleotide
  Sense strand starting at position 2099 of SEQ ID NO: 1562259
gcacgugaguccuccaggu

SEQ ID NO: 1734162 - RNA, 19 nt, Artificial Sequence
  Description of Artificial Sequence: Synthetic oligonucleotide
  Antisense strand to SEQ ID NO: 1734161
accuggaggacucacgugc

SEQ ID NO: 1734163 - RNA, 19 nt, Artificial Sequence
  Description of Artificial Sequence: Synthetic oligonucleotide
  Sense strand starting at position 2101 of SEQ ID NO: 1562259
acgugaguccuccaggucu

SEQ ID NO: 1734164 - RNA, 19 nt, Artificial Sequence
  Description of Artificial Sequence: Synthetic oligonucleotide
  Antisense strand to SEQ ID NO: 1734163
agaccuggaggacucacgu

SEQ ID NO: 1734165 - RNA, 19 nt, Artificial Sequence
  Description of Artificial Sequence: Synthetic oligonucleotide
  Sense strand starting at position 2215 of SEQ ID NO: 1562259
cagggaucuccaggcugua

SEQ ID NO: 1734166 - RNA, 19 nt, Artificial Sequence
  Description of Artificial Sequence: Synthetic oligonucleotide
  Antisense strand to SEQ ID NO: 1734165
uacagccuggagaucccug

SEQ ID NO: 1734167 - RNA, 19 nt, Artificial Sequence
  Description of Artificial Sequence: Synthetic oligonucleotide
  Sense strand starting at position 2393 of SEQ ID NO: 1562259
agaucagggucucacuauu

SEQ ID NO: 1734168 - RNA, 19 nt, Artificial Sequence
  Description of Artificial Sequence: Synthetic oligonucleotide
  Antisense strand to SEQ ID NO: 1734167
aauagugagacccugaucu

SEQ ID NO: 1734169 - RNA, 19 nt, Artificial Sequence
  Description of Artificial Sequence: Synthetic oligonucleotide
  Sense strand starting at position 2504 of SEQ ID NO: 1562259
gggaucccauuaucucuua

SEQ ID NO: 1734170 - RNA, 19 nt, Artificial Sequence
  Description of Artificial Sequence: Synthetic oligonucleotide
  Antisense strand to SEQ ID NO: 1734169
uaagagauaaugggauccc

SEQ ID NO: 1734171 - RNA, 19 nt, Artificial Sequence
  Description of Artificial Sequence: Synthetic oligonucleotide
  Sense strand starting at position 2626 of SEQ ID NO: 1562259
ggguccuauccaggucuca

SEQ ID NO: 1734172 - RNA, 19 nt, Artificial Sequence
  Description of Artificial Sequence: Synthetic oligonucleotide
  Antisense strand to SEQ ID NO: 1734171
ugagaccuggauaggaccc

SEQ ID NO: 1734173 - RNA, 19 nt, Artificial Sequence
  Description of Artificial Sequence: Synthetic oligonucleotide
  Sense strand starting at position 2742 of SEQ ID NO: 1562259
ugcaccaagucccguaaua

SEQ ID NO: 1734174 - RNA, 19 nt, Artificial Sequence
  Description of Artificial Sequence: Synthetic oligonucleotide
  Antisense strand to SEQ ID NO: 1734173
uauuacgggacuuggugca

SEQ ID NO: 1734175 - RNA, 19 nt, Artificial Sequence
  Description of Artificial Sequence: Synthetic oligonucleotide
  Sense strand starting at position 2753 of SEQ ID NO: 1562259
ccguaauagcucuagagac

SEQ ID NO: 1734176 - RNA, 19 nt, Artificial Sequence
  Description of Artificial Sequence: Synthetic oligonucleotide
  Antisense strand to SEQ ID NO: 1734175
gucucuagagcuauuacgg

SEQ ID NO: 1734177 - RNA, 19 nt, Artificial Sequence
  Description of Artificial Sequence: Synthetic oligonucleotide
  Sense strand starting at position 2755 of SEQ ID NO: 1562259
guaauagcucuagagacau

SEQ ID NO: 1734178 - RNA, 19 nt, Artificial Sequence
  Description of Artificial Sequence: Synthetic oligonucleotide
  Antisense strand to SEQ ID NO: 1734177
augucucuagagcuauuac

SEQ ID NO: 1734179 - RNA, 19 nt, Artificial Sequence
  Description of Artificial Sequence: Synthetic oligonucleotide
  Sense strand starting at position 2777 of SEQ ID NO: 1562259
gguccuuucccauggaguu

SEQ ID NO: 1734180 - RNA, 19 nt, Artificial Sequence
  Description of Artificial Sequence: Synthetic oligonucleotide
  Antisense strand to SEQ ID NO: 1734179
aacuccaugggaaaggacc

SEQ ID NO: 1734181 - RNA, 19 nt, Artificial Sequence
  Description of Artificial Sequence: Synthetic oligonucleotide
  Sense strand starting at position 2778 of SEQ ID NO: 1562259
guccuuucccauggaguua

SEQ ID NO: 1734182 - RNA, 19 nt, Artificial Sequence
  Description of Artificial Sequence: Synthetic oligonucleotide
  Antisense strand to SEQ ID NO: 1734181
uaacuccaugggaaaggac

SEQ ID NO: 1734183 - RNA, 19 nt, Artificial Sequence
  Description of Artificial Sequence: Synthetic oligonucleotide
  Sense strand starting at position 3302 of SEQ ID NO: 1562259
gugguuugcacuugaguac

SEQ ID NO: 1734184 - RNA, 19 nt, Artificial Sequence
  Description of Artificial Sequence: Synthetic oligonucleotide
  Antisense strand to SEQ ID NO: 1734183
guacucaagugcaaaccac

SEQ ID NO: 1734185 - RNA, 19 nt, Artificial Sequence
  Description of Artificial Sequence: Synthetic oligonucleotide
  Sense strand starting at position 3351 of SEQ ID NO: 1562259
ugcuuaagccuaggaagua

SEQ ID NO: 1734186 - RNA, 19 nt, Artificial Sequence
  Description of Artificial Sequence: Synthetic oligonucleotide
  Antisense strand to SEQ ID NO: 1734185
uacuuccuaggcuuaagca

SEQ ID NO: 1734187 - RNA, 19 nt, Artificial Sequence
  Description of Artificial Sequence: Synthetic oligonucleotide
  Sense strand starting at position 3434 of SEQ ID NO: 1562259
cucaauaaucaauguguga

SEQ ID NO: 1734188 - RNA, 19 nt, Artificial Sequence
  Description of Artificial Sequence: Synthetic oligonucleotide
  Antisense strand to SEQ ID NO: 1734187
ucacacauugauuauugag

SEQ ID NO: 1734189 - RNA, 19 nt, Artificial Sequence
  Description of Artificial Sequence: Synthetic oligonucleotide
  Sense strand starting at position 3438 of SEQ ID NO: 1562259
auaaucaaugugugauagu

SEQ ID NO: 1734190 - RNA, 19 nt, Artificial Sequence
  Description of Artificial Sequence: Synthetic oligonucleotide
  Antisense strand to SEQ ID NO: 1734189
acuaucacacauugauuau

SEQ ID NO: 1734191 - RNA, 19 nt, Artificial Sequence
  Description of Artificial Sequence: Synthetic oligonucleotide
  Sense strand starting at position 3439 of SEQ ID NO: 1562259
uaaucaaugugugauagug

SEQ ID NO: 1734192 - RNA, 19 nt, Artificial Sequence
  Description of Artificial Sequence: Synthetic oligonucleotide
  Antisense strand to SEQ ID NO: 1734191
cacuaucacacauugauua

SEQ ID NO: 1734193 - RNA, 19 nt, Artificial Sequence
  Description of Artificial Sequence: Synthetic oligonucleotide
  Sense strand starting at position 3447 of SEQ ID NO: 1562259
gugugauagugguuucaaa

SEQ ID NO: 1734194 - RNA, 19 nt, Artificial Sequence
  Description of Artificial Sequence: Synthetic oligonucleotide
  Antisense strand to SEQ ID NO: 1734193
uuugaaaccacuaucacac

SEQ ID NO: 1734195 - RNA, 19 nt, Artificial Sequence
  Description of Artificial Sequence: Synthetic oligonucleotide
  Sense strand starting at position 3888 of SEQ ID NO: 1562259
ugugguggcuccucuguaa

SEQ ID NO: 1734196 - RNA, 19 nt, Artificial Sequence
  Description of Artificial Sequence: Synthetic oligonucleotide
  Antisense strand to SEQ ID NO: 1734195
uuacagaggagccaccaca

SEQ ID NO: 1734197 - RNA, 19 nt, Artificial Sequence
  Description of Artificial Sequence: Synthetic oligonucleotide
  Sense strand starting at position 5 of SEQ ID NO: 1562260
gucugucuuucugagcuaa

SEQ ID NO: 1734198 - RNA, 19 nt, Artificial Sequence
  Description of Artificial Sequence: Synthetic oligonucleotide
  Antisense strand to SEQ ID NO: 1734197
uuagcucagaaagacagac

SEQ ID NO: 1734199 - RNA, 19 nt, Artificial Sequence
  Description of Artificial Sequence: Synthetic oligonucleotide
  Sense strand starting at position 9 of SEQ ID NO: 1562260
gucuuucugagcuaacgua

SEQ ID NO: 1734200 - RNA, 19 nt, Artificial Sequence
  Description of Artificial Sequence: Synthetic oligonucleotide
  Antisense strand to SEQ ID NO: 1734199
uacguuagcucagaaagac

SEQ ID NO: 1734201 - RNA, 19 nt, Artificial Sequence
  Description of Artificial Sequence: Synthetic oligonucleotide
  Sense strand starting at position 24 of SEQ ID NO: 1562260
cguacuguguaguucacaa

SEQ ID NO: 1734202 - RNA, 19 nt, Artificial Sequence
  Description of Artificial Sequence: Synthetic oligonucleotide
  Antisense strand to SEQ ID NO: 1734201
uugugaacuacacaguacg

SEQ ID NO: 1734203 - RNA, 19 nt, Artificial Sequence
  Description of Artificial Sequence: Synthetic oligonucleotide
  Sense strand starting at position 44 of SEQ ID NO: 1562260
aagucaaucuggcucaguu

SEQ ID NO: 1734204 - RNA, 19 nt, Artificial Sequence
  Description of Artificial Sequence: Synthetic oligonucleotide
  Antisense strand to SEQ ID NO: 1734203
aacugagccagauugacuu

SEQ ID NO: 1734205 - RNA, 19 nt, Artificial Sequence
  Description of Artificial Sequence: Synthetic oligonucleotide
  Sense strand starting at position 722 of SEQ ID NO: 1562260
aacccucgguuccgagaau

SEQ ID NO: 1734206 - RNA, 19 nt, Artificial Sequence
  Description of Artificial Sequence: Synthetic oligonucleotide
  Antisense strand to SEQ ID NO: 1734205
auucucggaaccgaggguu

SEQ ID NO: 1734207 - RNA, 19 nt, Artificial Sequence
  Description of Artificial Sequence: Synthetic oligonucleotide
  Sense strand starting at position 723 of SEQ ID NO: 1562260
acccucgguuccgagaauu

SEQ ID NO: 1734208 - RNA, 19 nt, Artificial Sequence
  Description of Artificial Sequence: Synthetic oligonucleotide
  Antisense strand to SEQ ID NO: 1734207
aauucucggaaccgagggu

SEQ ID NO: 1734209 - RNA, 19 nt, Artificial Sequence
  Description of Artificial Sequence: Synthetic oligonucleotide
  Sense strand starting at position 906 of SEQ ID NO: 1562260
uauggacucgcagggaauu

SEQ ID NO: 1734210 - RNA, 19 nt, Artificial Sequence
  Description of Artificial Sequence: Synthetic oligonucleotide
  Antisense strand to SEQ ID NO: 1734209
aauucccugcgaguccaua

SEQ ID NO: 1734211 - RNA, 19 nt, Artificial Sequence
  Description of Artificial Sequence: Synthetic oligonucleotide
  Sense strand starting at position 1066 of SEQ ID NO: 1562260
cugccauccuacuguuuga

SEQ ID NO: 1734212 - RNA, 19 nt, Artificial Sequence
  Description of Artificial Sequence: Synthetic oligonucleotide
  Antisense strand to SEQ ID NO: 1734211
ucaaacaguaggauggcag

SEQ ID NO: 1734213 - RNA, 19 nt, Artificial Sequence
  Description of Artificial Sequence: Synthetic oligonucleotide
  Sense strand starting at position 1069 of SEQ ID NO: 1562260
ccauccuacuguuugagga

SEQ ID NO: 1734214 - RNA, 19 nt, Artificial Sequence
  Description of Artificial Sequence: Synthetic oligonucleotide
  Antisense strand to SEQ ID NO: 1734213
uccucaaacaguaggaugg

SEQ ID NO: 1734215 - RNA, 19 nt, Artificial Sequence
  Description of Artificial Sequence: Synthetic oligonucleotide
  Sense strand starting at position 1088 of SEQ ID NO: 1562260
gccagaaguugacuugaag

SEQ ID NO: 1734216 - RNA, 19 nt, Artificial Sequence
  Description of Artificial Sequence: Synthetic oligonucleotide
  Antisense strand to SEQ ID NO: 1734215
cuucaagucaacuucuggc

SEQ ID NO: 1734217 - RNA, 19 nt, Artificial Sequence
  Description of Artificial Sequence: Synthetic oligonucleotide
  Sense strand starting at position 1320 of SEQ ID NO: 1562260
ggcuaagaauucuuucuuu

SEQ ID NO: 1734218 - RNA, 19 nt, Artificial Sequence
  Description of Artificial Sequence: Synthetic oligonucleotide
  Antisense strand to SEQ ID NO: 1734217
aaagaaagaauucuuagcc

SEQ ID NO: 1734219 - RNA, 19 nt, Artificial Sequence
  Description of Artificial Sequence: Synthetic oligonucleotide
  Sense strand starting at position 1482 of SEQ ID NO: 1562260
gugugauucugagccucuu

SEQ ID NO: 1734220 - RNA, 19 nt, Artificial Sequence
  Description of Artificial Sequence: Synthetic oligonucleotide
  Antisense strand to SEQ ID NO: 1734219
aagaggcucagaaucacac

SEQ ID NO: 1734221 - RNA, 19 nt, Artificial Sequence
  Description of Artificial Sequence: Synthetic oligonucleotide
  Sense strand starting at position 1851 of SEQ ID NO: 1562260
ugcuuacccuggcagagaa

SEQ ID NO: 1734222 - RNA, 19 nt, Artificial Sequence
  Description of Artificial Sequence: Synthetic oligonucleotide
  Antisense strand to SEQ ID NO: 1734221
uucucugccaggguaagca

SEQ ID NO: 1734223 - RNA, 19 nt, Artificial Sequence
  Description of Artificial Sequence: Synthetic oligonucleotide
  Sense strand starting at position 2083 of SEQ ID NO: 1562260
gggcccaguuccucagauu

SEQ ID NO: 1734224 - RNA, 19 nt, Artificial Sequence
  Description of Artificial Sequence: Synthetic oligonucleotide
  Antisense strand to SEQ ID NO: 1734223
aaucugaggaacugggccc

SEQ ID NO: 1734225 - RNA, 19 nt, Artificial Sequence
  Description of Artificial Sequence: Synthetic oligonucleotide
  Sense strand starting at position 2163 of SEQ ID NO: 1562260
ggaggccuuucagaaagga

SEQ ID NO: 1734226 - RNA, 19 nt, Artificial Sequence
  Description of Artificial Sequence: Synthetic oligonucleotide
  Antisense strand to SEQ ID NO: 1734225
uccuuucugaaaggccucc

SEQ ID NO: 1734227 - RNA, 19 nt, Artificial Sequence
  Description of Artificial Sequence: Synthetic oligonucleotide
  Sense strand starting at position 2613 of SEQ ID NO: 1562260
aagacuaagugauggucua

SEQ ID NO: 1734228 - RNA, 19 nt, Artificial Sequence
  Description of Artificial Sequence: Synthetic oligonucleotide
  Antisense strand to SEQ ID NO: 1734227
uagaccaucacuuagucuu

SEQ ID NO: 1734229 - RNA, 19 nt, Artificial Sequence
  Description of Artificial Sequence: Synthetic oligonucleotide
  Sense strand starting at position 3001 of SEQ ID NO: 1562260
ccgugcuucuggccuuaga

SEQ ID NO: 1734230 - RNA, 19 nt, Artificial Sequence
  Description of Artificial Sequence: Synthetic oligonucleotide
  Antisense strand to SEQ ID NO: 1734229
ucuaaggccagaagcacgg

SEQ ID NO: 1734231 - RNA, 19 nt, Artificial Sequence
  Description of Artificial Sequence: Synthetic oligonucleotide
  Sense strand starting at position 3018 of SEQ ID NO: 1562260
gagggacuugcgcacacau

SEQ ID NO: 1734232 - RNA, 19 nt, Artificial Sequence
  Description of Artificial Sequence: Synthetic oligonucleotide
  Antisense strand to SEQ ID NO: 1734231
augugugcgcaagucccuc

SEQ ID NO: 1734233 - RNA, 19 nt, Artificial Sequence
  Description of Artificial Sequence: Synthetic oligonucleotide
  Sense strand starting at position 3028 of SEQ ID NO: 1562260
cgcacacauggcugagaau

SEQ ID NO: 1734234 - RNA, 19 nt, Artificial Sequence
  Description of Artificial Sequence: Synthetic oligonucleotide
  Antisense strand to SEQ ID NO: 1734233
auucucagccaugugugcg

SEQ ID NO: 1734235 - RNA, 19 nt, Artificial Sequence
  Description of Artificial Sequence: Synthetic oligonucleotide
  Sense strand starting at position 3029 of SEQ ID NO: 1562260
gcacacauggcugagaaua

SEQ ID NO: 1734236 - RNA, 19 nt, Artificial Sequence
  Description of Artificial Sequence: Synthetic oligonucleotide
  Antisense strand to SEQ ID NO: 1734235
uauucucagccaugugugc

SEQ ID NO: 1734237 - RNA, 19 nt, Artificial Sequence
  Description of Artificial Sequence: Synthetic oligonucleotide
  Sense strand starting at position 3031 of SEQ ID NO: 1562260
acacauggcugagaauauu

SEQ ID NO: 1734238 - RNA, 19 nt, Artificial Sequence
  Description of Artificial Sequence: Synthetic oligonucleotide
  Antisense strand to SEQ ID NO: 1734237
aauauucucagccaugugu

SEQ ID NO: 1734239 - RNA, 19 nt, Artificial Sequence
  Description of Artificial Sequence: Synthetic oligonucleotide
  Sense strand starting at position 3052 of SEQ ID NO: 1562260
ccagaaagguguuacugau

SEQ ID NO: 1734240 - RNA, 19 nt, Artificial Sequence
  Description of Artificial Sequence: Synthetic oligonucleotide
  Antisense strand to SEQ ID NO: 1734239
aucaguaacaccuuucugg

SEQ ID NO: 1734241 - RNA, 19 nt, Artificial Sequence
  Description of Artificial Sequence: Synthetic oligonucleotide
  Sense strand starting at position 3058 of SEQ ID NO: 1562260
agguguuacugauaccaga

SEQ ID NO: 1734242 - RNA, 19 nt, Artificial Sequence
  Description of Artificial Sequence: Synthetic oligonucleotide
  Antisense strand to SEQ ID NO: 1734241
ucugguaucaguaacaccu

SEQ ID NO: 1734243 - RNA, 19 nt, Artificial Sequence
  Description of Artificial Sequence: Synthetic oligonucleotide
  Sense strand starting at position 3222 of SEQ ID NO: 1562260
ggcugcucaacugauugua

SEQ ID NO: 1734244 - RNA, 19 nt, Artificial Sequence
  Description of Artificial Sequence: Synthetic oligonucleotide
  Antisense strand to SEQ ID NO: 1734243
uacaaucaguugagcagcc

SEQ ID NO: 1734245 - RNA, 19 nt, Artificial Sequence
  Description of Artificial Sequence: Synthetic oligonucleotide
  Sense strand starting at position 3225 of SEQ ID NO: 1562260
ugcucaacugauuguaguu

SEQ ID NO: 1734246 - RNA, 19 nt, Artificial Sequence
  Description of Artificial Sequence: Synthetic oligonucleotide
  Antisense strand to SEQ ID NO: 1734245
aacuacaaucaguugagca

SEQ ID NO: 1734247 - RNA, 19 nt, Artificial Sequence
  Description of Artificial Sequence: Synthetic oligonucleotide
  Sense strand starting at position 3234 of SEQ ID NO: 1562260
gauuguaguuacuuccuga

SEQ ID NO: 1734248 - RNA, 19 nt, Artificial Sequence
  Description of Artificial Sequence: Synthetic oligonucleotide
  Antisense strand to SEQ ID NO: 1734247
ucaggaaguaacuacaauc

SEQ ID NO: 1734249 - RNA, 19 nt, Artificial Sequence
  Description of Artificial Sequence: Synthetic oligonucleotide
  Sense strand starting at position 3237 of SEQ ID NO: 1562260
uguaguuacuuccugacua

SEQ ID NO: 1734250 - RNA, 19 nt, Artificial Sequence
  Description of Artificial Sequence: Synthetic oligonucleotide
  Antisense strand to SEQ ID NO: 1734249
uagucaggaaguaacuaca

SEQ ID NO: 1734251 - RNA, 19 nt, Artificial Sequence
  Description of Artificial Sequence: Synthetic oligonucleotide
  Sense strand starting at position 3238 of SEQ ID NO: 1562260
guaguuacuuccugacuau

SEQ ID NO: 1734252 - RNA, 19 nt, Artificial Sequence
  Description of Artificial Sequence: Synthetic oligonucleotide
  Antisense strand to SEQ ID NO: 1734251
auagucaggaaguaacuac

SEQ ID NO: 1734253 - RNA, 19 nt, Artificial Sequence
  Description of Artificial Sequence: Synthetic oligonucleotide
  Sense strand starting at position 3241 of SEQ ID NO: 1562260
guuacuuccugacuauaug

SEQ ID NO: 1734254 - RNA, 19 nt, Artificial Sequence
  Description of Artificial Sequence: Synthetic oligonucleotide
  Antisense strand to SEQ ID NO: 1734253
cauauagucaggaaguaac

SEQ ID NO: 1734255 - RNA, 19 nt, Artificial Sequence
  Description of Artificial Sequence: Synthetic oligonucleotide
  Sense strand starting at position 3917 of SEQ ID NO: 1562260
ugucucauccugugauuua

SEQ ID NO: 1734256 - RNA, 19 nt, Artificial Sequence
  Description of Artificial Sequence: Synthetic oligonucleotide
  Antisense strand to SEQ ID NO: 1734255
uaaaucacaggaugagaca

SEQ ID NO: 1734257 - RNA, 19 nt, Artificial Sequence
  Description of Artificial Sequence: Synthetic oligonucleotide
  Sense strand starting at position 302 of SEQ ID NO: 1562261
gccuaugggccucaaauua

SEQ ID NO: 1734258 - RNA, 19 nt, Artificial Sequence
  Description of Artificial Sequence: Synthetic oligonucleotide
  Antisense strand to SEQ ID NO: 1734257
uaauuugaggcccauaggc

SEQ ID NO: 1734259 - RNA, 19 nt, Artificial Sequence
  Description of Artificial Sequence: Synthetic oligonucleotide
  Sense strand starting at position 358 of SEQ ID NO: 1562261
uacuguauaccagaggcaa

SEQ ID NO: 1734260 - RNA, 19 nt, Artificial Sequence
  Description of Artificial Sequence: Synthetic oligonucleotide
  Antisense strand to SEQ ID NO: 1734259
uugccucugguauacagua

SEQ ID NO: 1734261 - RNA, 19 nt, Artificial Sequence
  Description of Artificial Sequence: Synthetic oligonucleotide
  Sense strand starting at position 413 of SEQ ID NO: 1562261
ccaugaguucuacaccuuc

SEQ ID NO: 1734262 - RNA, 19 nt, Artificial Sequence
  Description of Artificial Sequence: Synthetic oligonucleotide
  Antisense strand to SEQ ID NO: 1734261
gaagguguagaacucaugg

SEQ ID NO: 1734263 - RNA, 19 nt, Artificial Sequence
  Description of Artificial Sequence: Synthetic oligonucleotide
  Sense strand starting at position 433 of SEQ ID NO: 1562261
ucaaauugacaaugcuaga

SEQ ID NO: 1734264 - RNA, 19 nt, Artificial Sequence
  Description of Artificial Sequence: Synthetic oligonucleotide
  Antisense strand to SEQ ID NO: 1734263
ucuagcauugucaauuuga

SEQ ID NO: 1734265 - RNA, 19 nt, Artificial Sequence
  Description of Artificial Sequence: Synthetic oligonucleotide
  Sense strand starting at position 542 of SEQ ID NO: 1562261
gucugacaauucucaaagu

SEQ ID NO: 1734266 - RNA, 19 nt, Artificial Sequence
  Description of Artificial Sequence: Synthetic oligonucleotide
  Antisense strand to SEQ ID NO: 1734265
acuuugagaauugucagac

SEQ ID NO: 1734267 - RNA, 19 nt, Artificial Sequence
  Description of Artificial Sequence: Synthetic oligonucleotide
  Sense strand starting at position 663 of SEQ ID NO: 1562261
ucuacuagguagguuuaaa

SEQ ID NO: 1734268 - RNA, 19 nt, Artificial Sequence
  Description of Artificial Sequence: Synthetic oligonucleotide
  Antisense strand to SEQ ID NO: 1734267
uuuaaaccuaccuaguaga

SEQ ID NO: 1734269 - RNA, 19 nt, Artificial Sequence
  Description of Artificial Sequence: Synthetic oligonucleotide
  Sense strand starting at position 719 of SEQ ID NO: 1562261
gccugauauccagaacuca

SEQ ID NO: 1734270 - RNA, 19 nt, Artificial Sequence
  Description of Artificial Sequence: Synthetic oligonucleotide
  Antisense strand to SEQ ID NO: 1734269
ugaguucuggauaucaggc

SEQ ID NO: 1734271 - RNA, 19 nt, Artificial Sequence
  Description of Artificial Sequence: Synthetic oligonucleotide
  Sense strand starting at position 736 of SEQ ID NO: 1562261
caccauaugccggaaguga

SEQ ID NO: 1734272 - RNA, 19 nt, Artificial Sequence
  Description of Artificial Sequence: Synthetic oligonucleotide
  Antisense strand to SEQ ID NO: 1734271
ucacuuccggcauauggug

SEQ ID NO: 1734273 - RNA, 19 nt, Artificial Sequence
  Description of Artificial Sequence: Synthetic oligonucleotide
  Sense strand starting at position 756 of SEQ ID NO: 1562261
uuggauuguuaacuagaag

SEQ ID NO: 1734274 - RNA, 19 nt, Artificial Sequence
  Description of Artificial Sequence: Synthetic oligonucleotide
  Antisense strand to SEQ ID NO: 1734273
cuucuaguuaacaauccaa

SEQ ID NO: 1734275 - RNA, 19 nt, Artificial Sequence
  Description of Artificial Sequence: Synthetic oligonucleotide
  Sense strand starting at position 767 of SEQ ID NO: 1562261
acuagaagccgucagaguu

SEQ ID NO: 1734276 - RNA, 19 nt, Artificial Sequence
  Description of Artificial Sequence: Synthetic oligonucleotide
  Antisense strand to SEQ ID NO: 1734275
aacucugacggcuucuagu

SEQ ID NO: 1734277 - RNA, 19 nt, Artificial Sequence
  Description of Artificial Sequence: Synthetic oligonucleotide
  Sense strand starting at position 821 of SEQ ID NO: 1562261
gauguuuggcccuaacaug

SEQ ID NO: 1734278 - RNA, 19 nt, Artificial Sequence
  Description of Artificial Sequence: Synthetic oligonucleotide
  Antisense strand to SEQ ID NO: 1734277
cauguuagggccaaacauc

SEQ ID NO: 1734279 - RNA, 19 nt, Artificial Sequence
  Description of Artificial Sequence: Synthetic oligonucleotide
  Sense strand starting at position 828 of SEQ ID NO: 1562261
ggcccuaacaugugaggga

SEQ ID NO: 1734280 - RNA, 19 nt, Artificial Sequence
  Description of Artificial Sequence: Synthetic oligonucleotide
  Antisense strand to SEQ ID NO: 1734279
ucccucacauguuagggcc

SEQ ID NO: 1734281 - RNA, 19 nt, Artificial Sequence
  Description of Artificial Sequence: Synthetic oligonucleotide
  Sense strand starting at position 901 of SEQ ID NO: 1562261
ccaggaacuuugccacaaa

SEQ ID NO: 1734282 - RNA, 19 nt, Artificial Sequence
  Description of Artificial Sequence: Synthetic oligonucleotide
  Antisense strand to SEQ ID NO: 1734281
uuuguggcaaaguuccugg

SEQ ID NO: 1734283 - RNA, 19 nt, Artificial Sequence
  Description of Artificial Sequence: Synthetic oligonucleotide
  Sense strand starting at position 1362 of SEQ ID NO: 1562261
uccauuuggcccuggcaga

SEQ ID NO: 1734284 - RNA, 19 nt, Artificial Sequence
  Description of Artificial Sequence: Synthetic oligonucleotide
  Antisense strand to SEQ ID NO: 1734283
ucugccagggccaaaugga

SEQ ID NO: 1734285 - RNA, 19 nt, Artificial Sequence
  Description of Artificial Sequence: Synthetic oligonucleotide
  Sense strand starting at position 1426 of SEQ ID NO: 1562261
ccgcccuccguauucgaaa

SEQ ID NO: 1734286 - RNA, 19 nt, Artificial Sequence
  Description of Artificial Sequence: Synthetic oligonucleotide
  Antisense strand to SEQ ID NO: 1734285
uuucgaauacggagggcgg

SEQ ID NO: 1734287 - RNA, 19 nt, Artificial Sequence
  Description of Artificial Sequence: Synthetic oligonucleotide
  Sense strand starting at position 1486 of SEQ ID NO: 1562261
auuagaguucuaggucacu

SEQ ID NO: 1734288 - RNA, 19 nt, Artificial Sequence
  Description of Artificial Sequence: Synthetic oligonucleotide
  Antisense strand to SEQ ID NO: 1734287
agugaccuagaacucuaau

SEQ ID NO: 1734289 - RNA, 19 nt, Artificial Sequence
  Description of Artificial Sequence: Synthetic oligonucleotide
  Sense strand starting at position 2065 of SEQ ID NO: 1562261
gucauuuccgauuggcgaa

SEQ ID NO: 1734290 - RNA, 19 nt, Artificial Sequence
  Description of Artificial Sequence: Synthetic oligonucleotide
  Antisense strand to SEQ ID NO: 1734289
uucgccaaucggaaaugac

SEQ ID NO: 1734291 - RNA, 19 nt, Artificial Sequence
  Description of Artificial Sequence: Synthetic oligonucleotide
  Sense strand starting at position 2066 of SEQ ID NO: 1562261
ucauuuccgauuggcgaau

SEQ ID NO: 1734292 - RNA, 19 nt, Artificial Sequence
  Description of Artificial Sequence: Synthetic oligonucleotide
  Antisense strand to SEQ ID NO: 1734291
auucgccaaucggaaauga

SEQ ID NO: 1734293 - RNA, 19 nt, Artificial Sequence
  Description of Artificial Sequence: Synthetic oligonucleotide
  Sense strand starting at position 2149 of SEQ ID NO: 1562261
ccugaauucccugggcuga

SEQ ID NO: 1734294 - RNA, 19 nt, Artificial Sequence
  Description of Artificial Sequence: Synthetic oligonucleotide
  Antisense strand to SEQ ID NO: 1734293
ucagcccagggaauucagg

SEQ ID NO: 1734295 - RNA, 19 nt, Artificial Sequence
  Description of Artificial Sequence: Synthetic oligonucleotide
  Sense strand starting at position 2409 of SEQ ID NO: 1562261
ucuggccucuuaucuaaga

SEQ ID NO: 1734296 - RNA, 19 nt, Artificial Sequence
  Description of Artificial Sequence: Synthetic oligonucleotide
  Antisense strand to SEQ ID NO: 1734295
ucuuagauaagaggccaga

SEQ ID NO: 1734297 - RNA, 19 nt, Artificial Sequence
  Description of Artificial Sequence: Synthetic oligonucleotide
  Sense strand starting at position 2410 of SEQ ID NO: 1562261
cuggccucuuaucuaagau

SEQ ID NO: 1734298 - RNA, 19 nt, Artificial Sequence
  Description of Artificial Sequence: Synthetic oligonucleotide
  Antisense strand to SEQ ID NO: 1734297
aucuuagauaagaggccag

SEQ ID NO: 1734299 - RNA, 19 nt, Artificial Sequence
  Description of Artificial Sequence: Synthetic oligonucleotide
  Sense strand starting at position 2649 of SEQ ID NO: 1562261
gcgcguuuaaaucuuaaug

SEQ ID NO: 1734300 - RNA, 19 nt, Artificial Sequence
  Description of Artificial Sequence: Synthetic oligonucleotide
  Antisense strand to SEQ ID NO: 1734299
cauuaagauuuaaacgcgc

SEQ ID NO: 1734301 - RNA, 19 nt, Artificial Sequence
  Description of Artificial Sequence: Synthetic oligonucleotide
  Sense strand starting at position 2737 of SEQ ID NO: 1562261
guauuuccaugagaaaucu

SEQ ID NO: 1734302 - RNA, 19 nt, Artificial Sequence
  Description of Artificial Sequence: Synthetic oligonucleotide
  Antisense strand to SEQ ID NO: 1734301
agauuucucauggaaauac

SEQ ID NO: 1734303 - RNA, 19 nt, Artificial Sequence
  Description of Artificial Sequence: Synthetic oligonucleotide
  Sense strand starting at position 2771 of SEQ ID NO: 1562261
uuugauauguaccugauac

SEQ ID NO: 1734304 - RNA, 19 nt, Artificial Sequence
  Description of Artificial Sequence: Synthetic oligonucleotide
  Antisense strand to SEQ ID NO: 1734303
guaucagguacauaucaaa

SEQ ID NO: 1734305 - RNA, 19 nt, Artificial Sequence
  Description of Artificial Sequence: Synthetic oligonucleotide
  Sense strand starting at position 2773 of SEQ ID NO: 1562261
ugauauguaccugauacuu

SEQ ID NO: 1734306 - RNA, 19 nt, Artificial Sequence
  Description of Artificial Sequence: Synthetic oligonucleotide
  Antisense strand to SEQ ID NO: 1734305
aaguaucagguacauauca

SEQ ID NO: 1734307 - RNA, 19 nt, Artificial Sequence
  Description of Artificial Sequence: Synthetic oligonucleotide
  Sense strand starting at position 2855 of SEQ ID NO: 1562261
ugagccaucucuuugaaau

SEQ ID NO: 1734308 - RNA, 19 nt, Artificial Sequence
  Description of Artificial Sequence: Synthetic oligonucleotide
  Antisense strand to SEQ ID NO: 1734307
auuucaaagagauggcuca

SEQ ID NO: 1734309 - RNA, 19 nt, Artificial Sequence
  Description of Artificial Sequence: Synthetic oligonucleotide
  Sense strand starting at position 2885 of SEQ ID NO: 1562261
agaagauagugcccuuauc

SEQ ID NO: 1734310 - RNA, 19 nt, Artificial Sequence
  Description of Artificial Sequence: Synthetic oligonucleotide
  Antisense strand to SEQ ID NO: 1734309
gauaagggcacuaucuucu

SEQ ID NO: 1734311 - RNA, 19 nt, Artificial Sequence
  Description of Artificial Sequence: Synthetic oligonucleotide
  Sense strand starting at position 3120 of SEQ ID NO: 1562261
ugaggacauguuuguaaua

SEQ ID NO: 1734312 - RNA, 19 nt, Artificial Sequence
  Description of Artificial Sequence: Synthetic oligonucleotide
  Antisense strand to SEQ ID NO: 1734311
uauuacaaacauguccuca

SEQ ID NO: 1734313 - RNA, 19 nt, Artificial Sequence
  Description of Artificial Sequence: Synthetic oligonucleotide
  Sense strand starting at position 3121 of SEQ ID NO: 1562261
gaggacauguuuguaauag

SEQ ID NO: 1734314 - RNA, 19 nt, Artificial Sequence
  Description of Artificial Sequence: Synthetic oligonucleotide
  Antisense strand to SEQ ID NO: 1734313
cuauuacaaacauguccuc

SEQ ID NO: 1734315 - RNA, 19 nt, Artificial Sequence
  Description of Artificial Sequence: Synthetic oligonucleotide
  Sense strand starting at position 3183 of SEQ ID NO: 1562261
cuggcaucugauuagcaga

SEQ ID NO: 1734316 - RNA, 19 nt, Artificial Sequence
  Description of Artificial Sequence: Synthetic oligonucleotide
  Antisense strand to SEQ ID NO: 1734315
ucugcuaaucagaugccag

SEQ ID NO: 1734317 - RNA, 19 nt, Artificial Sequence
  Description of Artificial Sequence: Synthetic oligonucleotide
  Sense strand starting at position 3193 of SEQ ID NO: 1562261
auuagcagauugucuacaa

SEQ ID NO: 1734318 - RNA, 19 nt, Artificial Sequence
  Description of Artificial Sequence: Synthetic oligonucleotide
  Antisense strand to SEQ ID NO: 1734317
uuguagacaaucugcuaau

SEQ ID NO: 1734319 - RNA, 19 nt, Artificial Sequence
  Description of Artificial Sequence: Synthetic oligonucleotide
  Sense strand starting at position 3194 of SEQ ID NO: 1562261
uuagcagauugucuacaau

SEQ ID NO: 1734320 - RNA, 19 nt, Artificial Sequence
  Description of Artificial Sequence: Synthetic oligonucleotide
  Antisense strand to SEQ ID NO: 1734319
auuguagacaaucugcuaa

SEQ ID NO: 1734321 - RNA, 19 nt, Artificial Sequence
  Description of Artificial Sequence: Synthetic oligonucleotide
  Sense strand starting at position 3197 of SEQ ID NO: 1562261
gcagauugucuacaaugug

SEQ ID NO: 1734322 - RNA, 19 nt, Artificial Sequence
  Description of Artificial Sequence: Synthetic oligonucleotide
  Antisense strand to SEQ ID NO: 1734321
cacauuguagacaaucugc

SEQ ID NO: 1734323 - RNA, 19 nt, Artificial Sequence
  Description of Artificial Sequence: Synthetic oligonucleotide
  Sense strand starting at position 3514 of SEQ ID NO: 1562261
ggaggcugccguguuagua

SEQ ID NO: 1734324 - RNA, 19 nt, Artificial Sequence
  Description of Artificial Sequence: Synthetic oligonucleotide
  Antisense strand to SEQ ID NO: 1734323
uacuaacacggcagccucc

SEQ ID NO: 1734325 - RNA, 19 nt, Artificial Sequence
  Description of Artificial Sequence: Synthetic oligonucleotide
  Sense strand starting at position 3526 of SEQ ID NO: 1562261
guuaguacugggcagaauc

SEQ ID NO: 1734326 - RNA, 19 nt, Artificial Sequence
  Description of Artificial Sequence: Synthetic oligonucleotide
  Antisense strand to SEQ ID NO: 1734325
gauucugcccaguacuaac

SEQ ID NO: 1734327 - RNA, 19 nt, Artificial Sequence
  Description of Artificial Sequence: Synthetic oligonucleotide
  Sense strand starting at position 3605 of SEQ ID NO: 1562261
cacugagacgaguauugca

SEQ ID NO: 1734328 - RNA, 19 nt, Artificial Sequence
  Description of Artificial Sequence: Synthetic oligonucleotide
  Antisense strand to SEQ ID NO: 1734327
ugcaauacucgucucagug

SEQ ID NO: 1734329 - RNA, 19 nt, Artificial Sequence
  Description of Artificial Sequence: Synthetic oligonucleotide
  Sense strand starting at position 3613 of SEQ ID NO: 1562261
cgaguauugcaagggaaga

SEQ ID NO: 1734330 - RNA, 19 nt, Artificial Sequence
  Description of Artificial Sequence: Synthetic oligonucleotide
  Antisense strand to SEQ ID NO: 1734329
ucuucccuugcaauacucg

SEQ ID NO: 1734331 - RNA, 19 nt, Artificial Sequence
  Description of Artificial Sequence: Synthetic oligonucleotide
  Sense strand starting at position 3780 of SEQ ID NO: 1562261
ggaaggaggugauugguua

SEQ ID NO: 1734332 - RNA, 19 nt, Artificial Sequence
  Description of Artificial Sequence: Synthetic oligonucleotide
  Antisense strand to SEQ ID NO: 1734331
uaaccaaucaccuccuucc

SEQ ID NO: 1734333 - RNA, 19 nt, Artificial Sequence
  Description of Artificial Sequence: Synthetic oligonucleotide
  Sense strand starting at position 3784 of SEQ ID NO: 1562261
ggaggugauugguuaggca

SEQ ID NO: 1734334 - RNA, 19 nt, Artificial Sequence
  Description of Artificial Sequence: Synthetic oligonucleotide
  Antisense strand to SEQ ID NO: 1734333
ugccuaaccaaucaccucc

SEQ ID NO: 1734335 - RNA, 19 nt, Artificial Sequence
  Description of Artificial Sequence: Synthetic oligonucleotide
  Sense strand starting at position 3792 of SEQ ID NO: 1562261
uugguuaggcaauaugacu

SEQ ID NO: 1734336 - RNA, 19 nt, Artificial Sequence
  Description of Artificial Sequence: Synthetic oligonucleotide
  Antisense strand to SEQ ID NO: 1734335
agucauauugccuaaccaa

SEQ ID NO: 1734337 - RNA, 19 nt, Artificial Sequence
  Description of Artificial Sequence: Synthetic oligonucleotide
  Sense strand starting at position 63 of SEQ ID NO: 1562262
gcagaaaggauccgucauc

SEQ ID NO: 1734338 - RNA, 19 nt, Artificial Sequence
  Description of Artificial Sequence: Synthetic oligonucleotide
  Antisense strand to SEQ ID NO: 1734337
gaugacggauccuuucugc

SEQ ID NO: 1734339 - RNA, 19 nt, Artificial Sequence
  Description of Artificial Sequence: Synthetic oligonucleotide
  Sense strand starting at position 74 of SEQ ID NO: 1562262
ccgucaucucugcagagca

SEQ ID NO: 1734340 - RNA, 19 nt, Artificial Sequence
  Description of Artificial Sequence: Synthetic oligonucleotide
  Antisense strand to SEQ ID NO: 1734339
ugcucugcagagaugacgg

SEQ ID NO: 1734341 - RNA, 19 nt, Artificial Sequence
  Description of Artificial Sequence: Synthetic oligonucleotide
  Sense strand starting at position 170 of SEQ ID NO: 1562262
guccucucuggucagggaa

SEQ ID NO: 1734342 - RNA, 19 nt, Artificial Sequence
  Description of Artificial Sequence: Synthetic oligonucleotide
  Antisense strand to SEQ ID NO: 1734341
uucccugaccagagaggac

SEQ ID NO: 1734343 - RNA, 19 nt, Artificial Sequence
  Description of Artificial Sequence: Synthetic oligonucleotide
  Sense strand starting at position 172 of SEQ ID NO: 1562262
ccucucuggucagggaaga

SEQ ID NO: 1734344 - RNA, 19 nt, Artificial Sequence
  Description of Artificial Sequence: Synthetic oligonucleotide
  Antisense strand to SEQ ID NO: 1734343
ucuucccugaccagagagg

SEQ ID NO: 1734345 - RNA, 19 nt, Artificial Sequence
  Description of Artificial Sequence: Synthetic oligonucleotide
  Sense strand starting at position 281 of SEQ ID NO: 1562262
ccagauaacccaggaguca

SEQ ID NO: 1734346 - RNA, 19 nt, Artificial Sequence
  Description of Artificial Sequence: Synthetic oligonucleotide
  Antisense strand to SEQ ID NO: 1734345
ugacuccuggguuaucugg

SEQ ID NO: 1734347 - RNA, 19 nt, Artificial Sequence
  Description of Artificial Sequence: Synthetic oligonucleotide
  Sense strand starting at position 294 of SEQ ID NO: 1562262
gagucaucaucaguuugau

SEQ ID NO: 1734348 - RNA, 19 nt, Artificial Sequence
  Description of Artificial Sequence: Synthetic oligonucleotide
  Antisense strand to SEQ ID NO: 1734347
aucaaacugaugaugacuc

SEQ ID NO: 1734349 - RNA, 19 nt, Artificial Sequence
  Description of Artificial Sequence: Synthetic oligonucleotide
  Sense strand starting at position 298 of SEQ ID NO: 1562262
caucaucaguuugauagga

SEQ ID NO: 1734350 - RNA, 19 nt, Artificial Sequence
  Description of Artificial Sequence: Synthetic oligonucleotide
  Antisense strand to SEQ ID NO: 1734349
uccuaucaaacugaugaug

SEQ ID NO: 1734351 - RNA, 19 nt, Artificial Sequence
  Description of Artificial Sequence: Synthetic oligonucleotide
  Sense strand starting at position 300 of SEQ ID NO: 1562262
ucaucaguuugauaggauc

SEQ ID NO: 1734352 - RNA, 19 nt, Artificial Sequence
  Description of Artificial Sequence: Synthetic oligonucleotide
  Antisense strand to SEQ ID NO: 1734351
gauccuaucaaacugauga

SEQ ID NO: 1734353 - RNA, 19 nt, Artificial Sequence
  Description of Artificial Sequence: Synthetic oligonucleotide
  Sense strand starting at position 498 of SEQ ID NO: 1562262
gaaggaggcuggcaacauu

SEQ ID NO: 1734354 - RNA, 19 nt, Artificial Sequence
  Description of Artificial Sequence: Synthetic oligonucleotide
  Antisense strand to SEQ ID NO: 1734353
aauguugccagccuccuuc

SEQ ID NO: 1734355 - RNA, 19 nt, Artificial Sequence
  Description of Artificial Sequence: Synthetic oligonucleotide
  Sense strand starting at position 525 of SEQ ID NO: 1562262
ggccaauuaugucucugau

SEQ ID NO: 1734356 - RNA, 19 nt, Artificial Sequence
  Description of Artificial Sequence: Synthetic oligonucleotide
  Antisense strand to SEQ ID NO: 1734355
aucagagacauaauuggcc

SEQ ID NO: 1734357 - RNA, 19 nt, Artificial Sequence
  Description of Artificial Sequence: Synthetic oligonucleotide
  Sense strand starting at position 527 of SEQ ID NO: 1562262
ccaauuaugucucugauga

SEQ ID NO: 1734358 - RNA, 19 nt, Artificial Sequence
  Description of Artificial Sequence: Synthetic oligonucleotide
  Antisense strand to SEQ ID NO: 1734357
ucaucagagacauaauugg

SEQ ID NO: 1734359 - RNA, 19 nt, Artificial Sequence
  Description of Artificial Sequence: Synthetic oligonucleotide
  Sense strand starting at position 529 of SEQ ID NO: 1562262
aauuaugucucugaugaug

SEQ ID NO: 1734360 - RNA, 19 nt, Artificial Sequence
  Description of Artificial Sequence: Synthetic oligonucleotide
  Antisense strand to SEQ ID NO: 1734359
caucaucagagacauaauu

SEQ ID NO: 1734361 - RNA, 19 nt, Artificial Sequence
  Description of Artificial Sequence: Synthetic oligonucleotide
  Sense strand starting at position 652 of SEQ ID NO: 1562262
gcagguacccuuggaaucu

SEQ ID NO: 1734362 - RNA, 19 nt, Artificial Sequence
  Description of Artificial Sequence: Synthetic oligonucleotide
  Antisense strand to SEQ ID NO: 1734361
agauuccaaggguaccugc

SEQ ID NO: 1734363 - RNA, 19 nt, Artificial Sequence
  Description of Artificial Sequence: Synthetic oligonucleotide
  Sense strand starting at position 662 of SEQ ID NO: 1562262
uuggaaucuucucuccaga

SEQ ID NO: 1734364 - RNA, 19 nt, Artificial Sequence
  Description of Artificial Sequence: Synthetic oligonucleotide
  Antisense strand to SEQ ID NO: 1734363
ucuggagagaagauuccaa

SEQ ID NO: 1734365 - RNA, 19 nt, Artificial Sequence
  Description of Artificial Sequence: Synthetic oligonucleotide
  Sense strand starting at position 664 of SEQ ID NO: 1562262
ggaaucuucucuccagaca

SEQ ID NO: 1734366 - RNA, 19 nt, Artificial Sequence
  Description of Artificial Sequence: Synthetic oligonucleotide
  Antisense strand to SEQ ID NO: 1734365
ugucuggagagaagauucc

SEQ ID NO: 1734367 - RNA, 19 nt, Artificial Sequence
  Description of Artificial Sequence: Synthetic oligonucleotide
  Sense strand starting at position 762 of SEQ ID NO: 1562262
gcugaacuauccuaccuga

SEQ ID NO: 1734368 - RNA, 19 nt, Artificial Sequence
  Description of Artificial Sequence: Synthetic oligonucleotide
  Antisense strand to SEQ ID NO: 1734367
ucagguaggauaguucagc

SEQ ID NO: 1734369 - RNA, 19 nt, Artificial Sequence
  Description of Artificial Sequence: Synthetic oligonucleotide
  Sense strand starting at position 775 of SEQ ID NO: 1562262
accugaugcucuucgcaga

SEQ ID NO: 1734370 - RNA, 19 nt, Artificial Sequence
  Description of Artificial Sequence: Synthetic oligonucleotide
  Antisense strand to SEQ ID NO: 1734369
ucugcgaagagcaucaggu

SEQ ID NO: 1734371 - RNA, 19 nt, Artificial Sequence
  Description of Artificial Sequence: Synthetic oligonucleotide
  Sense strand starting at position 778 of SEQ ID NO: 1562262
ugaugcucuucgcagacuu

SEQ ID NO: 1734372 - RNA, 19 nt, Artificial Sequence
  Description of Artificial Sequence: Synthetic oligonucleotide
  Antisense strand to SEQ ID NO: 1734371
aagucugcgaagagcauca

SEQ ID NO: 1734373 - RNA, 19 nt, Artificial Sequence
  Description of Artificial Sequence: Synthetic oligonucleotide
  Sense strand starting at position 790 of SEQ ID NO: 1562262
cagacuugucuccaggcuu

SEQ ID NO: 1734374 - RNA, 19 nt, Artificial Sequence
  Description of Artificial Sequence: Synthetic oligonucleotide
  Antisense strand to SEQ ID NO: 1734373
aagccuggagacaagucug

SEQ ID NO: 1734375 - RNA, 19 nt, Artificial Sequence
  Description of Artificial Sequence: Synthetic oligonucleotide
  Sense strand starting at position 1115 of SEQ ID NO: 1562262
cuaauuaacuuggauccga

SEQ ID NO: 1734376 - RNA, 19 nt, Artificial Sequence
  Description of Artificial Sequence: Synthetic oligonucleotide
  Antisense strand to SEQ ID NO: 1734375
ucggauccaaguuaauuag

SEQ ID NO: 1734377 - RNA, 19 nt, Artificial Sequence
  Description of Artificial Sequence: Synthetic oligonucleotide
  Sense strand starting at position 1234 of SEQ ID NO: 1562262
gacaaaguucucuggaagu

SEQ ID NO: 1734378 - RNA, 19 nt, Artificial Sequence
  Description of Artificial Sequence: Synthetic oligonucleotide
  Antisense strand to SEQ ID NO: 1734377
acuuccagagaacuuuguc

SEQ ID NO: 1734379 - RNA, 19 nt, Artificial Sequence
  Description of Artificial Sequence: Synthetic oligonucleotide
  Sense strand starting at position 1292 of SEQ ID NO: 1562262
gagucaucccagcaccuga

SEQ ID NO: 1734380 - RNA, 19 nt, Artificial Sequence
  Description of Artificial Sequence: Synthetic oligonucleotide
  Antisense strand to SEQ ID NO: 1734379
ucaggugcugggaugacuc

SEQ ID NO: 1734381 - RNA, 19 nt, Artificial Sequence
  Description of Artificial Sequence: Synthetic oligonucleotide
  Sense strand starting at position 2103 of SEQ ID NO: 1562262
gggcgaacucucgcguuau

SEQ ID NO: 1734382 - RNA, 19 nt, Artificial Sequence
  Description of Artificial Sequence: Synthetic oligonucleotide
  Antisense strand to SEQ ID NO: 1734381
auaacgcgagaguucgccc

SEQ ID NO: 1734383 - RNA, 19 nt, Artificial Sequence
  Description of Artificial Sequence: Synthetic oligonucleotide
  Sense strand starting at position 2104 of SEQ ID NO: 1562262
ggcgaacucucgcguuauu

SEQ ID NO: 1734384 - RNA, 19 nt, Artificial Sequence
  Description of Artificial Sequence: Synthetic oligonucleotide
  Antisense strand to SEQ ID NO: 1734383
aauaacgcgagaguucgcc

SEQ ID NO: 1734385 - RNA, 19 nt, Artificial Sequence
  Description of Artificial Sequence: Synthetic oligonucleotide
  Sense strand starting at position 2105 of SEQ ID NO: 1562262
gcgaacucucgcguuauuc

SEQ ID NO: 1734386 - RNA, 19 nt, Artificial Sequence
  Description of Artificial Sequence: Synthetic oligonucleotide
  Antisense strand to SEQ ID NO: 1734385
gaauaacgcgagaguucgc

SEQ ID NO: 1734387 - RNA, 19 nt, Artificial Sequence
  Description of Artificial Sequence: Synthetic oligonucleotide
  Sense strand starting at position 2669 of SEQ ID NO: 1562262
ggcugaguggucuggaggu

SEQ ID NO: 1734388 - RNA, 19 nt, Artificial Sequence
  Description of Artificial Sequence: Synthetic oligonucleotide
  Antisense strand to SEQ ID NO: 1734387
accuccagaccacucagcc

SEQ ID NO: 1734389 - RNA, 19 nt, Artificial Sequence
  Description of Artificial Sequence: Synthetic oligonucleotide
  Sense strand starting at position 2734 of SEQ ID NO: 1562262
aagguuggcucuccuaaag

SEQ ID NO: 1734390 - RNA, 19 nt, Artificial Sequence
  Description of Artificial Sequence: Synthetic oligonucleotide
  Antisense strand to SEQ ID NO: 1734389
cuuuaggagagccaaccuu

SEQ ID NO: 1734391 - RNA, 19 nt, Artificial Sequence
  Description of Artificial Sequence: Synthetic oligonucleotide
  Sense strand starting at position 3421 of SEQ ID NO: 1562262
cgaggucuuucuguguuga

SEQ ID NO: 1734392 - RNA, 19 nt, Artificial Sequence
  Description of Artificial Sequence: Synthetic oligonucleotide
  Antisense strand to SEQ ID NO: 1734391
ucaacacagaaagaccucg

SEQ ID NO: 1734393 - RNA, 19 nt, Artificial Sequence
  Description of Artificial Sequence: Synthetic oligonucleotide
  Sense strand starting at position 3422 of SEQ ID NO: 1562262
gaggucuuucuguguugac

SEQ ID NO: 1734394 - RNA, 19 nt, Artificial Sequence
  Description of Artificial Sequence: Synthetic oligonucleotide
  Antisense strand to SEQ ID NO: 1734393
gucaacacagaaagaccuc

SEQ ID NO: 1734395 - RNA, 19 nt, Artificial Sequence
  Description of Artificial Sequence: Synthetic oligonucleotide
  Sense strand starting at position 3423 of SEQ ID NO: 1562262
aggucuuucuguguugacu

SEQ ID NO: 1734396 - RNA, 19 nt, Artificial Sequence
  Description of Artificial Sequence: Synthetic oligonucleotide
  Antisense strand to SEQ ID NO: 1734395
agucaacacagaaagaccu

SEQ ID NO: 1734397 - RNA, 19 nt, Artificial Sequence
  Description of Artificial Sequence: Synthetic oligonucleotide
  Sense strand starting at position 3425 of SEQ ID NO: 1562262
gucuuucuguguugacuag

SEQ ID NO: 1734398 - RNA, 19 nt, Artificial Sequence
  Description of Artificial Sequence: Synthetic oligonucleotide
  Antisense strand to SEQ ID NO: 1734397
cuagucaacacagaaagac

SEQ ID NO: 1734399 - RNA, 19 nt, Artificial Sequence
  Description of Artificial Sequence: Synthetic oligonucleotide
  Sense strand starting at position 2221 of SEQ ID NO: 1562263
agcgaaguaacuugucaug

SEQ ID NO: 1734400 - RNA, 19 nt, Artificial Sequence
  Description of Artificial Sequence: Synthetic oligonucleotide
  Antisense strand to SEQ ID NO: 1734399
caugacaaguuacuucgcu

SEQ ID NO: 1734401 - RNA, 19 nt, Artificial Sequence
  Description of Artificial Sequence: Synthetic oligonucleotide
  Sense strand starting at position 2223 of SEQ ID NO: 1562263
cgaaguaacuugucaugca

SEQ ID NO: 1734402 - RNA, 19 nt, Artificial Sequence
  Description of Artificial Sequence: Synthetic oligonucleotide
  Antisense strand to SEQ ID NO: 1734401
ugcaugacaaguuacuucg

SEQ ID NO: 1734403 - RNA, 19 nt, Artificial Sequence
  Description of Artificial Sequence: Synthetic oligonucleotide
  Sense strand starting at position 2224 of SEQ ID NO: 1562263
gaaguaacuugucaugcaa

SEQ ID NO: 1734404 - RNA, 19 nt, Artificial Sequence
  Description of Artificial Sequence: Synthetic oligonucleotide
  Antisense strand to SEQ ID NO: 1734403
uugcaugacaaguuacuuc

SEQ ID NO: 1734405 - RNA, 19 nt, Artificial Sequence
  Description of Artificial Sequence: Synthetic oligonucleotide
  Sense strand starting at position 2268 of SEQ ID NO: 1562263
ggacccagaucugucugaa

SEQ ID NO: 1734406 - RNA, 19 nt, Artificial Sequence
  Description of Artificial Sequence: Synthetic oligonucleotide
  Antisense strand to SEQ ID NO: 1734405
uucagacagaucugggucc

SEQ ID NO: 1734407 - RNA, 19 nt, Artificial Sequence
  Description of Artificial Sequence: Synthetic oligonucleotide
  Sense strand starting at position 2272 of SEQ ID NO: 1562263
ccagaucugucugaauccu

SEQ ID NO: 1734408 - RNA, 19 nt, Artificial Sequence
  Description of Artificial Sequence: Synthetic oligonucleotide
  Antisense strand to SEQ ID NO: 1734407
aggauucagacagaucugg

SEQ ID NO: 1734409 - RNA, 19 nt, Artificial Sequence
  Description of Artificial Sequence: Synthetic oligonucleotide
  Sense strand starting at position 2381 of SEQ ID NO: 1562263
cucagaaagugugcugacu

SEQ ID NO: 1734410 - RNA, 19 nt, Artificial Sequence
  Description of Artificial Sequence: Synthetic oligonucleotide
  Antisense strand to SEQ ID NO: 1734409
agucagcacacuuucugag

SEQ ID NO: 1734411 - RNA, 19 nt, Artificial Sequence
  Description of Artificial Sequence: Synthetic oligonucleotide
  Sense strand starting at position 2383 of SEQ ID NO: 1562263
cagaaagugugcugacuuc

SEQ ID NO: 1734412 - RNA, 19 nt, Artificial Sequence
  Description of Artificial Sequence: Synthetic oligonucleotide
  Antisense strand to SEQ ID NO: 1734411
gaagucagcacacuuucug

SEQ ID NO: 1734413 - RNA, 19 nt, Artificial Sequence
  Description of Artificial Sequence: Synthetic oligonucleotide
  Sense strand starting at position 2421 of SEQ ID NO: 1562263
uguucaagguccucgaagu

SEQ ID NO: 1734414 - RNA, 19 nt, Artificial Sequence
  Description of Artificial Sequence: Synthetic oligonucleotide
  Antisense strand to SEQ ID NO: 1734413
acuucgaggaccuugaaca

SEQ ID NO: 1734415 - RNA, 19 nt, Artificial Sequence
  Description of Artificial Sequence: Synthetic oligonucleotide
  Sense strand starting at position 2422 of SEQ ID NO: 1562263
guucaagguccucgaaguu

SEQ ID NO: 1734416 - RNA, 19 nt, Artificial Sequence
  Description of Artificial Sequence: Synthetic oligonucleotide
  Antisense strand to SEQ ID NO: 1734415
aacuucgaggaccuugaac

SEQ ID NO: 1734417 - RNA, 19 nt, Artificial Sequence
  Description of Artificial Sequence: Synthetic oligonucleotide
  Sense strand starting at position 2441 of SEQ ID NO: 1562263
cacagugauuccgugcacu

SEQ ID NO: 1734418 - RNA, 19 nt, Artificial Sequence
  Description of Artificial Sequence: Synthetic oligonucleotide
  Antisense strand to SEQ ID NO: 1734417
agugcacggaaucacugug

SEQ ID NO: 1734419 - RNA, 19 nt, Artificial Sequence
  Description of Artificial Sequence: Synthetic oligonucleotide
  Sense strand starting at position 2481 of SEQ ID NO: 1562263
cugggacuguuuccagauc

SEQ ID NO: 1734420 - RNA, 19 nt, Artificial Sequence
  Description of Artificial Sequence: Synthetic oligonucleotide
  Antisense strand to SEQ ID NO: 1734419
gaucuggaaacagucccag

SEQ ID NO: 1734421 - RNA, 19 nt, Artificial Sequence
  Description of Artificial Sequence: Synthetic oligonucleotide
  Sense strand starting at position 2482 of SEQ ID NO: 1562263
ugggacuguuuccagaucu

SEQ ID NO: 1734422 - RNA, 19 nt, Artificial Sequence
  Description of Artificial Sequence: Synthetic oligonucleotide
  Antisense strand to SEQ ID NO: 1734421
agaucuggaaacaguccca

SEQ ID NO: 1734423 - RNA, 19 nt, Artificial Sequence
  Description of Artificial Sequence: Synthetic oligonucleotide
  Sense strand starting at position 2588 of SEQ ID NO: 1562263
caaggaaaggcuugccaga

SEQ ID NO: 1734424 - RNA, 19 nt, Artificial Sequence
  Description of Artificial Sequence: Synthetic oligonucleotide
  Antisense strand to SEQ ID NO: 1734423
ucuggcaagccuuuccuug

SEQ ID NO: 1734425 - RNA, 19 nt, Artificial Sequence
  Description of Artificial Sequence: Synthetic oligonucleotide
  Sense strand starting at position 2590 of SEQ ID NO: 1562263
aggaaaggcuugccagauu

SEQ ID NO: 1734426 - RNA, 19 nt, Artificial Sequence
  Description of Artificial Sequence: Synthetic oligonucleotide
  Antisense strand to SEQ ID NO: 1734425
aaucuggcaagccuuuccu

SEQ ID NO: 1734427 - RNA, 19 nt, Artificial Sequence
  Description of Artificial Sequence: Synthetic oligonucleotide
  Sense strand starting at position 2656 of SEQ ID NO: 1562263
auaguucuuuagugggagu

SEQ ID NO: 1734428 - RNA, 19 nt, Artificial Sequence
  Description of Artificial Sequence: Synthetic oligonucleotide
  Antisense strand to SEQ ID NO: 1734427
acucccacuaaagaacuau

SEQ ID NO: 1734429 - RNA, 19 nt, Artificial Sequence
  Description of Artificial Sequence: Synthetic oligonucleotide
  Sense strand starting at position 2657 of SEQ ID NO: 1562263
uaguucuuuagugggagua

SEQ ID NO: 1734430 - RNA, 19 nt, Artificial Sequence
  Description of Artificial Sequence: Synthetic oligonucleotide
  Antisense strand to SEQ ID NO: 1734429
uacucccacuaaagaacua

SEQ ID NO: 1734431 - RNA, 19 nt, Artificial Sequence
  Description of Artificial Sequence: Synthetic oligonucleotide
  Sense strand starting at position 2658 of SEQ ID NO: 1562263
aguucuuuagugggaguau

SEQ ID NO: 1734432 - RNA, 19 nt, Artificial Sequence
  Description of Artificial Sequence: Synthetic oligonucleotide
  Antisense strand to SEQ ID NO: 1734431
auacucccacuaaagaacu

SEQ ID NO: 1734433 - RNA, 19 nt, Artificial Sequence
  Description of Artificial Sequence: Synthetic oligonucleotide
  Sense strand starting at position 2659 of SEQ ID NO: 1562263
guucuuuagugggaguaug

SEQ ID NO: 1734434 - RNA, 19 nt, Artificial Sequence
  Description of Artificial Sequence: Synthetic oligonucleotide
  Antisense strand to SEQ ID NO: 1734433
cauacucccacuaaagaac

SEQ ID NO: 1734435 - RNA, 19 nt, Artificial Sequence
  Description of Artificial Sequence: Synthetic oligonucleotide
  Sense strand starting at position 2733 of SEQ ID NO: 1562263
gugccaugcuuauacggaa

SEQ ID NO: 1734436 - RNA, 19 nt, Artificial Sequence
  Description of Artificial Sequence: Synthetic oligonucleotide
  Antisense strand to SEQ ID NO: 1734435
uuccguauaagcauggcac

SEQ ID NO: 1734437 - RNA, 19 nt, Artificial Sequence
  Description of Artificial Sequence: Synthetic oligonucleotide
  Sense strand starting at position 2736 of SEQ ID NO: 1562263
ccaugcuuauacggaaaca

SEQ ID NO: 1734438 - RNA, 19 nt, Artificial Sequence
  Description of Artificial Sequence: Synthetic oligonucleotide
  Antisense strand to SEQ ID NO: 1734437
uguuuccguauaagcaugg

SEQ ID NO: 1734439 - RNA, 19 nt, Artificial Sequence
  Description of Artificial Sequence: Synthetic oligonucleotide
  Sense strand starting at position 2757 of SEQ ID NO: 1562263
gagcgcugcuuaucugaaa

SEQ ID NO: 1734440 - RNA, 19 nt, Artificial Sequence
  Description of Artificial Sequence: Synthetic oligonucleotide
  Antisense strand to SEQ ID NO: 1734439
uuucagauaagcagcgcuc

SEQ ID NO: 1734441 - RNA, 19 nt, Artificial Sequence
  Description of Artificial Sequence: Synthetic oligonucleotide
  Sense strand starting at position 2758 of SEQ ID NO: 1562263
agcgcugcuuaucugaaau

SEQ ID NO: 1734442 - RNA, 19 nt, Artificial Sequence
  Description of Artificial Sequence: Synthetic oligonucleotide
  Antisense strand to SEQ ID NO: 1734441
auuucagauaagcagcgcu

SEQ ID NO: 1734443 - RNA, 19 nt, Artificial Sequence
  Description of Artificial Sequence: Synthetic oligonucleotide
  Sense strand starting at position 2760 of SEQ ID NO: 1562263
cgcugcuuaucugaaauuc

SEQ ID NO: 1734444 - RNA, 19 nt, Artificial Sequence
  Description of Artificial Sequence: Synthetic oligonucleotide
  Antisense strand to SEQ ID NO: 1734443
gaauuucagauaagcagcg

SEQ ID NO: 1734445 - RNA, 19 nt, Artificial Sequence
  Description of Artificial Sequence: Synthetic oligonucleotide
  Sense strand starting at position 2770 of SEQ ID NO: 1562263
cugaaauuccaauguggcu

SEQ ID NO: 1734446 - RNA, 19 nt, Artificial Sequence
  Description of Artificial Sequence: Synthetic oligonucleotide
  Antisense strand to SEQ ID NO: 1734445
agccacauuggaauuucag

SEQ ID NO: 1734447 - RNA, 19 nt, Artificial Sequence
  Description of Artificial Sequence: Synthetic oligonucleotide
  Sense strand starting at position 2797 of SEQ ID NO: 1562263
uguauuugaucuggugaca

SEQ ID NO: 1734448 - RNA, 19 nt, Artificial Sequence
  Description of Artificial Sequence: Synthetic oligonucleotide
  Antisense strand to SEQ ID NO: 1734447
ugucaccagaucaaauaca

SEQ ID NO: 1734449 - RNA, 19 nt, Artificial Sequence
  Description of Artificial Sequence: Synthetic oligonucleotide
  Sense strand starting at position 2853 of SEQ ID NO: 1562263
agacuuaggucucugcuca

SEQ ID NO: 1734450 - RNA, 19 nt, Artificial Sequence
  Description of Artificial Sequence: Synthetic oligonucleotide
  Antisense strand to SEQ ID NO: 1734449
ugagcagagaccuaagucu

SEQ ID NO: 1734451 - RNA, 19 nt, Artificial Sequence
  Description of Artificial Sequence: Synthetic oligonucleotide
  Sense strand starting at position 2854 of SEQ ID NO: 1562263
gacuuaggucucugcucaa

SEQ ID NO: 1734452 - RNA, 19 nt, Artificial Sequence
  Description of Artificial Sequence: Synthetic oligonucleotide
  Antisense strand to SEQ ID NO: 1734451
uugagcagagaccuaaguc

SEQ ID NO: 1734453 - RNA, 19 nt, Artificial Sequence
  Description of Artificial Sequence: Synthetic oligonucleotide
  Sense strand starting at position 2896 of SEQ ID NO: 1562263
cagacugaguuaggacaaa

SEQ ID NO: 1734454 - RNA, 19 nt, Artificial Sequence
  Description of Artificial Sequence: Synthetic oligonucleotide
  Antisense strand to SEQ ID NO: 1734453
uuuguccuaacucagucug

SEQ ID NO: 1734455 - RNA, 19 nt, Artificial Sequence
  Description of Artificial Sequence: Synthetic oligonucleotide
  Sense strand starting at position 2934 of SEQ ID NO: 1562263
ggaggaguagcuuggcaaa

SEQ ID NO: 1734456 - RNA, 19 nt, Artificial Sequence
  Description of Artificial Sequence: Synthetic oligonucleotide
  Antisense strand to SEQ ID NO: 1734455
uuugccaagcuacuccucc

SEQ ID NO: 1734457 - RNA, 19 nt, Artificial Sequence
  Description of Artificial Sequence: Synthetic oligonucleotide
  Sense strand starting at position 2936 of SEQ ID NO: 1562263
aggaguagcuuggcaaauc

SEQ ID NO: 1734458 - RNA, 19 nt, Artificial Sequence
  Description of Artificial Sequence: Synthetic oligonucleotide
  Antisense strand to SEQ ID NO: 1734457
gauuugccaagcuacuccu

SEQ ID NO: 1734459 - RNA, 19 nt, Artificial Sequence
  Description of Artificial Sequence: Synthetic oligonucleotide
  Sense strand starting at position 2967 of SEQ ID NO: 1562263
gcaagagagguccagcuau

SEQ ID NO: 1734460 - RNA, 19 nt, Artificial Sequence
  Description of Artificial Sequence: Synthetic oligonucleotide
  Antisense strand to SEQ ID NO: 1734459
auagcuggaccucucuugc

SEQ ID NO: 1734461 - RNA, 19 nt, Artificial Sequence
  Description of Artificial Sequence: Synthetic oligonucleotide
  Sense strand starting at position 3188 of SEQ ID NO: 1562263
ggguguggcggaaguagua

SEQ ID NO: 1734462 - RNA, 19 nt, Artificial Sequence
  Description of Artificial Sequence: Synthetic oligonucleotide
  Antisense strand to SEQ ID NO: 1734461
uacuacuuccgccacaccc

SEQ ID NO: 1734463 - RNA, 19 nt, Artificial Sequence
  Description of Artificial Sequence: Synthetic oligonucleotide
  Sense strand starting at position 3405 of SEQ ID NO: 1562263
uugcuagaauccuggaggu

SEQ ID NO: 1734464 - RNA, 19 nt, Artificial Sequence
  Description of Artificial Sequence: Synthetic oligonucleotide
  Antisense strand to SEQ ID NO: 1734463
accuccaggauucuagcaa

SEQ ID NO: 1734465 - RNA, 19 nt, Artificial Sequence
  Description of Artificial Sequence: Synthetic oligonucleotide
  Sense strand starting at position 3579 of SEQ ID NO: 1562263
aagagagcugauuguuaaa

SEQ ID NO: 1734466 - RNA, 19 nt, Artificial Sequence
  Description of Artificial Sequence: Synthetic oligonucleotide
  Antisense strand to SEQ ID NO: 1734465
uuuaacaaucagcucucuu

SEQ ID NO: 1734467 - RNA, 19 nt, Artificial Sequence
  Description of Artificial Sequence: Synthetic oligonucleotide
  Sense strand starting at position 3610 of SEQ ID NO: 1562263
gcgcaagccagcugugaaa

SEQ ID NO: 1734468 - RNA, 19 nt, Artificial Sequence
  Description of Artificial Sequence: Synthetic oligonucleotide
  Antisense strand to SEQ ID NO: 1734467
uuucacagcuggcuugcgc

SEQ ID NO: 1734469 - RNA, 19 nt, Artificial Sequence
  Description of Artificial Sequence: Synthetic oligonucleotide
  Sense strand starting at position 3715 of SEQ ID NO: 1562263
ugauuacagucucaaaugu

SEQ ID NO: 1734470 - RNA, 19 nt, Artificial Sequence
  Description of Artificial Sequence: Synthetic oligonucleotide
  Antisense strand to SEQ ID NO: 1734469
acauuugagacuguaauca

SEQ ID NO: 1734471 - RNA, 19 nt, Artificial Sequence
  Description of Artificial Sequence: Synthetic oligonucleotide
  Sense strand starting at position 141 of SEQ ID NO: 1562264
ugcaguacccuacaguuua

SEQ ID NO: 1734472 - RNA, 19 nt, Artificial Sequence
  Description of Artificial Sequence: Synthetic oligonucleotide
  Antisense strand to SEQ ID NO: 1734471
uaaacuguaggguacugca

SEQ ID NO: 1734473 - RNA, 19 nt, Artificial Sequence
  Description of Artificial Sequence: Synthetic oligonucleotide
  Sense strand starting at position 162 of SEQ ID NO: 1562264
aauaauuagugagcaguua

SEQ ID NO: 1734474 - RNA, 19 nt, Artificial Sequence
  Description of Artificial Sequence: Synthetic oligonucleotide
  Antisense strand to SEQ ID NO: 1734473
uaacugcucacuaauuauu

SEQ ID NO: 1734475 - RNA, 19 nt, Artificial Sequence
  Description of Artificial Sequence: Synthetic oligonucleotide
  Sense strand starting at position 163 of SEQ ID NO: 1562264
auaauuagugagcaguuau

SEQ ID NO: 1734476 - RNA, 19 nt, Artificial Sequence
  Description of Artificial Sequence: Synthetic oligonucleotide
  Antisense strand to SEQ ID NO: 1734475
auaacugcucacuaauuau

SEQ ID NO: 1734477 - RNA, 19 nt, Artificial Sequence
  Description of Artificial Sequence: Synthetic oligonucleotide
  Sense strand starting at position 186 of SEQ ID NO: 1562264
uuagccuacucuuuggaau

SEQ ID NO: 1734478 - RNA, 19 nt, Artificial Sequence
  Description of Artificial Sequence: Synthetic oligonucleotide
  Antisense strand to SEQ ID NO: 1734477
auuccaaagaguaggcuaa

SEQ ID NO: 1734479 - RNA, 19 nt, Artificial Sequence
  Description of Artificial Sequence: Synthetic oligonucleotide
  Sense strand starting at position 214 of SEQ ID NO: 1562264
ugauuaagcucucugcucu

SEQ ID NO: 1734480 - RNA, 19 nt, Artificial Sequence
  Description of Artificial Sequence: Synthetic oligonucleotide
  Antisense strand to SEQ ID NO: 1734479
agagcagagagcuuaauca

SEQ ID NO: 1734481 - RNA, 19 nt, Artificial Sequence
  Description of Artificial Sequence: Synthetic oligonucleotide
  Sense strand starting at position 220 of SEQ ID NO: 1562264
agcucucugcucuacugaa

SEQ ID NO: 1734482 - RNA, 19 nt, Artificial Sequence
  Description of Artificial Sequence: Synthetic oligonucleotide
  Antisense strand to SEQ ID NO: 1734481
uucaguagagcagagagcu

SEQ ID NO: 1734483 - RNA, 19 nt, Artificial Sequence
  Description of Artificial Sequence: Synthetic oligonucleotide
  Sense strand starting at position 269 of SEQ ID NO: 1562264
ccaggagguuuggcaacua

SEQ ID NO: 1734484 - RNA, 19 nt, Artificial Sequence
  Description of Artificial Sequence: Synthetic oligonucleotide
  Antisense strand to SEQ ID NO: 1734483
uaguugccaaaccuccugg

SEQ ID NO: 1734485 - RNA, 19 nt, Artificial Sequence
  Description of Artificial Sequence: Synthetic oligonucleotide
  Sense strand starting at position 343 of SEQ ID NO: 1562264
auucuucuaccuuggugau

SEQ ID NO: 1734486 - RNA, 19 nt, Artificial Sequence
  Description of Artificial Sequence: Synthetic oligonucleotide
  Antisense strand to SEQ ID NO: 1734485
aucaccaagguagaagaau

SEQ ID NO: 1734487 - RNA, 19 nt, Artificial Sequence
  Description of Artificial Sequence: Synthetic oligonucleotide
  Sense strand starting at position 344 of SEQ ID NO: 1562264
uucuucuaccuuggugauu

SEQ ID NO: 1734488 - RNA, 19 nt, Artificial Sequence
  Description of Artificial Sequence: Synthetic oligonucleotide
  Antisense strand to SEQ ID NO: 1734487
aaucaccaagguagaagaa

SEQ ID NO: 1734489 - RNA, 19 nt, Artificial Sequence
  Description of Artificial Sequence: Synthetic oligonucleotide
  Sense strand starting at position 464 of SEQ ID NO: 1562264
gacucagaguccucagcaa

SEQ ID NO: 1734490 - RNA, 19 nt, Artificial Sequence
  Description of Artificial Sequence: Synthetic oligonucleotide
  Antisense strand to SEQ ID NO: 1734489
uugcugaggacucugaguc

SEQ ID NO: 1734491 - RNA, 19 nt, Artificial Sequence
  Description of Artificial Sequence: Synthetic oligonucleotide
  Sense strand starting at position 608 of SEQ ID NO: 1562264
cugggaauaucucugguga

SEQ ID NO: 1734492 - RNA, 19 nt, Artificial Sequence
  Description of Artificial Sequence: Synthetic oligonucleotide
  Antisense strand to SEQ ID NO: 1734491
ucaccagagauauucccag

SEQ ID NO: 1734493 - RNA, 19 nt, Artificial Sequence
  Description of Artificial Sequence: Synthetic oligonucleotide
  Sense strand starting at position 609 of SEQ ID NO: 1562264
ugggaauaucucuggugag

SEQ ID NO: 1734494 - RNA, 19 nt, Artificial Sequence
  Description of Artificial Sequence: Synthetic oligonucleotide
  Antisense strand to SEQ ID NO: 1734493
cucaccagagauauuccca

SEQ ID NO: 1734495 - RNA, 19 nt, Artificial Sequence
  Description of Artificial Sequence: Synthetic oligonucleotide
  Sense strand starting at position 662 of SEQ ID NO: 1562264
ggcgcaggcucaguauuua

SEQ ID NO: 1734496 - RNA, 19 nt, Artificial Sequence
  Description of Artificial Sequence: Synthetic oligonucleotide
  Antisense strand to SEQ ID NO: 1734495
uaaauacugagccugcgcc

SEQ ID NO: 1734497 - RNA, 19 nt, Artificial Sequence
  Description of Artificial Sequence: Synthetic oligonucleotide
  Sense strand starting at position 674 of SEQ ID NO: 1562264
guauuuagaguuuguuugu

SEQ ID NO: 1734498 - RNA, 19 nt, Artificial Sequence
  Description of Artificial Sequence: Synthetic oligonucleotide
  Antisense strand to SEQ ID NO: 1734497
acaaacaaacucuaaauac

SEQ ID NO: 1734499 - RNA, 19 nt, Artificial Sequence
  Description of Artificial Sequence: Synthetic oligonucleotide
  Sense strand starting at position 1227 of SEQ ID NO: 1562264
cgaggugcucuguagaaga

SEQ ID NO: 1734500 - RNA, 19 nt, Artificial Sequence
  Description of Artificial Sequence: Synthetic oligonucleotide
  Antisense strand to SEQ ID NO: 1734499
ucuucuacagagcaccucg

SEQ ID NO: 1734501 - RNA, 19 nt, Artificial Sequence
  Description of Artificial Sequence: Synthetic oligonucleotide
  Sense strand starting at position 1267 of SEQ ID NO: 1562264
gaggugaggccggaggaau

SEQ ID NO: 1734502 - RNA, 19 nt, Artificial Sequence
  Description of Artificial Sequence: Synthetic oligonucleotide
  Antisense strand to SEQ ID NO: 1734501
auuccuccggccucaccuc

SEQ ID NO: 1734503 - RNA, 19 nt, Artificial Sequence
  Description of Artificial Sequence: Synthetic oligonucleotide
  Sense strand starting at position 2524 of SEQ ID NO: 1562264
guggaaacuccauguucuu

SEQ ID NO: 1734504 - RNA, 19 nt, Artificial Sequence
  Description of Artificial Sequence: Synthetic oligonucleotide
  Antisense strand to SEQ ID NO: 1734503
aagaacauggaguuuccac

SEQ ID NO: 1734505 - RNA, 19 nt, Artificial Sequence
  Description of Artificial Sequence: Synthetic oligonucleotide
  Sense strand starting at position 2533 of SEQ ID NO: 1562264
ccauguucuucguuggaga

SEQ ID NO: 1734506 - RNA, 19 nt, Artificial Sequence
  Description of Artificial Sequence: Synthetic oligonucleotide
  Antisense strand to SEQ ID NO: 1734505
ucuccaacgaagaacaugg

SEQ ID NO: 1734507 - RNA, 19 nt, Artificial Sequence
  Description of Artificial Sequence: Synthetic oligonucleotide
  Sense strand starting at position 2615 of SEQ ID NO: 1562264
guggcuucuccgucucuga

SEQ ID NO: 1734508 - RNA, 19 nt, Artificial Sequence
  Description of Artificial Sequence: Synthetic oligonucleotide
  Antisense strand to SEQ ID NO: 1734507
ucagagacggagaagccac

SEQ ID NO: 1734509 - RNA, 19 nt, Artificial Sequence
  Description of Artificial Sequence: Synthetic oligonucleotide
  Sense strand starting at position 2796 of SEQ ID NO: 1562264
ucugauacaucggccucaa

SEQ ID NO: 1734510 - RNA, 19 nt, Artificial Sequence
  Description of Artificial Sequence: Synthetic oligonucleotide
  Antisense strand to SEQ ID NO: 1734509
uugaggccgauguaucaga

SEQ ID NO: 1734511 - RNA, 19 nt, Artificial Sequence
  Description of Artificial Sequence: Synthetic oligonucleotide
  Sense strand starting at position 2832 of SEQ ID NO: 1562264
guuucugaccgugggaaga

SEQ ID NO: 1734512 - RNA, 19 nt, Artificial Sequence
  Description of Artificial Sequence: Synthetic oligonucleotide
  Antisense strand to SEQ ID NO: 1734511
ucuucccacggucagaaac

SEQ ID NO: 1734513 - RNA, 19 nt, Artificial Sequence
  Description of Artificial Sequence: Synthetic oligonucleotide
  Sense strand starting at position 2853 of SEQ ID NO: 1562264
gcgguuaacgcccuuuauu

SEQ ID NO: 1734514 - RNA, 19 nt, Artificial Sequence
  Description of Artificial Sequence: Synthetic oligonucleotide
  Antisense strand to SEQ ID NO: 1734513
aauaaagggcguuaaccgc

SEQ ID NO: 1734515 - RNA, 19 nt, Artificial Sequence
  Description of Artificial Sequence: Synthetic oligonucleotide
  Sense strand starting at position 2988 of SEQ ID NO: 1562264
gaguaagucuuugucuccu

SEQ ID NO: 1734516 - RNA, 19 nt, Artificial Sequence
  Description of Artificial Sequence: Synthetic oligonucleotide
  Antisense strand to SEQ ID NO: 1734515
aggagacaaagacuuacuc

SEQ ID NO: 1734517 - RNA, 19 nt, Artificial Sequence
  Description of Artificial Sequence: Synthetic oligonucleotide
  Sense strand starting at position 3002 of SEQ ID NO: 1562264
cuccuaugggucuacugua

SEQ ID NO: 1734518 - RNA, 19 nt, Artificial Sequence
  Description of Artificial Sequence: Synthetic oligonucleotide
  Antisense strand to SEQ ID NO: 1734517
uacaguagacccauaggag

SEQ ID NO: 1734519 - RNA, 19 nt, Artificial Sequence
  Description of Artificial Sequence: Synthetic oligonucleotide
  Sense strand starting at position 3089 of SEQ ID NO: 1562264
gagcauuuauuagguauuu

SEQ ID NO: 1734520 - RNA, 19 nt, Artificial Sequence
  Description of Artificial Sequence: Synthetic oligonucleotide
  Antisense strand to SEQ ID NO: 1734519
aaauaccuaauaaaugcuc

SEQ ID NO: 1734521 - RNA, 19 nt, Artificial Sequence
  Description of Artificial Sequence: Synthetic oligonucleotide
  Sense strand starting at position 3183 of SEQ ID NO: 1562264
gucaccugaggucaagauu

SEQ ID NO: 1734522 - RNA, 19 nt, Artificial Sequence
  Description of Artificial Sequence: Synthetic oligonucleotide
  Antisense strand to SEQ ID NO: 1734521
aaucuugaccucaggugac

SEQ ID NO: 1734523 - RNA, 19 nt, Artificial Sequence
  Description of Artificial Sequence: Synthetic oligonucleotide
  Sense strand starting at position 3465 of SEQ ID NO: 1562264
ggaacuagguuucugguga

SEQ ID NO: 1734524 - RNA, 19 nt, Artificial Sequence
  Description of Artificial Sequence: Synthetic oligonucleotide
  Antisense strand to SEQ ID NO: 1734523
ucaccagaaaccuaguucc

SEQ ID NO: 1734525 - RNA, 19 nt, Artificial Sequence
  Description of Artificial Sequence: Synthetic oligonucleotide
  Sense strand starting at position 3492 of SEQ ID NO: 1562264
guuuaagagaaaugccuga

SEQ ID NO: 1734526 - RNA, 19 nt, Artificial Sequence
  Description of Artificial Sequence: Synthetic oligonucleotide
  Antisense strand to SEQ ID NO: 1734525
ucaggcauuucucuuaaac

SEQ ID NO: 1734527 - RNA, 19 nt, Artificial Sequence
  Description of Artificial Sequence: Synthetic oligonucleotide
  Sense strand starting at position 3496 of SEQ ID NO: 1562264
aagagaaaugccugaagug

SEQ ID NO: 1734528 - RNA, 19 nt, Artificial Sequence
  Description of Artificial Sequence: Synthetic oligonucleotide
  Antisense strand to SEQ ID NO: 1734527
cacuucaggcauuucucuu

SEQ ID NO: 1734529 - RNA, 19 nt, Artificial Sequence
  Description of Artificial Sequence: Synthetic oligonucleotide
  Sense strand starting at position 3512 of SEQ ID NO: 1562264
gugaaagaaccuuguuagu

SEQ ID NO: 1734530 - RNA, 19 nt, Artificial Sequence
  Description of Artificial Sequence: Synthetic oligonucleotide
  Antisense strand to SEQ ID NO: 1734529
acuaacaagguucuuucac

SEQ ID NO: 1734531 - RNA, 19 nt, Artificial Sequence
  Description of Artificial Sequence: Synthetic oligonucleotide
  Sense strand starting at position 3514 of SEQ ID NO: 1562264
gaaagaaccuuguuaguga

SEQ ID NO: 1734532 - RNA, 19 nt, Artificial Sequence
  Description of Artificial Sequence: Synthetic oligonucleotide
  Antisense strand to SEQ ID NO: 1734531
ucacuaacaagguucuuuc

SEQ ID NO: 1734533 - RNA, 19 nt, Artificial Sequence
  Description of Artificial Sequence: Synthetic oligonucleotide
  Sense strand starting at position 3517 of SEQ ID NO: 1562264
agaaccuuguuagugaaga

SEQ ID NO: 1734534 - RNA, 19 nt, Artificial Sequence
  Description of Artificial Sequence: Synthetic oligonucleotide
  Antisense strand to SEQ ID NO: 1734533
ucuucacuaacaagguucu

SEQ ID NO: 1734535 - RNA, 19 nt, Artificial Sequence
  Description of Artificial Sequence: Synthetic oligonucleotide
  Sense strand starting at position 3530 of SEQ ID NO: 1562264
ugaagaggcguuuaacauu

SEQ ID NO: 1734536 - RNA, 19 nt, Artificial Sequence
  Description of Artificial Sequence: Synthetic oligonucleotide
  Antisense strand to SEQ ID NO: 1734535
aauguuaaacgccucuuca

SEQ ID NO: 1734537 - RNA, 19 nt, Artificial Sequence
  Description of Artificial Sequence: Synthetic oligonucleotide
  Sense strand starting at position 3642 of SEQ ID NO: 1562264
uggaaagccaaauguguuu

SEQ ID NO: 1734538 - RNA, 19 nt, Artificial Sequence
  Description of Artificial Sequence: Synthetic oligonucleotide
  Antisense strand to SEQ ID NO: 1734537
aaacacauuuggcuuucca

SEQ ID NO: 1734539 - RNA, 19 nt, Artificial Sequence
  Description of Artificial Sequence: Synthetic oligonucleotide
  Sense strand starting at position 3726 of SEQ ID NO: 1562264
gagugaggcguuuacaaag

SEQ ID NO: 1734540 - RNA, 19 nt, Artificial Sequence
  Description of Artificial Sequence: Synthetic oligonucleotide
  Antisense strand to SEQ ID NO: 1734539
cuuuguaaacgccucacuc

SEQ ID NO: 1734541 - RNA, 19 nt, Artificial Sequence
  Description of Artificial Sequence: Synthetic oligonucleotide
  Sense strand starting at position 3768 of SEQ ID NO: 1562264
ugaagcuuauuguuccaga

SEQ ID NO: 1734542 - RNA, 19 nt, Artificial Sequence
  Description of Artificial Sequence: Synthetic oligonucleotide
  Antisense strand to SEQ ID NO: 1734541
ucuggaacaauaagcuuca

SEQ ID NO: 1734543 - RNA, 19 nt, Artificial Sequence
  Description of Artificial Sequence: Synthetic oligonucleotide
  Sense strand starting at position 3769 of SEQ ID NO: 1562264
gaagcuuauuguuccagau

SEQ ID NO: 1734544 - RNA, 19 nt, Artificial Sequence
  Description of Artificial Sequence: Synthetic oligonucleotide
  Antisense strand to SEQ ID NO: 1734543
aucuggaacaauaagcuuc

SEQ ID NO: 1734545 - RNA, 19 nt, Artificial Sequence
  Description of Artificial Sequence: Synthetic oligonucleotide
  Sense strand starting at position 3773 of SEQ ID NO: 1562264
cuuauuguuccagauuguu

SEQ ID NO: 1734546 - RNA, 19 nt, Artificial Sequence
  Description of Artificial Sequence: Synthetic oligonucleotide
  Antisense strand to SEQ ID NO: 1734545
aacaaucuggaacaauaag

SEQ ID NO: 1734547 - RNA, 19 nt, Artificial Sequence
  Description of Artificial Sequence: Synthetic oligonucleotide
  Sense strand starting at position 3827 of SEQ ID NO: 1562264
augcaaucucuugguacuu

SEQ ID NO: 1734548 - RNA, 19 nt, Artificial Sequence
  Description of Artificial Sequence: Synthetic oligonucleotide
  Antisense strand to SEQ ID NO: 1734547
aaguaccaagagauugcau

SEQ ID NO: 1734549 - RNA, 19 nt, Artificial Sequence
  Description of Artificial Sequence: Synthetic oligonucleotide
  Sense strand starting at position 3928 of SEQ ID NO: 1562264
aguguaagcacugaagaca

SEQ ID NO: 1734550 - RNA, 19 nt, Artificial Sequence
  Description of Artificial Sequence: Synthetic oligonucleotide
  Antisense strand to SEQ ID NO: 1734549
ugucuucagugcuuacacu

SEQ ID NO: 1734551 - RNA, 19 nt, Artificial Sequence
  Description of Artificial Sequence: Synthetic oligonucleotide
  Sense strand starting at position 761 of SEQ ID NO: 1562265
acuauaugucagcacuguu

SEQ ID NO: 1734552 - RNA, 19 nt, Artificial Sequence
  Description of Artificial Sequence: Synthetic oligonucleotide
  Antisense strand to SEQ ID NO: 1734551
aacagugcugacauauagu

SEQ ID NO: 1734553 - RNA, 19 nt, Artificial Sequence
  Description of Artificial Sequence: Synthetic oligonucleotide
  Sense strand starting at position 764 of SEQ ID NO: 1562265
auaugucagcacuguucua

SEQ ID NO: 1734554 - RNA, 19 nt, Artificial Sequence
  Description of Artificial Sequence: Synthetic oligonucleotide
  Antisense strand to SEQ ID NO: 1734553
uagaacagugcugacauau

SEQ ID NO: 1734555 - RNA, 19 nt, Artificial Sequence
  Description of Artificial Sequence: Synthetic oligonucleotide
  Sense strand starting at position 895 of SEQ ID NO: 1562265
gggauacuuuaguuaaagu

SEQ ID NO: 1734556 - RNA, 19 nt, Artificial Sequence
  Description of Artificial Sequence: Synthetic oligonucleotide
  Antisense strand to SEQ ID NO: 1734555
acuuuaacuaaaguauccc

SEQ ID NO: 1734557 - RNA, 19 nt, Artificial Sequence
  Description of Artificial Sequence: Synthetic oligonucleotide
  Sense strand starting at position 902 of SEQ ID NO: 1562265
uuuaguuaaagugguaaug

SEQ ID NO: 1734558 - RNA, 19 nt, Artificial Sequence
  Description of Artificial Sequence: Synthetic oligonucleotide
  Antisense strand to SEQ ID NO: 1734557
cauuaccacuuuaacuaaa

SEQ ID NO: 1734559 - RNA, 19 nt, Artificial Sequence
  Description of Artificial Sequence: Synthetic oligonucleotide
  Sense strand starting at position 944 of SEQ ID NO: 1562265
ugacauuggagcugaaauc

SEQ ID NO: 1734560 - RNA, 19 nt, Artificial Sequence
  Description of Artificial Sequence: Synthetic oligonucleotide
  Antisense strand to SEQ ID NO: 1734559
gauuucagcuccaauguca

SEQ ID NO: 1734561 - RNA, 19 nt, Artificial Sequence
  Description of Artificial Sequence: Synthetic oligonucleotide
  Sense strand starting at position 969 of SEQ ID NO: 1562265
auaagaaguuagcuaugga

SEQ ID NO: 1734562 - RNA, 19 nt, Artificial Sequence
  Description of Artificial Sequence: Synthetic oligonucleotide
  Antisense strand to SEQ ID NO: 1734561
uccauagcuaacuucuuau

SEQ ID NO: 1734563 - RNA, 19 nt, Artificial Sequence
  Description of Artificial Sequence: Synthetic oligonucleotide
  Sense strand starting at position 972 of SEQ ID NO: 1562265
agaaguuagcuauggaaag

SEQ ID NO: 1734564 - RNA, 19 nt, Artificial Sequence
  Description of Artificial Sequence: Synthetic oligonucleotide
  Antisense strand to SEQ ID NO: 1734563
cuuuccauagcuaacuucu

SEQ ID NO: 1734565 - RNA, 19 nt, Artificial Sequence
  Description of Artificial Sequence: Synthetic oligonucleotide
  Sense strand starting at position 1383 of SEQ ID NO: 1562265
auaaaugacugauuggcau

SEQ ID NO: 1734566 - RNA, 19 nt, Artificial Sequence
  Description of Artificial Sequence: Synthetic oligonucleotide
  Antisense strand to SEQ ID NO: 1734565
augccaaucagucauuuau

SEQ ID NO: 1734567 - RNA, 19 nt, Artificial Sequence
  Description of Artificial Sequence: Synthetic oligonucleotide
  Sense strand starting at position 1414 of SEQ ID NO: 1562265
uugguccugguauguauaa

SEQ ID NO: 1734568 - RNA, 19 nt, Artificial Sequence
  Description of Artificial Sequence: Synthetic oligonucleotide
  Antisense strand to SEQ ID NO: 1734567
uuauacauaccaggaccaa

SEQ ID NO: 1734569 - RNA, 19 nt, Artificial Sequence
  Description of Artificial Sequence: Synthetic oligonucleotide
  Sense strand starting at position 1416 of SEQ ID NO: 1562265
gguccugguauguauaaga

SEQ ID NO: 1734570 - RNA, 19 nt, Artificial Sequence
  Description of Artificial Sequence: Synthetic oligonucleotide
  Antisense strand to SEQ ID NO: 1734569
ucuuauacauaccaggacc

SEQ ID NO: 1734571 - RNA, 19 nt, Artificial Sequence
  Description of Artificial Sequence: Synthetic oligonucleotide
  Sense strand starting at position 1449 of SEQ ID NO: 1562265
ccaaacuugcuguguuauc

SEQ ID NO: 1734572 - RNA, 19 nt, Artificial Sequence
  Description of Artificial Sequence: Synthetic oligonucleotide
  Antisense strand to SEQ ID NO: 1734571
gauaacacagcaaguuugg

SEQ ID NO: 1734573 - RNA, 19 nt, Artificial Sequence
  Description of Artificial Sequence: Synthetic oligonucleotide
  Sense strand starting at position 1614 of SEQ ID NO: 1562265
ccgaguuacuguccucauu

SEQ ID NO: 1734574 - RNA, 19 nt, Artificial Sequence
  Description of Artificial Sequence: Synthetic oligonucleotide
  Antisense strand to SEQ ID NO: 1734573
aaugaggacaguaacucgg

SEQ ID NO: 1734575 - RNA, 19 nt, Artificial Sequence
  Description of Artificial Sequence: Synthetic oligonucleotide
  Sense strand starting at position 1676 of SEQ ID NO: 1562265
ccaccauuacucuguaagu

SEQ ID NO: 1734576 - RNA, 19 nt, Artificial Sequence
  Description of Artificial Sequence: Synthetic oligonucleotide
  Antisense strand to SEQ ID NO: 1734575
acuuacagaguaauggugg

SEQ ID NO: 1734577 - RNA, 19 nt, Artificial Sequence
  Description of Artificial Sequence: Synthetic oligonucleotide
  Sense strand starting at position 1678 of SEQ ID NO: 1562265
accauuacucuguaaguag

SEQ ID NO: 1734578 - RNA, 19 nt, Artificial Sequence
  Description of Artificial Sequence: Synthetic oligonucleotide
  Antisense strand to SEQ ID NO: 1734577
cuacuuacagaguaauggu

SEQ ID NO: 1734579 - RNA, 19 nt, Artificial Sequence
  Description of Artificial Sequence: Synthetic oligonucleotide
  Sense strand starting at position 1686 of SEQ ID NO: 1562265
ucuguaaguagcugaaagu

SEQ ID NO: 1734580 - RNA, 19 nt, Artificial Sequence
  Description of Artificial Sequence: Synthetic oligonucleotide
  Antisense strand to SEQ ID NO: 1734579
acuuucagcuacuuacaga

SEQ ID NO: 1734581 - RNA, 19 nt, Artificial Sequence
  Description of Artificial Sequence: Synthetic oligonucleotide
  Sense strand starting at position 1687 of SEQ ID NO: 1562265
cuguaaguagcugaaaguu

SEQ ID NO: 1734582 - RNA, 19 nt, Artificial Sequence
  Description of Artificial Sequence: Synthetic oligonucleotide
  Antisense strand to SEQ ID NO: 1734581
aacuuucagcuacuuacag

SEQ ID NO: 1734583 - RNA, 19 nt, Artificial Sequence
  Description of Artificial Sequence: Synthetic oligonucleotide
  Sense strand starting at position 1704 of SEQ ID NO: 1562265
uugagucuuugguucggga

SEQ ID NO: 1734584 - RNA, 19 nt, Artificial Sequence
  Description of Artificial Sequence: Synthetic oligonucleotide
  Antisense strand to SEQ ID NO: 1734583
ucccgaaccaaagacucaa

SEQ ID NO: 1734585 - RNA, 19 nt, Artificial Sequence
  Description of Artificial Sequence: Synthetic oligonucleotide
  Sense strand starting at position 1706 of SEQ ID NO: 1562265
gagucuuugguucgggauc

SEQ ID NO: 1734586 - RNA, 19 nt, Artificial Sequence
  Description of Artificial Sequence: Synthetic oligonucleotide
  Antisense strand to SEQ ID NO: 1734585
gaucccgaaccaaagacuc

SEQ ID NO: 1734587 - RNA, 19 nt, Artificial Sequence
  Description of Artificial Sequence: Synthetic oligonucleotide
  Sense strand starting at position 1805 of SEQ ID NO: 1562265
gggagauguggaugucuga

SEQ ID NO: 1734588 - RNA, 19 nt, Artificial Sequence
  Description of Artificial Sequence: Synthetic oligonucleotide
  Antisense strand to SEQ ID NO: 1734587
ucagacauccacaucuccc

SEQ ID NO: 1734589 - RNA, 19 nt, Artificial Sequence
  Description of Artificial Sequence: Synthetic oligonucleotide
  Sense strand starting at position 1808 of SEQ ID NO: 1562265
agauguggaugucugacau

SEQ ID NO: 1734590 - RNA, 19 nt, Artificial Sequence
  Description of Artificial Sequence: Synthetic oligonucleotide
  Antisense strand to SEQ ID NO: 1734589
augucagacauccacaucu

SEQ ID NO: 1734591 - RNA, 19 nt, Artificial Sequence
  Description of Artificial Sequence: Synthetic oligonucleotide
  Sense strand starting at position 2049 of SEQ ID NO: 1562265
cggaccaaugucugaggaa

SEQ ID NO: 1734592 - RNA, 19 nt, Artificial Sequence
  Description of Artificial Sequence: Synthetic oligonucleotide
  Antisense strand to SEQ ID NO: 1734591
uuccucagacauugguccg

SEQ ID NO: 1734593 - RNA, 19 nt, Artificial Sequence
  Description of Artificial Sequence: Synthetic oligonucleotide
  Sense strand starting at position 2050 of SEQ ID NO: 1562265
ggaccaaugucugaggaau

SEQ ID NO: 1734594 - RNA, 19 nt, Artificial Sequence
  Description of Artificial Sequence: Synthetic oligonucleotide
  Antisense strand to SEQ ID NO: 1734593
auuccucagacauuggucc

SEQ ID NO: 1734595 - RNA, 19 nt, Artificial Sequence
  Description of Artificial Sequence: Synthetic oligonucleotide
  Sense strand starting at position 2123 of SEQ ID NO: 1562265
ggccguguugccaggguua

SEQ ID NO: 1734596 - RNA, 19 nt, Artificial Sequence
  Description of Artificial Sequence: Synthetic oligonucleotide
  Antisense strand to SEQ ID NO: 1734595
uaacccuggcaacacggcc

SEQ ID NO: 1734597 - RNA, 19 nt, Artificial Sequence
  Description of Artificial Sequence: Synthetic oligonucleotide
  Sense strand starting at position 2148 of SEQ ID NO: 1562265
gcuggcuggagguaaagau

SEQ ID NO: 1734598 - RNA, 19 nt, Artificial Sequence
  Description of Artificial Sequence: Synthetic oligonucleotide
  Antisense strand to SEQ ID NO: 1734597
aucuuuaccuccagccagc

SEQ ID NO: 1734599 - RNA, 19 nt, Artificial Sequence
  Description of Artificial Sequence: Synthetic oligonucleotide
  Sense strand starting at position 2665 of SEQ ID NO: 1562265
gugcauauauagucauaac

SEQ ID NO: 1734600 - RNA, 19 nt, Artificial Sequence
  Description of Artificial Sequence: Synthetic oligonucleotide
  Antisense strand to SEQ ID NO: 1734599
guuaugacuauauaugcac

SEQ ID NO: 1734601 - RNA, 19 nt, Artificial Sequence
  Description of Artificial Sequence: Synthetic oligonucleotide
  Sense strand starting at position 2675 of SEQ ID NO: 1562265
agucauaacgcauauucua

SEQ ID NO: 1734602 - RNA, 19 nt, Artificial Sequence
  Description of Artificial Sequence: Synthetic oligonucleotide
  Antisense strand to SEQ ID NO: 1734601
uagaauaugcguuaugacu

SEQ ID NO: 1734603 - RNA, 19 nt, Artificial Sequence
  Description of Artificial Sequence: Synthetic oligonucleotide
  Sense strand starting at position 2705 of SEQ ID NO: 1562265
aacugaguuccaggucuca

SEQ ID NO: 1734604 - RNA, 19 nt, Artificial Sequence
  Description of Artificial Sequence: Synthetic oligonucleotide
  Antisense strand to SEQ ID NO: 1734603
ugagaccuggaacucaguu

SEQ ID NO: 1734605 - RNA, 19 nt, Artificial Sequence
  Description of Artificial Sequence: Synthetic oligonucleotide
  Sense strand starting at position 2852 of SEQ ID NO: 1562265
ugacuuauuuaggguccua

SEQ ID NO: 1734606 - RNA, 19 nt, Artificial Sequence
  Description of Artificial Sequence: Synthetic oligonucleotide
  Antisense strand to SEQ ID NO: 1734605
uaggacccuaaauaaguca

SEQ ID NO: 1734607 - RNA, 19 nt, Artificial Sequence
  Description of Artificial Sequence: Synthetic oligonucleotide
  Sense strand starting at position 2909 of SEQ ID NO: 1562265
cucaguucccuugaagaug

SEQ ID NO: 1734608 - RNA, 19 nt, Artificial Sequence
  Description of Artificial Sequence: Synthetic oligonucleotide
  Antisense strand to SEQ ID NO: 1734607
caucuucaagggaacugag

SEQ ID NO: 1734609 - RNA, 19 nt, Artificial Sequence
  Description of Artificial Sequence: Synthetic oligonucleotide
  Sense strand starting at position 2987 of SEQ ID NO: 1562265
acaucaaaucaguguuggu

SEQ ID NO: 1734610 - RNA, 19 nt, Artificial Sequence
  Description of Artificial Sequence: Synthetic oligonucleotide
  Antisense strand to SEQ ID NO: 1734609
accaacacugauuugaugu

SEQ ID NO: 1734611 - RNA, 19 nt, Artificial Sequence
  Description of Artificial Sequence: Synthetic oligonucleotide
  Sense strand starting at position 2991 of SEQ ID NO: 1562265
caaaucaguguugguacuu

SEQ ID NO: 1734612 - RNA, 19 nt, Artificial Sequence
  Description of Artificial Sequence: Synthetic oligonucleotide
  Antisense strand to SEQ ID NO: 1734611
aaguaccaacacugauuug

SEQ ID NO: 1734613 - RNA, 19 nt, Artificial Sequence
  Description of Artificial Sequence: Synthetic oligonucleotide
  Sense strand starting at position 2992 of SEQ ID NO: 1562265
aaaucaguguugguacuua

SEQ ID NO: 1734614 - RNA, 19 nt, Artificial Sequence
  Description of Artificial Sequence: Synthetic oligonucleotide
  Antisense strand to SEQ ID NO: 1734613
uaaguaccaacacugauuu

SEQ ID NO: 1734615 - RNA, 19 nt, Artificial Sequence
  Description of Artificial Sequence: Synthetic oligonucleotide
  Sense strand starting at position 3001 of SEQ ID NO: 1562265
uugguacuuacgcaucgaa

SEQ ID NO: 1734616 - RNA, 19 nt, Artificial Sequence
  Description of Artificial Sequence: Synthetic oligonucleotide
  Antisense strand to SEQ ID NO: 1734615
uucgaugcguaaguaccaa

SEQ ID NO: 1734617 - RNA, 19 nt, Artificial Sequence
  Description of Artificial Sequence: Synthetic oligonucleotide
  Sense strand starting at position 3393 of SEQ ID NO: 1562265
agaggaaacugaggucaaa

SEQ ID NO: 1734618 - RNA, 19 nt, Artificial Sequence
  Description of Artificial Sequence: Synthetic oligonucleotide
  Antisense strand to SEQ ID NO: 1734617
uuugaccucaguuuccucu

SEQ ID NO: 1734619 - RNA, 19 nt, Artificial Sequence
  Description of Artificial Sequence: Synthetic oligonucleotide
  Sense strand starting at position 3443 of SEQ ID NO: 1562265
ggcagucaagucuaagauu

SEQ ID NO: 1734620 - RNA, 19 nt, Artificial Sequence
  Description of Artificial Sequence: Synthetic oligonucleotide
  Antisense strand to SEQ ID NO: 1734619
aaucuuagacuugacugcc

SEQ ID NO: 1734621 - RNA, 19 nt, Artificial Sequence
  Description of Artificial Sequence: Synthetic oligonucleotide
  Sense strand starting at position 3495 of SEQ ID NO: 1562265
gccucuucccgcuagaaua

SEQ ID NO: 1734622 - RNA, 19 nt, Artificial Sequence
  Description of Artificial Sequence: Synthetic oligonucleotide
  Antisense strand to SEQ ID NO: 1734621
uauucuagcgggaagaggc

SEQ ID NO: 1734623 - RNA, 19 nt, Artificial Sequence
  Description of Artificial Sequence: Synthetic oligonucleotide
  Sense strand starting at position 3497 of SEQ ID NO: 1562265
cucuucccgcuagaauaua

SEQ ID NO: 1734624 - RNA, 19 nt, Artificial Sequence
  Description of Artificial Sequence: Synthetic oligonucleotide
  Antisense strand to SEQ ID NO: 1734623
uauauucuagcgggaagag

SEQ ID NO: 1734625 - RNA, 19 nt, Artificial Sequence
  Description of Artificial Sequence: Synthetic oligonucleotide
  Sense strand starting at position 3540 of SEQ ID NO: 1562265
ggcuuaguuguaggaagga

SEQ ID NO: 1734626 - RNA, 19 nt, Artificial Sequence
  Description of Artificial Sequence: Synthetic oligonucleotide
  Antisense strand to SEQ ID NO: 1734625
uccuuccuacaacuaagcc

SEQ ID NO: 1734627 - RNA, 19 nt, Artificial Sequence
  Description of Artificial Sequence: Synthetic oligonucleotide
  Sense strand starting at position 3559 of SEQ ID NO: 1562265
ggcaaauuaagacgcagau

SEQ ID NO: 1734628 - RNA, 19 nt, Artificial Sequence
  Description of Artificial Sequence: Synthetic oligonucleotide
  Antisense strand to SEQ ID NO: 1734627
aucugcgucuuaauuugcc

SEQ ID NO: 1734629 - RNA, 19 nt, Artificial Sequence
  Description of Artificial Sequence: Synthetic oligonucleotide
  Sense strand starting at position 3578 of SEQ ID NO: 1562265
ugccaaauccuugaaugug

SEQ ID NO: 1734630 - RNA, 19 nt, Artificial Sequence
  Description of Artificial Sequence: Synthetic oligonucleotide
  Antisense strand to SEQ ID NO: 1734629
cacauucaaggauuuggca

SEQ ID NO: 1734631 - RNA, 19 nt, Artificial Sequence
  Description of Artificial Sequence: Synthetic oligonucleotide
  Sense strand starting at position 7 of SEQ ID NO: 1562266
gguacucaguaauuaacca

SEQ ID NO: 1734632 - RNA, 19 nt, Artificial Sequence
  Description of Artificial Sequence: Synthetic oligonucleotide
  Antisense strand to SEQ ID NO: 1734631
ugguuaauuacugaguacc

SEQ ID NO: 1734633 - RNA, 19 nt, Artificial Sequence
  Description of Artificial Sequence: Synthetic oligonucleotide
  Sense strand starting at position 71 of SEQ ID NO: 1562266
caucaauuccagugugaag

SEQ ID NO: 1734634 - RNA, 19 nt, Artificial Sequence
  Description of Artificial Sequence: Synthetic oligonucleotide
  Antisense strand to SEQ ID NO: 1734633
cuucacacuggaauugaug

SEQ ID NO: 1734635 - RNA, 19 nt, Artificial Sequence
  Description of Artificial Sequence: Synthetic oligonucleotide
  Sense strand starting at position 119 of SEQ ID NO: 1562266
ucauuucuuucuccguaca

SEQ ID NO: 1734636 - RNA, 19 nt, Artificial Sequence
  Description of Artificial Sequence: Synthetic oligonucleotide
  Antisense strand to SEQ ID NO: 1734635
uguacggagaaagaaauga

SEQ ID NO: 1734637 - RNA, 19 nt, Artificial Sequence
  Description of Artificial Sequence: Synthetic oligonucleotide
  Sense strand starting at position 121 of SEQ ID NO: 1562266
auuucuuucuccguacauu

SEQ ID NO: 1734638 - RNA, 19 nt, Artificial Sequence
  Description of Artificial Sequence: Synthetic oligonucleotide
  Antisense strand to SEQ ID NO: 1734637
aauguacggagaaagaaau

SEQ ID NO: 1734639 - RNA, 19 nt, Artificial Sequence
  Description of Artificial Sequence: Synthetic oligonucleotide
  Sense strand starting at position 309 of SEQ ID NO: 1562266
cuggcugucuaauugagga

SEQ ID NO: 1734640 - RNA, 19 nt, Artificial Sequence
  Description of Artificial Sequence: Synthetic oligonucleotide
  Antisense strand to SEQ ID NO: 1734639
uccucaauuagacagccag

SEQ ID NO: 1734641 - RNA, 19 nt, Artificial Sequence
  Description of Artificial Sequence: Synthetic oligonucleotide
  Sense strand starting at position 314 of SEQ ID NO: 1562266
ugucuaauugaggagcuuu

SEQ ID NO: 1734642 - RNA, 19 nt, Artificial Sequence
  Description of Artificial Sequence: Synthetic oligonucleotide
  Antisense strand to SEQ ID NO: 1734641
aaagcuccucaauuagaca

SEQ ID NO: 1734643 - RNA, 19 nt, Artificial Sequence
  Description of Artificial Sequence: Synthetic oligonucleotide
  Sense strand starting at position 355 of SEQ ID NO: 1562266
cucaaacucggauaugcuu

SEQ ID NO: 1734644 - RNA, 19 nt, Artificial Sequence
  Description of Artificial Sequence: Synthetic oligonucleotide
  Antisense strand to SEQ ID NO: 1734643
aagcauauccgaguuugag

SEQ ID NO: 1734645 - RNA, 19 nt, Artificial Sequence
  Description of Artificial Sequence: Synthetic oligonucleotide
  Sense strand starting at position 362 of SEQ ID NO: 1562266
ucggauaugcuuuaacucu

SEQ ID NO: 1734646 - RNA, 19 nt, Artificial Sequence
  Description of Artificial Sequence: Synthetic oligonucleotide
  Antisense strand to SEQ ID NO: 1734645
agaguuaaagcauauccga

SEQ ID NO: 1734647 - RNA, 19 nt, Artificial Sequence
  Description of Artificial Sequence: Synthetic oligonucleotide
  Sense strand starting at position 368 of SEQ ID NO: 1562266
augcuuuaacucugaguug

SEQ ID NO: 1734648 - RNA, 19 nt, Artificial Sequence
  Description of Artificial Sequence: Synthetic oligonucleotide
  Antisense strand to SEQ ID NO: 1734647
caacucagaguuaaagcau

SEQ ID NO: 1734649 - RNA, 19 nt, Artificial Sequence
  Description of Artificial Sequence: Synthetic oligonucleotide
  Sense strand starting at position 454 of SEQ ID NO: 1562266
guggauuucugacaacucu

SEQ ID NO: 1734650 - RNA, 19 nt, Artificial Sequence
  Description of Artificial Sequence: Synthetic oligonucleotide
  Antisense strand to SEQ ID NO: 1734649
agaguugucagaaauccac

SEQ ID NO: 1734651 - RNA, 19 nt, Artificial Sequence
  Description of Artificial Sequence: Synthetic oligonucleotide
  Sense strand starting at position 727 of SEQ ID NO: 1562266
ccugacuucucaucuguca

SEQ ID NO: 1734652 - RNA, 19 nt, Artificial Sequence
  Description of Artificial Sequence: Synthetic oligonucleotide
  Antisense strand to SEQ ID NO: 1734651
ugacagaugagaagucagg

SEQ ID NO: 1734653 - RNA, 19 nt, Artificial Sequence
  Description of Artificial Sequence: Synthetic oligonucleotide
  Sense strand starting at position 842 of SEQ ID NO: 1562266
gcacauggaaaguguuuga

SEQ ID NO: 1734654 - RNA, 19 nt, Artificial Sequence
  Description of Artificial Sequence: Synthetic oligonucleotide
  Antisense strand to SEQ ID NO: 1734653
ucaaacacuuuccaugugc

SEQ ID NO: 1734655 - RNA, 19 nt, Artificial Sequence
  Description of Artificial Sequence: Synthetic oligonucleotide
  Sense strand starting at position 946 of SEQ ID NO: 1562266
cuuugagacgccgaaagau

SEQ ID NO: 1734656 - RNA, 19 nt, Artificial Sequence
  Description of Artificial Sequence: Synthetic oligonucleotide
  Antisense strand to SEQ ID NO: 1734655
aucuuucggcgucucaaag

SEQ ID NO: 1734657 - RNA, 19 nt, Artificial Sequence
  Description of Artificial Sequence: Synthetic oligonucleotide
  Sense strand starting at position 954 of SEQ ID NO: 1562266
cgccgaaagaucgcuuagu

SEQ ID NO: 1734658 - RNA, 19 nt, Artificial Sequence
  Description of Artificial Sequence: Synthetic oligonucleotide
  Antisense strand to SEQ ID NO: 1734657
acuaagcgaucuuucggcg

SEQ ID NO: 1734659 - RNA, 19 nt, Artificial Sequence
  Description of Artificial Sequence: Synthetic oligonucleotide
  Sense strand starting at position 1116 of SEQ ID NO: 1562266
aaggcucagugagcugauu

SEQ ID NO: 1734660 - RNA, 19 nt, Artificial Sequence
  Description of Artificial Sequence: Synthetic oligonucleotide
  Antisense strand to SEQ ID NO: 1734659
aaucagcucacugagccuu

SEQ ID NO: 1734661 - RNA, 19 nt, Artificial Sequence
  Description of Artificial Sequence: Synthetic oligonucleotide
  Sense strand starting at position 1220 of SEQ ID NO: 1562266
cgaacauuccaacgaccau

SEQ ID NO: 1734662 - RNA, 19 nt, Artificial Sequence
  Description of Artificial Sequence: Synthetic oligonucleotide
  Antisense strand to SEQ ID NO: 1734661
auggucguuggaauguucg

SEQ ID NO: 1734663 - RNA, 19 nt, Artificial Sequence
  Description of Artificial Sequence: Synthetic oligonucleotide
  Sense strand starting at position 1269 of SEQ ID NO: 1562266
aggaaauuaucgccaaggu

SEQ ID NO: 1734664 - RNA, 19 nt, Artificial Sequence
  Description of Artificial Sequence: Synthetic oligonucleotide
  Antisense strand to SEQ ID NO: 1734663
accuuggcgauaauuuccu

SEQ ID NO: 1734665 - RNA, 19 nt, Artificial Sequence
  Description of Artificial Sequence: Synthetic oligonucleotide
  Sense strand starting at position 1270 of SEQ ID NO: 1562266
ggaaauuaucgccaaggug

SEQ ID NO: 1734666 - RNA, 19 nt, Artificial Sequence
  Description of Artificial Sequence: Synthetic oligonucleotide
  Antisense strand to SEQ ID NO: 1734665
caccuuggcgauaauuucc

SEQ ID NO: 1734667 - RNA, 19 nt, Artificial Sequence
  Description of Artificial Sequence: Synthetic oligonucleotide
  Sense strand starting at position 1300 of SEQ ID NO: 1562266
uuaugaaagccauacuuug

SEQ ID NO: 1734668 - RNA, 19 nt, Artificial Sequence
  Description of Artificial Sequence: Synthetic oligonucleotide
  Antisense strand to SEQ ID NO: 1734667
caaaguauggcuuucauaa

SEQ ID NO: 1734669 - RNA, 19 nt, Artificial Sequence
  Description of Artificial Sequence: Synthetic oligonucleotide
  Sense strand starting at position 1383 of SEQ ID NO: 1562266
cugugaauggagugaaagu

SEQ ID NO: 1734670 - RNA, 19 nt, Artificial Sequence
  Description of Artificial Sequence: Synthetic oligonucleotide
  Antisense strand to SEQ ID NO: 1734669
acuuucacuccauucacag

SEQ ID NO: 1734671 - RNA, 19 nt, Artificial Sequence
  Description of Artificial Sequence: Synthetic oligonucleotide
  Sense strand starting at position 1399 of SEQ ID NO: 1562266
aguggaguggguggucaaa

SEQ ID NO: 1734672 - RNA, 19 nt, Artificial Sequence
  Description of Artificial Sequence: Synthetic oligonucleotide
  Antisense strand to SEQ ID NO: 1734671
uuugaccacccacuccacu

SEQ ID NO: 1734673 - RNA, 19 nt, Artificial Sequence
  Description of Artificial Sequence: Synthetic oligonucleotide
  Sense strand starting at position 2182 of SEQ ID NO: 1562266
ggcaaucugccggaagagu

SEQ ID NO: 1734674 - RNA, 19 nt, Artificial Sequence
  Description of Artificial Sequence: Synthetic oligonucleotide
  Antisense strand to SEQ ID NO: 1734673
acucuuccggcagauugcc

SEQ ID NO: 1734675 - RNA, 19 nt, Artificial Sequence
  Description of Artificial Sequence: Synthetic oligonucleotide
  Sense strand starting at position 2252 of SEQ ID NO: 1562266
gcagcauugaacuagaugu

SEQ ID NO: 1734676 - RNA, 19 nt, Artificial Sequence
  Description of Artificial Sequence: Synthetic oligonucleotide
  Antisense strand to SEQ ID NO: 1734675
acaucuaguucaaugcugc

SEQ ID NO: 1734677 - RNA, 19 nt, Artificial Sequence
  Description of Artificial Sequence: Synthetic oligonucleotide
  Sense strand starting at position 2424 of SEQ ID NO: 1562266
uccuuuagggcagaaacuu

SEQ ID NO: 1734678 - RNA, 19 nt, Artificial Sequence
  Description of Artificial Sequence: Synthetic oligonucleotide
  Antisense strand to SEQ ID NO: 1734677
aaguuucugcccuaaagga

SEQ ID NO: 1734679 - RNA, 19 nt, Artificial Sequence
  Description of Artificial Sequence: Synthetic oligonucleotide
  Sense strand starting at position 2430 of SEQ ID NO: 1562266
agggcagaaacuugaucuu

SEQ ID NO: 1734680 - RNA, 19 nt, Artificial Sequence
  Description of Artificial Sequence: Synthetic oligonucleotide
  Antisense strand to SEQ ID NO: 1734679
aagaucaaguuucugcccu

SEQ ID NO: 1734681 - RNA, 19 nt, Artificial Sequence
  Description of Artificial Sequence: Synthetic oligonucleotide
  Sense strand starting at position 2433 of SEQ ID NO: 1562266
gcagaaacuugaucuugac

SEQ ID NO: 1734682 - RNA, 19 nt, Artificial Sequence
  Description of Artificial Sequence: Synthetic oligonucleotide
  Antisense strand to SEQ ID NO: 1734681
gucaagaucaaguuucugc

SEQ ID NO: 1734683 - RNA, 19 nt, Artificial Sequence
  Description of Artificial Sequence: Synthetic oligonucleotide
  Sense strand starting at position 2709 of SEQ ID NO: 1562266
gcugauggaucagccuuaa

SEQ ID NO: 1734684 - RNA, 19 nt, Artificial Sequence
  Description of Artificial Sequence: Synthetic oligonucleotide
  Antisense strand to SEQ ID NO: 1734683
uuaaggcugauccaucagc

SEQ ID NO: 1734685 - RNA, 19 nt, Artificial Sequence
  Description of Artificial Sequence: Synthetic oligonucleotide
  Sense strand starting at position 2801 of SEQ ID NO: 1562266
ugggucugguuucucauua

SEQ ID NO: 1734686 - RNA, 19 nt, Artificial Sequence
  Description of Artificial Sequence: Synthetic oligonucleotide
  Antisense strand to SEQ ID NO: 1734685
uaaugagaaaccagaccca

SEQ ID NO: 1734687 - RNA, 19 nt, Artificial Sequence
  Description of Artificial Sequence: Synthetic oligonucleotide
  Sense strand starting at position 2805 of SEQ ID NO: 1562266
ucugguuucucauuacuua

SEQ ID NO: 1734688 - RNA, 19 nt, Artificial Sequence
  Description of Artificial Sequence: Synthetic oligonucleotide
  Antisense strand to SEQ ID NO: 1734687
uaaguaaugagaaaccaga

SEQ ID NO: 1734689 - RNA, 19 nt, Artificial Sequence
  Description of Artificial Sequence: Synthetic oligonucleotide
  Sense strand starting at position 2806 of SEQ ID NO: 1562266
cugguuucucauuacuuau

SEQ ID NO: 1734690 - RNA, 19 nt, Artificial Sequence
  Description of Artificial Sequence: Synthetic oligonucleotide
  Antisense strand to SEQ ID NO: 1734689
auaaguaaugagaaaccag

SEQ ID NO: 1734691 - RNA, 19 nt, Artificial Sequence
  Description of Artificial Sequence: Synthetic oligonucleotide
  Sense strand starting at position 3006 of SEQ ID NO: 1562266
uccugauuagcugggacau

SEQ ID NO: 1734692 - RNA, 19 nt, Artificial Sequence
  Description of Artificial Sequence: Synthetic oligonucleotide
  Antisense strand to SEQ ID NO: 1734691
augucccagcuaaucagga

SEQ ID NO: 1734693 - RNA, 19 nt, Artificial Sequence
  Description of Artificial Sequence: Synthetic oligonucleotide
  Sense strand starting at position 3007 of SEQ ID NO: 1562266
ccugauuagcugggacaua

SEQ ID NO: 1734694 - RNA, 19 nt, Artificial Sequence
  Description of Artificial Sequence: Synthetic oligonucleotide
  Antisense strand to SEQ ID NO: 1734693
uaugucccagcuaaucagg

SEQ ID NO: 1734695 - RNA, 19 nt, Artificial Sequence
  Description of Artificial Sequence: Synthetic oligonucleotide
  Sense strand starting at position 3223 of SEQ ID NO: 1562266
cuggcuuuacuggaaguua

SEQ ID NO: 1734696 - RNA, 19 nt, Artificial Sequence
  Description of Artificial Sequence: Synthetic oligonucleotide
  Antisense strand to SEQ ID NO: 1734695
uaacuuccaguaaagccag

SEQ ID NO: 1734697 - RNA, 19 nt, Artificial Sequence
  Description of Artificial Sequence: Synthetic oligonucleotide
  Sense strand starting at position 3231 of SEQ ID NO: 1562266
acuggaaguuaucuuacuu

SEQ ID NO: 1734698 - RNA, 19 nt, Artificial Sequence
  Description of Artificial Sequence: Synthetic oligonucleotide
  Antisense strand to SEQ ID NO: 1734697
aaguaagauaacuuccagu

SEQ ID NO: 1734699 - RNA, 19 nt, Artificial Sequence
  Description of Artificial Sequence: Synthetic oligonucleotide
  Sense strand starting at position 3235 of SEQ ID NO: 1562266
gaaguuaucuuacuuugag

SEQ ID NO: 1734700 - RNA, 19 nt, Artificial Sequence
  Description of Artificial Sequence: Synthetic oligonucleotide
  Antisense strand to SEQ ID NO: 1734699
cucaaaguaagauaacuuc

SEQ ID NO: 1734701 - RNA, 19 nt, Artificial Sequence
  Description of Artificial Sequence: Synthetic oligonucleotide
  Sense strand starting at position 3656 of SEQ ID NO: 1562266
gugggaggcuagagacaua

SEQ ID NO: 1734702 - RNA, 19 nt, Artificial Sequence
  Description of Artificial Sequence: Synthetic oligonucleotide
  Antisense strand to SEQ ID NO: 1734701
uaugucucuagccucccac

SEQ ID NO: 1734703 - RNA, 19 nt, Artificial Sequence
  Description of Artificial Sequence: Synthetic oligonucleotide
  Sense strand starting at position 3696 of SEQ ID NO: 1562266
cuacauucugggcaagcau

SEQ ID NO: 1734704 - RNA, 19 nt, Artificial Sequence
  Description of Artificial Sequence: Synthetic oligonucleotide
  Antisense strand to SEQ ID NO: 1734703
augcuugcccagaauguag

SEQ ID NO: 1734705 - RNA, 19 nt, Artificial Sequence
  Description of Artificial Sequence: Synthetic oligonucleotide
  Sense strand starting at position 3745 of SEQ ID NO: 1562266
ucaucuguacacugaagga

SEQ ID NO: 1734706 - RNA, 19 nt, Artificial Sequence
  Description of Artificial Sequence: Synthetic oligonucleotide
  Antisense strand to SEQ ID NO: 1734705
uccuucaguguacagauga

SEQ ID NO: 1734707 - RNA, 19 nt, Artificial Sequence
  Description of Artificial Sequence: Synthetic oligonucleotide
  Sense strand starting at position 3760 of SEQ ID NO: 1562266
aggaguuagacuugauguc

SEQ ID NO: 1734708 - RNA, 19 nt, Artificial Sequence
  Description of Artificial Sequence: Synthetic oligonucleotide
  Antisense strand to SEQ ID NO: 1734707
gacaucaagucuaacuccu

SEQ ID NO: 1734709 - RNA, 19 nt, Artificial Sequence
  Description of Artificial Sequence: Synthetic oligonucleotide
  Sense strand starting at position 3761 of SEQ ID NO: 1562266
ggaguuagacuugaugucu

SEQ ID NO: 1734710 - RNA, 19 nt, Artificial Sequence
  Description of Artificial Sequence: Synthetic oligonucleotide
  Antisense strand to SEQ ID NO: 1734709
agacaucaagucuaacucc

SEQ ID NO: 1734711 - RNA, 19 nt, Artificial Sequence
  Description of Artificial Sequence: Synthetic oligonucleotide
  Sense strand starting at position 88 of SEQ ID NO: 1562267
cugucuccacgugauaaca

SEQ ID NO: 1734712 - RNA, 19 nt, Artificial Sequence
  Description of Artificial Sequence: Synthetic oligonucleotide
  Antisense strand to SEQ ID NO: 1734711
uguuaucacguggagacag

SEQ ID NO: 1734713 - RNA, 19 nt, Artificial Sequence
  Description of Artificial Sequence: Synthetic oligonucleotide
  Sense strand starting at position 96 of SEQ ID NO: 1562267
acgugauaacaagacaguu

SEQ ID NO: 1734714 - RNA, 19 nt, Artificial Sequence
  Description of Artificial Sequence: Synthetic oligonucleotide
  Antisense strand to SEQ ID NO: 1734713
aacugucuuguuaucacgu

SEQ ID NO: 1734715 - RNA, 19 nt, Artificial Sequence
  Description of Artificial Sequence: Synthetic oligonucleotide
  Sense strand starting at position 404 of SEQ ID NO: 1562267
ccaaguguugcccaaagau

SEQ ID NO: 1734716 - RNA, 19 nt, Artificial Sequence
  Description of Artificial Sequence: Synthetic oligonucleotide
  Antisense strand to SEQ ID NO: 1734715
aucuuugggcaacacuugg

SEQ ID NO: 1734717 - RNA, 19 nt, Artificial Sequence
  Description of Artificial Sequence: Synthetic oligonucleotide
  Sense strand starting at position 479 of SEQ ID NO: 1562267
cugccucuucuacguagaa

SEQ ID NO: 1734718 - RNA, 19 nt, Artificial Sequence
  Description of Artificial Sequence: Synthetic oligonucleotide
  Antisense strand to SEQ ID NO: 1734717
uucuacguagaagaggcag

SEQ ID NO: 1734719 - RNA, 19 nt, Artificial Sequence
  Description of Artificial Sequence: Synthetic oligonucleotide
  Sense strand starting at position 649 of SEQ ID NO: 1562267
ccguauguucuacaguaac

SEQ ID NO: 1734720 - RNA, 19 nt, Artificial Sequence
  Description of Artificial Sequence: Synthetic oligonucleotide
  Antisense strand to SEQ ID NO: 1734719
guuacuguagaacauacgg

SEQ ID NO: 1734721 - RNA, 19 nt, Artificial Sequence
  Description of Artificial Sequence: Synthetic oligonucleotide
  Sense strand starting at position 660 of SEQ ID NO: 1562267
acaguaaccuguuuggaau

SEQ ID NO: 1734722 - RNA, 19 nt, Artificial Sequence
  Description of Artificial Sequence: Synthetic oligonucleotide
  Antisense strand to SEQ ID NO: 1734721
auuccaaacagguuacugu

SEQ ID NO: 1734723 - RNA, 19 nt, Artificial Sequence
  Description of Artificial Sequence: Synthetic oligonucleotide
  Sense strand starting at position 661 of SEQ ID NO: 1562267
caguaaccuguuuggaauc

SEQ ID NO: 1734724 - RNA, 19 nt, Artificial Sequence
  Description of Artificial Sequence: Synthetic oligonucleotide
  Antisense strand to SEQ ID NO: 1734723
gauuccaaacagguuacug

SEQ ID NO: 1734725 - RNA, 19 nt, Artificial Sequence
  Description of Artificial Sequence: Synthetic oligonucleotide
  Sense strand starting at position 674 of SEQ ID NO: 1562267
ggaaucauaggaugcaguu

SEQ ID NO: 1734726 - RNA, 19 nt, Artificial Sequence
  Description of Artificial Sequence: Synthetic oligonucleotide
  Antisense strand to SEQ ID NO: 1734725
aacugcauccuaugauucc

SEQ ID NO: 1734727 - RNA, 19 nt, Artificial Sequence
  Description of Artificial Sequence: Synthetic oligonucleotide
  Sense strand starting at position 680 of SEQ ID NO: 1562267
auaggaugcaguugucaca

SEQ ID NO: 1734728 - RNA, 19 nt, Artificial Sequence
  Description of Artificial Sequence: Synthetic oligonucleotide
  Antisense strand to SEQ ID NO: 1734727
ugugacaacugcauccuau

SEQ ID NO: 1734729 - RNA, 19 nt, Artificial Sequence
  Description of Artificial Sequence: Synthetic oligonucleotide
  Sense strand starting at position 755 of SEQ ID NO: 1562267
gagguaacugucggucaaa

SEQ ID NO: 1734730 - RNA, 19 nt, Artificial Sequence
  Description of Artificial Sequence: Synthetic oligonucleotide
  Antisense strand to SEQ ID NO: 1734729
uuugaccgacaguuaccuc

SEQ ID NO: 1734731 - RNA, 19 nt, Artificial Sequence
  Description of Artificial Sequence: Synthetic oligonucleotide
  Sense strand starting at position 756 of SEQ ID NO: 1562267
agguaacugucggucaaau

SEQ ID NO: 1734732 - RNA, 19 nt, Artificial Sequence
  Description of Artificial Sequence: Synthetic oligonucleotide
  Antisense strand to SEQ ID NO: 1734731
auuugaccgacaguuaccu

SEQ ID NO: 1734733 - RNA, 19 nt, Artificial Sequence
  Description of Artificial Sequence: Synthetic oligonucleotide
  Sense strand starting at position 884 of SEQ ID NO: 1562267
aaguaauaucaggguagua

SEQ ID NO: 1734734 - RNA, 19 nt, Artificial Sequence
  Description of Artificial Sequence: Synthetic oligonucleotide
  Antisense strand to SEQ ID NO: 1734733
uacuacccugauauuacuu

SEQ ID NO: 1734735 - RNA, 19 nt, Artificial Sequence
  Description of Artificial Sequence: Synthetic oligonucleotide
  Sense strand starting at position 886 of SEQ ID NO: 1562267
guaauaucaggguaguaac

SEQ ID NO: 1734736 - RNA, 19 nt, Artificial Sequence
  Description of Artificial Sequence: Synthetic oligonucleotide
  Antisense strand to SEQ ID NO: 1734735
guuacuacccugauauuac

SEQ ID NO: 1734737 - RNA, 19 nt, Artificial Sequence
  Description of Artificial Sequence: Synthetic oligonucleotide
  Sense strand starting at position 910 of SEQ ID NO: 1562267
agauacacggcguggaaua

SEQ ID NO: 1734738 - RNA, 19 nt, Artificial Sequence
  Description of Artificial Sequence: Synthetic oligonucleotide
  Antisense strand to SEQ ID NO: 1734737
uauuccacgccguguaucu

SEQ ID NO: 1734739 - RNA, 19 nt, Artificial Sequence
  Description of Artificial Sequence: Synthetic oligonucleotide
  Sense strand starting at position 972 of SEQ ID NO: 1562267
gugugcugggcguagacau

SEQ ID NO: 1734740 - RNA, 19 nt, Artificial Sequence
  Description of Artificial Sequence: Synthetic oligonucleotide
  Antisense strand to SEQ ID NO: 1734739
augucuacgcccagcacac

SEQ ID NO: 1734741 - RNA, 19 nt, Artificial Sequence
  Description of Artificial Sequence: Synthetic oligonucleotide
  Sense strand starting at position 1028 of SEQ ID NO: 1562267
gccugaugauugguuuguu

SEQ ID NO: 1734742 - RNA, 19 nt, Artificial Sequence
  Description of Artificial Sequence: Synthetic oligonucleotide
  Antisense strand to SEQ ID NO: 1734741
aacaaaccaaucaucaggc

SEQ ID NO: 1734743 - RNA, 19 nt, Artificial Sequence
  Description of Artificial Sequence: Synthetic oligonucleotide
  Sense strand starting at position 1031 of SEQ ID NO: 1562267
ugaugauugguuuguuguu

SEQ ID NO: 1734744 - RNA, 19 nt, Artificial Sequence
  Description of Artificial Sequence: Synthetic oligonucleotide
  Antisense strand to SEQ ID NO: 1734743
aacaacaaaccaaucauca

SEQ ID NO: 1734745 - RNA, 19 nt, Artificial Sequence
  Description of Artificial Sequence: Synthetic oligonucleotide
  Sense strand starting at position 1041 of SEQ ID NO: 1562267
uuuguuguuuguuccuaau

SEQ ID NO: 1734746 - RNA, 19 nt, Artificial Sequence
  Description of Artificial Sequence: Synthetic oligonucleotide
  Antisense strand to SEQ ID NO: 1734745
auuaggaacaaacaacaaa

SEQ ID NO: 1734747 - RNA, 19 nt, Artificial Sequence
  Description of Artificial Sequence: Synthetic oligonucleotide
  Sense strand starting at position 1074 of SEQ ID NO: 1562267
aagggagauuccugaccac

SEQ ID NO: 1734748 - RNA, 19 nt, Artificial Sequence
  Description of Artificial Sequence: Synthetic oligonucleotide
  Antisense strand to SEQ ID NO: 1734747
guggucaggaaucucccuu

SEQ ID NO: 1734749 - RNA, 19 nt, Artificial Sequence
  Description of Artificial Sequence: Synthetic oligonucleotide
  Sense strand starting at position 1773 of SEQ ID NO: 1562267
cgagcuugcgagucuuugu

SEQ ID NO: 1734750 - RNA, 19 nt, Artificial Sequence
  Description of Artificial Sequence: Synthetic oligonucleotide
  Antisense strand to SEQ ID NO: 1734749
acaaagacucgcaagcucg

SEQ ID NO: 1734751 - RNA, 19 nt, Artificial Sequence
  Description of Artificial Sequence: Synthetic oligonucleotide
  Sense strand starting at position 1794 of SEQ ID NO: 1562267
guuuccugcucuccuugaa

SEQ ID NO: 1734752 - RNA, 19 nt, Artificial Sequence
  Description of Artificial Sequence: Synthetic oligonucleotide
  Antisense strand to SEQ ID NO: 1734751
uucaaggagagcaggaaac

SEQ ID NO: 1734753 - RNA, 19 nt, Artificial Sequence
  Description of Artificial Sequence: Synthetic oligonucleotide
  Sense strand starting at position 2604 of SEQ ID NO: 1562267
ugcuaagugcuggguuaca

SEQ ID NO: 1734754 - RNA, 19 nt, Artificial Sequence
  Description of Artificial Sequence: Synthetic oligonucleotide
  Antisense strand to SEQ ID NO: 1734753
uguaacccagcacuuagca

SEQ ID NO: 1734755 - RNA, 19 nt, Artificial Sequence
  Description of Artificial Sequence: Synthetic oligonucleotide
  Sense strand starting at position 2732 of SEQ ID NO: 1562267
ggaacuguauaaggaauaa

SEQ ID NO: 1734756 - RNA, 19 nt, Artificial Sequence
  Description of Artificial Sequence: Synthetic oligonucleotide
  Antisense strand to SEQ ID NO: 1734755
uuauuccuuauacaguucc

SEQ ID NO: 1734757 - RNA, 19 nt, Artificial Sequence
  Description of Artificial Sequence: Synthetic oligonucleotide
  Sense strand starting at position 2782 of SEQ ID NO: 1562267
uggaauaucagauggucca

SEQ ID NO: 1734758 - RNA, 19 nt, Artificial Sequence
  Description of Artificial Sequence: Synthetic oligonucleotide
  Antisense strand to SEQ ID NO: 1734757
uggaccaucugauauucca

SEQ ID NO: 1734759 - RNA, 19 nt, Artificial Sequence
  Description of Artificial Sequence: Synthetic oligonucleotide
  Sense strand starting at position 2834 of SEQ ID NO: 1562267
gccauuuccugguauccau

SEQ ID NO: 1734760 - RNA, 19 nt, Artificial Sequence
  Description of Artificial Sequence: Synthetic oligonucleotide
  Antisense strand to SEQ ID NO: 1734759
auggauaccaggaaauggc

SEQ ID NO: 1734761 - RNA, 19 nt, Artificial Sequence
  Description of Artificial Sequence: Synthetic oligonucleotide
  Sense strand starting at position 2841 of SEQ ID NO: 1562267
ccugguauccauggugaca

SEQ ID NO: 1734762 - RNA, 19 nt, Artificial Sequence
  Description of Artificial Sequence: Synthetic oligonucleotide
  Antisense strand to SEQ ID NO: 1734761
ugucaccauggauaccagg

SEQ ID NO: 1734763 - RNA, 19 nt, Artificial Sequence
  Description of Artificial Sequence: Synthetic oligonucleotide
  Sense strand starting at position 2861 of SEQ ID NO: 1562267
ggaauucuuuacucccagu

SEQ ID NO: 1734764 - RNA, 19 nt, Artificial Sequence
  Description of Artificial Sequence: Synthetic oligonucleotide
  Antisense strand to SEQ ID NO: 1734763
acugggaguaaagaauucc

SEQ ID NO: 1734765 - RNA, 19 nt, Artificial Sequence
  Description of Artificial Sequence: Synthetic oligonucleotide
  Sense strand starting at position 3099 of SEQ ID NO: 1562267
gcucaaaucgaaggagaga

SEQ ID NO: 1734766 - RNA, 19 nt, Artificial Sequence
  Description of Artificial Sequence: Synthetic oligonucleotide
  Antisense strand to SEQ ID NO: 1734765
ucucuccuucgauuugagc

SEQ ID NO: 1734767 - RNA, 19 nt, Artificial Sequence
  Description of Artificial Sequence: Synthetic oligonucleotide
  Sense strand starting at position 3119 of SEQ ID NO: 1562267
aggagacacgguuaugagu

SEQ ID NO: 1734768 - RNA, 19 nt, Artificial Sequence
  Description of Artificial Sequence: Synthetic oligonucleotide
  Antisense strand to SEQ ID NO: 1734767
acucauaaccgugucuccu

SEQ ID NO: 1734769 - RNA, 19 nt, Artificial Sequence
  Description of Artificial Sequence: Synthetic oligonucleotide
  Sense strand starting at position 3500 of SEQ ID NO: 1562267
uuuacacuuggcugaaaug

SEQ ID NO: 1734770 - RNA, 19 nt, Artificial Sequence
  Description of Artificial Sequence: Synthetic oligonucleotide
  Antisense strand to SEQ ID NO: 1734769
cauuucagccaaguguaaa

SEQ ID NO: 1734771 - RNA, 19 nt, Artificial Sequence
  Description of Artificial Sequence: Synthetic oligonucleotide
  Sense strand starting at position 3518 of SEQ ID NO: 1562267
gaggaaaucugacugcugu

SEQ ID NO: 1734772 - RNA, 19 nt, Artificial Sequence
  Description of Artificial Sequence: Synthetic oligonucleotide
  Antisense strand to SEQ ID NO: 1734771
acagcagucagauuuccuc

SEQ ID NO: 1734773 - RNA, 19 nt, Artificial Sequence
  Description of Artificial Sequence: Synthetic oligonucleotide
  Sense strand starting at position 3625 of SEQ ID NO: 1562267
guguguugggaagaggauu

SEQ ID NO: 1734774 - RNA, 19 nt, Artificial Sequence
  Description of Artificial Sequence: Synthetic oligonucleotide
  Antisense strand to SEQ ID NO: 1734773
aauccucuucccaacacac

SEQ ID NO: 1734775 - RNA, 19 nt, Artificial Sequence
  Description of Artificial Sequence: Synthetic oligonucleotide
  Sense strand starting at position 3692 of SEQ ID NO: 1562267
gugccugauggcuggagau

SEQ ID NO: 1734776 - RNA, 19 nt, Artificial Sequence
  Description of Artificial Sequence: Synthetic oligonucleotide
  Antisense strand to SEQ ID NO: 1734775
aucuccagccaucaggcac

SEQ ID NO: 1734777 - RNA, 19 nt, Artificial Sequence
  Description of Artificial Sequence: Synthetic oligonucleotide
  Sense strand starting at position 3829 of SEQ ID NO: 1562267
gggugccugcaaugacaua

SEQ ID NO: 1734778 - RNA, 19 nt, Artificial Sequence
  Description of Artificial Sequence: Synthetic oligonucleotide
  Antisense strand to SEQ ID NO: 1734777
uaugucauugcaggcaccc

SEQ ID NO: 1734779 - RNA, 19 nt, Artificial Sequence
  Description of Artificial Sequence: Synthetic oligonucleotide
  Sense strand starting at position 3878 of SEQ ID NO: 1562267
ccaggaaugugcccagaau

SEQ ID NO: 1734780 - RNA, 19 nt, Artificial Sequence
  Description of Artificial Sequence: Synthetic oligonucleotide
  Antisense strand to SEQ ID NO: 1734779
auucugggcacauuccugg

SEQ ID NO: 1734781 - RNA, 19 nt, Artificial Sequence
  Description of Artificial Sequence: Synthetic oligonucleotide
  Sense strand starting at position 3879 of SEQ ID NO: 1562267
caggaaugugcccagaauu

SEQ ID NO: 1734782 - RNA, 19 nt, Artificial Sequence
  Description of Artificial Sequence: Synthetic oligonucleotide
  Antisense strand to SEQ ID NO: 1734781
aauucugggcacauuccug

SEQ ID NO: 1734783 - RNA, 19 nt, Artificial Sequence
  Description of Artificial Sequence: Synthetic oligonucleotide
  Sense strand starting at position 3931 of SEQ ID NO: 1562267
ccaguucucugcccgaaga

SEQ ID NO: 1734784 - RNA, 19 nt, Artificial Sequence
  Description of Artificial Sequence: Synthetic oligonucleotide
  Antisense strand to SEQ ID NO: 1734783
ucuucgggcagagaacugg

SEQ ID NO: 1734785 - RNA, 19 nt, Artificial Sequence
  Description of Artificial Sequence: Synthetic oligonucleotide
  Sense strand starting at position 3932 of SEQ ID NO: 1562267
caguucucugcccgaagau

SEQ ID NO: 1734786 - RNA, 19 nt, Artificial Sequence
  Description of Artificial Sequence: Synthetic oligonucleotide
  Antisense strand to SEQ ID NO: 1734785
aucuucgggcagagaacug

SEQ ID NO: 1734787 - RNA, 19 nt, Artificial Sequence
  Description of Artificial Sequence: Synthetic oligonucleotide
  Sense strand starting at position 3933 of SEQ ID NO: 1562267
aguucucugcccgaagauu

SEQ ID NO: 1734788 - RNA, 19 nt, Artificial Sequence
  Description of Artificial Sequence: Synthetic oligonucleotide
  Antisense strand to SEQ ID NO: 1734787
aaucuucgggcagagaacu

SEQ ID NO: 1734789 - RNA, 19 nt, Artificial Sequence
  Description of Artificial Sequence: Synthetic oligonucleotide
  Sense strand starting at position 3945 of SEQ ID NO: 1562267
gaagauuuaugcgggauug

SEQ ID NO: 1734790 - RNA, 19 nt, Artificial Sequence
  Description of Artificial Sequence: Synthetic oligonucleotide
  Antisense strand to SEQ ID NO: 1734789
caaucccgcauaaaucuuc

SEQ ID NO: 1734791 - RNA, 19 nt, Artificial Sequence
  Description of Artificial Sequence: Synthetic oligonucleotide
  Sense strand starting at position 257 of SEQ ID NO: 1562268
ggcgacugcccagaagaaa

SEQ ID NO: 1734792 - RNA, 19 nt, Artificial Sequence
  Description of Artificial Sequence: Synthetic oligonucleotide
  Antisense strand to SEQ ID NO: 1734791
uuucuucugggcagucgcc

SEQ ID NO: 1734793 - RNA, 19 nt, Artificial Sequence
  Description of Artificial Sequence: Synthetic oligonucleotide
  Sense strand starting at position 285 of SEQ ID NO: 1562268
gcaucauacccugaacuga

SEQ ID NO: 1734794 - RNA, 19 nt, Artificial Sequence
  Description of Artificial Sequence: Synthetic oligonucleotide
  Antisense strand to SEQ ID NO: 1734793
ucaguucaggguaugaugc

SEQ ID NO: 1734795 - RNA, 19 nt, Artificial Sequence
  Description of Artificial Sequence: Synthetic oligonucleotide
  Sense strand starting at position 530 of SEQ ID NO: 1562268
gcuuaagauccugguaucu

SEQ ID NO: 1734796 - RNA, 19 nt, Artificial Sequence
  Description of Artificial Sequence: Synthetic oligonucleotide
  Antisense strand to SEQ ID NO: 1734795
agauaccaggaucuuaagc

SEQ ID NO: 1734797 - RNA, 19 nt, Artificial Sequence
  Description of Artificial Sequence: Synthetic oligonucleotide
  Sense strand starting at position 552 of SEQ ID NO: 1562268
aagggcucuuuguuuauga

SEQ ID NO: 1734798 - RNA, 19 nt, Artificial Sequence
  Description of Artificial Sequence: Synthetic oligonucleotide
  Antisense strand to SEQ ID NO: 1734797
ucauaaacaaagagcccuu

SEQ ID NO: 1734799 - RNA, 19 nt, Artificial Sequence
  Description of Artificial Sequence: Synthetic oligonucleotide
  Sense strand starting at position 554 of SEQ ID NO: 1562268
gggcucuuuguuuaugacu

SEQ ID NO: 1734800 - RNA, 19 nt, Artificial Sequence
  Description of Artificial Sequence: Synthetic oligonucleotide
  Antisense strand to SEQ ID NO: 1734799
agucauaaacaaagagccc

SEQ ID NO: 1734801 - RNA, 19 nt, Artificial Sequence
  Description of Artificial Sequence: Synthetic oligonucleotide
  Sense strand starting at position 562 of SEQ ID NO: 1562268
uguuuaugacuuggccaga

SEQ ID NO: 1734802 - RNA, 19 nt, Artificial Sequence
  Description of Artificial Sequence: Synthetic oligonucleotide
  Antisense strand to SEQ ID NO: 1734801
ucuggccaagucauaaaca

SEQ ID NO: 1734803 - RNA, 19 nt, Artificial Sequence
  Description of Artificial Sequence: Synthetic oligonucleotide
  Sense strand starting at position 563 of SEQ ID NO: 1562268
guuuaugacuuggccagaa

SEQ ID NO: 1734804 - RNA, 19 nt, Artificial Sequence
  Description of Artificial Sequence: Synthetic oligonucleotide
  Antisense strand to SEQ ID NO: 1734803
uucuggccaagucauaaac

SEQ ID NO: 1734805 - RNA, 19 nt, Artificial Sequence
  Description of Artificial Sequence: Synthetic oligonucleotide
  Sense strand starting at position 565 of SEQ ID NO: 1562268
uuaugacuuggccagaauu

SEQ ID NO: 1734806 - RNA, 19 nt, Artificial Sequence
  Description of Artificial Sequence: Synthetic oligonucleotide
  Antisense strand to SEQ ID NO: 1734805
aauucuggccaagucauaa

SEQ ID NO: 1734807 - RNA, 19 nt, Artificial Sequence
  Description of Artificial Sequence: Synthetic oligonucleotide
  Sense strand starting at position 699 of SEQ ID NO: 1562268
uugcuuucagggugggaca

SEQ ID NO: 1734808 - RNA, 19 nt, Artificial Sequence
  Description of Artificial Sequence: Synthetic oligonucleotide
  Antisense strand to SEQ ID NO: 1734807
ugucccacccugaaagcaa

SEQ ID NO: 1734809 - RNA, 19 nt, Artificial Sequence
  Description of Artificial Sequence: Synthetic oligonucleotide
  Sense strand starting at position 712 of SEQ ID NO: 1562268
gggacagcugugcaugaau

SEQ ID NO: 1734810 - RNA, 19 nt, Artificial Sequence
  Description of Artificial Sequence: Synthetic oligonucleotide
  Antisense strand to SEQ ID NO: 1734809
auucaugcacagcuguccc

SEQ ID NO: 1734811 - RNA, 19 nt, Artificial Sequence
  Description of Artificial Sequence: Synthetic oligonucleotide
  Sense strand starting at position 715 of SEQ ID NO: 1562268
acagcugugcaugaauaga

SEQ ID NO: 1734812 - RNA, 19 nt, Artificial Sequence
  Description of Artificial Sequence: Synthetic oligonucleotide
  Antisense strand to SEQ ID NO: 1734811
ucuauucaugcacagcugu

SEQ ID NO: 1734813 - RNA, 19 nt, Artificial Sequence
  Description of Artificial Sequence: Synthetic oligonucleotide
  Sense strand starting at position 829 of SEQ ID NO: 1562268
cugucuccacgugauaaca

SEQ ID NO: 1734814 - RNA, 19 nt, Artificial Sequence
  Description of Artificial Sequence: Synthetic oligonucleotide
  Antisense strand to SEQ ID NO: 1734813
uguuaucacguggagacag

SEQ ID NO: 1734815 - RNA, 19 nt, Artificial Sequence
  Description of Artificial Sequence: Synthetic oligonucleotide
  Sense strand starting at position 837 of SEQ ID NO: 1562268
acgugauaacaagacaguu

SEQ ID NO: 1734816 - RNA, 19 nt, Artificial Sequence
  Description of Artificial Sequence: Synthetic oligonucleotide
  Antisense strand to SEQ ID NO: 1734815
aacugucuuguuaucacgu

SEQ ID NO: 1734817 - RNA, 19 nt, Artificial Sequence
  Description of Artificial Sequence: Synthetic oligonucleotide
  Sense strand starting at position 1145 of SEQ ID NO: 1562268
ccaaguguugcccaaagau

SEQ ID NO: 1734818 - RNA, 19 nt, Artificial Sequence
  Description of Artificial Sequence: Synthetic oligonucleotide
  Antisense strand to SEQ ID NO: 1734817
aucuuugggcaacacuugg

SEQ ID NO: 1734819 - RNA, 19 nt, Artificial Sequence
  Description of Artificial Sequence: Synthetic oligonucleotide
  Sense strand starting at position 1220 of SEQ ID NO: 1562268
cugccucuucuacguagaa

SEQ ID NO: 1734820 - RNA, 19 nt, Artificial Sequence
  Description of Artificial Sequence: Synthetic oligonucleotide
  Antisense strand to SEQ ID NO: 1734819
uucuacguagaagaggcag

SEQ ID NO: 1734821 - RNA, 19 nt, Artificial Sequence
  Description of Artificial Sequence: Synthetic oligonucleotide
  Sense strand starting at position 1390 of SEQ ID NO: 1562268
ccguauguucuacaguaac

SEQ ID NO: 1734822 - RNA, 19 nt, Artificial Sequence
  Description of Artificial Sequence: Synthetic oligonucleotide
  Antisense strand to SEQ ID NO: 1734821
guuacuguagaacauacgg

SEQ ID NO: 1734823 - RNA, 19 nt, Artificial Sequence
  Description of Artificial Sequence: Synthetic oligonucleotide
  Sense strand starting at position 1401 of SEQ ID NO: 1562268
acaguaaccuguuuggaau

SEQ ID NO: 1734824 - RNA, 19 nt, Artificial Sequence
  Description of Artificial Sequence: Synthetic oligonucleotide
  Antisense strand to SEQ ID NO: 1734823
auuccaaacagguuacugu

SEQ ID NO: 1734825 - RNA, 19 nt, Artificial Sequence
  Description of Artificial Sequence: Synthetic oligonucleotide
  Sense strand starting at position 1402 of SEQ ID NO: 1562268
caguaaccuguuuggaauc

SEQ ID NO: 1734826 - RNA, 19 nt, Artificial Sequence
  Description of Artificial Sequence: Synthetic oligonucleotide
  Antisense strand to SEQ ID NO: 1734825
gauuccaaacagguuacug

SEQ ID NO: 1734827 - RNA, 19 nt, Artificial Sequence
  Description of Artificial Sequence: Synthetic oligonucleotide
  Sense strand starting at position 1415 of SEQ ID NO: 1562268
ggaaucauaggaugcaguu

SEQ ID NO: 1734828 - RNA, 19 nt, Artificial Sequence
  Description of Artificial Sequence: Synthetic oligonucleotide
  Antisense strand to SEQ ID NO: 1734827
aacugcauccuaugauucc

SEQ ID NO: 1734829 - RNA, 19 nt, Artificial Sequence
  Description of Artificial Sequence: Synthetic oligonucleotide
  Sense strand starting at position 1421 of SEQ ID NO: 1562268
auaggaugcaguugucaca

SEQ ID NO: 1734830 - RNA, 19 nt, Artificial Sequence
  Description of Artificial Sequence: Synthetic oligonucleotide
  Antisense strand to SEQ ID NO: 1734829
ugugacaacugcauccuau

SEQ ID NO: 1734831 - RNA, 19 nt, Artificial Sequence
  Description of Artificial Sequence: Synthetic oligonucleotide
  Sense strand starting at position 1496 of SEQ ID NO: 1562268
gagguaacugucggucaaa

SEQ ID NO: 1734832 - RNA, 19 nt, Artificial Sequence
  Description of Artificial Sequence: Synthetic oligonucleotide
  Antisense strand to SEQ ID NO: 1734831
uuugaccgacaguuaccuc

SEQ ID NO: 1734833 - RNA, 19 nt, Artificial Sequence
  Description of Artificial Sequence: Synthetic oligonucleotide
  Sense strand starting at position 1497 of SEQ ID NO: 1562268
agguaacugucggucaaau

SEQ ID NO: 1734834 - RNA, 19 nt, Artificial Sequence
  Description of Artificial Sequence: Synthetic oligonucleotide
  Antisense strand to SEQ ID NO: 1734833
auuugaccgacaguuaccu

SEQ ID NO: 1734835 - RNA, 19 nt, Artificial Sequence
  Description of Artificial Sequence: Synthetic oligonucleotide
  Sense strand starting at position 1625 of SEQ ID NO: 1562268
aaguaauaucaggguagua

SEQ ID NO: 1734836 - RNA, 19 nt, Artificial Sequence
  Description of Artificial Sequence: Synthetic oligonucleotide
  Antisense strand to SEQ ID NO: 1734835
uacuacccugauauuacuu

SEQ ID NO: 1734837 - RNA, 19 nt, Artificial Sequence
  Description of Artificial Sequence: Synthetic oligonucleotide
  Sense strand starting at position 1627 of SEQ ID NO: 1562268
guaauaucaggguaguaac

SEQ ID NO: 1734838 - RNA, 19 nt, Artificial Sequence
  Description of Artificial Sequence: Synthetic oligonucleotide
  Antisense strand to SEQ ID NO: 1734837
guuacuacccugauauuac

SEQ ID NO: 1734839 - RNA, 19 nt, Artificial Sequence
  Description of Artificial Sequence: Synthetic oligonucleotide
  Sense strand starting at position 1651 of SEQ ID NO: 1562268
agauacacggcguggaaua

SEQ ID NO: 1734840 - RNA, 19 nt, Artificial Sequence
  Description of Artificial Sequence: Synthetic oligonucleotide
  Antisense strand to SEQ ID NO: 1734839
uauuccacgccguguaucu

SEQ ID NO: 1734841 - RNA, 19 nt, Artificial Sequence
  Description of Artificial Sequence: Synthetic oligonucleotide
  Sense strand starting at position 1713 of SEQ ID NO: 1562268
gugugcugggcguagacau

SEQ ID NO: 1734842 - RNA, 19 nt, Artificial Sequence
  Description of Artificial Sequence: Synthetic oligonucleotide
  Antisense strand to SEQ ID NO: 1734841
augucuacgcccagcacac

SEQ ID NO: 1734843 - RNA, 19 nt, Artificial Sequence
  Description of Artificial Sequence: Synthetic oligonucleotide
  Sense strand starting at position 1769 of SEQ ID NO: 1562268
gccugaugauugguuuguu

SEQ ID NO: 1734844 - RNA, 19 nt, Artificial Sequence
  Description of Artificial Sequence: Synthetic oligonucleotide
  Antisense strand to SEQ ID NO: 1734843
aacaaaccaaucaucaggc

SEQ ID NO: 1734845 - RNA, 19 nt, Artificial Sequence
  Description of Artificial Sequence: Synthetic oligonucleotide
  Sense strand starting at position 1772 of SEQ ID NO: 1562268
ugaugauugguuuguuguu

SEQ ID NO: 1734846 - RNA, 19 nt, Artificial Sequence
  Description of Artificial Sequence: Synthetic oligonucleotide
  Antisense strand to SEQ ID NO: 1734845
aacaacaaaccaaucauca

SEQ ID NO: 1734847 - RNA, 19 nt, Artificial Sequence
  Description of Artificial Sequence: Synthetic oligonucleotide
  Sense strand starting at position 1782 of SEQ ID NO: 1562268
uuuguuguuuguuccuaau

SEQ ID NO: 1734848 - RNA, 19 nt, Artificial Sequence
  Description of Artificial Sequence: Synthetic oligonucleotide
  Antisense strand to SEQ ID NO: 1734847
auuaggaacaaacaacaaa

SEQ ID NO: 1734849 - RNA, 19 nt, Artificial Sequence
  Description of Artificial Sequence: Synthetic oligonucleotide
  Sense strand starting at position 1815 of SEQ ID NO: 1562268
aagggagauuccugaccac

SEQ ID NO: 1734850 - RNA, 19 nt, Artificial Sequence
  Description of Artificial Sequence: Synthetic oligonucleotide
  Antisense strand to SEQ ID NO: 1734849
guggucaggaaucucccuu

SEQ ID NO: 1734851 - RNA, 19 nt, Artificial Sequence
  Description of Artificial Sequence: Synthetic oligonucleotide
  Sense strand starting at position 2514 of SEQ ID NO: 1562268
cgagcuugcgagucuuugu

SEQ ID NO: 1734852 - RNA, 19 nt, Artificial Sequence
  Description of Artificial Sequence: Synthetic oligonucleotide
  Antisense strand to SEQ ID NO: 1734851
acaaagacucgcaagcucg

SEQ ID NO: 1734853 - RNA, 19 nt, Artificial Sequence
  Description of Artificial Sequence: Synthetic oligonucleotide
  Sense strand starting at position 2535 of SEQ ID NO: 1562268
guuuccugcucuccuugaa

SEQ ID NO: 1734854 - RNA, 19 nt, Artificial Sequence
  Description of Artificial Sequence: Synthetic oligonucleotide
  Antisense strand to SEQ ID NO: 1734853
uucaaggagagcaggaaac

SEQ ID NO: 1734855 - RNA, 19 nt, Artificial Sequence
  Description of Artificial Sequence: Synthetic oligonucleotide
  Sense strand starting at position 3345 of SEQ ID NO: 1562268
ugcuaagugcuggguuaca

SEQ ID NO: 1734856 - RNA, 19 nt, Artificial Sequence
  Description of Artificial Sequence: Synthetic oligonucleotide
  Antisense strand to SEQ ID NO: 1734855
uguaacccagcacuuagca

SEQ ID NO: 1734857 - RNA, 19 nt, Artificial Sequence
  Description of Artificial Sequence: Synthetic oligonucleotide
  Sense strand starting at position 3473 of SEQ ID NO: 1562268
ggaacuguauaaggaauaa

SEQ ID NO: 1734858 - RNA, 19 nt, Artificial Sequence
  Description of Artificial Sequence: Synthetic oligonucleotide
  Antisense strand to SEQ ID NO: 1734857
uuauuccuuauacaguucc

SEQ ID NO: 1734859 - RNA, 19 nt, Artificial Sequence
  Description of Artificial Sequence: Synthetic oligonucleotide
  Sense strand starting at position 3523 of SEQ ID NO: 1562268
uggaauaucagauggucca

SEQ ID NO: 1734860 - RNA, 19 nt, Artificial Sequence
  Description of Artificial Sequence: Synthetic oligonucleotide
  Antisense strand to SEQ ID NO: 1734859
uggaccaucugauauucca

SEQ ID NO: 1734861 - RNA, 19 nt, Artificial Sequence
  Description of Artificial Sequence: Synthetic oligonucleotide
  Sense strand starting at position 3575 of SEQ ID NO: 1562268
gccauuuccugguauccau

SEQ ID NO: 1734862 - RNA, 19 nt, Artificial Sequence
  Description of Artificial Sequence: Synthetic oligonucleotide
  Antisense strand to SEQ ID NO: 1734861
auggauaccaggaaauggc

SEQ ID NO: 1734863 - RNA, 19 nt, Artificial Sequence
  Description of Artificial Sequence: Synthetic oligonucleotide
  Sense strand starting at position 3582 of SEQ ID NO: 1562268
ccugguauccauggugaca

SEQ ID NO: 1734864 - RNA, 19 nt, Artificial Sequence
  Description of Artificial Sequence: Synthetic oligonucleotide
  Antisense strand to SEQ ID NO: 1734863
ugucaccauggauaccagg

SEQ ID NO: 1734865 - RNA, 19 nt, Artificial Sequence
  Description of Artificial Sequence: Synthetic oligonucleotide
  Sense strand starting at position 3602 of SEQ ID NO: 1562268
ggaauucuuuacucccagu

SEQ ID NO: 1734866 - RNA, 19 nt, Artificial Sequence
  Description of Artificial Sequence: Synthetic oligonucleotide
  Antisense strand to SEQ ID NO: 1734865
acugggaguaaagaauucc

SEQ ID NO: 1734867 - RNA, 19 nt, Artificial Sequence
  Description of Artificial Sequence: Synthetic oligonucleotide
  Sense strand starting at position 3840 of SEQ ID NO: 1562268
gcucaaaucgaaggagaga

SEQ ID NO: 1734868 - RNA, 19 nt, Artificial Sequence
  Description of Artificial Sequence: Synthetic oligonucleotide
  Antisense strand to SEQ ID NO: 1734867
ucucuccuucgauuugagc

SEQ ID NO: 1734869 - RNA, 19 nt, Artificial Sequence
  Description of Artificial Sequence: Synthetic oligonucleotide
  Sense strand starting at position 3860 of SEQ ID NO: 1562268
aggagacacgguuaugagu

SEQ ID NO: 1734870 - RNA, 19 nt, Artificial Sequence
  Description of Artificial Sequence: Synthetic oligonucleotide
  Antisense strand to SEQ ID NO: 1734869
acucauaaccgugucuccu

SEQ ID NO: 1734871 - RNA, 19 nt, Artificial Sequence
  Description of Artificial Sequence: Synthetic oligonucleotide
  Sense strand starting at position 156 of SEQ ID NO: 1562269
agauuaacucaggguagcu

SEQ ID NO: 1734872 - RNA, 19 nt, Artificial Sequence
  Description of Artificial Sequence: Synthetic oligonucleotide
  Antisense strand to SEQ ID NO: 1734871
agcuacccugaguuaaucu

SEQ ID NO: 1734873 - RNA, 19 nt, Artificial Sequence
  Description of Artificial Sequence: Synthetic oligonucleotide
  Sense strand starting at position 358 of SEQ ID NO: 1562269
ugagcacucaagggaucua

SEQ ID NO: 1734874 - RNA, 19 nt, Artificial Sequence
  Description of Artificial Sequence: Synthetic oligonucleotide
  Antisense strand to SEQ ID NO: 1734873
uagaucccuugagugcuca

SEQ ID NO: 1734875 - RNA, 19 nt, Artificial Sequence
  Description of Artificial Sequence: Synthetic oligonucleotide
  Sense strand starting at position 566 of SEQ ID NO: 1562269
gcaagugacaguuaagcua

SEQ ID NO: 1734876 - RNA, 19 nt, Artificial Sequence
  Description of Artificial Sequence: Synthetic oligonucleotide
  Antisense strand to SEQ ID NO: 1734875
uagcuuaacugucacuugc

SEQ ID NO: 1734877 - RNA, 19 nt, Artificial Sequence
  Description of Artificial Sequence: Synthetic oligonucleotide
  Sense strand starting at position 1116 of SEQ ID NO: 1562269
uugaaucaucccgaaagca

SEQ ID NO: 1734878 - RNA, 19 nt, Artificial Sequence
  Description of Artificial Sequence: Synthetic oligonucleotide
  Antisense strand to SEQ ID NO: 1734877
ugcuuucgggaugauucaa

SEQ ID NO: 1734879 - RNA, 19 nt, Artificial Sequence
  Description of Artificial Sequence: Synthetic oligonucleotide
  Sense strand starting at position 1219 of SEQ ID NO: 1562269
auaugaagacugcacguaa

SEQ ID NO: 1734880 - RNA, 19 nt, Artificial Sequence
  Description of Artificial Sequence: Synthetic oligonucleotide
  Antisense strand to SEQ ID NO: 1734879
uuacgugcagucuucauau

SEQ ID NO: 1734881 - RNA, 19 nt, Artificial Sequence
  Description of Artificial Sequence: Synthetic oligonucleotide
  Sense strand starting at position 1284 of SEQ ID NO: 1562269
ugcccaacacuugaucaga

SEQ ID NO: 1734882 - RNA, 19 nt, Artificial Sequence
  Description of Artificial Sequence: Synthetic oligonucleotide
  Antisense strand to SEQ ID NO: 1734881
ucugaucaaguguugggca

SEQ ID NO: 1734883 - RNA, 19 nt, Artificial Sequence
  Description of Artificial Sequence: Synthetic oligonucleotide
  Sense strand starting at position 1359 of SEQ ID NO: 1562269
gcuucucuggagggaucua

SEQ ID NO: 1734884 - RNA, 19 nt, Artificial Sequence
  Description of Artificial Sequence: Synthetic oligonucleotide
  Antisense strand to SEQ ID NO: 1734883
uagaucccuccagagaagc

SEQ ID NO: 1734885 - RNA, 19 nt, Artificial Sequence
  Description of Artificial Sequence: Synthetic oligonucleotide
  Sense strand starting at position 1662 of SEQ ID NO: 1562269
gucugacugguauagguca

SEQ ID NO: 1734886 - RNA, 19 nt, Artificial Sequence
  Description of Artificial Sequence: Synthetic oligonucleotide
  Antisense strand to SEQ ID NO: 1734885
ugaccuauaccagucagac

SEQ ID NO: 1734887 - RNA, 19 nt, Artificial Sequence
  Description of Artificial Sequence: Synthetic oligonucleotide
  Sense strand starting at position 1676 of SEQ ID NO: 1562269
ggucacagauacuuuacau

SEQ ID NO: 1734888 - RNA, 19 nt, Artificial Sequence
  Description of Artificial Sequence: Synthetic oligonucleotide
  Antisense strand to SEQ ID NO: 1734887
auguaaaguaucugugacc

SEQ ID NO: 1734889 - RNA, 19 nt, Artificial Sequence
  Description of Artificial Sequence: Synthetic oligonucleotide
  Sense strand starting at position 1828 of SEQ ID NO: 1562269
gucagugacuuacccacaa

SEQ ID NO: 1734890 - RNA, 19 nt, Artificial Sequence
  Description of Artificial Sequence: Synthetic oligonucleotide
  Antisense strand to SEQ ID NO: 1734889
uuguggguaagucacugac

SEQ ID NO: 1734891 - RNA, 19 nt, Artificial Sequence
  Description of Artificial Sequence: Synthetic oligonucleotide
  Sense strand starting at position 2055 of SEQ ID NO: 1562269
guaauaauauugccuaaug

SEQ ID NO: 1734892 - RNA, 19 nt, Artificial Sequence
  Description of Artificial Sequence: Synthetic oligonucleotide
  Antisense strand to SEQ ID NO: 1734891
cauuaggcaauauuauuac

SEQ ID NO: 1734893 - RNA, 19 nt, Artificial Sequence
  Description of Artificial Sequence: Synthetic oligonucleotide
  Sense strand starting at position 2095 of SEQ ID NO: 1562269
ggaagugagcaggguuacu

SEQ ID NO: 1734894 - RNA, 19 nt, Artificial Sequence
  Description of Artificial Sequence: Synthetic oligonucleotide
  Antisense strand to SEQ ID NO: 1734893
aguaacccugcucacuucc

SEQ ID NO: 1734895 - RNA, 19 nt, Artificial Sequence
  Description of Artificial Sequence: Synthetic oligonucleotide
  Sense strand starting at position 2160 of SEQ ID NO: 1562269
ccuaguaccuguccacaga

SEQ ID NO: 1734896 - RNA, 19 nt, Artificial Sequence
  Description of Artificial Sequence: Synthetic oligonucleotide
  Antisense strand to SEQ ID NO: 1734895
ucuguggacagguacuagg

SEQ ID NO: 1734897 - RNA, 19 nt, Artificial Sequence
  Description of Artificial Sequence: Synthetic oligonucleotide
  Sense strand starting at position 2161 of SEQ ID NO: 1562269
cuaguaccuguccacagaa

SEQ ID NO: 1734898 - RNA, 19 nt, Artificial Sequence
  Description of Artificial Sequence: Synthetic oligonucleotide
  Antisense strand to SEQ ID NO: 1734897
uucuguggacagguacuag

SEQ ID NO: 1734899 - RNA, 19 nt, Artificial Sequence
  Description of Artificial Sequence: Synthetic oligonucleotide
  Sense strand starting at position 2218 of SEQ ID NO: 1562269
gucagauuauaaguuguac

SEQ ID NO: 1734900 - RNA, 19 nt, Artificial Sequence
  Description of Artificial Sequence: Synthetic oligonucleotide
  Antisense strand to SEQ ID NO: 1734899
guacaacuuauaaucugac

SEQ ID NO: 1734901 - RNA, 19 nt, Artificial Sequence
  Description of Artificial Sequence: Synthetic oligonucleotide
  Sense strand starting at position 2231 of SEQ ID NO: 1562269
uuguacauucgugaacaua

SEQ ID NO: 1734902 - RNA, 19 nt, Artificial Sequence
  Description of Artificial Sequence: Synthetic oligonucleotide
  Antisense strand to SEQ ID NO: 1734901
uauguucacgaauguacaa

SEQ ID NO: 1734903 - RNA, 19 nt, Artificial Sequence
  Description of Artificial Sequence: Synthetic oligonucleotide
  Sense strand starting at position 2298 of SEQ ID NO: 1562269
cugaaauuccuccaggucu

SEQ ID NO: 1734904 - RNA, 19 nt, Artificial Sequence
  Description of Artificial Sequence: Synthetic oligonucleotide
  Antisense strand to SEQ ID NO: 1734903
agaccuggaggaauuucag

SEQ ID NO: 1734905 - RNA, 19 nt, Artificial Sequence
  Description of Artificial Sequence: Synthetic oligonucleotide
  Sense strand starting at position 2309 of SEQ ID NO: 1562269
ccaggucuacaguguaaua

SEQ ID NO: 1734906 - RNA, 19 nt, Artificial Sequence
  Description of Artificial Sequence: Synthetic oligonucleotide
  Antisense strand to SEQ ID NO: 1734905
uauuacacuguagaccugg

SEQ ID NO: 1734907 - RNA, 19 nt, Artificial Sequence
  Description of Artificial Sequence: Synthetic oligonucleotide
  Sense strand starting at position 2311 of SEQ ID NO: 1562269
aggucuacaguguaauagu

SEQ ID NO: 1734908 - RNA, 19 nt, Artificial Sequence
  Description of Artificial Sequence: Synthetic oligonucleotide
  Antisense strand to SEQ ID NO: 1734907
acuauuacacuguagaccu

SEQ ID NO: 1734909 - RNA, 19 nt, Artificial Sequence
  Description of Artificial Sequence: Synthetic oligonucleotide
  Sense strand starting at position 2346 of SEQ ID NO: 1562269
uuucgucuagauuaacuuu

SEQ ID NO: 1734910 - RNA, 19 nt, Artificial Sequence
  Description of Artificial Sequence: Synthetic oligonucleotide
  Antisense strand to SEQ ID NO: 1734909
aaaguuaaucuagacgaaa

SEQ ID NO: 1734911 - RNA, 19 nt, Artificial Sequence
  Description of Artificial Sequence: Synthetic oligonucleotide
  Sense strand starting at position 2349 of SEQ ID NO: 1562269
cgucuagauuaacuuuaau

SEQ ID NO: 1734912 - RNA, 19 nt, Artificial Sequence
  Description of Artificial Sequence: Synthetic oligonucleotide
  Antisense strand to SEQ ID NO: 1734911
auuaaaguuaaucuagacg

SEQ ID NO: 1734913 - RNA, 19 nt, Artificial Sequence
  Description of Artificial Sequence: Synthetic oligonucleotide
  Sense strand starting at position 2396 of SEQ ID NO: 1562269
ugauuauugcagcaaagug

SEQ ID NO: 1734914 - RNA, 19 nt, Artificial Sequence
  Description of Artificial Sequence: Synthetic oligonucleotide
  Antisense strand to SEQ ID NO: 1734913
cacuuugcugcaauaauca

SEQ ID NO: 1734915 - RNA, 19 nt, Artificial Sequence
  Description of Artificial Sequence: Synthetic oligonucleotide
  Sense strand starting at position 2416 of SEQ ID NO: 1562269
gggaaagugagcuggugaa

SEQ ID NO: 1734916 - RNA, 19 nt, Artificial Sequence
  Description of Artificial Sequence: Synthetic oligonucleotide
  Antisense strand to SEQ ID NO: 1734915
uucaccagcucacuuuccc

SEQ ID NO: 1734917 - RNA, 19 nt, Artificial Sequence
  Description of Artificial Sequence: Synthetic oligonucleotide
  Sense strand starting at position 2428 of SEQ ID NO: 1562269
uggugaagccucugagauc

SEQ ID NO: 1734918 - RNA, 19 nt, Artificial Sequence
  Description of Artificial Sequence: Synthetic oligonucleotide
  Antisense strand to SEQ ID NO: 1734917
gaucucagaggcuucacca

SEQ ID NO: 1734919 - RNA, 19 nt, Artificial Sequence
  Description of Artificial Sequence: Synthetic oligonucleotide
  Sense strand starting at position 2493 of SEQ ID NO: 1562269
uggaaugaaggcuguauua

SEQ ID NO: 1734920 - RNA, 19 nt, Artificial Sequence
  Description of Artificial Sequence: Synthetic oligonucleotide
  Antisense strand to SEQ ID NO: 1734919
uaauacagccuucauucca

SEQ ID NO: 1734921 - RNA, 19 nt, Artificial Sequence
  Description of Artificial Sequence: Synthetic oligonucleotide
  Sense strand starting at position 2521 of SEQ ID NO: 1562269
ugcugagaagucuauccau

SEQ ID NO: 1734922 - RNA, 19 nt, Artificial Sequence
  Description of Artificial Sequence: Synthetic oligonucleotide
  Antisense strand to SEQ ID NO: 1734921
auggauagacuucucagca

SEQ ID NO: 1734923 - RNA, 19 nt, Artificial Sequence
  Description of Artificial Sequence: Synthetic oligonucleotide
  Sense strand starting at position 2524 of SEQ ID NO: 1562269
ugagaagucuauccauuaa

SEQ ID NO: 1734924 - RNA, 19 nt, Artificial Sequence
  Description of Artificial Sequence: Synthetic oligonucleotide
  Antisense strand to SEQ ID NO: 1734923
uuaauggauagacuucuca

SEQ ID NO: 1734925 - RNA, 19 nt, Artificial Sequence
  Description of Artificial Sequence: Synthetic oligonucleotide
  Sense strand starting at position 2746 of SEQ ID NO: 1562269
uucuguaaagucugaugaa

SEQ ID NO: 1734926 - RNA, 19 nt, Artificial Sequence
  Description of Artificial Sequence: Synthetic oligonucleotide
  Antisense strand to SEQ ID NO: 1734925
uucaucagacuuuacagaa

SEQ ID NO: 1734927 - RNA, 19 nt, Artificial Sequence
  Description of Artificial Sequence: Synthetic oligonucleotide
  Sense strand starting at position 2813 of SEQ ID NO: 1562269
gaccauuugcauuguguaa

SEQ ID NO: 1734928 - RNA, 19 nt, Artificial Sequence
  Description of Artificial Sequence: Synthetic oligonucleotide
  Antisense strand to SEQ ID NO: 1734927
uuacacaaugcaaaugguc

SEQ ID NO: 1734929 - RNA, 19 nt, Artificial Sequence
  Description of Artificial Sequence: Synthetic oligonucleotide
  Sense strand starting at position 3134 of SEQ ID NO: 1562269
ugucucuugguggauacaa

SEQ ID NO: 1734930 - RNA, 19 nt, Artificial Sequence
  Description of Artificial Sequence: Synthetic oligonucleotide
  Antisense strand to SEQ ID NO: 1734929
uuguauccaccaagagaca

SEQ ID NO: 1734931 - RNA, 19 nt, Artificial Sequence
  Description of Artificial Sequence: Synthetic oligonucleotide
  Sense strand starting at position 3183 of SEQ ID NO: 1562269
gagaaauugccagguuaug

SEQ ID NO: 1734932 - RNA, 19 nt, Artificial Sequence
  Description of Artificial Sequence: Synthetic oligonucleotide
  Antisense strand to SEQ ID NO: 1734931
cauaaccuggcaauuucuc

SEQ ID NO: 1734933 - RNA, 19 nt, Artificial Sequence
  Description of Artificial Sequence: Synthetic oligonucleotide
  Sense strand starting at position 3201 of SEQ ID NO: 1562269
gggacaagaaugugcuuaa

SEQ ID NO: 1734934 - RNA, 19 nt, Artificial Sequence
  Description of Artificial Sequence: Synthetic oligonucleotide
  Antisense strand to SEQ ID NO: 1734933
uuaagcacauucuuguccc

SEQ ID NO: 1734935 - RNA, 19 nt, Artificial Sequence
  Description of Artificial Sequence: Synthetic oligonucleotide
  Sense strand starting at position 3202 of SEQ ID NO: 1562269
ggacaagaaugugcuuaau

SEQ ID NO: 1734936 - RNA, 19 nt, Artificial Sequence
  Description of Artificial Sequence: Synthetic oligonucleotide
  Antisense strand to SEQ ID NO: 1734935
auuaagcacauucuugucc

SEQ ID NO: 1734937 - RNA, 19 nt, Artificial Sequence
  Description of Artificial Sequence: Synthetic oligonucleotide
  Sense strand starting at position 3350 of SEQ ID NO: 1562269
cucugauuggaaugugaug

SEQ ID NO: 1734938 - RNA, 19 nt, Artificial Sequence
  Description of Artificial Sequence: Synthetic oligonucleotide
  Antisense strand to SEQ ID NO: 1734937
caucacauuccaaucagag

SEQ ID NO: 1734939 - RNA, 19 nt, Artificial Sequence
  Description of Artificial Sequence: Synthetic oligonucleotide
  Sense strand starting at position 3352 of SEQ ID NO: 1562269
cugauuggaaugugaugau

SEQ ID NO: 1734940 - RNA, 19 nt, Artificial Sequence
  Description of Artificial Sequence: Synthetic oligonucleotide
  Antisense strand to SEQ ID NO: 1734939
aucaucacauuccaaucag

SEQ ID NO: 1734941 - RNA, 19 nt, Artificial Sequence
  Description of Artificial Sequence: Synthetic oligonucleotide
  Sense strand starting at position 3367 of SEQ ID NO: 1562269
ugaucauaucaucaaggcu

SEQ ID NO: 1734942 - RNA, 19 nt, Artificial Sequence
  Description of Artificial Sequence: Synthetic oligonucleotide
  Antisense strand to SEQ ID NO: 1734941
agccuugaugauaugauca

SEQ ID NO: 1734943 - RNA, 19 nt, Artificial Sequence
  Description of Artificial Sequence: Synthetic oligonucleotide
  Sense strand starting at position 3397 of SEQ ID NO: 1562269
uucuguacugauuaaugau

SEQ ID NO: 1734944 - RNA, 19 nt, Artificial Sequence
  Description of Artificial Sequence: Synthetic oligonucleotide
  Antisense strand to SEQ ID NO: 1734943
aucauuaaucaguacagaa

SEQ ID NO: 1734945 - RNA, 19 nt, Artificial Sequence
  Description of Artificial Sequence: Synthetic oligonucleotide
  Sense strand starting at position 3406 of SEQ ID NO: 1562269
gauuaaugaugugccacuu

SEQ ID NO: 1734946 - RNA, 19 nt, Artificial Sequence
  Description of Artificial Sequence: Synthetic oligonucleotide
  Antisense strand to SEQ ID NO: 1734945
aaguggcacaucauuaauc

SEQ ID NO: 1734947 - RNA, 19 nt, Artificial Sequence
  Description of Artificial Sequence: Synthetic oligonucleotide
  Sense strand starting at position 3455 of SEQ ID NO: 1562269
uaguauugguuuguagaau

SEQ ID NO: 1734948 - RNA, 19 nt, Artificial Sequence
  Description of Artificial Sequence: Synthetic oligonucleotide
  Antisense strand to SEQ ID NO: 1734947
auucuacaaaccaauacua

SEQ ID NO: 1734949 - RNA, 19 nt, Artificial Sequence
  Description of Artificial Sequence: Synthetic oligonucleotide
  Sense strand starting at position 3536 of SEQ ID NO: 1562269
gucuguaguuugccauuua

SEQ ID NO: 1734950 - RNA, 19 nt, Artificial Sequence
  Description of Artificial Sequence: Synthetic oligonucleotide
  Antisense strand to SEQ ID NO: 1734949
uaaauggcaaacuacagac

SEQ ID NO: 1734951 - RNA, 19 nt, Artificial Sequence
  Description of Artificial Sequence: Synthetic oligonucleotide
  Sense strand starting at position 12 of SEQ ID NO: 1562270
cacggaacgaguugaaaca

SEQ ID NO: 1734952 - RNA, 19 nt, Artificial Sequence
  Description of Artificial Sequence: Synthetic oligonucleotide
  Antisense strand to SEQ ID NO: 1734951
uguuucaacucguuccgug

SEQ ID NO: 1734953 - RNA, 19 nt, Artificial Sequence
  Description of Artificial Sequence: Synthetic oligonucleotide
  Sense strand starting at position 279 of SEQ ID NO: 1562270
agauuaacucaggguagcu

SEQ ID NO: 1734954 - RNA, 19 nt, Artificial Sequence
  Description of Artificial Sequence: Synthetic oligonucleotide
  Antisense strand to SEQ ID NO: 1734953
agcuacccugaguuaaucu

SEQ ID NO: 1734955 - RNA, 19 nt, Artificial Sequence
  Description of Artificial Sequence: Synthetic oligonucleotide
  Sense strand starting at position 481 of SEQ ID NO: 1562270
ugagcacucaagggaucua

SEQ ID NO: 1734956 - RNA, 19 nt, Artificial Sequence
  Description of Artificial Sequence: Synthetic oligonucleotide
  Antisense strand to SEQ ID NO: 1734955
uagaucccuugagugcuca

SEQ ID NO: 1734957 - RNA, 19 nt, Artificial Sequence
  Description of Artificial Sequence: Synthetic oligonucleotide
  Sense strand starting at position 689 of SEQ ID NO: 1562270
gcaagugacaguuaagcua

SEQ ID NO: 1734958 - RNA, 19 nt, Artificial Sequence
  Description of Artificial Sequence: Synthetic oligonucleotide
  Antisense strand to SEQ ID NO: 1734957
uagcuuaacugucacuugc

SEQ ID NO: 1734959 - RNA, 19 nt, Artificial Sequence
  Description of Artificial Sequence: Synthetic oligonucleotide
  Sense strand starting at position 1239 of SEQ ID NO: 1562270
uugaaucaucccgaaagca

SEQ ID NO: 1734960 - RNA, 19 nt, Artificial Sequence
  Description of Artificial Sequence: Synthetic oligonucleotide
  Antisense strand to SEQ ID NO: 1734959
ugcuuucgggaugauucaa

SEQ ID NO: 1734961 - RNA, 19 nt, Artificial Sequence
  Description of Artificial Sequence: Synthetic oligonucleotide
  Sense strand starting at position 1342 of SEQ ID NO: 1562270
auaugaagacugcacguaa

SEQ ID NO: 1734962 - RNA, 19 nt, Artificial Sequence
  Description of Artificial Sequence: Synthetic oligonucleotide
  Antisense strand to SEQ ID NO: 1734961
uuacgugcagucuucauau

SEQ ID NO: 1734963 - RNA, 19 nt, Artificial Sequence
  Description of Artificial Sequence: Synthetic oligonucleotide
  Sense strand starting at position 1407 of SEQ ID NO: 1562270
ugcccaacacuugaucaga

SEQ ID NO: 1734964 - RNA, 19 nt, Artificial Sequence
  Description of Artificial Sequence: Synthetic oligonucleotide
  Antisense strand to SEQ ID NO: 1734963
ucugaucaaguguugggca

SEQ ID NO: 1734965 - RNA, 19 nt, Artificial Sequence
  Description of Artificial Sequence: Synthetic oligonucleotide
  Sense strand starting at position 1482 of SEQ ID NO: 1562270
gcuucucuggagggaucua

SEQ ID NO: 1734966 - RNA, 19 nt, Artificial Sequence
  Description of Artificial Sequence: Synthetic oligonucleotide
  Antisense strand to SEQ ID NO: 1734965
uagaucccuccagagaagc

SEQ ID NO: 1734967 - RNA, 19 nt, Artificial Sequence
  Description of Artificial Sequence: Synthetic oligonucleotide
  Sense strand starting at position 1785 of SEQ ID NO: 1562270
gucugacugguauagguca

SEQ ID NO: 1734968 - RNA, 19 nt, Artificial Sequence
  Description of Artificial Sequence: Synthetic oligonucleotide
  Antisense strand to SEQ ID NO: 1734967
ugaccuauaccagucagac

SEQ ID NO: 1734969 - RNA, 19 nt, Artificial Sequence
  Description of Artificial Sequence: Synthetic oligonucleotide
  Sense strand starting at position 1799 of SEQ ID NO: 1562270
ggucacagauacuuuacau

SEQ ID NO: 1734970 - RNA, 19 nt, Artificial Sequence
  Description of Artificial Sequence: Synthetic oligonucleotide
  Antisense strand to SEQ ID NO: 1734969
auguaaaguaucugugacc

SEQ ID NO: 1734971 - RNA, 19 nt, Artificial Sequence
  Description of Artificial Sequence: Synthetic oligonucleotide
  Sense strand starting at position 1951 of SEQ ID NO: 1562270
gucagugacuuacccacaa

SEQ ID NO: 1734972 - RNA, 19 nt, Artificial Sequence
  Description of Artificial Sequence: Synthetic oligonucleotide
  Antisense strand to SEQ ID NO: 1734971
uuguggguaagucacugac

SEQ ID NO: 1734973 - RNA, 19 nt, Artificial Sequence
  Description of Artificial Sequence: Synthetic oligonucleotide
  Sense strand starting at position 2178 of SEQ ID NO: 1562270
guaauaauauugccuaaug

SEQ ID NO: 1734974 - RNA, 19 nt, Artificial Sequence
  Description of Artificial Sequence: Synthetic oligonucleotide
  Antisense strand to SEQ ID NO: 1734973
cauuaggcaauauuauuac

SEQ ID NO: 1734975 - RNA, 19 nt, Artificial Sequence
  Description of Artificial Sequence: Synthetic oligonucleotide
  Sense strand starting at position 2218 of SEQ ID NO: 1562270
ggaagugagcaggguuacu

SEQ ID NO: 1734976 - RNA, 19 nt, Artificial Sequence
  Description of Artificial Sequence: Synthetic oligonucleotide
  Antisense strand to SEQ ID NO: 1734975
aguaacccugcucacuucc

SEQ ID NO: 1734977 - RNA, 19 nt, Artificial Sequence
  Description of Artificial Sequence: Synthetic oligonucleotide
  Sense strand starting at position 2283 of SEQ ID NO: 1562270
ccuaguaccuguccacaga

SEQ ID NO: 1734978 - RNA, 19 nt, Artificial Sequence
  Description of Artificial Sequence: Synthetic oligonucleotide
  Antisense strand to SEQ ID NO: 1734977
ucuguggacagguacuagg

SEQ ID NO: 1734979 - RNA, 19 nt, Artificial Sequence
  Description of Artificial Sequence: Synthetic oligonucleotide
  Sense strand starting at position 2284 of SEQ ID NO: 1562270
cuaguaccuguccacagaa

SEQ ID NO: 1734980 - RNA, 19 nt, Artificial Sequence
  Description of Artificial Sequence: Synthetic oligonucleotide
  Antisense strand to SEQ ID NO: 1734979
uucuguggacagguacuag

SEQ ID NO: 1734981 - RNA, 19 nt, Artificial Sequence
  Description of Artificial Sequence: Synthetic oligonucleotide
  Sense strand starting at position 2341 of SEQ ID NO: 1562270
gucagauuauaaguuguac

SEQ ID NO: 1734982 - RNA, 19 nt, Artificial Sequence
  Description of Artificial Sequence: Synthetic oligonucleotide
  Antisense strand to SEQ ID NO: 1734981
guacaacuuauaaucugac

SEQ ID NO: 1734983 - RNA, 19 nt, Artificial Sequence
  Description of Artificial Sequence: Synthetic oligonucleotide
  Sense strand starting at position 2354 of SEQ ID NO: 1562270
uuguacauucgugaacaua

SEQ ID NO: 1734984 - RNA, 19 nt, Artificial Sequence
  Description of Artificial Sequence: Synthetic oligonucleotide
  Antisense strand to SEQ ID NO: 1734983
uauguucacgaauguacaa

SEQ ID NO: 1734985 - RNA, 19 nt, Artificial Sequence
  Description of Artificial Sequence: Synthetic oligonucleotide
  Sense strand starting at position 2421 of SEQ ID NO: 1562270
cugaaauuccuccaggucu

SEQ ID NO: 1734986 - RNA, 19 nt, Artificial Sequence
  Description of Artificial Sequence: Synthetic oligonucleotide
  Antisense strand to SEQ ID NO: 1734985
agaccuggaggaauuucag

SEQ ID NO: 1734987 - RNA, 19 nt, Artificial Sequence
  Description of Artificial Sequence: Synthetic oligonucleotide
  Sense strand starting at position 2432 of SEQ ID NO: 1562270
ccaggucuacaguguaaua

SEQ ID NO: 1734988 - RNA, 19 nt, Artificial Sequence
  Description of Artificial Sequence: Synthetic oligonucleotide
  Antisense strand to SEQ ID NO: 1734987
uauuacacuguagaccugg

SEQ ID NO: 1734989 - RNA, 19 nt, Artificial Sequence
  Description of Artificial Sequence: Synthetic oligonucleotide
  Sense strand starting at position 2434 of SEQ ID NO: 1562270
aggucuacaguguaauagu

SEQ ID NO: 1734990 - RNA, 19 nt, Artificial Sequence
  Description of Artificial Sequence: Synthetic oligonucleotide
  Antisense strand to SEQ ID NO: 1734989
acuauuacacuguagaccu

SEQ ID NO: 1734991 - RNA, 19 nt, Artificial Sequence
  Description of Artificial Sequence: Synthetic oligonucleotide
  Sense strand starting at position 2469 of SEQ ID NO: 1562270
uuucgucuagauuaacuuu

SEQ ID NO: 1734992 - RNA, 19 nt, Artificial Sequence
  Description of Artificial Sequence: Synthetic oligonucleotide
  Antisense strand to SEQ ID NO: 1734991
aaaguuaaucuagacgaaa

SEQ ID NO: 1734993 - RNA, 19 nt, Artificial Sequence
  Description of Artificial Sequence: Synthetic oligonucleotide
  Sense strand starting at position 2472 of SEQ ID NO: 1562270
cgucuagauuaacuuuaau

SEQ ID NO: 1734994 - RNA, 19 nt, Artificial Sequence
  Description of Artificial Sequence: Synthetic oligonucleotide
  Antisense strand to SEQ ID NO: 1734993
auuaaaguuaaucuagacg

SEQ ID NO: 1734995 - RNA, 19 nt, Artificial Sequence
  Description of Artificial Sequence: Synthetic oligonucleotide
  Sense strand starting at position 2519 of SEQ ID NO: 1562270
ugauuauugcagcaaagug

SEQ ID NO: 1734996 - RNA, 19 nt, Artificial Sequence
  Description of Artificial Sequence: Synthetic oligonucleotide
  Antisense strand to SEQ ID NO: 1734995
cacuuugcugcaauaauca

SEQ ID NO: 1734997 - RNA, 19 nt, Artificial Sequence
  Description of Artificial Sequence: Synthetic oligonucleotide
  Sense strand starting at position 2539 of SEQ ID NO: 1562270
gggaaagugagcuggugaa

SEQ ID NO: 1734998 - RNA, 19 nt, Artificial Sequence
  Description of Artificial Sequence: Synthetic oligonucleotide
  Antisense strand to SEQ ID NO: 1734997
uucaccagcucacuuuccc

SEQ ID NO: 1734999 - RNA, 19 nt, Artificial Sequence
  Description of Artificial Sequence: Synthetic oligonucleotide
  Sense strand starting at position 2551 of SEQ ID NO: 1562270
uggugaagccucugagauc

SEQ ID NO: 1735000 - RNA, 19 nt, Artificial Sequence
  Description of Artificial Sequence: Synthetic oligonucleotide
  Antisense strand to SEQ ID NO: 1734999
gaucucagaggcuucacca

SEQ ID NO: 1735001 - RNA, 19 nt, Artificial Sequence
  Description of Artificial Sequence: Synthetic oligonucleotide
  Sense strand starting at position 2616 of SEQ ID NO: 1562270
uggaaugaaggcuguauua

SEQ ID NO: 1735002 - RNA, 19 nt, Artificial Sequence
  Description of Artificial Sequence: Synthetic oligonucleotide
  Antisense strand to SEQ ID NO: 1735001
uaauacagccuucauucca

SEQ ID NO: 1735003 - RNA, 19 nt, Artificial Sequence
  Description of Artificial Sequence: Synthetic oligonucleotide
  Sense strand starting at position 2644 of SEQ ID NO: 1562270
ugcugagaagucuauccau

SEQ ID NO: 1735004 - RNA, 19 nt, Artificial Sequence
  Description of Artificial Sequence: Synthetic oligonucleotide
  Antisense strand to SEQ ID NO: 1735003
auggauagacuucucagca

SEQ ID NO: 1735005 - RNA, 19 nt, Artificial Sequence
  Description of Artificial Sequence: Synthetic oligonucleotide
  Sense strand starting at position 2647 of SEQ ID NO: 1562270
ugagaagucuauccauuaa

SEQ ID NO: 1735006 - RNA, 19 nt, Artificial Sequence
  Description of Artificial Sequence: Synthetic oligonucleotide
  Antisense strand to SEQ ID NO: 1735005
uuaauggauagacuucuca

SEQ ID NO: 1735007 - RNA, 19 nt, Artificial Sequence
  Description of Artificial Sequence: Synthetic oligonucleotide
  Sense strand starting at position 2869 of SEQ ID NO: 1562270
uucuguaaagucugaugaa

SEQ ID NO: 1735008 - RNA, 19 nt, Artificial Sequence
  Description of Artificial Sequence: Synthetic oligonucleotide
  Antisense strand to SEQ ID NO: 1735007
uucaucagacuuuacagaa

SEQ ID NO: 1735009 - RNA, 19 nt, Artificial Sequence
  Description of Artificial Sequence: Synthetic oligonucleotide
  Sense strand starting at position 2936 of SEQ ID NO: 1562270
gaccauuugcauuguguaa

SEQ ID NO: 1735010 - RNA, 19 nt, Artificial Sequence
  Description of Artificial Sequence: Synthetic oligonucleotide
  Antisense strand to SEQ ID NO: 1735009
uuacacaaugcaaaugguc

SEQ ID NO: 1735011 - RNA, 19 nt, Artificial Sequence
  Description of Artificial Sequence: Synthetic oligonucleotide
  Sense strand starting at position 3257 of SEQ ID NO: 1562270
ugucucuugguggauacaa

SEQ ID NO: 1735012 - RNA, 19 nt, Artificial Sequence
  Description of Artificial Sequence: Synthetic oligonucleotide
  Antisense strand to SEQ ID NO: 1735011
uuguauccaccaagagaca

SEQ ID NO: 1735013 - RNA, 19 nt, Artificial Sequence
  Description of Artificial Sequence: Synthetic oligonucleotide
  Sense strand starting at position 3306 of SEQ ID NO: 1562270
gagaaauugccagguuaug

SEQ ID NO: 1735014 - RNA, 19 nt, Artificial Sequence
  Description of Artificial Sequence: Synthetic oligonucleotide
  Antisense strand to SEQ ID NO: 1735013
cauaaccuggcaauuucuc

SEQ ID NO: 1735015 - RNA, 19 nt, Artificial Sequence
  Description of Artificial Sequence: Synthetic oligonucleotide
  Sense strand starting at position 3324 of SEQ ID NO: 1562270
gggacaagaaugugcuuaa

SEQ ID NO: 1735016 - RNA, 19 nt, Artificial Sequence
  Description of Artificial Sequence: Synthetic oligonucleotide
  Antisense strand to SEQ ID NO: 1735015
uuaagcacauucuuguccc

SEQ ID NO: 1735017 - RNA, 19 nt, Artificial Sequence
  Description of Artificial Sequence: Synthetic oligonucleotide
  Sense strand starting at position 3325 of SEQ ID NO: 1562270
ggacaagaaugugcuuaau

SEQ ID NO: 1735018 - RNA, 19 nt, Artificial Sequence
  Description of Artificial Sequence: Synthetic oligonucleotide
  Antisense strand to SEQ ID NO: 1735017
auuaagcacauucuugucc

SEQ ID NO: 1735019 - RNA, 19 nt, Artificial Sequence
  Description of Artificial Sequence: Synthetic oligonucleotide
  Sense strand starting at position 3473 of SEQ ID NO: 1562270
cucugauuggaaugugaug

SEQ ID NO: 1735020 - RNA, 19 nt, Artificial Sequence
  Description of Artificial Sequence: Synthetic oligonucleotide
  Antisense strand to SEQ ID NO: 1735019
caucacauuccaaucagag

SEQ ID NO: 1735021 - RNA, 19 nt, Artificial Sequence
  Description of Artificial Sequence: Synthetic oligonucleotide
  Sense strand starting at position 3475 of SEQ ID NO: 1562270
cugauuggaaugugaugau

SEQ ID NO: 1735022 - RNA, 19 nt, Artificial Sequence
  Description of Artificial Sequence: Synthetic oligonucleotide
  Antisense strand to SEQ ID NO: 1735021
aucaucacauuccaaucag

SEQ ID NO: 1735023 - RNA, 19 nt, Artificial Sequence
  Description of Artificial Sequence: Synthetic oligonucleotide
  Sense strand starting at position 3490 of SEQ ID NO: 1562270
ugaucauaucaucaaggcu

SEQ ID NO: 1735024 - RNA, 19 nt, Artificial Sequence
  Description of Artificial Sequence: Synthetic oligonucleotide
  Antisense strand to SEQ ID NO: 1735023
agccuugaugauaugauca

SEQ ID NO: 1735025 - RNA, 19 nt, Artificial Sequence
  Description of Artificial Sequence: Synthetic oligonucleotide
  Sense strand starting at position 3520 of SEQ ID NO: 1562270
uucuguacugauuaaugau

SEQ ID NO: 1735026 - RNA, 19 nt, Artificial Sequence
  Description of Artificial Sequence: Synthetic oligonucleotide
  Antisense strand to SEQ ID NO: 1735025
aucauuaaucaguacagaa

SEQ ID NO: 1735027 - RNA, 19 nt, Artificial Sequence
  Description of Artificial Sequence: Synthetic oligonucleotide
  Sense strand starting at position 3529 of SEQ ID NO: 1562270
gauuaaugaugugccacuu

SEQ ID NO: 1735028 - RNA, 19 nt, Artificial Sequence
  Description of Artificial Sequence: Synthetic oligonucleotide
  Antisense strand to SEQ ID NO: 1735027
aaguggcacaucauuaauc

SEQ ID NO: 1735029 - RNA, 19 nt, Artificial Sequence
  Description of Artificial Sequence: Synthetic oligonucleotide
  Sense strand starting at position 3659 of SEQ ID NO: 1562270
gucuguaguuugccauuua

SEQ ID NO: 1735030 - RNA, 19 nt, Artificial Sequence
  Description of Artificial Sequence: Synthetic oligonucleotide
  Antisense strand to SEQ ID NO: 1735029
uaaauggcaaacuacagac

SEQ ID NO: 1735031 - RNA, 19 nt, Artificial Sequence
  Description of Artificial Sequence: Synthetic oligonucleotide
  Sense strand starting at position 19 of SEQ ID NO: 1562271
gcucaaaucgaaggagaga

SEQ ID NO: 1735032 - RNA, 19 nt, Artificial Sequence
  Description of Artificial Sequence: Synthetic oligonucleotide
  Antisense strand to SEQ ID NO: 1735031
ucucuccuucgauuugagc

SEQ ID NO: 1735033 - RNA, 19 nt, Artificial Sequence
  Description of Artificial Sequence: Synthetic oligonucleotide
  Sense strand starting at position 39 of SEQ ID NO: 1562271
aggagacacgguuaugagu

SEQ ID NO: 1735034 - RNA, 19 nt, Artificial Sequence
  Description of Artificial Sequence: Synthetic oligonucleotide
  Antisense strand to SEQ ID NO: 1735033
acucauaaccgugucuccu

SEQ ID NO: 1735035 - RNA, 19 nt, Artificial Sequence
  Description of Artificial Sequence: Synthetic oligonucleotide
  Sense strand starting at position 420 of SEQ ID NO: 1562271
uuuacacuuggcugaaaug

SEQ ID NO: 1735036 - RNA, 19 nt, Artificial Sequence
  Description of Artificial Sequence: Synthetic oligonucleotide
  Antisense strand to SEQ ID NO: 1735035
cauuucagccaaguguaaa

SEQ ID NO: 1735037 - RNA, 19 nt, Artificial Sequence
  Description of Artificial Sequence: Synthetic oligonucleotide
  Sense strand starting at position 438 of SEQ ID NO: 1562271
gaggaaaucugacugcugu

SEQ ID NO: 1735038 - RNA, 19 nt, Artificial Sequence
  Description of Artificial Sequence: Synthetic oligonucleotide
  Antisense strand to SEQ ID NO: 1735037
acagcagucagauuuccuc

SEQ ID NO: 1735039 - RNA, 19 nt, Artificial Sequence
  Description of Artificial Sequence: Synthetic oligonucleotide
  Sense strand starting at position 545 of SEQ ID NO: 1562271
guguguugggaagaggauu

SEQ ID NO: 1735040 - RNA, 19 nt, Artificial Sequence
  Description of Artificial Sequence: Synthetic oligonucleotide
  Antisense strand to SEQ ID NO: 1735039
aauccucuucccaacacac

SEQ ID NO: 1735041 - RNA, 19 nt, Artificial Sequence
  Description of Artificial Sequence: Synthetic oligonucleotide
  Sense strand starting at position 612 of SEQ ID NO: 1562271
gugccugauggcuggagau

SEQ ID NO: 1735042 - RNA, 19 nt, Artificial Sequence
  Description of Artificial Sequence: Synthetic oligonucleotide
  Antisense strand to SEQ ID NO: 1735041
aucuccagccaucaggcac

SEQ ID NO: 1735043 - RNA, 19 nt, Artificial Sequence
  Description of Artificial Sequence: Synthetic oligonucleotide
  Sense strand starting at position 749 of SEQ ID NO: 1562271
gggugccugcaaugacaua

SEQ ID NO: 1735044 - RNA, 19 nt, Artificial Sequence
  Description of Artificial Sequence: Synthetic oligonucleotide
  Antisense strand to SEQ ID NO: 1735043
uaugucauugcaggcaccc

SEQ ID NO: 1735045 - RNA, 19 nt, Artificial Sequence
  Description of Artificial Sequence: Synthetic oligonucleotide
  Sense strand starting at position 798 of SEQ ID NO: 1562271
ccaggaaugugcccagaau

SEQ ID NO: 1735046 - RNA, 19 nt, Artificial Sequence
  Description of Artificial Sequence: Synthetic oligonucleotide
  Antisense strand to SEQ ID NO: 1735045
auucugggcacauuccugg

SEQ ID NO: 1735047 - RNA, 19 nt, Artificial Sequence
  Description of Artificial Sequence: Synthetic oligonucleotide
  Sense strand starting at position 799 of SEQ ID NO: 1562271
caggaaugugcccagaauu

SEQ ID NO: 1735048 - RNA, 19 nt, Artificial Sequence
  Description of Artificial Sequence: Synthetic oligonucleotide
  Antisense strand to SEQ ID NO: 1735047
aauucugggcacauuccug

SEQ ID NO: 1735049 - RNA, 19 nt, Artificial Sequence
  Description of Artificial Sequence: Synthetic oligonucleotide
  Sense strand starting at position 853 of SEQ ID NO: 1562271
aguucucugcccgaagauu

SEQ ID NO: 1735050 - RNA, 19 nt, Artificial Sequence
  Description of Artificial Sequence: Synthetic oligonucleotide
  Antisense strand to SEQ ID NO: 1735049
aaucuucgggcagagaacu

SEQ ID NO: 1735051 - RNA, 19 nt, Artificial Sequence
  Description of Artificial Sequence: Synthetic oligonucleotide
  Sense strand starting at position 1111 of SEQ ID NO: 1562271
gugaaaggguccucacuua

SEQ ID NO: 1735052 - RNA, 19 nt, Artificial Sequence
  Description of Artificial Sequence: Synthetic oligonucleotide
  Antisense strand to SEQ ID NO: 1735051
uaagugaggacccuuucac

SEQ ID NO: 1735053 - RNA, 19 nt, Artificial Sequence
  Description of Artificial Sequence: Synthetic oligonucleotide
  Sense strand starting at position 1121 of SEQ ID NO: 1562271
ccucacuuaucugucugua

SEQ ID NO: 1735054 - RNA, 19 nt, Artificial Sequence
  Description of Artificial Sequence: Synthetic oligonucleotide
  Antisense strand to SEQ ID NO: 1735053
uacagacagauaagugagg

SEQ ID NO: 1735055 - RNA, 19 nt, Artificial Sequence
  Description of Artificial Sequence: Synthetic oligonucleotide
  Sense strand starting at position 1123 of SEQ ID NO: 1562271
ucacuuaucugucuguaca

SEQ ID NO: 1735056 - RNA, 19 nt, Artificial Sequence
  Description of Artificial Sequence: Synthetic oligonucleotide
  Antisense strand to SEQ ID NO: 1735055
uguacagacagauaaguga

SEQ ID NO: 1735057 - RNA, 19 nt, Artificial Sequence
  Description of Artificial Sequence: Synthetic oligonucleotide
  Sense strand starting at position 1311 of SEQ ID NO: 1562271
cuugguuguaaaggacaga

SEQ ID NO: 1735058 - RNA, 19 nt, Artificial Sequence
  Description of Artificial Sequence: Synthetic oligonucleotide
  Antisense strand to SEQ ID NO: 1735057
ucuguccuuuacaaccaag

SEQ ID NO: 1735059 - RNA, 19 nt, Artificial Sequence
  Description of Artificial Sequence: Synthetic oligonucleotide
  Sense strand starting at position 1340 of SEQ ID NO: 1562271
ggcuuaagcuaaguacaga

SEQ ID NO: 1735060 - RNA, 19 nt, Artificial Sequence
  Description of Artificial Sequence: Synthetic oligonucleotide
  Antisense strand to SEQ ID NO: 1735059
ucuguacuuagcuuaagcc

SEQ ID NO: 1735061 - RNA, 19 nt, Artificial Sequence
  Description of Artificial Sequence: Synthetic oligonucleotide
  Sense strand starting at position 1579 of SEQ ID NO: 1562271
ccugguucacaugggauga

SEQ ID NO: 1735062 - RNA, 19 nt, Artificial Sequence
  Description of Artificial Sequence: Synthetic oligonucleotide
  Antisense strand to SEQ ID NO: 1735061
ucaucccaugugaaccagg

SEQ ID NO: 1735063 - RNA, 19 nt, Artificial Sequence
  Description of Artificial Sequence: Synthetic oligonucleotide
  Sense strand starting at position 1666 of SEQ ID NO: 1562271
gaggcauucuaaguagaac

SEQ ID NO: 1735064 - RNA, 19 nt, Artificial Sequence
  Description of Artificial Sequence: Synthetic oligonucleotide
  Antisense strand to SEQ ID NO: 1735063
guucuacuuagaaugccuc

SEQ ID NO: 1735065 - RNA, 19 nt, Artificial Sequence
  Description of Artificial Sequence: Synthetic oligonucleotide
  Sense strand starting at position 1745 of SEQ ID NO: 1562271
agaaauuucugcuaaggca

SEQ ID NO: 1735066 - RNA, 19 nt, Artificial Sequence
  Description of Artificial Sequence: Synthetic oligonucleotide
  Antisense strand to SEQ ID NO: 1735065
ugccuuagcagaaauuucu

SEQ ID NO: 1735067 - RNA, 19 nt, Artificial Sequence
  Description of Artificial Sequence: Synthetic oligonucleotide
  Sense strand starting at position 1763 of SEQ ID NO: 1562271
auugcugacagcugguaau

SEQ ID NO: 1735068 - RNA, 19 nt, Artificial Sequence
  Description of Artificial Sequence: Synthetic oligonucleotide
  Antisense strand to SEQ ID NO: 1735067
auuaccagcugucagcaau

SEQ ID NO: 1735069 - RNA, 19 nt, Artificial Sequence
  Description of Artificial Sequence: Synthetic oligonucleotide
  Sense strand starting at position 1797 of SEQ ID NO: 1562271
acuuccugucuguauuagu

SEQ ID NO: 1735070 - RNA, 19 nt, Artificial Sequence
  Description of Artificial Sequence: Synthetic oligonucleotide
  Antisense strand to SEQ ID NO: 1735069
acuaauacagacaggaagu

SEQ ID NO: 1735071 - RNA, 19 nt, Artificial Sequence
  Description of Artificial Sequence: Synthetic oligonucleotide
  Sense strand starting at position 2198 of SEQ ID NO: 1562271
uguugucaccauuagcaaa

SEQ ID NO: 1735072 - RNA, 19 nt, Artificial Sequence
  Description of Artificial Sequence: Synthetic oligonucleotide
  Antisense strand to SEQ ID NO: 1735071
uuugcuaauggugacaaca

SEQ ID NO: 1735073 - RNA, 19 nt, Artificial Sequence
  Description of Artificial Sequence: Synthetic oligonucleotide
  Sense strand starting at position 2339 of SEQ ID NO: 1562271
ccuuguucucuggaccaga

SEQ ID NO: 1735074 - RNA, 19 nt, Artificial Sequence
  Description of Artificial Sequence: Synthetic oligonucleotide
  Antisense strand to SEQ ID NO: 1735073
ucugguccagagaacaagg

SEQ ID NO: 1735075 - RNA, 19 nt, Artificial Sequence
  Description of Artificial Sequence: Synthetic oligonucleotide
  Sense strand starting at position 2373 of SEQ ID NO: 1562271
caguguggcuuccuagaag

SEQ ID NO: 1735076 - RNA, 19 nt, Artificial Sequence
  Description of Artificial Sequence: Synthetic oligonucleotide
  Antisense strand to SEQ ID NO: 1735075
cuucuaggaagccacacug

SEQ ID NO: 1735077 - RNA, 19 nt, Artificial Sequence
  Description of Artificial Sequence: Synthetic oligonucleotide
  Sense strand starting at position 2437 of SEQ ID NO: 1562271
ccucgugucccucaugaaa

SEQ ID NO: 1735078 - RNA, 19 nt, Artificial Sequence
  Description of Artificial Sequence: Synthetic oligonucleotide
  Antisense strand to SEQ ID NO: 1735077
uuucaugagggacacgagg

SEQ ID NO: 1735079 - RNA, 19 nt, Artificial Sequence
  Description of Artificial Sequence: Synthetic oligonucleotide
  Sense strand starting at position 2617 of SEQ ID NO: 1562271
gaagucuaggucuguggga

SEQ ID NO: 1735080 - RNA, 19 nt, Artificial Sequence
  Description of Artificial Sequence: Synthetic oligonucleotide
  Antisense strand to SEQ ID NO: 1735079
ucccacagaccuagacuuc

SEQ ID NO: 1735081 - RNA, 19 nt, Artificial Sequence
  Description of Artificial Sequence: Synthetic oligonucleotide
  Sense strand starting at position 2618 of SEQ ID NO: 1562271
aagucuaggucugugggaa

SEQ ID NO: 1735082 - RNA, 19 nt, Artificial Sequence
  Description of Artificial Sequence: Synthetic oligonucleotide
  Antisense strand to SEQ ID NO: 1735081
uucccacagaccuagacuu

SEQ ID NO: 1735083 - RNA, 19 nt, Artificial Sequence
  Description of Artificial Sequence: Synthetic oligonucleotide
  Sense strand starting at position 2619 of SEQ ID NO: 1562271
agucuaggucugugggaag

SEQ ID NO: 1735084 - RNA, 19 nt, Artificial Sequence
  Description of Artificial Sequence: Synthetic oligonucleotide
  Antisense strand to SEQ ID NO: 1735083
cuucccacagaccuagacu

SEQ ID NO: 1735085 - RNA, 19 nt, Artificial Sequence
  Description of Artificial Sequence: Synthetic oligonucleotide
  Sense strand starting at position 2679 of SEQ ID NO: 1562271
uuagaagugucugauuuau

SEQ ID NO: 1735086 - RNA, 19 nt, Artificial Sequence
  Description of Artificial Sequence: Synthetic oligonucleotide
  Antisense strand to SEQ ID NO: 1735085
auaaaucagacacuucuaa

SEQ ID NO: 1735087 - RNA, 19 nt, Artificial Sequence
  Description of Artificial Sequence: Synthetic oligonucleotide
  Sense strand starting at position 2689 of SEQ ID NO: 1562271
cugauuuauuucuguggac

SEQ ID NO: 1735088 - RNA, 19 nt, Artificial Sequence
  Description of Artificial Sequence: Synthetic oligonucleotide
  Antisense strand to SEQ ID NO: 1735087
guccacagaaauaaaucag

SEQ ID NO: 1735089 - RNA, 19 nt, Artificial Sequence
  Description of Artificial Sequence: Synthetic oligonucleotide
  Sense strand starting at position 2859 of SEQ ID NO: 1562271
uggugaguuucugcaacca

SEQ ID NO: 1735090 - RNA, 19 nt, Artificial Sequence
  Description of Artificial Sequence: Synthetic oligonucleotide
  Antisense strand to SEQ ID NO: 1735089
ugguugcagaaacucacca

SEQ ID NO: 1735091 - RNA, 19 nt, Artificial Sequence
  Description of Artificial Sequence: Synthetic oligonucleotide
  Sense strand starting at position 2898 of SEQ ID NO: 1562271
cuggcuuggugacuugaau

SEQ ID NO: 1735092 - RNA, 19 nt, Artificial Sequence
  Description of Artificial Sequence: Synthetic oligonucleotide
  Antisense strand to SEQ ID NO: 1735091
auucaagucaccaagccag

SEQ ID NO: 1735093 - RNA, 19 nt, Artificial Sequence
  Description of Artificial Sequence: Synthetic oligonucleotide
  Sense strand starting at position 3091 of SEQ ID NO: 1562271
ggacaucucgcucacuuga

SEQ ID NO: 1735094 - RNA, 19 nt, Artificial Sequence
  Description of Artificial Sequence: Synthetic oligonucleotide
  Antisense strand to SEQ ID NO: 1735093
ucaagugagcgagaugucc

SEQ ID NO: 1735095 - RNA, 19 nt, Artificial Sequence
  Description of Artificial Sequence: Synthetic oligonucleotide
  Sense strand starting at position 3202 of SEQ ID NO: 1562271
gccugauggcaauaugaag

SEQ ID NO: 1735096 - RNA, 19 nt, Artificial Sequence
  Description of Artificial Sequence: Synthetic oligonucleotide
  Antisense strand to SEQ ID NO: 1735095
cuucauauugccaucaggc

SEQ ID NO: 1735097 - RNA, 19 nt, Artificial Sequence
  Description of Artificial Sequence: Synthetic oligonucleotide
  Sense strand starting at position 3326 of SEQ ID NO: 1562271
ccagaucucugacucugaa

SEQ ID NO: 1735098 - RNA, 19 nt, Artificial Sequence
  Description of Artificial Sequence: Synthetic oligonucleotide
  Antisense strand to SEQ ID NO: 1735097
uucagagucagagaucugg

SEQ ID NO: 1735099 - RNA, 19 nt, Artificial Sequence
  Description of Artificial Sequence: Synthetic oligonucleotide
  Sense strand starting at position 3431 of SEQ ID NO: 1562271
uggugagugaugugaggga

SEQ ID NO: 1735100 - RNA, 19 nt, Artificial Sequence
  Description of Artificial Sequence: Synthetic oligonucleotide
  Antisense strand to SEQ ID NO: 1735099
ucccucacaucacucacca

SEQ ID NO: 1735101 - RNA, 19 nt, Artificial Sequence
  Description of Artificial Sequence: Synthetic oligonucleotide
  Sense strand starting at position 3621 of SEQ ID NO: 1562271
aguguacgugugucuuagu

SEQ ID NO: 1735102 - RNA, 19 nt, Artificial Sequence
  Description of Artificial Sequence: Synthetic oligonucleotide
  Antisense strand to SEQ ID NO: 1735101
acuaagacacacguacacu

SEQ ID NO: 1735103 - RNA, 19 nt, Artificial Sequence
  Description of Artificial Sequence: Synthetic oligonucleotide
  Sense strand starting at position 3660 of SEQ ID NO: 1562271
aauaucguagacugggaaa

SEQ ID NO: 1735104 - RNA, 19 nt, Artificial Sequence
  Description of Artificial Sequence: Synthetic oligonucleotide
  Antisense strand to SEQ ID NO: 1735103
uuucccagucuacgauauu

SEQ ID NO: 1735105 - RNA, 19 nt, Artificial Sequence
  Description of Artificial Sequence: Synthetic oligonucleotide
  Sense strand starting at position 3662 of SEQ ID NO: 1562271
uaucguagacugggaaauc

SEQ ID NO: 1735106 - RNA, 19 nt, Artificial Sequence
  Description of Artificial Sequence: Synthetic oligonucleotide
  Antisense strand to SEQ ID NO: 1735105
gauuucccagucuacgaua

SEQ ID NO: 1735107 - RNA, 19 nt, Artificial Sequence
  Description of Artificial Sequence: Synthetic oligonucleotide
  Sense strand starting at position 3839 of SEQ ID NO: 1562271
uuaugagagcuccacccua

SEQ ID NO: 1735108 - RNA, 19 nt, Artificial Sequence
  Description of Artificial Sequence: Synthetic oligonucleotide
  Antisense strand to SEQ ID NO: 1735107
uaggguggagcucucauaa

SEQ ID NO: 1735109 - RNA, 19 nt, Artificial Sequence
  Description of Artificial Sequence: Synthetic oligonucleotide
  Sense strand starting at position 3912 of SEQ ID NO: 1562271
guacuaucagaguauuaau

SEQ ID NO: 1735110 - RNA, 19 nt, Artificial Sequence
  Description of Artificial Sequence: Synthetic oligonucleotide
  Antisense strand to SEQ ID NO: 1735109
auuaauacucugauaguac

SEQ ID NO: 1735111 - RNA, 19 nt, Artificial Sequence
  Description of Artificial Sequence: Synthetic oligonucleotide
  Sense strand starting at position 26 of SEQ ID NO: 1562272
acgcgagagaguuaaagaa

SEQ ID NO: 1735112 - RNA, 19 nt, Artificial Sequence
  Description of Artificial Sequence: Synthetic oligonucleotide
  Antisense strand to SEQ ID NO: 1735111
uucuuuaacucucucgcgu

SEQ ID NO: 1735113 - RNA, 19 nt, Artificial Sequence
  Description of Artificial Sequence: Synthetic oligonucleotide
  Sense strand starting at position 142 of SEQ ID NO: 1562272
agugcuugagagcagaauu

SEQ ID NO: 1735114 - RNA, 19 nt, Artificial Sequence
  Description of Artificial Sequence: Synthetic oligonucleotide
  Antisense strand to SEQ ID NO: 1735113
aauucugcucucaagcacu

SEQ ID NO: 1735115 - RNA, 19 nt, Artificial Sequence
  Description of Artificial Sequence: Synthetic oligonucleotide
  Sense strand starting at position 154 of SEQ ID NO: 1562272
cagaauuauggccgcgaga

SEQ ID NO: 1735116 - RNA, 19 nt, Artificial Sequence
  Description of Artificial Sequence: Synthetic oligonucleotide
  Antisense strand to SEQ ID NO: 1735115
ucucgcggccauaauucug

SEQ ID NO: 1735117 - RNA, 19 nt, Artificial Sequence
  Description of Artificial Sequence: Synthetic oligonucleotide
  Sense strand starting at position 156 of SEQ ID NO: 1562272
gaauuauggccgcgagagg

SEQ ID NO: 1735118 - RNA, 19 nt, Artificial Sequence
  Description of Artificial Sequence: Synthetic oligonucleotide
  Antisense strand to SEQ ID NO: 1735117
ccucucgcggccauaauuc

SEQ ID NO: 1735119 - RNA, 19 nt, Artificial Sequence
  Description of Artificial Sequence: Synthetic oligonucleotide
  Sense strand starting at position 284 of SEQ ID NO: 1562272
gggacagaagucugcagaa

SEQ ID NO: 1735120 - RNA, 19 nt, Artificial Sequence
  Description of Artificial Sequence: Synthetic oligonucleotide
  Antisense strand to SEQ ID NO: 1735119
uucugcagacuucuguccc

SEQ ID NO: 1735121 - RNA, 19 nt, Artificial Sequence
  Description of Artificial Sequence: Synthetic oligonucleotide
  Sense strand starting at position 483 of SEQ ID NO: 1562272
guggaaagaacucgcacaa

SEQ ID NO: 1735122 - RNA, 19 nt, Artificial Sequence
  Description of Artificial Sequence: Synthetic oligonucleotide
  Antisense strand to SEQ ID NO: 1735121
uugugcgaguucuuuccac

SEQ ID NO: 1735123 - RNA, 19 nt, Artificial Sequence
  Description of Artificial Sequence: Synthetic oligonucleotide
  Sense strand starting at position 502 of SEQ ID NO: 1562272
gcuccaacucgcuaaaggu

SEQ ID NO: 1735124 - RNA, 19 nt, Artificial Sequence
  Description of Artificial Sequence: Synthetic oligonucleotide
  Antisense strand to SEQ ID NO: 1735123
accuuuagcgaguuggagc

SEQ ID NO: 1735125 - RNA, 19 nt, Artificial Sequence
  Description of Artificial Sequence: Synthetic oligonucleotide
  Sense strand starting at position 518 of SEQ ID NO: 1562272
gguggaaggagucagguua

SEQ ID NO: 1735126 - RNA, 19 nt, Artificial Sequence
  Description of Artificial Sequence: Synthetic oligonucleotide
  Antisense strand to SEQ ID NO: 1735125
uaaccugacuccuuccacc

SEQ ID NO: 1735127 - RNA, 19 nt, Artificial Sequence
  Description of Artificial Sequence: Synthetic oligonucleotide
  Sense strand starting at position 565 of SEQ ID NO: 1562272
uugcuuuaguuugcagaaa

SEQ ID NO: 1735128 - RNA, 19 nt, Artificial Sequence
  Description of Artificial Sequence: Synthetic oligonucleotide
  Antisense strand to SEQ ID NO: 1735127
uuucugcaaacuaaagcaa

SEQ ID NO: 1735129 - RNA, 19 nt, Artificial Sequence
  Description of Artificial Sequence: Synthetic oligonucleotide
  Sense strand starting at position 622 of SEQ ID NO: 1562272
ggcaaaugcaaguauguuu

SEQ ID NO: 1735130 - RNA, 19 nt, Artificial Sequence
  Description of Artificial Sequence: Synthetic oligonucleotide
  Antisense strand to SEQ ID NO: 1735129
aaacauacuugcauuugcc

SEQ ID NO: 1735131 - RNA, 19 nt, Artificial Sequence
  Description of Artificial Sequence: Synthetic oligonucleotide
  Sense strand starting at position 730 of SEQ ID NO: 1562272
gcaggagucuacccugaag

SEQ ID NO: 1735132 - RNA, 19 nt, Artificial Sequence
  Description of Artificial Sequence: Synthetic oligonucleotide
  Antisense strand to SEQ ID NO: 1735131
cuucaggguagacuccugc

SEQ ID NO: 1735133 - RNA, 19 nt, Artificial Sequence
  Description of Artificial Sequence: Synthetic oligonucleotide
  Sense strand starting at position 732 of SEQ ID NO: 1562272
aggagucuacccugaaguc

SEQ ID NO: 1735134 - RNA, 19 nt, Artificial Sequence
  Description of Artificial Sequence: Synthetic oligonucleotide
  Antisense strand to SEQ ID NO: 1735133
gacuucaggguagacuccu

SEQ ID NO: 1735135 - RNA, 19 nt, Artificial Sequence
  Description of Artificial Sequence: Synthetic oligonucleotide
  Sense strand starting at position 747 of SEQ ID NO: 1562272
agucgcgugggauagauaa

SEQ ID NO: 1735136 - RNA, 19 nt, Artificial Sequence
  Description of Artificial Sequence: Synthetic oligonucleotide
  Antisense strand to SEQ ID NO: 1735135
uuaucuaucccacgcgacu

SEQ ID NO: 1735137 - RNA, 19 nt, Artificial Sequence
  Description of Artificial Sequence: Synthetic oligonucleotide
  Sense strand starting at position 1594 of SEQ ID NO: 1562272
uuuaguucgggucgggaga

SEQ ID NO: 1735138 - RNA, 19 nt, Artificial Sequence
  Description of Artificial Sequence: Synthetic oligonucleotide
  Antisense strand to SEQ ID NO: 1735137
ucucccgacccgaacuaaa

SEQ ID NO: 1735139 - RNA, 19 nt, Artificial Sequence
  Description of Artificial Sequence: Synthetic oligonucleotide
  Sense strand starting at position 1628 of SEQ ID NO: 1562272
ccugcucuggauuguuaaa

SEQ ID NO: 1735140 - RNA, 19 nt, Artificial Sequence
  Description of Artificial Sequence: Synthetic oligonucleotide
  Antisense strand to SEQ ID NO: 1735139
uuuaacaauccagagcagg

SEQ ID NO: 1735141 - RNA, 19 nt, Artificial Sequence
  Description of Artificial Sequence: Synthetic oligonucleotide
  Sense strand starting at position 1655 of SEQ ID NO: 1562272
uuucuauuauucguuggaa

SEQ ID NO: 1735142 - RNA, 19 nt, Artificial Sequence
  Description of Artificial Sequence: Synthetic oligonucleotide
  Antisense strand to SEQ ID NO: 1735141
uuccaacgaauaauagaaa

SEQ ID NO: 1735143 - RNA, 19 nt, Artificial Sequence
  Description of Artificial Sequence: Synthetic oligonucleotide
  Sense strand starting at position 1656 of SEQ ID NO: 1562272
uucuauuauucguuggaag

SEQ ID NO: 1735144 - RNA, 19 nt, Artificial Sequence
  Description of Artificial Sequence: Synthetic oligonucleotide
  Antisense strand to SEQ ID NO: 1735143
cuuccaacgaauaauagaa

SEQ ID NO: 1735145 - RNA, 19 nt, Artificial Sequence
  Description of Artificial Sequence: Synthetic oligonucleotide
  Sense strand starting at position 1657 of SEQ ID NO: 1562272
ucuauuauucguuggaagg

SEQ ID NO: 1735146 - RNA, 19 nt, Artificial Sequence
  Description of Artificial Sequence: Synthetic oligonucleotide
  Antisense strand to SEQ ID NO: 1735145
ccuuccaacgaauaauaga

SEQ ID NO: 1735147 - RNA, 19 nt, Artificial Sequence
  Description of Artificial Sequence: Synthetic oligonucleotide
  Sense strand starting at position 2369 of SEQ ID NO: 1562272
ggaggguucgguuggagaa

SEQ ID NO: 1735148 - RNA, 19 nt, Artificial Sequence
  Description of Artificial Sequence: Synthetic oligonucleotide
  Antisense strand to SEQ ID NO: 1735147
uucuccaaccgaacccucc

SEQ ID NO: 1735149 - RNA, 19 nt, Artificial Sequence
  Description of Artificial Sequence: Synthetic oligonucleotide
  Sense strand starting at position 2485 of SEQ ID NO: 1562272
gggcuacacuuucuagaaa

SEQ ID NO: 1735150 - RNA, 19 nt, Artificial Sequence
  Description of Artificial Sequence: Synthetic oligonucleotide
  Antisense strand to SEQ ID NO: 1735149
uuucuagaaaguguagccc

SEQ ID NO: 1735151 - RNA, 19 nt, Artificial Sequence
  Description of Artificial Sequence: Synthetic oligonucleotide
  Sense strand starting at position 2641 of SEQ ID NO: 1562272
aggugacacuuccuacgau

SEQ ID NO: 1735152 - RNA, 19 nt, Artificial Sequence
  Description of Artificial Sequence: Synthetic oligonucleotide
  Antisense strand to SEQ ID NO: 1735151
aucguaggaagugucaccu

SEQ ID NO: 1735153 - RNA, 19 nt, Artificial Sequence
  Description of Artificial Sequence: Synthetic oligonucleotide
  Sense strand starting at position 2789 of SEQ ID NO: 1562272
ggcucaauucccuagagca

SEQ ID NO: 1735154 - RNA, 19 nt, Artificial Sequence
  Description of Artificial Sequence: Synthetic oligonucleotide
  Antisense strand to SEQ ID NO: 1735153
ugcucuagggaauugagcc

SEQ ID NO: 1735155 - RNA, 19 nt, Artificial Sequence
  Description of Artificial Sequence: Synthetic oligonucleotide
  Sense strand starting at position 3050 of SEQ ID NO: 1562272
ggcuauauccgcguuacga

SEQ ID NO: 1735156 - RNA, 19 nt, Artificial Sequence
  Description of Artificial Sequence: Synthetic oligonucleotide
  Antisense strand to SEQ ID NO: 1735155
ucguaacgcggauauagcc

SEQ ID NO: 1735157 - RNA, 19 nt, Artificial Sequence
  Description of Artificial Sequence: Synthetic oligonucleotide
  Sense strand starting at position 3051 of SEQ ID NO: 1562272
gcuauauccgcguuacgaa

SEQ ID NO: 1735158 - RNA, 19 nt, Artificial Sequence
  Description of Artificial Sequence: Synthetic oligonucleotide
  Antisense strand to SEQ ID NO: 1735157
uucguaacgcggauauagc

SEQ ID NO: 1735159 - RNA, 19 nt, Artificial Sequence
  Description of Artificial Sequence: Synthetic oligonucleotide
  Sense strand starting at position 3052 of SEQ ID NO: 1562272
cuauauccgcguuacgaaa

SEQ ID NO: 1735160 - RNA, 19 nt, Artificial Sequence
  Description of Artificial Sequence: Synthetic oligonucleotide
  Antisense strand to SEQ ID NO: 1735159
uuucguaacgcggauauag

SEQ ID NO: 1735161 - RNA, 19 nt, Artificial Sequence
  Description of Artificial Sequence: Synthetic oligonucleotide
  Sense strand starting at position 3113 of SEQ ID NO: 1562272
aguggcucuucucuccaaa

SEQ ID NO: 1735162 - RNA, 19 nt, Artificial Sequence
  Description of Artificial Sequence: Synthetic oligonucleotide
  Antisense strand to SEQ ID NO: 1735161
uuuggagagaagagccacu

SEQ ID NO: 1735163 - RNA, 19 nt, Artificial Sequence
  Description of Artificial Sequence: Synthetic oligonucleotide
  Sense strand starting at position 3155 of SEQ ID NO: 1562272
agaggaaggacguguuuca

SEQ ID NO: 1735164 - RNA, 19 nt, Artificial Sequence
  Description of Artificial Sequence: Synthetic oligonucleotide
  Antisense strand to SEQ ID NO: 1735163
ugaaacacguccuuccucu

SEQ ID NO: 1735165 - RNA, 19 nt, Artificial Sequence
  Description of Artificial Sequence: Synthetic oligonucleotide
  Sense strand starting at position 3321 of SEQ ID NO: 1562272
caaguagaucuggguccuu

SEQ ID NO: 1735166 - RNA, 19 nt, Artificial Sequence
  Description of Artificial Sequence: Synthetic oligonucleotide
  Antisense strand to SEQ ID NO: 1735165
aaggacccagaucuacuug

SEQ ID NO: 1735167 - RNA, 19 nt, Artificial Sequence
  Description of Artificial Sequence: Synthetic oligonucleotide
  Sense strand starting at position 3435 of SEQ ID NO: 1562272
uccggaugcuuuccaacuu

SEQ ID NO: 1735168 - RNA, 19 nt, Artificial Sequence
  Description of Artificial Sequence: Synthetic oligonucleotide
  Antisense strand to SEQ ID NO: 1735167
aaguuggaaagcauccgga

SEQ ID NO: 1735169 - RNA, 19 nt, Artificial Sequence
  Description of Artificial Sequence: Synthetic oligonucleotide
  Sense strand starting at position 3463 of SEQ ID NO: 1562272
uagcgagauugcuuacuug

SEQ ID NO: 1735170 - RNA, 19 nt, Artificial Sequence
  Description of Artificial Sequence: Synthetic oligonucleotide
  Antisense strand to SEQ ID NO: 1735169
caaguaagcaaucucgcua

SEQ ID NO: 1735171 - RNA, 19 nt, Artificial Sequence
  Description of Artificial Sequence: Synthetic oligonucleotide
  Sense strand starting at position 3466 of SEQ ID NO: 1562272
cgagauugcuuacuugaaa

SEQ ID NO: 1735172 - RNA, 19 nt, Artificial Sequence
  Description of Artificial Sequence: Synthetic oligonucleotide
  Antisense strand to SEQ ID NO: 1735171
uuucaaguaagcaaucucg

SEQ ID NO: 1735173 - RNA, 19 nt, Artificial Sequence
  Description of Artificial Sequence: Synthetic oligonucleotide
  Sense strand starting at position 3503 of SEQ ID NO: 1562272
gcuuuccacucaucaggaa

SEQ ID NO: 1735174 - RNA, 19 nt, Artificial Sequence
  Description of Artificial Sequence: Synthetic oligonucleotide
  Antisense strand to SEQ ID NO: 1735173
uuccugaugaguggaaagc

SEQ ID NO: 1735175 - RNA, 19 nt, Artificial Sequence
  Description of Artificial Sequence: Synthetic oligonucleotide
  Sense strand starting at position 3561 of SEQ ID NO: 1562272
cuuacuucugaagggcuua

SEQ ID NO: 1735176 - RNA, 19 nt, Artificial Sequence
  Description of Artificial Sequence: Synthetic oligonucleotide
  Antisense strand to SEQ ID NO: 1735175
uaagcccuucagaaguaag

SEQ ID NO: 1735177 - RNA, 19 nt, Artificial Sequence
  Description of Artificial Sequence: Synthetic oligonucleotide
  Sense strand starting at position 3657 of SEQ ID NO: 1562272
aucguugaacguugaauaa

SEQ ID NO: 1735178 - RNA, 19 nt, Artificial Sequence
  Description of Artificial Sequence: Synthetic oligonucleotide
  Antisense strand to SEQ ID NO: 1735177
uuauucaacguucaacgau

SEQ ID NO: 1735179 - RNA, 19 nt, Artificial Sequence
  Description of Artificial Sequence: Synthetic oligonucleotide
  Sense strand starting at position 3699 of SEQ ID NO: 1562272
uugacagcgcucgauuaac

SEQ ID NO: 1735180 - RNA, 19 nt, Artificial Sequence
  Description of Artificial Sequence: Synthetic oligonucleotide
  Antisense strand to SEQ ID NO: 1735179
guuaaucgagcgcugucaa

SEQ ID NO: 1735181 - RNA, 19 nt, Artificial Sequence
  Description of Artificial Sequence: Synthetic oligonucleotide
  Sense strand starting at position 3865 of SEQ ID NO: 1562272
ucaagcauuguccagccua

SEQ ID NO: 1735182 - RNA, 19 nt, Artificial Sequence
  Description of Artificial Sequence: Synthetic oligonucleotide
  Antisense strand to SEQ ID NO: 1735181
uaggcuggacaaugcuuga

SEQ ID NO: 1735183 - RNA, 19 nt, Artificial Sequence
  Description of Artificial Sequence: Synthetic oligonucleotide
  Sense strand starting at position 3890 of SEQ ID NO: 1562272
ucucuucgacuucgaacua

SEQ ID NO: 1735184 - RNA, 19 nt, Artificial Sequence
  Description of Artificial Sequence: Synthetic oligonucleotide
  Antisense strand to SEQ ID NO: 1735183
uaguucgaagucgaagaga

SEQ ID NO: 1735185 - RNA, 19 nt, Artificial Sequence
  Description of Artificial Sequence: Synthetic oligonucleotide
  Sense strand starting at position 3900 of SEQ ID NO: 1562272
uucgaacuacgaggauuau

SEQ ID NO: 1735186 - RNA, 19 nt, Artificial Sequence
  Description of Artificial Sequence: Synthetic oligonucleotide
  Antisense strand to SEQ ID NO: 1735185
auaauccucguaguucgaa

SEQ ID NO: 1735187 - RNA, 19 nt, Artificial Sequence
  Description of Artificial Sequence: Synthetic oligonucleotide
  Sense strand starting at position 3901 of SEQ ID NO: 1562272
ucgaacuacgaggauuauu

SEQ ID NO: 1735188 - RNA, 19 nt, Artificial Sequence
  Description of Artificial Sequence: Synthetic oligonucleotide
  Antisense strand to SEQ ID NO: 1735187
aauaauccucguaguucga

SEQ ID NO: 1735189 - RNA, 19 nt, Artificial Sequence
  Description of Artificial Sequence: Synthetic oligonucleotide
  Sense strand starting at position 3910 of SEQ ID NO: 1562272
gaggauuauuccuuccugu

SEQ ID NO: 1735190 - RNA, 19 nt, Artificial Sequence
  Description of Artificial Sequence: Synthetic oligonucleotide
  Antisense strand to SEQ ID NO: 1735189
acaggaaggaauaauccuc

SEQ ID NO: 1735191 - RNA, 19 nt, Artificial Sequence
  Description of Artificial Sequence: Synthetic oligonucleotide
  Sense strand starting at position 18 of SEQ ID NO: 1562273
guugaaggcugguuggauu

SEQ ID NO: 1735192 - RNA, 19 nt, Artificial Sequence
  Description of Artificial Sequence: Synthetic oligonucleotide
  Antisense strand to SEQ ID NO: 1735191
aauccaaccagccuucaac

SEQ ID NO: 1735193 - RNA, 19 nt, Artificial Sequence
  Description of Artificial Sequence: Synthetic oligonucleotide
  Sense strand starting at position 161 of SEQ ID NO: 1562273
gaccuaccucccgaguaaa

SEQ ID NO: 1735194 - RNA, 19 nt, Artificial Sequence
  Description of Artificial Sequence: Synthetic oligonucleotide
  Antisense strand to SEQ ID NO: 1735193
uuuacucgggagguagguc

SEQ ID NO: 1735195 - RNA, 19 nt, Artificial Sequence
  Description of Artificial Sequence: Synthetic oligonucleotide
  Sense strand starting at position 179 of SEQ ID NO: 1562273
acaggauagcugcaucgua

SEQ ID NO: 1735196 - RNA, 19 nt, Artificial Sequence
  Description of Artificial Sequence: Synthetic oligonucleotide
  Antisense strand to SEQ ID NO: 1735195
uacgaugcagcuauccugu

SEQ ID NO: 1735197 - RNA, 19 nt, Artificial Sequence
  Description of Artificial Sequence: Synthetic oligonucleotide
  Sense strand starting at position 790 of SEQ ID NO: 1562273
gcgugcuugaccgcgaaga

SEQ ID NO: 1735198 - RNA, 19 nt, Artificial Sequence
  Description of Artificial Sequence: Synthetic oligonucleotide
  Antisense strand to SEQ ID NO: 1735197
ucuucgcggucaagcacgc

SEQ ID NO: 1735199 - RNA, 19 nt, Artificial Sequence
  Description of Artificial Sequence: Synthetic oligonucleotide
  Sense strand starting at position 792 of SEQ ID NO: 1562273
gugcuugaccgcgaagaag

SEQ ID NO: 1735200 - RNA, 19 nt, Artificial Sequence
  Description of Artificial Sequence: Synthetic oligonucleotide
  Antisense strand to SEQ ID NO: 1735199
cuucuucgcggucaagcac

SEQ ID NO: 1735201 - RNA, 19 nt, Artificial Sequence
  Description of Artificial Sequence: Synthetic oligonucleotide
  Sense strand starting at position 1025 of SEQ ID NO: 1562273
cggaguagaguuggucgau

SEQ ID NO: 1735202 - RNA, 19 nt, Artificial Sequence
  Description of Artificial Sequence: Synthetic oligonucleotide
  Antisense strand to SEQ ID NO: 1735201
aucgaccaacucuacuccg

SEQ ID NO: 1735203 - RNA, 19 nt, Artificial Sequence
  Description of Artificial Sequence: Synthetic oligonucleotide
  Sense strand starting at position 1026 of SEQ ID NO: 1562273
ggaguagaguuggucgaug

SEQ ID NO: 1735204 - RNA, 19 nt, Artificial Sequence
  Description of Artificial Sequence: Synthetic oligonucleotide
  Antisense strand to SEQ ID NO: 1735203
caucgaccaacucuacucc

SEQ ID NO: 1735205 - RNA, 19 nt, Artificial Sequence
  Description of Artificial Sequence: Synthetic oligonucleotide
  Sense strand starting at position 1320 of SEQ ID NO: 1562273
uuuguuauuugcuaugaag

SEQ ID NO: 1735206 - RNA, 19 nt, Artificial Sequence
  Description of Artificial Sequence: Synthetic oligonucleotide
  Antisense strand to SEQ ID NO: 1735205
cuucauagcaaauaacaaa

SEQ ID NO: 1735207 - RNA, 19 nt, Artificial Sequence
  Description of Artificial Sequence: Synthetic oligonucleotide
  Sense strand starting at position 1322 of SEQ ID NO: 1562273
uguuauuugcuaugaaguu

SEQ ID NO: 1735208 - RNA, 19 nt, Artificial Sequence
  Description of Artificial Sequence: Synthetic oligonucleotide
  Antisense strand to SEQ ID NO: 1735207
aacuucauagcaaauaaca

SEQ ID NO: 1735209 - RNA, 19 nt, Artificial Sequence
  Description of Artificial Sequence: Synthetic oligonucleotide
  Sense strand starting at position 1378 of SEQ ID NO: 1562273
gcaggauugagucaagugu

SEQ ID NO: 1735210 - RNA, 19 nt, Artificial Sequence
  Description of Artificial Sequence: Synthetic oligonucleotide
  Antisense strand to SEQ ID NO: 1735209
acacuugacucaauccugc

SEQ ID NO: 1735211 - RNA, 19 nt, Artificial Sequence
  Description of Artificial Sequence: Synthetic oligonucleotide
  Sense strand starting at position 1382 of SEQ ID NO: 1562273
gauugagucaagugucgga

SEQ ID NO: 1735212 - RNA, 19 nt, Artificial Sequence
  Description of Artificial Sequence: Synthetic oligonucleotide
  Antisense strand to SEQ ID NO: 1735211
uccgacacuugacucaauc

SEQ ID NO: 1735213 - RNA, 19 nt, Artificial Sequence
  Description of Artificial Sequence: Synthetic oligonucleotide
  Sense strand starting at position 1460 of SEQ ID NO: 1562273
uuucuuuguugcuugggaa

SEQ ID NO: 1735214 - RNA, 19 nt, Artificial Sequence
  Description of Artificial Sequence: Synthetic oligonucleotide
  Antisense strand to SEQ ID NO: 1735213
uucccaagcaacaaagaaa

SEQ ID NO: 1735215 - RNA, 19 nt, Artificial Sequence
  Description of Artificial Sequence: Synthetic oligonucleotide
  Sense strand starting at position 1461 of SEQ ID NO: 1562273
uucuuuguugcuugggaaa

SEQ ID NO: 1735216 - RNA, 19 nt, Artificial Sequence
  Description of Artificial Sequence: Synthetic oligonucleotide
  Antisense strand to SEQ ID NO: 1735215
uuucccaagcaacaaagaa

SEQ ID NO: 1735217 - RNA, 19 nt, Artificial Sequence
  Description of Artificial Sequence: Synthetic oligonucleotide
  Sense strand starting at position 1486 of SEQ ID NO: 1562273
ggauucgugcuccagaaag

SEQ ID NO: 1735218 - RNA, 19 nt, Artificial Sequence
  Description of Artificial Sequence: Synthetic oligonucleotide
  Antisense strand to SEQ ID NO: 1735217
cuuucuggagcacgaaucc

SEQ ID NO: 1735219 - RNA, 19 nt, Artificial Sequence
  Description of Artificial Sequence: Synthetic oligonucleotide
  Sense strand starting at position 1488 of SEQ ID NO: 1562273
auucgugcuccagaaagag

SEQ ID NO: 1735220 - RNA, 19 nt, Artificial Sequence
  Description of Artificial Sequence: Synthetic oligonucleotide
  Antisense strand to SEQ ID NO: 1735219
cucuuucuggagcacgaau

SEQ ID NO: 1735221 - RNA, 19 nt, Artificial Sequence
  Description of Artificial Sequence: Synthetic oligonucleotide
  Sense strand starting at position 1619 of SEQ ID NO: 1562273
gcacgaucgcuguuucaag

SEQ ID NO: 1735222 - RNA, 19 nt, Artificial Sequence
  Description of Artificial Sequence: Synthetic oligonucleotide
  Antisense strand to SEQ ID NO: 1735221
cuugaaacagcgaucgugc

SEQ ID NO: 1735223 - RNA, 19 nt, Artificial Sequence
  Description of Artificial Sequence: Synthetic oligonucleotide
  Sense strand starting at position 1741 of SEQ ID NO: 1562273
gggcccacuuccuuucuua

SEQ ID NO: 1735224 - RNA, 19 nt, Artificial Sequence
  Description of Artificial Sequence: Synthetic oligonucleotide
  Antisense strand to SEQ ID NO: 1735223
uaagaaaggaagugggccc

SEQ ID NO: 1735225 - RNA, 19 nt, Artificial Sequence
  Description of Artificial Sequence: Synthetic oligonucleotide
  Sense strand starting at position 2346 of SEQ ID NO: 1562273
ugguuaaaguuauugagac

SEQ ID NO: 1735226 - RNA, 19 nt, Artificial Sequence
  Description of Artificial Sequence: Synthetic oligonucleotide
  Antisense strand to SEQ ID NO: 1735225
gucucaauaacuuuaacca

SEQ ID NO: 1735227 - RNA, 19 nt, Artificial Sequence
  Description of Artificial Sequence: Synthetic oligonucleotide
  Sense strand starting at position 2348 of SEQ ID NO: 1562273
guuaaaguuauugagacgu

SEQ ID NO: 1735228 - RNA, 19 nt, Artificial Sequence
  Description of Artificial Sequence: Synthetic oligonucleotide
  Antisense strand to SEQ ID NO: 1735227
acgucucaauaacuuuaac

SEQ ID NO: 1735229 - RNA, 19 nt, Artificial Sequence
  Description of Artificial Sequence: Synthetic oligonucleotide
  Sense strand starting at position 2836 of SEQ ID NO: 1562273
ggaacuuccuuugcucuaa

SEQ ID NO: 1735230 - RNA, 19 nt, Artificial Sequence
  Description of Artificial Sequence: Synthetic oligonucleotide
  Antisense strand to SEQ ID NO: 1735229
uuagagcaaaggaaguucc

SEQ ID NO: 1735231 - RNA, 19 nt, Artificial Sequence
  Description of Artificial Sequence: Synthetic oligonucleotide
  Sense strand starting at position 2864 of SEQ ID NO: 1562273
gcgagaaagaguuaacucu

SEQ ID NO: 1735232 - RNA, 19 nt, Artificial Sequence
  Description of Artificial Sequence: Synthetic oligonucleotide
  Antisense strand to SEQ ID NO: 1735231
agaguuaacucuuucucgc

SEQ ID NO: 1735233 - RNA, 19 nt, Artificial Sequence
  Description of Artificial Sequence: Synthetic oligonucleotide
  Sense strand starting at position 2873 of SEQ ID NO: 1562273
aguuaacucuuagagggaa

SEQ ID NO: 1735234 - RNA, 19 nt, Artificial Sequence
  Description of Artificial Sequence: Synthetic oligonucleotide
  Antisense strand to SEQ ID NO: 1735233
uucccucuaagaguuaacu

SEQ ID NO: 1735235 - RNA, 19 nt, Artificial Sequence
  Description of Artificial Sequence: Synthetic oligonucleotide
  Sense strand starting at position 3085 of SEQ ID NO: 1562273
gaaggaagauuggugcuua

SEQ ID NO: 1735236 - RNA, 19 nt, Artificial Sequence
  Description of Artificial Sequence: Synthetic oligonucleotide
  Antisense strand to SEQ ID NO: 1735235
uaagcaccaaucuuccuuc

SEQ ID NO: 1735237 - RNA, 19 nt, Artificial Sequence
  Description of Artificial Sequence: Synthetic oligonucleotide
  Sense strand starting at position 3089 of SEQ ID NO: 1562273
gaagauuggugcuuauuag

SEQ ID NO: 1735238 - RNA, 19 nt, Artificial Sequence
  Description of Artificial Sequence: Synthetic oligonucleotide
  Antisense strand to SEQ ID NO: 1735237
cuaauaagcaccaaucuuc

SEQ ID NO: 1735239 - RNA, 19 nt, Artificial Sequence
  Description of Artificial Sequence: Synthetic oligonucleotide
  Sense strand starting at position 3090 of SEQ ID NO: 1562273
aagauuggugcuuauuagu

SEQ ID NO: 1735240 - RNA, 19 nt, Artificial Sequence
  Description of Artificial Sequence: Synthetic oligonucleotide
  Antisense strand to SEQ ID NO: 1735239
acuaauaagcaccaaucuu

SEQ ID NO: 1735241 - RNA, 19 nt, Artificial Sequence
  Description of Artificial Sequence: Synthetic oligonucleotide
  Sense strand starting at position 3115 of SEQ ID NO: 1562273
gugacauuaucacugcuac

SEQ ID NO: 1735242 - RNA, 19 nt, Artificial Sequence
  Description of Artificial Sequence: Synthetic oligonucleotide
  Antisense strand to SEQ ID NO: 1735241
guagcagugauaaugucac

SEQ ID NO: 1735243 - RNA, 19 nt, Artificial Sequence
  Description of Artificial Sequence: Synthetic oligonucleotide
  Sense strand starting at position 3165 of SEQ ID NO: 1562273
uuaucauucuaagaaggga

SEQ ID NO: 1735244 - RNA, 19 nt, Artificial Sequence
  Description of Artificial Sequence: Synthetic oligonucleotide
  Antisense strand to SEQ ID NO: 1735243
ucccuucuuagaaugauaa

SEQ ID NO: 1735245 - RNA, 19 nt, Artificial Sequence
  Description of Artificial Sequence: Synthetic oligonucleotide
  Sense strand starting at position 3196 of SEQ ID NO: 1562273
gacgacuuaugguuagaag

SEQ ID NO: 1735246 - RNA, 19 nt, Artificial Sequence
  Description of Artificial Sequence: Synthetic oligonucleotide
  Antisense strand to SEQ ID NO: 1735245
cuucuaaccauaagucguc

SEQ ID NO: 1735247 - RNA, 19 nt, Artificial Sequence
  Description of Artificial Sequence: Synthetic oligonucleotide
  Sense strand starting at position 3302 of SEQ ID NO: 1562273
ugugguguaauuuguacau

SEQ ID NO: 1735248 - RNA, 19 nt, Artificial Sequence
  Description of Artificial Sequence: Synthetic oligonucleotide
  Antisense strand to SEQ ID NO: 1735247
auguacaaauuacaccaca

SEQ ID NO: 1735249 - RNA, 19 nt, Artificial Sequence
  Description of Artificial Sequence: Synthetic oligonucleotide
  Sense strand starting at position 3304 of SEQ ID NO: 1562273
ugguguaauuuguacauuu

SEQ ID NO: 1735250 - RNA, 19 nt, Artificial Sequence
  Description of Artificial Sequence: Synthetic oligonucleotide
  Antisense strand to SEQ ID NO: 1735249
aaauguacaaauuacacca

SEQ ID NO: 1735251 - RNA, 19 nt, Artificial Sequence
  Description of Artificial Sequence: Synthetic oligonucleotide
  Sense strand starting at position 3397 of SEQ ID NO: 1562273
ucgcuuucucugggaggga

SEQ ID NO: 1735252 - RNA, 19 nt, Artificial Sequence
  Description of Artificial Sequence: Synthetic oligonucleotide
  Antisense strand to SEQ ID NO: 1735251
ucccucccagagaaagcga

SEQ ID NO: 1735253 - RNA, 19 nt, Artificial Sequence
  Description of Artificial Sequence: Synthetic oligonucleotide
  Sense strand starting at position 3441 of SEQ ID NO: 1562273
agguucuuagaguggcaau

SEQ ID NO: 1735254 - RNA, 19 nt, Artificial Sequence
  Description of Artificial Sequence: Synthetic oligonucleotide
  Antisense strand to SEQ ID NO: 1735253
auugccacucuaagaaccu

SEQ ID NO: 1735255 - RNA, 19 nt, Artificial Sequence
  Description of Artificial Sequence: Synthetic oligonucleotide
  Sense strand starting at position 3442 of SEQ ID NO: 1562273
gguucuuagaguggcaaua

SEQ ID NO: 1735256 - RNA, 19 nt, Artificial Sequence
  Description of Artificial Sequence: Synthetic oligonucleotide
  Antisense strand to SEQ ID NO: 1735255
uauugccacucuaagaacc

SEQ ID NO: 1735257 - RNA, 19 nt, Artificial Sequence
  Description of Artificial Sequence: Synthetic oligonucleotide
  Sense strand starting at position 3453 of SEQ ID NO: 1562273
uggcaauaauccucuggaa

SEQ ID NO: 1735258 - RNA, 19 nt, Artificial Sequence
  Description of Artificial Sequence: Synthetic oligonucleotide
  Antisense strand to SEQ ID NO: 1735257
uuccagaggauuauugcca

SEQ ID NO: 1735259 - RNA, 19 nt, Artificial Sequence
  Description of Artificial Sequence: Synthetic oligonucleotide
  Sense strand starting at position 3455 of SEQ ID NO: 1562273
gcaauaauccucuggaagg

SEQ ID NO: 1735260 - RNA, 19 nt, Artificial Sequence
  Description of Artificial Sequence: Synthetic oligonucleotide
  Antisense strand to SEQ ID NO: 1735259
ccuuccagaggauuauugc

SEQ ID NO: 1735261 - RNA, 19 nt, Artificial Sequence
  Description of Artificial Sequence: Synthetic oligonucleotide
  Sense strand starting at position 3478 of SEQ ID NO: 1562273
ucagaauugcccggcaaca

SEQ ID NO: 1735262 - RNA, 19 nt, Artificial Sequence
  Description of Artificial Sequence: Synthetic oligonucleotide
  Antisense strand to SEQ ID NO: 1735261
uguugccgggcaauucuga

SEQ ID NO: 1735263 - RNA, 19 nt, Artificial Sequence
  Description of Artificial Sequence: Synthetic oligonucleotide
  Sense strand starting at position 3480 of SEQ ID NO: 1562273
agaauugcccggcaacaau

SEQ ID NO: 1735264 - RNA, 19 nt, Artificial Sequence
  Description of Artificial Sequence: Synthetic oligonucleotide
  Antisense strand to SEQ ID NO: 1735263
auuguugccgggcaauucu

SEQ ID NO: 1735265 - RNA, 19 nt, Artificial Sequence
  Description of Artificial Sequence: Synthetic oligonucleotide
  Sense strand starting at position 3545 of SEQ ID NO: 1562273
gcagauguaucaucuuguu

SEQ ID NO: 1735266 - RNA, 19 nt, Artificial Sequence
  Description of Artificial Sequence: Synthetic oligonucleotide
  Antisense strand to SEQ ID NO: 1735265
aacaagaugauacaucugc

SEQ ID NO: 1735267 - RNA, 19 nt, Artificial Sequence
  Description of Artificial Sequence: Synthetic oligonucleotide
  Sense strand starting at position 3615 of SEQ ID NO: 1562273
cugauagauucugaaauac

SEQ ID NO: 1735268 - RNA, 19 nt, Artificial Sequence
  Description of Artificial Sequence: Synthetic oligonucleotide
  Antisense strand to SEQ ID NO: 1735267
guauuucagaaucuaucag

SEQ ID NO: 1735269 - RNA, 19 nt, Artificial Sequence
  Description of Artificial Sequence: Synthetic oligonucleotide
  Sense strand starting at position 3799 of SEQ ID NO: 1562273
ugcauuagccguucucuuu

SEQ ID NO: 1735270 - RNA, 19 nt, Artificial Sequence
  Description of Artificial Sequence: Synthetic oligonucleotide
  Antisense strand to SEQ ID NO: 1735269
aaagagaacggcuaaugca

SEQ ID NO: 1735271 - RNA, 19 nt, Artificial Sequence
  Description of Artificial Sequence: Synthetic oligonucleotide
  Sense strand starting at position 13 of SEQ ID NO: 1562274
uucucagagcuggaucgau

SEQ ID NO: 1735272 - RNA, 19 nt, Artificial Sequence
  Description of Artificial Sequence: Synthetic oligonucleotide
  Antisense strand to SEQ ID NO: 1735271
aucgauccagcucugagaa

SEQ ID NO: 1735273 - RNA, 19 nt, Artificial Sequence
  Description of Artificial Sequence: Synthetic oligonucleotide
  Sense strand starting at position 100 of SEQ ID NO: 1562274
uguagauguagugggauau

SEQ ID NO: 1735274 - RNA, 19 nt, Artificial Sequence
  Description of Artificial Sequence: Synthetic oligonucleotide
  Antisense strand to SEQ ID NO: 1735273
auaucccacuacaucuaca

SEQ ID NO: 1735275 - RNA, 19 nt, Artificial Sequence
  Description of Artificial Sequence: Synthetic oligonucleotide
  Sense strand starting at position 101 of SEQ ID NO: 1562274
guagauguagugggauaua

SEQ ID NO: 1735276 - RNA, 19 nt, Artificial Sequence
  Description of Artificial Sequence: Synthetic oligonucleotide
  Antisense strand to SEQ ID NO: 1735275
uauaucccacuacaucuac

SEQ ID NO: 1735277 - RNA, 19 nt, Artificial Sequence
  Description of Artificial Sequence: Synthetic oligonucleotide
  Sense strand starting at position 110 of SEQ ID NO: 1562274
gugggauauacccagucuu

SEQ ID NO: 1735278 - RNA, 19 nt, Artificial Sequence
  Description of Artificial Sequence: Synthetic oligonucleotide
  Antisense strand to SEQ ID NO: 1735277
aagacuggguauaucccac

SEQ ID NO: 1735279 - RNA, 19 nt, Artificial Sequence
  Description of Artificial Sequence: Synthetic oligonucleotide
  Sense strand starting at position 151 of SEQ ID NO: 1562274
gggcaucacucacagacaa

SEQ ID NO: 1735280 - RNA, 19 nt, Artificial Sequence
  Description of Artificial Sequence: Synthetic oligonucleotide
  Antisense strand to SEQ ID NO: 1735279
uugucugugagugaugccc

SEQ ID NO: 1735281 - RNA, 19 nt, Artificial Sequence
  Description of Artificial Sequence: Synthetic oligonucleotide
  Sense strand starting at position 315 of SEQ ID NO: 1562274
cgcaaugagagacaguuaa

SEQ ID NO: 1735282 - RNA, 19 nt, Artificial Sequence
  Description of Artificial Sequence: Synthetic oligonucleotide
  Antisense strand to SEQ ID NO: 1735281
uuaacugucucucauugcg

SEQ ID NO: 1735283 - RNA, 19 nt, Artificial Sequence
  Description of Artificial Sequence: Synthetic oligonucleotide
  Sense strand starting at position 634 of SEQ ID NO: 1562274
acgguucuaucaucuuaau

SEQ ID NO: 1735284 - RNA, 19 nt, Artificial Sequence
  Description of Artificial Sequence: Synthetic oligonucleotide
  Antisense strand to SEQ ID NO: 1735283
auuaagaugauagaaccgu

SEQ ID NO: 1735285 - RNA, 19 nt, Artificial Sequence
  Description of Artificial Sequence: Synthetic oligonucleotide
  Sense strand starting at position 671 of SEQ ID NO: 1562274
agaaacaaguuugauauca

SEQ ID NO: 1735286 - RNA, 19 nt, Artificial Sequence
  Description of Artificial Sequence: Synthetic oligonucleotide
  Antisense strand to SEQ ID NO: 1735285
ugauaucaaacuuguuucu

SEQ ID NO: 1735287 - RNA, 19 nt, Artificial Sequence
  Description of Artificial Sequence: Synthetic oligonucleotide
  Sense strand starting at position 698 of SEQ ID NO: 1562274
uucguuauacuucgagaac

SEQ ID NO: 1735288 - RNA, 19 nt, Artificial Sequence
  Description of Artificial Sequence: Synthetic oligonucleotide
  Antisense strand to SEQ ID NO: 1735287
guucucgaaguauaacgaa

SEQ ID NO: 1735289 - RNA, 19 nt, Artificial Sequence
  Description of Artificial Sequence: Synthetic oligonucleotide
  Sense strand starting at position 701 of SEQ ID NO: 1562274
guuauacuucgagaacgga

SEQ ID NO: 1735290 - RNA, 19 nt, Artificial Sequence
  Description of Artificial Sequence: Synthetic oligonucleotide
  Antisense strand to SEQ ID NO: 1735289
uccguucucgaaguauaac

SEQ ID NO: 1735291 - RNA, 19 nt, Artificial Sequence
  Description of Artificial Sequence: Synthetic oligonucleotide
  Sense strand starting at position 709 of SEQ ID NO: 1562274
ucgagaacggaaugcaaua

SEQ ID NO: 1735292 - RNA, 19 nt, Artificial Sequence
  Description of Artificial Sequence: Synthetic oligonucleotide
  Antisense strand to SEQ ID NO: 1735291
uauugcauuccguucucga

SEQ ID NO: 1735293 - RNA, 19 nt, Artificial Sequence
  Description of Artificial Sequence: Synthetic oligonucleotide
  Sense strand starting at position 720 of SEQ ID NO: 1562274
augcaauaaugguuaguaa

SEQ ID NO: 1735294 - RNA, 19 nt, Artificial Sequence
  Description of Artificial Sequence: Synthetic oligonucleotide
  Antisense strand to SEQ ID NO: 1735293
uuacuaaccauuauugcau

SEQ ID NO: 1735295 - RNA, 19 nt, Artificial Sequence
  Description of Artificial Sequence: Synthetic oligonucleotide
  Sense strand starting at position 727 of SEQ ID NO: 1562274
aaugguuaguaagaaggaa

SEQ ID NO: 1735296 - RNA, 19 nt, Artificial Sequence
  Description of Artificial Sequence: Synthetic oligonucleotide
  Antisense strand to SEQ ID NO: 1735295
uuccuucuuacuaaccauu

SEQ ID NO: 1735297 - RNA, 19 nt, Artificial Sequence
  Description of Artificial Sequence: Synthetic oligonucleotide
  Sense strand starting at position 818 of SEQ ID NO: 1562274
ggugcagaucuccgacaua

SEQ ID NO: 1735298 - RNA, 19 nt, Artificial Sequence
  Description of Artificial Sequence: Synthetic oligonucleotide
  Antisense strand to SEQ ID NO: 1735297
uaugucggagaucugcacc

SEQ ID NO: 1735299 - RNA, 19 nt, Artificial Sequence
  Description of Artificial Sequence: Synthetic oligonucleotide
  Sense strand starting at position 821 of SEQ ID NO: 1562274
gcagaucuccgacauagaa

SEQ ID NO: 1735300 - RNA, 19 nt, Artificial Sequence
  Description of Artificial Sequence: Synthetic oligonucleotide
  Antisense strand to SEQ ID NO: 1735299
uucuaugucggagaucugc

SEQ ID NO: 1735301 - RNA, 19 nt, Artificial Sequence
  Description of Artificial Sequence: Synthetic oligonucleotide
  Sense strand starting at position 2615 of SEQ ID NO: 1562274
cccggaguugccugggaca

SEQ ID NO: 1735302 - RNA, 19 nt, Artificial Sequence
  Description of Artificial Sequence: Synthetic oligonucleotide
  Antisense strand to SEQ ID NO: 1735301
ugucccaggcaacuccggg

SEQ ID NO: 1735303 - RNA, 19 nt, Artificial Sequence
  Description of Artificial Sequence: Synthetic oligonucleotide
  Sense strand starting at position 2661 of SEQ ID NO: 1562274
gcccgucauccucacugua

SEQ ID NO: 1735304 - RNA, 19 nt, Artificial Sequence
  Description of Artificial Sequence: Synthetic oligonucleotide
  Antisense strand to SEQ ID NO: 1735303
uacagugaggaugacgggc

SEQ ID NO: 1735305 - RNA, 19 nt, Artificial Sequence
  Description of Artificial Sequence: Synthetic oligonucleotide
  Sense strand starting at position 2663 of SEQ ID NO: 1562274
ccgucauccucacuguaga

SEQ ID NO: 1735306 - RNA, 19 nt, Artificial Sequence
  Description of Artificial Sequence: Synthetic oligonucleotide
  Antisense strand to SEQ ID NO: 1735305
ucuacagugaggaugacgg

SEQ ID NO: 1735307 - RNA, 19 nt, Artificial Sequence
  Description of Artificial Sequence: Synthetic oligonucleotide
  Sense strand starting at position 2903 of SEQ ID NO: 1562274
cugacuguuccacaguuau

SEQ ID NO: 1735308 - RNA, 19 nt, Artificial Sequence
  Description of Artificial Sequence: Synthetic oligonucleotide
  Antisense strand to SEQ ID NO: 1735307
auaacuguggaacagucag

SEQ ID NO: 1735309 - RNA, 19 nt, Artificial Sequence
  Description of Artificial Sequence: Synthetic oligonucleotide
  Sense strand starting at position 2946 of SEQ ID NO: 1562274
ugauaagcauauguagaaa

SEQ ID NO: 1735310 - RNA, 19 nt, Artificial Sequence
  Description of Artificial Sequence: Synthetic oligonucleotide
  Antisense strand to SEQ ID NO: 1735309
uuucuacauaugcuuauca

SEQ ID NO: 1735311 - RNA, 19 nt, Artificial Sequence
  Description of Artificial Sequence: Synthetic oligonucleotide
  Sense strand starting at position 3003 of SEQ ID NO: 1562274
ugcaguucucugcacgaag

SEQ ID NO: 1735312 - RNA, 19 nt, Artificial Sequence
  Description of Artificial Sequence: Synthetic oligonucleotide
  Antisense strand to SEQ ID NO: 1735311
cuucgugcagagaacugca

SEQ ID NO: 1735313 - RNA, 19 nt, Artificial Sequence
  Description of Artificial Sequence: Synthetic oligonucleotide
  Sense strand starting at position 3005 of SEQ ID NO: 1562274
caguucucugcacgaagau

SEQ ID NO: 1735314 - RNA, 19 nt, Artificial Sequence
  Description of Artificial Sequence: Synthetic oligonucleotide
  Antisense strand to SEQ ID NO: 1735313
aucuucgugcagagaacug

SEQ ID NO: 1735315 - RNA, 19 nt, Artificial Sequence
  Description of Artificial Sequence: Synthetic oligonucleotide
  Sense strand starting at position 3006 of SEQ ID NO: 1562274
aguucucugcacgaagaua

SEQ ID NO: 1735316 - RNA, 19 nt, Artificial Sequence
  Description of Artificial Sequence: Synthetic oligonucleotide
  Antisense strand to SEQ ID NO: 1735315
uaucuucgugcagagaacu

SEQ ID NO: 1735317 - RNA, 19 nt, Artificial Sequence
  Description of Artificial Sequence: Synthetic oligonucleotide
  Sense strand starting at position 3021 of SEQ ID NO: 1562274
gauaaaguuugauaggcaa

SEQ ID NO: 1735318 - RNA, 19 nt, Artificial Sequence
  Description of Artificial Sequence: Synthetic oligonucleotide
  Antisense strand to SEQ ID NO: 1735317
uugccuaucaaacuuuauc

SEQ ID NO: 1735319 - RNA, 19 nt, Artificial Sequence
  Description of Artificial Sequence: Synthetic oligonucleotide
  Sense strand starting at position 3024 of SEQ ID NO: 1562274
aaaguuugauaggcaaacu

SEQ ID NO: 1735320 - RNA, 19 nt, Artificial Sequence
  Description of Artificial Sequence: Synthetic oligonucleotide
  Antisense strand to SEQ ID NO: 1735319
aguuugccuaucaaacuuu

SEQ ID NO: 1735321 - RNA, 19 nt, Artificial Sequence
  Description of Artificial Sequence: Synthetic oligonucleotide
  Sense strand starting at position 3163 of SEQ ID NO: 1562274
ucaaauugagguuguacua

SEQ ID NO: 1735322 - RNA, 19 nt, Artificial Sequence
  Description of Artificial Sequence: Synthetic oligonucleotide
  Antisense strand to SEQ ID NO: 1735321
uaguacaaccucaauuuga

SEQ ID NO: 1735323 - RNA, 19 nt, Artificial Sequence
  Description of Artificial Sequence: Synthetic oligonucleotide
  Sense strand starting at position 3380 of SEQ ID NO: 1562274
cgagguccgcgccuauaaa

SEQ ID NO: 1735324 - RNA, 19 nt, Artificial Sequence
  Description of Artificial Sequence: Synthetic oligonucleotide
  Antisense strand to SEQ ID NO: 1735323
uuuauaggcgcggaccucg

SEQ ID NO: 1735325 - RNA, 19 nt, Artificial Sequence
  Description of Artificial Sequence: Synthetic oligonucleotide
  Sense strand starting at position 3381 of SEQ ID NO: 1562274
gagguccgcgccuauaaau

SEQ ID NO: 1735326 - RNA, 19 nt, Artificial Sequence
  Description of Artificial Sequence: Synthetic oligonucleotide
  Antisense strand to SEQ ID NO: 1735325
auuuauaggcgcggaccuc

SEQ ID NO: 1735327 - RNA, 19 nt, Artificial Sequence
  Description of Artificial Sequence: Synthetic oligonucleotide
  Sense strand starting at position 3720 of SEQ ID NO: 1562274
acgccuucucgggacacau

SEQ ID NO: 1735328 - RNA, 19 nt, Artificial Sequence
  Description of Artificial Sequence: Synthetic oligonucleotide
  Antisense strand to SEQ ID NO: 1735327
augugucccgagaaggcgu

SEQ ID NO: 1735329 - RNA, 19 nt, Artificial Sequence
  Description of Artificial Sequence: Synthetic oligonucleotide
  Sense strand starting at position 3729 of SEQ ID NO: 1562274
cgggacacauucuuaaaga

SEQ ID NO: 1735330 - RNA, 19 nt, Artificial Sequence
  Description of Artificial Sequence: Synthetic oligonucleotide
  Antisense strand to SEQ ID NO: 1735329
ucuuuaagaaugugucccg

SEQ ID NO: 1735331 - RNA, 19 nt, Artificial Sequence
  Description of Artificial Sequence: Synthetic oligonucleotide
  Sense strand starting at position 3730 of SEQ ID NO: 1562274
gggacacauucuuaaagag

SEQ ID NO: 1735332 - RNA, 19 nt, Artificial Sequence
  Description of Artificial Sequence: Synthetic oligonucleotide
  Antisense strand to SEQ ID NO: 1735331
cucuuuaagaauguguccc

SEQ ID NO: 1735333 - RNA, 19 nt, Artificial Sequence
  Description of Artificial Sequence: Synthetic oligonucleotide
  Sense strand starting at position 3745 of SEQ ID NO: 1562274
agagauacgugccugagga

SEQ ID NO: 1735334 - RNA, 19 nt, Artificial Sequence
  Description of Artificial Sequence: Synthetic oligonucleotide
  Antisense strand to SEQ ID NO: 1735333
uccucaggcacguaucucu

SEQ ID NO: 1735335 - RNA, 19 nt, Artificial Sequence
  Description of Artificial Sequence: Synthetic oligonucleotide
  Sense strand starting at position 3746 of SEQ ID NO: 1562274
gagauacgugccugaggac

SEQ ID NO: 1735336 - RNA, 19 nt, Artificial Sequence
  Description of Artificial Sequence: Synthetic oligonucleotide
  Antisense strand to SEQ ID NO: 1735335
guccucaggcacguaucuc

SEQ ID NO: 1735337 - RNA, 19 nt, Artificial Sequence
  Description of Artificial Sequence: Synthetic oligonucleotide
  Sense strand starting at position 3758 of SEQ ID NO: 1562274
ugaggacguuguguguauu

SEQ ID NO: 1735338 - RNA, 19 nt, Artificial Sequence
  Description of Artificial Sequence: Synthetic oligonucleotide
  Antisense strand to SEQ ID NO: 1735337
aauacacacaacguccuca

SEQ ID NO: 1735339 - RNA, 19 nt, Artificial Sequence
  Description of Artificial Sequence: Synthetic oligonucleotide
  Sense strand starting at position 3759 of SEQ ID NO: 1562274
gaggacguuguguguauuu

SEQ ID NO: 1735340 - RNA, 19 nt, Artificial Sequence
  Description of Artificial Sequence: Synthetic oligonucleotide
  Antisense strand to SEQ ID NO: 1735339
aaauacacacaacguccuc

SEQ ID NO: 1735341 - RNA, 19 nt, Artificial Sequence
  Description of Artificial Sequence: Synthetic oligonucleotide
  Sense strand starting at position 3761 of SEQ ID NO: 1562274
ggacguuguguguauuucu

SEQ ID NO: 1735342 - RNA, 19 nt, Artificial Sequence
  Description of Artificial Sequence: Synthetic oligonucleotide
  Antisense strand to SEQ ID NO: 1735341
agaaauacacacaacgucc

SEQ ID NO: 1735343 - RNA, 19 nt, Artificial Sequence
  Description of Artificial Sequence: Synthetic oligonucleotide
  Sense strand starting at position 3766 of SEQ ID NO: 1562274
uuguguguauuucugugua

SEQ ID NO: 1735344 - RNA, 19 nt, Artificial Sequence
  Description of Artificial Sequence: Synthetic oligonucleotide
  Antisense strand to SEQ ID NO: 1735343
uacacagaaauacacacaa

SEQ ID NO: 1735345 - RNA, 19 nt, Artificial Sequence
  Description of Artificial Sequence: Synthetic oligonucleotide
  Sense strand starting at position 3768 of SEQ ID NO: 1562274
guguguauuucuguguaac

SEQ ID NO: 1735346 - RNA, 19 nt, Artificial Sequence
  Description of Artificial Sequence: Synthetic oligonucleotide
  Antisense strand to SEQ ID NO: 1735345
guuacacagaaauacacac

SEQ ID NO: 1735347 - RNA, 19 nt, Artificial Sequence
  Description of Artificial Sequence: Synthetic oligonucleotide
  Sense strand starting at position 3769 of SEQ ID NO: 1562274
uguguauuucuguguaaca

SEQ ID NO: 1735348 - RNA, 19 nt, Artificial Sequence
  Description of Artificial Sequence: Synthetic oligonucleotide
  Antisense strand to SEQ ID NO: 1735347
uguuacacagaaauacaca

SEQ ID NO: 1735349 - RNA, 19 nt, Artificial Sequence
  Description of Artificial Sequence: Synthetic oligonucleotide
  Sense strand starting at position 3770 of SEQ ID NO: 1562274
guguauuucuguguaacag

SEQ ID NO: 1735350 - RNA, 19 nt, Artificial Sequence
  Description of Artificial Sequence: Synthetic oligonucleotide
  Antisense strand to SEQ ID NO: 1735349
cuguuacacagaaauacac

SEQ ID NO: 1735351 - RNA, 19 nt, Artificial Sequence
  Description of Artificial Sequence: Synthetic oligonucleotide
  Sense strand starting at position 181 of SEQ ID NO: 1562275
aguaauacaccuugcugua

SEQ ID NO: 1735352 - RNA, 19 nt, Artificial Sequence
  Description of Artificial Sequence: Synthetic oligonucleotide
  Antisense strand to SEQ ID NO: 1735351
uacagcaagguguauuacu

SEQ ID NO: 1735353 - RNA, 19 nt, Artificial Sequence
  Description of Artificial Sequence: Synthetic oligonucleotide
  Sense strand starting at position 220 of SEQ ID NO: 1562275
gguacauggucagaaggga

SEQ ID NO: 1735354 - RNA, 19 nt, Artificial Sequence
  Description of Artificial Sequence: Synthetic oligonucleotide
  Antisense strand to SEQ ID NO: 1735353
ucccuucugaccauguacc

SEQ ID NO: 1735355 - RNA, 19 nt, Artificial Sequence
  Description of Artificial Sequence: Synthetic oligonucleotide
  Sense strand starting at position 894 of SEQ ID NO: 1562275
cugccuguucucugugaga

SEQ ID NO: 1735356 - RNA, 19 nt, Artificial Sequence
  Description of Artificial Sequence: Synthetic oligonucleotide
  Antisense strand to SEQ ID NO: 1735355
ucucacagagaacaggcag

SEQ ID NO: 1735357 - RNA, 19 nt, Artificial Sequence
  Description of Artificial Sequence: Synthetic oligonucleotide
  Sense strand starting at position 896 of SEQ ID NO: 1562275
gccuguucucugugagaau

SEQ ID NO: 1735358 - RNA, 19 nt, Artificial Sequence
  Description of Artificial Sequence: Synthetic oligonucleotide
  Antisense strand to SEQ ID NO: 1735357
auucucacagagaacaggc

SEQ ID NO: 1735359 - RNA, 19 nt, Artificial Sequence
  Description of Artificial Sequence: Synthetic oligonucleotide
  Sense strand starting at position 897 of SEQ ID NO: 1562275
ccuguucucugugagaaug

SEQ ID NO: 1735360 - RNA, 19 nt, Artificial Sequence
  Description of Artificial Sequence: Synthetic oligonucleotide
  Antisense strand to SEQ ID NO: 1735359
cauucucacagagaacagg

SEQ ID NO: 1735361 - RNA, 19 nt, Artificial Sequence
  Description of Artificial Sequence: Synthetic oligonucleotide
  Sense strand starting at position 899 of SEQ ID NO: 1562275
uguucucugugagaaugaa

SEQ ID NO: 1735362 - RNA, 19 nt, Artificial Sequence
  Description of Artificial Sequence: Synthetic oligonucleotide
  Antisense strand to SEQ ID NO: 1735361
uucauucucacagagaaca

SEQ ID NO: 1735363 - RNA, 19 nt, Artificial Sequence
  Description of Artificial Sequence: Synthetic oligonucleotide
  Sense strand starting at position 1102 of SEQ ID NO: 1562275
gcgccagugcguuacucaa

SEQ ID NO: 1735364 - RNA, 19 nt, Artificial Sequence
  Description of Artificial Sequence: Synthetic oligonucleotide
  Antisense strand to SEQ ID NO: 1735363
uugaguaacgcacuggcgc

SEQ ID NO: 1735365 - RNA, 19 nt, Artificial Sequence
  Description of Artificial Sequence: Synthetic oligonucleotide
  Sense strand starting at position 1104 of SEQ ID NO: 1562275
gccagugcguuacucaaga

SEQ ID NO: 1735366 - RNA, 19 nt, Artificial Sequence
  Description of Artificial Sequence: Synthetic oligonucleotide
  Antisense strand to SEQ ID NO: 1735365
ucuugaguaacgcacuggc

SEQ ID NO: 1735367 - RNA, 19 nt, Artificial Sequence
  Description of Artificial Sequence: Synthetic oligonucleotide
  Sense strand starting at position 1109 of SEQ ID NO: 1562275
ugcguuacucaagaacacu

SEQ ID NO: 1735368 - RNA, 19 nt, Artificial Sequence
  Description of Artificial Sequence: Synthetic oligonucleotide
  Antisense strand to SEQ ID NO: 1735367
aguguucuugaguaacgca

SEQ ID NO: 1735369 - RNA, 19 nt, Artificial Sequence
  Description of Artificial Sequence: Synthetic oligonucleotide
  Sense strand starting at position 1319 of SEQ ID NO: 1562275
uaacuuuaacgauguguuu

SEQ ID NO: 1735370 - RNA, 19 nt, Artificial Sequence
  Description of Artificial Sequence: Synthetic oligonucleotide
  Antisense strand to SEQ ID NO: 1735369
aaacacaucguuaaaguua

SEQ ID NO: 1735371 - RNA, 19 nt, Artificial Sequence
  Description of Artificial Sequence: Synthetic oligonucleotide
  Sense strand starting at position 1364 of SEQ ID NO: 1562275
cacagacuucuccaucgga

SEQ ID NO: 1735372 - RNA, 19 nt, Artificial Sequence
  Description of Artificial Sequence: Synthetic oligonucleotide
  Antisense strand to SEQ ID NO: 1735371
uccgauggagaagucugug

SEQ ID NO: 1735373 - RNA, 19 nt, Artificial Sequence
  Description of Artificial Sequence: Synthetic oligonucleotide
  Sense strand starting at position 1501 of SEQ ID NO: 1562275
guuuguuacucccaggaca

SEQ ID NO: 1735374 - RNA, 19 nt, Artificial Sequence
  Description of Artificial Sequence: Synthetic oligonucleotide
  Antisense strand to SEQ ID NO: 1735373
uguccugggaguaacaaac

SEQ ID NO: 1735375 - RNA, 19 nt, Artificial Sequence
  Description of Artificial Sequence: Synthetic oligonucleotide
  Sense strand starting at position 1503 of SEQ ID NO: 1562275
uuguuacucccaggacauu

SEQ ID NO: 1735376 - RNA, 19 nt, Artificial Sequence
  Description of Artificial Sequence: Synthetic oligonucleotide
  Antisense strand to SEQ ID NO: 1735375
aauguccugggaguaacaa

SEQ ID NO: 1735377 - RNA, 19 nt, Artificial Sequence
  Description of Artificial Sequence: Synthetic oligonucleotide
  Sense strand starting at position 1559 of SEQ ID NO: 1562275
guggaauggacuugggagu

SEQ ID NO: 1735378 - RNA, 19 nt, Artificial Sequence
  Description of Artificial Sequence: Synthetic oligonucleotide
  Antisense strand to SEQ ID NO: 1735377
acucccaaguccauuccac

SEQ ID NO: 1735379 - RNA, 19 nt, Artificial Sequence
  Description of Artificial Sequence: Synthetic oligonucleotide
  Sense strand starting at position 1596 of SEQ ID NO: 1562275
gacagagcucuguguggga

SEQ ID NO: 1735380 - RNA, 19 nt, Artificial Sequence
  Description of Artificial Sequence: Synthetic oligonucleotide
  Antisense strand to SEQ ID NO: 1735379
ucccacacagagcucuguc

SEQ ID NO: 1735381 - RNA, 19 nt, Artificial Sequence
  Description of Artificial Sequence: Synthetic oligonucleotide
  Sense strand starting at position 1598 of SEQ ID NO: 1562275
cagagcucugugugggaau

SEQ ID NO: 1735382 - RNA, 19 nt, Artificial Sequence
  Description of Artificial Sequence: Synthetic oligonucleotide
  Antisense strand to SEQ ID NO: 1735381
auucccacacagagcucug

SEQ ID NO: 1735383 - RNA, 19 nt, Artificial Sequence
  Description of Artificial Sequence: Synthetic oligonucleotide
  Sense strand starting at position 1638 of SEQ ID NO: 1562275
aggccagaugcaugaaugu

SEQ ID NO: 1735384 - RNA, 19 nt, Artificial Sequence
  Description of Artificial Sequence: Synthetic oligonucleotide
  Antisense strand to SEQ ID NO: 1735383
acauucaugcaucuggccu

SEQ ID NO: 1735385 - RNA, 19 nt, Artificial Sequence
  Description of Artificial Sequence: Synthetic oligonucleotide
  Sense strand starting at position 1908 of SEQ ID NO: 1562275
gaaagagaguucugcucag

SEQ ID NO: 1735386 - RNA, 19 nt, Artificial Sequence
  Description of Artificial Sequence: Synthetic oligonucleotide
  Antisense strand to SEQ ID NO: 1735385
cugagcagaacucucuuuc

SEQ ID NO: 1735387 - RNA, 19 nt, Artificial Sequence
  Description of Artificial Sequence: Synthetic oligonucleotide
  Sense strand starting at position 2067 of SEQ ID NO: 1562275
gaagaaaucuugcuggauc

SEQ ID NO: 1735388 - RNA, 19 nt, Artificial Sequence
  Description of Artificial Sequence: Synthetic oligonucleotide
  Antisense strand to SEQ ID NO: 1735387
gauccagcaagauuucuuc

SEQ ID NO: 1735389 - RNA, 19 nt, Artificial Sequence
  Description of Artificial Sequence: Synthetic oligonucleotide
  Sense strand starting at position 2069 of SEQ ID NO: 1562275
agaaaucuugcuggauccu

SEQ ID NO: 1735390 - RNA, 19 nt, Artificial Sequence
  Description of Artificial Sequence: Synthetic oligonucleotide
  Antisense strand to SEQ ID NO: 1735389
aggauccagcaagauuucu

SEQ ID NO: 1735391 - RNA, 19 nt, Artificial Sequence
  Description of Artificial Sequence: Synthetic oligonucleotide
  Sense strand starting at position 2284 of SEQ ID NO: 1562275
gccgucuucccguucucau

SEQ ID NO: 1735392 - RNA, 19 nt, Artificial Sequence
  Description of Artificial Sequence: Synthetic oligonucleotide
  Antisense strand to SEQ ID NO: 1735391
augagaacgggaagacggc

SEQ ID NO: 1735393 - RNA, 19 nt, Artificial Sequence
  Description of Artificial Sequence: Synthetic oligonucleotide
  Sense strand starting at position 2291 of SEQ ID NO: 1562275
ucccguucucaucaucaca

SEQ ID NO: 1735394 - RNA, 19 nt, Artificial Sequence
  Description of Artificial Sequence: Synthetic oligonucleotide
  Antisense strand to SEQ ID NO: 1735393
ugugaugaugagaacggga

SEQ ID NO: 1735395 - RNA, 19 nt, Artificial Sequence
  Description of Artificial Sequence: Synthetic oligonucleotide
  Sense strand starting at position 2293 of SEQ ID NO: 1562275
ccguucucaucaucacaga

SEQ ID NO: 1735396 - RNA, 19 nt, Artificial Sequence
  Description of Artificial Sequence: Synthetic oligonucleotide
  Antisense strand to SEQ ID NO: 1735395
ucugugaugaugagaacgg

SEQ ID NO: 1735397 - RNA, 19 nt, Artificial Sequence
  Description of Artificial Sequence: Synthetic oligonucleotide
  Sense strand starting at position 2484 of SEQ ID NO: 1562275
gcuugaaauccugacaacu

SEQ ID NO: 1735398 - RNA, 19 nt, Artificial Sequence
  Description of Artificial Sequence: Synthetic oligonucleotide
  Antisense strand to SEQ ID NO: 1735397
aguugucaggauuucaagc

SEQ ID NO: 1735399 - RNA, 19 nt, Artificial Sequence
  Description of Artificial Sequence: Synthetic oligonucleotide
  Sense strand starting at position 2670 of SEQ ID NO: 1562275
cgaccuuccugccuggaau

SEQ ID NO: 1735400 - RNA, 19 nt, Artificial Sequence
  Description of Artificial Sequence: Synthetic oligonucleotide
  Antisense strand to SEQ ID NO: 1735399
auuccaggcaggaaggucg

SEQ ID NO: 1735401 - RNA, 19 nt, Artificial Sequence
  Description of Artificial Sequence: Synthetic oligonucleotide
  Sense strand starting at position 2845 of SEQ ID NO: 1562275
ggaagauggaucugcuguu

SEQ ID NO: 1735402 - RNA, 19 nt, Artificial Sequence
  Description of Artificial Sequence: Synthetic oligonucleotide
  Antisense strand to SEQ ID NO: 1735401
aacagcagauccaucuucc

SEQ ID NO: 1735403 - RNA, 19 nt, Artificial Sequence
  Description of Artificial Sequence: Synthetic oligonucleotide
  Sense strand starting at position 2852 of SEQ ID NO: 1562275
ggaucugcuguucgugaaa

SEQ ID NO: 1735404 - RNA, 19 nt, Artificial Sequence
  Description of Artificial Sequence: Synthetic oligonucleotide
  Antisense strand to SEQ ID NO: 1735403
uuucacgaacagcagaucc

SEQ ID NO: 1735405 - RNA, 19 nt, Artificial Sequence
  Description of Artificial Sequence: Synthetic oligonucleotide
  Sense strand starting at position 2863 of SEQ ID NO: 1562275
ucgugaaagugcuugcaaa

SEQ ID NO: 1735406 - RNA, 19 nt, Artificial Sequence
  Description of Artificial Sequence: Synthetic oligonucleotide
  Antisense strand to SEQ ID NO: 1735405
uuugcaagcacuuucacga

SEQ ID NO: 1735407 - RNA, 19 nt, Artificial Sequence
  Description of Artificial Sequence: Synthetic oligonucleotide
  Sense strand starting at position 2864 of SEQ ID NO: 1562275
cgugaaagugcuugcaaag

SEQ ID NO: 1735408 - RNA, 19 nt, Artificial Sequence
  Description of Artificial Sequence: Synthetic oligonucleotide
  Antisense strand to SEQ ID NO: 1735407
cuuugcaagcacuuucacg

SEQ ID NO: 1735409 - RNA, 19 nt, Artificial Sequence
  Description of Artificial Sequence: Synthetic oligonucleotide
  Sense strand starting at position 2933 of SEQ ID NO: 1562275
gcagguauuuauuggucuu

SEQ ID NO: 1735410 - RNA, 19 nt, Artificial Sequence
  Description of Artificial Sequence: Synthetic oligonucleotide
  Antisense strand to SEQ ID NO: 1735409
aagaccaauaaauaccugc

SEQ ID NO: 1735411 - RNA, 19 nt, Artificial Sequence
  Description of Artificial Sequence: Synthetic oligonucleotide
  Sense strand starting at position 2936 of SEQ ID NO: 1562275
gguauuuauuggucuuagu

SEQ ID NO: 1735412 - RNA, 19 nt, Artificial Sequence
  Description of Artificial Sequence: Synthetic oligonucleotide
  Antisense strand to SEQ ID NO: 1735411
acuaagaccaauaaauacc

SEQ ID NO: 1735413 - RNA, 19 nt, Artificial Sequence
  Description of Artificial Sequence: Synthetic oligonucleotide
  Sense strand starting at position 2986 of SEQ ID NO: 1562275
cuuguaauuuccugagugg

SEQ ID NO: 1735414 - RNA, 19 nt, Artificial Sequence
  Description of Artificial Sequence: Synthetic oligonucleotide
  Antisense strand to SEQ ID NO: 1735413
ccacucaggaaauuacaag

SEQ ID NO: 1735415 - RNA, 19 nt, Artificial Sequence
  Description of Artificial Sequence: Synthetic oligonucleotide
  Sense strand starting at position 3030 of SEQ ID NO: 1562275
ucuauuugguucuuguaca

SEQ ID NO: 1735416 - RNA, 19 nt, Artificial Sequence
  Description of Artificial Sequence: Synthetic oligonucleotide
  Antisense strand to SEQ ID NO: 1735415
uguacaagaaccaaauaga

SEQ ID NO: 1735417 - RNA, 19 nt, Artificial Sequence
  Description of Artificial Sequence: Synthetic oligonucleotide
  Sense strand starting at position 3031 of SEQ ID NO: 1562275
cuauuugguucuuguacaa

SEQ ID NO: 1735418 - RNA, 19 nt, Artificial Sequence
  Description of Artificial Sequence: Synthetic oligonucleotide
  Antisense strand to SEQ ID NO: 1735417
uuguacaagaaccaaauag

SEQ ID NO: 1735419 - RNA, 19 nt, Artificial Sequence
  Description of Artificial Sequence: Synthetic oligonucleotide
  Sense strand starting at position 3726 of SEQ ID NO: 1562275
gcugguauuucccugaguu

SEQ ID NO: 1735420 - RNA, 19 nt, Artificial Sequence
  Description of Artificial Sequence: Synthetic oligonucleotide
  Antisense strand to SEQ ID NO: 1735419
aacucagggaaauaccagc

SEQ ID NO: 1735421 - RNA, 19 nt, Artificial Sequence
  Description of Artificial Sequence: Synthetic oligonucleotide
  Sense strand starting at position 3747 of SEQ ID NO: 1562275
gugagcuguccuggcaaau

SEQ ID NO: 1735422 - RNA, 19 nt, Artificial Sequence
  Description of Artificial Sequence: Synthetic oligonucleotide
  Antisense strand to SEQ ID NO: 1735421
auuugccaggacagcucac

SEQ ID NO: 1735423 - RNA, 19 nt, Artificial Sequence
  Description of Artificial Sequence: Synthetic oligonucleotide
  Sense strand starting at position 3805 of SEQ ID NO: 1562275
ccaguugggucauggauca

SEQ ID NO: 1735424 - RNA, 19 nt, Artificial Sequence
  Description of Artificial Sequence: Synthetic oligonucleotide
  Antisense strand to SEQ ID NO: 1735423
ugauccaugacccaacugg

SEQ ID NO: 1735425 - RNA, 19 nt, Artificial Sequence
  Description of Artificial Sequence: Synthetic oligonucleotide
  Sense strand starting at position 3830 of SEQ ID NO: 1562275
gggauuggcaucugacagu

SEQ ID NO: 1735426 - RNA, 19 nt, Artificial Sequence
  Description of Artificial Sequence: Synthetic oligonucleotide
  Antisense strand to SEQ ID NO: 1735425
acugucagaugccaauccc

SEQ ID NO: 1735427 - RNA, 19 nt, Artificial Sequence
  Description of Artificial Sequence: Synthetic oligonucleotide
  Sense strand starting at position 3895 of SEQ ID NO: 1562275
gucagaacucaauggaauu

SEQ ID NO: 1735428 - RNA, 19 nt, Artificial Sequence
  Description of Artificial Sequence: Synthetic oligonucleotide
  Antisense strand to SEQ ID NO: 1735427
aauuccauugaguucugac

SEQ ID NO: 1735429 - RNA, 19 nt, Artificial Sequence
  Description of Artificial Sequence: Synthetic oligonucleotide
  Sense strand starting at position 3953 of SEQ ID NO: 1562275
gggaaacauccacgcaucu

SEQ ID NO: 1735430 - RNA, 19 nt, Artificial Sequence
  Description of Artificial Sequence: Synthetic oligonucleotide
  Antisense strand to SEQ ID NO: 1735429
agaugcguggauguuuccc

SEQ ID NO: 1735431 - RNA, 19 nt, Artificial Sequence
  Description of Artificial Sequence: Synthetic oligonucleotide
  Sense strand starting at position 24 of SEQ ID NO: 1562276
ccuguugugucagaucacu

SEQ ID NO: 1735432 - RNA, 19 nt, Artificial Sequence
  Description of Artificial Sequence: Synthetic oligonucleotide
  Antisense strand to SEQ ID NO: 1735431
agugaucugacacaacagg

SEQ ID NO: 1735433 - RNA, 19 nt, Artificial Sequence
  Description of Artificial Sequence: Synthetic oligonucleotide
  Sense strand starting at position 29 of SEQ ID NO: 1562276
ugugucagaucacuuguuu

SEQ ID NO: 1735434 - RNA, 19 nt, Artificial Sequence
  Description of Artificial Sequence: Synthetic oligonucleotide
  Antisense strand to SEQ ID NO: 1735433
aaacaagugaucugacaca

SEQ ID NO: 1735435 - RNA, 19 nt, Artificial Sequence
  Description of Artificial Sequence: Synthetic oligonucleotide
  Sense strand starting at position 33 of SEQ ID NO: 1562276
ucagaucacuuguuuacga

SEQ ID NO: 1735436 - RNA, 19 nt, Artificial Sequence
  Description of Artificial Sequence: Synthetic oligonucleotide
  Antisense strand to SEQ ID NO: 1735435
ucguaaacaagugaucuga

SEQ ID NO: 1735437 - RNA, 19 nt, Artificial Sequence
  Description of Artificial Sequence: Synthetic oligonucleotide
  Sense strand starting at position 38 of SEQ ID NO: 1562276
ucacuuguuuacgagguca

SEQ ID NO: 1735438 - RNA, 19 nt, Artificial Sequence
  Description of Artificial Sequence: Synthetic oligonucleotide
  Antisense strand to SEQ ID NO: 1735437
ugaccucguaaacaaguga

SEQ ID NO: 1735439 - RNA, 19 nt, Artificial Sequence
  Description of Artificial Sequence: Synthetic oligonucleotide
  Sense strand starting at position 40 of SEQ ID NO: 1562276
acuuguuuacgaggucaaa

SEQ ID NO: 1735440 - RNA, 19 nt, Artificial Sequence
  Description of Artificial Sequence: Synthetic oligonucleotide
  Antisense strand to SEQ ID NO: 1735439
uuugaccucguaaacaagu

SEQ ID NO: 1735441 - RNA, 19 nt, Artificial Sequence
  Description of Artificial Sequence: Synthetic oligonucleotide
  Sense strand starting at position 83 of SEQ ID NO: 1562276
guaucagucacgugucuac

SEQ ID NO: 1735442 - RNA, 19 nt, Artificial Sequence
  Description of Artificial Sequence: Synthetic oligonucleotide
  Antisense strand to SEQ ID NO: 1735441
guagacacgugacugauac

SEQ ID NO: 1735443 - RNA, 19 nt, Artificial Sequence
  Description of Artificial Sequence: Synthetic oligonucleotide
  Sense strand starting at position 113 of SEQ ID NO: 1562276
aacagauuacuuuggugaa

SEQ ID NO: 1735444 - RNA, 19 nt, Artificial Sequence
  Description of Artificial Sequence: Synthetic oligonucleotide
  Antisense strand to SEQ ID NO: 1735443
uucaccaaaguaaucuguu

SEQ ID NO: 1735445 - RNA, 19 nt, Artificial Sequence
  Description of Artificial Sequence: Synthetic oligonucleotide
  Sense strand starting at position 114 of SEQ ID NO: 1562276
acagauuacuuuggugaau

SEQ ID NO: 1735446 - RNA, 19 nt, Artificial Sequence
  Description of Artificial Sequence: Synthetic oligonucleotide
  Antisense strand to SEQ ID NO: 1735445
auucaccaaaguaaucugu

SEQ ID NO: 1735447 - RNA, 19 nt, Artificial Sequence
  Description of Artificial Sequence: Synthetic oligonucleotide
  Sense strand starting at position 115 of SEQ ID NO: 1562276
cagauuacuuuggugaaug

SEQ ID NO: 1735448 - RNA, 19 nt, Artificial Sequence
  Description of Artificial Sequence: Synthetic oligonucleotide
  Antisense strand to SEQ ID NO: 1735447
cauucaccaaaguaaucug

SEQ ID NO: 1735449 - RNA, 19 nt, Artificial Sequence
  Description of Artificial Sequence: Synthetic oligonucleotide
  Sense strand starting at position 286 of SEQ ID NO: 1562276
gaaggccuguucuagaauc

SEQ ID NO: 1735450 - RNA, 19 nt, Artificial Sequence
  Description of Artificial Sequence: Synthetic oligonucleotide
  Antisense strand to SEQ ID NO: 1735449
gauucuagaacaggccuuc

SEQ ID NO: 1735451 - RNA, 19 nt, Artificial Sequence
  Description of Artificial Sequence: Synthetic oligonucleotide
  Sense strand starting at position 288 of SEQ ID NO: 1562276
aggccuguucuagaaucca

SEQ ID NO: 1735452 - RNA, 19 nt, Artificial Sequence
  Description of Artificial Sequence: Synthetic oligonucleotide
  Antisense strand to SEQ ID NO: 1735451
uggauucuagaacaggccu

SEQ ID NO: 1735453 - RNA, 19 nt, Artificial Sequence
  Description of Artificial Sequence: Synthetic oligonucleotide
  Sense strand starting at position 493 of SEQ ID NO: 1562276
gggcccuguucugucugaa

SEQ ID NO: 1735454 - RNA, 19 nt, Artificial Sequence
  Description of Artificial Sequence: Synthetic oligonucleotide
  Antisense strand to SEQ ID NO: 1735453
uucagacagaacagggccc

SEQ ID NO: 1735455 - RNA, 19 nt, Artificial Sequence
  Description of Artificial Sequence: Synthetic oligonucleotide
  Sense strand starting at position 496 of SEQ ID NO: 1562276
cccuguucugucugaaugu

SEQ ID NO: 1735456 - RNA, 19 nt, Artificial Sequence
  Description of Artificial Sequence: Synthetic oligonucleotide
  Antisense strand to SEQ ID NO: 1735455
acauucagacagaacaggg

SEQ ID NO: 1735457 - RNA, 19 nt, Artificial Sequence
  Description of Artificial Sequence: Synthetic oligonucleotide
  Sense strand starting at position 634 of SEQ ID NO: 1562276
gaggauugguuggaaagag

SEQ ID NO: 1735458 - RNA, 19 nt, Artificial Sequence
  Description of Artificial Sequence: Synthetic oligonucleotide
  Antisense strand to SEQ ID NO: 1735457
cucuuuccaaccaauccuc

SEQ ID NO: 1735459 - RNA, 19 nt, Artificial Sequence
  Description of Artificial Sequence: Synthetic oligonucleotide
  Sense strand starting at position 682 of SEQ ID NO: 1562276
ucaagagagugcucagcau

SEQ ID NO: 1735460 - RNA, 19 nt, Artificial Sequence
  Description of Artificial Sequence: Synthetic oligonucleotide
  Antisense strand to SEQ ID NO: 1735459
augcugagcacucucuuga

SEQ ID NO: 1735461 - RNA, 19 nt, Artificial Sequence
  Description of Artificial Sequence: Synthetic oligonucleotide
  Sense strand starting at position 954 of SEQ ID NO: 1562276
agaucauguuucccaggaa

SEQ ID NO: 1735462 - RNA, 19 nt, Artificial Sequence
  Description of Artificial Sequence: Synthetic oligonucleotide
  Antisense strand to SEQ ID NO: 1735461
uuccugggaaacaugaucu

SEQ ID NO: 1735463 - RNA, 19 nt, Artificial Sequence
  Description of Artificial Sequence: Synthetic oligonucleotide
  Sense strand starting at position 955 of SEQ ID NO: 1562276
gaucauguuucccaggaaa

SEQ ID NO: 1735464 - RNA, 19 nt, Artificial Sequence
  Description of Artificial Sequence: Synthetic oligonucleotide
  Antisense strand to SEQ ID NO: 1735463
uuuccugggaaacaugauc

SEQ ID NO: 1735465 - RNA, 19 nt, Artificial Sequence
  Description of Artificial Sequence: Synthetic oligonucleotide
  Sense strand starting at position 986 of SEQ ID NO: 1562276
gcucaaguauucuccuaga

SEQ ID NO: 1735466 - RNA, 19 nt, Artificial Sequence
  Description of Artificial Sequence: Synthetic oligonucleotide
  Antisense strand to SEQ ID NO: 1735465
ucuaggagaauacuugagc

SEQ ID NO: 1735467 - RNA, 19 nt, Artificial Sequence
  Description of Artificial Sequence: Synthetic oligonucleotide
  Sense strand starting at position 1163 of SEQ ID NO: 1562276
cuaaguacuugggaccaau

SEQ ID NO: 1735468 - RNA, 19 nt, Artificial Sequence
  Description of Artificial Sequence: Synthetic oligonucleotide
  Antisense strand to SEQ ID NO: 1735467
auuggucccaaguacuuag

SEQ ID NO: 1735469 - RNA, 19 nt, Artificial Sequence
  Description of Artificial Sequence: Synthetic oligonucleotide
  Sense strand starting at position 3521 of SEQ ID NO: 1562276
aguuaagauuugcaaagcu

SEQ ID NO: 1735470 - RNA, 19 nt, Artificial Sequence
  Description of Artificial Sequence: Synthetic oligonucleotide
  Antisense strand to SEQ ID NO: 1735469
agcuuugcaaaucuuaacu

SEQ ID NO: 1735471 - RNA, 19 nt, Artificial Sequence
  Description of Artificial Sequence: Synthetic oligonucleotide
  Sense strand starting at position 3530 of SEQ ID NO: 1562276
uugcaaagcucguggaauu

SEQ ID NO: 1735472 - RNA, 19 nt, Artificial Sequence
  Description of Artificial Sequence: Synthetic oligonucleotide
  Antisense strand to SEQ ID NO: 1735471
aauuccacgagcuuugcaa

SEQ ID NO: 1735473 - RNA, 19 nt, Artificial Sequence
  Description of Artificial Sequence: Synthetic oligonucleotide
  Sense strand starting at position 3584 of SEQ ID NO: 1562276
uuggguaaucugugccaca

SEQ ID NO: 1735474 - RNA, 19 nt, Artificial Sequence
  Description of Artificial Sequence: Synthetic oligonucleotide
  Antisense strand to SEQ ID NO: 1735473
uguggcacagauuacccaa

SEQ ID NO: 1735475 - RNA, 19 nt, Artificial Sequence
  Description of Artificial Sequence: Synthetic oligonucleotide
  Sense strand starting at position 3585 of SEQ ID NO: 1562276
uggguaaucugugccacag

SEQ ID NO: 1735476 - RNA, 19 nt, Artificial Sequence
  Description of Artificial Sequence: Synthetic oligonucleotide
  Antisense strand to SEQ ID NO: 1735475
cuguggcacagauuaccca

SEQ ID NO: 1735477 - RNA, 19 nt, Artificial Sequence
  Description of Artificial Sequence: Synthetic oligonucleotide
  Sense strand starting at position 3692 of SEQ ID NO: 1562276
accagacacuugguuaaau

SEQ ID NO: 1735478 - RNA, 19 nt, Artificial Sequence
  Description of Artificial Sequence: Synthetic oligonucleotide
  Antisense strand to SEQ ID NO: 1735477
auuuaaccaagugucuggu

SEQ ID NO: 1735479 - RNA, 19 nt, Artificial Sequence
  Description of Artificial Sequence: Synthetic oligonucleotide
  Sense strand starting at position 3693 of SEQ ID NO: 1562276
ccagacacuugguuaaaua

SEQ ID NO: 1735480 - RNA, 19 nt, Artificial Sequence
  Description of Artificial Sequence: Synthetic oligonucleotide
  Antisense strand to SEQ ID NO: 1735479
uauuuaaccaagugucugg

SEQ ID NO: 1735481 - RNA, 19 nt, Artificial Sequence
  Description of Artificial Sequence: Synthetic oligonucleotide
  Sense strand starting at position 3753 of SEQ ID NO: 1562276
uucuaaaguugugauguga

SEQ ID NO: 1735482 - RNA, 19 nt, Artificial Sequence
  Description of Artificial Sequence: Synthetic oligonucleotide
  Antisense strand to SEQ ID NO: 1735481
ucacaucacaacuuuagaa

SEQ ID NO: 1735483 - RNA, 19 nt, Artificial Sequence
  Description of Artificial Sequence: Synthetic oligonucleotide
  Sense strand starting at position 3766 of SEQ ID NO: 1562276
augugauaauucuguguac

SEQ ID NO: 1735484 - RNA, 19 nt, Artificial Sequence
  Description of Artificial Sequence: Synthetic oligonucleotide
  Antisense strand to SEQ ID NO: 1735483
guacacagaauuaucacau

SEQ ID NO: 1735485 - RNA, 19 nt, Artificial Sequence
  Description of Artificial Sequence: Synthetic oligonucleotide
  Sense strand starting at position 3767 of SEQ ID NO: 1562276
ugugauaauucuguguaca

SEQ ID NO: 1735486 - RNA, 19 nt, Artificial Sequence
  Description of Artificial Sequence: Synthetic oligonucleotide
  Antisense strand to SEQ ID NO: 1735485
uguacacagaauuaucaca

SEQ ID NO: 1735487 - RNA, 19 nt, Artificial Sequence
  Description of Artificial Sequence: Synthetic oligonucleotide
  Sense strand starting at position 3768 of SEQ ID NO: 1562276
gugauaauucuguguacac

SEQ ID NO: 1735488 - RNA, 19 nt, Artificial Sequence
  Description of Artificial Sequence: Synthetic oligonucleotide
  Antisense strand to SEQ ID NO: 1735487
guguacacagaauuaucac

SEQ ID NO: 1735489 - RNA, 19 nt, Artificial Sequence
  Description of Artificial Sequence: Synthetic oligonucleotide
  Sense strand starting at position 3769 of SEQ ID NO: 1562276
ugauaauucuguguacaca

SEQ ID NO: 1735490 - RNA, 19 nt, Artificial Sequence
  Description of Artificial Sequence: Synthetic oligonucleotide
  Antisense strand to SEQ ID NO: 1735489
uguguacacagaauuauca

SEQ ID NO: 1735491 - RNA, 19 nt, Artificial Sequence
  Description of Artificial Sequence: Synthetic oligonucleotide
  Sense strand starting at position 3770 of SEQ ID NO: 1562276
gauaauucuguguacacag

SEQ ID NO: 1735492 - RNA, 19 nt, Artificial Sequence
  Description of Artificial Sequence: Synthetic oligonucleotide
  Antisense strand to SEQ ID NO: 1735491
cuguguacacagaauuauc

SEQ ID NO: 1735493 - RNA, 19 nt, Artificial Sequence
  Description of Artificial Sequence: Synthetic oligonucleotide
  Sense strand starting at position 3791 of SEQ ID NO: 1562276
aggauauagucuccaagau

SEQ ID NO: 1735494 - RNA, 19 nt, Artificial Sequence
  Description of Artificial Sequence: Synthetic oligonucleotide
  Antisense strand to SEQ ID NO: 1735493
aucuuggagacuauauccu

SEQ ID NO: 1735495 - RNA, 19 nt, Artificial Sequence
  Description of Artificial Sequence: Synthetic oligonucleotide
  Sense strand starting at position 3833 of SEQ ID NO: 1562276
agugcagagcagugaauau

SEQ ID NO: 1735496 - RNA, 19 nt, Artificial Sequence
  Description of Artificial Sequence: Synthetic oligonucleotide
  Antisense strand to SEQ ID NO: 1735495
auauucacugcucugcacu

SEQ ID NO: 1735497 - RNA, 19 nt, Artificial Sequence
  Description of Artificial Sequence: Synthetic oligonucleotide
  Sense strand starting at position 3850 of SEQ ID NO: 1562276
auacaaugaugugcuuuau

SEQ ID NO: 1735498 - RNA, 19 nt, Artificial Sequence
  Description of Artificial Sequence: Synthetic oligonucleotide
  Antisense strand to SEQ ID NO: 1735497
auaaagcacaucauuguau

SEQ ID NO: 1735499 - RNA, 19 nt, Artificial Sequence
  Description of Artificial Sequence: Synthetic oligonucleotide
  Sense strand starting at position 55 of SEQ ID NO: 1562277
gcaagaucaugcuuagacc

SEQ ID NO: 1735500 - RNA, 19 nt, Artificial Sequence
  Description of Artificial Sequence: Synthetic oligonucleotide
  Antisense strand to SEQ ID NO: 1735499
ggucuaagcaugaucuugc

SEQ ID NO: 1735501 - RNA, 19 nt, Artificial Sequence
  Description of Artificial Sequence: Synthetic oligonucleotide
  Sense strand starting at position 448 of SEQ ID NO: 1562277
ucugguuucucaucaguaa

SEQ ID NO: 1735502 - RNA, 19 nt, Artificial Sequence
  Description of Artificial Sequence: Synthetic oligonucleotide
  Antisense strand to SEQ ID NO: 1735501
uuacugaugagaaaccaga

SEQ ID NO: 1735503 - RNA, 19 nt, Artificial Sequence
  Description of Artificial Sequence: Synthetic oligonucleotide
  Sense strand starting at position 1537 of SEQ ID NO: 1562277
ucuaacuugucaucaggga

SEQ ID NO: 1735504 - RNA, 19 nt, Artificial Sequence
  Description of Artificial Sequence: Synthetic oligonucleotide
  Antisense strand to SEQ ID NO: 1735503
ucccugaugacaaguuaga

SEQ ID NO: 1735505 - RNA, 19 nt, Artificial Sequence
  Description of Artificial Sequence: Synthetic oligonucleotide
  Sense strand starting at position 2062 of SEQ ID NO: 1562277
agggacacuucccugugau

SEQ ID NO: 1735506 - RNA, 19 nt, Artificial Sequence
  Description of Artificial Sequence: Synthetic oligonucleotide
  Antisense strand to SEQ ID NO: 1735505
aucacagggaagugucccu

SEQ ID NO: 1735507 - RNA, 19 nt, Artificial Sequence
  Description of Artificial Sequence: Synthetic oligonucleotide
  Sense strand starting at position 2063 of SEQ ID NO: 1562277
gggacacuucccugugaug

SEQ ID NO: 1735508 - RNA, 19 nt, Artificial Sequence
  Description of Artificial Sequence: Synthetic oligonucleotide
  Antisense strand to SEQ ID NO: 1735507
caucacagggaaguguccc

SEQ ID NO: 1735509 - RNA, 19 nt, Artificial Sequence
  Description of Artificial Sequence: Synthetic oligonucleotide
  Sense strand starting at position 2065 of SEQ ID NO: 1562277
gacacuucccugugaugga

SEQ ID NO: 1735510 - RNA, 19 nt, Artificial Sequence
  Description of Artificial Sequence: Synthetic oligonucleotide
  Antisense strand to SEQ ID NO: 1735509
uccaucacagggaaguguc

SEQ ID NO: 1735511 - RNA, 19 nt, Artificial Sequence
  Description of Artificial Sequence: Synthetic oligonucleotide
  Sense strand starting at position 2195 of SEQ ID NO: 1562277
agagaacucucacuuccga

SEQ ID NO: 1735512 - RNA, 19 nt, Artificial Sequence
  Description of Artificial Sequence: Synthetic oligonucleotide
  Antisense strand to SEQ ID NO: 1735511
ucggaagugagaguucucu

SEQ ID NO: 1735513 - RNA, 19 nt, Artificial Sequence
  Description of Artificial Sequence: Synthetic oligonucleotide
  Sense strand starting at position 2455 of SEQ ID NO: 1562277
gauggaggcucagucugau

SEQ ID NO: 1735514 - RNA, 19 nt, Artificial Sequence
  Description of Artificial Sequence: Synthetic oligonucleotide
  Antisense strand to SEQ ID NO: 1735513
aucagacugagccuccauc

SEQ ID NO: 1735515 - RNA, 19 nt, Artificial Sequence
  Description of Artificial Sequence: Synthetic oligonucleotide
  Sense strand starting at position 2576 of SEQ ID NO: 1562277
ucgguucccucaucuuuaa

SEQ ID NO: 1735516 - RNA, 19 nt, Artificial Sequence
  Description of Artificial Sequence: Synthetic oligonucleotide
  Antisense strand to SEQ ID NO: 1735515
uuaaagaugagggaaccga

SEQ ID NO: 1735517 - RNA, 19 nt, Artificial Sequence
  Description of Artificial Sequence: Synthetic oligonucleotide
  Sense strand starting at position 2725 of SEQ ID NO: 1562277
gggucuuccuaggaccagu

SEQ ID NO: 1735518 - RNA, 19 nt, Artificial Sequence
  Description of Artificial Sequence: Synthetic oligonucleotide
  Antisense strand to SEQ ID NO: 1735517
acugguccuaggaagaccc

SEQ ID NO: 1735519 - RNA, 19 nt, Artificial Sequence
  Description of Artificial Sequence: Synthetic oligonucleotide
  Sense strand starting at position 2967 of SEQ ID NO: 1562277
gugggaggccuugguaaca

SEQ ID NO: 1735520 - RNA, 19 nt, Artificial Sequence
  Description of Artificial Sequence: Synthetic oligonucleotide
  Antisense strand to SEQ ID NO: 1735519
uguuaccaaggccucccac

SEQ ID NO: 1735521 - RNA, 19 nt, Artificial Sequence
  Description of Artificial Sequence: Synthetic oligonucleotide
  Sense strand starting at position 3062 of SEQ ID NO: 1562277
gcacgaguguucccacuga

SEQ ID NO: 1735522 - RNA, 19 nt, Artificial Sequence
  Description of Artificial Sequence: Synthetic oligonucleotide
  Antisense strand to SEQ ID NO: 1735521
ucagugggaacacucgugc

SEQ ID NO: 1735523 - RNA, 19 nt, Artificial Sequence
  Description of Artificial Sequence: Synthetic oligonucleotide
  Sense strand starting at position 3066 of SEQ ID NO: 1562277
gaguguucccacugagcca

SEQ ID NO: 1735524 - RNA, 19 nt, Artificial Sequence
  Description of Artificial Sequence: Synthetic oligonucleotide
  Antisense strand to SEQ ID NO: 1735523
uggcucagugggaacacuc

SEQ ID NO: 1735525 - RNA, 19 nt, Artificial Sequence
  Description of Artificial Sequence: Synthetic oligonucleotide
  Sense strand starting at position 3338 of SEQ ID NO: 1562277
gagcguucugcacgucuga

SEQ ID NO: 1735526 - RNA, 19 nt, Artificial Sequence
  Description of Artificial Sequence: Synthetic oligonucleotide
  Antisense strand to SEQ ID NO: 1735525
ucagacgugcagaacgcuc

SEQ ID NO: 1735527 - RNA, 19 nt, Artificial Sequence
  Description of Artificial Sequence: Synthetic oligonucleotide
  Sense strand starting at position 3340 of SEQ ID NO: 1562277
gcguucugcacgucugaga

SEQ ID NO: 1735528 - RNA, 19 nt, Artificial Sequence
  Description of Artificial Sequence: Synthetic oligonucleotide
  Antisense strand to SEQ ID NO: 1735527
ucucagacgugcagaacgc

SEQ ID NO: 1735529 - RNA, 19 nt, Artificial Sequence
  Description of Artificial Sequence: Synthetic oligonucleotide
  Sense strand starting at position 3341 of SEQ ID NO: 1562277
cguucugcacgucugagau

SEQ ID NO: 1735530 - RNA, 19 nt, Artificial Sequence
  Description of Artificial Sequence: Synthetic oligonucleotide
  Antisense strand to SEQ ID NO: 1735529
aucucagacgugcagaacg

SEQ ID NO: 1735531 - RNA, 19 nt, Artificial Sequence
  Description of Artificial Sequence: Synthetic oligonucleotide
  Sense strand starting at position 3351 of SEQ ID NO: 1562277
gucugagauugcuccggaa

SEQ ID NO: 1735532 - RNA, 19 nt, Artificial Sequence
  Description of Artificial Sequence: Synthetic oligonucleotide
  Antisense strand to SEQ ID NO: 1735531
uuccggagcaaucucagac

SEQ ID NO: 1735533 - RNA, 19 nt, Artificial Sequence
  Description of Artificial Sequence: Synthetic oligonucleotide
  Sense strand starting at position 3540 of SEQ ID NO: 1562277
gcuggcuccuguguggaau

SEQ ID NO: 1735534 - RNA, 19 nt, Artificial Sequence
  Description of Artificial Sequence: Synthetic oligonucleotide
  Antisense strand to SEQ ID NO: 1735533
auuccacacaggagccagc

SEQ ID NO: 1735535 - RNA, 19 nt, Artificial Sequence
  Description of Artificial Sequence: Synthetic oligonucleotide
  Sense strand starting at position 3759 of SEQ ID NO: 1562277
ccugcaguucuguauuuac

SEQ ID NO: 1735536 - RNA, 19 nt, Artificial Sequence
  Description of Artificial Sequence: Synthetic oligonucleotide
  Antisense strand to SEQ ID NO: 1735535
guaaauacagaacugcagg

SEQ ID NO: 1735537 - RNA, 19 nt, Artificial Sequence
  Description of Artificial Sequence: Synthetic oligonucleotide
  Sense strand starting at position 3837 of SEQ ID NO: 1562277
aucccugucugcuccugaa

SEQ ID NO: 1735538 - RNA, 19 nt, Artificial Sequence
  Description of Artificial Sequence: Synthetic oligonucleotide
  Antisense strand to SEQ ID NO: 1735537
uucaggagcagacagggau

SEQ ID NO: 1735539 - RNA, 19 nt, Artificial Sequence
  Description of Artificial Sequence: Synthetic oligonucleotide
  Sense strand starting at position 3840 of SEQ ID NO: 1562277
ccugucugcuccugaaaca

SEQ ID NO: 1735540 - RNA, 19 nt, Artificial Sequence
  Description of Artificial Sequence: Synthetic oligonucleotide
  Antisense strand to SEQ ID NO: 1735539
uguuucaggagcagacagg

SEQ ID NO: 1735541 - RNA, 19 nt, Artificial Sequence
  Description of Artificial Sequence: Synthetic oligonucleotide
  Sense strand starting at position 1 of SEQ ID NO: 1562278
gcccuaaggugauuccuga

SEQ ID NO: 1735542 - RNA, 19 nt, Artificial Sequence
  Description of Artificial Sequence: Synthetic oligonucleotide
  Antisense strand to SEQ ID NO: 1735541
ucaggaaucaccuuagggc

SEQ ID NO: 1735543 - RNA, 19 nt, Artificial Sequence
  Description of Artificial Sequence: Synthetic oligonucleotide
  Sense strand starting at position 83 of SEQ ID NO: 1562278
aaacuaauggugugauagu

SEQ ID NO: 1735544 - RNA, 19 nt, Artificial Sequence
  Description of Artificial Sequence: Synthetic oligonucleotide
  Antisense strand to SEQ ID NO: 1735543
acuaucacaccauuaguuu

SEQ ID NO: 1735545 - RNA, 19 nt, Artificial Sequence
  Description of Artificial Sequence: Synthetic oligonucleotide
  Sense strand starting at position 103 of SEQ ID NO: 1562278
uguacagccucaguggaau

SEQ ID NO: 1735546 - RNA, 19 nt, Artificial Sequence
  Description of Artificial Sequence: Synthetic oligonucleotide
  Antisense strand to SEQ ID NO: 1735545
auuccacugaggcuguaca

SEQ ID NO: 1735547 - RNA, 19 nt, Artificial Sequence
  Description of Artificial Sequence: Synthetic oligonucleotide
  Sense strand starting at position 248 of SEQ ID NO: 1562278
cgaaguccgaagugaaaua

SEQ ID NO: 1735548 - RNA, 19 nt, Artificial Sequence
  Description of Artificial Sequence: Synthetic oligonucleotide
  Antisense strand to SEQ ID NO: 1735547
uauuucacuucggacuucg

SEQ ID NO: 1735549 - RNA, 19 nt, Artificial Sequence
  Description of Artificial Sequence: Synthetic oligonucleotide
  Sense strand starting at position 357 of SEQ ID NO: 1562278
auguucgagaguuggauga

SEQ ID NO: 1735550 - RNA, 19 nt, Artificial Sequence
  Description of Artificial Sequence: Synthetic oligonucleotide
  Antisense strand to SEQ ID NO: 1735549
ucauccaacucucgaacau

SEQ ID NO: 1735551 - RNA, 19 nt, Artificial Sequence
  Description of Artificial Sequence: Synthetic oligonucleotide
  Sense strand starting at position 387 of SEQ ID NO: 1562278
uuguuauacaccuaguggu

SEQ ID NO: 1735552 - RNA, 19 nt, Artificial Sequence
  Description of Artificial Sequence: Synthetic oligonucleotide
  Antisense strand to SEQ ID NO: 1735551
accacuagguguauaacaa

SEQ ID NO: 1735553 - RNA, 19 nt, Artificial Sequence
  Description of Artificial Sequence: Synthetic oligonucleotide
  Sense strand starting at position 744 of SEQ ID NO: 1562278
agaauuaagccucggaggu

SEQ ID NO: 1735554 - RNA, 19 nt, Artificial Sequence
  Description of Artificial Sequence: Synthetic oligonucleotide
  Antisense strand to SEQ ID NO: 1735553
accuccgaggcuuaauucu

SEQ ID NO: 1735555 - RNA, 19 nt, Artificial Sequence
  Description of Artificial Sequence: Synthetic oligonucleotide
  Sense strand starting at position 745 of SEQ ID NO: 1562278
gaauuaagccucggaggug

SEQ ID NO: 1735556 - RNA, 19 nt, Artificial Sequence
  Description of Artificial Sequence: Synthetic oligonucleotide
  Antisense strand to SEQ ID NO: 1735555
caccuccgaggcuuaauuc

SEQ ID NO: 1735557 - RNA, 19 nt, Artificial Sequence
  Description of Artificial Sequence: Synthetic oligonucleotide
  Sense strand starting at position 1331 of SEQ ID NO: 1562278
gagcgaaggacuggcuuua

SEQ ID NO: 1735558 - RNA, 19 nt, Artificial Sequence
  Description of Artificial Sequence: Synthetic oligonucleotide
  Antisense strand to SEQ ID NO: 1735557
uaaagccaguccuucgcuc

SEQ ID NO: 1735559 - RNA, 19 nt, Artificial Sequence
  Description of Artificial Sequence: Synthetic oligonucleotide
  Sense strand starting at position 1648 of SEQ ID NO: 1562278
ccggcuucucugcauuaaa

SEQ ID NO: 1735560 - RNA, 19 nt, Artificial Sequence
  Description of Artificial Sequence: Synthetic oligonucleotide
  Antisense strand to SEQ ID NO: 1735559
uuuaaugcagagaagccgg

SEQ ID NO: 1735561 - RNA, 19 nt, Artificial Sequence
  Description of Artificial Sequence: Synthetic oligonucleotide
  Sense strand starting at position 1651 of SEQ ID NO: 1562278
gcuucucugcauuaaagac

SEQ ID NO: 1735562 - RNA, 19 nt, Artificial Sequence
  Description of Artificial Sequence: Synthetic oligonucleotide
  Antisense strand to SEQ ID NO: 1735561
gucuuuaaugcagagaagc

SEQ ID NO: 1735563 - RNA, 19 nt, Artificial Sequence
  Description of Artificial Sequence: Synthetic oligonucleotide
  Sense strand starting at position 1659 of SEQ ID NO: 1562278
gcauuaaagacuuggguua

SEQ ID NO: 1735564 - RNA, 19 nt, Artificial Sequence
  Description of Artificial Sequence: Synthetic oligonucleotide
  Antisense strand to SEQ ID NO: 1735563
uaacccaagucuuuaaugc

SEQ ID NO: 1735565 - RNA, 19 nt, Artificial Sequence
  Description of Artificial Sequence: Synthetic oligonucleotide
  Sense strand starting at position 1660 of SEQ ID NO: 1562278
cauuaaagacuuggguuaa

SEQ ID NO: 1735566 - RNA, 19 nt, Artificial Sequence
  Description of Artificial Sequence: Synthetic oligonucleotide
  Antisense strand to SEQ ID NO: 1735565
uuaacccaagucuuuaaug

SEQ ID NO: 1735567 - RNA, 19 nt, Artificial Sequence
  Description of Artificial Sequence: Synthetic oligonucleotide
  Sense strand starting at position 2289 of SEQ ID NO: 1562278
gugagcuugaaucauccga

SEQ ID NO: 1735568 - RNA, 19 nt, Artificial Sequence
  Description of Artificial Sequence: Synthetic oligonucleotide
  Antisense strand to SEQ ID NO: 1735567
ucggaugauucaagcucac

SEQ ID NO: 1735569 - RNA, 19 nt, Artificial Sequence
  Description of Artificial Sequence: Synthetic oligonucleotide
  Sense strand starting at position 2406 of SEQ ID NO: 1562278
gcguuucuggaagagaaug

SEQ ID NO: 1735570 - RNA, 19 nt, Artificial Sequence
  Description of Artificial Sequence: Synthetic oligonucleotide
  Antisense strand to SEQ ID NO: 1735569
cauucucuuccagaaacgc

SEQ ID NO: 1735571 - RNA, 19 nt, Artificial Sequence
  Description of Artificial Sequence: Synthetic oligonucleotide
  Sense strand starting at position 2513 of SEQ ID NO: 1562278
gcacgagcaaccuggaauu

SEQ ID NO: 1735572 - RNA, 19 nt, Artificial Sequence
  Description of Artificial Sequence: Synthetic oligonucleotide
  Antisense strand to SEQ ID NO: 1735571
aauuccagguugcucgugc

SEQ ID NO: 1735573 - RNA, 19 nt, Artificial Sequence
  Description of Artificial Sequence: Synthetic oligonucleotide
  Sense strand starting at position 2533 of SEQ ID NO: 1562278
cuaucuuuagaacgaacca

SEQ ID NO: 1735574 - RNA, 19 nt, Artificial Sequence
  Description of Artificial Sequence: Synthetic oligonucleotide
  Antisense strand to SEQ ID NO: 1735573
ugguucguucuaaagauag

SEQ ID NO: 1735575 - RNA, 19 nt, Artificial Sequence
  Description of Artificial Sequence: Synthetic oligonucleotide
  Sense strand starting at position 2682 of SEQ ID NO: 1562278
ggguggucaguguggauuu

SEQ ID NO: 1735576 - RNA, 19 nt, Artificial Sequence
  Description of Artificial Sequence: Synthetic oligonucleotide
  Antisense strand to SEQ ID NO: 1735575
aaauccacacugaccaccc

SEQ ID NO: 1735577 - RNA, 19 nt, Artificial Sequence
  Description of Artificial Sequence: Synthetic oligonucleotide
  Sense strand starting at position 2721 of SEQ ID NO: 1562278
uuuguuguuaagcagggau

SEQ ID NO: 1735578 - RNA, 19 nt, Artificial Sequence
  Description of Artificial Sequence: Synthetic oligonucleotide
  Antisense strand to SEQ ID NO: 1735577
aucccugcuuaacaacaaa

SEQ ID NO: 1735579 - RNA, 19 nt, Artificial Sequence
  Description of Artificial Sequence: Synthetic oligonucleotide
  Sense strand starting at position 2724 of SEQ ID NO: 1562278
guuguuaagcagggaugua

SEQ ID NO: 1735580 - RNA, 19 nt, Artificial Sequence
  Description of Artificial Sequence: Synthetic oligonucleotide
  Antisense strand to SEQ ID NO: 1735579
uacaucccugcuuaacaac

SEQ ID NO: 1735581 - RNA, 19 nt, Artificial Sequence
  Description of Artificial Sequence: Synthetic oligonucleotide
  Sense strand starting at position 2725 of SEQ ID NO: 1562278
uuguuaagcagggauguaa

SEQ ID NO: 1735582 - RNA, 19 nt, Artificial Sequence
  Description of Artificial Sequence: Synthetic oligonucleotide
  Antisense strand to SEQ ID NO: 1735581
uuacaucccugcuuaacaa

SEQ ID NO: 1735583 - RNA, 19 nt, Artificial Sequence
  Description of Artificial Sequence: Synthetic oligonucleotide
  Sense strand starting at position 2844 of SEQ ID NO: 1562278
cauugugucuguccugaau

SEQ ID NO: 1735584 - RNA, 19 nt, Artificial Sequence
  Description of Artificial Sequence: Synthetic oligonucleotide
  Antisense strand to SEQ ID NO: 1735583
auucaggacagacacaaug

SEQ ID NO: 1735585 - RNA, 19 nt, Artificial Sequence
  Description of Artificial Sequence: Synthetic oligonucleotide
  Sense strand starting at position 2847 of SEQ ID NO: 1562278
ugugucuguccugaauuau

SEQ ID NO: 1735586 - RNA, 19 nt, Artificial Sequence
  Description of Artificial Sequence: Synthetic oligonucleotide
  Antisense strand to SEQ ID NO: 1735585
auaauucaggacagacaca

SEQ ID NO: 1735587 - RNA, 19 nt, Artificial Sequence
  Description of Artificial Sequence: Synthetic oligonucleotide
  Sense strand starting at position 2853 of SEQ ID NO: 1562278
uguccugaauuauagaaau

SEQ ID NO: 1735588 - RNA, 19 nt, Artificial Sequence
  Description of Artificial Sequence: Synthetic oligonucleotide
  Antisense strand to SEQ ID NO: 1735587
auuucuauaauucaggaca

SEQ ID NO: 1735589 - RNA, 19 nt, Artificial Sequence
  Description of Artificial Sequence: Synthetic oligonucleotide
  Sense strand starting at position 2923 of SEQ ID NO: 1562278
uccaguuaguguccagaua

SEQ ID NO: 1735590 - RNA, 19 nt, Artificial Sequence
  Description of Artificial Sequence: Synthetic oligonucleotide
  Antisense strand to SEQ ID NO: 1735589
uaucuggacacuaacugga

SEQ ID NO: 1735591 - RNA, 19 nt, Artificial Sequence
  Description of Artificial Sequence: Synthetic oligonucleotide
  Sense strand starting at position 2924 of SEQ ID NO: 1562278
ccaguuaguguccagauag

SEQ ID NO: 1735592 - RNA, 19 nt, Artificial Sequence
  Description of Artificial Sequence: Synthetic oligonucleotide
  Antisense strand to SEQ ID NO: 1735591
cuaucuggacacuaacugg

SEQ ID NO: 1735593 - RNA, 19 nt, Artificial Sequence
  Description of Artificial Sequence: Synthetic oligonucleotide
  Sense strand starting at position 2931 of SEQ ID NO: 1562278
guguccagauaguuuagaa

SEQ ID NO: 1735594 - RNA, 19 nt, Artificial Sequence
  Description of Artificial Sequence: Synthetic oligonucleotide
  Antisense strand to SEQ ID NO: 1735593
uucuaaacuaucuggacac

SEQ ID NO: 1735595 - RNA, 19 nt, Artificial Sequence
  Description of Artificial Sequence: Synthetic oligonucleotide
  Sense strand starting at position 2938 of SEQ ID NO: 1562278
gauaguuuagaaugcucua

SEQ ID NO: 1735596 - RNA, 19 nt, Artificial Sequence
  Description of Artificial Sequence: Synthetic oligonucleotide
  Antisense strand to SEQ ID NO: 1735595
uagagcauucuaaacuauc

SEQ ID NO: 1735597 - RNA, 19 nt, Artificial Sequence
  Description of Artificial Sequence: Synthetic oligonucleotide
  Sense strand starting at position 2943 of SEQ ID NO: 1562278
uuuagaaugcucuagaacu

SEQ ID NO: 1735598 - RNA, 19 nt, Artificial Sequence
  Description of Artificial Sequence: Synthetic oligonucleotide
  Antisense strand to SEQ ID NO: 1735597
aguucuagagcauucuaaa

SEQ ID NO: 1735599 - RNA, 19 nt, Artificial Sequence
  Description of Artificial Sequence: Synthetic oligonucleotide
  Sense strand starting at position 2953 of SEQ ID NO: 1562278
ucuagaacugcccagauau

SEQ ID NO: 1735600 - RNA, 19 nt, Artificial Sequence
  Description of Artificial Sequence: Synthetic oligonucleotide
  Antisense strand to SEQ ID NO: 1735599
auaucugggcaguucuaga

SEQ ID NO: 1735601 - RNA, 19 nt, Artificial Sequence
  Description of Artificial Sequence: Synthetic oligonucleotide
  Sense strand starting at position 3183 of SEQ ID NO: 1562278
ggaagucauuucuguacca

SEQ ID NO: 1735602 - RNA, 19 nt, Artificial Sequence
  Description of Artificial Sequence: Synthetic oligonucleotide
  Antisense strand to SEQ ID NO: 1735601
ugguacagaaaugacuucc

SEQ ID NO: 1735603 - RNA, 19 nt, Artificial Sequence
  Description of Artificial Sequence: Synthetic oligonucleotide
  Sense strand starting at position 3275 of SEQ ID NO: 1562278
cccugaauguccuuuggau

SEQ ID NO: 1735604 - RNA, 19 nt, Artificial Sequence
  Description of Artificial Sequence: Synthetic oligonucleotide
  Antisense strand to SEQ ID NO: 1735603
auccaaaggacauucaggg

SEQ ID NO: 1735605 - RNA, 19 nt, Artificial Sequence
  Description of Artificial Sequence: Synthetic oligonucleotide
  Sense strand starting at position 3277 of SEQ ID NO: 1562278
cugaauguccuuuggaugu

SEQ ID NO: 1735606 - RNA, 19 nt, Artificial Sequence
  Description of Artificial Sequence: Synthetic oligonucleotide
  Antisense strand to SEQ ID NO: 1735605
acauccaaaggacauucag

SEQ ID NO: 1735607 - RNA, 19 nt, Artificial Sequence
  Description of Artificial Sequence: Synthetic oligonucleotide
  Sense strand starting at position 3536 of SEQ ID NO: 1562278
accgcaauuccguauuugu

SEQ ID NO: 1735608 - RNA, 19 nt, Artificial Sequence
  Description of Artificial Sequence: Synthetic oligonucleotide
  Antisense strand to SEQ ID NO: 1735607
acaaauacggaauugcggu

SEQ ID NO: 1735609 - RNA, 19 nt, Artificial Sequence
  Description of Artificial Sequence: Synthetic oligonucleotide
  Sense strand starting at position 3556 of SEQ ID NO: 1562278
ccgggucugcaugagcaaa

SEQ ID NO: 1735610 - RNA, 19 nt, Artificial Sequence
  Description of Artificial Sequence: Synthetic oligonucleotide
  Antisense strand to SEQ ID NO: 1735609
uuugcucaugcagacccgg

SEQ ID NO: 1735611 - RNA, 19 nt, Artificial Sequence
  Description of Artificial Sequence: Synthetic oligonucleotide
  Sense strand starting at position 3558 of SEQ ID NO: 1562278
gggucugcaugagcaaaua

SEQ ID NO: 1735612 - RNA, 19 nt, Artificial Sequence
  Description of Artificial Sequence: Synthetic oligonucleotide
  Antisense strand to SEQ ID NO: 1735611
uauuugcucaugcagaccc

SEQ ID NO: 1735613 - RNA, 19 nt, Artificial Sequence
  Description of Artificial Sequence: Synthetic oligonucleotide
  Sense strand starting at position 3588 of SEQ ID NO: 1562278
aagguaucugaaugcaaag

SEQ ID NO: 1735614 - RNA, 19 nt, Artificial Sequence
  Description of Artificial Sequence: Synthetic oligonucleotide
  Antisense strand to SEQ ID NO: 1735613
cuuugcauucagauaccuu

SEQ ID NO: 1735615 - RNA, 19 nt, Artificial Sequence
  Description of Artificial Sequence: Synthetic oligonucleotide
  Sense strand starting at position 3605 of SEQ ID NO: 1562278
agagaaacgugguccaaag

SEQ ID NO: 1735616 - RNA, 19 nt, Artificial Sequence
  Description of Artificial Sequence: Synthetic oligonucleotide
  Antisense strand to SEQ ID NO: 1735615
cuuuggaccacguuucucu

SEQ ID NO: 1735617 - RNA, 19 nt, Artificial Sequence
  Description of Artificial Sequence: Synthetic oligonucleotide
  Sense strand starting at position 3660 of SEQ ID NO: 1562278
gugagacccuuuguuacau

SEQ ID NO: 1735618 - RNA, 19 nt, Artificial Sequence
  Description of Artificial Sequence: Synthetic oligonucleotide
  Antisense strand to SEQ ID NO: 1735617
auguaacaaagggucucac

SEQ ID NO: 1735619 - RNA, 19 nt, Artificial Sequence
  Description of Artificial Sequence: Synthetic oligonucleotide
  Sense strand starting at position 3661 of SEQ ID NO: 1562278
ugagacccuuuguuacauu

SEQ ID NO: 1735620 - RNA, 19 nt, Artificial Sequence
  Description of Artificial Sequence: Synthetic oligonucleotide
  Antisense strand to SEQ ID NO: 1735619
aauguaacaaagggucuca

SEQ ID NO: 1735621 - RNA, 19 nt, Artificial Sequence
  Description of Artificial Sequence: Synthetic oligonucleotide
  Sense strand starting at position 242 of SEQ ID NO: 1562279
acaguaagccaugaugacu

SEQ ID NO: 1735622 - RNA, 19 nt, Artificial Sequence
  Description of Artificial Sequence: Synthetic oligonucleotide
  Antisense strand to SEQ ID NO: 1735621
agucaucauggcuuacugu

SEQ ID NO: 1735623 - RNA, 19 nt, Artificial Sequence
  Description of Artificial Sequence: Synthetic oligonucleotide
  Sense strand starting at position 250 of SEQ ID NO: 1562279
ccaugaugacuccauggca

SEQ ID NO: 1735624 - RNA, 19 nt, Artificial Sequence
  Description of Artificial Sequence: Synthetic oligonucleotide
  Antisense strand to SEQ ID NO: 1735623
ugccauggagucaucaugg

SEQ ID NO: 1735625 - RNA, 19 nt, Artificial Sequence
  Description of Artificial Sequence: Synthetic oligonucleotide
  Sense strand starting at position 288 of SEQ ID NO: 1562279
gagauagccugucucagaa

SEQ ID NO: 1735626 - RNA, 19 nt, Artificial Sequence
  Description of Artificial Sequence: Synthetic oligonucleotide
  Antisense strand to SEQ ID NO: 1735625
uucugagacaggcuaucuc

SEQ ID NO: 1735627 - RNA, 19 nt, Artificial Sequence
  Description of Artificial Sequence: Synthetic oligonucleotide
  Sense strand starting at position 354 of SEQ ID NO: 1562279
aauauucuguugguggaua

SEQ ID NO: 1735628 - RNA, 19 nt, Artificial Sequence
  Description of Artificial Sequence: Synthetic oligonucleotide
  Antisense strand to SEQ ID NO: 1735627
uauccaccaacagaauauu

SEQ ID NO: 1735629 - RNA, 19 nt, Artificial Sequence
  Description of Artificial Sequence: Synthetic oligonucleotide
  Sense strand starting at position 397 of SEQ ID NO: 1562279
aguaccuguuacucaauau

SEQ ID NO: 1735630 - RNA, 19 nt, Artificial Sequence
  Description of Artificial Sequence: Synthetic oligonucleotide
  Antisense strand to SEQ ID NO: 1735629
auauugaguaacagguacu

SEQ ID NO: 1735631 - RNA, 19 nt, Artificial Sequence
  Description of Artificial Sequence: Synthetic oligonucleotide
  Sense strand starting at position 486 of SEQ ID NO: 1562279
ucccuuguuggucaaagaa

SEQ ID NO: 1735632 - RNA, 19 nt, Artificial Sequence
  Description of Artificial Sequence: Synthetic oligonucleotide
  Antisense strand to SEQ ID NO: 1735631
uucuuugaccaacaaggga

SEQ ID NO: 1735633 - RNA, 19 nt, Artificial Sequence
  Description of Artificial Sequence: Synthetic oligonucleotide
  Sense strand starting at position 541 of SEQ ID NO: 1562279
cuuucuugguaagcaauaa

SEQ ID NO: 1735634 - RNA, 19 nt, Artificial Sequence
  Description of Artificial Sequence: Synthetic oligonucleotide
  Antisense strand to SEQ ID NO: 1735633
uuauugcuuaccaagaaag

SEQ ID NO: 1735635 - RNA, 19 nt, Artificial Sequence
  Description of Artificial Sequence: Synthetic oligonucleotide
  Sense strand starting at position 599 of SEQ ID NO: 1562279
ggaauugugacacgguuac

SEQ ID NO: 1735636 - RNA, 19 nt, Artificial Sequence
  Description of Artificial Sequence: Synthetic oligonucleotide
  Antisense strand to SEQ ID NO: 1735635
guaaccgugucacaauucc

SEQ ID NO: 1735637 - RNA, 19 nt, Artificial Sequence
  Description of Artificial Sequence: Synthetic oligonucleotide
  Sense strand starting at position 654 of SEQ ID NO: 1562279
uuagguagagucuguauuu

SEQ ID NO: 1735638 - RNA, 19 nt, Artificial Sequence
  Description of Artificial Sequence: Synthetic oligonucleotide
  Antisense strand to SEQ ID NO: 1735637
aaauacagacucuaccuaa

SEQ ID NO: 1735639 - RNA, 19 nt, Artificial Sequence
  Description of Artificial Sequence: Synthetic oligonucleotide
  Sense strand starting at position 689 of SEQ ID NO: 1562279
ggugauuaguaucuugaac

SEQ ID NO: 1735640 - RNA, 19 nt, Artificial Sequence
  Description of Artificial Sequence: Synthetic oligonucleotide
  Antisense strand to SEQ ID NO: 1735639
guucaagauacuaaucacc

SEQ ID NO: 1735641 - RNA, 19 nt, Artificial Sequence
  Description of Artificial Sequence: Synthetic oligonucleotide
  Sense strand starting at position 732 of SEQ ID NO: 1562279
ugcaacauuacguaaggga

SEQ ID NO: 1735642 - RNA, 19 nt, Artificial Sequence
  Description of Artificial Sequence: Synthetic oligonucleotide
  Antisense strand to SEQ ID NO: 1735641
ucccuuacguaauguugca

SEQ ID NO: 1735643 - RNA, 19 nt, Artificial Sequence
  Description of Artificial Sequence: Synthetic oligonucleotide
  Sense strand starting at position 953 of SEQ ID NO: 1562279
uuaccuugugaaggauaga

SEQ ID NO: 1735644 - RNA, 19 nt, Artificial Sequence
  Description of Artificial Sequence: Synthetic oligonucleotide
  Antisense strand to SEQ ID NO: 1735643
ucuauccuucacaagguaa

SEQ ID NO: 1735645 - RNA, 19 nt, Artificial Sequence
  Description of Artificial Sequence: Synthetic oligonucleotide
  Sense strand starting at position 1000 of SEQ ID NO: 1562279
gugguccacagauaaggua

SEQ ID NO: 1735646 - RNA, 19 nt, Artificial Sequence
  Description of Artificial Sequence: Synthetic oligonucleotide
  Antisense strand to SEQ ID NO: 1735645
uaccuuaucuguggaccac

SEQ ID NO: 1735647 - RNA, 19 nt, Artificial Sequence
  Description of Artificial Sequence: Synthetic oligonucleotide
  Sense strand starting at position 1113 of SEQ ID NO: 1562279
ugagaacuauguguuuaua

SEQ ID NO: 1735648 - RNA, 19 nt, Artificial Sequence
  Description of Artificial Sequence: Synthetic oligonucleotide
  Antisense strand to SEQ ID NO: 1735647
uauaaacacauaguucuca

SEQ ID NO: 1735649 - RNA, 19 nt, Artificial Sequence
  Description of Artificial Sequence: Synthetic oligonucleotide
  Sense strand starting at position 1115 of SEQ ID NO: 1562279
agaacuauguguuuauacu

SEQ ID NO: 1735650 - RNA, 19 nt, Artificial Sequence
  Description of Artificial Sequence: Synthetic oligonucleotide
  Antisense strand to SEQ ID NO: 1735649
aguauaaacacauaguucu

SEQ ID NO: 1735651 - RNA, 19 nt, Artificial Sequence
  Description of Artificial Sequence: Synthetic oligonucleotide
  Sense strand starting at position 1682 of SEQ ID NO: 1562279
agauauuacugucugagaa

SEQ ID NO: 1735652 - RNA, 19 nt, Artificial Sequence
  Description of Artificial Sequence: Synthetic oligonucleotide
  Antisense strand to SEQ ID NO: 1735651
uucucagacaguaauaucu

SEQ ID NO: 1735653 - RNA, 19 nt, Artificial Sequence
  Description of Artificial Sequence: Synthetic oligonucleotide
  Sense strand starting at position 1683 of SEQ ID NO: 1562279
gauauuacugucugagaac

SEQ ID NO: 1735654 - RNA, 19 nt, Artificial Sequence
  Description of Artificial Sequence: Synthetic oligonucleotide
  Antisense strand to SEQ ID NO: 1735653
guucucagacaguaauauc

SEQ ID NO: 1735655 - RNA, 19 nt, Artificial Sequence
  Description of Artificial Sequence: Synthetic oligonucleotide
  Sense strand starting at position 1856 of SEQ ID NO: 1562279
guggaauacucccugagau

SEQ ID NO: 1735656 - RNA, 19 nt, Artificial Sequence
  Description of Artificial Sequence: Synthetic oligonucleotide
  Antisense strand to SEQ ID NO: 1735655
aucucagggaguauuccac

SEQ ID NO: 1735657 - RNA, 19 nt, Artificial Sequence
  Description of Artificial Sequence: Synthetic oligonucleotide
  Sense strand starting at position 1857 of SEQ ID NO: 1562279
uggaauacucccugagauc

SEQ ID NO: 1735658 - RNA, 19 nt, Artificial Sequence
  Description of Artificial Sequence: Synthetic oligonucleotide
  Antisense strand to SEQ ID NO: 1735657
gaucucagggaguauucca

SEQ ID NO: 1735659 - RNA, 19 nt, Artificial Sequence
  Description of Artificial Sequence: Synthetic oligonucleotide
  Sense strand starting at position 1994 of SEQ ID NO: 1562279
gcuauuuaggcguggauca

SEQ ID NO: 1735660 - RNA, 19 nt, Artificial Sequence
  Description of Artificial Sequence: Synthetic oligonucleotide
  Antisense strand to SEQ ID NO: 1735659
ugauccacgccuaaauagc

SEQ ID NO: 1735661 - RNA, 19 nt, Artificial Sequence
  Description of Artificial Sequence: Synthetic oligonucleotide
  Sense strand starting at position 2064 of SEQ ID NO: 1562279
gaacucugucuuggguaga

SEQ ID NO: 1735662 - RNA, 19 nt, Artificial Sequence
  Description of Artificial Sequence: Synthetic oligonucleotide
  Antisense strand to SEQ ID NO: 1735661
ucuacccaagacagaguuc

SEQ ID NO: 1735663 - RNA, 19 nt, Artificial Sequence
  Description of Artificial Sequence: Synthetic oligonucleotide
  Sense strand starting at position 2067 of SEQ ID NO: 1562279
cucugucuuggguagagua

SEQ ID NO: 1735664 - RNA, 19 nt, Artificial Sequence
  Description of Artificial Sequence: Synthetic oligonucleotide
  Antisense strand to SEQ ID NO: 1735663
uacucuacccaagacagag

SEQ ID NO: 1735665 - RNA, 19 nt, Artificial Sequence
  Description of Artificial Sequence: Synthetic oligonucleotide
  Sense strand starting at position 2172 of SEQ ID NO: 1562279
aagguugaccagugguuua

SEQ ID NO: 1735666 - RNA, 19 nt, Artificial Sequence
  Description of Artificial Sequence: Synthetic oligonucleotide
  Antisense strand to SEQ ID NO: 1735665
uaaaccacuggucaaccuu

SEQ ID NO: 1735667 - RNA, 19 nt, Artificial Sequence
  Description of Artificial Sequence: Synthetic oligonucleotide
  Sense strand starting at position 2279 of SEQ ID NO: 1562279
ggaacuuguuaggcaagaa

SEQ ID NO: 1735668 - RNA, 19 nt, Artificial Sequence
  Description of Artificial Sequence: Synthetic oligonucleotide
  Antisense strand to SEQ ID NO: 1735667
uucuugccuaacaaguucc

SEQ ID NO: 1735669 - RNA, 19 nt, Artificial Sequence
  Description of Artificial Sequence: Synthetic oligonucleotide
  Sense strand starting at position 2461 of SEQ ID NO: 1562279
gggugguugggcuaaaugu

SEQ ID NO: 1735670 - RNA, 19 nt, Artificial Sequence
  Description of Artificial Sequence: Synthetic oligonucleotide
  Antisense strand to SEQ ID NO: 1735669
acauuuagcccaaccaccc

SEQ ID NO: 1735671 - RNA, 19 nt, Artificial Sequence
  Description of Artificial Sequence: Synthetic oligonucleotide
  Sense strand starting at position 2536 of SEQ ID NO: 1562279
uggagcauucuggaggagu

SEQ ID NO: 1735672 - RNA, 19 nt, Artificial Sequence
  Description of Artificial Sequence: Synthetic oligonucleotide
  Antisense strand to SEQ ID NO: 1735671
acuccuccagaaugcucca

SEQ ID NO: 1735673 - RNA, 19 nt, Artificial Sequence
  Description of Artificial Sequence: Synthetic oligonucleotide
  Sense strand starting at position 2538 of SEQ ID NO: 1562279
gagcauucuggaggaguaa

SEQ ID NO: 1735674 - RNA, 19 nt, Artificial Sequence
  Description of Artificial Sequence: Synthetic oligonucleotide
  Antisense strand to SEQ ID NO: 1735673
uuacuccuccagaaugcuc

SEQ ID NO: 1735675 - RNA, 19 nt, Artificial Sequence
  Description of Artificial Sequence: Synthetic oligonucleotide
  Sense strand starting at position 2558 of SEQ ID NO: 1562279
gacagaggauuuggaauga

SEQ ID NO: 1735676 - RNA, 19 nt, Artificial Sequence
  Description of Artificial Sequence: Synthetic oligonucleotide
  Antisense strand to SEQ ID NO: 1735675
ucauuccaaauccucuguc

SEQ ID NO: 1735677 - RNA, 19 nt, Artificial Sequence
  Description of Artificial Sequence: Synthetic oligonucleotide
  Sense strand starting at position 2574 of SEQ ID NO: 1562279
ugagacugcauagguuuaa

SEQ ID NO: 1735678 - RNA, 19 nt, Artificial Sequence
  Description of Artificial Sequence: Synthetic oligonucleotide
  Antisense strand to SEQ ID NO: 1735677
uuaaaccuaugcagucuca

SEQ ID NO: 1735679 - RNA, 19 nt, Artificial Sequence
  Description of Artificial Sequence: Synthetic oligonucleotide
  Sense strand starting at position 2575 of SEQ ID NO: 1562279
gagacugcauagguuuaaa

SEQ ID NO: 1735680 - RNA, 19 nt, Artificial Sequence
  Description of Artificial Sequence: Synthetic oligonucleotide
  Antisense strand to SEQ ID NO: 1735679
uuuaaaccuaugcagucuc

SEQ ID NO: 1735681 - RNA, 19 nt, Artificial Sequence
  Description of Artificial Sequence: Synthetic oligonucleotide
  Sense strand starting at position 2794 of SEQ ID NO: 1562279
acgcaaagagucuaaugaa

SEQ ID NO: 1735682 - RNA, 19 nt, Artificial Sequence
  Description of Artificial Sequence: Synthetic oligonucleotide
  Antisense strand to SEQ ID NO: 1735681
uucauuagacucuuugcgu

SEQ ID NO: 1735683 - RNA, 19 nt, Artificial Sequence
  Description of Artificial Sequence: Synthetic oligonucleotide
  Sense strand starting at position 2964 of SEQ ID NO: 1562279
ggcacagucuuauuaugac

SEQ ID NO: 1735684 - RNA, 19 nt, Artificial Sequence
  Description of Artificial Sequence: Synthetic oligonucleotide
  Antisense strand to SEQ ID NO: 1735683
gucauaauaagacugugcc

SEQ ID NO: 1735685 - RNA, 19 nt, Artificial Sequence
  Description of Artificial Sequence: Synthetic oligonucleotide
  Sense strand starting at position 3078 of SEQ ID NO: 1562279
cuggguucuggaugacuga

SEQ ID NO: 1735686 - RNA, 19 nt, Artificial Sequence
  Description of Artificial Sequence: Synthetic oligonucleotide
  Antisense strand to SEQ ID NO: 1735685
ucagucauccagaacccag

SEQ ID NO: 1735687 - RNA, 19 nt, Artificial Sequence
  Description of Artificial Sequence: Synthetic oligonucleotide
  Sense strand starting at position 3085 of SEQ ID NO: 1562279
cuggaugacugaguucuuu

SEQ ID NO: 1735688 - RNA, 19 nt, Artificial Sequence
  Description of Artificial Sequence: Synthetic oligonucleotide
  Antisense strand to SEQ ID NO: 1735687
aaagaacucagucauccag

SEQ ID NO: 1735689 - RNA, 19 nt, Artificial Sequence
  Description of Artificial Sequence: Synthetic oligonucleotide
  Sense strand starting at position 3111 of SEQ ID NO: 1562279
gggacaagagcugaugcua

SEQ ID NO: 1735690 - RNA, 19 nt, Artificial Sequence
  Description of Artificial Sequence: Synthetic oligonucleotide
  Antisense strand to SEQ ID NO: 1735689
uagcaucagcucuuguccc

SEQ ID NO: 1735691 - RNA, 19 nt, Artificial Sequence
  Description of Artificial Sequence: Synthetic oligonucleotide
  Sense strand starting at position 3362 of SEQ ID NO: 1562279
ucgguuccaguuuacaaau

SEQ ID NO: 1735692 - RNA, 19 nt, Artificial Sequence
  Description of Artificial Sequence: Synthetic oligonucleotide
  Antisense strand to SEQ ID NO: 1735691
auuuguaaacuggaaccga

SEQ ID NO: 1735693 - RNA, 19 nt, Artificial Sequence
  Description of Artificial Sequence: Synthetic oligonucleotide
  Sense strand starting at position 3430 of SEQ ID NO: 1562279
caguuauuacaucaagggu

SEQ ID NO: 1735694 - RNA, 19 nt, Artificial Sequence
  Description of Artificial Sequence: Synthetic oligonucleotide
  Antisense strand to SEQ ID NO: 1735693
acccuugauguaauaacug

SEQ ID NO: 1735695 - RNA, 19 nt, Artificial Sequence
  Description of Artificial Sequence: Synthetic oligonucleotide
  Sense strand starting at position 3776 of SEQ ID NO: 1562279
guauaagaggcuugguaaa

SEQ ID NO: 1735696 - RNA, 19 nt, Artificial Sequence
  Description of Artificial Sequence: Synthetic oligonucleotide
  Antisense strand to SEQ ID NO: 1735695
uuuaccaagccucuuauac

SEQ ID NO: 1735697 - RNA, 19 nt, Artificial Sequence
  Description of Artificial Sequence: Synthetic oligonucleotide
  Sense strand starting at position 3778 of SEQ ID NO: 1562279
auaagaggcuugguaaaua

SEQ ID NO: 1735698 - RNA, 19 nt, Artificial Sequence
  Description of Artificial Sequence: Synthetic oligonucleotide
  Antisense strand to SEQ ID NO: 1735697
uauuuaccaagccucuuau

SEQ ID NO: 1735699 - RNA, 19 nt, Artificial Sequence
  Description of Artificial Sequence: Synthetic oligonucleotide
  Sense strand starting at position 3790 of SEQ ID NO: 1562279
guaaauauccacuggaccu

SEQ ID NO: 1735700 - RNA, 19 nt, Artificial Sequence
  Description of Artificial Sequence: Synthetic oligonucleotide
  Antisense strand to SEQ ID NO: 1735699
agguccaguggauauuuac

SEQ ID NO: 1735701 - RNA, 19 nt, Artificial Sequence
  Description of Artificial Sequence: Synthetic oligonucleotide
  Sense strand starting at position 49 of SEQ ID NO: 1562280
auguucgagaguuggauga

SEQ ID NO: 1735702 - RNA, 19 nt, Artificial Sequence
  Description of Artificial Sequence: Synthetic oligonucleotide
  Antisense strand to SEQ ID NO: 1735701
ucauccaacucucgaacau

SEQ ID NO: 1735703 - RNA, 19 nt, Artificial Sequence
  Description of Artificial Sequence: Synthetic oligonucleotide
  Sense strand starting at position 79 of SEQ ID NO: 1562280
uuguuauacaccuaguggu

SEQ ID NO: 1735704 - RNA, 19 nt, Artificial Sequence
  Description of Artificial Sequence: Synthetic oligonucleotide
  Antisense strand to SEQ ID NO: 1735703
accacuagguguauaacaa

SEQ ID NO: 1735705 - RNA, 19 nt, Artificial Sequence
  Description of Artificial Sequence: Synthetic oligonucleotide
  Sense strand starting at position 157 of SEQ ID NO: 1562280
gccaucuucuccgucuuaa

SEQ ID NO: 1735706 - RNA, 19 nt, Artificial Sequence
  Description of Artificial Sequence: Synthetic oligonucleotide
  Antisense strand to SEQ ID NO: 1735705
uuaagacggagaagauggc

SEQ ID NO: 1735707 - RNA, 19 nt, Artificial Sequence
  Description of Artificial Sequence: Synthetic oligonucleotide
  Sense strand starting at position 436 of SEQ ID NO: 1562280
agaauuaagccucggaggu

SEQ ID NO: 1735708 - RNA, 19 nt, Artificial Sequence
  Description of Artificial Sequence: Synthetic oligonucleotide
  Antisense strand to SEQ ID NO: 1735707
accuccgaggcuuaauucu

SEQ ID NO: 1735709 - RNA, 19 nt, Artificial Sequence
  Description of Artificial Sequence: Synthetic oligonucleotide
  Sense strand starting at position 437 of SEQ ID NO: 1562280
gaauuaagccucggaggug

SEQ ID NO: 1735710 - RNA, 19 nt, Artificial Sequence
  Description of Artificial Sequence: Synthetic oligonucleotide
  Antisense strand to SEQ ID NO: 1735709
caccuccgaggcuuaauuc

SEQ ID NO: 1735711 - RNA, 19 nt, Artificial Sequence
  Description of Artificial Sequence: Synthetic oligonucleotide
  Sense strand starting at position 1023 of SEQ ID NO: 1562280
gagcgaaggacuggcuuua

SEQ ID NO: 1735712 - RNA, 19 nt, Artificial Sequence
  Description of Artificial Sequence: Synthetic oligonucleotide
  Antisense strand to SEQ ID NO: 1735711
uaaagccaguccuucgcuc

SEQ ID NO: 1735713 - RNA, 19 nt, Artificial Sequence
  Description of Artificial Sequence: Synthetic oligonucleotide
  Sense strand starting at position 1339 of SEQ ID NO: 1562280
cccggcuucucugcauuaa

SEQ ID NO: 1735714 - RNA, 19 nt, Artificial Sequence
  Description of Artificial Sequence: Synthetic oligonucleotide
  Antisense strand to SEQ ID NO: 1735713
uuaaugcagagaagccggg

SEQ ID NO: 1735715 - RNA, 19 nt, Artificial Sequence
  Description of Artificial Sequence: Synthetic oligonucleotide
  Sense strand starting at position 1340 of SEQ ID NO: 1562280
ccggcuucucugcauuaaa

SEQ ID NO: 1735716 - RNA, 19 nt, Artificial Sequence
  Description of Artificial Sequence: Synthetic oligonucleotide
  Antisense strand to SEQ ID NO: 1735715
uuuaaugcagagaagccgg

SEQ ID NO: 1735717 - RNA, 19 nt, Artificial Sequence
  Description of Artificial Sequence: Synthetic oligonucleotide
  Sense strand starting at position 1343 of SEQ ID NO: 1562280
gcuucucugcauuaaagac

SEQ ID NO: 1735718 - RNA, 19 nt, Artificial Sequence
  Description of Artificial Sequence: Synthetic oligonucleotide
  Antisense strand to SEQ ID NO: 1735717
gucuuuaaugcagagaagc

SEQ ID NO: 1735719 - RNA, 19 nt, Artificial Sequence
  Description of Artificial Sequence: Synthetic oligonucleotide
  Sense strand starting at position 1351 of SEQ ID NO: 1562280
gcauuaaagacuuggguua

SEQ ID NO: 1735720 - RNA, 19 nt, Artificial Sequence
  Description of Artificial Sequence: Synthetic oligonucleotide
  Antisense strand to SEQ ID NO: 1735719
uaacccaagucuuuaaugc

SEQ ID NO: 1735721 - RNA, 19 nt, Artificial Sequence
  Description of Artificial Sequence: Synthetic oligonucleotide
  Sense strand starting at position 1352 of SEQ ID NO: 1562280
cauuaaagacuuggguuaa

SEQ ID NO: 1735722 - RNA, 19 nt, Artificial Sequence
  Description of Artificial Sequence: Synthetic oligonucleotide
  Antisense strand to SEQ ID NO: 1735721
uuaacccaagucuuuaaug

SEQ ID NO: 1735723 - RNA, 19 nt, Artificial Sequence
  Description of Artificial Sequence: Synthetic oligonucleotide
  Sense strand starting at position 1981 of SEQ ID NO: 1562280
gugagcuugaaucauccga

SEQ ID NO: 1735724 - RNA, 19 nt, Artificial Sequence
  Description of Artificial Sequence: Synthetic oligonucleotide
  Antisense strand to SEQ ID NO: 1735723
ucggaugauucaagcucac

SEQ ID NO: 1735725 - RNA, 19 nt, Artificial Sequence
  Description of Artificial Sequence: Synthetic oligonucleotide
  Sense strand starting at position 2098 of SEQ ID NO: 1562280
gcguuucuggaagagaaug

SEQ ID NO: 1735726 - RNA, 19 nt, Artificial Sequence
  Description of Artificial Sequence: Synthetic oligonucleotide
  Antisense strand to SEQ ID NO: 1735725
cauucucuuccagaaacgc

SEQ ID NO: 1735727 - RNA, 19 nt, Artificial Sequence
  Description of Artificial Sequence: Synthetic oligonucleotide
  Sense strand starting at position 2205 of SEQ ID NO: 1562280
gcacgagcaaccuggaauu

SEQ ID NO: 1735728 - RNA, 19 nt, Artificial Sequence
  Description of Artificial Sequence: Synthetic oligonucleotide
  Antisense strand to SEQ ID NO: 1735727
aauuccagguugcucgugc

SEQ ID NO: 1735729 - RNA, 19 nt, Artificial Sequence
  Description of Artificial Sequence: Synthetic oligonucleotide
  Sense strand starting at position 2225 of SEQ ID NO: 1562280
cuaucuuuagaacgaacca

SEQ ID NO: 1735730 - RNA, 19 nt, Artificial Sequence
  Description of Artificial Sequence: Synthetic oligonucleotide
  Antisense strand to SEQ ID NO: 1735729
ugguucguucuaaagauag

SEQ ID NO: 1735731 - RNA, 19 nt, Artificial Sequence
  Description of Artificial Sequence: Synthetic oligonucleotide
  Sense strand starting at position 2374 of SEQ ID NO: 1562280
ggguggucaguguggauuu

SEQ ID NO: 1735732 - RNA, 19 nt, Artificial Sequence
  Description of Artificial Sequence: Synthetic oligonucleotide
  Antisense strand to SEQ ID NO: 1735731
aaauccacacugaccaccc

SEQ ID NO: 1735733 - RNA, 19 nt, Artificial Sequence
  Description of Artificial Sequence: Synthetic oligonucleotide
  Sense strand starting at position 2413 of SEQ ID NO: 1562280
uuuguuguuaagcagggau

SEQ ID NO: 1735734 - RNA, 19 nt, Artificial Sequence
  Description of Artificial Sequence: Synthetic oligonucleotide
  Antisense strand to SEQ ID NO: 1735733
aucccugcuuaacaacaaa

SEQ ID NO: 1735735 - RNA, 19 nt, Artificial Sequence
  Description of Artificial Sequence: Synthetic oligonucleotide
  Sense strand starting at position 2416 of SEQ ID NO: 1562280
guuguuaagcagggaugua

SEQ ID NO: 1735736 - RNA, 19 nt, Artificial Sequence
  Description of Artificial Sequence: Synthetic oligonucleotide
  Antisense strand to SEQ ID NO: 1735735
uacaucccugcuuaacaac

SEQ ID NO: 1735737 - RNA, 19 nt, Artificial Sequence
  Description of Artificial Sequence: Synthetic oligonucleotide
  Sense strand starting at position 2417 of SEQ ID NO: 1562280
uuguuaagcagggauguaa

SEQ ID NO: 1735738 - RNA, 19 nt, Artificial Sequence
  Description of Artificial Sequence: Synthetic oligonucleotide
  Antisense strand to SEQ ID NO: 1735737
uuacaucccugcuuaacaa

SEQ ID NO: 1735739 - RNA, 19 nt, Artificial Sequence
  Description of Artificial Sequence: Synthetic oligonucleotide
  Sense strand starting at position 2536 of SEQ ID NO: 1562280
cauugugucuguccugaau

SEQ ID NO: 1735740 - RNA, 19 nt, Artificial Sequence
  Description of Artificial Sequence: Synthetic oligonucleotide
  Antisense strand to SEQ ID NO: 1735739
auucaggacagacacaaug

SEQ ID NO: 1735741 - RNA, 19 nt, Artificial Sequence
  Description of Artificial Sequence: Synthetic oligonucleotide
  Sense strand starting at position 2539 of SEQ ID NO: 1562280
ugugucuguccugaauuau

SEQ ID NO: 1735742 - RNA, 19 nt, Artificial Sequence
  Description of Artificial Sequence: Synthetic oligonucleotide
  Antisense strand to SEQ ID NO: 1735741
auaauucaggacagacaca

SEQ ID NO: 1735743 - RNA, 19 nt, Artificial Sequence
  Description of Artificial Sequence: Synthetic oligonucleotide
  Sense strand starting at position 2545 of SEQ ID NO: 1562280
uguccugaauuauagaaau

SEQ ID NO: 1735744 - RNA, 19 nt, Artificial Sequence
  Description of Artificial Sequence: Synthetic oligonucleotide
  Antisense strand to SEQ ID NO: 1735743
auuucuauaauucaggaca

SEQ ID NO: 1735745 - RNA, 19 nt, Artificial Sequence
  Description of Artificial Sequence: Synthetic oligonucleotide
  Sense strand starting at position 2615 of SEQ ID NO: 1562280
uccaguuaguguccagaua

SEQ ID NO: 1735746 - RNA, 19 nt, Artificial Sequence
  Description of Artificial Sequence: Synthetic oligonucleotide
  Antisense strand to SEQ ID NO: 1735745
uaucuggacacuaacugga

SEQ ID NO: 1735747 - RNA, 19 nt, Artificial Sequence
  Description of Artificial Sequence: Synthetic oligonucleotide
  Sense strand starting at position 2616 of SEQ ID NO: 1562280
ccaguuaguguccagauag

SEQ ID NO: 1735748 - RNA, 19 nt, Artificial Sequence
  Description of Artificial Sequence: Synthetic oligonucleotide
  Antisense strand to SEQ ID NO: 1735747
cuaucuggacacuaacugg

SEQ ID NO: 1735749 - RNA, 19 nt, Artificial Sequence
  Description of Artificial Sequence: Synthetic oligonucleotide
  Sense strand starting at position 2623 of SEQ ID NO: 1562280
guguccagauaguuuagaa

SEQ ID NO: 1735750 - RNA, 19 nt, Artificial Sequence
  Description of Artificial Sequence: Synthetic oligonucleotide
  Antisense strand to SEQ ID NO: 1735749
uucuaaacuaucuggacac

SEQ ID NO: 1735751 - RNA, 19 nt, Artificial Sequence
  Description of Artificial Sequence: Synthetic oligonucleotide
  Sense strand starting at position 2630 of SEQ ID NO: 1562280
gauaguuuagaaugcucua

SEQ ID NO: 1735752 - RNA, 19 nt, Artificial Sequence
  Description of Artificial Sequence: Synthetic oligonucleotide
  Antisense strand to SEQ ID NO: 1735751
uagagcauucuaaacuauc

SEQ ID NO: 1735753 - RNA, 19 nt, Artificial Sequence
  Description of Artificial Sequence: Synthetic oligonucleotide
  Sense strand starting at position 2635 of SEQ ID NO: 1562280
uuuagaaugcucuagaacu

SEQ ID NO: 1735754 - RNA, 19 nt, Artificial Sequence
  Description of Artificial Sequence: Synthetic oligonucleotide
  Antisense strand to SEQ ID NO: 1735753
aguucuagagcauucuaaa

SEQ ID NO: 1735755 - RNA, 19 nt, Artificial Sequence
  Description of Artificial Sequence: Synthetic oligonucleotide
  Sense strand starting at position 2645 of SEQ ID NO: 1562280
ucuagaacugcccagauau

SEQ ID NO: 1735756 - RNA, 19 nt, Artificial Sequence
  Description of Artificial Sequence: Synthetic oligonucleotide
  Antisense strand to SEQ ID NO: 1735755
auaucugggcaguucuaga

SEQ ID NO: 1735757 - RNA, 19 nt, Artificial Sequence
  Description of Artificial Sequence: Synthetic oligonucleotide
  Sense strand starting at position 2688 of SEQ ID NO: 1562280
gcauuuaguuaccaagcca

SEQ ID NO: 1735758 - RNA, 19 nt, Artificial Sequence
  Description of Artificial Sequence: Synthetic oligonucleotide
  Antisense strand to SEQ ID NO: 1735757
uggcuugguaacuaaaugc

SEQ ID NO: 1735759 - RNA, 19 nt, Artificial Sequence
  Description of Artificial Sequence: Synthetic oligonucleotide
  Sense strand starting at position 2875 of SEQ ID NO: 1562280
ggaagucauuucuguacca

SEQ ID NO: 1735760 - RNA, 19 nt, Artificial Sequence
  Description of Artificial Sequence: Synthetic oligonucleotide
  Antisense strand to SEQ ID NO: 1735759
ugguacagaaaugacuucc

SEQ ID NO: 1735761 - RNA, 19 nt, Artificial Sequence
  Description of Artificial Sequence: Synthetic oligonucleotide
  Sense strand starting at position 2899 of SEQ ID NO: 1562280
ccuaaauguugucuugugu

SEQ ID NO: 1735762 - RNA, 19 nt, Artificial Sequence
  Description of Artificial Sequence: Synthetic oligonucleotide
  Antisense strand to SEQ ID NO: 1735761
acacaagacaacauuuagg

SEQ ID NO: 1735763 - RNA, 19 nt, Artificial Sequence
  Description of Artificial Sequence: Synthetic oligonucleotide
  Sense strand starting at position 2967 of SEQ ID NO: 1562280
cccugaauguccuuuggau

SEQ ID NO: 1735764 - RNA, 19 nt, Artificial Sequence
  Description of Artificial Sequence: Synthetic oligonucleotide
  Antisense strand to SEQ ID NO: 1735763
auccaaaggacauucaggg

SEQ ID NO: 1735765 - RNA, 19 nt, Artificial Sequence
  Description of Artificial Sequence: Synthetic oligonucleotide
  Sense strand starting at position 2969 of SEQ ID NO: 1562280
cugaauguccuuuggaugu

SEQ ID NO: 1735766 - RNA, 19 nt, Artificial Sequence
  Description of Artificial Sequence: Synthetic oligonucleotide
  Antisense strand to SEQ ID NO: 1735765
acauccaaaggacauucag

SEQ ID NO: 1735767 - RNA, 19 nt, Artificial Sequence
  Description of Artificial Sequence: Synthetic oligonucleotide
  Sense strand starting at position 3228 of SEQ ID NO: 1562280
accgcaauuccguauuugu

SEQ ID NO: 1735768 - RNA, 19 nt, Artificial Sequence
  Description of Artificial Sequence: Synthetic oligonucleotide
  Antisense strand to SEQ ID NO: 1735767
acaaauacggaauugcggu

SEQ ID NO: 1735769 - RNA, 19 nt, Artificial Sequence
  Description of Artificial Sequence: Synthetic oligonucleotide
  Sense strand starting at position 3248 of SEQ ID NO: 1562280
ccgggucugcaugagcaaa

SEQ ID NO: 1735770 - RNA, 19 nt, Artificial Sequence
  Description of Artificial Sequence: Synthetic oligonucleotide
  Antisense strand to SEQ ID NO: 1735769
uuugcucaugcagacccgg

SEQ ID NO: 1735771 - RNA, 19 nt, Artificial Sequence
  Description of Artificial Sequence: Synthetic oligonucleotide
  Sense strand starting at position 3250 of SEQ ID NO: 1562280
gggucugcaugagcaaaua

SEQ ID NO: 1735772 - RNA, 19 nt, Artificial Sequence
  Description of Artificial Sequence: Synthetic oligonucleotide
  Antisense strand to SEQ ID NO: 1735771
uauuugcucaugcagaccc

SEQ ID NO: 1735773 - RNA, 19 nt, Artificial Sequence
  Description of Artificial Sequence: Synthetic oligonucleotide
  Sense strand starting at position 3280 of SEQ ID NO: 1562280
aagguaucugaaugcaaag

SEQ ID NO: 1735774 - RNA, 19 nt, Artificial Sequence
  Description of Artificial Sequence: Synthetic oligonucleotide
  Antisense strand to SEQ ID NO: 1735773
cuuugcauucagauaccuu

SEQ ID NO: 1735775 - RNA, 19 nt, Artificial Sequence
  Description of Artificial Sequence: Synthetic oligonucleotide
  Sense strand starting at position 3297 of SEQ ID NO: 1562280
agagaaacgugguccaaag

SEQ ID NO: 1735776 - RNA, 19 nt, Artificial Sequence
  Description of Artificial Sequence: Synthetic oligonucleotide
  Antisense strand to SEQ ID NO: 1735775
cuuuggaccacguuucucu

SEQ ID NO: 1735777 - RNA, 19 nt, Artificial Sequence
  Description of Artificial Sequence: Synthetic oligonucleotide
  Sense strand starting at position 3352 of SEQ ID NO: 1562280
gugagacccuuuguuacau

SEQ ID NO: 1735778 - RNA, 19 nt, Artificial Sequence
  Description of Artificial Sequence: Synthetic oligonucleotide
  Antisense strand to SEQ ID NO: 1735777
auguaacaaagggucucac

SEQ ID NO: 1735779 - RNA, 19 nt, Artificial Sequence
  Description of Artificial Sequence: Synthetic oligonucleotide
  Sense strand starting at position 3353 of SEQ ID NO: 1562280
ugagacccuuuguuacauu

SEQ ID NO: 1735780 - RNA, 19 nt, Artificial Sequence
  Description of Artificial Sequence: Synthetic oligonucleotide
  Antisense strand to SEQ ID NO: 1735779
aauguaacaaagggucuca

SEQ ID NO: 1735781 - RNA, 19 nt, Artificial Sequence
  Description of Artificial Sequence: Synthetic oligonucleotide
  Sense strand starting at position 17 of SEQ ID NO: 1562281
uuugcuuagcccuagauac

SEQ ID NO: 1735782 - RNA, 19 nt, Artificial Sequence
  Description of Artificial Sequence: Synthetic oligonucleotide
  Antisense strand to SEQ ID NO: 1735781
guaucuagggcuaagcaaa

SEQ ID NO: 1735783 - RNA, 19 nt, Artificial Sequence
  Description of Artificial Sequence: Synthetic oligonucleotide
  Sense strand starting at position 27 of SEQ ID NO: 1562281
ccuagauacugugcaaagu

SEQ ID NO: 1735784 - RNA, 19 nt, Artificial Sequence
  Description of Artificial Sequence: Synthetic oligonucleotide
  Antisense strand to SEQ ID NO: 1735783
acuuugcacaguaucuagg

SEQ ID NO: 1735785 - RNA, 19 nt, Artificial Sequence
  Description of Artificial Sequence: Synthetic oligonucleotide
  Sense strand starting at position 28 of SEQ ID NO: 1562281
cuagauacugugcaaagua

SEQ ID NO: 1735786 - RNA, 19 nt, Artificial Sequence
  Description of Artificial Sequence: Synthetic oligonucleotide
  Antisense strand to SEQ ID NO: 1735785
uacuuugcacaguaucuag

SEQ ID NO: 1735787 - RNA, 19 nt, Artificial Sequence
  Description of Artificial Sequence: Synthetic oligonucleotide
  Sense strand starting at position 146 of SEQ ID NO: 1562281
aagauuaagcugcacguau

SEQ ID NO: 1735788 - RNA, 19 nt, Artificial Sequence
  Description of Artificial Sequence: Synthetic oligonucleotide
  Antisense strand to SEQ ID NO: 1735787
auacgugcagcuuaaucuu

SEQ ID NO: 1735789 - RNA, 19 nt, Artificial Sequence
  Description of Artificial Sequence: Synthetic oligonucleotide
  Sense strand starting at position 181 of SEQ ID NO: 1562281
cucuaagucugacugcaua

SEQ ID NO: 1735790 - RNA, 19 nt, Artificial Sequence
  Description of Artificial Sequence: Synthetic oligonucleotide
  Antisense strand to SEQ ID NO: 1735789
uaugcagucagacuuagag

SEQ ID NO: 1735791 - RNA, 19 nt, Artificial Sequence
  Description of Artificial Sequence: Synthetic oligonucleotide
  Sense strand starting at position 184 of SEQ ID NO: 1562281
uaagucugacugcauagau

SEQ ID NO: 1735792 - RNA, 19 nt, Artificial Sequence
  Description of Artificial Sequence: Synthetic oligonucleotide
  Antisense strand to SEQ ID NO: 1735791
aucuaugcagucagacuua

SEQ ID NO: 1735793 - RNA, 19 nt, Artificial Sequence
  Description of Artificial Sequence: Synthetic oligonucleotide
  Sense strand starting at position 257 of SEQ ID NO: 1562281
cauguaagugccuaugauu

SEQ ID NO: 1735794 - RNA, 19 nt, Artificial Sequence
  Description of Artificial Sequence: Synthetic oligonucleotide
  Antisense strand to SEQ ID NO: 1735793
aaucauaggcacuuacaug

SEQ ID NO: 1735795 - RNA, 19 nt, Artificial Sequence
  Description of Artificial Sequence: Synthetic oligonucleotide
  Sense strand starting at position 353 of SEQ ID NO: 1562281
uuauaaguccuacgaacuc

SEQ ID NO: 1735796 - RNA, 19 nt, Artificial Sequence
  Description of Artificial Sequence: Synthetic oligonucleotide
  Antisense strand to SEQ ID NO: 1735795
gaguucguaggacuuauaa

SEQ ID NO: 1735797 - RNA, 19 nt, Artificial Sequence
  Description of Artificial Sequence: Synthetic oligonucleotide
  Sense strand starting at position 444 of SEQ ID NO: 1562281
cugauuagugaaugcauau

SEQ ID NO: 1735798 - RNA, 19 nt, Artificial Sequence
  Description of Artificial Sequence: Synthetic oligonucleotide
  Antisense strand to SEQ ID NO: 1735797
auaugcauucacuaaucag

SEQ ID NO: 1735799 - RNA, 19 nt, Artificial Sequence
  Description of Artificial Sequence: Synthetic oligonucleotide
  Sense strand starting at position 475 of SEQ ID NO: 1562281
cgcagaagauagucauuac

SEQ ID NO: 1735800 - RNA, 19 nt, Artificial Sequence
  Description of Artificial Sequence: Synthetic oligonucleotide
  Antisense strand to SEQ ID NO: 1735799
guaaugacuaucuucugcg

SEQ ID NO: 1735801 - RNA, 19 nt, Artificial Sequence
  Description of Artificial Sequence: Synthetic oligonucleotide
  Sense strand starting at position 568 of SEQ ID NO: 1562281
agcgucugacaugaucaga

SEQ ID NO: 1735802 - RNA, 19 nt, Artificial Sequence
  Description of Artificial Sequence: Synthetic oligonucleotide
  Antisense strand to SEQ ID NO: 1735801
ucugaucaugucagacgcu

SEQ ID NO: 1735803 - RNA, 19 nt, Artificial Sequence
  Description of Artificial Sequence: Synthetic oligonucleotide
  Sense strand starting at position 747 of SEQ ID NO: 1562281
aaugaaguguuagcaccau

SEQ ID NO: 1735804 - RNA, 19 nt, Artificial Sequence
  Description of Artificial Sequence: Synthetic oligonucleotide
  Antisense strand to SEQ ID NO: 1735803
auggugcuaacacuucauu

SEQ ID NO: 1735805 - RNA, 19 nt, Artificial Sequence
  Description of Artificial Sequence: Synthetic oligonucleotide
  Sense strand starting at position 1103 of SEQ ID NO: 1562281
ccuccuaguaaaggugaga

SEQ ID NO: 1735806 - RNA, 19 nt, Artificial Sequence
  Description of Artificial Sequence: Synthetic oligonucleotide
  Antisense strand to SEQ ID NO: 1735805
ucucaccuuuacuaggagg

SEQ ID NO: 1735807 - RNA, 19 nt, Artificial Sequence
  Description of Artificial Sequence: Synthetic oligonucleotide
  Sense strand starting at position 2060 of SEQ ID NO: 1562281
ccauuuccguucguggaga

SEQ ID NO: 1735808 - RNA, 19 nt, Artificial Sequence
  Description of Artificial Sequence: Synthetic oligonucleotide
  Antisense strand to SEQ ID NO: 1735807
ucuccacgaacggaaaugg

SEQ ID NO: 1735809 - RNA, 19 nt, Artificial Sequence
  Description of Artificial Sequence: Synthetic oligonucleotide
  Sense strand starting at position 2363 of SEQ ID NO: 1562281
auccgcucucuuuauagaa

SEQ ID NO: 1735810 - RNA, 19 nt, Artificial Sequence
  Description of Artificial Sequence: Synthetic oligonucleotide
  Antisense strand to SEQ ID NO: 1735809
uucuauaaagagagcggau

SEQ ID NO: 1735811 - RNA, 19 nt, Artificial Sequence
  Description of Artificial Sequence: Synthetic oligonucleotide
  Sense strand starting at position 2396 of SEQ ID NO: 1562281
aucauuuaucagcguauau

SEQ ID NO: 1735812 - RNA, 19 nt, Artificial Sequence
  Description of Artificial Sequence: Synthetic oligonucleotide
  Antisense strand to SEQ ID NO: 1735811
auauacgcugauaaaugau

SEQ ID NO: 1735813 - RNA, 19 nt, Artificial Sequence
  Description of Artificial Sequence: Synthetic oligonucleotide
  Sense strand starting at position 2465 of SEQ ID NO: 1562281
ggagauaacaauggguugu

SEQ ID NO: 1735814 - RNA, 19 nt, Artificial Sequence
  Description of Artificial Sequence: Synthetic oligonucleotide
  Antisense strand to SEQ ID NO: 1735813
acaacccauuguuaucucc

SEQ ID NO: 1735815 - RNA, 19 nt, Artificial Sequence
  Description of Artificial Sequence: Synthetic oligonucleotide
  Sense strand starting at position 2476 of SEQ ID NO: 1562281
uggguugucuacuuggaaa

SEQ ID NO: 1735816 - RNA, 19 nt, Artificial Sequence
  Description of Artificial Sequence: Synthetic oligonucleotide
  Antisense strand to SEQ ID NO: 1735815
uuuccaaguagacaaccca

SEQ ID NO: 1735817 - RNA, 19 nt, Artificial Sequence
  Description of Artificial Sequence: Synthetic oligonucleotide
  Sense strand starting at position 2478 of SEQ ID NO: 1562281
gguugucuacuuggaaauu

SEQ ID NO: 1735818 - RNA, 19 nt, Artificial Sequence
  Description of Artificial Sequence: Synthetic oligonucleotide
  Antisense strand to SEQ ID NO: 1735817
aauuuccaaguagacaacc

SEQ ID NO: 1735819 - RNA, 19 nt, Artificial Sequence
  Description of Artificial Sequence: Synthetic oligonucleotide
  Sense strand starting at position 2551 of SEQ ID NO: 1562281
guuugaucagguuagcgga

SEQ ID NO: 1735820 - RNA, 19 nt, Artificial Sequence
  Description of Artificial Sequence: Synthetic oligonucleotide
  Antisense strand to SEQ ID NO: 1735819
uccgcuaaccugaucaaac

SEQ ID NO: 1735821 - RNA, 19 nt, Artificial Sequence
  Description of Artificial Sequence: Synthetic oligonucleotide
  Sense strand starting at position 2585 of SEQ ID NO: 1562281
cuaauauugcauugcaaga

SEQ ID NO: 1735822 - RNA, 19 nt, Artificial Sequence
  Description of Artificial Sequence: Synthetic oligonucleotide
  Antisense strand to SEQ ID NO: 1735821
ucuugcaaugcaauauuag

SEQ ID NO: 1735823 - RNA, 19 nt, Artificial Sequence
  Description of Artificial Sequence: Synthetic oligonucleotide
  Sense strand starting at position 2590 of SEQ ID NO: 1562281
auugcauugcaagaugauu

SEQ ID NO: 1735824 - RNA, 19 nt, Artificial Sequence
  Description of Artificial Sequence: Synthetic oligonucleotide
  Antisense strand to SEQ ID NO: 1735823
aaucaucuugcaaugcaau

SEQ ID NO: 1735825 - RNA, 19 nt, Artificial Sequence
  Description of Artificial Sequence: Synthetic oligonucleotide
  Sense strand starting at position 2598 of SEQ ID NO: 1562281
gcaagaugauuagaaauuu

SEQ ID NO: 1735826 - RNA, 19 nt, Artificial Sequence
  Description of Artificial Sequence: Synthetic oligonucleotide
  Antisense strand to SEQ ID NO: 1735825
aaauuucuaaucaucuugc

SEQ ID NO: 1735827 - RNA, 19 nt, Artificial Sequence
  Description of Artificial Sequence: Synthetic oligonucleotide
  Sense strand starting at position 2638 of SEQ ID NO: 1562281
aguaguuuccacuaauagc

SEQ ID NO: 1735828 - RNA, 19 nt, Artificial Sequence
  Description of Artificial Sequence: Synthetic oligonucleotide
  Antisense strand to SEQ ID NO: 1735827
gcuauuaguggaaacuacu

SEQ ID NO: 1735829 - RNA, 19 nt, Artificial Sequence
  Description of Artificial Sequence: Synthetic oligonucleotide
  Sense strand starting at position 2700 of SEQ ID NO: 1562281
acuugagcgaauuguagaa

SEQ ID NO: 1735830 - RNA, 19 nt, Artificial Sequence
  Description of Artificial Sequence: Synthetic oligonucleotide
  Antisense strand to SEQ ID NO: 1735829
uucuacaauucgcucaagu

SEQ ID NO: 1735831 - RNA, 19 nt, Artificial Sequence
  Description of Artificial Sequence: Synthetic oligonucleotide
  Sense strand starting at position 2891 of SEQ ID NO: 1562281
accugaauuguguauacaa

SEQ ID NO: 1735832 - RNA, 19 nt, Artificial Sequence
  Description of Artificial Sequence: Synthetic oligonucleotide
  Antisense strand to SEQ ID NO: 1735831
uuguauacacaauucaggu

SEQ ID NO: 1735833 - RNA, 19 nt, Artificial Sequence
  Description of Artificial Sequence: Synthetic oligonucleotide
  Sense strand starting at position 2906 of SEQ ID NO: 1562281
acaagagcaucugucauga

SEQ ID NO: 1735834 - RNA, 19 nt, Artificial Sequence
  Description of Artificial Sequence: Synthetic oligonucleotide
  Antisense strand to SEQ ID NO: 1735833
ucaugacagaugcucuugu

SEQ ID NO: 1735835 - RNA, 19 nt, Artificial Sequence
  Description of Artificial Sequence: Synthetic oligonucleotide
  Sense strand starting at position 2911 of SEQ ID NO: 1562281
agcaucugucaugaggcau

SEQ ID NO: 1735836 - RNA, 19 nt, Artificial Sequence
  Description of Artificial Sequence: Synthetic oligonucleotide
  Antisense strand to SEQ ID NO: 1735835
augccucaugacagaugcu

SEQ ID NO: 1735837 - RNA, 19 nt, Artificial Sequence
  Description of Artificial Sequence: Synthetic oligonucleotide
  Sense strand starting at position 2915 of SEQ ID NO: 1562281
ucugucaugaggcauguau

SEQ ID NO: 1735838 - RNA, 19 nt, Artificial Sequence
  Description of Artificial Sequence: Synthetic oligonucleotide
  Antisense strand to SEQ ID NO: 1735837
auacaugccucaugacaga

SEQ ID NO: 1735839 - RNA, 19 nt, Artificial Sequence
  Description of Artificial Sequence: Synthetic oligonucleotide
  Sense strand starting at position 2917 of SEQ ID NO: 1562281
ugucaugaggcauguauag

SEQ ID NO: 1735840 - RNA, 19 nt, Artificial Sequence
  Description of Artificial Sequence: Synthetic oligonucleotide
  Antisense strand to SEQ ID NO: 1735839
cuauacaugccucaugaca

SEQ ID NO: 1735841 - RNA, 19 nt, Artificial Sequence
  Description of Artificial Sequence: Synthetic oligonucleotide
  Sense strand starting at position 2919 of SEQ ID NO: 1562281
ucaugaggcauguauagua

SEQ ID NO: 1735842 - RNA, 19 nt, Artificial Sequence
  Description of Artificial Sequence: Synthetic oligonucleotide
  Antisense strand to SEQ ID NO: 1735841
uacuauacaugccucauga

SEQ ID NO: 1735843 - RNA, 19 nt, Artificial Sequence
  Description of Artificial Sequence: Synthetic oligonucleotide
  Sense strand starting at position 2950 of SEQ ID NO: 1562281
aaucaugagcuagauguua

SEQ ID NO: 1735844 - RNA, 19 nt, Artificial Sequence
  Description of Artificial Sequence: Synthetic oligonucleotide
  Antisense strand to SEQ ID NO: 1735843
uaacaucuagcucaugauu

SEQ ID NO: 1735845 - RNA, 19 nt, Artificial Sequence
  Description of Artificial Sequence: Synthetic oligonucleotide
  Sense strand starting at position 2958 of SEQ ID NO: 1562281
gcuagauguuagguugaag

SEQ ID NO: 1735846 - RNA, 19 nt, Artificial Sequence
  Description of Artificial Sequence: Synthetic oligonucleotide
  Antisense strand to SEQ ID NO: 1735845
cuucaaccuaacaucuagc

SEQ ID NO: 1735847 - RNA, 19 nt, Artificial Sequence
  Description of Artificial Sequence: Synthetic oligonucleotide
  Sense strand starting at position 2961 of SEQ ID NO: 1562281
agauguuagguugaagcaa

SEQ ID NO: 1735848 - RNA, 19 nt, Artificial Sequence
  Description of Artificial Sequence: Synthetic oligonucleotide
  Antisense strand to SEQ ID NO: 1735847
uugcuucaaccuaacaucu

SEQ ID NO: 1735849 - RNA, 19 nt, Artificial Sequence
  Description of Artificial Sequence: Synthetic oligonucleotide
  Sense strand starting at position 3519 of SEQ ID NO: 1562281
gcagaaccagagugucaaa

SEQ ID NO: 1735850 - RNA, 19 nt, Artificial Sequence
  Description of Artificial Sequence: Synthetic oligonucleotide
  Antisense strand to SEQ ID NO: 1735849
uuugacacucugguucugc

SEQ ID NO: 1735851 - RNA, 19 nt, Artificial Sequence
  Description of Artificial Sequence: Synthetic oligonucleotide
  Sense strand starting at position 3687 of SEQ ID NO: 1562281
augaaagauuuggacuauu

SEQ ID NO: 1735852 - RNA, 19 nt, Artificial Sequence
  Description of Artificial Sequence: Synthetic oligonucleotide
  Antisense strand to SEQ ID NO: 1735851
aauaguccaaaucuuucau

SEQ ID NO: 1735853 - RNA, 19 nt, Artificial Sequence
  Description of Artificial Sequence: Synthetic oligonucleotide
  Sense strand starting at position 3723 of SEQ ID NO: 1562281
gcuucucuggacuaagcau

SEQ ID NO: 1735854 - RNA, 19 nt, Artificial Sequence
  Description of Artificial Sequence: Synthetic oligonucleotide
  Antisense strand to SEQ ID NO: 1735853
augcuuaguccagagaagc

SEQ ID NO: 1735855 - RNA, 19 nt, Artificial Sequence
  Description of Artificial Sequence: Synthetic oligonucleotide
  Sense strand starting at position 3875 of SEQ ID NO: 1562281
gcacuuucuagggauuggu

SEQ ID NO: 1735856 - RNA, 19 nt, Artificial Sequence
  Description of Artificial Sequence: Synthetic oligonucleotide
  Antisense strand to SEQ ID NO: 1735855
accaaucccuagaaagugc

SEQ ID NO: 1735857 - RNA, 19 nt, Artificial Sequence
  Description of Artificial Sequence: Synthetic oligonucleotide
  Sense strand starting at position 3878 of SEQ ID NO: 1562281
cuuucuagggauuggucua

SEQ ID NO: 1735858 - RNA, 19 nt, Artificial Sequence
  Description of Artificial Sequence: Synthetic oligonucleotide
  Antisense strand to SEQ ID NO: 1735857
uagaccaaucccuagaaag

SEQ ID NO: 1735859 - RNA, 19 nt, Artificial Sequence
  Description of Artificial Sequence: Synthetic oligonucleotide
  Sense strand starting at position 3879 of SEQ ID NO: 1562281
uuucuagggauuggucuau

SEQ ID NO: 1735860 - RNA, 19 nt, Artificial Sequence
  Description of Artificial Sequence: Synthetic oligonucleotide
  Antisense strand to SEQ ID NO: 1735859
auagaccaaucccuagaaa

SEQ ID NO: 1735861 - RNA, 19 nt, Artificial Sequence
  Description of Artificial Sequence: Synthetic oligonucleotide
  Sense strand starting at position 251 of SEQ ID NO: 1562282
uguaauaacuuccugugau

SEQ ID NO: 1735862 - RNA, 19 nt, Artificial Sequence
  Description of Artificial Sequence: Synthetic oligonucleotide
  Antisense strand to SEQ ID NO: 1735861
aucacaggaaguuauuaca

SEQ ID NO: 1735863 - RNA, 19 nt, Artificial Sequence
  Description of Artificial Sequence: Synthetic oligonucleotide
  Sense strand starting at position 263 of SEQ ID NO: 1562282
cugugauaacuugggcaug

SEQ ID NO: 1735864 - RNA, 19 nt, Artificial Sequence
  Description of Artificial Sequence: Synthetic oligonucleotide
  Antisense strand to SEQ ID NO: 1735863
caugcccaaguuaucacag

SEQ ID NO: 1735865 - RNA, 19 nt, Artificial Sequence
  Description of Artificial Sequence: Synthetic oligonucleotide
  Sense strand starting at position 266 of SEQ ID NO: 1562282
ugauaacuugggcauguca

SEQ ID NO: 1735866 - RNA, 19 nt, Artificial Sequence
  Description of Artificial Sequence: Synthetic oligonucleotide
  Antisense strand to SEQ ID NO: 1735865
ugacaugcccaaguuauca

SEQ ID NO: 1735867 - RNA, 19 nt, Artificial Sequence
  Description of Artificial Sequence: Synthetic oligonucleotide
  Sense strand starting at position 558 of SEQ ID NO: 1562282
cguacuuuaucauuacaga

SEQ ID NO: 1735868 - RNA, 19 nt, Artificial Sequence
  Description of Artificial Sequence: Synthetic oligonucleotide
  Antisense strand to SEQ ID NO: 1735867
ucuguaaugauaaaguacg

SEQ ID NO: 1735869 - RNA, 19 nt, Artificial Sequence
  Description of Artificial Sequence: Synthetic oligonucleotide
  Sense strand starting at position 783 of SEQ ID NO: 1562282
gggugagcuacuuacuauu

SEQ ID NO: 1735870 - RNA, 19 nt, Artificial Sequence
  Description of Artificial Sequence: Synthetic oligonucleotide
  Antisense strand to SEQ ID NO: 1735869
aauaguaaguagcucaccc

SEQ ID NO: 1735871 - RNA, 19 nt, Artificial Sequence
  Description of Artificial Sequence: Synthetic oligonucleotide
  Sense strand starting at position 808 of SEQ ID NO: 1562282
ggguaaacuuacccaauga

SEQ ID NO: 1735872 - RNA, 19 nt, Artificial Sequence
  Description of Artificial Sequence: Synthetic oligonucleotide
  Antisense strand to SEQ ID NO: 1735871
ucauuggguaaguuuaccc

SEQ ID NO: 1735873 - RNA, 19 nt, Artificial Sequence
  Description of Artificial Sequence: Synthetic oligonucleotide
  Sense strand starting at position 867 of SEQ ID NO: 1562282
ccuccuaguuugcuaggaa

SEQ ID NO: 1735874 - RNA, 19 nt, Artificial Sequence
  Description of Artificial Sequence: Synthetic oligonucleotide
  Antisense strand to SEQ ID NO: 1735873
uuccuagcaaacuaggagg

SEQ ID NO: 1735875 - RNA, 19 nt, Artificial Sequence
  Description of Artificial Sequence: Synthetic oligonucleotide
  Sense strand starting at position 896 of SEQ ID NO: 1562282
cuagcauacccguaagaca

SEQ ID NO: 1735876 - RNA, 19 nt, Artificial Sequence
  Description of Artificial Sequence: Synthetic oligonucleotide
  Antisense strand to SEQ ID NO: 1735875
ugucuuacggguaugcuag

SEQ ID NO: 1735877 - RNA, 19 nt, Artificial Sequence
  Description of Artificial Sequence: Synthetic oligonucleotide
  Sense strand starting at position 986 of SEQ ID NO: 1562282
gacccuugagcagaucauu

SEQ ID NO: 1735878 - RNA, 19 nt, Artificial Sequence
  Description of Artificial Sequence: Synthetic oligonucleotide
  Antisense strand to SEQ ID NO: 1735877
aaugaucugcucaaggguc

SEQ ID NO: 1735879 - RNA, 19 nt, Artificial Sequence
  Description of Artificial Sequence: Synthetic oligonucleotide
  Sense strand starting at position 995 of SEQ ID NO: 1562282
gcagaucauuugcaacaga

SEQ ID NO: 1735880 - RNA, 19 nt, Artificial Sequence
  Description of Artificial Sequence: Synthetic oligonucleotide
  Antisense strand to SEQ ID NO: 1735879
ucuguugcaaaugaucugc

SEQ ID NO: 1735881 - RNA, 19 nt, Artificial Sequence
  Description of Artificial Sequence: Synthetic oligonucleotide
  Sense strand starting at position 1074 of SEQ ID NO: 1562282
cgcagaguuugaucugaca

SEQ ID NO: 1735882 - RNA, 19 nt, Artificial Sequence
  Description of Artificial Sequence: Synthetic oligonucleotide
  Antisense strand to SEQ ID NO: 1735881
ugucagaucaaacucugcg

SEQ ID NO: 1735883 - RNA, 19 nt, Artificial Sequence
  Description of Artificial Sequence: Synthetic oligonucleotide
  Sense strand starting at position 1091 of SEQ ID NO: 1562282
caagaagccuuaguucuga

SEQ ID NO: 1735884 - RNA, 19 nt, Artificial Sequence
  Description of Artificial Sequence: Synthetic oligonucleotide
  Antisense strand to SEQ ID NO: 1735883
ucagaacuaaggcuucuug

SEQ ID NO: 1735885 - RNA, 19 nt, Artificial Sequence
  Description of Artificial Sequence: Synthetic oligonucleotide
  Sense strand starting at position 1236 of SEQ ID NO: 1562282
acugcuugugaggauuaag

SEQ ID NO: 1735886 - RNA, 19 nt, Artificial Sequence
  Description of Artificial Sequence: Synthetic oligonucleotide
  Antisense strand to SEQ ID NO: 1735885
cuuaauccucacaagcagu

SEQ ID NO: 1735887 - RNA, 19 nt, Artificial Sequence
  Description of Artificial Sequence: Synthetic oligonucleotide
  Sense strand starting at position 1239 of SEQ ID NO: 1562282
gcuugugaggauuaagacu

SEQ ID NO: 1735888 - RNA, 19 nt, Artificial Sequence
  Description of Artificial Sequence: Synthetic oligonucleotide
  Antisense strand to SEQ ID NO: 1735887
agucuuaauccucacaagc

SEQ ID NO: 1735889 - RNA, 19 nt, Artificial Sequence
  Description of Artificial Sequence: Synthetic oligonucleotide
  Sense strand starting at position 1299 of SEQ ID NO: 1562282
ggucaugauauguaaagca

SEQ ID NO: 1735890 - RNA, 19 nt, Artificial Sequence
  Description of Artificial Sequence: Synthetic oligonucleotide
  Antisense strand to SEQ ID NO: 1735889
ugcuuuacauaucaugacc

SEQ ID NO: 1735891 - RNA, 19 nt, Artificial Sequence
  Description of Artificial Sequence: Synthetic oligonucleotide
  Sense strand starting at position 1501 of SEQ ID NO: 1562282
acuaguaagugaucucuga

SEQ ID NO: 1735892 - RNA, 19 nt, Artificial Sequence
  Description of Artificial Sequence: Synthetic oligonucleotide
  Antisense strand to SEQ ID NO: 1735891
ucagagaucacuuacuagu

SEQ ID NO: 1735893 - RNA, 19 nt, Artificial Sequence
  Description of Artificial Sequence: Synthetic oligonucleotide
  Sense strand starting at position 1505 of SEQ ID NO: 1562282
guaagugaucucugacagg

SEQ ID NO: 1735894 - RNA, 19 nt, Artificial Sequence
  Description of Artificial Sequence: Synthetic oligonucleotide
  Antisense strand to SEQ ID NO: 1735893
ccugucagagaucacuuac

SEQ ID NO: 1735895 - RNA, 19 nt, Artificial Sequence
  Description of Artificial Sequence: Synthetic oligonucleotide
  Sense strand starting at position 1749 of SEQ ID NO: 1562282
gucccauaaccuugaagac

SEQ ID NO: 1735896 - RNA, 19 nt, Artificial Sequence
  Description of Artificial Sequence: Synthetic oligonucleotide
  Antisense strand to SEQ ID NO: 1735895
gucuucaagguuaugggac

SEQ ID NO: 1735897 - RNA, 19 nt, Artificial Sequence
  Description of Artificial Sequence: Synthetic oligonucleotide
  Sense strand starting at position 1820 of SEQ ID NO: 1562282
cggucaucccaggagggau

SEQ ID NO: 1735898 - RNA, 19 nt, Artificial Sequence
  Description of Artificial Sequence: Synthetic oligonucleotide
  Antisense strand to SEQ ID NO: 1735897
aucccuccugggaugaccg

SEQ ID NO: 1735899 - RNA, 19 nt, Artificial Sequence
  Description of Artificial Sequence: Synthetic oligonucleotide
  Sense strand starting at position 1990 of SEQ ID NO: 1562282
cuagguucucugggaagug

SEQ ID NO: 1735900 - RNA, 19 nt, Artificial Sequence
  Description of Artificial Sequence: Synthetic oligonucleotide
  Antisense strand to SEQ ID NO: 1735899
cacuucccagagaaccuag

SEQ ID NO: 1735901 - RNA, 19 nt, Artificial Sequence
  Description of Artificial Sequence: Synthetic oligonucleotide
  Sense strand starting at position 2283 of SEQ ID NO: 1562282
ugcuaaagccugcaucaau

SEQ ID NO: 1735902 - RNA, 19 nt, Artificial Sequence
  Description of Artificial Sequence: Synthetic oligonucleotide
  Antisense strand to SEQ ID NO: 1735901
auugaugcaggcuuuagca

SEQ ID NO: 1735903 - RNA, 19 nt, Artificial Sequence
  Description of Artificial Sequence: Synthetic oligonucleotide
  Sense strand starting at position 2446 of SEQ ID NO: 1562282
cuuauuaaagcaugauaag

SEQ ID NO: 1735904 - RNA, 19 nt, Artificial Sequence
  Description of Artificial Sequence: Synthetic oligonucleotide
  Antisense strand to SEQ ID NO: 1735903
cuuaucaugcuuuaauaag

SEQ ID NO: 1735905 - RNA, 19 nt, Artificial Sequence
  Description of Artificial Sequence: Synthetic oligonucleotide
  Sense strand starting at position 2479 of SEQ ID NO: 1562282
ggaccauagcgauggguau

SEQ ID NO: 1735906 - RNA, 19 nt, Artificial Sequence
  Description of Artificial Sequence: Synthetic oligonucleotide
  Antisense strand to SEQ ID NO: 1735905
auacccaucgcuauggucc

SEQ ID NO: 1735907 - RNA, 19 nt, Artificial Sequence
  Description of Artificial Sequence: Synthetic oligonucleotide
  Sense strand starting at position 2480 of SEQ ID NO: 1562282
gaccauagcgauggguaua

SEQ ID NO: 1735908 - RNA, 19 nt, Artificial Sequence
  Description of Artificial Sequence: Synthetic oligonucleotide
  Antisense strand to SEQ ID NO: 1735907
uauacccaucgcuaugguc

SEQ ID NO: 1735909 - RNA, 19 nt, Artificial Sequence
  Description of Artificial Sequence: Synthetic oligonucleotide
  Sense strand starting at position 2747 of SEQ ID NO: 1562282
gaugaucgguugucgaaga

SEQ ID NO: 1735910 - RNA, 19 nt, Artificial Sequence
  Description of Artificial Sequence: Synthetic oligonucleotide
  Antisense strand to SEQ ID NO: 1735909
ucuucgacaaccgaucauc

SEQ ID NO: 1735911 - RNA, 19 nt, Artificial Sequence
  Description of Artificial Sequence: Synthetic oligonucleotide
  Sense strand starting at position 2850 of SEQ ID NO: 1562282
ucagaagucucacuaaagu

SEQ ID NO: 1735912 - RNA, 19 nt, Artificial Sequence
  Description of Artificial Sequence: Synthetic oligonucleotide
  Antisense strand to SEQ ID NO: 1735911
acuuuagugagacuucuga

SEQ ID NO: 1735913 - RNA, 19 nt, Artificial Sequence
  Description of Artificial Sequence: Synthetic oligonucleotide
  Sense strand starting at position 2923 of SEQ ID NO: 1562282
cccaucucaccugaguaua

SEQ ID NO: 1735914 - RNA, 19 nt, Artificial Sequence
  Description of Artificial Sequence: Synthetic oligonucleotide
  Antisense strand to SEQ ID NO: 1735913
uauacucaggugagauggg

SEQ ID NO: 1735915 - RNA, 19 nt, Artificial Sequence
  Description of Artificial Sequence: Synthetic oligonucleotide
  Sense strand starting at position 2973 of SEQ ID NO: 1562282
ggauucugguaccuagauu

SEQ ID NO: 1735916 - RNA, 19 nt, Artificial Sequence
  Description of Artificial Sequence: Synthetic oligonucleotide
  Antisense strand to SEQ ID NO: 1735915
aaucuagguaccagaaucc

SEQ ID NO: 1735917 - RNA, 19 nt, Artificial Sequence
  Description of Artificial Sequence: Synthetic oligonucleotide
  Sense strand starting at position 3086 of SEQ ID NO: 1562282
ggguacuagccuuggauau

SEQ ID NO: 1735918 - RNA, 19 nt, Artificial Sequence
  Description of Artificial Sequence: Synthetic oligonucleotide
  Antisense strand to SEQ ID NO: 1735917
auauccaaggcuaguaccc

SEQ ID NO: 1735919 - RNA, 19 nt, Artificial Sequence
  Description of Artificial Sequence: Synthetic oligonucleotide
  Sense strand starting at position 3087 of SEQ ID NO: 1562282
gguacuagccuuggauaua

SEQ ID NO: 1735920 - RNA, 19 nt, Artificial Sequence
  Description of Artificial Sequence: Synthetic oligonucleotide
  Antisense strand to SEQ ID NO: 1735919
uauauccaaggcuaguacc

SEQ ID NO: 1735921 - RNA, 19 nt, Artificial Sequence
  Description of Artificial Sequence: Synthetic oligonucleotide
  Sense strand starting at position 3103 of SEQ ID NO: 1562282
auaguuugucugcauccau

SEQ ID NO: 1735922 - RNA, 19 nt, Artificial Sequence
  Description of Artificial Sequence: Synthetic oligonucleotide
  Antisense strand to SEQ ID NO: 1735921
auggaugcagacaaacuau

SEQ ID NO: 1735923 - RNA, 19 nt, Artificial Sequence
  Description of Artificial Sequence: Synthetic oligonucleotide
  Sense strand starting at position 3152 of SEQ ID NO: 1562282
uaaauagaacuuggucgaa

SEQ ID NO: 1735924 - RNA, 19 nt, Artificial Sequence
  Description of Artificial Sequence: Synthetic oligonucleotide
  Antisense strand to SEQ ID NO: 1735923
uucgaccaaguucuauuua

SEQ ID NO: 1735925 - RNA, 19 nt, Artificial Sequence
  Description of Artificial Sequence: Synthetic oligonucleotide
  Sense strand starting at position 3154 of SEQ ID NO: 1562282
aauagaacuuggucgaauu

SEQ ID NO: 1735926 - RNA, 19 nt, Artificial Sequence
  Description of Artificial Sequence: Synthetic oligonucleotide
  Antisense strand to SEQ ID NO: 1735925
aauucgaccaaguucuauu

SEQ ID NO: 1735927 - RNA, 19 nt, Artificial Sequence
  Description of Artificial Sequence: Synthetic oligonucleotide
  Sense strand starting at position 3203 of SEQ ID NO: 1562282
cagagcaagggucaguauu

SEQ ID NO: 1735928 - RNA, 19 nt, Artificial Sequence
  Description of Artificial Sequence: Synthetic oligonucleotide
  Antisense strand to SEQ ID NO: 1735927
aauacugacccuugcucug

SEQ ID NO: 1735929 - RNA, 19 nt, Artificial Sequence
  Description of Artificial Sequence: Synthetic oligonucleotide
  Sense strand starting at position 3785 of SEQ ID NO: 1562282
aguuccuuggcccaauuau

SEQ ID NO: 1735930 - RNA, 19 nt, Artificial Sequence
  Description of Artificial Sequence: Synthetic oligonucleotide
  Antisense strand to SEQ ID NO: 1735929
auaauugggccaaggaacu

SEQ ID NO: 1735931 - RNA, 19 nt, Artificial Sequence
  Description of Artificial Sequence: Synthetic oligonucleotide
  Sense strand starting at position 3851 of SEQ ID NO: 1562282
auaguaucugccuauaggu

SEQ ID NO: 1735932 - RNA, 19 nt, Artificial Sequence
  Description of Artificial Sequence: Synthetic oligonucleotide
  Antisense strand to SEQ ID NO: 1735931
accuauaggcagauacuau

SEQ ID NO: 1735933 - RNA, 19 nt, Artificial Sequence
  Description of Artificial Sequence: Synthetic oligonucleotide
  Sense strand starting at position 3858 of SEQ ID NO: 1562282
cugccuauaggucauuaga

SEQ ID NO: 1735934 - RNA, 19 nt, Artificial Sequence
  Description of Artificial Sequence: Synthetic oligonucleotide
  Antisense strand to SEQ ID NO: 1735933
ucuaaugaccuauaggcag

SEQ ID NO: 1735935 - RNA, 19 nt, Artificial Sequence
  Description of Artificial Sequence: Synthetic oligonucleotide
  Sense strand starting at position 3860 of SEQ ID NO: 1562282
gccuauaggucauuagaag

SEQ ID NO: 1735936 - RNA, 19 nt, Artificial Sequence
  Description of Artificial Sequence: Synthetic oligonucleotide
  Antisense strand to SEQ ID NO: 1735935
cuucuaaugaccuauaggc

SEQ ID NO: 1735937 - RNA, 19 nt, Artificial Sequence
  Description of Artificial Sequence: Synthetic oligonucleotide
  Sense strand starting at position 3906 of SEQ ID NO: 1562282
uuagaacaauugccugaga

SEQ ID NO: 1735938 - RNA, 19 nt, Artificial Sequence
  Description of Artificial Sequence: Synthetic oligonucleotide
  Antisense strand to SEQ ID NO: 1735937
ucucaggcaauuguucuaa

SEQ ID NO: 1735939 - RNA, 19 nt, Artificial Sequence
  Description of Artificial Sequence: Synthetic oligonucleotide
  Sense strand starting at position 3923 of SEQ ID NO: 1562282
gagaguggugcuuauuaau

SEQ ID NO: 1735940 - RNA, 19 nt, Artificial Sequence
  Description of Artificial Sequence: Synthetic oligonucleotide
  Antisense strand to SEQ ID NO: 1735939
auuaauaagcaccacucuc

SEQ ID NO: 1735941 - RNA, 19 nt, Artificial Sequence
  Description of Artificial Sequence: Synthetic oligonucleotide
  Sense strand starting at position 94 of SEQ ID NO: 1562283
gcagaaaucugaucagacg

SEQ ID NO: 1735942 - RNA, 19 nt, Artificial Sequence
  Description of Artificial Sequence: Synthetic oligonucleotide
  Antisense strand to SEQ ID NO: 1735941
cgucugaucagauuucugc

SEQ ID NO: 1735943 - RNA, 19 nt, Artificial Sequence
  Description of Artificial Sequence: Synthetic oligonucleotide
  Sense strand starting at position 103 of SEQ ID NO: 1562283
ugaucagacgcccaguuaa

SEQ ID NO: 1735944 - RNA, 19 nt, Artificial Sequence
  Description of Artificial Sequence: Synthetic oligonucleotide
  Antisense strand to SEQ ID NO: 1735943
uuaacugggcgucugauca

SEQ ID NO: 1735945 - RNA, 19 nt, Artificial Sequence
  Description of Artificial Sequence: Synthetic oligonucleotide
  Sense strand starting at position 203 of SEQ ID NO: 1562283
cccugaaacucuucuugga

SEQ ID NO: 1735946 - RNA, 19 nt, Artificial Sequence
  Description of Artificial Sequence: Synthetic oligonucleotide
  Antisense strand to SEQ ID NO: 1735945
uccaagaagaguuucaggg

SEQ ID NO: 1735947 - RNA, 19 nt, Artificial Sequence
  Description of Artificial Sequence: Synthetic oligonucleotide
  Sense strand starting at position 245 of SEQ ID NO: 1562283
guagcuguccagggacaga

SEQ ID NO: 1735948 - RNA, 19 nt, Artificial Sequence
  Description of Artificial Sequence: Synthetic oligonucleotide
  Antisense strand to SEQ ID NO: 1735947
ucugucccuggacagcuac

SEQ ID NO: 1735949 - RNA, 19 nt, Artificial Sequence
  Description of Artificial Sequence: Synthetic oligonucleotide
  Sense strand starting at position 309 of SEQ ID NO: 1562283
uuaccauccguguggagaa

SEQ ID NO: 1735950 - RNA, 19 nt, Artificial Sequence
  Description of Artificial Sequence: Synthetic oligonucleotide
  Antisense strand to SEQ ID NO: 1735949
uucuccacacggaugguaa

SEQ ID NO: 1735951 - RNA, 19 nt, Artificial Sequence
  Description of Artificial Sequence: Synthetic oligonucleotide
  Sense strand starting at position 322 of SEQ ID NO: 1562283
ggagaaguuuggccauggu

SEQ ID NO: 1735952 - RNA, 19 nt, Artificial Sequence
  Description of Artificial Sequence: Synthetic oligonucleotide
  Antisense strand to SEQ ID NO: 1735951
accauggccaaacuucucc

SEQ ID NO: 1735953 - RNA, 19 nt, Artificial Sequence
  Description of Artificial Sequence: Synthetic oligonucleotide
  Sense strand starting at position 325 of SEQ ID NO: 1562283
gaaguuuggccauggugag

SEQ ID NO: 1735954 - RNA, 19 nt, Artificial Sequence
  Description of Artificial Sequence: Synthetic oligonucleotide
  Antisense strand to SEQ ID NO: 1735953
cucaccauggccaaacuuc

SEQ ID NO: 1735955 - RNA, 19 nt, Artificial Sequence
  Description of Artificial Sequence: Synthetic oligonucleotide
  Sense strand starting at position 335 of SEQ ID NO: 1562283
cauggugagguaugcagaa

SEQ ID NO: 1735956 - RNA, 19 nt, Artificial Sequence
  Description of Artificial Sequence: Synthetic oligonucleotide
  Antisense strand to SEQ ID NO: 1735955
uucugcauaccucaccaug

SEQ ID NO: 1735957 - RNA, 19 nt, Artificial Sequence
  Description of Artificial Sequence: Synthetic oligonucleotide
  Sense strand starting at position 373 of SEQ ID NO: 1562283
aaagguggcccuuguuuau

SEQ ID NO: 1735958 - RNA, 19 nt, Artificial Sequence
  Description of Artificial Sequence: Synthetic oligonucleotide
  Antisense strand to SEQ ID NO: 1735957
auaaacaagggccaccuuu

SEQ ID NO: 1735959 - RNA, 19 nt, Artificial Sequence
  Description of Artificial Sequence: Synthetic oligonucleotide
  Sense strand starting at position 427 of SEQ ID NO: 1562283
gaugcccuugucuggaaga

SEQ ID NO: 1735960 - RNA, 19 nt, Artificial Sequence
  Description of Artificial Sequence: Synthetic oligonucleotide
  Antisense strand to SEQ ID NO: 1735959
ucuuccagacaagggcauc

SEQ ID NO: 1735961 - RNA, 19 nt, Artificial Sequence
  Description of Artificial Sequence: Synthetic oligonucleotide
  Sense strand starting at position 429 of SEQ ID NO: 1562283
ugcccuugucuggaagaac

SEQ ID NO: 1735962 - RNA, 19 nt, Artificial Sequence
  Description of Artificial Sequence: Synthetic oligonucleotide
  Antisense strand to SEQ ID NO: 1735961
guucuuccagacaagggca

SEQ ID NO: 1735963 - RNA, 19 nt, Artificial Sequence
  Description of Artificial Sequence: Synthetic oligonucleotide
  Sense strand starting at position 458 of SEQ ID NO: 1562283
acaaccuuguccuugucaa

SEQ ID NO: 1735964 - RNA, 19 nt, Artificial Sequence
  Description of Artificial Sequence: Synthetic oligonucleotide
  Antisense strand to SEQ ID NO: 1735963
uugacaaggacaagguugu

SEQ ID NO: 1735965 - RNA, 19 nt, Artificial Sequence
  Description of Artificial Sequence: Synthetic oligonucleotide
  Sense strand starting at position 498 of SEQ ID NO: 1562283
ugaaacaucucuuuccgau

SEQ ID NO: 1735966 - RNA, 19 nt, Artificial Sequence
  Description of Artificial Sequence: Synthetic oligonucleotide
  Antisense strand to SEQ ID NO: 1735965
aucggaaagagauguuuca

SEQ ID NO: 1735967 - RNA, 19 nt, Artificial Sequence
  Description of Artificial Sequence: Synthetic oligonucleotide
  Sense strand starting at position 516 of SEQ ID NO: 1562283
uuugcaucuccaggaggua

SEQ ID NO: 1735968 - RNA, 19 nt, Artificial Sequence
  Description of Artificial Sequence: Synthetic oligonucleotide
  Antisense strand to SEQ ID NO: 1735967
uaccuccuggagaugcaaa

SEQ ID NO: 1735969 - RNA, 19 nt, Artificial Sequence
  Description of Artificial Sequence: Synthetic oligonucleotide
  Sense strand starting at position 517 of SEQ ID NO: 1562283
uugcaucuccaggagguaa

SEQ ID NO: 1735970 - RNA, 19 nt, Artificial Sequence
  Description of Artificial Sequence: Synthetic oligonucleotide
  Antisense strand to SEQ ID NO: 1735969
uuaccuccuggagaugcaa

SEQ ID NO: 1735971 - RNA, 19 nt, Artificial Sequence
  Description of Artificial Sequence: Synthetic oligonucleotide
  Sense strand starting at position 553 of SEQ ID NO: 1562283
cugagcuccuuccugaaca

SEQ ID NO: 1735972 - RNA, 19 nt, Artificial Sequence
  Description of Artificial Sequence: Synthetic oligonucleotide
  Antisense strand to SEQ ID NO: 1735971
uguucaggaaggagcucag

SEQ ID NO: 1735973 - RNA, 19 nt, Artificial Sequence
  Description of Artificial Sequence: Synthetic oligonucleotide
  Sense strand starting at position 781 of SEQ ID NO: 1562283
auguaaagaugggcagaau

SEQ ID NO: 1735974 - RNA, 19 nt, Artificial Sequence
  Description of Artificial Sequence: Synthetic oligonucleotide
  Antisense strand to SEQ ID NO: 1735973
auucugcccaucuuuacau

SEQ ID NO: 1735975 - RNA, 19 nt, Artificial Sequence
  Description of Artificial Sequence: Synthetic oligonucleotide
  Sense strand starting at position 793 of SEQ ID NO: 1562283
gcagaaucagcaugcauuu

SEQ ID NO: 1735976 - RNA, 19 nt, Artificial Sequence
  Description of Artificial Sequence: Synthetic oligonucleotide
  Antisense strand to SEQ ID NO: 1735975
aaaugcaugcugauucugc

SEQ ID NO: 1735977 - RNA, 19 nt, Artificial Sequence
  Description of Artificial Sequence: Synthetic oligonucleotide
  Sense strand starting at position 827 of SEQ ID NO: 1562283
uccgaagacuuccuacauc

SEQ ID NO: 1735978 - RNA, 19 nt, Artificial Sequence
  Description of Artificial Sequence: Synthetic oligonucleotide
  Antisense strand to SEQ ID NO: 1735977
gauguaggaagucuucgga

SEQ ID NO: 1735979 - RNA, 19 nt, Artificial Sequence
  Description of Artificial Sequence: Synthetic oligonucleotide
  Sense strand starting at position 1019 of SEQ ID NO: 1562283
acaauagguggccacauau

SEQ ID NO: 1735980 - RNA, 19 nt, Artificial Sequence
  Description of Artificial Sequence: Synthetic oligonucleotide
  Antisense strand to SEQ ID NO: 1735979
auauguggccaccuauugu

SEQ ID NO: 1735981 - RNA, 19 nt, Artificial Sequence
  Description of Artificial Sequence: Synthetic oligonucleotide
  Sense strand starting at position 1097 of SEQ ID NO: 1562283
aucugauuacugcagauuc

SEQ ID NO: 1735982 - RNA, 19 nt, Artificial Sequence
  Description of Artificial Sequence: Synthetic oligonucleotide
  Antisense strand to SEQ ID NO: 1735981
gaaucugcaguaaucagau

SEQ ID NO: 1735983 - RNA, 19 nt, Artificial Sequence
  Description of Artificial Sequence: Synthetic oligonucleotide
  Sense strand starting at position 1516 of SEQ ID NO: 1562283
uuaagauuaggccauucuu

SEQ ID NO: 1735984 - RNA, 19 nt, Artificial Sequence
  Description of Artificial Sequence: Synthetic oligonucleotide
  Antisense strand to SEQ ID NO: 1735983
aagaauggccuaaucuuaa

SEQ ID NO: 1735985 - RNA, 19 nt, Artificial Sequence
  Description of Artificial Sequence: Synthetic oligonucleotide
  Sense strand starting at position 1635 of SEQ ID NO: 1562283
gcgauaagacuuuauaaau

SEQ ID NO: 1735986 - RNA, 19 nt, Artificial Sequence
  Description of Artificial Sequence: Synthetic oligonucleotide
  Antisense strand to SEQ ID NO: 1735985
auuuauaaagucuuaucgc

SEQ ID NO: 1735987 - RNA, 19 nt, Artificial Sequence
  Description of Artificial Sequence: Synthetic oligonucleotide
  Sense strand starting at position 2178 of SEQ ID NO: 1562283
gcaggaacugucuacaaau

SEQ ID NO: 1735988 - RNA, 19 nt, Artificial Sequence
  Description of Artificial Sequence: Synthetic oligonucleotide
  Antisense strand to SEQ ID NO: 1735987
auuuguagacaguuccugc

SEQ ID NO: 1735989 - RNA, 19 nt, Artificial Sequence
  Description of Artificial Sequence: Synthetic oligonucleotide
  Sense strand starting at position 2246 of SEQ ID NO: 1562283
ggaauugacgacgguggaa

SEQ ID NO: 1735990 - RNA, 19 nt, Artificial Sequence
  Description of Artificial Sequence: Synthetic oligonucleotide
  Antisense strand to SEQ ID NO: 1735989
uuccaccgucgucaauucc

SEQ ID NO: 1735991 - RNA, 19 nt, Artificial Sequence
  Description of Artificial Sequence: Synthetic oligonucleotide
  Sense strand starting at position 2248 of SEQ ID NO: 1562283
aauugacgacgguggaauu

SEQ ID NO: 1735992 - RNA, 19 nt, Artificial Sequence
  Description of Artificial Sequence: Synthetic oligonucleotide
  Antisense strand to SEQ ID NO: 1735991
aauuccaccgucgucaauu

SEQ ID NO: 1735993 - RNA, 19 nt, Artificial Sequence
  Description of Artificial Sequence: Synthetic oligonucleotide
  Sense strand starting at position 2545 of SEQ ID NO: 1562283
aguagaugccuugacgauu

SEQ ID NO: 1735994 - RNA, 19 nt, Artificial Sequence
  Description of Artificial Sequence: Synthetic oligonucleotide
  Antisense strand to SEQ ID NO: 1735993
aaucgucaaggcaucuacu

SEQ ID NO: 1735995 - RNA, 19 nt, Artificial Sequence
  Description of Artificial Sequence: Synthetic oligonucleotide
  Sense strand starting at position 2970 of SEQ ID NO: 1562283
augugauccuucuugcaca

SEQ ID NO: 1735996 - RNA, 19 nt, Artificial Sequence
  Description of Artificial Sequence: Synthetic oligonucleotide
  Antisense strand to SEQ ID NO: 1735995
ugugcaagaaggaucacau

SEQ ID NO: 1735997 - RNA, 19 nt, Artificial Sequence
  Description of Artificial Sequence: Synthetic oligonucleotide
  Sense strand starting at position 2987 of SEQ ID NO: 1562283
caaagaugacgugagcuaa

SEQ ID NO: 1735998 - RNA, 19 nt, Artificial Sequence
  Description of Artificial Sequence: Synthetic oligonucleotide
  Antisense strand to SEQ ID NO: 1735997
uuagcucacgucaucuuug

SEQ ID NO: 1735999 - RNA, 19 nt, Artificial Sequence
  Description of Artificial Sequence: Synthetic oligonucleotide
  Sense strand starting at position 3072 of SEQ ID NO: 1562283
gguguagaaucgcuucaga

SEQ ID NO: 1736000 - RNA, 19 nt, Artificial Sequence
  Description of Artificial Sequence: Synthetic oligonucleotide
  Antisense strand to SEQ ID NO: 1735999
ucugaagcgauucuacacc

SEQ ID NO: 1736001 - RNA, 19 nt, Artificial Sequence
  Description of Artificial Sequence: Synthetic oligonucleotide
  Sense strand starting at position 3195 of SEQ ID NO: 1562283
auuaaacucccacgcgauu

SEQ ID NO: 1736002 - RNA, 19 nt, Artificial Sequence
  Description of Artificial Sequence: Synthetic oligonucleotide
  Antisense strand to SEQ ID NO: 1736001
aaucgcgugggaguuuaau

SEQ ID NO: 1736003 - RNA, 19 nt, Artificial Sequence
  Description of Artificial Sequence: Synthetic oligonucleotide
  Sense strand starting at position 3766 of SEQ ID NO: 1562283
cagggaaucguucagguag

SEQ ID NO: 1736004 - RNA, 19 nt, Artificial Sequence
  Description of Artificial Sequence: Synthetic oligonucleotide
  Antisense strand to SEQ ID NO: 1736003
cuaccugaacgauucccug

SEQ ID NO: 1736005 - RNA, 19 nt, Artificial Sequence
  Description of Artificial Sequence: Synthetic oligonucleotide
  Sense strand starting at position 3816 of SEQ ID NO: 1562283
ggaagcuucuucccugaaa

SEQ ID NO: 1736006 - RNA, 19 nt, Artificial Sequence
  Description of Artificial Sequence: Synthetic oligonucleotide
  Antisense strand to SEQ ID NO: 1736005
uuucagggaagaagcuucc

SEQ ID NO: 1736007 - RNA, 19 nt, Artificial Sequence
  Description of Artificial Sequence: Synthetic oligonucleotide
  Sense strand starting at position 3819 of SEQ ID NO: 1562283
agcuucuucccugaaauug

SEQ ID NO: 1736008 - RNA, 19 nt, Artificial Sequence
  Description of Artificial Sequence: Synthetic oligonucleotide
  Antisense strand to SEQ ID NO: 1736007
caauuucagggaagaagcu

SEQ ID NO: 1736009 - RNA, 19 nt, Artificial Sequence
  Description of Artificial Sequence: Synthetic oligonucleotide
  Sense strand starting at position 3829 of SEQ ID NO: 1562283
cugaaauuguccuugggag

SEQ ID NO: 1736010 - RNA, 19 nt, Artificial Sequence
  Description of Artificial Sequence: Synthetic oligonucleotide
  Antisense strand to SEQ ID NO: 1736009
cucccaaggacaauuucag

SEQ ID NO: 1736011 - RNA, 19 nt, Artificial Sequence
  Description of Artificial Sequence: Synthetic oligonucleotide
  Sense strand starting at position 3830 of SEQ ID NO: 1562283
ugaaauuguccuugggagg

SEQ ID NO: 1736012 - RNA, 19 nt, Artificial Sequence
  Description of Artificial Sequence: Synthetic oligonucleotide
  Antisense strand to SEQ ID NO: 1736011
ccucccaaggacaauuuca

SEQ ID NO: 1736013 - RNA, 19 nt, Artificial Sequence
  Description of Artificial Sequence: Synthetic oligonucleotide
  Sense strand starting at position 3831 of SEQ ID NO: 1562283
gaaauuguccuugggagga

SEQ ID NO: 1736014 - RNA, 19 nt, Artificial Sequence
  Description of Artificial Sequence: Synthetic oligonucleotide
  Antisense strand to SEQ ID NO: 1736013
uccucccaaggacaauuuc

SEQ ID NO: 1736015 - RNA, 19 nt, Artificial Sequence
  Description of Artificial Sequence: Synthetic oligonucleotide
  Sense strand starting at position 3933 of SEQ ID NO: 1562283
uaggcuaguaagugguaua

SEQ ID NO: 1736016 - RNA, 19 nt, Artificial Sequence
  Description of Artificial Sequence: Synthetic oligonucleotide
  Antisense strand to SEQ ID NO: 1736015
uauaccacuuacuagccua

SEQ ID NO: 1736017 - RNA, 19 nt, Artificial Sequence
  Description of Artificial Sequence: Synthetic oligonucleotide
  Sense strand starting at position 3934 of SEQ ID NO: 1562283
aggcuaguaagugguauaa

SEQ ID NO: 1736018 - RNA, 19 nt, Artificial Sequence
  Description of Artificial Sequence: Synthetic oligonucleotide
  Antisense strand to SEQ ID NO: 1736017
uuauaccacuuacuagccu

SEQ ID NO: 1736019 - RNA, 19 nt, Artificial Sequence
  Description of Artificial Sequence: Synthetic oligonucleotide
  Sense strand starting at position 3968 of SEQ ID NO: 1562283
aaacgaauuggagggcuaa

SEQ ID NO: 1736020 - RNA, 19 nt, Artificial Sequence
  Description of Artificial Sequence: Synthetic oligonucleotide
  Antisense strand to SEQ ID NO: 1736019
uuagcccuccaauucguuu

SEQ ID NO: 1736021 - RNA, 19 nt, Artificial Sequence
  Description of Artificial Sequence: Synthetic oligonucleotide
  Sense strand starting at position 492 of SEQ ID NO: 1562284
gacuucuuuccuggaggca

SEQ ID NO: 1736022 - RNA, 19 nt, Artificial Sequence
  Description of Artificial Sequence: Synthetic oligonucleotide
  Antisense strand to SEQ ID NO: 1736021
ugccuccaggaaagaaguc

SEQ ID NO: 1736023 - RNA, 19 nt, Artificial Sequence
  Description of Artificial Sequence: Synthetic oligonucleotide
  Sense strand starting at position 493 of SEQ ID NO: 1562284
acuucuuuccuggaggcaa

SEQ ID NO: 1736024 - RNA, 19 nt, Artificial Sequence
  Description of Artificial Sequence: Synthetic oligonucleotide
  Antisense strand to SEQ ID NO: 1736023
uugccuccaggaaagaagu

SEQ ID NO: 1736025 - RNA, 19 nt, Artificial Sequence
  Description of Artificial Sequence: Synthetic oligonucleotide
  Sense strand starting at position 613 of SEQ ID NO: 1562284
accagaacuugucugaacu

SEQ ID NO: 1736026 - RNA, 19 nt, Artificial Sequence
  Description of Artificial Sequence: Synthetic oligonucleotide
  Antisense strand to SEQ ID NO: 1736025
aguucagacaaguucuggu

SEQ ID NO: 1736027 - RNA, 19 nt, Artificial Sequence
  Description of Artificial Sequence: Synthetic oligonucleotide
  Sense strand starting at position 614 of SEQ ID NO: 1562284
ccagaacuugucugaacug

SEQ ID NO: 1736028 - RNA, 19 nt, Artificial Sequence
  Description of Artificial Sequence: Synthetic oligonucleotide
  Antisense strand to SEQ ID NO: 1736027
caguucagacaaguucugg

SEQ ID NO: 1736029 - RNA, 19 nt, Artificial Sequence
  Description of Artificial Sequence: Synthetic oligonucleotide
  Sense strand starting at position 867 of SEQ ID NO: 1562284
uuguuuccuugcuugaaua

SEQ ID NO: 1736030 - RNA, 19 nt, Artificial Sequence
  Description of Artificial Sequence: Synthetic oligonucleotide
  Antisense strand to SEQ ID NO: 1736029
uauucaagcaaggaaacaa

SEQ ID NO: 1736031 - RNA, 19 nt, Artificial Sequence
  Description of Artificial Sequence: Synthetic oligonucleotide
  Sense strand starting at position 868 of SEQ ID NO: 1562284
uguuuccuugcuugaauaa

SEQ ID NO: 1736032 - RNA, 19 nt, Artificial Sequence
  Description of Artificial Sequence: Synthetic oligonucleotide
  Antisense strand to SEQ ID NO: 1736031
uuauucaagcaaggaaaca

SEQ ID NO: 1736033 - RNA, 19 nt, Artificial Sequence
  Description of Artificial Sequence: Synthetic oligonucleotide
  Sense strand starting at position 869 of SEQ ID NO: 1562284
guuuccuugcuugaauaau

SEQ ID NO: 1736034 - RNA, 19 nt, Artificial Sequence
  Description of Artificial Sequence: Synthetic oligonucleotide
  Antisense strand to SEQ ID NO: 1736033
auuauucaagcaaggaaac

SEQ ID NO: 1736035 - RNA, 19 nt, Artificial Sequence
  Description of Artificial Sequence: Synthetic oligonucleotide
  Sense strand starting at position 1180 of SEQ ID NO: 1562284
augagacaucugcaucuuu

SEQ ID NO: 1736036 - RNA, 19 nt, Artificial Sequence
  Description of Artificial Sequence: Synthetic oligonucleotide
  Antisense strand to SEQ ID NO: 1736035
aaagaugcagaugucucau

SEQ ID NO: 1736037 - RNA, 19 nt, Artificial Sequence
  Description of Artificial Sequence: Synthetic oligonucleotide
  Sense strand starting at position 1207 of SEQ ID NO: 1562284
cuguauugggccuaaagag

SEQ ID NO: 1736038 - RNA, 19 nt, Artificial Sequence
  Description of Artificial Sequence: Synthetic oligonucleotide
  Antisense strand to SEQ ID NO: 1736037
cucuuuaggcccaauacag

SEQ ID NO: 1736039 - RNA, 19 nt, Artificial Sequence
  Description of Artificial Sequence: Synthetic oligonucleotide
  Sense strand starting at position 1371 of SEQ ID NO: 1562284
cugccuuaccugggacaga

SEQ ID NO: 1736040 - RNA, 19 nt, Artificial Sequence
  Description of Artificial Sequence: Synthetic oligonucleotide
  Antisense strand to SEQ ID NO: 1736039
ucugucccagguaaggcag

SEQ ID NO: 1736041 - RNA, 19 nt, Artificial Sequence
  Description of Artificial Sequence: Synthetic oligonucleotide
  Sense strand starting at position 1657 of SEQ ID NO: 1562284
acagauagaugagaagaaa

SEQ ID NO: 1736042 - RNA, 19 nt, Artificial Sequence
  Description of Artificial Sequence: Synthetic oligonucleotide
  Antisense strand to SEQ ID NO: 1736041
uuucuucucaucuaucugu

SEQ ID NO: 1736043 - RNA, 19 nt, Artificial Sequence
  Description of Artificial Sequence: Synthetic oligonucleotide
  Sense strand starting at position 2172 of SEQ ID NO: 1562284
ggcuuugcucuguaacuca

SEQ ID NO: 1736044 - RNA, 19 nt, Artificial Sequence
  Description of Artificial Sequence: Synthetic oligonucleotide
  Antisense strand to SEQ ID NO: 1736043
ugaguuacagagcaaagcc

SEQ ID NO: 1736045 - RNA, 19 nt, Artificial Sequence
  Description of Artificial Sequence: Synthetic oligonucleotide
  Sense strand starting at position 2180 of SEQ ID NO: 1562284
ucuguaacucaugagcaau

SEQ ID NO: 1736046 - RNA, 19 nt, Artificial Sequence
  Description of Artificial Sequence: Synthetic oligonucleotide
  Antisense strand to SEQ ID NO: 1736045
auugcucaugaguuacaga

SEQ ID NO: 1736047 - RNA, 19 nt, Artificial Sequence
  Description of Artificial Sequence: Synthetic oligonucleotide
  Sense strand starting at position 2182 of SEQ ID NO: 1562284
uguaacucaugagcaauau

SEQ ID NO: 1736048 - RNA, 19 nt, Artificial Sequence
  Description of Artificial Sequence: Synthetic oligonucleotide
  Antisense strand to SEQ ID NO: 1736047
auauugcucaugaguuaca

SEQ ID NO: 1736049 - RNA, 19 nt, Artificial Sequence
  Description of Artificial Sequence: Synthetic oligonucleotide
  Sense strand starting at position 2183 of SEQ ID NO: 1562284
guaacucaugagcaauaua

SEQ ID NO: 1736050 - RNA, 19 nt, Artificial Sequence
  Description of Artificial Sequence: Synthetic oligonucleotide
  Antisense strand to SEQ ID NO: 1736049
uauauugcucaugaguuac

SEQ ID NO: 1736051 - RNA, 19 nt, Artificial Sequence
  Description of Artificial Sequence: Synthetic oligonucleotide
  Sense strand starting at position 2210 of SEQ ID NO: 1562284
gagagaaccuuggaacuga

SEQ ID NO: 1736052 - RNA, 19 nt, Artificial Sequence
  Description of Artificial Sequence: Synthetic oligonucleotide
  Antisense strand to SEQ ID NO: 1736051
ucaguuccaagguucucuc

SEQ ID NO: 1736053 - RNA, 19 nt, Artificial Sequence
  Description of Artificial Sequence: Synthetic oligonucleotide
  Sense strand starting at position 2232 of SEQ ID NO: 1562284
agauaaauacagugcagaa

SEQ ID NO: 1736054 - RNA, 19 nt, Artificial Sequence
  Description of Artificial Sequence: Synthetic oligonucleotide
  Antisense strand to SEQ ID NO: 1736053
uucugcacuguauuuaucu

SEQ ID NO: 1736055 - RNA, 19 nt, Artificial Sequence
  Description of Artificial Sequence: Synthetic oligonucleotide
  Sense strand starting at position 2404 of SEQ ID NO: 1562284
cccagagaacugugcacaa

SEQ ID NO: 1736056 - RNA, 19 nt, Artificial Sequence
  Description of Artificial Sequence: Synthetic oligonucleotide
  Antisense strand to SEQ ID NO: 1736055
uugugcacaguucucuggg

SEQ ID NO: 1736057 - RNA, 19 nt, Artificial Sequence
  Description of Artificial Sequence: Synthetic oligonucleotide
  Sense strand starting at position 2500 of SEQ ID NO: 1562284
aggcucucuaacgggaaau

SEQ ID NO: 1736058 - RNA, 19 nt, Artificial Sequence
  Description of Artificial Sequence: Synthetic oligonucleotide
  Antisense strand to SEQ ID NO: 1736057
auuucccguuagagagccu

SEQ ID NO: 1736059 - RNA, 19 nt, Artificial Sequence
  Description of Artificial Sequence: Synthetic oligonucleotide
  Sense strand starting at position 2501 of SEQ ID NO: 1562284
ggcucucuaacgggaaauc

SEQ ID NO: 1736060 - RNA, 19 nt, Artificial Sequence
  Description of Artificial Sequence: Synthetic oligonucleotide
  Antisense strand to SEQ ID NO: 1736059
gauuucccguuagagagcc

SEQ ID NO: 1736061 - RNA, 19 nt, Artificial Sequence
  Description of Artificial Sequence: Synthetic oligonucleotide
  Sense strand starting at position 2502 of SEQ ID NO: 1562284
gcucucuaacgggaaaucu

SEQ ID NO: 1736062 - RNA, 19 nt, Artificial Sequence
  Description of Artificial Sequence: Synthetic oligonucleotide
  Antisense strand to SEQ ID NO: 1736061
agauuucccguuagagagc

SEQ ID NO: 1736063 - RNA, 19 nt, Artificial Sequence
  Description of Artificial Sequence: Synthetic oligonucleotide
  Sense strand starting at position 2510 of SEQ ID NO: 1562284
acgggaaaucugggcauca

SEQ ID NO: 1736064 - RNA, 19 nt, Artificial Sequence
  Description of Artificial Sequence: Synthetic oligonucleotide
  Antisense strand to SEQ ID NO: 1736063
ugaugcccagauuucccgu

SEQ ID NO: 1736065 - RNA, 19 nt, Artificial Sequence
  Description of Artificial Sequence: Synthetic oligonucleotide
  Sense strand starting at position 2511 of SEQ ID NO: 1562284
cgggaaaucugggcaucag

SEQ ID NO: 1736066 - RNA, 19 nt, Artificial Sequence
  Description of Artificial Sequence: Synthetic oligonucleotide
  Antisense strand to SEQ ID NO: 1736065
cugaugcccagauuucccg

SEQ ID NO: 1736067 - RNA, 19 nt, Artificial Sequence
  Description of Artificial Sequence: Synthetic oligonucleotide
  Sense strand starting at position 2836 of SEQ ID NO: 1562284
gaggaagcuggugagcauu

SEQ ID NO: 1736068 - RNA, 19 nt, Artificial Sequence
  Description of Artificial Sequence: Synthetic oligonucleotide
  Antisense strand to SEQ ID NO: 1736067
aaugcucaccagcuuccuc

SEQ ID NO: 1736069 - RNA, 19 nt, Artificial Sequence
  Description of Artificial Sequence: Synthetic oligonucleotide
  Sense strand starting at position 2904 of SEQ ID NO: 1562284
ugugauguaacagguggaa

SEQ ID NO: 1736070 - RNA, 19 nt, Artificial Sequence
  Description of Artificial Sequence: Synthetic oligonucleotide
  Antisense strand to SEQ ID NO: 1736069
uuccaccuguuacaucaca

SEQ ID NO: 1736071 - RNA, 19 nt, Artificial Sequence
  Description of Artificial Sequence: Synthetic oligonucleotide
  Sense strand starting at position 3009 of SEQ ID NO: 1562284
ccagaucacugucuuguau

SEQ ID NO: 1736072 - RNA, 19 nt, Artificial Sequence
  Description of Artificial Sequence: Synthetic oligonucleotide
  Antisense strand to SEQ ID NO: 1736071
auacaagacagugaucugg

SEQ ID NO: 1736073 - RNA, 19 nt, Artificial Sequence
  Description of Artificial Sequence: Synthetic oligonucleotide
  Sense strand starting at position 3018 of SEQ ID NO: 1562284
ugucuuguauccuuggaga

SEQ ID NO: 1736074 - RNA, 19 nt, Artificial Sequence
  Description of Artificial Sequence: Synthetic oligonucleotide
  Antisense strand to SEQ ID NO: 1736073
ucuccaaggauacaagaca

SEQ ID NO: 1736075 - RNA, 19 nt, Artificial Sequence
  Description of Artificial Sequence: Synthetic oligonucleotide
  Sense strand starting at position 3020 of SEQ ID NO: 1562284
ucuuguauccuuggagauu

SEQ ID NO: 1736076 - RNA, 19 nt, Artificial Sequence
  Description of Artificial Sequence: Synthetic oligonucleotide
  Antisense strand to SEQ ID NO: 1736075
aaucuccaaggauacaaga

SEQ ID NO: 1736077 - RNA, 19 nt, Artificial Sequence
  Description of Artificial Sequence: Synthetic oligonucleotide
  Sense strand starting at position 3046 of SEQ ID NO: 1562284
ccgcauaggccuugggaga

SEQ ID NO: 1736078 - RNA, 19 nt, Artificial Sequence
  Description of Artificial Sequence: Synthetic oligonucleotide
  Antisense strand to SEQ ID NO: 1736077
ucucccaaggccuaugcgg

SEQ ID NO: 1736079 - RNA, 19 nt, Artificial Sequence
  Description of Artificial Sequence: Synthetic oligonucleotide
  Sense strand starting at position 3047 of SEQ ID NO: 1562284
cgcauaggccuugggagaa

SEQ ID NO: 1736080 - RNA, 19 nt, Artificial Sequence
  Description of Artificial Sequence: Synthetic oligonucleotide
  Antisense strand to SEQ ID NO: 1736079
uucucccaaggccuaugcg

SEQ ID NO: 1736081 - RNA, 19 nt, Artificial Sequence
  Description of Artificial Sequence: Synthetic oligonucleotide
  Sense strand starting at position 3135 of SEQ ID NO: 1562284
ucucaaauccagugagugu

SEQ ID NO: 1736082 - RNA, 19 nt, Artificial Sequence
  Description of Artificial Sequence: Synthetic oligonucleotide
  Antisense strand to SEQ ID NO: 1736081
acacucacuggauuugaga

SEQ ID NO: 1736083 - RNA, 19 nt, Artificial Sequence
  Description of Artificial Sequence: Synthetic oligonucleotide
  Sense strand starting at position 3139 of SEQ ID NO: 1562284
aaauccagugagugucaga

SEQ ID NO: 1736084 - RNA, 19 nt, Artificial Sequence
  Description of Artificial Sequence: Synthetic oligonucleotide
  Antisense strand to SEQ ID NO: 1736083
ucugacacucacuggauuu

SEQ ID NO: 1736085 - RNA, 19 nt, Artificial Sequence
  Description of Artificial Sequence: Synthetic oligonucleotide
  Sense strand starting at position 3245 of SEQ ID NO: 1562284
uuaacaugcggucauucua

SEQ ID NO: 1736086 - RNA, 19 nt, Artificial Sequence
  Description of Artificial Sequence: Synthetic oligonucleotide
  Antisense strand to SEQ ID NO: 1736085
uagaaugaccgcauguuaa

SEQ ID NO: 1736087 - RNA, 19 nt, Artificial Sequence
  Description of Artificial Sequence: Synthetic oligonucleotide
  Sense strand starting at position 3389 of SEQ ID NO: 1562284
auucguuguacagacugaa

SEQ ID NO: 1736088 - RNA, 19 nt, Artificial Sequence
  Description of Artificial Sequence: Synthetic oligonucleotide
  Antisense strand to SEQ ID NO: 1736087
uucagucuguacaacgaau

SEQ ID NO: 1736089 - RNA, 19 nt, Artificial Sequence
  Description of Artificial Sequence: Synthetic oligonucleotide
  Sense strand starting at position 3464 of SEQ ID NO: 1562284
augcuucuccacuggaaac

SEQ ID NO: 1736090 - RNA, 19 nt, Artificial Sequence
  Description of Artificial Sequence: Synthetic oligonucleotide
  Antisense strand to SEQ ID NO: 1736089
guuuccaguggagaagcau

SEQ ID NO: 1736091 - RNA, 19 nt, Artificial Sequence
  Description of Artificial Sequence: Synthetic oligonucleotide
  Sense strand starting at position 3578 of SEQ ID NO: 1562284
ggcuuucucagaggaaaga

SEQ ID NO: 1736092 - RNA, 19 nt, Artificial Sequence
  Description of Artificial Sequence: Synthetic oligonucleotide
  Antisense strand to SEQ ID NO: 1736091
ucuuuccucugagaaagcc

SEQ ID NO: 1736093 - RNA, 19 nt, Artificial Sequence
  Description of Artificial Sequence: Synthetic oligonucleotide
  Sense strand starting at position 3750 of SEQ ID NO: 1562284
cagagagaaucucccaagu

SEQ ID NO: 1736094 - RNA, 19 nt, Artificial Sequence
  Description of Artificial Sequence: Synthetic oligonucleotide
  Antisense strand to SEQ ID NO: 1736093
acuugggagauucucucug

SEQ ID NO: 1736095 - RNA, 19 nt, Artificial Sequence
  Description of Artificial Sequence: Synthetic oligonucleotide
  Sense strand starting at position 3790 of SEQ ID NO: 1562284
gugacccucuaaguaauua

SEQ ID NO: 1736096 - RNA, 19 nt, Artificial Sequence
  Description of Artificial Sequence: Synthetic oligonucleotide
  Antisense strand to SEQ ID NO: 1736095
uaauuacuuagagggucac

SEQ ID NO: 1736097 - RNA, 19 nt, Artificial Sequence
  Description of Artificial Sequence: Synthetic oligonucleotide
  Sense strand starting at position 3826 of SEQ ID NO: 1562284
gggagauucucagcaacug

SEQ ID NO: 1736098 - RNA, 19 nt, Artificial Sequence
  Description of Artificial Sequence: Synthetic oligonucleotide
  Antisense strand to SEQ ID NO: 1736097
caguugcugagaaucuccc

SEQ ID NO: 1736099 - RNA, 19 nt, Artificial Sequence
  Description of Artificial Sequence: Synthetic oligonucleotide
  Sense strand starting at position 3827 of SEQ ID NO: 1562284
ggagauucucagcaacugu

SEQ ID NO: 1736100 - RNA, 19 nt, Artificial Sequence
  Description of Artificial Sequence: Synthetic oligonucleotide
  Antisense strand to SEQ ID NO: 1736099
acaguugcugagaaucucc

SEQ ID NO: 1736101 - RNA, 19 nt, Artificial Sequence
  Description of Artificial Sequence: Synthetic oligonucleotide
  Sense strand starting at position 70 of SEQ ID NO: 1562285
acagaaguuauucggcagu

SEQ ID NO: 1736102 - RNA, 19 nt, Artificial Sequence
  Description of Artificial Sequence: Synthetic oligonucleotide
  Antisense strand to SEQ ID NO: 1736101
acugccgaauaacuucugu

SEQ ID NO: 1736103 - RNA, 19 nt, Artificial Sequence
  Description of Artificial Sequence: Synthetic oligonucleotide
  Sense strand starting at position 73 of SEQ ID NO: 1562285
gaaguuauucggcaguuuc

SEQ ID NO: 1736104 - RNA, 19 nt, Artificial Sequence
  Description of Artificial Sequence: Synthetic oligonucleotide
  Antisense strand to SEQ ID NO: 1736103
gaaacugccgaauaacuuc

SEQ ID NO: 1736105 - RNA, 19 nt, Artificial Sequence
  Description of Artificial Sequence: Synthetic oligonucleotide
  Sense strand starting at position 163 of SEQ ID NO: 1562285
aagucaugaguauguucua

SEQ ID NO: 1736106 - RNA, 19 nt, Artificial Sequence
  Description of Artificial Sequence: Synthetic oligonucleotide
  Antisense strand to SEQ ID NO: 1736105
uagaacauacucaugacuu

SEQ ID NO: 1736107 - RNA, 19 nt, Artificial Sequence
  Description of Artificial Sequence: Synthetic oligonucleotide
  Sense strand starting at position 164 of SEQ ID NO: 1562285
agucaugaguauguucuau

SEQ ID NO: 1736108 - RNA, 19 nt, Artificial Sequence
  Description of Artificial Sequence: Synthetic oligonucleotide
  Antisense strand to SEQ ID NO: 1736107
auagaacauacucaugacu

SEQ ID NO: 1736109 - RNA, 19 nt, Artificial Sequence
  Description of Artificial Sequence: Synthetic oligonucleotide
  Sense strand starting at position 354 of SEQ ID NO: 1562285
agaucacugugcuugggaa

SEQ ID NO: 1736110 - RNA, 19 nt, Artificial Sequence
  Description of Artificial Sequence: Synthetic oligonucleotide
  Antisense strand to SEQ ID NO: 1736109
uucccaagcacagugaucu

SEQ ID NO: 1736111 - RNA, 19 nt, Artificial Sequence
  Description of Artificial Sequence: Synthetic oligonucleotide
  Sense strand starting at position 356 of SEQ ID NO: 1562285
aucacugugcuugggaaca

SEQ ID NO: 1736112 - RNA, 19 nt, Artificial Sequence
  Description of Artificial Sequence: Synthetic oligonucleotide
  Antisense strand to SEQ ID NO: 1736111
uguucccaagcacagugau

SEQ ID NO: 1736113 - RNA, 19 nt, Artificial Sequence
  Description of Artificial Sequence: Synthetic oligonucleotide
  Sense strand starting at position 453 of SEQ ID NO: 1562285
uguuguaaucgggauacca

SEQ ID NO: 1736114 - RNA, 19 nt, Artificial Sequence
  Description of Artificial Sequence: Synthetic oligonucleotide
  Antisense strand to SEQ ID NO: 1736113
ugguaucccgauuacaaca

SEQ ID NO: 1736115 - RNA, 19 nt, Artificial Sequence
  Description of Artificial Sequence: Synthetic oligonucleotide
  Sense strand starting at position 455 of SEQ ID NO: 1562285
uuguaaucgggauaccacu

SEQ ID NO: 1736116 - RNA, 19 nt, Artificial Sequence
  Description of Artificial Sequence: Synthetic oligonucleotide
  Antisense strand to SEQ ID NO: 1736115
agugguaucccgauuacaa

SEQ ID NO: 1736117 - RNA, 19 nt, Artificial Sequence
  Description of Artificial Sequence: Synthetic oligonucleotide
  Sense strand starting at position 764 of SEQ ID NO: 1562285
ccucuuuagcaaugagaca

SEQ ID NO: 1736118 - RNA, 19 nt, Artificial Sequence
  Description of Artificial Sequence: Synthetic oligonucleotide
  Antisense strand to SEQ ID NO: 1736117
ugucucauugcuaaagagg

SEQ ID NO: 1736119 - RNA, 19 nt, Artificial Sequence
  Description of Artificial Sequence: Synthetic oligonucleotide
  Sense strand starting at position 823 of SEQ ID NO: 1562285
guaugaacacgaggugauu

SEQ ID NO: 1736120 - RNA, 19 nt, Artificial Sequence
  Description of Artificial Sequence: Synthetic oligonucleotide
  Antisense strand to SEQ ID NO: 1736119
aaucaccucguguucauac

SEQ ID NO: 1736121 - RNA, 19 nt, Artificial Sequence
  Description of Artificial Sequence: Synthetic oligonucleotide
  Sense strand starting at position 2019 of SEQ ID NO: 1562285
ugacgaggcucaucugaua

SEQ ID NO: 1736122 - RNA, 19 nt, Artificial Sequence
  Description of Artificial Sequence: Synthetic oligonucleotide
  Antisense strand to SEQ ID NO: 1736121
uaucagaugagccucguca

SEQ ID NO: 1736123 - RNA, 19 nt, Artificial Sequence
  Description of Artificial Sequence: Synthetic oligonucleotide
  Sense strand starting at position 2432 of SEQ ID NO: 1562285
augcgagagcuuuggagaa

SEQ ID NO: 1736124 - RNA, 19 nt, Artificial Sequence
  Description of Artificial Sequence: Synthetic oligonucleotide
  Antisense strand to SEQ ID NO: 1736123
uucuccaaagcucucgcau

SEQ ID NO: 1736125 - RNA, 19 nt, Artificial Sequence
  Description of Artificial Sequence: Synthetic oligonucleotide
  Sense strand starting at position 2622 of SEQ ID NO: 1562285
gucccuaaugcaggucaga

SEQ ID NO: 1736126 - RNA, 19 nt, Artificial Sequence
  Description of Artificial Sequence: Synthetic oligonucleotide
  Antisense strand to SEQ ID NO: 1736125
ucugaccugcauuagggac

SEQ ID NO: 1736127 - RNA, 19 nt, Artificial Sequence
  Description of Artificial Sequence: Synthetic oligonucleotide
  Sense strand starting at position 2792 of SEQ ID NO: 1562285
cggacugucuaauuaauac

SEQ ID NO: 1736128 - RNA, 19 nt, Artificial Sequence
  Description of Artificial Sequence: Synthetic oligonucleotide
  Antisense strand to SEQ ID NO: 1736127
guauuaauuagacaguccg

SEQ ID NO: 1736129 - RNA, 19 nt, Artificial Sequence
  Description of Artificial Sequence: Synthetic oligonucleotide
  Sense strand starting at position 2804 of SEQ ID NO: 1562285
uuaauacucguuuagccau

SEQ ID NO: 1736130 - RNA, 19 nt, Artificial Sequence
  Description of Artificial Sequence: Synthetic oligonucleotide
  Antisense strand to SEQ ID NO: 1736129
auggcuaaacgaguauuaa

SEQ ID NO: 1736131 - RNA, 19 nt, Artificial Sequence
  Description of Artificial Sequence: Synthetic oligonucleotide
  Sense strand starting at position 2807 of SEQ ID NO: 1562285
auacucguuuagccauaga

SEQ ID NO: 1736132 - RNA, 19 nt, Artificial Sequence
  Description of Artificial Sequence: Synthetic oligonucleotide
  Antisense strand to SEQ ID NO: 1736131
ucuauggcuaaacgaguau

SEQ ID NO: 1736133 - RNA, 19 nt, Artificial Sequence
  Description of Artificial Sequence: Synthetic oligonucleotide
  Sense strand starting at position 2836 of SEQ ID NO: 1562285
cagaaaugcguugaguaau

SEQ ID NO: 1736134 - RNA, 19 nt, Artificial Sequence
  Description of Artificial Sequence: Synthetic oligonucleotide
  Antisense strand to SEQ ID NO: 1736133
auuacucaacgcauuucug

SEQ ID NO: 1736135 - RNA, 19 nt, Artificial Sequence
  Description of Artificial Sequence: Synthetic oligonucleotide
  Sense strand starting at position 2839 of SEQ ID NO: 1562285
aaaugcguugaguaaugca

SEQ ID NO: 1736136 - RNA, 19 nt, Artificial Sequence
  Description of Artificial Sequence: Synthetic oligonucleotide
  Antisense strand to SEQ ID NO: 1736135
ugcauuacucaacgcauuu

SEQ ID NO: 1736137 - RNA, 19 nt, Artificial Sequence
  Description of Artificial Sequence: Synthetic oligonucleotide
  Sense strand starting at position 2844 of SEQ ID NO: 1562285
cguugaguaaugcaagcaa

SEQ ID NO: 1736138 - RNA, 19 nt, Artificial Sequence
  Description of Artificial Sequence: Synthetic oligonucleotide
  Antisense strand to SEQ ID NO: 1736137
uugcuugcauuacucaacg

SEQ ID NO: 1736139 - RNA, 19 nt, Artificial Sequence
  Description of Artificial Sequence: Synthetic oligonucleotide
  Sense strand starting at position 2913 of SEQ ID NO: 1562285
gcuaaaguccaucgauuuc

SEQ ID NO: 1736140 - RNA, 19 nt, Artificial Sequence
  Description of Artificial Sequence: Synthetic oligonucleotide
  Antisense strand to SEQ ID NO: 1736139
gaaaucgauggacuuuagc

SEQ ID NO: 1736141 - RNA, 19 nt, Artificial Sequence
  Description of Artificial Sequence: Synthetic oligonucleotide
  Sense strand starting at position 2920 of SEQ ID NO: 1562285
uccaucgauuucuacagaa

SEQ ID NO: 1736142 - RNA, 19 nt, Artificial Sequence
  Description of Artificial Sequence: Synthetic oligonucleotide
  Antisense strand to SEQ ID NO: 1736141
uucuguagaaaucgaugga

SEQ ID NO: 1736143 - RNA, 19 nt, Artificial Sequence
  Description of Artificial Sequence: Synthetic oligonucleotide
  Sense strand starting at position 3026 of SEQ ID NO: 1562285
ggaguuagaagccaagcuu

SEQ ID NO: 1736144 - RNA, 19 nt, Artificial Sequence
  Description of Artificial Sequence: Synthetic oligonucleotide
  Antisense strand to SEQ ID NO: 1736143
aagcuuggcuucuaacucc

SEQ ID NO: 1736145 - RNA, 19 nt, Artificial Sequence
  Description of Artificial Sequence: Synthetic oligonucleotide
  Sense strand starting at position 3094 of SEQ ID NO: 1562285
auuccuguguucccaauuu

SEQ ID NO: 1736146 - RNA, 19 nt, Artificial Sequence
  Description of Artificial Sequence: Synthetic oligonucleotide
  Antisense strand to SEQ ID NO: 1736145
aaauugggaacacaggaau

SEQ ID NO: 1736147 - RNA, 19 nt, Artificial Sequence
  Description of Artificial Sequence: Synthetic oligonucleotide
  Sense strand starting at position 3258 of SEQ ID NO: 1562285
gcuggaucccgugauauaa

SEQ ID NO: 1736148 - RNA, 19 nt, Artificial Sequence
  Description of Artificial Sequence: Synthetic oligonucleotide
  Antisense strand to SEQ ID NO: 1736147
uuauaucacgggauccagc

SEQ ID NO: 1736149 - RNA, 19 nt, Artificial Sequence
  Description of Artificial Sequence: Synthetic oligonucleotide
  Sense strand starting at position 3267 of SEQ ID NO: 1562285
cgugauauaacuuaaguug

SEQ ID NO: 1736150 - RNA, 19 nt, Artificial Sequence
  Description of Artificial Sequence: Synthetic oligonucleotide
  Antisense strand to SEQ ID NO: 1736149
caacuuaaguuauaucacg

SEQ ID NO: 1736151 - RNA, 19 nt, Artificial Sequence
  Description of Artificial Sequence: Synthetic oligonucleotide
  Sense strand starting at position 3300 of SEQ ID NO: 1562285
ucugcauaguuauuccaga

SEQ ID NO: 1736152 - RNA, 19 nt, Artificial Sequence
  Description of Artificial Sequence: Synthetic oligonucleotide
  Antisense strand to SEQ ID NO: 1736151
ucuggaauaacuaugcaga

SEQ ID NO: 1736153 - RNA, 19 nt, Artificial Sequence
  Description of Artificial Sequence: Synthetic oligonucleotide
  Sense strand starting at position 3305 of SEQ ID NO: 1562285
auaguuauuccagagcccu

SEQ ID NO: 1736154 - RNA, 19 nt, Artificial Sequence
  Description of Artificial Sequence: Synthetic oligonucleotide
  Antisense strand to SEQ ID NO: 1736153
agggcucuggaauaacuau

SEQ ID NO: 1736155 - RNA, 19 nt, Artificial Sequence
  Description of Artificial Sequence: Synthetic oligonucleotide
  Sense strand starting at position 3481 of SEQ ID NO: 1562285
auguauuagggccauugau

SEQ ID NO: 1736156 - RNA, 19 nt, Artificial Sequence
  Description of Artificial Sequence: Synthetic oligonucleotide
  Antisense strand to SEQ ID NO: 1736155
aucaauggcccuaauacau

SEQ ID NO: 1736157 - RNA, 19 nt, Artificial Sequence
  Description of Artificial Sequence: Synthetic oligonucleotide
  Sense strand starting at position 3499 of SEQ ID NO: 1562285
uaaagaggcuaugugacau

SEQ ID NO: 1736158 - RNA, 19 nt, Artificial Sequence
  Description of Artificial Sequence: Synthetic oligonucleotide
  Antisense strand to SEQ ID NO: 1736157
augucacauagccucuuua

SEQ ID NO: 1736159 - RNA, 19 nt, Artificial Sequence
  Description of Artificial Sequence: Synthetic oligonucleotide
  Sense strand starting at position 3505 of SEQ ID NO: 1562285
ggcuaugugacauauaagu

SEQ ID NO: 1736160 - RNA, 19 nt, Artificial Sequence
  Description of Artificial Sequence: Synthetic oligonucleotide
  Antisense strand to SEQ ID NO: 1736159
acuuauaugucacauagcc

SEQ ID NO: 1736161 - RNA, 19 nt, Artificial Sequence
  Description of Artificial Sequence: Synthetic oligonucleotide
  Sense strand starting at position 3607 of SEQ ID NO: 1562285
acaagaaacgcgugacuca

SEQ ID NO: 1736162 - RNA, 19 nt, Artificial Sequence
  Description of Artificial Sequence: Synthetic oligonucleotide
  Antisense strand to SEQ ID NO: 1736161
ugagucacgcguuucuugu

SEQ ID NO: 1736163 - RNA, 19 nt, Artificial Sequence
  Description of Artificial Sequence: Synthetic oligonucleotide
  Sense strand starting at position 3622 of SEQ ID NO: 1562285
cucagucuagggugaguau

SEQ ID NO: 1736164 - RNA, 19 nt, Artificial Sequence
  Description of Artificial Sequence: Synthetic oligonucleotide
  Antisense strand to SEQ ID NO: 1736163
auacucacccuagacugag

SEQ ID NO: 1736165 - RNA, 19 nt, Artificial Sequence
  Description of Artificial Sequence: Synthetic oligonucleotide
  Sense strand starting at position 3623 of SEQ ID NO: 1562285
ucagucuagggugaguauu

SEQ ID NO: 1736166 - RNA, 19 nt, Artificial Sequence
  Description of Artificial Sequence: Synthetic oligonucleotide
  Antisense strand to SEQ ID NO: 1736165
aauacucacccuagacuga

SEQ ID NO: 1736167 - RNA, 19 nt, Artificial Sequence
  Description of Artificial Sequence: Synthetic oligonucleotide
  Sense strand starting at position 3629 of SEQ ID NO: 1562285
uagggugaguauuccuaag

SEQ ID NO: 1736168 - RNA, 19 nt, Artificial Sequence
  Description of Artificial Sequence: Synthetic oligonucleotide
  Antisense strand to SEQ ID NO: 1736167
cuuaggaauacucacccua

SEQ ID NO: 1736169 - RNA, 19 nt, Artificial Sequence
  Description of Artificial Sequence: Synthetic oligonucleotide
  Sense strand starting at position 3631 of SEQ ID NO: 1562285
gggugaguauuccuaagcu

SEQ ID NO: 1736170 - RNA, 19 nt, Artificial Sequence
  Description of Artificial Sequence: Synthetic oligonucleotide
  Antisense strand to SEQ ID NO: 1736169
agcuuaggaauacucaccc

SEQ ID NO: 1736171 - RNA, 19 nt, Artificial Sequence
  Description of Artificial Sequence: Synthetic oligonucleotide
  Sense strand starting at position 3660 of SEQ ID NO: 1562285
agagggaugguuuggguuu

SEQ ID NO: 1736172 - RNA, 19 nt, Artificial Sequence
  Description of Artificial Sequence: Synthetic oligonucleotide
  Antisense strand to SEQ ID NO: 1736171
aaacccaaaccaucccucu

SEQ ID NO: 1736173 - RNA, 19 nt, Artificial Sequence
  Description of Artificial Sequence: Synthetic oligonucleotide
  Sense strand starting at position 3740 of SEQ ID NO: 1562285
agagcugucuugucagaaa

SEQ ID NO: 1736174 - RNA, 19 nt, Artificial Sequence
  Description of Artificial Sequence: Synthetic oligonucleotide
  Antisense strand to SEQ ID NO: 1736173
uuucugacaagacagcucu

SEQ ID NO: 1736175 - RNA, 19 nt, Artificial Sequence
  Description of Artificial Sequence: Synthetic oligonucleotide
  Sense strand starting at position 3823 of SEQ ID NO: 1562285
ggucuuagagcauaugauc

SEQ ID NO: 1736176 - RNA, 19 nt, Artificial Sequence
  Description of Artificial Sequence: Synthetic oligonucleotide
  Antisense strand to SEQ ID NO: 1736175
gaucauaugcucuaagacc

SEQ ID NO: 1736177 - RNA, 19 nt, Artificial Sequence
  Description of Artificial Sequence: Synthetic oligonucleotide
  Sense strand starting at position 3887 of SEQ ID NO: 1562285
uuacuuuccagguguugga

SEQ ID NO: 1736178 - RNA, 19 nt, Artificial Sequence
  Description of Artificial Sequence: Synthetic oligonucleotide
  Antisense strand to SEQ ID NO: 1736177
uccaacaccuggaaaguaa

SEQ ID NO: 1736179 - RNA, 19 nt, Artificial Sequence
  Description of Artificial Sequence: Synthetic oligonucleotide
  Sense strand starting at position 3896 of SEQ ID NO: 1562285
agguguuggaacugaaaug

SEQ ID NO: 1736180 - RNA, 19 nt, Artificial Sequence
  Description of Artificial Sequence: Synthetic oligonucleotide
  Antisense strand to SEQ ID NO: 1736179
cauuucaguuccaacaccu

SEQ ID NO: 1736181 - RNA, 19 nt, Artificial Sequence
  Description of Artificial Sequence: Synthetic oligonucleotide
  Sense strand starting at position 39 of SEQ ID NO: 1562286
guguacucauaaccaaauu

SEQ ID NO: 1736182 - RNA, 19 nt, Artificial Sequence
  Description of Artificial Sequence: Synthetic oligonucleotide
  Antisense strand to SEQ ID NO: 1736181
aauuugguuaugaguacac

SEQ ID NO: 1736183 - RNA, 19 nt, Artificial Sequence
  Description of Artificial Sequence: Synthetic oligonucleotide
  Sense strand starting at position 76 of SEQ ID NO: 1562286
agcucacugcuugaaacuu

SEQ ID NO: 1736184 - RNA, 19 nt, Artificial Sequence
  Description of Artificial Sequence: Synthetic oligonucleotide
  Antisense strand to SEQ ID NO: 1736183
aaguuucaagcagugagcu

SEQ ID NO: 1736185 - RNA, 19 nt, Artificial Sequence
  Description of Artificial Sequence: Synthetic oligonucleotide
  Sense strand starting at position 91 of SEQ ID NO: 1562286
acuuauagaccacguaaca

SEQ ID NO: 1736186 - RNA, 19 nt, Artificial Sequence
  Description of Artificial Sequence: Synthetic oligonucleotide
  Antisense strand to SEQ ID NO: 1736185
uguuacguggucuauaagu

SEQ ID NO: 1736187 - RNA, 19 nt, Artificial Sequence
  Description of Artificial Sequence: Synthetic oligonucleotide
  Sense strand starting at position 126 of SEQ ID NO: 1562286
aacuaaguccaguaagagu

SEQ ID NO: 1736188 - RNA, 19 nt, Artificial Sequence
  Description of Artificial Sequence: Synthetic oligonucleotide
  Antisense strand to SEQ ID NO: 1736187
acucuuacuggacuuaguu

SEQ ID NO: 1736189 - RNA, 19 nt, Artificial Sequence
  Description of Artificial Sequence: Synthetic oligonucleotide
  Sense strand starting at position 223 of SEQ ID NO: 1562286
gcgcaaauuuauucucaga

SEQ ID NO: 1736190 - RNA, 19 nt, Artificial Sequence
  Description of Artificial Sequence: Synthetic oligonucleotide
  Antisense strand to SEQ ID NO: 1736189
ucugagaauaaauuugcgc

SEQ ID NO: 1736191 - RNA, 19 nt, Artificial Sequence
  Description of Artificial Sequence: Synthetic oligonucleotide
  Sense strand starting at position 425 of SEQ ID NO: 1562286
gaguauuugcaccagcugu

SEQ ID NO: 1736192 - RNA, 19 nt, Artificial Sequence
  Description of Artificial Sequence: Synthetic oligonucleotide
  Antisense strand to SEQ ID NO: 1736191
acagcuggugcaaauacuc

SEQ ID NO: 1736193 - RNA, 19 nt, Artificial Sequence
  Description of Artificial Sequence: Synthetic oligonucleotide
  Sense strand starting at position 465 of SEQ ID NO: 1562286
gggcgaaugacucagcaac

SEQ ID NO: 1736194 - RNA, 19 nt, Artificial Sequence
  Description of Artificial Sequence: Synthetic oligonucleotide
  Antisense strand to SEQ ID NO: 1736193
guugcugagucauucgccc

SEQ ID NO: 1736195 - RNA, 19 nt, Artificial Sequence
  Description of Artificial Sequence: Synthetic oligonucleotide
  Sense strand starting at position 622 of SEQ ID NO: 1562286
gggagccuuucuucccuaa

SEQ ID NO: 1736196 - RNA, 19 nt, Artificial Sequence
  Description of Artificial Sequence: Synthetic oligonucleotide
  Antisense strand to SEQ ID NO: 1736195
uuagggaagaaaggcuccc

SEQ ID NO: 1736197 - RNA, 19 nt, Artificial Sequence
  Description of Artificial Sequence: Synthetic oligonucleotide
  Sense strand starting at position 751 of SEQ ID NO: 1562286
ucugcuugacuaugugaag

SEQ ID NO: 1736198 - RNA, 19 nt, Artificial Sequence
  Description of Artificial Sequence: Synthetic oligonucleotide
  Antisense strand to SEQ ID NO: 1736197
cuucacauagucaagcaga

SEQ ID NO: 1736199 - RNA, 19 nt, Artificial Sequence
  Description of Artificial Sequence: Synthetic oligonucleotide
  Sense strand starting at position 777 of SEQ ID NO: 1562286
gugcucugccacuaacaca

SEQ ID NO: 1736200 - RNA, 19 nt, Artificial Sequence
  Description of Artificial Sequence: Synthetic oligonucleotide
  Antisense strand to SEQ ID NO: 1736199
uguguuaguggcagagcac

SEQ ID NO: 1736201 - RNA, 19 nt, Artificial Sequence
  Description of Artificial Sequence: Synthetic oligonucleotide
  Sense strand starting at position 787 of SEQ ID NO: 1562286
acuaacacaucugggauuu

SEQ ID NO: 1736202 - RNA, 19 nt, Artificial Sequence
  Description of Artificial Sequence: Synthetic oligonucleotide
  Antisense strand to SEQ ID NO: 1736201
aaaucccagauguguuagu

SEQ ID NO: 1736203 - RNA, 19 nt, Artificial Sequence
  Description of Artificial Sequence: Synthetic oligonucleotide
  Sense strand starting at position 847 of SEQ ID NO: 1562286
ugauguaaaggguguucaa

SEQ ID NO: 1736204 - RNA, 19 nt, Artificial Sequence
  Description of Artificial Sequence: Synthetic oligonucleotide
  Antisense strand to SEQ ID NO: 1736203
uugaacacccuuuacauca

SEQ ID NO: 1736205 - RNA, 19 nt, Artificial Sequence
  Description of Artificial Sequence: Synthetic oligonucleotide
  Sense strand starting at position 885 of SEQ ID NO: 1562286
uagcaucauccauggguaa

SEQ ID NO: 1736206 - RNA, 19 nt, Artificial Sequence
  Description of Artificial Sequence: Synthetic oligonucleotide
  Antisense strand to SEQ ID NO: 1736205
uuacccauggaugaugcua

SEQ ID NO: 1736207 - RNA, 19 nt, Artificial Sequence
  Description of Artificial Sequence: Synthetic oligonucleotide
  Sense strand starting at position 1032 of SEQ ID NO: 1562286
cuggaaucagcacaaguuu

SEQ ID NO: 1736208 - RNA, 19 nt, Artificial Sequence
  Description of Artificial Sequence: Synthetic oligonucleotide
  Antisense strand to SEQ ID NO: 1736207
aaacuugugcugauuccag

SEQ ID NO: 1736209 - RNA, 19 nt, Artificial Sequence
  Description of Artificial Sequence: Synthetic oligonucleotide
  Sense strand starting at position 1054 of SEQ ID NO: 1562286
gcagaagccucacuccaua

SEQ ID NO: 1736210 - RNA, 19 nt, Artificial Sequence
  Description of Artificial Sequence: Synthetic oligonucleotide
  Antisense strand to SEQ ID NO: 1736209
uauggagugaggcuucugc

SEQ ID NO: 1736211 - RNA, 19 nt, Artificial Sequence
  Description of Artificial Sequence: Synthetic oligonucleotide
  Sense strand starting at position 1105 of SEQ ID NO: 1562286
gaaacugccguguaagaau

SEQ ID NO: 1736212 - RNA, 19 nt, Artificial Sequence
  Description of Artificial Sequence: Synthetic oligonucleotide
  Antisense strand to SEQ ID NO: 1736211
auucuuacacggcaguuuc

SEQ ID NO: 1736213 - RNA, 19 nt, Artificial Sequence
  Description of Artificial Sequence: Synthetic oligonucleotide
  Sense strand starting at position 1133 of SEQ ID NO: 1562286
acggcacucguguuacauu

SEQ ID NO: 1736214 - RNA, 19 nt, Artificial Sequence
  Description of Artificial Sequence: Synthetic oligonucleotide
  Antisense strand to SEQ ID NO: 1736213
aauguaacacgagugccgu

SEQ ID NO: 1736215 - RNA, 19 nt, Artificial Sequence
  Description of Artificial Sequence: Synthetic oligonucleotide
  Sense strand starting at position 1144 of SEQ ID NO: 1562286
guuacauuacacgagcaca

SEQ ID NO: 1736216 - RNA, 19 nt, Artificial Sequence
  Description of Artificial Sequence: Synthetic oligonucleotide
  Antisense strand to SEQ ID NO: 1736215
ugugcucguguaauguaac

SEQ ID NO: 1736217 - RNA, 19 nt, Artificial Sequence
  Description of Artificial Sequence: Synthetic oligonucleotide
  Sense strand starting at position 2533 of SEQ ID NO: 1562286
ucuuacugacagugaaaca

SEQ ID NO: 1736218 - RNA, 19 nt, Artificial Sequence
  Description of Artificial Sequence: Synthetic oligonucleotide
  Antisense strand to SEQ ID NO: 1736217
uguuucacugucaguaaga

SEQ ID NO: 1736219 - RNA, 19 nt, Artificial Sequence
  Description of Artificial Sequence: Synthetic oligonucleotide
  Sense strand starting at position 2704 of SEQ ID NO: 1562286
uugaaauuauguucccaag

SEQ ID NO: 1736220 - RNA, 19 nt, Artificial Sequence
  Description of Artificial Sequence: Synthetic oligonucleotide
  Antisense strand to SEQ ID NO: 1736219
cuugggaacauaauuucaa

SEQ ID NO: 1736221 - RNA, 19 nt, Artificial Sequence
  Description of Artificial Sequence: Synthetic oligonucleotide
  Sense strand starting at position 2859 of SEQ ID NO: 1562286
gacgauuugugugaaggga

SEQ ID NO: 1736222 - RNA, 19 nt, Artificial Sequence
  Description of Artificial Sequence: Synthetic oligonucleotide
  Antisense strand to SEQ ID NO: 1736221
ucccuucacacaaaucguc

SEQ ID NO: 1736223 - RNA, 19 nt, Artificial Sequence
  Description of Artificial Sequence: Synthetic oligonucleotide
  Sense strand starting at position 2861 of SEQ ID NO: 1562286
cgauuugugugaagggauu

SEQ ID NO: 1736224 - RNA, 19 nt, Artificial Sequence
  Description of Artificial Sequence: Synthetic oligonucleotide
  Antisense strand to SEQ ID NO: 1736223
aaucccuucacacaaaucg

SEQ ID NO: 1736225 - RNA, 19 nt, Artificial Sequence
  Description of Artificial Sequence: Synthetic oligonucleotide
  Sense strand starting at position 2967 of SEQ ID NO: 1562286
cgacuaacaugacugcauu

SEQ ID NO: 1736226 - RNA, 19 nt, Artificial Sequence
  Description of Artificial Sequence: Synthetic oligonucleotide
  Antisense strand to SEQ ID NO: 1736225
aaugcagucauguuagucg

SEQ ID NO: 1736227 - RNA, 19 nt, Artificial Sequence
  Description of Artificial Sequence: Synthetic oligonucleotide
  Sense strand starting at position 3013 of SEQ ID NO: 1562286
acguuugagcuacauccaa

SEQ ID NO: 1736228 - RNA, 19 nt, Artificial Sequence
  Description of Artificial Sequence: Synthetic oligonucleotide
  Antisense strand to SEQ ID NO: 1736227
uuggauguagcucaaacgu

SEQ ID NO: 1736229 - RNA, 19 nt, Artificial Sequence
  Description of Artificial Sequence: Synthetic oligonucleotide
  Sense strand starting at position 3053 of SEQ ID NO: 1562286
agugaaauuggaugagagu

SEQ ID NO: 1736230 - RNA, 19 nt, Artificial Sequence
  Description of Artificial Sequence: Synthetic oligonucleotide
  Antisense strand to SEQ ID NO: 1736229
acucucauccaauuucacu

SEQ ID NO: 1736231 - RNA, 19 nt, Artificial Sequence
  Description of Artificial Sequence: Synthetic oligonucleotide
  Sense strand starting at position 3141 of SEQ ID NO: 1562286
ugggucuugauugggaaga

SEQ ID NO: 1736232 - RNA, 19 nt, Artificial Sequence
  Description of Artificial Sequence: Synthetic oligonucleotide
  Antisense strand to SEQ ID NO: 1736231
ucuucccaaucaagaccca

SEQ ID NO: 1736233 - RNA, 19 nt, Artificial Sequence
  Description of Artificial Sequence: Synthetic oligonucleotide
  Sense strand starting at position 3299 of SEQ ID NO: 1562286
gaaguucuugcagacacau

SEQ ID NO: 1736234 - RNA, 19 nt, Artificial Sequence
  Description of Artificial Sequence: Synthetic oligonucleotide
  Antisense strand to SEQ ID NO: 1736233
augugucugcaagaacuuc

SEQ ID NO: 1736235 - RNA, 19 nt, Artificial Sequence
  Description of Artificial Sequence: Synthetic oligonucleotide
  Sense strand starting at position 3450 of SEQ ID NO: 1562286
aggaacucuugcuucuuua

SEQ ID NO: 1736236 - RNA, 19 nt, Artificial Sequence
  Description of Artificial Sequence: Synthetic oligonucleotide
  Antisense strand to SEQ ID NO: 1736235
uaaagaagcaagaguuccu

SEQ ID NO: 1736237 - RNA, 19 nt, Artificial Sequence
  Description of Artificial Sequence: Synthetic oligonucleotide
  Sense strand starting at position 3468 of SEQ ID NO: 1562286
agauaauagcagugacauu

SEQ ID NO: 1736238 - RNA, 19 nt, Artificial Sequence
  Description of Artificial Sequence: Synthetic oligonucleotide
  Antisense strand to SEQ ID NO: 1736237
aaugucacugcuauuaucu

SEQ ID NO: 1736239 - RNA, 19 nt, Artificial Sequence
  Description of Artificial Sequence: Synthetic oligonucleotide
  Sense strand starting at position 3502 of SEQ ID NO: 1562286
uaugauguaugcccugaua

SEQ ID NO: 1736240 - RNA, 19 nt, Artificial Sequence
  Description of Artificial Sequence: Synthetic oligonucleotide
  Antisense strand to SEQ ID NO: 1736239
uaucagggcauacaucaua

SEQ ID NO: 1736241 - RNA, 19 nt, Artificial Sequence
  Description of Artificial Sequence: Synthetic oligonucleotide
  Sense strand starting at position 3504 of SEQ ID NO: 1562286
ugauguaugcccugauagg

SEQ ID NO: 1736242 - RNA, 19 nt, Artificial Sequence
  Description of Artificial Sequence: Synthetic oligonucleotide
  Antisense strand to SEQ ID NO: 1736241
ccuaucagggcauacauca

SEQ ID NO: 1736243 - RNA, 19 nt, Artificial Sequence
  Description of Artificial Sequence: Synthetic oligonucleotide
  Sense strand starting at position 3505 of SEQ ID NO: 1562286
gauguaugcccugauaggu

SEQ ID NO: 1736244 - RNA, 19 nt, Artificial Sequence
  Description of Artificial Sequence: Synthetic oligonucleotide
  Antisense strand to SEQ ID NO: 1736243
accuaucagggcauacauc

SEQ ID NO: 1736245 - RNA, 19 nt, Artificial Sequence
  Description of Artificial Sequence: Synthetic oligonucleotide
  Sense strand starting at position 3510 of SEQ ID NO: 1562286
augcccugauagguuuaau

SEQ ID NO: 1736246 - RNA, 19 nt, Artificial Sequence
  Description of Artificial Sequence: Synthetic oligonucleotide
  Antisense strand to SEQ ID NO: 1736245
auuaaaccuaucagggcau

SEQ ID NO: 1736247 - RNA, 19 nt, Artificial Sequence
  Description of Artificial Sequence: Synthetic oligonucleotide
  Sense strand starting at position 3513 of SEQ ID NO: 1562286
cccugauagguuuaauuau

SEQ ID NO: 1736248 - RNA, 19 nt, Artificial Sequence
  Description of Artificial Sequence: Synthetic oligonucleotide
  Antisense strand to SEQ ID NO: 1736247
auaauuaaaccuaucaggg

SEQ ID NO: 1736249 - RNA, 19 nt, Artificial Sequence
  Description of Artificial Sequence: Synthetic oligonucleotide
  Sense strand starting at position 3550 of SEQ ID NO: 1562286
gguauacagaugugcuaag

SEQ ID NO: 1736250 - RNA, 19 nt, Artificial Sequence
  Description of Artificial Sequence: Synthetic oligonucleotide
  Antisense strand to SEQ ID NO: 1736249
cuuagcacaucuguauacc

SEQ ID NO: 1736251 - RNA, 19 nt, Artificial Sequence
  Description of Artificial Sequence: Synthetic oligonucleotide
  Sense strand starting at position 3551 of SEQ ID NO: 1562286
guauacagaugugcuaaga

SEQ ID NO: 1736252 - RNA, 19 nt, Artificial Sequence
  Description of Artificial Sequence: Synthetic oligonucleotide
  Antisense strand to SEQ ID NO: 1736251
ucuuagcacaucuguauac

SEQ ID NO: 1736253 - RNA, 19 nt, Artificial Sequence
  Description of Artificial Sequence: Synthetic oligonucleotide
  Sense strand starting at position 3613 of SEQ ID NO: 1562286
gaauauuugguuugcuugu

SEQ ID NO: 1736254 - RNA, 19 nt, Artificial Sequence
  Description of Artificial Sequence: Synthetic oligonucleotide
  Antisense strand to SEQ ID NO: 1736253
acaagcaaaccaaauauuc

SEQ ID NO: 1736255 - RNA, 19 nt, Artificial Sequence
  Description of Artificial Sequence: Synthetic oligonucleotide
  Sense strand starting at position 3615 of SEQ ID NO: 1562286
auauuugguuugcuuguua

SEQ ID NO: 1736256 - RNA, 19 nt, Artificial Sequence
  Description of Artificial Sequence: Synthetic oligonucleotide
  Antisense strand to SEQ ID NO: 1736255
uaacaagcaaaccaaauau

SEQ ID NO: 1736257 - RNA, 19 nt, Artificial Sequence
  Description of Artificial Sequence: Synthetic oligonucleotide
  Sense strand starting at position 3717 of SEQ ID NO: 1562286
aggagaucgacauggugaa

SEQ ID NO: 1736258 - RNA, 19 nt, Artificial Sequence
  Description of Artificial Sequence: Synthetic oligonucleotide
  Antisense strand to SEQ ID NO: 1736257
uucaccaugucgaucuccu

SEQ ID NO: 1736259 - RNA, 19 nt, Artificial Sequence
  Description of Artificial Sequence: Synthetic oligonucleotide
  Sense strand starting at position 3718 of SEQ ID NO: 1562286
ggagaucgacauggugaaa

SEQ ID NO: 1736260 - RNA, 19 nt, Artificial Sequence
  Description of Artificial Sequence: Synthetic oligonucleotide
  Antisense strand to SEQ ID NO: 1736259
uuucaccaugucgaucucc

SEQ ID NO: 1736261 - RNA, 19 nt, Artificial Sequence
  Description of Artificial Sequence: Synthetic oligonucleotide
  Sense strand starting at position 19 of SEQ ID NO: 1562287
uguuacugacagugguuaa

SEQ ID NO: 1736262 - RNA, 19 nt, Artificial Sequence
  Description of Artificial Sequence: Synthetic oligonucleotide
  Antisense strand to SEQ ID NO: 1736261
uuaaccacugucaguaaca

SEQ ID NO: 1736263 - RNA, 19 nt, Artificial Sequence
  Description of Artificial Sequence: Synthetic oligonucleotide
  Sense strand starting at position 74 of SEQ ID NO: 1562287
caugcacgcgcauuauaua

SEQ ID NO: 1736264 - RNA, 19 nt, Artificial Sequence
  Description of Artificial Sequence: Synthetic oligonucleotide
  Antisense strand to SEQ ID NO: 1736263
uauauaaugcgcgugcaug

SEQ ID NO: 1736265 - RNA, 19 nt, Artificial Sequence
  Description of Artificial Sequence: Synthetic oligonucleotide
  Sense strand starting at position 93 of SEQ ID NO: 1562287
auaugaauacacgauuguu

SEQ ID NO: 1736266 - RNA, 19 nt, Artificial Sequence
  Description of Artificial Sequence: Synthetic oligonucleotide
  Antisense strand to SEQ ID NO: 1736265
aacaaucguguauucauau

SEQ ID NO: 1736267 - RNA, 19 nt, Artificial Sequence
  Description of Artificial Sequence: Synthetic oligonucleotide
  Sense strand starting at position 96 of SEQ ID NO: 1562287
ugaauacacgauuguuagu

SEQ ID NO: 1736268 - RNA, 19 nt, Artificial Sequence
  Description of Artificial Sequence: Synthetic oligonucleotide
  Antisense strand to SEQ ID NO: 1736267
acuaacaaucguguauuca

SEQ ID NO: 1736269 - RNA, 19 nt, Artificial Sequence
  Description of Artificial Sequence: Synthetic oligonucleotide
  Sense strand starting at position 385 of SEQ ID NO: 1562287
uuuguuugcaaugaggacu

SEQ ID NO: 1736270 - RNA, 19 nt, Artificial Sequence
  Description of Artificial Sequence: Synthetic oligonucleotide
  Antisense strand to SEQ ID NO: 1736269
aguccucauugcaaacaaa

SEQ ID NO: 1736271 - RNA, 19 nt, Artificial Sequence
  Description of Artificial Sequence: Synthetic oligonucleotide
  Sense strand starting at position 472 of SEQ ID NO: 1562287
ggugucauauaaucaagac

SEQ ID NO: 1736272 - RNA, 19 nt, Artificial Sequence
  Description of Artificial Sequence: Synthetic oligonucleotide
  Antisense strand to SEQ ID NO: 1736271
gucuugauuauaugacacc

SEQ ID NO: 1736273 - RNA, 19 nt, Artificial Sequence
  Description of Artificial Sequence: Synthetic oligonucleotide
  Sense strand starting at position 500 of SEQ ID NO: 1562287
gguauuuacgguuggcuau

SEQ ID NO: 1736274 - RNA, 19 nt, Artificial Sequence
  Description of Artificial Sequence: Synthetic oligonucleotide
  Antisense strand to SEQ ID NO: 1736273
auagccaaccguaaauacc

SEQ ID NO: 1736275 - RNA, 19 nt, Artificial Sequence
  Description of Artificial Sequence: Synthetic oligonucleotide
  Sense strand starting at position 501 of SEQ ID NO: 1562287
guauuuacgguuggcuauu

SEQ ID NO: 1736276 - RNA, 19 nt, Artificial Sequence
  Description of Artificial Sequence: Synthetic oligonucleotide
  Antisense strand to SEQ ID NO: 1736275
aauagccaaccguaaauac

SEQ ID NO: 1736277 - RNA, 19 nt, Artificial Sequence
  Description of Artificial Sequence: Synthetic oligonucleotide
  Sense strand starting at position 507 of SEQ ID NO: 1562287
acgguuggcuauuuauuaa

SEQ ID NO: 1736278 - RNA, 19 nt, Artificial Sequence
  Description of Artificial Sequence: Synthetic oligonucleotide
  Antisense strand to SEQ ID NO: 1736277
uuaauaaauagccaaccgu

SEQ ID NO: 1736279 - RNA, 19 nt, Artificial Sequence
  Description of Artificial Sequence: Synthetic oligonucleotide
  Sense strand starting at position 522 of SEQ ID NO: 1562287
uuaaacagcucuuucgaga

SEQ ID NO: 1736280 - RNA, 19 nt, Artificial Sequence
  Description of Artificial Sequence: Synthetic oligonucleotide
  Antisense strand to SEQ ID NO: 1736279
ucucgaaagagcuguuuaa

SEQ ID NO: 1736281 - RNA, 19 nt, Artificial Sequence
  Description of Artificial Sequence: Synthetic oligonucleotide
  Sense strand starting at position 596 of SEQ ID NO: 1562287
uccugaaacuucuugugua

SEQ ID NO: 1736282 - RNA, 19 nt, Artificial Sequence
  Description of Artificial Sequence: Synthetic oligonucleotide
  Antisense strand to SEQ ID NO: 1736281
uacacaagaaguuucagga

SEQ ID NO: 1736283 - RNA, 19 nt, Artificial Sequence
  Description of Artificial Sequence: Synthetic oligonucleotide
  Sense strand starting at position 654 of SEQ ID NO: 1562287
ccuucuguguacucauaac

SEQ ID NO: 1736284 - RNA, 19 nt, Artificial Sequence
  Description of Artificial Sequence: Synthetic oligonucleotide
  Antisense strand to SEQ ID NO: 1736283
guuaugaguacacagaagg

SEQ ID NO: 1736285 - RNA, 19 nt, Artificial Sequence
  Description of Artificial Sequence: Synthetic oligonucleotide
  Sense strand starting at position 660 of SEQ ID NO: 1562287
guguacucauaaccaaauu

SEQ ID NO: 1736286 - RNA, 19 nt, Artificial Sequence
  Description of Artificial Sequence: Synthetic oligonucleotide
  Antisense strand to SEQ ID NO: 1736285
aauuugguuaugaguacac

SEQ ID NO: 1736287 - RNA, 19 nt, Artificial Sequence
  Description of Artificial Sequence: Synthetic oligonucleotide
  Sense strand starting at position 697 of SEQ ID NO: 1562287
agcucacugcuugaaacuu

SEQ ID NO: 1736288 - RNA, 19 nt, Artificial Sequence
  Description of Artificial Sequence: Synthetic oligonucleotide
  Antisense strand to SEQ ID NO: 1736287
aaguuucaagcagugagcu

SEQ ID NO: 1736289 - RNA, 19 nt, Artificial Sequence
  Description of Artificial Sequence: Synthetic oligonucleotide
  Sense strand starting at position 712 of SEQ ID NO: 1562287
acuuauagaccacguaaca

SEQ ID NO: 1736290 - RNA, 19 nt, Artificial Sequence
  Description of Artificial Sequence: Synthetic oligonucleotide
  Antisense strand to SEQ ID NO: 1736289
uguuacguggucuauaagu

SEQ ID NO: 1736291 - RNA, 19 nt, Artificial Sequence
  Description of Artificial Sequence: Synthetic oligonucleotide
  Sense strand starting at position 747 of SEQ ID NO: 1562287
aacuaaguccaguaagagu

SEQ ID NO: 1736292 - RNA, 19 nt, Artificial Sequence
  Description of Artificial Sequence: Synthetic oligonucleotide
  Antisense strand to SEQ ID NO: 1736291
acucuuacuggacuuaguu

SEQ ID NO: 1736293 - RNA, 19 nt, Artificial Sequence
  Description of Artificial Sequence: Synthetic oligonucleotide
  Sense strand starting at position 844 of SEQ ID NO: 1562287
gcgcaaauuuauucucaga

SEQ ID NO: 1736294 - RNA, 19 nt, Artificial Sequence
  Description of Artificial Sequence: Synthetic oligonucleotide
  Antisense strand to SEQ ID NO: 1736293
ucugagaauaaauuugcgc

SEQ ID NO: 1736295 - RNA, 19 nt, Artificial Sequence
  Description of Artificial Sequence: Synthetic oligonucleotide
  Sense strand starting at position 1046 of SEQ ID NO: 1562287
gaguauuugcaccagcugu

SEQ ID NO: 1736296 - RNA, 19 nt, Artificial Sequence
  Description of Artificial Sequence: Synthetic oligonucleotide
  Antisense strand to SEQ ID NO: 1736295
acagcuggugcaaauacuc

SEQ ID NO: 1736297 - RNA, 19 nt, Artificial Sequence
  Description of Artificial Sequence: Synthetic oligonucleotide
  Sense strand starting at position 1086 of SEQ ID NO: 1562287
gggcgaaugacucagcaac

SEQ ID NO: 1736298 - RNA, 19 nt, Artificial Sequence
  Description of Artificial Sequence: Synthetic oligonucleotide
  Antisense strand to SEQ ID NO: 1736297
guugcugagucauucgccc

SEQ ID NO: 1736299 - RNA, 19 nt, Artificial Sequence
  Description of Artificial Sequence: Synthetic oligonucleotide
  Sense strand starting at position 1243 of SEQ ID NO: 1562287
gggagccuuucuucccuaa

SEQ ID NO: 1736300 - RNA, 19 nt, Artificial Sequence
  Description of Artificial Sequence: Synthetic oligonucleotide
  Antisense strand to SEQ ID NO: 1736299
uuagggaagaaaggcuccc

SEQ ID NO: 1736301 - RNA, 19 nt, Artificial Sequence
  Description of Artificial Sequence: Synthetic oligonucleotide
  Sense strand starting at position 1372 of SEQ ID NO: 1562287
ucugcuugacuaugugaag

SEQ ID NO: 1736302 - RNA, 19 nt, Artificial Sequence
  Description of Artificial Sequence: Synthetic oligonucleotide
  Antisense strand to SEQ ID NO: 1736301
cuucacauagucaagcaga

SEQ ID NO: 1736303 - RNA, 19 nt, Artificial Sequence
  Description of Artificial Sequence: Synthetic oligonucleotide
  Sense strand starting at position 1398 of SEQ ID NO: 1562287
gugcucugccacuaacaca

SEQ ID NO: 1736304 - RNA, 19 nt, Artificial Sequence
  Description of Artificial Sequence: Synthetic oligonucleotide
  Antisense strand to SEQ ID NO: 1736303
uguguuaguggcagagcac

SEQ ID NO: 1736305 - RNA, 19 nt, Artificial Sequence
  Description of Artificial Sequence: Synthetic oligonucleotide
  Sense strand starting at position 1408 of SEQ ID NO: 1562287
acuaacacaucugggauuu

SEQ ID NO: 1736306 - RNA, 19 nt, Artificial Sequence
  Description of Artificial Sequence: Synthetic oligonucleotide
  Antisense strand to SEQ ID NO: 1736305
aaaucccagauguguuagu

SEQ ID NO: 1736307 - RNA, 19 nt, Artificial Sequence
  Description of Artificial Sequence: Synthetic oligonucleotide
  Sense strand starting at position 1468 of SEQ ID NO: 1562287
ugauguaaaggguguucaa

SEQ ID NO: 1736308 - RNA, 19 nt, Artificial Sequence
  Description of Artificial Sequence: Synthetic oligonucleotide
  Antisense strand to SEQ ID NO: 1736307
uugaacacccuuuacauca

SEQ ID NO: 1736309 - RNA, 19 nt, Artificial Sequence
  Description of Artificial Sequence: Synthetic oligonucleotide
  Sense strand starting at position 1506 of SEQ ID NO: 1562287
uagcaucauccauggguaa

SEQ ID NO: 1736310 - RNA, 19 nt, Artificial Sequence
  Description of Artificial Sequence: Synthetic oligonucleotide
  Antisense strand to SEQ ID NO: 1736309
uuacccauggaugaugcua

SEQ ID NO: 1736311 - RNA, 19 nt, Artificial Sequence
  Description of Artificial Sequence: Synthetic oligonucleotide
  Sense strand starting at position 1653 of SEQ ID NO: 1562287
cuggaaucagcacaaguuu

SEQ ID NO: 1736312 - RNA, 19 nt, Artificial Sequence
  Description of Artificial Sequence: Synthetic oligonucleotide
  Antisense strand to SEQ ID NO: 1736311
aaacuugugcugauuccag

SEQ ID NO: 1736313 - RNA, 19 nt, Artificial Sequence
  Description of Artificial Sequence: Synthetic oligonucleotide
  Sense strand starting at position 1675 of SEQ ID NO: 1562287
gcagaagccucacuccaua

SEQ ID NO: 1736314 - RNA, 19 nt, Artificial Sequence
  Description of Artificial Sequence: Synthetic oligonucleotide
  Antisense strand to SEQ ID NO: 1736313
uauggagugaggcuucugc

SEQ ID NO: 1736315 - RNA, 19 nt, Artificial Sequence
  Description of Artificial Sequence: Synthetic oligonucleotide
  Sense strand starting at position 1724 of SEQ ID NO: 1562287
augaaacugccguguaaga

SEQ ID NO: 1736316 - RNA, 19 nt, Artificial Sequence
  Description of Artificial Sequence: Synthetic oligonucleotide
  Antisense strand to SEQ ID NO: 1736315
ucuuacacggcaguuucau

SEQ ID NO: 1736317 - RNA, 19 nt, Artificial Sequence
  Description of Artificial Sequence: Synthetic oligonucleotide
  Sense strand starting at position 1726 of SEQ ID NO: 1562287
gaaacugccguguaagaau

SEQ ID NO: 1736318 - RNA, 19 nt, Artificial Sequence
  Description of Artificial Sequence: Synthetic oligonucleotide
  Antisense strand to SEQ ID NO: 1736317
auucuuacacggcaguuuc

SEQ ID NO: 1736319 - RNA, 19 nt, Artificial Sequence
  Description of Artificial Sequence: Synthetic oligonucleotide
  Sense strand starting at position 1754 of SEQ ID NO: 1562287
acggcacucguguuacauu

SEQ ID NO: 1736320 - RNA, 19 nt, Artificial Sequence
  Description of Artificial Sequence: Synthetic oligonucleotide
  Antisense strand to SEQ ID NO: 1736319
aauguaacacgagugccgu

SEQ ID NO: 1736321 - RNA, 19 nt, Artificial Sequence
  Description of Artificial Sequence: Synthetic oligonucleotide
  Sense strand starting at position 1765 of SEQ ID NO: 1562287
guuacauuacacgagcaca

SEQ ID NO: 1736322 - RNA, 19 nt, Artificial Sequence
  Description of Artificial Sequence: Synthetic oligonucleotide
  Antisense strand to SEQ ID NO: 1736321
ugugcucguguaauguaac

SEQ ID NO: 1736323 - RNA, 19 nt, Artificial Sequence
  Description of Artificial Sequence: Synthetic oligonucleotide
  Sense strand starting at position 3154 of SEQ ID NO: 1562287
ucuuacugacagugaaaca

SEQ ID NO: 1736324 - RNA, 19 nt, Artificial Sequence
  Description of Artificial Sequence: Synthetic oligonucleotide
  Antisense strand to SEQ ID NO: 1736323
uguuucacugucaguaaga

SEQ ID NO: 1736325 - RNA, 19 nt, Artificial Sequence
  Description of Artificial Sequence: Synthetic oligonucleotide
  Sense strand starting at position 3325 of SEQ ID NO: 1562287
uugaaauuauguucccaag

SEQ ID NO: 1736326 - RNA, 19 nt, Artificial Sequence
  Description of Artificial Sequence: Synthetic oligonucleotide
  Antisense strand to SEQ ID NO: 1736325
cuugggaacauaauuucaa

SEQ ID NO: 1736327 - RNA, 19 nt, Artificial Sequence
  Description of Artificial Sequence: Synthetic oligonucleotide
  Sense strand starting at position 3480 of SEQ ID NO: 1562287
gacgauuugugugaaggga

SEQ ID NO: 1736328 - RNA, 19 nt, Artificial Sequence
  Description of Artificial Sequence: Synthetic oligonucleotide
  Antisense strand to SEQ ID NO: 1736327
ucccuucacacaaaucguc

SEQ ID NO: 1736329 - RNA, 19 nt, Artificial Sequence
  Description of Artificial Sequence: Synthetic oligonucleotide
  Sense strand starting at position 3482 of SEQ ID NO: 1562287
cgauuugugugaagggauu

SEQ ID NO: 1736330 - RNA, 19 nt, Artificial Sequence
  Description of Artificial Sequence: Synthetic oligonucleotide
  Antisense strand to SEQ ID NO: 1736329
aaucccuucacacaaaucg

SEQ ID NO: 1736331 - RNA, 19 nt, Artificial Sequence
  Description of Artificial Sequence: Synthetic oligonucleotide
  Sense strand starting at position 3588 of SEQ ID NO: 1562287
cgacuaacaugacugcauu

SEQ ID NO: 1736332 - RNA, 19 nt, Artificial Sequence
  Description of Artificial Sequence: Synthetic oligonucleotide
  Antisense strand to SEQ ID NO: 1736331
aaugcagucauguuagucg

SEQ ID NO: 1736333 - RNA, 19 nt, Artificial Sequence
  Description of Artificial Sequence: Synthetic oligonucleotide
  Sense strand starting at position 3634 of SEQ ID NO: 1562287
acguuugagcuacauccaa

SEQ ID NO: 1736334 - RNA, 19 nt, Artificial Sequence
  Description of Artificial Sequence: Synthetic oligonucleotide
  Antisense strand to SEQ ID NO: 1736333
uuggauguagcucaaacgu

SEQ ID NO: 1736335 - RNA, 19 nt, Artificial Sequence
  Description of Artificial Sequence: Synthetic oligonucleotide
  Sense strand starting at position 3674 of SEQ ID NO: 1562287
agugaaauuggaugagagu

SEQ ID NO: 1736336 - RNA, 19 nt, Artificial Sequence
  Description of Artificial Sequence: Synthetic oligonucleotide
  Antisense strand to SEQ ID NO: 1736335
acucucauccaauuucacu

SEQ ID NO: 1736337 - RNA, 19 nt, Artificial Sequence
  Description of Artificial Sequence: Synthetic oligonucleotide
  Sense strand starting at position 3762 of SEQ ID NO: 1562287
ugggucuugauugggaaga

SEQ ID NO: 1736338 - RNA, 19 nt, Artificial Sequence
  Description of Artificial Sequence: Synthetic oligonucleotide
  Antisense strand to SEQ ID NO: 1736337
ucuucccaaucaagaccca

SEQ ID NO: 1736339 - RNA, 19 nt, Artificial Sequence
  Description of Artificial Sequence: Synthetic oligonucleotide
  Sense strand starting at position 3920 of SEQ ID NO: 1562287
gaaguucuugcagacacau

SEQ ID NO: 1736340 - RNA, 19 nt, Artificial Sequence
  Description of Artificial Sequence: Synthetic oligonucleotide
  Antisense strand to SEQ ID NO: 1736339
augugucugcaagaacuuc

SEQ ID NO: 1736341 - RNA, 19 nt, Artificial Sequence
  Description of Artificial Sequence: Synthetic oligonucleotide
  Sense strand starting at position 239 of SEQ ID NO: 1562288
gugcauaacuguucucaac

SEQ ID NO: 1736342 - RNA, 19 nt, Artificial Sequence
  Description of Artificial Sequence: Synthetic oligonucleotide
  Antisense strand to SEQ ID NO: 1736341
guugagaacaguuaugcac

SEQ ID NO: 1736343 - RNA, 19 nt, Artificial Sequence
  Description of Artificial Sequence: Synthetic oligonucleotide
  Sense strand starting at position 257 of SEQ ID NO: 1562288
ccuugacaaugucaauguu

SEQ ID NO: 1736344 - RNA, 19 nt, Artificial Sequence
  Description of Artificial Sequence: Synthetic oligonucleotide
  Antisense strand to SEQ ID NO: 1736343
aacauugacauugucaagg

SEQ ID NO: 1736345 - RNA, 19 nt, Artificial Sequence
  Description of Artificial Sequence: Synthetic oligonucleotide
  Sense strand starting at position 260 of SEQ ID NO: 1562288
ugacaaugucaauguuaga

SEQ ID NO: 1736346 - RNA, 19 nt, Artificial Sequence
  Description of Artificial Sequence: Synthetic oligonucleotide
  Antisense strand to SEQ ID NO: 1736345
ucuaacauugacauuguca

SEQ ID NO: 1736347 - RNA, 19 nt, Artificial Sequence
  Description of Artificial Sequence: Synthetic oligonucleotide
  Sense strand starting at position 265 of SEQ ID NO: 1562288
augucaauguuagaaauga

SEQ ID NO: 1736348 - RNA, 19 nt, Artificial Sequence
  Description of Artificial Sequence: Synthetic oligonucleotide
  Antisense strand to SEQ ID NO: 1736347
ucauuucuaacauugacau

SEQ ID NO: 1736349 - RNA, 19 nt, Artificial Sequence
  Description of Artificial Sequence: Synthetic oligonucleotide
  Sense strand starting at position 1238 of SEQ ID NO: 1562288
cugacauuguagcucauga

SEQ ID NO: 1736350 - RNA, 19 nt, Artificial Sequence
  Description of Artificial Sequence: Synthetic oligonucleotide
  Antisense strand to SEQ ID NO: 1736349
ucaugagcuacaaugucag

SEQ ID NO: 1736351 - RNA, 19 nt, Artificial Sequence
  Description of Artificial Sequence: Synthetic oligonucleotide
  Sense strand starting at position 1240 of SEQ ID NO: 1562288
gacauuguagcucaugaua

SEQ ID NO: 1736352 - RNA, 19 nt, Artificial Sequence
  Description of Artificial Sequence: Synthetic oligonucleotide
  Antisense strand to SEQ ID NO: 1736351
uaucaugagcuacaauguc

SEQ ID NO: 1736353 - RNA, 19 nt, Artificial Sequence
  Description of Artificial Sequence: Synthetic oligonucleotide
  Sense strand starting at position 2112 of SEQ ID NO: 1562288
acucuaauugguuguccua

SEQ ID NO: 1736354 - RNA, 19 nt, Artificial Sequence
  Description of Artificial Sequence: Synthetic oligonucleotide
  Antisense strand to SEQ ID NO: 1736353
uaggacaaccaauuagagu

SEQ ID NO: 1736355 - RNA, 19 nt, Artificial Sequence
  Description of Artificial Sequence: Synthetic oligonucleotide
  Sense strand starting at position 2114 of SEQ ID NO: 1562288
ucuaauugguuguccuaag

SEQ ID NO: 1736356 - RNA, 19 nt, Artificial Sequence
  Description of Artificial Sequence: Synthetic oligonucleotide
  Antisense strand to SEQ ID NO: 1736355
cuuaggacaaccaauuaga

SEQ ID NO: 1736357 - RNA, 19 nt, Artificial Sequence
  Description of Artificial Sequence: Synthetic oligonucleotide
  Sense strand starting at position 2115 of SEQ ID NO: 1562288
cuaauugguuguccuaaga

SEQ ID NO: 1736358 - RNA, 19 nt, Artificial Sequence
  Description of Artificial Sequence: Synthetic oligonucleotide
  Antisense strand to SEQ ID NO: 1736357
ucuuaggacaaccaauuag

SEQ ID NO: 1736359 - RNA, 19 nt, Artificial Sequence
  Description of Artificial Sequence: Synthetic oligonucleotide
  Sense strand starting at position 2194 of SEQ ID NO: 1562288
uuauccaauccuggaaagu

SEQ ID NO: 1736360 - RNA, 19 nt, Artificial Sequence
  Description of Artificial Sequence: Synthetic oligonucleotide
  Antisense strand to SEQ ID NO: 1736359
acuuuccaggauuggauaa

SEQ ID NO: 1736361 - RNA, 19 nt, Artificial Sequence
  Description of Artificial Sequence: Synthetic oligonucleotide
  Sense strand starting at position 2207 of SEQ ID NO: 1562288
gaaaguguaguccacgaac

SEQ ID NO: 1736362 - RNA, 19 nt, Artificial Sequence
  Description of Artificial Sequence: Synthetic oligonucleotide
  Antisense strand to SEQ ID NO: 1736361
guucguggacuacacuuuc

SEQ ID NO: 1736363 - RNA, 19 nt, Artificial Sequence
  Description of Artificial Sequence: Synthetic oligonucleotide
  Sense strand starting at position 2260 of SEQ ID NO: 1562288
gaagaagagucaggcuguu

SEQ ID NO: 1736364 - RNA, 19 nt, Artificial Sequence
  Description of Artificial Sequence: Synthetic oligonucleotide
  Antisense strand to SEQ ID NO: 1736363
aacagccugacucuucuuc

SEQ ID NO: 1736365 - RNA, 19 nt, Artificial Sequence
  Description of Artificial Sequence: Synthetic oligonucleotide
  Sense strand starting at position 2500 of SEQ ID NO: 1562288
cggagaagucauugcauaa

SEQ ID NO: 1736366 - RNA, 19 nt, Artificial Sequence
  Description of Artificial Sequence: Synthetic oligonucleotide
  Antisense strand to SEQ ID NO: 1736365
uuaugcaaugacuucuccg

SEQ ID NO: 1736367 - RNA, 19 nt, Artificial Sequence
  Description of Artificial Sequence: Synthetic oligonucleotide
  Sense strand starting at position 3587 of SEQ ID NO: 1562288
aacggaagugagcgguaua

SEQ ID NO: 1736368 - RNA, 19 nt, Artificial Sequence
  Description of Artificial Sequence: Synthetic oligonucleotide
  Antisense strand to SEQ ID NO: 1736367
uauaccgcucacuuccguu

SEQ ID NO: 1736369 - RNA, 19 nt, Artificial Sequence
  Description of Artificial Sequence: Synthetic oligonucleotide
  Sense strand starting at position 3590 of SEQ ID NO: 1562288
ggaagugagcgguauagua

SEQ ID NO: 1736370 - RNA, 19 nt, Artificial Sequence
  Description of Artificial Sequence: Synthetic oligonucleotide
  Antisense strand to SEQ ID NO: 1736369
uacuauaccgcucacuucc

SEQ ID NO: 1736371 - RNA, 19 nt, Artificial Sequence
  Description of Artificial Sequence: Synthetic oligonucleotide
  Sense strand starting at position 3592 of SEQ ID NO: 1562288
aagugagcgguauaguaua

SEQ ID NO: 1736372 - RNA, 19 nt, Artificial Sequence
  Description of Artificial Sequence: Synthetic oligonucleotide
  Antisense strand to SEQ ID NO: 1736371
uauacuauaccgcucacuu

SEQ ID NO: 1736373 - RNA, 19 nt, Artificial Sequence
  Description of Artificial Sequence: Synthetic oligonucleotide
  Sense strand starting at position 251 of SEQ ID NO: 1562289
gugcauaacuguucucaac

SEQ ID NO: 1736374 - RNA, 19 nt, Artificial Sequence
  Description of Artificial Sequence: Synthetic oligonucleotide
  Antisense strand to SEQ ID NO: 1736373
guugagaacaguuaugcac

SEQ ID NO: 1736375 - RNA, 19 nt, Artificial Sequence
  Description of Artificial Sequence: Synthetic oligonucleotide
  Sense strand starting at position 269 of SEQ ID NO: 1562289
ccuugacaaugucaauguu

SEQ ID NO: 1736376 - RNA, 19 nt, Artificial Sequence
  Description of Artificial Sequence: Synthetic oligonucleotide
  Antisense strand to SEQ ID NO: 1736375
aacauugacauugucaagg

SEQ ID NO: 1736377 - RNA, 19 nt, Artificial Sequence
  Description of Artificial Sequence: Synthetic oligonucleotide
  Sense strand starting at position 272 of SEQ ID NO: 1562289
ugacaaugucaauguuaga

SEQ ID NO: 1736378 - RNA, 19 nt, Artificial Sequence
  Description of Artificial Sequence: Synthetic oligonucleotide
  Antisense strand to SEQ ID NO: 1736377
ucuaacauugacauuguca

SEQ ID NO: 1736379 - RNA, 19 nt, Artificial Sequence
  Description of Artificial Sequence: Synthetic oligonucleotide
  Sense strand starting at position 277 of SEQ ID NO: 1562289
augucaauguuagaaauga

SEQ ID NO: 1736380 - RNA, 19 nt, Artificial Sequence
  Description of Artificial Sequence: Synthetic oligonucleotide
  Antisense strand to SEQ ID NO: 1736379
ucauuucuaacauugacau

SEQ ID NO: 1736381 - RNA, 19 nt, Artificial Sequence
  Description of Artificial Sequence: Synthetic oligonucleotide
  Sense strand starting at position 1250 of SEQ ID NO: 1562289
cugacauuguagcucauga

SEQ ID NO: 1736382 - RNA, 19 nt, Artificial Sequence
  Description of Artificial Sequence: Synthetic oligonucleotide
  Antisense strand to SEQ ID NO: 1736381
ucaugagcuacaaugucag

SEQ ID NO: 1736383 - RNA, 19 nt, Artificial Sequence
  Description of Artificial Sequence: Synthetic oligonucleotide
  Sense strand starting at position 1252 of SEQ ID NO: 1562289
gacauuguagcucaugaua

SEQ ID NO: 1736384 - RNA, 19 nt, Artificial Sequence
  Description of Artificial Sequence: Synthetic oligonucleotide
  Antisense strand to SEQ ID NO: 1736383
uaucaugagcuacaauguc

SEQ ID NO: 1736385 - RNA, 19 nt, Artificial Sequence
  Description of Artificial Sequence: Synthetic oligonucleotide
  Sense strand starting at position 2124 of SEQ ID NO: 1562289
acucuaauugguuguccua

SEQ ID NO: 1736386 - RNA, 19 nt, Artificial Sequence
  Description of Artificial Sequence: Synthetic oligonucleotide
  Antisense strand to SEQ ID NO: 1736385
uaggacaaccaauuagagu

SEQ ID NO: 1736387 - RNA, 19 nt, Artificial Sequence
  Description of Artificial Sequence: Synthetic oligonucleotide
  Sense strand starting at position 2126 of SEQ ID NO: 1562289
ucuaauugguuguccuaag

SEQ ID NO: 1736388 - RNA, 19 nt, Artificial Sequence
  Description of Artificial Sequence: Synthetic oligonucleotide
  Antisense strand to SEQ ID NO: 1736387
cuuaggacaaccaauuaga

SEQ ID NO: 1736389 - RNA, 19 nt, Artificial Sequence
  Description of Artificial Sequence: Synthetic oligonucleotide
  Sense strand starting at position 2127 of SEQ ID NO: 1562289
cuaauugguuguccuaaga

SEQ ID NO: 1736390 - RNA, 19 nt, Artificial Sequence
  Description of Artificial Sequence: Synthetic oligonucleotide
  Antisense strand to SEQ ID NO: 1736389
ucuuaggacaaccaauuag

SEQ ID NO: 1736391 - RNA, 19 nt, Artificial Sequence
  Description of Artificial Sequence: Synthetic oligonucleotide
  Sense strand starting at position 2206 of SEQ ID NO: 1562289
uuauccaauccuggaaagu

SEQ ID NO: 1736392 - RNA, 19 nt, Artificial Sequence
  Description of Artificial Sequence: Synthetic oligonucleotide
  Antisense strand to SEQ ID NO: 1736391
acuuuccaggauuggauaa

SEQ ID NO: 1736393 - RNA, 19 nt, Artificial Sequence
  Description of Artificial Sequence: Synthetic oligonucleotide
  Sense strand starting at position 2219 of SEQ ID NO: 1562289
gaaaguguaguccacgaac

SEQ ID NO: 1736394 - RNA, 19 nt, Artificial Sequence
  Description of Artificial Sequence: Synthetic oligonucleotide
  Antisense strand to SEQ ID NO: 1736393
guucguggacuacacuuuc

SEQ ID NO: 1736395 - RNA, 19 nt, Artificial Sequence
  Description of Artificial Sequence: Synthetic oligonucleotide
  Sense strand starting at position 2272 of SEQ ID NO: 1562289
gaagaagagucaggcuguu

SEQ ID NO: 1736396 - RNA, 19 nt, Artificial Sequence
  Description of Artificial Sequence: Synthetic oligonucleotide
  Antisense strand to SEQ ID NO: 1736395
aacagccugacucuucuuc

SEQ ID NO: 1736397 - RNA, 19 nt, Artificial Sequence
  Description of Artificial Sequence: Synthetic oligonucleotide
  Sense strand starting at position 2512 of SEQ ID NO: 1562289
cggagaagucauugcauaa

SEQ ID NO: 1736398 - RNA, 19 nt, Artificial Sequence
  Description of Artificial Sequence: Synthetic oligonucleotide
  Antisense strand to SEQ ID NO: 1736397
uuaugcaaugacuucuccg

SEQ ID NO: 1736399 - RNA, 19 nt, Artificial Sequence
  Description of Artificial Sequence: Synthetic oligonucleotide
  Sense strand starting at position 3599 of SEQ ID NO: 1562289
aacggaagugagcgguaua

SEQ ID NO: 1736400 - RNA, 19 nt, Artificial Sequence
  Description of Artificial Sequence: Synthetic oligonucleotide
  Antisense strand to SEQ ID NO: 1736399
uauaccgcucacuuccguu

SEQ ID NO: 1736401 - RNA, 19 nt, Artificial Sequence
  Description of Artificial Sequence: Synthetic oligonucleotide
  Sense strand starting at position 3602 of SEQ ID NO: 1562289
ggaagugagcgguauagua

SEQ ID NO: 1736402 - RNA, 19 nt, Artificial Sequence
  Description of Artificial Sequence: Synthetic oligonucleotide
  Antisense strand to SEQ ID NO: 1736401
uacuauaccgcucacuucc

SEQ ID NO: 1736403 - RNA, 19 nt, Artificial Sequence
  Description of Artificial Sequence: Synthetic oligonucleotide
  Sense strand starting at position 3604 of SEQ ID NO: 1562289
aagugagcgguauaguaua

SEQ ID NO: 1736404 - RNA, 19 nt, Artificial Sequence
  Description of Artificial Sequence: Synthetic oligonucleotide
  Antisense strand to SEQ ID NO: 1736403
uauacuauaccgcucacuu

SEQ ID NO: 1736405 - RNA, 19 nt, Artificial Sequence
  Description of Artificial Sequence: Synthetic oligonucleotide
  Sense strand starting at position 251 of SEQ ID NO: 1562290
gugcauaacuguucucaac

SEQ ID NO: 1736406 - RNA, 19 nt, Artificial Sequence
  Description of Artificial Sequence: Synthetic oligonucleotide
  Antisense strand to SEQ ID NO: 1736405
guugagaacaguuaugcac

SEQ ID NO: 1736407 - RNA, 19 nt, Artificial Sequence
  Description of Artificial Sequence: Synthetic oligonucleotide
  Sense strand starting at position 269 of SEQ ID NO: 1562290
ccuugacaaugucaauguu

SEQ ID NO: 1736408 - RNA, 19 nt, Artificial Sequence
  Description of Artificial Sequence: Synthetic oligonucleotide
  Antisense strand to SEQ ID NO: 1736407
aacauugacauugucaagg

SEQ ID NO: 1736409 - RNA, 19 nt, Artificial Sequence
  Description of Artificial Sequence: Synthetic oligonucleotide
  Sense strand starting at position 272 of SEQ ID NO: 1562290
ugacaaugucaauguuaga

SEQ ID NO: 1736410 - RNA, 19 nt, Artificial Sequence
  Description of Artificial Sequence: Synthetic oligonucleotide
  Antisense strand to SEQ ID NO: 1736409
ucuaacauugacauuguca

SEQ ID NO: 1736411 - RNA, 19 nt, Artificial Sequence
  Description of Artificial Sequence: Synthetic oligonucleotide
  Sense strand starting at position 277 of SEQ ID NO: 1562290
augucaauguuagaaauga

SEQ ID NO: 1736412 - RNA, 19 nt, Artificial Sequence
  Description of Artificial Sequence: Synthetic oligonucleotide
  Antisense strand to SEQ ID NO: 1736411
ucauuucuaacauugacau

SEQ ID NO: 1736413 - RNA, 19 nt, Artificial Sequence
  Description of Artificial Sequence: Synthetic oligonucleotide
  Sense strand starting at position 1250 of SEQ ID NO: 1562290
cugacauuguagcucauga

SEQ ID NO: 1736414 - RNA, 19 nt, Artificial Sequence
  Description of Artificial Sequence: Synthetic oligonucleotide
  Antisense strand to SEQ ID NO: 1736413
ucaugagcuacaaugucag

SEQ ID NO: 1736415 - RNA, 19 nt, Artificial Sequence
  Description of Artificial Sequence: Synthetic oligonucleotide
  Sense strand starting at position 1252 of SEQ ID NO: 1562290
gacauuguagcucaugaua

SEQ ID NO: 1736416 - RNA, 19 nt, Artificial Sequence
  Description of Artificial Sequence: Synthetic oligonucleotide
  Antisense strand to SEQ ID NO: 1736415
uaucaugagcuacaauguc

SEQ ID NO: 1736417 - RNA, 19 nt, Artificial Sequence
  Description of Artificial Sequence: Synthetic oligonucleotide
  Sense strand starting at position 2124 of SEQ ID NO: 1562290
acucuaauugguuguccua

SEQ ID NO: 1736418 - RNA, 19 nt, Artificial Sequence
  Description of Artificial Sequence: Synthetic oligonucleotide
  Antisense strand to SEQ ID NO: 1736417
uaggacaaccaauuagagu

SEQ ID NO: 1736419 - RNA, 19 nt, Artificial Sequence
  Description of Artificial Sequence: Synthetic oligonucleotide
  Sense strand starting at position 2126 of SEQ ID NO: 1562290
ucuaauugguuguccuaag

SEQ ID NO: 1736420 - RNA, 19 nt, Artificial Sequence
  Description of Artificial Sequence: Synthetic oligonucleotide
  Antisense strand to SEQ ID NO: 1736419
cuuaggacaaccaauuaga

SEQ ID NO: 1736421 - RNA, 19 nt, Artificial Sequence
  Description of Artificial Sequence: Synthetic oligonucleotide
  Sense strand starting at position 2127 of SEQ ID NO: 1562290
cuaauugguuguccuaaga

SEQ ID NO: 1736422 - RNA, 19 nt, Artificial Sequence
  Description of Artificial Sequence: Synthetic oligonucleotide
  Antisense strand to SEQ ID NO: 1736421
ucuuaggacaaccaauuag

SEQ ID NO: 1736423 - RNA, 19 nt, Artificial Sequence
  Description of Artificial Sequence: Synthetic oligonucleotide
  Sense strand starting at position 2206 of SEQ ID NO: 1562290
uuauccaauccuggaaagu

SEQ ID NO: 1736424 - RNA, 19 nt, Artificial Sequence
  Description of Artificial Sequence: Synthetic oligonucleotide
  Antisense strand to SEQ ID NO: 1736423
acuuuccaggauuggauaa

SEQ ID NO: 1736425 - RNA, 19 nt, Artificial Sequence
  Description of Artificial Sequence: Synthetic oligonucleotide
  Sense strand starting at position 2219 of SEQ ID NO: 1562290
gaaaguguaguccacgaac

SEQ ID NO: 1736426 - RNA, 19 nt, Artificial Sequence
  Description of Artificial Sequence: Synthetic oligonucleotide
  Antisense strand to SEQ ID NO: 1736425
guucguggacuacacuuuc

SEQ ID NO: 1736427 - RNA, 19 nt, Artificial Sequence
  Description of Artificial Sequence: Synthetic oligonucleotide
  Sense strand starting at position 2272 of SEQ ID NO: 1562290
gaagaagagucaggcuguu

SEQ ID NO: 1736428 - RNA, 19 nt, Artificial Sequence
  Description of Artificial Sequence: Synthetic oligonucleotide
  Antisense strand to SEQ ID NO: 1736427
aacagccugacucuucuuc

SEQ ID NO: 1736429 - RNA, 19 nt, Artificial Sequence
  Description of Artificial Sequence: Synthetic oligonucleotide
  Sense strand starting at position 2512 of SEQ ID NO: 1562290
cggagaagucauugcauaa

SEQ ID NO: 1736430 - RNA, 19 nt, Artificial Sequence
  Description of Artificial Sequence: Synthetic oligonucleotide
  Antisense strand to SEQ ID NO: 1736429
uuaugcaaugacuucuccg

SEQ ID NO: 1736431 - RNA, 19 nt, Artificial Sequence
  Description of Artificial Sequence: Synthetic oligonucleotide
  Sense strand starting at position 3599 of SEQ ID NO: 1562290
aacggaagugagcgguaua

SEQ ID NO: 1736432 - RNA, 19 nt, Artificial Sequence
  Description of Artificial Sequence: Synthetic oligonucleotide
  Antisense strand to SEQ ID NO: 1736431
uauaccgcucacuuccguu

SEQ ID NO: 1736433 - RNA, 19 nt, Artificial Sequence
  Description of Artificial Sequence: Synthetic oligonucleotide
  Sense strand starting at position 3602 of SEQ ID NO: 1562290
ggaagugagcgguauagua

SEQ ID NO: 1736434 - RNA, 19 nt, Artificial Sequence
  Description of Artificial Sequence: Synthetic oligonucleotide
  Antisense strand to SEQ ID NO: 1736433
uacuauaccgcucacuucc

SEQ ID NO: 1736435 - RNA, 19 nt, Artificial Sequence
  Description of Artificial Sequence: Synthetic oligonucleotide
  Sense strand starting at position 3604 of SEQ ID NO: 1562290
aagugagcgguauaguaua

SEQ ID NO: 1736436 - RNA, 19 nt, Artificial Sequence
  Description of Artificial Sequence: Synthetic oligonucleotide
  Antisense strand to SEQ ID NO: 1736435
uauacuauaccgcucacuu

SEQ ID NO: 1736437 - RNA, 19 nt, Artificial Sequence
  Description of Artificial Sequence: Synthetic oligonucleotide
  Sense strand starting at position 251 of SEQ ID NO: 1562291
gugcauaacuguucucaac

SEQ ID NO: 1736438 - RNA, 19 nt, Artificial Sequence
  Description of Artificial Sequence: Synthetic oligonucleotide
  Antisense strand to SEQ ID NO: 1736437
guugagaacaguuaugcac

SEQ ID NO: 1736439 - RNA, 19 nt, Artificial Sequence
  Description of Artificial Sequence: Synthetic oligonucleotide
  Sense strand starting at position 269 of SEQ ID NO: 1562291
ccuugacaaugucaauguu

SEQ ID NO: 1736440 - RNA, 19 nt, Artificial Sequence
  Description of Artificial Sequence: Synthetic oligonucleotide
  Antisense strand to SEQ ID NO: 1736439
aacauugacauugucaagg

SEQ ID NO: 1736441 - RNA, 19 nt, Artificial Sequence
  Description of Artificial Sequence: Synthetic oligonucleotide
  Sense strand starting at position 272 of SEQ ID NO: 1562291
ugacaaugucaauguuaga

SEQ ID NO: 1736442 - RNA, 19 nt, Artificial Sequence
  Description of Artificial Sequence: Synthetic oligonucleotide
  Antisense strand to SEQ ID NO: 1736441
ucuaacauugacauuguca

SEQ ID NO: 1736443 - RNA, 19 nt, Artificial Sequence
  Description of Artificial Sequence: Synthetic oligonucleotide
  Sense strand starting at position 277 of SEQ ID NO: 1562291
augucaauguuagaaauga

SEQ ID NO: 1736444 - RNA, 19 nt, Artificial Sequence
  Description of Artificial Sequence: Synthetic oligonucleotide
  Antisense strand to SEQ ID NO: 1736443
ucauuucuaacauugacau

SEQ ID NO: 1736445 - RNA, 19 nt, Artificial Sequence
  Description of Artificial Sequence: Synthetic oligonucleotide
  Sense strand starting at position 1250 of SEQ ID NO: 1562291
cugacauuguagcucauga

SEQ ID NO: 1736446 - RNA, 19 nt, Artificial Sequence
  Description of Artificial Sequence: Synthetic oligonucleotide
  Antisense strand to SEQ ID NO: 1736445
ucaugagcuacaaugucag

SEQ ID NO: 1736447 - RNA, 19 nt, Artificial Sequence
  Description of Artificial Sequence: Synthetic oligonucleotide
  Sense strand starting at position 1252 of SEQ ID NO: 1562291
gacauuguagcucaugaua

SEQ ID NO: 1736448 - RNA, 19 nt, Artificial Sequence
  Description of Artificial Sequence: Synthetic oligonucleotide
  Antisense strand to SEQ ID NO: 1736447
uaucaugagcuacaauguc

SEQ ID NO: 1736449 - RNA, 19 nt, Artificial Sequence
  Description of Artificial Sequence: Synthetic oligonucleotide
  Sense strand starting at position 2124 of SEQ ID NO: 1562291
acucuaauugguuguccua

SEQ ID NO: 1736450 - RNA, 19 nt, Artificial Sequence
  Description of Artificial Sequence: Synthetic oligonucleotide
  Antisense strand to SEQ ID NO: 1736449
uaggacaaccaauuagagu

SEQ ID NO: 1736451 - RNA, 19 nt, Artificial Sequence
  Description of Artificial Sequence: Synthetic oligonucleotide
  Sense strand starting at position 2126 of SEQ ID NO: 1562291
ucuaauugguuguccuaag

SEQ ID NO: 1736452 - RNA, 19 nt, Artificial Sequence
  Description of Artificial Sequence: Synthetic oligonucleotide
  Antisense strand to SEQ ID NO: 1736451
cuuaggacaaccaauuaga

SEQ ID NO: 1736453 - RNA, 19 nt, Artificial Sequence
  Description of Artificial Sequence: Synthetic oligonucleotide
  Sense strand starting at position 2127 of SEQ ID NO: 1562291
cuaauugguuguccuaaga

SEQ ID NO: 1736454 - RNA, 19 nt, Artificial Sequence
  Description of Artificial Sequence: Synthetic oligonucleotide
  Antisense strand to SEQ ID NO: 1736453
ucuuaggacaaccaauuag

SEQ ID NO: 1736455 - RNA, 19 nt, Artificial Sequence
  Description of Artificial Sequence: Synthetic oligonucleotide
  Sense strand starting at position 2206 of SEQ ID NO: 1562291
uuauccaauccuggaaagu

SEQ ID NO: 1736456 - RNA, 19 nt, Artificial Sequence
  Description of Artificial Sequence: Synthetic oligonucleotide
  Antisense strand to SEQ ID NO: 1736455
acuuuccaggauuggauaa

SEQ ID NO: 1736457 - RNA, 19 nt, Artificial Sequence
  Description of Artificial Sequence: Synthetic oligonucleotide
  Sense strand starting at position 2219 of SEQ ID NO: 1562291
gaaaguguaguccacgaac

SEQ ID NO: 1736458 - RNA, 19 nt, Artificial Sequence
  Description of Artificial Sequence: Synthetic oligonucleotide
  Antisense strand to SEQ ID NO: 1736457
guucguggacuacacuuuc

SEQ ID NO: 1736459 - RNA, 19 nt, Artificial Sequence
  Description of Artificial Sequence: Synthetic oligonucleotide
  Sense strand starting at position 2272 of SEQ ID NO: 1562291
gaagaagagucaggcuguu

SEQ ID NO: 1736460 - RNA, 19 nt, Artificial Sequence
  Description of Artificial Sequence: Synthetic oligonucleotide
  Antisense strand to SEQ ID NO: 1736459
aacagccugacucuucuuc

SEQ ID NO: 1736461 - RNA, 19 nt, Artificial Sequence
  Description of Artificial Sequence: Synthetic oligonucleotide
  Sense strand starting at position 2512 of SEQ ID NO: 1562291
cggagaagucauugcauaa

SEQ ID NO: 1736462 - RNA, 19 nt, Artificial Sequence
  Description of Artificial Sequence: Synthetic oligonucleotide
  Antisense strand to SEQ ID NO: 1736461
uuaugcaaugacuucuccg

SEQ ID NO: 1736463 - RNA, 19 nt, Artificial Sequence
  Description of Artificial Sequence: Synthetic oligonucleotide
  Sense strand starting at position 3599 of SEQ ID NO: 1562291
aacggaagugagcgguaua

SEQ ID NO: 1736464 - RNA, 19 nt, Artificial Sequence
  Description of Artificial Sequence: Synthetic oligonucleotide
  Antisense strand to SEQ ID NO: 1736463
uauaccgcucacuuccguu

SEQ ID NO: 1736465 - RNA, 19 nt, Artificial Sequence
  Description of Artificial Sequence: Synthetic oligonucleotide
  Sense strand starting at position 3602 of SEQ ID NO: 1562291
ggaagugagcgguauagua

SEQ ID NO: 1736466 - RNA, 19 nt, Artificial Sequence
  Description of Artificial Sequence: Synthetic oligonucleotide
  Antisense strand to SEQ ID NO: 1736465
uacuauaccgcucacuucc

SEQ ID NO: 1736467 - RNA, 19 nt, Artificial Sequence
  Description of Artificial Sequence: Synthetic oligonucleotide
  Sense strand starting at position 3604 of SEQ ID NO: 1562291
aagugagcgguauaguaua

SEQ ID NO: 1736468 - RNA, 19 nt, Artificial Sequence
  Description of Artificial Sequence: Synthetic oligonucleotide
  Antisense strand to SEQ ID NO: 1736467
uauacuauaccgcucacuu

SEQ ID NO: 1736469 - RNA, 19 nt, Artificial Sequence
  Description of Artificial Sequence: Synthetic oligonucleotide
  Sense strand starting at position 251 of SEQ ID NO: 1562292
gugcauaacuguucucaac

SEQ ID NO: 1736470 - RNA, 19 nt, Artificial Sequence
  Description of Artificial Sequence: Synthetic oligonucleotide
  Antisense strand to SEQ ID NO: 1736469
guugagaacaguuaugcac

SEQ ID NO: 1736471 - RNA, 19 nt, Artificial Sequence
  Description of Artificial Sequence: Synthetic oligonucleotide
  Sense strand starting at position 269 of SEQ ID NO: 1562292
ccuugacaaugucaauguu

SEQ ID NO: 1736472 - RNA, 19 nt, Artificial Sequence
  Description of Artificial Sequence: Synthetic oligonucleotide
  Antisense strand to SEQ ID NO: 1736471
aacauugacauugucaagg

SEQ ID NO: 1736473 - RNA, 19 nt, Artificial Sequence
  Description of Artificial Sequence: Synthetic oligonucleotide
  Sense strand starting at position 272 of SEQ ID NO: 1562292
ugacaaugucaauguuaga

SEQ ID NO: 1736474 - RNA, 19 nt, Artificial Sequence
  Description of Artificial Sequence: Synthetic oligonucleotide
  Antisense strand to SEQ ID NO: 1736473
ucuaacauugacauuguca

SEQ ID NO: 1736475 - RNA, 19 nt, Artificial Sequence
  Description of Artificial Sequence: Synthetic oligonucleotide
  Sense strand starting at position 277 of SEQ ID NO: 1562292
augucaauguuagaaauga

SEQ ID NO: 1736476 - RNA, 19 nt, Artificial Sequence
  Description of Artificial Sequence: Synthetic oligonucleotide
  Antisense strand to SEQ ID NO: 1736475
ucauuucuaacauugacau

SEQ ID NO: 1736477 - RNA, 19 nt, Artificial Sequence
  Description of Artificial Sequence: Synthetic oligonucleotide
  Sense strand starting at position 1250 of SEQ ID NO: 1562292
cugacauuguagcucauga

SEQ ID NO: 1736478 - RNA, 19 nt, Artificial Sequence
  Description of Artificial Sequence: Synthetic oligonucleotide
  Antisense strand to SEQ ID NO: 1736477
ucaugagcuacaaugucag

SEQ ID NO: 1736479 - RNA, 19 nt, Artificial Sequence
  Description of Artificial Sequence: Synthetic oligonucleotide
  Sense strand starting at position 1252 of SEQ ID NO: 1562292
gacauuguagcucaugaua

SEQ ID NO: 1736480 - RNA, 19 nt, Artificial Sequence
  Description of Artificial Sequence: Synthetic oligonucleotide
  Antisense strand to SEQ ID NO: 1736479
uaucaugagcuacaauguc

SEQ ID NO: 1736481 - RNA, 19 nt, Artificial Sequence
  Description of Artificial Sequence: Synthetic oligonucleotide
  Sense strand starting at position 2124 of SEQ ID NO: 1562292
acucuaauugguuguccua

SEQ ID NO: 1736482 - RNA, 19 nt, Artificial Sequence
  Description of Artificial Sequence: Synthetic oligonucleotide
  Antisense strand to SEQ ID NO: 1736481
uaggacaaccaauuagagu

SEQ ID NO: 1736483 - RNA, 19 nt, Artificial Sequence
  Description of Artificial Sequence: Synthetic oligonucleotide
  Sense strand starting at position 2126 of SEQ ID NO: 1562292
ucuaauugguuguccuaag

SEQ ID NO: 1736484 - RNA, 19 nt, Artificial Sequence
  Description of Artificial Sequence: Synthetic oligonucleotide
  Antisense strand to SEQ ID NO: 1736483
cuuaggacaaccaauuaga

SEQ ID NO: 1736485 - RNA, 19 nt, Artificial Sequence
  Description of Artificial Sequence: Synthetic oligonucleotide
  Sense strand starting at position 2127 of SEQ ID NO: 1562292
cuaauugguuguccuaaga

SEQ ID NO: 1736486 - RNA, 19 nt, Artificial Sequence
  Description of Artificial Sequence: Synthetic oligonucleotide
  Antisense strand to SEQ ID NO: 1736485
ucuuaggacaaccaauuag

SEQ ID NO: 1736487 - RNA, 19 nt, Artificial Sequence
  Description of Artificial Sequence: Synthetic oligonucleotide
  Sense strand starting at position 2206 of SEQ ID NO: 1562292
uuauccaauccuggaaagu

SEQ ID NO: 1736488 - RNA, 19 nt, Artificial Sequence
  Description of Artificial Sequence: Synthetic oligonucleotide
  Antisense strand to SEQ ID NO: 1736487
acuuuccaggauuggauaa

SEQ ID NO: 1736489 - RNA, 19 nt, Artificial Sequence
  Description of Artificial Sequence: Synthetic oligonucleotide
  Sense strand starting at position 2219 of SEQ ID NO: 1562292
gaaaguguaguccacgaac

SEQ ID NO: 1736490 - RNA, 19 nt, Artificial Sequence
  Description of Artificial Sequence: Synthetic oligonucleotide
  Antisense strand to SEQ ID NO: 1736489
guucguggacuacacuuuc

SEQ ID NO: 1736491 - RNA, 19 nt, Artificial Sequence
  Description of Artificial Sequence: Synthetic oligonucleotide
  Sense strand starting at position 2272 of SEQ ID NO: 1562292
gaagaagagucaggcuguu

SEQ ID NO: 1736492 - RNA, 19 nt, Artificial Sequence
  Description of Artificial Sequence: Synthetic oligonucleotide
  Antisense strand to SEQ ID NO: 1736491
aacagccugacucuucuuc

SEQ ID NO: 1736493 - RNA, 19 nt, Artificial Sequence
  Description of Artificial Sequence: Synthetic oligonucleotide
  Sense strand starting at position 2512 of SEQ ID NO: 1562292
cggagaagucauugcauaa

SEQ ID NO: 1736494 - RNA, 19 nt, Artificial Sequence
  Description of Artificial Sequence: Synthetic oligonucleotide
  Antisense strand to SEQ ID NO: 1736493
uuaugcaaugacuucuccg

SEQ ID NO: 1736495 - RNA, 19 nt, Artificial Sequence
  Description of Artificial Sequence: Synthetic oligonucleotide
  Sense strand starting at position 3599 of SEQ ID NO: 1562292
aacggaagugagcgguaua

SEQ ID NO: 1736496 - RNA, 19 nt, Artificial Sequence
  Description of Artificial Sequence: Synthetic oligonucleotide
  Antisense strand to SEQ ID NO: 1736495
uauaccgcucacuuccguu

SEQ ID NO: 1736497 - RNA, 19 nt, Artificial Sequence
  Description of Artificial Sequence: Synthetic oligonucleotide
  Sense strand starting at position 3602 of SEQ ID NO: 1562292
ggaagugagcgguauagua

SEQ ID NO: 1736498 - RNA, 19 nt, Artificial Sequence
  Description of Artificial Sequence: Synthetic oligonucleotide
  Antisense strand to SEQ ID NO: 1736497
uacuauaccgcucacuucc

SEQ ID NO: 1736499 - RNA, 19 nt, Artificial Sequence
  Description of Artificial Sequence: Synthetic oligonucleotide
  Sense strand starting at position 3604 of SEQ ID NO: 1562292
aagugagcgguauaguaua

SEQ ID NO: 1736500 - RNA, 19 nt, Artificial Sequence
  Description of Artificial Sequence: Synthetic oligonucleotide
  Antisense strand to SEQ ID NO: 1736499
uauacuauaccgcucacuu

SEQ ID NO: 1736501 - RNA, 19 nt, Artificial Sequence
  Description of Artificial Sequence: Synthetic oligonucleotide
  Sense strand starting at position 136 of SEQ ID NO: 1562293
aggucuuccaacuguggua

SEQ ID NO: 1736502 - RNA, 19 nt, Artificial Sequence
  Description of Artificial Sequence: Synthetic oligonucleotide
  Antisense strand to SEQ ID NO: 1736501
uaccacaguuggaagaccu

SEQ ID NO: 1736503 - RNA, 19 nt, Artificial Sequence
  Description of Artificial Sequence: Synthetic oligonucleotide
  Sense strand starting at position 138 of SEQ ID NO: 1562293
gucuuccaacugugguaaa

SEQ ID NO: 1736504 - RNA, 19 nt, Artificial Sequence
  Description of Artificial Sequence: Synthetic oligonucleotide
  Antisense strand to SEQ ID NO: 1736503
uuuaccacaguuggaagac

SEQ ID NO: 1736505 - RNA, 19 nt, Artificial Sequence
  Description of Artificial Sequence: Synthetic oligonucleotide
  Sense strand starting at position 208 of SEQ ID NO: 1562293
cugaauauggccuggcaau

SEQ ID NO: 1736506 - RNA, 19 nt, Artificial Sequence
  Description of Artificial Sequence: Synthetic oligonucleotide
  Antisense strand to SEQ ID NO: 1736505
auugccaggccauauucag

SEQ ID NO: 1736507 - RNA, 19 nt, Artificial Sequence
  Description of Artificial Sequence: Synthetic oligonucleotide
  Sense strand starting at position 209 of SEQ ID NO: 1562293
ugaauauggccuggcaauu

SEQ ID NO: 1736508 - RNA, 19 nt, Artificial Sequence
  Description of Artificial Sequence: Synthetic oligonucleotide
  Antisense strand to SEQ ID NO: 1736507
aauugccaggccauauuca

SEQ ID NO: 1736509 - RNA, 19 nt, Artificial Sequence
  Description of Artificial Sequence: Synthetic oligonucleotide
  Sense strand starting at position 306 of SEQ ID NO: 1562293
cugcaacugcuguaacuau

SEQ ID NO: 1736510 - RNA, 19 nt, Artificial Sequence
  Description of Artificial Sequence: Synthetic oligonucleotide
  Antisense strand to SEQ ID NO: 1736509
auaguuacagcaguugcag

SEQ ID NO: 1736511 - RNA, 19 nt, Artificial Sequence
  Description of Artificial Sequence: Synthetic oligonucleotide
  Sense strand starting at position 372 of SEQ ID NO: 1562293
augagacuguaaugcaaga

SEQ ID NO: 1736512 - RNA, 19 nt, Artificial Sequence
  Description of Artificial Sequence: Synthetic oligonucleotide
  Antisense strand to SEQ ID NO: 1736511
ucuugcauuacagucucau

SEQ ID NO: 1736513 - RNA, 19 nt, Artificial Sequence
  Description of Artificial Sequence: Synthetic oligonucleotide
  Sense strand starting at position 377 of SEQ ID NO: 1562293
acuguaaugcaagauuaac

SEQ ID NO: 1736514 - RNA, 19 nt, Artificial Sequence
  Description of Artificial Sequence: Synthetic oligonucleotide
  Antisense strand to SEQ ID NO: 1736513
guuaaucuugcauuacagu

SEQ ID NO: 1736515 - RNA, 19 nt, Artificial Sequence
  Description of Artificial Sequence: Synthetic oligonucleotide
  Sense strand starting at position 425 of SEQ ID NO: 1562293
gcacuuuauuguguuaucu

SEQ ID NO: 1736516 - RNA, 19 nt, Artificial Sequence
  Description of Artificial Sequence: Synthetic oligonucleotide
  Antisense strand to SEQ ID NO: 1736515
agauaacacaauaaagugc

SEQ ID NO: 1736517 - RNA, 19 nt, Artificial Sequence
  Description of Artificial Sequence: Synthetic oligonucleotide
  Sense strand starting at position 427 of SEQ ID NO: 1562293
acuuuauuguguuaucuac

SEQ ID NO: 1736518 - RNA, 19 nt, Artificial Sequence
  Description of Artificial Sequence: Synthetic oligonucleotide
  Antisense strand to SEQ ID NO: 1736517
guagauaacacaauaaagu

SEQ ID NO: 1736519 - RNA, 19 nt, Artificial Sequence
  Description of Artificial Sequence: Synthetic oligonucleotide
  Sense strand starting at position 433 of SEQ ID NO: 1562293
uuguguuaucuacaagauc

SEQ ID NO: 1736520 - RNA, 19 nt, Artificial Sequence
  Description of Artificial Sequence: Synthetic oligonucleotide
  Antisense strand to SEQ ID NO: 1736519
gaucuuguagauaacacaa

SEQ ID NO: 1736521 - RNA, 19 nt, Artificial Sequence
  Description of Artificial Sequence: Synthetic oligonucleotide
  Sense strand starting at position 436 of SEQ ID NO: 1562293
uguuaucuacaagaucagu

SEQ ID NO: 1736522 - RNA, 19 nt, Artificial Sequence
  Description of Artificial Sequence: Synthetic oligonucleotide
  Antisense strand to SEQ ID NO: 1736521
acugaucuuguagauaaca

SEQ ID NO: 1736523 - RNA, 19 nt, Artificial Sequence
  Description of Artificial Sequence: Synthetic oligonucleotide
  Sense strand starting at position 441 of SEQ ID NO: 1562293
ucuacaagaucagugugaa

SEQ ID NO: 1736524 - RNA, 19 nt, Artificial Sequence
  Description of Artificial Sequence: Synthetic oligonucleotide
  Antisense strand to SEQ ID NO: 1736523
uucacacugaucuuguaga

SEQ ID NO: 1736525 - RNA, 19 nt, Artificial Sequence
  Description of Artificial Sequence: Synthetic oligonucleotide
  Sense strand starting at position 442 of SEQ ID NO: 1562293
cuacaagaucagugugaaa

SEQ ID NO: 1736526 - RNA, 19 nt, Artificial Sequence
  Description of Artificial Sequence: Synthetic oligonucleotide
  Antisense strand to SEQ ID NO: 1736525
uuucacacugaucuuguag

SEQ ID NO: 1736527 - RNA, 19 nt, Artificial Sequence
  Description of Artificial Sequence: Synthetic oligonucleotide
  Sense strand starting at position 444 of SEQ ID NO: 1562293
acaagaucagugugaaacu

SEQ ID NO: 1736528 - RNA, 19 nt, Artificial Sequence
  Description of Artificial Sequence: Synthetic oligonucleotide
  Antisense strand to SEQ ID NO: 1736527
aguuucacacugaucuugu

SEQ ID NO: 1736529 - RNA, 19 nt, Artificial Sequence
  Description of Artificial Sequence: Synthetic oligonucleotide
  Sense strand starting at position 453 of SEQ ID NO: 1562293
gugugaaacucaucaauca

SEQ ID NO: 1736530 - RNA, 19 nt, Artificial Sequence
  Description of Artificial Sequence: Synthetic oligonucleotide
  Antisense strand to SEQ ID NO: 1736529
ugauugaugaguuucacac

SEQ ID NO: 1736531 - RNA, 19 nt, Artificial Sequence
  Description of Artificial Sequence: Synthetic oligonucleotide
  Sense strand starting at position 621 of SEQ ID NO: 1562293
augauucuauuccuaggga

SEQ ID NO: 1736532 - RNA, 19 nt, Artificial Sequence
  Description of Artificial Sequence: Synthetic oligonucleotide
  Antisense strand to SEQ ID NO: 1736531
ucccuaggaauagaaucau

SEQ ID NO: 1736533 - RNA, 19 nt, Artificial Sequence
  Description of Artificial Sequence: Synthetic oligonucleotide
  Sense strand starting at position 622 of SEQ ID NO: 1562293
ugauucuauuccuagggaa

SEQ ID NO: 1736534 - RNA, 19 nt, Artificial Sequence
  Description of Artificial Sequence: Synthetic oligonucleotide
  Antisense strand to SEQ ID NO: 1736533
uucccuaggaauagaauca

SEQ ID NO: 1736535 - RNA, 19 nt, Artificial Sequence
  Description of Artificial Sequence: Synthetic oligonucleotide
  Sense strand starting at position 624 of SEQ ID NO: 1562293
auucuauuccuagggaaca

SEQ ID NO: 1736536 - RNA, 19 nt, Artificial Sequence
  Description of Artificial Sequence: Synthetic oligonucleotide
  Antisense strand to SEQ ID NO: 1736535
uguucccuaggaauagaau

SEQ ID NO: 1736537 - RNA, 19 nt, Artificial Sequence
  Description of Artificial Sequence: Synthetic oligonucleotide
  Sense strand starting at position 625 of SEQ ID NO: 1562293
uucuauuccuagggaacaa

SEQ ID NO: 1736538 - RNA, 19 nt, Artificial Sequence
  Description of Artificial Sequence: Synthetic oligonucleotide
  Antisense strand to SEQ ID NO: 1736537
uuguucccuaggaauagaa

SEQ ID NO: 1736539 - RNA, 19 nt, Artificial Sequence
  Description of Artificial Sequence: Synthetic oligonucleotide
  Sense strand starting at position 682 of SEQ ID NO: 1562293
ccaaucagagcgcgaguua

SEQ ID NO: 1736540 - RNA, 19 nt, Artificial Sequence
  Description of Artificial Sequence: Synthetic oligonucleotide
  Antisense strand to SEQ ID NO: 1736539
uaacucgcgcucugauugg

SEQ ID NO: 1736541 - RNA, 19 nt, Artificial Sequence
  Description of Artificial Sequence: Synthetic oligonucleotide
  Sense strand starting at position 855 of SEQ ID NO: 1562293
augacuguuuccugccaaa

SEQ ID NO: 1736542 - RNA, 19 nt, Artificial Sequence
  Description of Artificial Sequence: Synthetic oligonucleotide
  Antisense strand to SEQ ID NO: 1736541
uuuggcaggaaacagucau

SEQ ID NO: 1736543 - RNA, 19 nt, Artificial Sequence
  Description of Artificial Sequence: Synthetic oligonucleotide
  Sense strand starting at position 1093 of SEQ ID NO: 1562293
aguccaaucucuucggcaa

SEQ ID NO: 1736544 - RNA, 19 nt, Artificial Sequence
  Description of Artificial Sequence: Synthetic oligonucleotide
  Antisense strand to SEQ ID NO: 1736543
uugccgaagagauuggacu

SEQ ID NO: 1736545 - RNA, 19 nt, Artificial Sequence
  Description of Artificial Sequence: Synthetic oligonucleotide
  Sense strand starting at position 1096 of SEQ ID NO: 1562293
ccaaucucuucggcaacaa

SEQ ID NO: 1736546 - RNA, 19 nt, Artificial Sequence
  Description of Artificial Sequence: Synthetic oligonucleotide
  Antisense strand to SEQ ID NO: 1736545
uuguugccgaagagauugg

SEQ ID NO: 1736547 - RNA, 19 nt, Artificial Sequence
  Description of Artificial Sequence: Synthetic oligonucleotide
  Sense strand starting at position 1482 of SEQ ID NO: 1562293
cgauagguaccgggcgaua

SEQ ID NO: 1736548 - RNA, 19 nt, Artificial Sequence
  Description of Artificial Sequence: Synthetic oligonucleotide
  Antisense strand to SEQ ID NO: 1736547
uaucgcccgguaccuaucg

SEQ ID NO: 1736549 - RNA, 19 nt, Artificial Sequence
  Description of Artificial Sequence: Synthetic oligonucleotide
  Sense strand starting at position 1873 of SEQ ID NO: 1562293
guaguuccuccgcgggaga

SEQ ID NO: 1736550 - RNA, 19 nt, Artificial Sequence
  Description of Artificial Sequence: Synthetic oligonucleotide
  Antisense strand to SEQ ID NO: 1736549
ucucccgcggaggaacuac

SEQ ID NO: 1736551 - RNA, 19 nt, Artificial Sequence
  Description of Artificial Sequence: Synthetic oligonucleotide
  Sense strand starting at position 1994 of SEQ ID NO: 1562293
gggacucgaugaggagaaa

SEQ ID NO: 1736552 - RNA, 19 nt, Artificial Sequence
  Description of Artificial Sequence: Synthetic oligonucleotide
  Antisense strand to SEQ ID NO: 1736551
uuucuccucaucgaguccc

SEQ ID NO: 1736553 - RNA, 19 nt, Artificial Sequence
  Description of Artificial Sequence: Synthetic oligonucleotide
  Sense strand starting at position 3127 of SEQ ID NO: 1562293
gucucaaaguugugaggau

SEQ ID NO: 1736554 - RNA, 19 nt, Artificial Sequence
  Description of Artificial Sequence: Synthetic oligonucleotide
  Antisense strand to SEQ ID NO: 1736553
auccucacaacuuugagac

SEQ ID NO: 1736555 - RNA, 19 nt, Artificial Sequence
  Description of Artificial Sequence: Synthetic oligonucleotide
  Sense strand starting at position 3128 of SEQ ID NO: 1562293
ucucaaaguugugaggauu

SEQ ID NO: 1736556 - RNA, 19 nt, Artificial Sequence
  Description of Artificial Sequence: Synthetic oligonucleotide
  Antisense strand to SEQ ID NO: 1736555
aauccucacaacuuugaga

SEQ ID NO: 1736557 - RNA, 19 nt, Artificial Sequence
  Description of Artificial Sequence: Synthetic oligonucleotide
  Sense strand starting at position 3149 of SEQ ID NO: 1562293
augaauuuguguuccuggu

SEQ ID NO: 1736558 - RNA, 19 nt, Artificial Sequence
  Description of Artificial Sequence: Synthetic oligonucleotide
  Antisense strand to SEQ ID NO: 1736557
accaggaacacaaauucau

SEQ ID NO: 1736559 - RNA, 19 nt, Artificial Sequence
  Description of Artificial Sequence: Synthetic oligonucleotide
  Sense strand starting at position 3151 of SEQ ID NO: 1562293
gaauuuguguuccugguau

SEQ ID NO: 1736560 - RNA, 19 nt, Artificial Sequence
  Description of Artificial Sequence: Synthetic oligonucleotide
  Antisense strand to SEQ ID NO: 1736559
auaccaggaacacaaauuc

SEQ ID NO: 1736561 - RNA, 19 nt, Artificial Sequence
  Description of Artificial Sequence: Synthetic oligonucleotide
  Sense strand starting at position 3153 of SEQ ID NO: 1562293
auuuguguuccugguauac

SEQ ID NO: 1736562 - RNA, 19 nt, Artificial Sequence
  Description of Artificial Sequence: Synthetic oligonucleotide
  Antisense strand to SEQ ID NO: 1736561
guauaccaggaacacaaau

SEQ ID NO: 1736563 - RNA, 19 nt, Artificial Sequence
  Description of Artificial Sequence: Synthetic oligonucleotide
  Sense strand starting at position 3157 of SEQ ID NO: 1562293
guguuccugguauacagua

SEQ ID NO: 1736564 - RNA, 19 nt, Artificial Sequence
  Description of Artificial Sequence: Synthetic oligonucleotide
  Antisense strand to SEQ ID NO: 1736563
uacuguauaccaggaacac

SEQ ID NO: 1736565 - RNA, 19 nt, Artificial Sequence
  Description of Artificial Sequence: Synthetic oligonucleotide
  Sense strand starting at position 3171 of SEQ ID NO: 1562293
caguaagcaccguguacaa

SEQ ID NO: 1736566 - RNA, 19 nt, Artificial Sequence
  Description of Artificial Sequence: Synthetic oligonucleotide
  Antisense strand to SEQ ID NO: 1736565
uuguacacggugcuuacug

SEQ ID NO: 1736567 - RNA, 19 nt, Artificial Sequence
  Description of Artificial Sequence: Synthetic oligonucleotide
  Sense strand starting at position 3548 of SEQ ID NO: 1562293
cauagauaucugugaggcu

SEQ ID NO: 1736568 - RNA, 19 nt, Artificial Sequence
  Description of Artificial Sequence: Synthetic oligonucleotide
  Antisense strand to SEQ ID NO: 1736567
agccucacagauaucuaug

SEQ ID NO: 1736569 - RNA, 19 nt, Artificial Sequence
  Description of Artificial Sequence: Synthetic oligonucleotide
  Sense strand starting at position 3857 of SEQ ID NO: 1562293
aaagcuauuugugagguaa

SEQ ID NO: 1736570 - RNA, 19 nt, Artificial Sequence
  Description of Artificial Sequence: Synthetic oligonucleotide
  Antisense strand to SEQ ID NO: 1736569
uuaccucacaaauagcuuu

SEQ ID NO: 1736571 - RNA, 19 nt, Artificial Sequence
  Description of Artificial Sequence: Synthetic oligonucleotide
  Sense strand starting at position 3859 of SEQ ID NO: 1562293
agcuauuugugagguaaca

SEQ ID NO: 1736572 - RNA, 19 nt, Artificial Sequence
  Description of Artificial Sequence: Synthetic oligonucleotide
  Antisense strand to SEQ ID NO: 1736571
uguuaccucacaaauagcu

SEQ ID NO: 1736573 - RNA, 19 nt, Artificial Sequence
  Description of Artificial Sequence: Synthetic oligonucleotide
  Sense strand starting at position 3878 of SEQ ID NO: 1562293
aucuaaauauguuugagcu

SEQ ID NO: 1736574 - RNA, 19 nt, Artificial Sequence
  Description of Artificial Sequence: Synthetic oligonucleotide
  Antisense strand to SEQ ID NO: 1736573
agcucaaacauauuuagau

SEQ ID NO: 1736575 - RNA, 19 nt, Artificial Sequence
  Description of Artificial Sequence: Synthetic oligonucleotide
  Sense strand starting at position 3879 of SEQ ID NO: 1562293
ucuaaauauguuugagcua

SEQ ID NO: 1736576 - RNA, 19 nt, Artificial Sequence
  Description of Artificial Sequence: Synthetic oligonucleotide
  Antisense strand to SEQ ID NO: 1736575
uagcucaaacauauuuaga

SEQ ID NO: 1736577 - RNA, 19 nt, Artificial Sequence
  Description of Artificial Sequence: Synthetic oligonucleotide
  Sense strand starting at position 3884 of SEQ ID NO: 1562293
auauguuugagcuagugca

SEQ ID NO: 1736578 - RNA, 19 nt, Artificial Sequence
  Description of Artificial Sequence: Synthetic oligonucleotide
  Antisense strand to SEQ ID NO: 1736577
ugcacuagcucaaacauau

SEQ ID NO: 1736579 - RNA, 19 nt, Artificial Sequence
  Description of Artificial Sequence: Synthetic oligonucleotide
  Sense strand starting at position 3903 of SEQ ID NO: 1562293
acaguaaguuaacuccuua

SEQ ID NO: 1736580 - RNA, 19 nt, Artificial Sequence
  Description of Artificial Sequence: Synthetic oligonucleotide
  Antisense strand to SEQ ID NO: 1736579
uaaggaguuaacuuacugu

SEQ ID NO: 1736581 - RNA, 19 nt, Artificial Sequence
  Description of Artificial Sequence: Synthetic oligonucleotide
  Sense strand starting at position 120 of SEQ ID NO: 1562294
aguguacacguauacauaa

SEQ ID NO: 1736582 - RNA, 19 nt, Artificial Sequence
  Description of Artificial Sequence: Synthetic oligonucleotide
  Antisense strand to SEQ ID NO: 1736581
uuauguauacguguacacu

SEQ ID NO: 1736583 - RNA, 19 nt, Artificial Sequence
  Description of Artificial Sequence: Synthetic oligonucleotide
  Sense strand starting at position 197 of SEQ ID NO: 1562294
uuuguaaagcuacguuuau

SEQ ID NO: 1736584 - RNA, 19 nt, Artificial Sequence
  Description of Artificial Sequence: Synthetic oligonucleotide
  Antisense strand to SEQ ID NO: 1736583
auaaacguagcuuuacaaa

SEQ ID NO: 1736585 - RNA, 19 nt, Artificial Sequence
  Description of Artificial Sequence: Synthetic oligonucleotide
  Sense strand starting at position 198 of SEQ ID NO: 1562294
uuguaaagcuacguuuaua

SEQ ID NO: 1736586 - RNA, 19 nt, Artificial Sequence
  Description of Artificial Sequence: Synthetic oligonucleotide
  Antisense strand to SEQ ID NO: 1736585
uauaaacguagcuuuacaa

SEQ ID NO: 1736587 - RNA, 19 nt, Artificial Sequence
  Description of Artificial Sequence: Synthetic oligonucleotide
  Sense strand starting at position 407 of SEQ ID NO: 1562294
auaucugaguucuggauuu

SEQ ID NO: 1736588 - RNA, 19 nt, Artificial Sequence
  Description of Artificial Sequence: Synthetic oligonucleotide
  Antisense strand to SEQ ID NO: 1736587
aaauccagaacucagauau

SEQ ID NO: 1736589 - RNA, 19 nt, Artificial Sequence
  Description of Artificial Sequence: Synthetic oligonucleotide
  Sense strand starting at position 507 of SEQ ID NO: 1562294
gaugacucauuuggacuuu

SEQ ID NO: 1736590 - RNA, 19 nt, Artificial Sequence
  Description of Artificial Sequence: Synthetic oligonucleotide
  Antisense strand to SEQ ID NO: 1736589
aaaguccaaaugagucauc

SEQ ID NO: 1736591 - RNA, 19 nt, Artificial Sequence
  Description of Artificial Sequence: Synthetic oligonucleotide
  Sense strand starting at position 583 of SEQ ID NO: 1562294
accaguauucuaggaguac

SEQ ID NO: 1736592 - RNA, 19 nt, Artificial Sequence
  Description of Artificial Sequence: Synthetic oligonucleotide
  Antisense strand to SEQ ID NO: 1736591
guacuccuagaauacuggu

SEQ ID NO: 1736593 - RNA, 19 nt, Artificial Sequence
  Description of Artificial Sequence: Synthetic oligonucleotide
  Sense strand starting at position 618 of SEQ ID NO: 1562294
gagaguuacagucagggca

SEQ ID NO: 1736594 - RNA, 19 nt, Artificial Sequence
  Description of Artificial Sequence: Synthetic oligonucleotide
  Antisense strand to SEQ ID NO: 1736593
ugcccugacuguaacucuc

SEQ ID NO: 1736595 - RNA, 19 nt, Artificial Sequence
  Description of Artificial Sequence: Synthetic oligonucleotide
  Sense strand starting at position 788 of SEQ ID NO: 1562294
aguucuacuuuguuccaca

SEQ ID NO: 1736596 - RNA, 19 nt, Artificial Sequence
  Description of Artificial Sequence: Synthetic oligonucleotide
  Antisense strand to SEQ ID NO: 1736595
uguggaacaaaguagaacu

SEQ ID NO: 1736597 - RNA, 19 nt, Artificial Sequence
  Description of Artificial Sequence: Synthetic oligonucleotide
  Sense strand starting at position 789 of SEQ ID NO: 1562294
guucuacuuuguuccacaa

SEQ ID NO: 1736598 - RNA, 19 nt, Artificial Sequence
  Description of Artificial Sequence: Synthetic oligonucleotide
  Antisense strand to SEQ ID NO: 1736597
uuguggaacaaaguagaac

SEQ ID NO: 1736599 - RNA, 19 nt, Artificial Sequence
  Description of Artificial Sequence: Synthetic oligonucleotide
  Sense strand starting at position 922 of SEQ ID NO: 1562294
ucgcaaacguuucuaggaa

SEQ ID NO: 1736600 - RNA, 19 nt, Artificial Sequence
  Description of Artificial Sequence: Synthetic oligonucleotide
  Antisense strand to SEQ ID NO: 1736599
uuccuagaaacguuugcga

SEQ ID NO: 1736601 - RNA, 19 nt, Artificial Sequence
  Description of Artificial Sequence: Synthetic oligonucleotide
  Sense strand starting at position 926 of SEQ ID NO: 1562294
aaacguuucuaggaacaca

SEQ ID NO: 1736602 - RNA, 19 nt, Artificial Sequence
  Description of Artificial Sequence: Synthetic oligonucleotide
  Antisense strand to SEQ ID NO: 1736601
uguguuccuagaaacguuu

SEQ ID NO: 1736603 - RNA, 19 nt, Artificial Sequence
  Description of Artificial Sequence: Synthetic oligonucleotide
  Sense strand starting at position 1067 of SEQ ID NO: 1562294
gggcuaagaguuggacuuu

SEQ ID NO: 1736604 - RNA, 19 nt, Artificial Sequence
  Description of Artificial Sequence: Synthetic oligonucleotide
  Antisense strand to SEQ ID NO: 1736603
aaaguccaacucuuagccc

SEQ ID NO: 1736605 - RNA, 19 nt, Artificial Sequence
  Description of Artificial Sequence: Synthetic oligonucleotide
  Sense strand starting at position 1358 of SEQ ID NO: 1562294
gcgacucuccagcaaacaa

SEQ ID NO: 1736606 - RNA, 19 nt, Artificial Sequence
  Description of Artificial Sequence: Synthetic oligonucleotide
  Antisense strand to SEQ ID NO: 1736605
uuguuugcuggagagucgc

SEQ ID NO: 1736607 - RNA, 19 nt, Artificial Sequence
  Description of Artificial Sequence: Synthetic oligonucleotide
  Sense strand starting at position 2363 of SEQ ID NO: 1562294
ggcggaauggcgaguucua

SEQ ID NO: 1736608 - RNA, 19 nt, Artificial Sequence
  Description of Artificial Sequence: Synthetic oligonucleotide
  Antisense strand to SEQ ID NO: 1736607
uagaacucgccauuccgcc

SEQ ID NO: 1736609 - RNA, 19 nt, Artificial Sequence
  Description of Artificial Sequence: Synthetic oligonucleotide
  Sense strand starting at position 2440 of SEQ ID NO: 1562294
cuuggcauuuauggacaga

SEQ ID NO: 1736610 - RNA, 19 nt, Artificial Sequence
  Description of Artificial Sequence: Synthetic oligonucleotide
  Antisense strand to SEQ ID NO: 1736609
ucuguccauaaaugccaag

SEQ ID NO: 1736611 - RNA, 19 nt, Artificial Sequence
  Description of Artificial Sequence: Synthetic oligonucleotide
  Sense strand starting at position 2465 of SEQ ID NO: 1562294
uccuucuugcuguagucaa

SEQ ID NO: 1736612 - RNA, 19 nt, Artificial Sequence
  Description of Artificial Sequence: Synthetic oligonucleotide
  Antisense strand to SEQ ID NO: 1736611
uugacuacagcaagaagga

SEQ ID NO: 1736613 - RNA, 19 nt, Artificial Sequence
  Description of Artificial Sequence: Synthetic oligonucleotide
  Sense strand starting at position 2479 of SEQ ID NO: 1562294
gucaauuacacgcacguua

SEQ ID NO: 1736614 - RNA, 19 nt, Artificial Sequence
  Description of Artificial Sequence: Synthetic oligonucleotide
  Antisense strand to SEQ ID NO: 1736613
uaacgugcguguaauugac

SEQ ID NO: 1736615 - RNA, 19 nt, Artificial Sequence
  Description of Artificial Sequence: Synthetic oligonucleotide
  Sense strand starting at position 2644 of SEQ ID NO: 1562294
uccaaagauguuggccaaa

SEQ ID NO: 1736616 - RNA, 19 nt, Artificial Sequence
  Description of Artificial Sequence: Synthetic oligonucleotide
  Antisense strand to SEQ ID NO: 1736615
uuuggccaacaucuuugga

SEQ ID NO: 1736617 - RNA, 19 nt, Artificial Sequence
  Description of Artificial Sequence: Synthetic oligonucleotide
  Sense strand starting at position 2686 of SEQ ID NO: 1562294
gcuuucuauuucugagaca

SEQ ID NO: 1736618 - RNA, 19 nt, Artificial Sequence
  Description of Artificial Sequence: Synthetic oligonucleotide
  Antisense strand to SEQ ID NO: 1736617
ugucucagaaauagaaagc

SEQ ID NO: 1736619 - RNA, 19 nt, Artificial Sequence
  Description of Artificial Sequence: Synthetic oligonucleotide
  Sense strand starting at position 2819 of SEQ ID NO: 1562294
gaguuaacaccauggucuu

SEQ ID NO: 1736620 - RNA, 19 nt, Artificial Sequence
  Description of Artificial Sequence: Synthetic oligonucleotide
  Antisense strand to SEQ ID NO: 1736619
aagaccaugguguuaacuc

SEQ ID NO: 1736621 - RNA, 19 nt, Artificial Sequence
  Description of Artificial Sequence: Synthetic oligonucleotide
  Sense strand starting at position 2820 of SEQ ID NO: 1562294
aguuaacaccauggucuua

SEQ ID NO: 1736622 - RNA, 19 nt, Artificial Sequence
  Description of Artificial Sequence: Synthetic oligonucleotide
  Antisense strand to SEQ ID NO: 1736621
uaagaccaugguguuaacu

SEQ ID NO: 1736623 - RNA, 19 nt, Artificial Sequence
  Description of Artificial Sequence: Synthetic oligonucleotide
  Sense strand starting at position 2844 of SEQ ID NO: 1562294
gugaaagcacuuuaauaca

SEQ ID NO: 1736624 - RNA, 19 nt, Artificial Sequence
  Description of Artificial Sequence: Synthetic oligonucleotide
  Antisense strand to SEQ ID NO: 1736623
uguauuaaagugcuuucac

SEQ ID NO: 1736625 - RNA, 19 nt, Artificial Sequence
  Description of Artificial Sequence: Synthetic oligonucleotide
  Sense strand starting at position 2920 of SEQ ID NO: 1562294
agggcuaaaccauguugua

SEQ ID NO: 1736626 - RNA, 19 nt, Artificial Sequence
  Description of Artificial Sequence: Synthetic oligonucleotide
  Antisense strand to SEQ ID NO: 1736625
uacaacaugguuuagcccu

SEQ ID NO: 1736627 - RNA, 19 nt, Artificial Sequence
  Description of Artificial Sequence: Synthetic oligonucleotide
  Sense strand starting at position 2933 of SEQ ID NO: 1562294
guuguaaacuacuuaagaa

SEQ ID NO: 1736628 - RNA, 19 nt, Artificial Sequence
  Description of Artificial Sequence: Synthetic oligonucleotide
  Antisense strand to SEQ ID NO: 1736627
uucuuaaguaguuuacaac

SEQ ID NO: 1736629 - RNA, 19 nt, Artificial Sequence
  Description of Artificial Sequence: Synthetic oligonucleotide
  Sense strand starting at position 2968 of SEQ ID NO: 1562294
uacaguauauuggccagau

SEQ ID NO: 1736630 - RNA, 19 nt, Artificial Sequence
  Description of Artificial Sequence: Synthetic oligonucleotide
  Antisense strand to SEQ ID NO: 1736629
aucuggccaauauacugua

SEQ ID NO: 1736631 - RNA, 19 nt, Artificial Sequence
  Description of Artificial Sequence: Synthetic oligonucleotide
  Sense strand starting at position 2969 of SEQ ID NO: 1562294
acaguauauuggccagauu

SEQ ID NO: 1736632 - RNA, 19 nt, Artificial Sequence
  Description of Artificial Sequence: Synthetic oligonucleotide
  Antisense strand to SEQ ID NO: 1736631
aaucuggccaauauacugu

SEQ ID NO: 1736633 - RNA, 19 nt, Artificial Sequence
  Description of Artificial Sequence: Synthetic oligonucleotide
  Sense strand starting at position 2970 of SEQ ID NO: 1562294
caguauauuggccagauuc

SEQ ID NO: 1736634 - RNA, 19 nt, Artificial Sequence
  Description of Artificial Sequence: Synthetic oligonucleotide
  Antisense strand to SEQ ID NO: 1736633
gaaucuggccaauauacug

SEQ ID NO: 1736635 - RNA, 19 nt, Artificial Sequence
  Description of Artificial Sequence: Synthetic oligonucleotide
  Sense strand starting at position 2972 of SEQ ID NO: 1562294
guauauuggccagauuccu

SEQ ID NO: 1736636 - RNA, 19 nt, Artificial Sequence
  Description of Artificial Sequence: Synthetic oligonucleotide
  Antisense strand to SEQ ID NO: 1736635
aggaaucuggccaauauac

SEQ ID NO: 1736637 - RNA, 19 nt, Artificial Sequence
  Description of Artificial Sequence: Synthetic oligonucleotide
  Sense strand starting at position 3048 of SEQ ID NO: 1562294
uuguauuacugaucuuugu

SEQ ID NO: 1736638 - RNA, 19 nt, Artificial Sequence
  Description of Artificial Sequence: Synthetic oligonucleotide
  Antisense strand to SEQ ID NO: 1736637
acaaagaucaguaauacaa

SEQ ID NO: 1736639 - RNA, 19 nt, Artificial Sequence
  Description of Artificial Sequence: Synthetic oligonucleotide
  Sense strand starting at position 3186 of SEQ ID NO: 1562294
ucuacuuacugguacauuu

SEQ ID NO: 1736640 - RNA, 19 nt, Artificial Sequence
  Description of Artificial Sequence: Synthetic oligonucleotide
  Antisense strand to SEQ ID NO: 1736639
aaauguaccaguaaguaga

SEQ ID NO: 1736641 - RNA, 19 nt, Artificial Sequence
  Description of Artificial Sequence: Synthetic oligonucleotide
  Sense strand starting at position 3302 of SEQ ID NO: 1562294
gccuuuaauucugcaguuu

SEQ ID NO: 1736642 - RNA, 19 nt, Artificial Sequence
  Description of Artificial Sequence: Synthetic oligonucleotide
  Antisense strand to SEQ ID NO: 1736641
aaacugcagaauuaaaggc

SEQ ID NO: 1736643 - RNA, 19 nt, Artificial Sequence
  Description of Artificial Sequence: Synthetic oligonucleotide
  Sense strand starting at position 3404 of SEQ ID NO: 1562294
uuuauaaaucuguggucca

SEQ ID NO: 1736644 - RNA, 19 nt, Artificial Sequence
  Description of Artificial Sequence: Synthetic oligonucleotide
  Antisense strand to SEQ ID NO: 1736643
uggaccacagauuuauaaa

SEQ ID NO: 1736645 - RNA, 19 nt, Artificial Sequence
  Description of Artificial Sequence: Synthetic oligonucleotide
  Sense strand starting at position 3407 of SEQ ID NO: 1562294
auaaaucugugguccacau

SEQ ID NO: 1736646 - RNA, 19 nt, Artificial Sequence
  Description of Artificial Sequence: Synthetic oligonucleotide
  Antisense strand to SEQ ID NO: 1736645
auguggaccacagauuuau

SEQ ID NO: 1736647 - RNA, 19 nt, Artificial Sequence
  Description of Artificial Sequence: Synthetic oligonucleotide
  Sense strand starting at position 3432 of SEQ ID NO: 1562294
gucuuagagcaguaccaua

SEQ ID NO: 1736648 - RNA, 19 nt, Artificial Sequence
  Description of Artificial Sequence: Synthetic oligonucleotide
  Antisense strand to SEQ ID NO: 1736647
uaugguacugcucuaagac

SEQ ID NO: 1736649 - RNA, 19 nt, Artificial Sequence
  Description of Artificial Sequence: Synthetic oligonucleotide
  Sense strand starting at position 3814 of SEQ ID NO: 1562294
auagcugaacacugugaaa

SEQ ID NO: 1736650 - RNA, 19 nt, Artificial Sequence
  Description of Artificial Sequence: Synthetic oligonucleotide
  Antisense strand to SEQ ID NO: 1736649
uuucacaguguucagcuau

SEQ ID NO: 1736651 - RNA, 19 nt, Artificial Sequence
  Description of Artificial Sequence: Synthetic oligonucleotide
  Sense strand starting at position 3816 of SEQ ID NO: 1562294
agcugaacacugugaaaua

SEQ ID NO: 1736652 - RNA, 19 nt, Artificial Sequence
  Description of Artificial Sequence: Synthetic oligonucleotide
  Antisense strand to SEQ ID NO: 1736651
uauuucacaguguucagcu

SEQ ID NO: 1736653 - RNA, 19 nt, Artificial Sequence
  Description of Artificial Sequence: Synthetic oligonucleotide
  Sense strand starting at position 3817 of SEQ ID NO: 1562294
gcugaacacugugaaauag

SEQ ID NO: 1736654 - RNA, 19 nt, Artificial Sequence
  Description of Artificial Sequence: Synthetic oligonucleotide
  Antisense strand to SEQ ID NO: 1736653
cuauuucacaguguucagc

SEQ ID NO: 1736655 - RNA, 19 nt, Artificial Sequence
  Description of Artificial Sequence: Synthetic oligonucleotide
  Sense strand starting at position 3962 of SEQ ID NO: 1562294
gcucucuuuccuugugagu

SEQ ID NO: 1736656 - RNA, 19 nt, Artificial Sequence
  Description of Artificial Sequence: Synthetic oligonucleotide
  Antisense strand to SEQ ID NO: 1736655
acucacaaggaaagagagc

SEQ ID NO: 1736657 - RNA, 19 nt, Artificial Sequence
  Description of Artificial Sequence: Synthetic oligonucleotide
  Sense strand starting at position 3967 of SEQ ID NO: 1562294
cuuuccuugugaguuggaa

SEQ ID NO: 1736658 - RNA, 19 nt, Artificial Sequence
  Description of Artificial Sequence: Synthetic oligonucleotide
  Antisense strand to SEQ ID NO: 1736657
uuccaacucacaaggaaag

SEQ ID NO: 1736659 - RNA, 19 nt, Artificial Sequence
  Description of Artificial Sequence: Synthetic oligonucleotide
  Sense strand starting at position 3969 of SEQ ID NO: 1562294
uuccuugugaguuggaauc

SEQ ID NO: 1736660 - RNA, 19 nt, Artificial Sequence
  Description of Artificial Sequence: Synthetic oligonucleotide
  Antisense strand to SEQ ID NO: 1736659
gauuccaacucacaaggaa

SEQ ID NO: 1736661 - RNA, 19 nt, Artificial Sequence
  Description of Artificial Sequence: Synthetic oligonucleotide
  Sense strand starting at position 70 of SEQ ID NO: 1562297
auuagugguucugcagaau

SEQ ID NO: 1736662 - RNA, 19 nt, Artificial Sequence
  Description of Artificial Sequence: Synthetic oligonucleotide
  Antisense strand to SEQ ID NO: 1736661
auucugcagaaccacuaau

SEQ ID NO: 1736663 - RNA, 19 nt, Artificial Sequence
  Description of Artificial Sequence: Synthetic oligonucleotide
  Sense strand starting at position 73 of SEQ ID NO: 1562297
agugguucugcagaaugaa

SEQ ID NO: 1736664 - RNA, 19 nt, Artificial Sequence
  Description of Artificial Sequence: Synthetic oligonucleotide
  Antisense strand to SEQ ID NO: 1736663
uucauucugcagaaccacu

SEQ ID NO: 1736665 - RNA, 19 nt, Artificial Sequence
  Description of Artificial Sequence: Synthetic oligonucleotide
  Sense strand starting at position 94 of SEQ ID NO: 1562297
ccgcuaagugaacaaagua

SEQ ID NO: 1736666 - RNA, 19 nt, Artificial Sequence
  Description of Artificial Sequence: Synthetic oligonucleotide
  Antisense strand to SEQ ID NO: 1736665
uacuuuguucacuuagcgg

SEQ ID NO: 1736667 - RNA, 19 nt, Artificial Sequence
  Description of Artificial Sequence: Synthetic oligonucleotide
  Sense strand starting at position 126 of SEQ ID NO: 1562297
ugaauugauaggugcaguu

SEQ ID NO: 1736668 - RNA, 19 nt, Artificial Sequence
  Description of Artificial Sequence: Synthetic oligonucleotide
  Antisense strand to SEQ ID NO: 1736667
aacugcaccuaucaauuca

SEQ ID NO: 1736669 - RNA, 19 nt, Artificial Sequence
  Description of Artificial Sequence: Synthetic oligonucleotide
  Sense strand starting at position 202 of SEQ ID NO: 1562297
uggagaugaucagugcaau

SEQ ID NO: 1736670 - RNA, 19 nt, Artificial Sequence
  Description of Artificial Sequence: Synthetic oligonucleotide
  Antisense strand to SEQ ID NO: 1736669
auugcacugaucaucucca

SEQ ID NO: 1736671 - RNA, 19 nt, Artificial Sequence
  Description of Artificial Sequence: Synthetic oligonucleotide
  Sense strand starting at position 203 of SEQ ID NO: 1562297
ggagaugaucagugcaaua

SEQ ID NO: 1736672 - RNA, 19 nt, Artificial Sequence
  Description of Artificial Sequence: Synthetic oligonucleotide
  Antisense strand to SEQ ID NO: 1736671
uauugcacugaucaucucc

SEQ ID NO: 1736673 - RNA, 19 nt, Artificial Sequence
  Description of Artificial Sequence: Synthetic oligonucleotide
  Sense strand starting at position 205 of SEQ ID NO: 1562297
agaugaucagugcaauacu

SEQ ID NO: 1736674 - RNA, 19 nt, Artificial Sequence
  Description of Artificial Sequence: Synthetic oligonucleotide
  Antisense strand to SEQ ID NO: 1736673
aguauugcacugaucaucu

SEQ ID NO: 1736675 - RNA, 19 nt, Artificial Sequence
  Description of Artificial Sequence: Synthetic oligonucleotide
  Sense strand starting at position 220 of SEQ ID NO: 1562297
uacuuacaucugugaggca

SEQ ID NO: 1736676 - RNA, 19 nt, Artificial Sequence
  Description of Artificial Sequence: Synthetic oligonucleotide
  Antisense strand to SEQ ID NO: 1736675
ugccucacagauguaagua

SEQ ID NO: 1736677 - RNA, 19 nt, Artificial Sequence
  Description of Artificial Sequence: Synthetic oligonucleotide
  Sense strand starting at position 343 of SEQ ID NO: 1562297
accgaugacucccuacaaa

SEQ ID NO: 1736678 - RNA, 19 nt, Artificial Sequence
  Description of Artificial Sequence: Synthetic oligonucleotide
  Antisense strand to SEQ ID NO: 1736677
uuuguagggagucaucggu

SEQ ID NO: 1736679 - RNA, 19 nt, Artificial Sequence
  Description of Artificial Sequence: Synthetic oligonucleotide
  Sense strand starting at position 397 of SEQ ID NO: 1562297
aaggaagguugcccagaua

SEQ ID NO: 1736680 - RNA, 19 nt, Artificial Sequence
  Description of Artificial Sequence: Synthetic oligonucleotide
  Antisense strand to SEQ ID NO: 1736679
uaucugggcaaccuuccuu

SEQ ID NO: 1736681 - RNA, 19 nt, Artificial Sequence
  Description of Artificial Sequence: Synthetic oligonucleotide
  Sense strand starting at position 400 of SEQ ID NO: 1562297
gaagguugcccagauaacu

SEQ ID NO: 1736682 - RNA, 19 nt, Artificial Sequence
  Description of Artificial Sequence: Synthetic oligonucleotide
  Antisense strand to SEQ ID NO: 1736681
aguuaucugggcaaccuuc

SEQ ID NO: 1736683 - RNA, 19 nt, Artificial Sequence
  Description of Artificial Sequence: Synthetic oligonucleotide
  Sense strand starting at position 417 of SEQ ID NO: 1562297
cuggcaaagguguaaacaa

SEQ ID NO: 1736684 - RNA, 19 nt, Artificial Sequence
  Description of Artificial Sequence: Synthetic oligonucleotide
  Antisense strand to SEQ ID NO: 1736683
uuguuuacaccuuugccag

SEQ ID NO: 1736685 - RNA, 19 nt, Artificial Sequence
  Description of Artificial Sequence: Synthetic oligonucleotide
  Sense strand starting at position 452 of SEQ ID NO: 1562297
ucaacuaaacuguauguuu

SEQ ID NO: 1736686 - RNA, 19 nt, Artificial Sequence
  Description of Artificial Sequence: Synthetic oligonucleotide
  Antisense strand to SEQ ID NO: 1736685
aaacauacaguuuaguuga

SEQ ID NO: 1736687 - RNA, 19 nt, Artificial Sequence
  Description of Artificial Sequence: Synthetic oligonucleotide
  Sense strand starting at position 508 of SEQ ID NO: 1562297
gguugcuccauuuguaaga

SEQ ID NO: 1736688 - RNA, 19 nt, Artificial Sequence
  Description of Artificial Sequence: Synthetic oligonucleotide
  Antisense strand to SEQ ID NO: 1736687
ucuuacaaauggagcaacc

SEQ ID NO: 1736689 - RNA, 19 nt, Artificial Sequence
  Description of Artificial Sequence: Synthetic oligonucleotide
  Sense strand starting at position 510 of SEQ ID NO: 1562297
uugcuccauuuguaagaca

SEQ ID NO: 1736690 - RNA, 19 nt, Artificial Sequence
  Description of Artificial Sequence: Synthetic oligonucleotide
  Antisense strand to SEQ ID NO: 1736689
ugucuuacaaauggagcaa

SEQ ID NO: 1736691 - RNA, 19 nt, Artificial Sequence
  Description of Artificial Sequence: Synthetic oligonucleotide
  Sense strand starting at position 545 of SEQ ID NO: 1562297
uccucauggucccugagua

SEQ ID NO: 1736692 - RNA, 19 nt, Artificial Sequence
  Description of Artificial Sequence: Synthetic oligonucleotide
  Antisense strand to SEQ ID NO: 1736691
uacucagggaccaugagga

SEQ ID NO: 1736693 - RNA, 19 nt, Artificial Sequence
  Description of Artificial Sequence: Synthetic oligonucleotide
  Sense strand starting at position 555 of SEQ ID NO: 1562297
cccugaguagcagaagguu

SEQ ID NO: 1736694 - RNA, 19 nt, Artificial Sequence
  Description of Artificial Sequence: Synthetic oligonucleotide
  Antisense strand to SEQ ID NO: 1736693
aaccuucugcuacucaggg

SEQ ID NO: 1736695 - RNA, 19 nt, Artificial Sequence
  Description of Artificial Sequence: Synthetic oligonucleotide
  Sense strand starting at position 602 of SEQ ID NO: 1562297
gggcgucuuuauaagaggu

SEQ ID NO: 1736696 - RNA, 19 nt, Artificial Sequence
  Description of Artificial Sequence: Synthetic oligonucleotide
  Antisense strand to SEQ ID NO: 1736695
accucuuauaaagacgccc

SEQ ID NO: 1736697 - RNA, 19 nt, Artificial Sequence
  Description of Artificial Sequence: Synthetic oligonucleotide
  Sense strand starting at position 606 of SEQ ID NO: 1562297
gucuuuauaagaggucaag

SEQ ID NO: 1736698 - RNA, 19 nt, Artificial Sequence
  Description of Artificial Sequence: Synthetic oligonucleotide
  Antisense strand to SEQ ID NO: 1736697
cuugaccucuuauaaagac

SEQ ID NO: 1736699 - RNA, 19 nt, Artificial Sequence
  Description of Artificial Sequence: Synthetic oligonucleotide
  Sense strand starting at position 747 of SEQ ID NO: 1562297
agcaaaugacacgggaauu

SEQ ID NO: 1736700 - RNA, 19 nt, Artificial Sequence
  Description of Artificial Sequence: Synthetic oligonucleotide
  Antisense strand to SEQ ID NO: 1736699
aauucccgugucauuugcu

SEQ ID NO: 1736701 - RNA, 19 nt, Artificial Sequence
  Description of Artificial Sequence: Synthetic oligonucleotide
  Sense strand starting at position 778 of SEQ ID NO: 1562297
ccagauaugccagggcaga

SEQ ID NO: 1736702 - RNA, 19 nt, Artificial Sequence
  Description of Artificial Sequence: Synthetic oligonucleotide
  Antisense strand to SEQ ID NO: 1736701
ucugcccuggcauaucugg

SEQ ID NO: 1736703 - RNA, 19 nt, Artificial Sequence
  Description of Artificial Sequence: Synthetic oligonucleotide
  Sense strand starting at position 1120 of SEQ ID NO: 1562297
acugauuaccaacguguuu

SEQ ID NO: 1736704 - RNA, 19 nt, Artificial Sequence
  Description of Artificial Sequence: Synthetic oligonucleotide
  Antisense strand to SEQ ID NO: 1736703
aaacacguugguaaucagu

SEQ ID NO: 1736705 - RNA, 19 nt, Artificial Sequence
  Description of Artificial Sequence: Synthetic oligonucleotide
  Sense strand starting at position 1142 of SEQ ID NO: 1562297
gacucaguccuggaaagcu

SEQ ID NO: 1736706 - RNA, 19 nt, Artificial Sequence
  Description of Artificial Sequence: Synthetic oligonucleotide
  Antisense strand to SEQ ID NO: 1736705
agcuuuccaggacugaguc

SEQ ID NO: 1736707 - RNA, 19 nt, Artificial Sequence
  Description of Artificial Sequence: Synthetic oligonucleotide
  Sense strand starting at position 1151 of SEQ ID NO: 1562297
cuggaaagcucaguucucu

SEQ ID NO: 1736708 - RNA, 19 nt, Artificial Sequence
  Description of Artificial Sequence: Synthetic oligonucleotide
  Antisense strand to SEQ ID NO: 1736707
agagaacugagcuuuccag

SEQ ID NO: 1736709 - RNA, 19 nt, Artificial Sequence
  Description of Artificial Sequence: Synthetic oligonucleotide
  Sense strand starting at position 2406 of SEQ ID NO: 1562297
cucuaaacaucguuacaug

SEQ ID NO: 1736710 - RNA, 19 nt, Artificial Sequence
  Description of Artificial Sequence: Synthetic oligonucleotide
  Antisense strand to SEQ ID NO: 1736709
cauguaacgauguuuagag

SEQ ID NO: 1736711 - RNA, 19 nt, Artificial Sequence
  Description of Artificial Sequence: Synthetic oligonucleotide
  Sense strand starting at position 2480 of SEQ ID NO: 1562297
aauuguaucggugagagaa

SEQ ID NO: 1736712 - RNA, 19 nt, Artificial Sequence
  Description of Artificial Sequence: Synthetic oligonucleotide
  Antisense strand to SEQ ID NO: 1736711
uucucucaccgauacaauu

SEQ ID NO: 1736713 - RNA, 19 nt, Artificial Sequence
  Description of Artificial Sequence: Synthetic oligonucleotide
  Sense strand starting at position 2493 of SEQ ID NO: 1562297
agagaagguuggccuugaa

SEQ ID NO: 1736714 - RNA, 19 nt, Artificial Sequence
  Description of Artificial Sequence: Synthetic oligonucleotide
  Antisense strand to SEQ ID NO: 1736713
uucaaggccaaccuucucu

SEQ ID NO: 1736715 - RNA, 19 nt, Artificial Sequence
  Description of Artificial Sequence: Synthetic oligonucleotide
  Sense strand starting at position 2496 of SEQ ID NO: 1562297
gaagguuggccuugaagga

SEQ ID NO: 1736716 - RNA, 19 nt, Artificial Sequence
  Description of Artificial Sequence: Synthetic oligonucleotide
  Antisense strand to SEQ ID NO: 1736715
uccuucaaggccaaccuuc

SEQ ID NO: 1736717 - RNA, 19 nt, Artificial Sequence
  Description of Artificial Sequence: Synthetic oligonucleotide
  Sense strand starting at position 2554 of SEQ ID NO: 1562297
gcccuuaauuauuccugga

SEQ ID NO: 1736718 - RNA, 19 nt, Artificial Sequence
  Description of Artificial Sequence: Synthetic oligonucleotide
  Antisense strand to SEQ ID NO: 1736717
uccaggaauaauuaagggc

SEQ ID NO: 1736719 - RNA, 19 nt, Artificial Sequence
  Description of Artificial Sequence: Synthetic oligonucleotide
  Sense strand starting at position 2558 of SEQ ID NO: 1562297
uuaauuauuccuggauaag

SEQ ID NO: 1736720 - RNA, 19 nt, Artificial Sequence
  Description of Artificial Sequence: Synthetic oligonucleotide
  Antisense strand to SEQ ID NO: 1736719
cuuauccaggaauaauuaa

SEQ ID NO: 1736721 - RNA, 19 nt, Artificial Sequence
  Description of Artificial Sequence: Synthetic oligonucleotide
  Sense strand starting at position 2580 of SEQ ID NO: 1562297
agguaacuuugggagacau

SEQ ID NO: 1736722 - RNA, 19 nt, Artificial Sequence
  Description of Artificial Sequence: Synthetic oligonucleotide
  Antisense strand to SEQ ID NO: 1736721
augucucccaaaguuaccu

SEQ ID NO: 1736723 - RNA, 19 nt, Artificial Sequence
  Description of Artificial Sequence: Synthetic oligonucleotide
  Sense strand starting at position 3009 of SEQ ID NO: 1562297
uaaggucagugcuugaaau

SEQ ID NO: 1736724 - RNA, 19 nt, Artificial Sequence
  Description of Artificial Sequence: Synthetic oligonucleotide
  Antisense strand to SEQ ID NO: 1736723
auuucaagcacugaccuua

SEQ ID NO: 1736725 - RNA, 19 nt, Artificial Sequence
  Description of Artificial Sequence: Synthetic oligonucleotide
  Sense strand starting at position 3010 of SEQ ID NO: 1562297
aaggucagugcuugaaaua

SEQ ID NO: 1736726 - RNA, 19 nt, Artificial Sequence
  Description of Artificial Sequence: Synthetic oligonucleotide
  Antisense strand to SEQ ID NO: 1736725
uauuucaagcacugaccuu

SEQ ID NO: 1736727 - RNA, 19 nt, Artificial Sequence
  Description of Artificial Sequence: Synthetic oligonucleotide
  Sense strand starting at position 3011 of SEQ ID NO: 1562297
aggucagugcuugaaauau

SEQ ID NO: 1736728 - RNA, 19 nt, Artificial Sequence
  Description of Artificial Sequence: Synthetic oligonucleotide
  Antisense strand to SEQ ID NO: 1736727
auauuucaagcacugaccu

SEQ ID NO: 1736729 - RNA, 19 nt, Artificial Sequence
  Description of Artificial Sequence: Synthetic oligonucleotide
  Sense strand starting at position 3320 of SEQ ID NO: 1562297
caauuccguugccuugaua

SEQ ID NO: 1736730 - RNA, 19 nt, Artificial Sequence
  Description of Artificial Sequence: Synthetic oligonucleotide
  Antisense strand to SEQ ID NO: 1736729
uaucaaggcaacggaauug

SEQ ID NO: 1736731 - RNA, 19 nt, Artificial Sequence
  Description of Artificial Sequence: Synthetic oligonucleotide
  Sense strand starting at position 3323 of SEQ ID NO: 1562297
uuccguugccuugauaaau

SEQ ID NO: 1736732 - RNA, 19 nt, Artificial Sequence
  Description of Artificial Sequence: Synthetic oligonucleotide
  Antisense strand to SEQ ID NO: 1736731
auuuaucaaggcaacggaa

SEQ ID NO: 1736733 - RNA, 19 nt, Artificial Sequence
  Description of Artificial Sequence: Synthetic oligonucleotide
  Sense strand starting at position 3437 of SEQ ID NO: 1562297
uguaaacauucgucagcca

SEQ ID NO: 1736734 - RNA, 19 nt, Artificial Sequence
  Description of Artificial Sequence: Synthetic oligonucleotide
  Antisense strand to SEQ ID NO: 1736733
uggcugacgaauguuuaca

SEQ ID NO: 1736735 - RNA, 19 nt, Artificial Sequence
  Description of Artificial Sequence: Synthetic oligonucleotide
  Sense strand starting at position 3438 of SEQ ID NO: 1562297
guaaacauucgucagccau

SEQ ID NO: 1736736 - RNA, 19 nt, Artificial Sequence
  Description of Artificial Sequence: Synthetic oligonucleotide
  Antisense strand to SEQ ID NO: 1736735
auggcugacgaauguuuac

SEQ ID NO: 1736737 - RNA, 19 nt, Artificial Sequence
  Description of Artificial Sequence: Synthetic oligonucleotide
  Sense strand starting at position 3742 of SEQ ID NO: 1562297
gcagcuuagcagcugugaa

SEQ ID NO: 1736738 - RNA, 19 nt, Artificial Sequence
  Description of Artificial Sequence: Synthetic oligonucleotide
  Antisense strand to SEQ ID NO: 1736737
uucacagcugcuaagcugc

SEQ ID NO: 1736739 - RNA, 19 nt, Artificial Sequence
  Description of Artificial Sequence: Synthetic oligonucleotide
  Sense strand starting at position 3778 of SEQ ID NO: 1562297
aggacucaaucuguuuaga

SEQ ID NO: 1736740 - RNA, 19 nt, Artificial Sequence
  Description of Artificial Sequence: Synthetic oligonucleotide
  Antisense strand to SEQ ID NO: 1736739
ucuaaacagauugaguccu

SEQ ID NO: 1736741 - RNA, 19 nt, Artificial Sequence
  Description of Artificial Sequence: Synthetic oligonucleotide
  Sense strand starting at position 108 of SEQ ID NO: 1562298
ggaagacaggcuugagacu

SEQ ID NO: 1736742 - RNA, 19 nt, Artificial Sequence
  Description of Artificial Sequence: Synthetic oligonucleotide
  Antisense strand to SEQ ID NO: 1736741
agucucaagccugucuucc

SEQ ID NO: 1736743 - RNA, 19 nt, Artificial Sequence
  Description of Artificial Sequence: Synthetic oligonucleotide
  Sense strand starting at position 121 of SEQ ID NO: 1562298
gagacuggaucucagauca

SEQ ID NO: 1736744 - RNA, 19 nt, Artificial Sequence
  Description of Artificial Sequence: Synthetic oligonucleotide
  Antisense strand to SEQ ID NO: 1736743
ugaucugagauccagucuc

SEQ ID NO: 1736745 - RNA, 19 nt, Artificial Sequence
  Description of Artificial Sequence: Synthetic oligonucleotide
  Sense strand starting at position 131 of SEQ ID NO: 1562298
cucagaucacauugguacu

SEQ ID NO: 1736746 - RNA, 19 nt, Artificial Sequence
  Description of Artificial Sequence: Synthetic oligonucleotide
  Antisense strand to SEQ ID NO: 1736745
aguaccaaugugaucugag

SEQ ID NO: 1736747 - RNA, 19 nt, Artificial Sequence
  Description of Artificial Sequence: Synthetic oligonucleotide
  Sense strand starting at position 268 of SEQ ID NO: 1562298
agaugcgucccauguauaa

SEQ ID NO: 1736748 - RNA, 19 nt, Artificial Sequence
  Description of Artificial Sequence: Synthetic oligonucleotide
  Antisense strand to SEQ ID NO: 1736747
uuauacaugggacgcaucu

SEQ ID NO: 1736749 - RNA, 19 nt, Artificial Sequence
  Description of Artificial Sequence: Synthetic oligonucleotide
  Sense strand starting at position 270 of SEQ ID NO: 1562298
augcgucccauguauaagu

SEQ ID NO: 1736750 - RNA, 19 nt, Artificial Sequence
  Description of Artificial Sequence: Synthetic oligonucleotide
  Antisense strand to SEQ ID NO: 1736749
acuuauacaugggacgcau

SEQ ID NO: 1736751 - RNA, 19 nt, Artificial Sequence
  Description of Artificial Sequence: Synthetic oligonucleotide
  Sense strand starting at position 455 of SEQ ID NO: 1562298
aaauaauugcgcuggacau

SEQ ID NO: 1736752 - RNA, 19 nt, Artificial Sequence
  Description of Artificial Sequence: Synthetic oligonucleotide
  Antisense strand to SEQ ID NO: 1736751
auguccagcgcaauuauuu

SEQ ID NO: 1736753 - RNA, 19 nt, Artificial Sequence
  Description of Artificial Sequence: Synthetic oligonucleotide
  Sense strand starting at position 456 of SEQ ID NO: 1562298
aauaauugcgcuggacaug

SEQ ID NO: 1736754 - RNA, 19 nt, Artificial Sequence
  Description of Artificial Sequence: Synthetic oligonucleotide
  Antisense strand to SEQ ID NO: 1736753
cauguccagcgcaauuauu

SEQ ID NO: 1736755 - RNA, 19 nt, Artificial Sequence
  Description of Artificial Sequence: Synthetic oligonucleotide
  Sense strand starting at position 767 of SEQ ID NO: 1562298
aaacaauugguaugcgauc

SEQ ID NO: 1736756 - RNA, 19 nt, Artificial Sequence
  Description of Artificial Sequence: Synthetic oligonucleotide
  Antisense strand to SEQ ID NO: 1736755
gaucgcauaccaauuguuu

SEQ ID NO: 1736757 - RNA, 19 nt, Artificial Sequence
  Description of Artificial Sequence: Synthetic oligonucleotide
  Sense strand starting at position 1000 of SEQ ID NO: 1562298
gauuccuuuccaggugaga

SEQ ID NO: 1736758 - RNA, 19 nt, Artificial Sequence
  Description of Artificial Sequence: Synthetic oligonucleotide
  Antisense strand to SEQ ID NO: 1736757
ucucaccuggaaaggaauc

SEQ ID NO: 1736759 - RNA, 19 nt, Artificial Sequence
  Description of Artificial Sequence: Synthetic oligonucleotide
  Sense strand starting at position 1134 of SEQ ID NO: 1562298
auuagugguucugcagaau

SEQ ID NO: 1736760 - RNA, 19 nt, Artificial Sequence
  Description of Artificial Sequence: Synthetic oligonucleotide
  Antisense strand to SEQ ID NO: 1736759
auucugcagaaccacuaau

SEQ ID NO: 1736761 - RNA, 19 nt, Artificial Sequence
  Description of Artificial Sequence: Synthetic oligonucleotide
  Sense strand starting at position 1137 of SEQ ID NO: 1562298
agugguucugcagaaugaa

SEQ ID NO: 1736762 - RNA, 19 nt, Artificial Sequence
  Description of Artificial Sequence: Synthetic oligonucleotide
  Antisense strand to SEQ ID NO: 1736761
uucauucugcagaaccacu

SEQ ID NO: 1736763 - RNA, 19 nt, Artificial Sequence
  Description of Artificial Sequence: Synthetic oligonucleotide
  Sense strand starting at position 1158 of SEQ ID NO: 1562298
ccgcuaagugaacaaagua

SEQ ID NO: 1736764 - RNA, 19 nt, Artificial Sequence
  Description of Artificial Sequence: Synthetic oligonucleotide
  Antisense strand to SEQ ID NO: 1736763
uacuuuguucacuuagcgg

SEQ ID NO: 1736765 - RNA, 19 nt, Artificial Sequence
  Description of Artificial Sequence: Synthetic oligonucleotide
  Sense strand starting at position 1190 of SEQ ID NO: 1562298
ugaauugauaggugcaguu

SEQ ID NO: 1736766 - RNA, 19 nt, Artificial Sequence
  Description of Artificial Sequence: Synthetic oligonucleotide
  Antisense strand to SEQ ID NO: 1736765
aacugcaccuaucaauuca

SEQ ID NO: 1736767 - RNA, 19 nt, Artificial Sequence
  Description of Artificial Sequence: Synthetic oligonucleotide
  Sense strand starting at position 1266 of SEQ ID NO: 1562298
uggagaugaucagugcaau

SEQ ID NO: 1736768 - RNA, 19 nt, Artificial Sequence
  Description of Artificial Sequence: Synthetic oligonucleotide
  Antisense strand to SEQ ID NO: 1736767
auugcacugaucaucucca

SEQ ID NO: 1736769 - RNA, 19 nt, Artificial Sequence
  Description of Artificial Sequence: Synthetic oligonucleotide
  Sense strand starting at position 1267 of SEQ ID NO: 1562298
ggagaugaucagugcaaua

SEQ ID NO: 1736770 - RNA, 19 nt, Artificial Sequence
  Description of Artificial Sequence: Synthetic oligonucleotide
  Antisense strand to SEQ ID NO: 1736769
uauugcacugaucaucucc

SEQ ID NO: 1736771 - RNA, 19 nt, Artificial Sequence
  Description of Artificial Sequence: Synthetic oligonucleotide
  Sense strand starting at position 1269 of SEQ ID NO: 1562298
agaugaucagugcaauacu

SEQ ID NO: 1736772 - RNA, 19 nt, Artificial Sequence
  Description of Artificial Sequence: Synthetic oligonucleotide
  Antisense strand to SEQ ID NO: 1736771
aguauugcacugaucaucu

SEQ ID NO: 1736773 - RNA, 19 nt, Artificial Sequence
  Description of Artificial Sequence: Synthetic oligonucleotide
  Sense strand starting at position 1284 of SEQ ID NO: 1562298
uacuuacaucugugaggca

SEQ ID NO: 1736774 - RNA, 19 nt, Artificial Sequence
  Description of Artificial Sequence: Synthetic oligonucleotide
  Antisense strand to SEQ ID NO: 1736773
ugccucacagauguaagua

SEQ ID NO: 1736775 - RNA, 19 nt, Artificial Sequence
  Description of Artificial Sequence: Synthetic oligonucleotide
  Sense strand starting at position 1407 of SEQ ID NO: 1562298
accgaugacucccuacaaa

SEQ ID NO: 1736776 - RNA, 19 nt, Artificial Sequence
  Description of Artificial Sequence: Synthetic oligonucleotide
  Antisense strand to SEQ ID NO: 1736775
uuuguagggagucaucggu

SEQ ID NO: 1736777 - RNA, 19 nt, Artificial Sequence
  Description of Artificial Sequence: Synthetic oligonucleotide
  Sense strand starting at position 1461 of SEQ ID NO: 1562298
aaggaagguugcccagaua

SEQ ID NO: 1736778 - RNA, 19 nt, Artificial Sequence
  Description of Artificial Sequence: Synthetic oligonucleotide
  Antisense strand to SEQ ID NO: 1736777
uaucugggcaaccuuccuu

SEQ ID NO: 1736779 - RNA, 19 nt, Artificial Sequence
  Description of Artificial Sequence: Synthetic oligonucleotide
  Sense strand starting at position 1464 of SEQ ID NO: 1562298
gaagguugcccagauaacu

SEQ ID NO: 1736780 - RNA, 19 nt, Artificial Sequence
  Description of Artificial Sequence: Synthetic oligonucleotide
  Antisense strand to SEQ ID NO: 1736779
aguuaucugggcaaccuuc

SEQ ID NO: 1736781 - RNA, 19 nt, Artificial Sequence
  Description of Artificial Sequence: Synthetic oligonucleotide
  Sense strand starting at position 1481 of SEQ ID NO: 1562298
cuggcaaagguguaaacaa

SEQ ID NO: 1736782 - RNA, 19 nt, Artificial Sequence
  Description of Artificial Sequence: Synthetic oligonucleotide
  Antisense strand to SEQ ID NO: 1736781
uuguuuacaccuuugccag

SEQ ID NO: 1736783 - RNA, 19 nt, Artificial Sequence
  Description of Artificial Sequence: Synthetic oligonucleotide
  Sense strand starting at position 1516 of SEQ ID NO: 1562298
ucaacuaaacuguauguuu

SEQ ID NO: 1736784 - RNA, 19 nt, Artificial Sequence
  Description of Artificial Sequence: Synthetic oligonucleotide
  Antisense strand to SEQ ID NO: 1736783
aaacauacaguuuaguuga

SEQ ID NO: 1736785 - RNA, 19 nt, Artificial Sequence
  Description of Artificial Sequence: Synthetic oligonucleotide
  Sense strand starting at position 1572 of SEQ ID NO: 1562298
gguugcuccauuuguaaga

SEQ ID NO: 1736786 - RNA, 19 nt, Artificial Sequence
  Description of Artificial Sequence: Synthetic oligonucleotide
  Antisense strand to SEQ ID NO: 1736785
ucuuacaaauggagcaacc

SEQ ID NO: 1736787 - RNA, 19 nt, Artificial Sequence
  Description of Artificial Sequence: Synthetic oligonucleotide
  Sense strand starting at position 1574 of SEQ ID NO: 1562298
uugcuccauuuguaagaca

SEQ ID NO: 1736788 - RNA, 19 nt, Artificial Sequence
  Description of Artificial Sequence: Synthetic oligonucleotide
  Antisense strand to SEQ ID NO: 1736787
ugucuuacaaauggagcaa

SEQ ID NO: 1736789 - RNA, 19 nt, Artificial Sequence
  Description of Artificial Sequence: Synthetic oligonucleotide
  Sense strand starting at position 1609 of SEQ ID NO: 1562298
uccucauggucccugagua

SEQ ID NO: 1736790 - RNA, 19 nt, Artificial Sequence
  Description of Artificial Sequence: Synthetic oligonucleotide
  Antisense strand to SEQ ID NO: 1736789
uacucagggaccaugagga

SEQ ID NO: 1736791 - RNA, 19 nt, Artificial Sequence
  Description of Artificial Sequence: Synthetic oligonucleotide
  Sense strand starting at position 1619 of SEQ ID NO: 1562298
cccugaguagcagaagguu

SEQ ID NO: 1736792 - RNA, 19 nt, Artificial Sequence
  Description of Artificial Sequence: Synthetic oligonucleotide
  Antisense strand to SEQ ID NO: 1736791
aaccuucugcuacucaggg

SEQ ID NO: 1736793 - RNA, 19 nt, Artificial Sequence
  Description of Artificial Sequence: Synthetic oligonucleotide
  Sense strand starting at position 1666 of SEQ ID NO: 1562298
gggcgucuuuauaagaggu

SEQ ID NO: 1736794 - RNA, 19 nt, Artificial Sequence
  Description of Artificial Sequence: Synthetic oligonucleotide
  Antisense strand to SEQ ID NO: 1736793
accucuuauaaagacgccc

SEQ ID NO: 1736795 - RNA, 19 nt, Artificial Sequence
  Description of Artificial Sequence: Synthetic oligonucleotide
  Sense strand starting at position 1670 of SEQ ID NO: 1562298
gucuuuauaagaggucaag

SEQ ID NO: 1736796 - RNA, 19 nt, Artificial Sequence
  Description of Artificial Sequence: Synthetic oligonucleotide
  Antisense strand to SEQ ID NO: 1736795
cuugaccucuuauaaagac

SEQ ID NO: 1736797 - RNA, 19 nt, Artificial Sequence
  Description of Artificial Sequence: Synthetic oligonucleotide
  Sense strand starting at position 1811 of SEQ ID NO: 1562298
agcaaaugacacgggaauu

SEQ ID NO: 1736798 - RNA, 19 nt, Artificial Sequence
  Description of Artificial Sequence: Synthetic oligonucleotide
  Antisense strand to SEQ ID NO: 1736797
aauucccgugucauuugcu

SEQ ID NO: 1736799 - RNA, 19 nt, Artificial Sequence
  Description of Artificial Sequence: Synthetic oligonucleotide
  Sense strand starting at position 1842 of SEQ ID NO: 1562298
ccagauaugccagggcaga

SEQ ID NO: 1736800 - RNA, 19 nt, Artificial Sequence
  Description of Artificial Sequence: Synthetic oligonucleotide
  Antisense strand to SEQ ID NO: 1736799
ucugcccuggcauaucugg

SEQ ID NO: 1736801 - RNA, 19 nt, Artificial Sequence
  Description of Artificial Sequence: Synthetic oligonucleotide
  Sense strand starting at position 2184 of SEQ ID NO: 1562298
acugauuaccaacguguuu

SEQ ID NO: 1736802 - RNA, 19 nt, Artificial Sequence
  Description of Artificial Sequence: Synthetic oligonucleotide
  Antisense strand to SEQ ID NO: 1736801
aaacacguugguaaucagu

SEQ ID NO: 1736803 - RNA, 19 nt, Artificial Sequence
  Description of Artificial Sequence: Synthetic oligonucleotide
  Sense strand starting at position 2206 of SEQ ID NO: 1562298
gacucaguccuggaaagcu

SEQ ID NO: 1736804 - RNA, 19 nt, Artificial Sequence
  Description of Artificial Sequence: Synthetic oligonucleotide
  Antisense strand to SEQ ID NO: 1736803
agcuuuccaggacugaguc

SEQ ID NO: 1736805 - RNA, 19 nt, Artificial Sequence
  Description of Artificial Sequence: Synthetic oligonucleotide
  Sense strand starting at position 2215 of SEQ ID NO: 1562298
cuggaaagcucaguucucu

SEQ ID NO: 1736806 - RNA, 19 nt, Artificial Sequence
  Description of Artificial Sequence: Synthetic oligonucleotide
  Antisense strand to SEQ ID NO: 1736805
agagaacugagcuuuccag

SEQ ID NO: 1736807 - RNA, 19 nt, Artificial Sequence
  Description of Artificial Sequence: Synthetic oligonucleotide
  Sense strand starting at position 3470 of SEQ ID NO: 1562298
cucuaaacaucguuacaug

SEQ ID NO: 1736808 - RNA, 19 nt, Artificial Sequence
  Description of Artificial Sequence: Synthetic oligonucleotide
  Antisense strand to SEQ ID NO: 1736807
cauguaacgauguuuagag

SEQ ID NO: 1736809 - RNA, 19 nt, Artificial Sequence
  Description of Artificial Sequence: Synthetic oligonucleotide
  Sense strand starting at position 3544 of SEQ ID NO: 1562298
aauuguaucggugagagaa

SEQ ID NO: 1736810 - RNA, 19 nt, Artificial Sequence
  Description of Artificial Sequence: Synthetic oligonucleotide
  Antisense strand to SEQ ID NO: 1736809
uucucucaccgauacaauu

SEQ ID NO: 1736811 - RNA, 19 nt, Artificial Sequence
  Description of Artificial Sequence: Synthetic oligonucleotide
  Sense strand starting at position 3557 of SEQ ID NO: 1562298
agagaagguuggccuugaa

SEQ ID NO: 1736812 - RNA, 19 nt, Artificial Sequence
  Description of Artificial Sequence: Synthetic oligonucleotide
  Antisense strand to SEQ ID NO: 1736811
uucaaggccaaccuucucu

SEQ ID NO: 1736813 - RNA, 19 nt, Artificial Sequence
  Description of Artificial Sequence: Synthetic oligonucleotide
  Sense strand starting at position 3560 of SEQ ID NO: 1562298
gaagguuggccuugaagga

SEQ ID NO: 1736814 - RNA, 19 nt, Artificial Sequence
  Description of Artificial Sequence: Synthetic oligonucleotide
  Antisense strand to SEQ ID NO: 1736813
uccuucaaggccaaccuuc

SEQ ID NO: 1736815 - RNA, 19 nt, Artificial Sequence
  Description of Artificial Sequence: Synthetic oligonucleotide
  Sense strand starting at position 3618 of SEQ ID NO: 1562298
gcccuuaauuauuccugga

SEQ ID NO: 1736816 - RNA, 19 nt, Artificial Sequence
  Description of Artificial Sequence: Synthetic oligonucleotide
  Antisense strand to SEQ ID NO: 1736815
uccaggaauaauuaagggc

SEQ ID NO: 1736817 - RNA, 19 nt, Artificial Sequence
  Description of Artificial Sequence: Synthetic oligonucleotide
  Sense strand starting at position 3622 of SEQ ID NO: 1562298
uuaauuauuccuggauaag

SEQ ID NO: 1736818 - RNA, 19 nt, Artificial Sequence
  Description of Artificial Sequence: Synthetic oligonucleotide
  Antisense strand to SEQ ID NO: 1736817
cuuauccaggaauaauuaa

SEQ ID NO: 1736819 - RNA, 19 nt, Artificial Sequence
  Description of Artificial Sequence: Synthetic oligonucleotide
  Sense strand starting at position 3644 of SEQ ID NO: 1562298
agguaacuuugggagacau

SEQ ID NO: 1736820 - RNA, 19 nt, Artificial Sequence
  Description of Artificial Sequence: Synthetic oligonucleotide
  Antisense strand to SEQ ID NO: 1736819
augucucccaaaguuaccu

SEQ ID NO: 1736821 - RNA, 19 nt, Artificial Sequence
  Description of Artificial Sequence: Synthetic oligonucleotide
  Sense strand starting at position 17 of SEQ ID NO: 1562299
ggcuuucggucacuacuua

SEQ ID NO: 1736822 - RNA, 19 nt, Artificial Sequence
  Description of Artificial Sequence: Synthetic oligonucleotide
  Antisense strand to SEQ ID NO: 1736821
uaaguagugaccgaaagcc

SEQ ID NO: 1736823 - RNA, 19 nt, Artificial Sequence
  Description of Artificial Sequence: Synthetic oligonucleotide
  Sense strand starting at position 350 of SEQ ID NO: 1562299
uuccgcuacccauaagaaa

SEQ ID NO: 1736824 - RNA, 19 nt, Artificial Sequence
  Description of Artificial Sequence: Synthetic oligonucleotide
  Antisense strand to SEQ ID NO: 1736823
uuucuuauggguagcggaa

SEQ ID NO: 1736825 - RNA, 19 nt, Artificial Sequence
  Description of Artificial Sequence: Synthetic oligonucleotide
  Sense strand starting at position 772 of SEQ ID NO: 1562299
ccagaaauaccacgcaacu

SEQ ID NO: 1736826 - RNA, 19 nt, Artificial Sequence
  Description of Artificial Sequence: Synthetic oligonucleotide
  Antisense strand to SEQ ID NO: 1736825
aguugcgugguauuucugg

SEQ ID NO: 1736827 - RNA, 19 nt, Artificial Sequence
  Description of Artificial Sequence: Synthetic oligonucleotide
  Sense strand starting at position 795 of SEQ ID NO: 1562299
aaaugauguugagaacuga

SEQ ID NO: 1736828 - RNA, 19 nt, Artificial Sequence
  Description of Artificial Sequence: Synthetic oligonucleotide
  Antisense strand to SEQ ID NO: 1736827
ucaguucucaacaucauuu

SEQ ID NO: 1736829 - RNA, 19 nt, Artificial Sequence
  Description of Artificial Sequence: Synthetic oligonucleotide
  Sense strand starting at position 821 of SEQ ID NO: 1562299
ggaauuacuucccaugcgu

SEQ ID NO: 1736830 - RNA, 19 nt, Artificial Sequence
  Description of Artificial Sequence: Synthetic oligonucleotide
  Antisense strand to SEQ ID NO: 1736829
acgcaugggaaguaauucc

SEQ ID NO: 1736831 - RNA, 19 nt, Artificial Sequence
  Description of Artificial Sequence: Synthetic oligonucleotide
  Sense strand starting at position 830 of SEQ ID NO: 1562299
ucccaugcgucagaaacau

SEQ ID NO: 1736832 - RNA, 19 nt, Artificial Sequence
  Description of Artificial Sequence: Synthetic oligonucleotide
  Antisense strand to SEQ ID NO: 1736831
auguuucugacgcauggga

SEQ ID NO: 1736833 - RNA, 19 nt, Artificial Sequence
  Description of Artificial Sequence: Synthetic oligonucleotide
  Sense strand starting at position 860 of SEQ ID NO: 1562299
gggugagugugaucucagu

SEQ ID NO: 1736834 - RNA, 19 nt, Artificial Sequence
  Description of Artificial Sequence: Synthetic oligonucleotide
  Antisense strand to SEQ ID NO: 1736833
acugagaucacacucaccc

SEQ ID NO: 1736835 - RNA, 19 nt, Artificial Sequence
  Description of Artificial Sequence: Synthetic oligonucleotide
  Sense strand starting at position 2048 of SEQ ID NO: 1562299
agcccuauccagugaguuc

SEQ ID NO: 1736836 - RNA, 19 nt, Artificial Sequence
  Description of Artificial Sequence: Synthetic oligonucleotide
  Antisense strand to SEQ ID NO: 1736835
gaacucacuggauagggcu

SEQ ID NO: 1736837 - RNA, 19 nt, Artificial Sequence
  Description of Artificial Sequence: Synthetic oligonucleotide
  Sense strand starting at position 2091 of SEQ ID NO: 1562299
cgcagagccuccgaauaga

SEQ ID NO: 1736838 - RNA, 19 nt, Artificial Sequence
  Description of Artificial Sequence: Synthetic oligonucleotide
  Antisense strand to SEQ ID NO: 1736837
ucuauucggaggcucugcg

SEQ ID NO: 1736839 - RNA, 19 nt, Artificial Sequence
  Description of Artificial Sequence: Synthetic oligonucleotide
  Sense strand starting at position 2094 of SEQ ID NO: 1562299
agagccuccgaauagaguu

SEQ ID NO: 1736840 - RNA, 19 nt, Artificial Sequence
  Description of Artificial Sequence: Synthetic oligonucleotide
  Antisense strand to SEQ ID NO: 1736839
aacucuauucggaggcucu

SEQ ID NO: 1736841 - RNA, 19 nt, Artificial Sequence
  Description of Artificial Sequence: Synthetic oligonucleotide
  Sense strand starting at position 2102 of SEQ ID NO: 1562299
cgaauagaguuccgggaac

SEQ ID NO: 1736842 - RNA, 19 nt, Artificial Sequence
  Description of Artificial Sequence: Synthetic oligonucleotide
  Antisense strand to SEQ ID NO: 1736841
guucccggaacucuauucg

SEQ ID NO: 1736843 - RNA, 19 nt, Artificial Sequence
  Description of Artificial Sequence: Synthetic oligonucleotide
  Sense strand starting at position 2347 of SEQ ID NO: 1562299
aauggccacucgucuuaau

SEQ ID NO: 1736844 - RNA, 19 nt, Artificial Sequence
  Description of Artificial Sequence: Synthetic oligonucleotide
  Antisense strand to SEQ ID NO: 1736843
auuaagacgaguggccauu

SEQ ID NO: 1736845 - RNA, 19 nt, Artificial Sequence
  Description of Artificial Sequence: Synthetic oligonucleotide
  Sense strand starting at position 2357 of SEQ ID NO: 1562299
cgucuuaaucucggcguca

SEQ ID NO: 1736846 - RNA, 19 nt, Artificial Sequence
  Description of Artificial Sequence: Synthetic oligonucleotide
  Antisense strand to SEQ ID NO: 1736845
ugacgccgagauuaagacg

SEQ ID NO: 1736847 - RNA, 19 nt, Artificial Sequence
  Description of Artificial Sequence: Synthetic oligonucleotide
  Sense strand starting at position 2358 of SEQ ID NO: 1562299
gucuuaaucucggcgucag

SEQ ID NO: 1736848 - RNA, 19 nt, Artificial Sequence
  Description of Artificial Sequence: Synthetic oligonucleotide
  Antisense strand to SEQ ID NO: 1736847
cugacgccgagauuaagac

SEQ ID NO: 1736849 - RNA, 19 nt, Artificial Sequence
  Description of Artificial Sequence: Synthetic oligonucleotide
  Sense strand starting at position 2475 of SEQ ID NO: 1562299
gauguuguauccuggaaac

SEQ ID NO: 1736850 - RNA, 19 nt, Artificial Sequence
  Description of Artificial Sequence: Synthetic oligonucleotide
  Antisense strand to SEQ ID NO: 1736849
guuuccaggauacaacauc

SEQ ID NO: 1736851 - RNA, 19 nt, Artificial Sequence
  Description of Artificial Sequence: Synthetic oligonucleotide
  Sense strand starting at position 2477 of SEQ ID NO: 1562299
uguuguauccuggaaacug

SEQ ID NO: 1736852 - RNA, 19 nt, Artificial Sequence
  Description of Artificial Sequence: Synthetic oligonucleotide
  Antisense strand to SEQ ID NO: 1736851
caguuuccaggauacaaca

SEQ ID NO: 1736853 - RNA, 19 nt, Artificial Sequence
  Description of Artificial Sequence: Synthetic oligonucleotide
  Sense strand starting at position 2509 of SEQ ID NO: 1562299
gggcuugaucuggguuagu

SEQ ID NO: 1736854 - RNA, 19 nt, Artificial Sequence
  Description of Artificial Sequence: Synthetic oligonucleotide
  Antisense strand to SEQ ID NO: 1736853
acuaacccagaucaagccc

SEQ ID NO: 1736855 - RNA, 19 nt, Artificial Sequence
  Description of Artificial Sequence: Synthetic oligonucleotide
  Sense strand starting at position 2544 of SEQ ID NO: 1562299
cgccgauucuguuuggguu

SEQ ID NO: 1736856 - RNA, 19 nt, Artificial Sequence
  Description of Artificial Sequence: Synthetic oligonucleotide
  Antisense strand to SEQ ID NO: 1736855
aacccaaacagaaucggcg

SEQ ID NO: 1736857 - RNA, 19 nt, Artificial Sequence
  Description of Artificial Sequence: Synthetic oligonucleotide
  Sense strand starting at position 2545 of SEQ ID NO: 1562299
gccgauucuguuuggguuu

SEQ ID NO: 1736858 - RNA, 19 nt, Artificial Sequence
  Description of Artificial Sequence: Synthetic oligonucleotide
  Antisense strand to SEQ ID NO: 1736857
aaacccaaacagaaucggc

SEQ ID NO: 1736859 - RNA, 19 nt, Artificial Sequence
  Description of Artificial Sequence: Synthetic oligonucleotide
  Sense strand starting at position 2909 of SEQ ID NO: 1562299
ggacggucagugugaagau

SEQ ID NO: 1736860 - RNA, 19 nt, Artificial Sequence
  Description of Artificial Sequence: Synthetic oligonucleotide
  Antisense strand to SEQ ID NO: 1736859
aucuucacacugaccgucc

SEQ ID NO: 1736861 - RNA, 19 nt, Artificial Sequence
  Description of Artificial Sequence: Synthetic oligonucleotide
  Sense strand starting at position 2937 of SEQ ID NO: 1562299
ucggguccuagcuggaauu

SEQ ID NO: 1736862 - RNA, 19 nt, Artificial Sequence
  Description of Artificial Sequence: Synthetic oligonucleotide
  Antisense strand to SEQ ID NO: 1736861
aauuccagcuaggacccga

SEQ ID NO: 1736863 - RNA, 19 nt, Artificial Sequence
  Description of Artificial Sequence: Synthetic oligonucleotide
  Sense strand starting at position 2974 of SEQ ID NO: 1562299
guuuguuaugcauggguua

SEQ ID NO: 1736864 - RNA, 19 nt, Artificial Sequence
  Description of Artificial Sequence: Synthetic oligonucleotide
  Antisense strand to SEQ ID NO: 1736863
uaacccaugcauaacaaac

SEQ ID NO: 1736865 - RNA, 19 nt, Artificial Sequence
  Description of Artificial Sequence: Synthetic oligonucleotide
  Sense strand starting at position 2976 of SEQ ID NO: 1562299
uuguuaugcauggguuagu

SEQ ID NO: 1736866 - RNA, 19 nt, Artificial Sequence
  Description of Artificial Sequence: Synthetic oligonucleotide
  Antisense strand to SEQ ID NO: 1736865
acuaacccaugcauaacaa

SEQ ID NO: 1736867 - RNA, 19 nt, Artificial Sequence
  Description of Artificial Sequence: Synthetic oligonucleotide
  Sense strand starting at position 2977 of SEQ ID NO: 1562299
uguuaugcauggguuaguu

SEQ ID NO: 1736868 - RNA, 19 nt, Artificial Sequence
  Description of Artificial Sequence: Synthetic oligonucleotide
  Antisense strand to SEQ ID NO: 1736867
aacuaacccaugcauaaca

SEQ ID NO: 1736869 - RNA, 19 nt, Artificial Sequence
  Description of Artificial Sequence: Synthetic oligonucleotide
  Sense strand starting at position 2986 of SEQ ID NO: 1562299
uggguuaguucacagagga

SEQ ID NO: 1736870 - RNA, 19 nt, Artificial Sequence
  Description of Artificial Sequence: Synthetic oligonucleotide
  Antisense strand to SEQ ID NO: 1736869
uccucugugaacuaaccca

SEQ ID NO: 1736871 - RNA, 19 nt, Artificial Sequence
  Description of Artificial Sequence: Synthetic oligonucleotide
  Sense strand starting at position 3068 of SEQ ID NO: 1562299
uugaaauaaugugaauggu

SEQ ID NO: 1736872 - RNA, 19 nt, Artificial Sequence
  Description of Artificial Sequence: Synthetic oligonucleotide
  Antisense strand to SEQ ID NO: 1736871
accauucacauuauuucaa

SEQ ID NO: 1736873 - RNA, 19 nt, Artificial Sequence
  Description of Artificial Sequence: Synthetic oligonucleotide
  Sense strand starting at position 3071 of SEQ ID NO: 1562299
aaauaaugugaaugguuac

SEQ ID NO: 1736874 - RNA, 19 nt, Artificial Sequence
  Description of Artificial Sequence: Synthetic oligonucleotide
  Antisense strand to SEQ ID NO: 1736873
guaaccauucacauuauuu

SEQ ID NO: 1736875 - RNA, 19 nt, Artificial Sequence
  Description of Artificial Sequence: Synthetic oligonucleotide
  Sense strand starting at position 3127 of SEQ ID NO: 1562299
agacacaucugaugaucua

SEQ ID NO: 1736876 - RNA, 19 nt, Artificial Sequence
  Description of Artificial Sequence: Synthetic oligonucleotide
  Antisense strand to SEQ ID NO: 1736875
uagaucaucagaugugucu

SEQ ID NO: 1736877 - RNA, 19 nt, Artificial Sequence
  Description of Artificial Sequence: Synthetic oligonucleotide
  Sense strand starting at position 3178 of SEQ ID NO: 1562299
guccaucacuaggacuuua

SEQ ID NO: 1736878 - RNA, 19 nt, Artificial Sequence
  Description of Artificial Sequence: Synthetic oligonucleotide
  Antisense strand to SEQ ID NO: 1736877
uaaaguccuagugauggac

SEQ ID NO: 1736879 - RNA, 19 nt, Artificial Sequence
  Description of Artificial Sequence: Synthetic oligonucleotide
  Sense strand starting at position 3186 of SEQ ID NO: 1562299
cuaggacuuuacugccaau

SEQ ID NO: 1736880 - RNA, 19 nt, Artificial Sequence
  Description of Artificial Sequence: Synthetic oligonucleotide
  Antisense strand to SEQ ID NO: 1736879
auuggcaguaaaguccuag

SEQ ID NO: 1736881 - RNA, 19 nt, Artificial Sequence
  Description of Artificial Sequence: Synthetic oligonucleotide
  Sense strand starting at position 3189 of SEQ ID NO: 1562299
ggacuuuacugccaauccu

SEQ ID NO: 1736882 - RNA, 19 nt, Artificial Sequence
  Description of Artificial Sequence: Synthetic oligonucleotide
  Antisense strand to SEQ ID NO: 1736881
aggauuggcaguaaagucc

SEQ ID NO: 1736883 - RNA, 19 nt, Artificial Sequence
  Description of Artificial Sequence: Synthetic oligonucleotide
  Sense strand starting at position 3196 of SEQ ID NO: 1562299
acugccaauccuugcaaga

SEQ ID NO: 1736884 - RNA, 19 nt, Artificial Sequence
  Description of Artificial Sequence: Synthetic oligonucleotide
  Antisense strand to SEQ ID NO: 1736883
ucuugcaaggauuggcagu

SEQ ID NO: 1736885 - RNA, 19 nt, Artificial Sequence
  Description of Artificial Sequence: Synthetic oligonucleotide
  Sense strand starting at position 3198 of SEQ ID NO: 1562299
ugccaauccuugcaagaua

SEQ ID NO: 1736886 - RNA, 19 nt, Artificial Sequence
  Description of Artificial Sequence: Synthetic oligonucleotide
  Antisense strand to SEQ ID NO: 1736885
uaucuugcaaggauuggca

SEQ ID NO: 1736887 - RNA, 19 nt, Artificial Sequence
  Description of Artificial Sequence: Synthetic oligonucleotide
  Sense strand starting at position 3560 of SEQ ID NO: 1562299
cgacuacucagguguccau

SEQ ID NO: 1736888 - RNA, 19 nt, Artificial Sequence
  Description of Artificial Sequence: Synthetic oligonucleotide
  Antisense strand to SEQ ID NO: 1736887
auggacaccugaguagucg

SEQ ID NO: 1736889 - RNA, 19 nt, Artificial Sequence
  Description of Artificial Sequence: Synthetic oligonucleotide
  Sense strand starting at position 3578 of SEQ ID NO: 1562299
ucgccaugcacaugugaca

SEQ ID NO: 1736890 - RNA, 19 nt, Artificial Sequence
  Description of Artificial Sequence: Synthetic oligonucleotide
  Antisense strand to SEQ ID NO: 1736889
ugucacaugugcauggcga

SEQ ID NO: 1736891 - RNA, 19 nt, Artificial Sequence
  Description of Artificial Sequence: Synthetic oligonucleotide
  Sense strand starting at position 3681 of SEQ ID NO: 1562299
gugcuuuggguaggcgaua

SEQ ID NO: 1736892 - RNA, 19 nt, Artificial Sequence
  Description of Artificial Sequence: Synthetic oligonucleotide
  Antisense strand to SEQ ID NO: 1736891
uaucgccuacccaaagcac

SEQ ID NO: 1736893 - RNA, 19 nt, Artificial Sequence
  Description of Artificial Sequence: Synthetic oligonucleotide
  Sense strand starting at position 3686 of SEQ ID NO: 1562299
uuggguaggcgauagcuaa

SEQ ID NO: 1736894 - RNA, 19 nt, Artificial Sequence
  Description of Artificial Sequence: Synthetic oligonucleotide
  Antisense strand to SEQ ID NO: 1736893
uuagcuaucgccuacccaa

SEQ ID NO: 1736895 - RNA, 19 nt, Artificial Sequence
  Description of Artificial Sequence: Synthetic oligonucleotide
  Sense strand starting at position 3690 of SEQ ID NO: 1562299
guaggcgauagcuaaggau

SEQ ID NO: 1736896 - RNA, 19 nt, Artificial Sequence
  Description of Artificial Sequence: Synthetic oligonucleotide
  Antisense strand to SEQ ID NO: 1736895
auccuuagcuaucgccuac

SEQ ID NO: 1736897 - RNA, 19 nt, Artificial Sequence
  Description of Artificial Sequence: Synthetic oligonucleotide
  Sense strand starting at position 3716 of SEQ ID NO: 1562299
cgucugggucacggagauu

SEQ ID NO: 1736898 - RNA, 19 nt, Artificial Sequence
  Description of Artificial Sequence: Synthetic oligonucleotide
  Antisense strand to SEQ ID NO: 1736897
aaucuccgugacccagacg

SEQ ID NO: 1736899 - RNA, 19 nt, Artificial Sequence
  Description of Artificial Sequence: Synthetic oligonucleotide
  Sense strand starting at position 3834 of SEQ ID NO: 1562299
aggcacugccugucguauu

SEQ ID NO: 1736900 - RNA, 19 nt, Artificial Sequence
  Description of Artificial Sequence: Synthetic oligonucleotide
  Antisense strand to SEQ ID NO: 1736899
aauacgacaggcagugccu

SEQ ID NO: 1736901 - RNA, 19 nt, Artificial Sequence
  Description of Artificial Sequence: Synthetic oligonucleotide
  Sense strand starting at position 16 of SEQ ID NO: 1562300
ggcuuucggucacuacuua

SEQ ID NO: 1736902 - RNA, 19 nt, Artificial Sequence
  Description of Artificial Sequence: Synthetic oligonucleotide
  Antisense strand to SEQ ID NO: 1736901
uaaguagugaccgaaagcc

SEQ ID NO: 1736903 - RNA, 19 nt, Artificial Sequence
  Description of Artificial Sequence: Synthetic oligonucleotide
  Sense strand starting at position 349 of SEQ ID NO: 1562300
uuccgcuacccauaagaaa

SEQ ID NO: 1736904 - RNA, 19 nt, Artificial Sequence
  Description of Artificial Sequence: Synthetic oligonucleotide
  Antisense strand to SEQ ID NO: 1736903
uuucuuauggguagcggaa

SEQ ID NO: 1736905 - RNA, 19 nt, Artificial Sequence
  Description of Artificial Sequence: Synthetic oligonucleotide
  Sense strand starting at position 397 of SEQ ID NO: 1562300
ugccguucugccugggaga

SEQ ID NO: 1736906 - RNA, 19 nt, Artificial Sequence
  Description of Artificial Sequence: Synthetic oligonucleotide
  Antisense strand to SEQ ID NO: 1736905
ucucccaggcagaacggca

SEQ ID NO: 1736907 - RNA, 19 nt, Artificial Sequence
  Description of Artificial Sequence: Synthetic oligonucleotide
  Sense strand starting at position 771 of SEQ ID NO: 1562300
ccagaaauaccacgcaacu

SEQ ID NO: 1736908 - RNA, 19 nt, Artificial Sequence
  Description of Artificial Sequence: Synthetic oligonucleotide
  Antisense strand to SEQ ID NO: 1736907
aguugcgugguauuucugg

SEQ ID NO: 1736909 - RNA, 19 nt, Artificial Sequence
  Description of Artificial Sequence: Synthetic oligonucleotide
  Sense strand starting at position 794 of SEQ ID NO: 1562300
aaaugauguugagaacuga

SEQ ID NO: 1736910 - RNA, 19 nt, Artificial Sequence
  Description of Artificial Sequence: Synthetic oligonucleotide
  Antisense strand to SEQ ID NO: 1736909
ucaguucucaacaucauuu

SEQ ID NO: 1736911 - RNA, 19 nt, Artificial Sequence
  Description of Artificial Sequence: Synthetic oligonucleotide
  Sense strand starting at position 820 of SEQ ID NO: 1562300
ggaauuacuucccaugcgu

SEQ ID NO: 1736912 - RNA, 19 nt, Artificial Sequence
  Description of Artificial Sequence: Synthetic oligonucleotide
  Antisense strand to SEQ ID NO: 1736911
acgcaugggaaguaauucc

SEQ ID NO: 1736913 - RNA, 19 nt, Artificial Sequence
  Description of Artificial Sequence: Synthetic oligonucleotide
  Sense strand starting at position 829 of SEQ ID NO: 1562300
ucccaugcgucagaaacau

SEQ ID NO: 1736914 - RNA, 19 nt, Artificial Sequence
  Description of Artificial Sequence: Synthetic oligonucleotide
  Antisense strand to SEQ ID NO: 1736913
auguuucugacgcauggga

SEQ ID NO: 1736915 - RNA, 19 nt, Artificial Sequence
  Description of Artificial Sequence: Synthetic oligonucleotide
  Sense strand starting at position 859 of SEQ ID NO: 1562300
gggugagugugaucucagu

SEQ ID NO: 1736916 - RNA, 19 nt, Artificial Sequence
  Description of Artificial Sequence: Synthetic oligonucleotide
  Antisense strand to SEQ ID NO: 1736915
acugagaucacacucaccc

SEQ ID NO: 1736917 - RNA, 19 nt, Artificial Sequence
  Description of Artificial Sequence: Synthetic oligonucleotide
  Sense strand starting at position 935 of SEQ ID NO: 1562300
ggcucuaggugacaguaua

SEQ ID NO: 1736918 - RNA, 19 nt, Artificial Sequence
  Description of Artificial Sequence: Synthetic oligonucleotide
  Antisense strand to SEQ ID NO: 1736917
uauacugucaccuagagcc

SEQ ID NO: 1736919 - RNA, 19 nt, Artificial Sequence
  Description of Artificial Sequence: Synthetic oligonucleotide
  Sense strand starting at position 947 of SEQ ID NO: 1562300
caguauaagcgacacuuaa

SEQ ID NO: 1736920 - RNA, 19 nt, Artificial Sequence
  Description of Artificial Sequence: Synthetic oligonucleotide
  Antisense strand to SEQ ID NO: 1736919
uuaagugucgcuuauacug

SEQ ID NO: 1736921 - RNA, 19 nt, Artificial Sequence
  Description of Artificial Sequence: Synthetic oligonucleotide
  Sense strand starting at position 2093 of SEQ ID NO: 1562300
agagccuccgaauagaguu

SEQ ID NO: 1736922 - RNA, 19 nt, Artificial Sequence
  Description of Artificial Sequence: Synthetic oligonucleotide
  Antisense strand to SEQ ID NO: 1736921
aacucuauucggaggcucu

SEQ ID NO: 1736923 - RNA, 19 nt, Artificial Sequence
  Description of Artificial Sequence: Synthetic oligonucleotide
  Sense strand starting at position 2101 of SEQ ID NO: 1562300
cgaauagaguuccgggaac

SEQ ID NO: 1736924 - RNA, 19 nt, Artificial Sequence
  Description of Artificial Sequence: Synthetic oligonucleotide
  Antisense strand to SEQ ID NO: 1736923
guucccggaacucuauucg

SEQ ID NO: 1736925 - RNA, 19 nt, Artificial Sequence
  Description of Artificial Sequence: Synthetic oligonucleotide
  Sense strand starting at position 2346 of SEQ ID NO: 1562300
aauggccacucgucuuaau

SEQ ID NO: 1736926 - RNA, 19 nt, Artificial Sequence
  Description of Artificial Sequence: Synthetic oligonucleotide
  Antisense strand to SEQ ID NO: 1736925
auuaagacgaguggccauu

SEQ ID NO: 1736927 - RNA, 19 nt, Artificial Sequence
  Description of Artificial Sequence: Synthetic oligonucleotide
  Sense strand starting at position 2356 of SEQ ID NO: 1562300
cgucuuaaucucggcguca

SEQ ID NO: 1736928 - RNA, 19 nt, Artificial Sequence
  Description of Artificial Sequence: Synthetic oligonucleotide
  Antisense strand to SEQ ID NO: 1736927
ugacgccgagauuaagacg

SEQ ID NO: 1736929 - RNA, 19 nt, Artificial Sequence
  Description of Artificial Sequence: Synthetic oligonucleotide
  Sense strand starting at position 2357 of SEQ ID NO: 1562300
gucuuaaucucggcgucag

SEQ ID NO: 1736930 - RNA, 19 nt, Artificial Sequence
  Description of Artificial Sequence: Synthetic oligonucleotide
  Antisense strand to SEQ ID NO: 1736929
cugacgccgagauuaagac

SEQ ID NO: 1736931 - RNA, 19 nt, Artificial Sequence
  Description of Artificial Sequence: Synthetic oligonucleotide
  Sense strand starting at position 2474 of SEQ ID NO: 1562300
gauguuguauccuggaaac

SEQ ID NO: 1736932 - RNA, 19 nt, Artificial Sequence
  Description of Artificial Sequence: Synthetic oligonucleotide
  Antisense strand to SEQ ID NO: 1736931
guuuccaggauacaacauc

SEQ ID NO: 1736933 - RNA, 19 nt, Artificial Sequence
  Description of Artificial Sequence: Synthetic oligonucleotide
  Sense strand starting at position 2508 of SEQ ID NO: 1562300
gggcuugaucuggguuagu

SEQ ID NO: 1736934 - RNA, 19 nt, Artificial Sequence
  Description of Artificial Sequence: Synthetic oligonucleotide
  Antisense strand to SEQ ID NO: 1736933
acuaacccagaucaagccc

SEQ ID NO: 1736935 - RNA, 19 nt, Artificial Sequence
  Description of Artificial Sequence: Synthetic oligonucleotide
  Sense strand starting at position 2543 of SEQ ID NO: 1562300
cgccgauucuguuuggguu

SEQ ID NO: 1736936 - RNA, 19 nt, Artificial Sequence
  Description of Artificial Sequence: Synthetic oligonucleotide
  Antisense strand to SEQ ID NO: 1736935
aacccaaacagaaucggcg

SEQ ID NO: 1736937 - RNA, 19 nt, Artificial Sequence
  Description of Artificial Sequence: Synthetic oligonucleotide
  Sense strand starting at position 2544 of SEQ ID NO: 1562300
gccgauucuguuuggguuu

SEQ ID NO: 1736938 - RNA, 19 nt, Artificial Sequence
  Description of Artificial Sequence: Synthetic oligonucleotide
  Antisense strand to SEQ ID NO: 1736937
aaacccaaacagaaucggc

SEQ ID NO: 1736939 - RNA, 19 nt, Artificial Sequence
  Description of Artificial Sequence: Synthetic oligonucleotide
  Sense strand starting at position 2908 of SEQ ID NO: 1562300
ggacggucagugugaagau

SEQ ID NO: 1736940 - RNA, 19 nt, Artificial Sequence
  Description of Artificial Sequence: Synthetic oligonucleotide
  Antisense strand to SEQ ID NO: 1736939
aucuucacacugaccgucc

SEQ ID NO: 1736941 - RNA, 19 nt, Artificial Sequence
  Description of Artificial Sequence: Synthetic oligonucleotide
  Sense strand starting at position 2936 of SEQ ID NO: 1562300
ucggguccuagcuggaauu

SEQ ID NO: 1736942 - RNA, 19 nt, Artificial Sequence
  Description of Artificial Sequence: Synthetic oligonucleotide
  Antisense strand to SEQ ID NO: 1736941
aauuccagcuaggacccga

SEQ ID NO: 1736943 - RNA, 19 nt, Artificial Sequence
  Description of Artificial Sequence: Synthetic oligonucleotide
  Sense strand starting at position 2973 of SEQ ID NO: 1562300
guuuguuaugcauggguua

SEQ ID NO: 1736944 - RNA, 19 nt, Artificial Sequence
  Description of Artificial Sequence: Synthetic oligonucleotide
  Antisense strand to SEQ ID NO: 1736943
uaacccaugcauaacaaac

SEQ ID NO: 1736945 - RNA, 19 nt, Artificial Sequence
  Description of Artificial Sequence: Synthetic oligonucleotide
  Sense strand starting at position 2975 of SEQ ID NO: 1562300
uuguuaugcauggguuagu

SEQ ID NO: 1736946 - RNA, 19 nt, Artificial Sequence
  Description of Artificial Sequence: Synthetic oligonucleotide
  Antisense strand to SEQ ID NO: 1736945
acuaacccaugcauaacaa

SEQ ID NO: 1736947 - RNA, 19 nt, Artificial Sequence
  Description of Artificial Sequence: Synthetic oligonucleotide
  Sense strand starting at position 2976 of SEQ ID NO: 1562300
uguuaugcauggguuaguu

SEQ ID NO: 1736948 - RNA, 19 nt, Artificial Sequence
  Description of Artificial Sequence: Synthetic oligonucleotide
  Antisense strand to SEQ ID NO: 1736947
aacuaacccaugcauaaca

SEQ ID NO: 1736949 - RNA, 19 nt, Artificial Sequence
  Description of Artificial Sequence: Synthetic oligonucleotide
  Sense strand starting at position 2985 of SEQ ID NO: 1562300
uggguuaguucacagagga

SEQ ID NO: 1736950 - RNA, 19 nt, Artificial Sequence
  Description of Artificial Sequence: Synthetic oligonucleotide
  Antisense strand to SEQ ID NO: 1736949
uccucugugaacuaaccca

SEQ ID NO: 1736951 - RNA, 19 nt, Artificial Sequence
  Description of Artificial Sequence: Synthetic oligonucleotide
  Sense strand starting at position 3067 of SEQ ID NO: 1562300
uugaaauaaugugaauggu

SEQ ID NO: 1736952 - RNA, 19 nt, Artificial Sequence
  Description of Artificial Sequence: Synthetic oligonucleotide
  Antisense strand to SEQ ID NO: 1736951
accauucacauuauuucaa

SEQ ID NO: 1736953 - RNA, 19 nt, Artificial Sequence
  Description of Artificial Sequence: Synthetic oligonucleotide
  Sense strand starting at position 3070 of SEQ ID NO: 1562300
aaauaaugugaaugguuac

SEQ ID NO: 1736954 - RNA, 19 nt, Artificial Sequence
  Description of Artificial Sequence: Synthetic oligonucleotide
  Antisense strand to SEQ ID NO: 1736953
guaaccauucacauuauuu

SEQ ID NO: 1736955 - RNA, 19 nt, Artificial Sequence
  Description of Artificial Sequence: Synthetic oligonucleotide
  Sense strand starting at position 3126 of SEQ ID NO: 1562300
agacacaucugaugaucua

SEQ ID NO: 1736956 - RNA, 19 nt, Artificial Sequence
  Description of Artificial Sequence: Synthetic oligonucleotide
  Antisense strand to SEQ ID NO: 1736955
uagaucaucagaugugucu

SEQ ID NO: 1736957 - RNA, 19 nt, Artificial Sequence
  Description of Artificial Sequence: Synthetic oligonucleotide
  Sense strand starting at position 3177 of SEQ ID NO: 1562300
guccaucacuaggacuuua

SEQ ID NO: 1736958 - RNA, 19 nt, Artificial Sequence
  Description of Artificial Sequence: Synthetic oligonucleotide
  Antisense strand to SEQ ID NO: 1736957
uaaaguccuagugauggac

SEQ ID NO: 1736959 - RNA, 19 nt, Artificial Sequence
  Description of Artificial Sequence: Synthetic oligonucleotide
  Sense strand starting at position 3185 of SEQ ID NO: 1562300
cuaggacuuuacugccaau

SEQ ID NO: 1736960 - RNA, 19 nt, Artificial Sequence
  Description of Artificial Sequence: Synthetic oligonucleotide
  Antisense strand to SEQ ID NO: 1736959
auuggcaguaaaguccuag

SEQ ID NO: 1736961 - RNA, 19 nt, Artificial Sequence
  Description of Artificial Sequence: Synthetic oligonucleotide
  Sense strand starting at position 3188 of SEQ ID NO: 1562300
ggacuuuacugccaauccu

SEQ ID NO: 1736962 - RNA, 19 nt, Artificial Sequence
  Description of Artificial Sequence: Synthetic oligonucleotide
  Antisense strand to SEQ ID NO: 1736961
aggauuggcaguaaagucc

SEQ ID NO: 1736963 - RNA, 19 nt, Artificial Sequence
  Description of Artificial Sequence: Synthetic oligonucleotide
  Sense strand starting at position 3195 of SEQ ID NO: 1562300
acugccaauccuugcaaga

SEQ ID NO: 1736964 - RNA, 19 nt, Artificial Sequence
  Description of Artificial Sequence: Synthetic oligonucleotide
  Antisense strand to SEQ ID NO: 1736963
ucuugcaaggauuggcagu

SEQ ID NO: 1736965 - RNA, 19 nt, Artificial Sequence
  Description of Artificial Sequence: Synthetic oligonucleotide
  Sense strand starting at position 3197 of SEQ ID NO: 1562300
ugccaauccuugcaagaua

SEQ ID NO: 1736966 - RNA, 19 nt, Artificial Sequence
  Description of Artificial Sequence: Synthetic oligonucleotide
  Antisense strand to SEQ ID NO: 1736965
uaucuugcaaggauuggca

SEQ ID NO: 1736967 - RNA, 19 nt, Artificial Sequence
  Description of Artificial Sequence: Synthetic oligonucleotide
  Sense strand starting at position 3559 of SEQ ID NO: 1562300
cgacuacucagguguccau

SEQ ID NO: 1736968 - RNA, 19 nt, Artificial Sequence
  Description of Artificial Sequence: Synthetic oligonucleotide
  Antisense strand to SEQ ID NO: 1736967
auggacaccugaguagucg

SEQ ID NO: 1736969 - RNA, 19 nt, Artificial Sequence
  Description of Artificial Sequence: Synthetic oligonucleotide
  Sense strand starting at position 3577 of SEQ ID NO: 1562300
ucgccaugcacaugugaca

SEQ ID NO: 1736970 - RNA, 19 nt, Artificial Sequence
  Description of Artificial Sequence: Synthetic oligonucleotide
  Antisense strand to SEQ ID NO: 1736969
ugucacaugugcauggcga

SEQ ID NO: 1736971 - RNA, 19 nt, Artificial Sequence
  Description of Artificial Sequence: Synthetic oligonucleotide
  Sense strand starting at position 3680 of SEQ ID NO: 1562300
gugcuuuggguaggcgaua

SEQ ID NO: 1736972 - RNA, 19 nt, Artificial Sequence
  Description of Artificial Sequence: Synthetic oligonucleotide
  Antisense strand to SEQ ID NO: 1736971
uaucgccuacccaaagcac

SEQ ID NO: 1736973 - RNA, 19 nt, Artificial Sequence
  Description of Artificial Sequence: Synthetic oligonucleotide
  Sense strand starting at position 3685 of SEQ ID NO: 1562300
uuggguaggcgauagcuaa

SEQ ID NO: 1736974 - RNA, 19 nt, Artificial Sequence
  Description of Artificial Sequence: Synthetic oligonucleotide
  Antisense strand to SEQ ID NO: 1736973
uuagcuaucgccuacccaa

SEQ ID NO: 1736975 - RNA, 19 nt, Artificial Sequence
  Description of Artificial Sequence: Synthetic oligonucleotide
  Sense strand starting at position 3689 of SEQ ID NO: 1562300
guaggcgauagcuaaggau

SEQ ID NO: 1736976 - RNA, 19 nt, Artificial Sequence
  Description of Artificial Sequence: Synthetic oligonucleotide
  Antisense strand to SEQ ID NO: 1736975
auccuuagcuaucgccuac

SEQ ID NO: 1736977 - RNA, 19 nt, Artificial Sequence
  Description of Artificial Sequence: Synthetic oligonucleotide
  Sense strand starting at position 3715 of SEQ ID NO: 1562300
cgucugggucacggagauu

SEQ ID NO: 1736978 - RNA, 19 nt, Artificial Sequence
  Description of Artificial Sequence: Synthetic oligonucleotide
  Antisense strand to SEQ ID NO: 1736977
aaucuccgugacccagacg

SEQ ID NO: 1736979 - RNA, 19 nt, Artificial Sequence
  Description of Artificial Sequence: Synthetic oligonucleotide
  Sense strand starting at position 3833 of SEQ ID NO: 1562300
aggcacugccugucguauu

SEQ ID NO: 1736980 - RNA, 19 nt, Artificial Sequence
  Description of Artificial Sequence: Synthetic oligonucleotide
  Antisense strand to SEQ ID NO: 1736979
aauacgacaggcagugccu

SEQ ID NO: 1736981 - RNA, 19 nt, Artificial Sequence
  Description of Artificial Sequence: Synthetic oligonucleotide
  Sense strand starting at position 320 of SEQ ID NO: 1562301
cagugagugauugggugaa

SEQ ID NO: 1736982 - RNA, 19 nt, Artificial Sequence
  Description of Artificial Sequence: Synthetic oligonucleotide
  Antisense strand to SEQ ID NO: 1736981
uucacccaaucacucacug

SEQ ID NO: 1736983 - RNA, 19 nt, Artificial Sequence
  Description of Artificial Sequence: Synthetic oligonucleotide
  Sense strand starting at position 324 of SEQ ID NO: 1562301
gagugauugggugaaggcu

SEQ ID NO: 1736984 - RNA, 19 nt, Artificial Sequence
  Description of Artificial Sequence: Synthetic oligonucleotide
  Antisense strand to SEQ ID NO: 1736983
agccuucacccaaucacuc

SEQ ID NO: 1736985 - RNA, 19 nt, Artificial Sequence
  Description of Artificial Sequence: Synthetic oligonucleotide
  Sense strand starting at position 431 of SEQ ID NO: 1562301
uggauuacuccugacguag

SEQ ID NO: 1736986 - RNA, 19 nt, Artificial Sequence
  Description of Artificial Sequence: Synthetic oligonucleotide
  Antisense strand to SEQ ID NO: 1736985
cuacgucaggaguaaucca

SEQ ID NO: 1736987 - RNA, 19 nt, Artificial Sequence
  Description of Artificial Sequence: Synthetic oligonucleotide
  Sense strand starting at position 435 of SEQ ID NO: 1562301
uuacuccugacguagaguu

SEQ ID NO: 1736988 - RNA, 19 nt, Artificial Sequence
  Description of Artificial Sequence: Synthetic oligonucleotide
  Antisense strand to SEQ ID NO: 1736987
aacucuacgucaggaguaa

SEQ ID NO: 1736989 - RNA, 19 nt, Artificial Sequence
  Description of Artificial Sequence: Synthetic oligonucleotide
  Sense strand starting at position 1134 of SEQ ID NO: 1562301
guccacagucauuaacagu

SEQ ID NO: 1736990 - RNA, 19 nt, Artificial Sequence
  Description of Artificial Sequence: Synthetic oligonucleotide
  Antisense strand to SEQ ID NO: 1736989
acuguuaaugacuguggac

SEQ ID NO: 1736991 - RNA, 19 nt, Artificial Sequence
  Description of Artificial Sequence: Synthetic oligonucleotide
  Sense strand starting at position 1140 of SEQ ID NO: 1562301
agucauuaacagugacagu

SEQ ID NO: 1736992 - RNA, 19 nt, Artificial Sequence
  Description of Artificial Sequence: Synthetic oligonucleotide
  Antisense strand to SEQ ID NO: 1736991
acugucacuguuaaugacu

SEQ ID NO: 1736993 - RNA, 19 nt, Artificial Sequence
  Description of Artificial Sequence: Synthetic oligonucleotide
  Sense strand starting at position 1241 of SEQ ID NO: 1562301
ugauauaagugaccucauc

SEQ ID NO: 1736994 - RNA, 19 nt, Artificial Sequence
  Description of Artificial Sequence: Synthetic oligonucleotide
  Antisense strand to SEQ ID NO: 1736993
gaugaggucacuuauauca

SEQ ID NO: 1736995 - RNA, 19 nt, Artificial Sequence
  Description of Artificial Sequence: Synthetic oligonucleotide
  Sense strand starting at position 1732 of SEQ ID NO: 1562301
accagauguuuccucauca

SEQ ID NO: 1736996 - RNA, 19 nt, Artificial Sequence
  Description of Artificial Sequence: Synthetic oligonucleotide
  Antisense strand to SEQ ID NO: 1736995
ugaugaggaaacaucuggu

SEQ ID NO: 1736997 - RNA, 19 nt, Artificial Sequence
  Description of Artificial Sequence: Synthetic oligonucleotide
  Sense strand starting at position 1733 of SEQ ID NO: 1562301
ccagauguuuccucaucag

SEQ ID NO: 1736998 - RNA, 19 nt, Artificial Sequence
  Description of Artificial Sequence: Synthetic oligonucleotide
  Antisense strand to SEQ ID NO: 1736997
cugaugaggaaacaucugg

SEQ ID NO: 1736999 - RNA, 19 nt, Artificial Sequence
  Description of Artificial Sequence: Synthetic oligonucleotide
  Sense strand starting at position 1736 of SEQ ID NO: 1562301
gauguuuccucaucaguag

SEQ ID NO: 1737000 - RNA, 19 nt, Artificial Sequence
  Description of Artificial Sequence: Synthetic oligonucleotide
  Antisense strand to SEQ ID NO: 1736999
cuacugaugaggaaacauc

SEQ ID NO: 1737001 - RNA, 19 nt, Artificial Sequence
  Description of Artificial Sequence: Synthetic oligonucleotide
  Sense strand starting at position 1737 of SEQ ID NO: 1562301
auguuuccucaucaguaga

SEQ ID NO: 1737002 - RNA, 19 nt, Artificial Sequence
  Description of Artificial Sequence: Synthetic oligonucleotide
  Antisense strand to SEQ ID NO: 1737001
ucuacugaugaggaaacau

SEQ ID NO: 1737003 - RNA, 19 nt, Artificial Sequence
  Description of Artificial Sequence: Synthetic oligonucleotide
  Sense strand starting at position 1739 of SEQ ID NO: 1562301
guuuccucaucaguagaua

SEQ ID NO: 1737004 - RNA, 19 nt, Artificial Sequence
  Description of Artificial Sequence: Synthetic oligonucleotide
  Antisense strand to SEQ ID NO: 1737003
uaucuacugaugaggaaac

SEQ ID NO: 1737005 - RNA, 19 nt, Artificial Sequence
  Description of Artificial Sequence: Synthetic oligonucleotide
  Sense strand starting at position 1805 of SEQ ID NO: 1562301
uccuuaccagaguacucua

SEQ ID NO: 1737006 - RNA, 19 nt, Artificial Sequence
  Description of Artificial Sequence: Synthetic oligonucleotide
  Antisense strand to SEQ ID NO: 1737005
uagaguacucugguaagga

SEQ ID NO: 1737007 - RNA, 19 nt, Artificial Sequence
  Description of Artificial Sequence: Synthetic oligonucleotide
  Sense strand starting at position 1812 of SEQ ID NO: 1562301
cagaguacucuauggccau

SEQ ID NO: 1737008 - RNA, 19 nt, Artificial Sequence
  Description of Artificial Sequence: Synthetic oligonucleotide
  Antisense strand to SEQ ID NO: 1737007
auggccauagaguacucug

SEQ ID NO: 1737009 - RNA, 19 nt, Artificial Sequence
  Description of Artificial Sequence: Synthetic oligonucleotide
  Sense strand starting at position 1815 of SEQ ID NO: 1562301
aguacucuauggccaugaa

SEQ ID NO: 1737010 - RNA, 19 nt, Artificial Sequence
  Description of Artificial Sequence: Synthetic oligonucleotide
  Antisense strand to SEQ ID NO: 1737009
uucauggccauagaguacu

SEQ ID NO: 1737011 - RNA, 19 nt, Artificial Sequence
  Description of Artificial Sequence: Synthetic oligonucleotide
  Sense strand starting at position 1816 of SEQ ID NO: 1562301
guacucuauggccaugaaa

SEQ ID NO: 1737012 - RNA, 19 nt, Artificial Sequence
  Description of Artificial Sequence: Synthetic oligonucleotide
  Antisense strand to SEQ ID NO: 1737011
uuucauggccauagaguac

SEQ ID NO: 1737013 - RNA, 19 nt, Artificial Sequence
  Description of Artificial Sequence: Synthetic oligonucleotide
  Sense strand starting at position 1966 of SEQ ID NO: 1562301
cguugaacugguuaacuuu

SEQ ID NO: 1737014 - RNA, 19 nt, Artificial Sequence
  Description of Artificial Sequence: Synthetic oligonucleotide
  Antisense strand to SEQ ID NO: 1737013
aaaguuaaccaguucaacg

SEQ ID NO: 1737015 - RNA, 19 nt, Artificial Sequence
  Description of Artificial Sequence: Synthetic oligonucleotide
  Sense strand starting at position 2000 of SEQ ID NO: 1562301
ucucuugauguggaauguu

SEQ ID NO: 1737016 - RNA, 19 nt, Artificial Sequence
  Description of Artificial Sequence: Synthetic oligonucleotide
  Antisense strand to SEQ ID NO: 1737015
aacauuccacaucaagaga

SEQ ID NO: 1737017 - RNA, 19 nt, Artificial Sequence
  Description of Artificial Sequence: Synthetic oligonucleotide
  Sense strand starting at position 2003 of SEQ ID NO: 1562301
cuugauguggaauguuuau

SEQ ID NO: 1737018 - RNA, 19 nt, Artificial Sequence
  Description of Artificial Sequence: Synthetic oligonucleotide
  Antisense strand to SEQ ID NO: 1737017
auaaacauuccacaucaag

SEQ ID NO: 1737019 - RNA, 19 nt, Artificial Sequence
  Description of Artificial Sequence: Synthetic oligonucleotide
  Sense strand starting at position 2033 of SEQ ID NO: 1562301
aguggucaaguauacuauu

SEQ ID NO: 1737020 - RNA, 19 nt, Artificial Sequence
  Description of Artificial Sequence: Synthetic oligonucleotide
  Antisense strand to SEQ ID NO: 1737019
aauaguauacuugaccacu

SEQ ID NO: 1737021 - RNA, 19 nt, Artificial Sequence
  Description of Artificial Sequence: Synthetic oligonucleotide
  Sense strand starting at position 2061 of SEQ ID NO: 1562301
uuguaauacugacugacuu

SEQ ID NO: 1737022 - RNA, 19 nt, Artificial Sequence
  Description of Artificial Sequence: Synthetic oligonucleotide
  Antisense strand to SEQ ID NO: 1737021
aagucagucaguauuacaa

SEQ ID NO: 1737023 - RNA, 19 nt, Artificial Sequence
  Description of Artificial Sequence: Synthetic oligonucleotide
  Sense strand starting at position 2062 of SEQ ID NO: 1562301
uguaauacugacugacuua

SEQ ID NO: 1737024 - RNA, 19 nt, Artificial Sequence
  Description of Artificial Sequence: Synthetic oligonucleotide
  Antisense strand to SEQ ID NO: 1737023
uaagucagucaguauuaca

SEQ ID NO: 1737025 - RNA, 19 nt, Artificial Sequence
  Description of Artificial Sequence: Synthetic oligonucleotide
  Sense strand starting at position 2140 of SEQ ID NO: 1562301
agaauugccuccucgggau

SEQ ID NO: 1737026 - RNA, 19 nt, Artificial Sequence
  Description of Artificial Sequence: Synthetic oligonucleotide
  Antisense strand to SEQ ID NO: 1737025
aucccgaggaggcaauucu

SEQ ID NO: 1737027 - RNA, 19 nt, Artificial Sequence
  Description of Artificial Sequence: Synthetic oligonucleotide
  Sense strand starting at position 2158 of SEQ ID NO: 1562301
ucucuaguaguauacauaa

SEQ ID NO: 1737028 - RNA, 19 nt, Artificial Sequence
  Description of Artificial Sequence: Synthetic oligonucleotide
  Antisense strand to SEQ ID NO: 1737027
uuauguauacuacuagaga

SEQ ID NO: 1737029 - RNA, 19 nt, Artificial Sequence
  Description of Artificial Sequence: Synthetic oligonucleotide
  Sense strand starting at position 2630 of SEQ ID NO: 1562301
ugugguauccaucagaaca

SEQ ID NO: 1737030 - RNA, 19 nt, Artificial Sequence
  Description of Artificial Sequence: Synthetic oligonucleotide
  Antisense strand to SEQ ID NO: 1737029
uguucugauggauaccaca

SEQ ID NO: 1737031 - RNA, 19 nt, Artificial Sequence
  Description of Artificial Sequence: Synthetic oligonucleotide
  Sense strand starting at position 2651 of SEQ ID NO: 1562301
ccauuacauugaguuaugu

SEQ ID NO: 1737032 - RNA, 19 nt, Artificial Sequence
  Description of Artificial Sequence: Synthetic oligonucleotide
  Antisense strand to SEQ ID NO: 1737031
acauaacucaauguaaugg

SEQ ID NO: 1737033 - RNA, 19 nt, Artificial Sequence
  Description of Artificial Sequence: Synthetic oligonucleotide
  Sense strand starting at position 2653 of SEQ ID NO: 1562301
auuacauugaguuaugugu

SEQ ID NO: 1737034 - RNA, 19 nt, Artificial Sequence
  Description of Artificial Sequence: Synthetic oligonucleotide
  Antisense strand to SEQ ID NO: 1737033
acacauaacucaauguaau

SEQ ID NO: 1737035 - RNA, 19 nt, Artificial Sequence
  Description of Artificial Sequence: Synthetic oligonucleotide
  Sense strand starting at position 2714 of SEQ ID NO: 1562301
gacaguuucgaagaguacu

SEQ ID NO: 1737036 - RNA, 19 nt, Artificial Sequence
  Description of Artificial Sequence: Synthetic oligonucleotide
  Antisense strand to SEQ ID NO: 1737035
aguacucuucgaaacuguc

SEQ ID NO: 1737037 - RNA, 19 nt, Artificial Sequence
  Description of Artificial Sequence: Synthetic oligonucleotide
  Sense strand starting at position 2722 of SEQ ID NO: 1562301
cgaagaguacugggcagau

SEQ ID NO: 1737038 - RNA, 19 nt, Artificial Sequence
  Description of Artificial Sequence: Synthetic oligonucleotide
  Antisense strand to SEQ ID NO: 1737037
aucugcccaguacucuucg

SEQ ID NO: 1737039 - RNA, 19 nt, Artificial Sequence
  Description of Artificial Sequence: Synthetic oligonucleotide
  Sense strand starting at position 2773 of SEQ ID NO: 1562301
cuauuaucuccugguuaga

SEQ ID NO: 1737040 - RNA, 19 nt, Artificial Sequence
  Description of Artificial Sequence: Synthetic oligonucleotide
  Antisense strand to SEQ ID NO: 1737039
ucuaaccaggagauaauag

SEQ ID NO: 1737041 - RNA, 19 nt, Artificial Sequence
  Description of Artificial Sequence: Synthetic oligonucleotide
  Sense strand starting at position 2775 of SEQ ID NO: 1562301
auuaucuccugguuagacu

SEQ ID NO: 1737042 - RNA, 19 nt, Artificial Sequence
  Description of Artificial Sequence: Synthetic oligonucleotide
  Antisense strand to SEQ ID NO: 1737041
agucuaaccaggagauaau

SEQ ID NO: 1737043 - RNA, 19 nt, Artificial Sequence
  Description of Artificial Sequence: Synthetic oligonucleotide
  Sense strand starting at position 2869 of SEQ ID NO: 1562301
ugucaccucgacuauaacu

SEQ ID NO: 1737044 - RNA, 19 nt, Artificial Sequence
  Description of Artificial Sequence: Synthetic oligonucleotide
  Antisense strand to SEQ ID NO: 1737043
aguuauagucgaggugaca

SEQ ID NO: 1737045 - RNA, 19 nt, Artificial Sequence
  Description of Artificial Sequence: Synthetic oligonucleotide
  Sense strand starting at position 2984 of SEQ ID NO: 1562301
ggaggaaguggcuaugugu

SEQ ID NO: 1737046 - RNA, 19 nt, Artificial Sequence
  Description of Artificial Sequence: Synthetic oligonucleotide
  Antisense strand to SEQ ID NO: 1737045
acacauagccacuuccucc

SEQ ID NO: 1737047 - RNA, 19 nt, Artificial Sequence
  Description of Artificial Sequence: Synthetic oligonucleotide
  Sense strand starting at position 2997 of SEQ ID NO: 1562301
auguguggucuacacuuaa

SEQ ID NO: 1737048 - RNA, 19 nt, Artificial Sequence
  Description of Artificial Sequence: Synthetic oligonucleotide
  Antisense strand to SEQ ID NO: 1737047
uuaaguguagaccacacau

SEQ ID NO: 1737049 - RNA, 19 nt, Artificial Sequence
  Description of Artificial Sequence: Synthetic oligonucleotide
  Sense strand starting at position 3036 of SEQ ID NO: 1562301
ccuccuugagggugaguau

SEQ ID NO: 1737050 - RNA, 19 nt, Artificial Sequence
  Description of Artificial Sequence: Synthetic oligonucleotide
  Antisense strand to SEQ ID NO: 1737049
auacucacccucaaggagg

SEQ ID NO: 1737051 - RNA, 19 nt, Artificial Sequence
  Description of Artificial Sequence: Synthetic oligonucleotide
  Sense strand starting at position 3039 of SEQ ID NO: 1562301
ccuugagggugaguaucua

SEQ ID NO: 1737052 - RNA, 19 nt, Artificial Sequence
  Description of Artificial Sequence: Synthetic oligonucleotide
  Antisense strand to SEQ ID NO: 1737051
uagauacucacccucaagg

SEQ ID NO: 1737053 - RNA, 19 nt, Artificial Sequence
  Description of Artificial Sequence: Synthetic oligonucleotide
  Sense strand starting at position 3043 of SEQ ID NO: 1562301
gagggugaguaucuacaaa

SEQ ID NO: 1737054 - RNA, 19 nt, Artificial Sequence
  Description of Artificial Sequence: Synthetic oligonucleotide
  Antisense strand to SEQ ID NO: 1737053
uuuguagauacucacccuc

SEQ ID NO: 1737055 - RNA, 19 nt, Artificial Sequence
  Description of Artificial Sequence: Synthetic oligonucleotide
  Sense strand starting at position 3327 of SEQ ID NO: 1562301
gguggugugccuguaauuc

SEQ ID NO: 1737056 - RNA, 19 nt, Artificial Sequence
  Description of Artificial Sequence: Synthetic oligonucleotide
  Antisense strand to SEQ ID NO: 1737055
gaauuacaggcacaccacc

SEQ ID NO: 1737057 - RNA, 19 nt, Artificial Sequence
  Description of Artificial Sequence: Synthetic oligonucleotide
  Sense strand starting at position 3510 of SEQ ID NO: 1562301
agcagaaccucucuaggau

SEQ ID NO: 1737058 - RNA, 19 nt, Artificial Sequence
  Description of Artificial Sequence: Synthetic oligonucleotide
  Antisense strand to SEQ ID NO: 1737057
auccuagagagguucugcu

SEQ ID NO: 1737059 - RNA, 19 nt, Artificial Sequence
  Description of Artificial Sequence: Synthetic oligonucleotide
  Sense strand starting at position 3964 of SEQ ID NO: 1562301
aauucugagcgagauucca

SEQ ID NO: 1737060 - RNA, 19 nt, Artificial Sequence
  Description of Artificial Sequence: Synthetic oligonucleotide
  Antisense strand to SEQ ID NO: 1737059
uggaaucucgcucagaauu

SEQ ID NO: 1737061 - RNA, 19 nt, Artificial Sequence
  Description of Artificial Sequence: Synthetic oligonucleotide
  Sense strand starting at position 687 of SEQ ID NO: 1562302
gggucugaucugggugcga

SEQ ID NO: 1737062 - RNA, 19 nt, Artificial Sequence
  Description of Artificial Sequence: Synthetic oligonucleotide
  Antisense strand to SEQ ID NO: 1737061
ucgcacccagaucagaccc

SEQ ID NO: 1737063 - RNA, 19 nt, Artificial Sequence
  Description of Artificial Sequence: Synthetic oligonucleotide
  Sense strand starting at position 783 of SEQ ID NO: 1562302
ggguuugcagacuaaaggu

SEQ ID NO: 1737064 - RNA, 19 nt, Artificial Sequence
  Description of Artificial Sequence: Synthetic oligonucleotide
  Antisense strand to SEQ ID NO: 1737063
accuuuagucugcaaaccc

SEQ ID NO: 1737065 - RNA, 19 nt, Artificial Sequence
  Description of Artificial Sequence: Synthetic oligonucleotide
  Sense strand starting at position 792 of SEQ ID NO: 1562302
gacuaaaggugauaaggaa

SEQ ID NO: 1737066 - RNA, 19 nt, Artificial Sequence
  Description of Artificial Sequence: Synthetic oligonucleotide
  Antisense strand to SEQ ID NO: 1737065
uuccuuaucaccuuuaguc

SEQ ID NO: 1737067 - RNA, 19 nt, Artificial Sequence
  Description of Artificial Sequence: Synthetic oligonucleotide
  Sense strand starting at position 879 of SEQ ID NO: 1562302
gggugauucccagaguugc

SEQ ID NO: 1737068 - RNA, 19 nt, Artificial Sequence
  Description of Artificial Sequence: Synthetic oligonucleotide
  Antisense strand to SEQ ID NO: 1737067
gcaacucugggaaucaccc

SEQ ID NO: 1737069 - RNA, 19 nt, Artificial Sequence
  Description of Artificial Sequence: Synthetic oligonucleotide
  Sense strand starting at position 1096 of SEQ ID NO: 1562302
cccugugugcuccaggaau

SEQ ID NO: 1737070 - RNA, 19 nt, Artificial Sequence
  Description of Artificial Sequence: Synthetic oligonucleotide
  Antisense strand to SEQ ID NO: 1737069
auuccuggagcacacaggg

SEQ ID NO: 1737071 - RNA, 19 nt, Artificial Sequence
  Description of Artificial Sequence: Synthetic oligonucleotide
  Sense strand starting at position 1098 of SEQ ID NO: 1562302
cugugugcuccaggaauga

SEQ ID NO: 1737072 - RNA, 19 nt, Artificial Sequence
  Description of Artificial Sequence: Synthetic oligonucleotide
  Antisense strand to SEQ ID NO: 1737071
ucauuccuggagcacacag

SEQ ID NO: 1737073 - RNA, 19 nt, Artificial Sequence
  Description of Artificial Sequence: Synthetic oligonucleotide
  Sense strand starting at position 1141 of SEQ ID NO: 1562302
aaugguacgucaggaguaa

SEQ ID NO: 1737074 - RNA, 19 nt, Artificial Sequence
  Description of Artificial Sequence: Synthetic oligonucleotide
  Antisense strand to SEQ ID NO: 1737073
uuacuccugacguaccauu

SEQ ID NO: 1737075 - RNA, 19 nt, Artificial Sequence
  Description of Artificial Sequence: Synthetic oligonucleotide
  Sense strand starting at position 1273 of SEQ ID NO: 1562302
ggcggaugcucugaguggu

SEQ ID NO: 1737076 - RNA, 19 nt, Artificial Sequence
  Description of Artificial Sequence: Synthetic oligonucleotide
  Antisense strand to SEQ ID NO: 1737075
accacucagagcauccgcc

SEQ ID NO: 1737077 - RNA, 19 nt, Artificial Sequence
  Description of Artificial Sequence: Synthetic oligonucleotide
  Sense strand starting at position 1297 of SEQ ID NO: 1562302
caggcagauuucugaagag

SEQ ID NO: 1737078 - RNA, 19 nt, Artificial Sequence
  Description of Artificial Sequence: Synthetic oligonucleotide
  Antisense strand to SEQ ID NO: 1737077
cucuucagaaaucugccug

SEQ ID NO: 1737079 - RNA, 19 nt, Artificial Sequence
  Description of Artificial Sequence: Synthetic oligonucleotide
  Sense strand starting at position 1713 of SEQ ID NO: 1562302
cagggcugucucgaagagu

SEQ ID NO: 1737080 - RNA, 19 nt, Artificial Sequence
  Description of Artificial Sequence: Synthetic oligonucleotide
  Antisense strand to SEQ ID NO: 1737079
acucuucgagacagcccug

SEQ ID NO: 1737081 - RNA, 19 nt, Artificial Sequence
  Description of Artificial Sequence: Synthetic oligonucleotide
  Sense strand starting at position 1714 of SEQ ID NO: 1562302
agggcugucucgaagaguc

SEQ ID NO: 1737082 - RNA, 19 nt, Artificial Sequence
  Description of Artificial Sequence: Synthetic oligonucleotide
  Antisense strand to SEQ ID NO: 1737081
gacucuucgagacagcccu

SEQ ID NO: 1737083 - RNA, 19 nt, Artificial Sequence
  Description of Artificial Sequence: Synthetic oligonucleotide
  Sense strand starting at position 1745 of SEQ ID NO: 1562302
cagccugcgaguuguuaaa

SEQ ID NO: 1737084 - RNA, 19 nt, Artificial Sequence
  Description of Artificial Sequence: Synthetic oligonucleotide
  Antisense strand to SEQ ID NO: 1737083
uuuaacaacucgcaggcug

SEQ ID NO: 1737085 - RNA, 19 nt, Artificial Sequence
  Description of Artificial Sequence: Synthetic oligonucleotide
  Sense strand starting at position 1912 of SEQ ID NO: 1562302
gguucuguuacucgcagga

SEQ ID NO: 1737086 - RNA, 19 nt, Artificial Sequence
  Description of Artificial Sequence: Synthetic oligonucleotide
  Antisense strand to SEQ ID NO: 1737085
uccugcgaguaacagaacc

SEQ ID NO: 1737087 - RNA, 19 nt, Artificial Sequence
  Description of Artificial Sequence: Synthetic oligonucleotide
  Sense strand starting at position 1914 of SEQ ID NO: 1562302
uucuguuacucgcaggaaa

SEQ ID NO: 1737088 - RNA, 19 nt, Artificial Sequence
  Description of Artificial Sequence: Synthetic oligonucleotide
  Antisense strand to SEQ ID NO: 1737087
uuuccugcgaguaacagaa

SEQ ID NO: 1737089 - RNA, 19 nt, Artificial Sequence
  Description of Artificial Sequence: Synthetic oligonucleotide
  Sense strand starting at position 1916 of SEQ ID NO: 1562302
cuguuacucgcaggaaaga

SEQ ID NO: 1737090 - RNA, 19 nt, Artificial Sequence
  Description of Artificial Sequence: Synthetic oligonucleotide
  Antisense strand to SEQ ID NO: 1737089
ucuuuccugcgaguaacag

SEQ ID NO: 1737091 - RNA, 19 nt, Artificial Sequence
  Description of Artificial Sequence: Synthetic oligonucleotide
  Sense strand starting at position 1917 of SEQ ID NO: 1562302
uguuacucgcaggaaagaa

SEQ ID NO: 1737092 - RNA, 19 nt, Artificial Sequence
  Description of Artificial Sequence: Synthetic oligonucleotide
  Antisense strand to SEQ ID NO: 1737091
uucuuuccugcgaguaaca

SEQ ID NO: 1737093 - RNA, 19 nt, Artificial Sequence
  Description of Artificial Sequence: Synthetic oligonucleotide
  Sense strand starting at position 2347 of SEQ ID NO: 1562302
cugccuccaggguguuaau

SEQ ID NO: 1737094 - RNA, 19 nt, Artificial Sequence
  Description of Artificial Sequence: Synthetic oligonucleotide
  Antisense strand to SEQ ID NO: 1737093
auuaacacccuggaggcag

SEQ ID NO: 1737095 - RNA, 19 nt, Artificial Sequence
  Description of Artificial Sequence: Synthetic oligonucleotide
  Sense strand starting at position 2520 of SEQ ID NO: 1562302
gggcuuuagcaggaccaga

SEQ ID NO: 1737096 - RNA, 19 nt, Artificial Sequence
  Description of Artificial Sequence: Synthetic oligonucleotide
  Antisense strand to SEQ ID NO: 1737095
ucugguccugcuaaagccc

SEQ ID NO: 1737097 - RNA, 19 nt, Artificial Sequence
  Description of Artificial Sequence: Synthetic oligonucleotide
  Sense strand starting at position 2589 of SEQ ID NO: 1562302
ggagucaaguuugcaggaa

SEQ ID NO: 1737098 - RNA, 19 nt, Artificial Sequence
  Description of Artificial Sequence: Synthetic oligonucleotide
  Antisense strand to SEQ ID NO: 1737097
uuccugcaaacuugacucc

SEQ ID NO: 1737099 - RNA, 19 nt, Artificial Sequence
  Description of Artificial Sequence: Synthetic oligonucleotide
  Sense strand starting at position 2593 of SEQ ID NO: 1562302
ucaaguuugcaggaagcuu

SEQ ID NO: 1737100 - RNA, 19 nt, Artificial Sequence
  Description of Artificial Sequence: Synthetic oligonucleotide
  Antisense strand to SEQ ID NO: 1737099
aagcuuccugcaaacuuga

SEQ ID NO: 1737101 - RNA, 19 nt, Artificial Sequence
  Description of Artificial Sequence: Synthetic oligonucleotide
  Sense strand starting at position 2645 of SEQ ID NO: 1562302
gcacuugguugggcauuaa

SEQ ID NO: 1737102 - RNA, 19 nt, Artificial Sequence
  Description of Artificial Sequence: Synthetic oligonucleotide
  Antisense strand to SEQ ID NO: 1737101
uuaaugcccaaccaagugc

SEQ ID NO: 1737103 - RNA, 19 nt, Artificial Sequence
  Description of Artificial Sequence: Synthetic oligonucleotide
  Sense strand starting at position 2664 of SEQ ID NO: 1562302
acuccacguugaugaguua

SEQ ID NO: 1737104 - RNA, 19 nt, Artificial Sequence
  Description of Artificial Sequence: Synthetic oligonucleotide
  Antisense strand to SEQ ID NO: 1737103
uaacucaucaacguggagu

SEQ ID NO: 1737105 - RNA, 19 nt, Artificial Sequence
  Description of Artificial Sequence: Synthetic oligonucleotide
  Sense strand starting at position 2671 of SEQ ID NO: 1562302
guugaugaguuagucaauc

SEQ ID NO: 1737106 - RNA, 19 nt, Artificial Sequence
  Description of Artificial Sequence: Synthetic oligonucleotide
  Antisense strand to SEQ ID NO: 1737105
gauugacuaacucaucaac

SEQ ID NO: 1737107 - RNA, 19 nt, Artificial Sequence
  Description of Artificial Sequence: Synthetic oligonucleotide
  Sense strand starting at position 2826 of SEQ ID NO: 1562302
gcccucaguucuguaaaug

SEQ ID NO: 1737108 - RNA, 19 nt, Artificial Sequence
  Description of Artificial Sequence: Synthetic oligonucleotide
  Antisense strand to SEQ ID NO: 1737107
cauuuacagaacugagggc

SEQ ID NO: 1737109 - RNA, 19 nt, Artificial Sequence
  Description of Artificial Sequence: Synthetic oligonucleotide
  Sense strand starting at position 2838 of SEQ ID NO: 1562302
guaaauggcccauguccau

SEQ ID NO: 1737110 - RNA, 19 nt, Artificial Sequence
  Description of Artificial Sequence: Synthetic oligonucleotide
  Antisense strand to SEQ ID NO: 1737109
auggacaugggccauuuac

SEQ ID NO: 1737111 - RNA, 19 nt, Artificial Sequence
  Description of Artificial Sequence: Synthetic oligonucleotide
  Sense strand starting at position 2847 of SEQ ID NO: 1562302
ccauguccaucaguaucua

SEQ ID NO: 1737112 - RNA, 19 nt, Artificial Sequence
  Description of Artificial Sequence: Synthetic oligonucleotide
  Antisense strand to SEQ ID NO: 1737111
uagauacugauggacaugg

SEQ ID NO: 1737113 - RNA, 19 nt, Artificial Sequence
  Description of Artificial Sequence: Synthetic oligonucleotide
  Sense strand starting at position 2925 of SEQ ID NO: 1562302
cagugagugauugggugaa

SEQ ID NO: 1737114 - RNA, 19 nt, Artificial Sequence
  Description of Artificial Sequence: Synthetic oligonucleotide
  Antisense strand to SEQ ID NO: 1737113
uucacccaaucacucacug

SEQ ID NO: 1737115 - RNA, 19 nt, Artificial Sequence
  Description of Artificial Sequence: Synthetic oligonucleotide
  Sense strand starting at position 2929 of SEQ ID NO: 1562302
gagugauugggugaaggcu

SEQ ID NO: 1737116 - RNA, 19 nt, Artificial Sequence
  Description of Artificial Sequence: Synthetic oligonucleotide
  Antisense strand to SEQ ID NO: 1737115
agccuucacccaaucacuc

SEQ ID NO: 1737117 - RNA, 19 nt, Artificial Sequence
  Description of Artificial Sequence: Synthetic oligonucleotide
  Sense strand starting at position 3035 of SEQ ID NO: 1562302
cuggauuacuccugacgua

SEQ ID NO: 1737118 - RNA, 19 nt, Artificial Sequence
  Description of Artificial Sequence: Synthetic oligonucleotide
  Antisense strand to SEQ ID NO: 1737117
uacgucaggaguaauccag

SEQ ID NO: 1737119 - RNA, 19 nt, Artificial Sequence
  Description of Artificial Sequence: Synthetic oligonucleotide
  Sense strand starting at position 3036 of SEQ ID NO: 1562302
uggauuacuccugacguag

SEQ ID NO: 1737120 - RNA, 19 nt, Artificial Sequence
  Description of Artificial Sequence: Synthetic oligonucleotide
  Antisense strand to SEQ ID NO: 1737119
cuacgucaggaguaaucca

SEQ ID NO: 1737121 - RNA, 19 nt, Artificial Sequence
  Description of Artificial Sequence: Synthetic oligonucleotide
  Sense strand starting at position 3038 of SEQ ID NO: 1562302
gauuacuccugacguagag

SEQ ID NO: 1737122 - RNA, 19 nt, Artificial Sequence
  Description of Artificial Sequence: Synthetic oligonucleotide
  Antisense strand to SEQ ID NO: 1737121
cucuacgucaggaguaauc

SEQ ID NO: 1737123 - RNA, 19 nt, Artificial Sequence
  Description of Artificial Sequence: Synthetic oligonucleotide
  Sense strand starting at position 3040 of SEQ ID NO: 1562302
uuacuccugacguagaguu

SEQ ID NO: 1737124 - RNA, 19 nt, Artificial Sequence
  Description of Artificial Sequence: Synthetic oligonucleotide
  Antisense strand to SEQ ID NO: 1737123
aacucuacgucaggaguaa

SEQ ID NO: 1737125 - RNA, 19 nt, Artificial Sequence
  Description of Artificial Sequence: Synthetic oligonucleotide
  Sense strand starting at position 3248 of SEQ ID NO: 1562302
uuaagaucccagugccauu

SEQ ID NO: 1737126 - RNA, 19 nt, Artificial Sequence
  Description of Artificial Sequence: Synthetic oligonucleotide
  Antisense strand to SEQ ID NO: 1737125
aauggcacugggaucuuaa

SEQ ID NO: 1737127 - RNA, 19 nt, Artificial Sequence
  Description of Artificial Sequence: Synthetic oligonucleotide
  Sense strand starting at position 3732 of SEQ ID NO: 1562302
ggcucuuguccacagucau

SEQ ID NO: 1737128 - RNA, 19 nt, Artificial Sequence
  Description of Artificial Sequence: Synthetic oligonucleotide
  Antisense strand to SEQ ID NO: 1737127
augacuguggacaagagcc

SEQ ID NO: 1737129 - RNA, 19 nt, Artificial Sequence
  Description of Artificial Sequence: Synthetic oligonucleotide
  Sense strand starting at position 3739 of SEQ ID NO: 1562302
guccacagucauuaacagu

SEQ ID NO: 1737130 - RNA, 19 nt, Artificial Sequence
  Description of Artificial Sequence: Synthetic oligonucleotide
  Antisense strand to SEQ ID NO: 1737129
acuguuaaugacuguggac

SEQ ID NO: 1737131 - RNA, 19 nt, Artificial Sequence
  Description of Artificial Sequence: Synthetic oligonucleotide
  Sense strand starting at position 3745 of SEQ ID NO: 1562302
agucauuaacagugacagu

SEQ ID NO: 1737132 - RNA, 19 nt, Artificial Sequence
  Description of Artificial Sequence: Synthetic oligonucleotide
  Antisense strand to SEQ ID NO: 1737131
acugucacuguuaaugacu

SEQ ID NO: 1737133 - RNA, 19 nt, Artificial Sequence
  Description of Artificial Sequence: Synthetic oligonucleotide
  Sense strand starting at position 3754 of SEQ ID NO: 1562302
cagugacagucuugggaga

SEQ ID NO: 1737134 - RNA, 19 nt, Artificial Sequence
  Description of Artificial Sequence: Synthetic oligonucleotide
  Antisense strand to SEQ ID NO: 1737133
ucucccaagacugucacug

SEQ ID NO: 1737135 - RNA, 19 nt, Artificial Sequence
  Description of Artificial Sequence: Synthetic oligonucleotide
  Sense strand starting at position 3756 of SEQ ID NO: 1562302
gugacagucuugggagaca

SEQ ID NO: 1737136 - RNA, 19 nt, Artificial Sequence
  Description of Artificial Sequence: Synthetic oligonucleotide
  Antisense strand to SEQ ID NO: 1737135
ugucucccaagacugucac

SEQ ID NO: 1737137 - RNA, 19 nt, Artificial Sequence
  Description of Artificial Sequence: Synthetic oligonucleotide
  Sense strand starting at position 3846 of SEQ ID NO: 1562302
ugauauaagugaccucauc

SEQ ID NO: 1737138 - RNA, 19 nt, Artificial Sequence
  Description of Artificial Sequence: Synthetic oligonucleotide
  Antisense strand to SEQ ID NO: 1737137
gaugaggucacuuauauca

SEQ ID NO: 1737139 - RNA, 19 nt, Artificial Sequence
  Description of Artificial Sequence: Synthetic oligonucleotide
  Sense strand starting at position 3872 of SEQ ID NO: 1562302
aggacuccaucuuauguau

SEQ ID NO: 1737140 - RNA, 19 nt, Artificial Sequence
  Description of Artificial Sequence: Synthetic oligonucleotide
  Antisense strand to SEQ ID NO: 1737139
auacauaagauggaguccu

SEQ ID NO: 1737141 - RNA, 19 nt, Artificial Sequence
  Description of Artificial Sequence: Synthetic oligonucleotide
  Sense strand starting at position 119 of SEQ ID NO: 1562303
guugcucaugccuguaacu

SEQ ID NO: 1737142 - RNA, 19 nt, Artificial Sequence
  Description of Artificial Sequence: Synthetic oligonucleotide
  Antisense strand to SEQ ID NO: 1737141
aguuacaggcaugagcaac

SEQ ID NO: 1737143 - RNA, 19 nt, Artificial Sequence
  Description of Artificial Sequence: Synthetic oligonucleotide
  Sense strand starting at position 253 of SEQ ID NO: 1562303
gguggugugccuguaauuc

SEQ ID NO: 1737144 - RNA, 19 nt, Artificial Sequence
  Description of Artificial Sequence: Synthetic oligonucleotide
  Antisense strand to SEQ ID NO: 1737143
gaauuacaggcacaccacc

SEQ ID NO: 1737145 - RNA, 19 nt, Artificial Sequence
  Description of Artificial Sequence: Synthetic oligonucleotide
  Sense strand starting at position 436 of SEQ ID NO: 1562303
agcagaaccucucuaggau

SEQ ID NO: 1737146 - RNA, 19 nt, Artificial Sequence
  Description of Artificial Sequence: Synthetic oligonucleotide
  Antisense strand to SEQ ID NO: 1737145
auccuagagagguucugcu

SEQ ID NO: 1737147 - RNA, 19 nt, Artificial Sequence
  Description of Artificial Sequence: Synthetic oligonucleotide
  Sense strand starting at position 545 of SEQ ID NO: 1562303
acacguaacaguugugaga

SEQ ID NO: 1737148 - RNA, 19 nt, Artificial Sequence
  Description of Artificial Sequence: Synthetic oligonucleotide
  Antisense strand to SEQ ID NO: 1737147
ucucacaacuguuacgugu

SEQ ID NO: 1737149 - RNA, 19 nt, Artificial Sequence
  Description of Artificial Sequence: Synthetic oligonucleotide
  Sense strand starting at position 580 of SEQ ID NO: 1562303
gucucuguuccuggaaagu

SEQ ID NO: 1737150 - RNA, 19 nt, Artificial Sequence
  Description of Artificial Sequence: Synthetic oligonucleotide
  Antisense strand to SEQ ID NO: 1737149
acuuuccaggaacagagac

SEQ ID NO: 1737151 - RNA, 19 nt, Artificial Sequence
  Description of Artificial Sequence: Synthetic oligonucleotide
  Sense strand starting at position 672 of SEQ ID NO: 1562303
cccagaguuugcucaaacc

SEQ ID NO: 1737152 - RNA, 19 nt, Artificial Sequence
  Description of Artificial Sequence: Synthetic oligonucleotide
  Antisense strand to SEQ ID NO: 1737151
gguuugagcaaacucuggg

SEQ ID NO: 1737153 - RNA, 19 nt, Artificial Sequence
  Description of Artificial Sequence: Synthetic oligonucleotide
  Sense strand starting at position 890 of SEQ ID NO: 1562303
aauucugagcgagauucca

SEQ ID NO: 1737154 - RNA, 19 nt, Artificial Sequence
  Description of Artificial Sequence: Synthetic oligonucleotide
  Antisense strand to SEQ ID NO: 1737153
uggaaucucgcucagaauu

SEQ ID NO: 1737155 - RNA, 19 nt, Artificial Sequence
  Description of Artificial Sequence: Synthetic oligonucleotide
  Sense strand starting at position 1006 of SEQ ID NO: 1562303
ucguuacugcugcaaacaa

SEQ ID NO: 1737156 - RNA, 19 nt, Artificial Sequence
  Description of Artificial Sequence: Synthetic oligonucleotide
  Antisense strand to SEQ ID NO: 1737155
uuguuugcagcaguaacga

SEQ ID NO: 1737157 - RNA, 19 nt, Artificial Sequence
  Description of Artificial Sequence: Synthetic oligonucleotide
  Sense strand starting at position 1199 of SEQ ID NO: 1562303
ugccacuucgcuccaguua

SEQ ID NO: 1737158 - RNA, 19 nt, Artificial Sequence
  Description of Artificial Sequence: Synthetic oligonucleotide
  Antisense strand to SEQ ID NO: 1737157
uaacuggagcgaaguggca

SEQ ID NO: 1737159 - RNA, 19 nt, Artificial Sequence
  Description of Artificial Sequence: Synthetic oligonucleotide
  Sense strand starting at position 1210 of SEQ ID NO: 1562303
uccaguuaguuucccaagu

SEQ ID NO: 1737160 - RNA, 19 nt, Artificial Sequence
  Description of Artificial Sequence: Synthetic oligonucleotide
  Antisense strand to SEQ ID NO: 1737159
acuugggaaacuaacugga

SEQ ID NO: 1737161 - RNA, 19 nt, Artificial Sequence
  Description of Artificial Sequence: Synthetic oligonucleotide
  Sense strand starting at position 1211 of SEQ ID NO: 1562303
ccaguuaguuucccaaguu

SEQ ID NO: 1737162 - RNA, 19 nt, Artificial Sequence
  Description of Artificial Sequence: Synthetic oligonucleotide
  Antisense strand to SEQ ID NO: 1737161
aacuugggaaacuaacugg

SEQ ID NO: 1737163 - RNA, 19 nt, Artificial Sequence
  Description of Artificial Sequence: Synthetic oligonucleotide
  Sense strand starting at position 1317 of SEQ ID NO: 1562303
gggcuucgguguccagaga

SEQ ID NO: 1737164 - RNA, 19 nt, Artificial Sequence
  Description of Artificial Sequence: Synthetic oligonucleotide
  Antisense strand to SEQ ID NO: 1737163
ucucuggacaccgaagccc

SEQ ID NO: 1737165 - RNA, 19 nt, Artificial Sequence
  Description of Artificial Sequence: Synthetic oligonucleotide
  Sense strand starting at position 1378 of SEQ ID NO: 1562303
gcuuauguuccgcugagcu

SEQ ID NO: 1737166 - RNA, 19 nt, Artificial Sequence
  Description of Artificial Sequence: Synthetic oligonucleotide
  Antisense strand to SEQ ID NO: 1737165
agcucagcggaacauaagc

SEQ ID NO: 1737167 - RNA, 19 nt, Artificial Sequence
  Description of Artificial Sequence: Synthetic oligonucleotide
  Sense strand starting at position 1380 of SEQ ID NO: 1562303
uuauguuccgcugagcuca

SEQ ID NO: 1737168 - RNA, 19 nt, Artificial Sequence
  Description of Artificial Sequence: Synthetic oligonucleotide
  Antisense strand to SEQ ID NO: 1737167
ugagcucagcggaacauaa

SEQ ID NO: 1737169 - RNA, 19 nt, Artificial Sequence
  Description of Artificial Sequence: Synthetic oligonucleotide
  Sense strand starting at position 1604 of SEQ ID NO: 1562303
cgggcuuucugaccgcauu

SEQ ID NO: 1737170 - RNA, 19 nt, Artificial Sequence
  Description of Artificial Sequence: Synthetic oligonucleotide
  Antisense strand to SEQ ID NO: 1737169
aaugcggucagaaagcccg

SEQ ID NO: 1737171 - RNA, 19 nt, Artificial Sequence
  Description of Artificial Sequence: Synthetic oligonucleotide
  Sense strand starting at position 1617 of SEQ ID NO: 1562303
cgcauucggccgaguucuu

SEQ ID NO: 1737172 - RNA, 19 nt, Artificial Sequence
  Description of Artificial Sequence: Synthetic oligonucleotide
  Antisense strand to SEQ ID NO: 1737171
aagaacucggccgaaugcg

SEQ ID NO: 1737173 - RNA, 19 nt, Artificial Sequence
  Description of Artificial Sequence: Synthetic oligonucleotide
  Sense strand starting at position 1626 of SEQ ID NO: 1562303
ccgaguucuucucugaaga

SEQ ID NO: 1737174 - RNA, 19 nt, Artificial Sequence
  Description of Artificial Sequence: Synthetic oligonucleotide
  Antisense strand to SEQ ID NO: 1737173
ucuucagagaagaacucgg

SEQ ID NO: 1737175 - RNA, 19 nt, Artificial Sequence
  Description of Artificial Sequence: Synthetic oligonucleotide
  Sense strand starting at position 1627 of SEQ ID NO: 1562303
cgaguucuucucugaagac

SEQ ID NO: 1737176 - RNA, 19 nt, Artificial Sequence
  Description of Artificial Sequence: Synthetic oligonucleotide
  Antisense strand to SEQ ID NO: 1737175
gucuucagagaagaacucg

SEQ ID NO: 1737177 - RNA, 19 nt, Artificial Sequence
  Description of Artificial Sequence: Synthetic oligonucleotide
  Sense strand starting at position 2996 of SEQ ID NO: 1562303
aguccuuacugugugaaag

SEQ ID NO: 1737178 - RNA, 19 nt, Artificial Sequence
  Description of Artificial Sequence: Synthetic oligonucleotide
  Antisense strand to SEQ ID NO: 1737177
cuuucacacaguaaggacu

SEQ ID NO: 1737179 - RNA, 19 nt, Artificial Sequence
  Description of Artificial Sequence: Synthetic oligonucleotide
  Sense strand starting at position 3202 of SEQ ID NO: 1562303
guccuagguuucgugggaa

SEQ ID NO: 1737180 - RNA, 19 nt, Artificial Sequence
  Description of Artificial Sequence: Synthetic oligonucleotide
  Antisense strand to SEQ ID NO: 1737179
uucccacgaaaccuaggac

SEQ ID NO: 1737181 - RNA, 19 nt, Artificial Sequence
  Description of Artificial Sequence: Synthetic oligonucleotide
  Sense strand starting at position 3205 of SEQ ID NO: 1562303
cuagguuucgugggaauaa

SEQ ID NO: 1737182 - RNA, 19 nt, Artificial Sequence
  Description of Artificial Sequence: Synthetic oligonucleotide
  Antisense strand to SEQ ID NO: 1737181
uuauucccacgaaaccuag

SEQ ID NO: 1737183 - RNA, 19 nt, Artificial Sequence
  Description of Artificial Sequence: Synthetic oligonucleotide
  Sense strand starting at position 3540 of SEQ ID NO: 1562303
agaccaggucugugcuaua

SEQ ID NO: 1737184 - RNA, 19 nt, Artificial Sequence
  Description of Artificial Sequence: Synthetic oligonucleotide
  Antisense strand to SEQ ID NO: 1737183
uauagcacagaccuggucu

SEQ ID NO: 1737185 - RNA, 19 nt, Artificial Sequence
  Description of Artificial Sequence: Synthetic oligonucleotide
  Sense strand starting at position 3553 of SEQ ID NO: 1562303
gcuauaucccgacauggau

SEQ ID NO: 1737186 - RNA, 19 nt, Artificial Sequence
  Description of Artificial Sequence: Synthetic oligonucleotide
  Antisense strand to SEQ ID NO: 1737185
auccaugucgggauauagc

SEQ ID NO: 1737187 - RNA, 19 nt, Artificial Sequence
  Description of Artificial Sequence: Synthetic oligonucleotide
  Sense strand starting at position 3601 of SEQ ID NO: 1562303
acgacaugagguugacuuu

SEQ ID NO: 1737188 - RNA, 19 nt, Artificial Sequence
  Description of Artificial Sequence: Synthetic oligonucleotide
  Antisense strand to SEQ ID NO: 1737187
aaagucaaccucaugucgu

SEQ ID NO: 1737189 - RNA, 19 nt, Artificial Sequence
  Description of Artificial Sequence: Synthetic oligonucleotide
  Sense strand starting at position 3604 of SEQ ID NO: 1562303
acaugagguugacuuugaa

SEQ ID NO: 1737190 - RNA, 19 nt, Artificial Sequence
  Description of Artificial Sequence: Synthetic oligonucleotide
  Antisense strand to SEQ ID NO: 1737189
uucaaagucaaccucaugu

SEQ ID NO: 1737191 - RNA, 19 nt, Artificial Sequence
  Description of Artificial Sequence: Synthetic oligonucleotide
  Sense strand starting at position 3607 of SEQ ID NO: 1562303
ugagguugacuuugaagga

SEQ ID NO: 1737192 - RNA, 19 nt, Artificial Sequence
  Description of Artificial Sequence: Synthetic oligonucleotide
  Antisense strand to SEQ ID NO: 1737191
uccuucaaagucaaccuca

SEQ ID NO: 1737193 - RNA, 19 nt, Artificial Sequence
  Description of Artificial Sequence: Synthetic oligonucleotide
  Sense strand starting at position 3608 of SEQ ID NO: 1562303
gagguugacuuugaaggaa

SEQ ID NO: 1737194 - RNA, 19 nt, Artificial Sequence
  Description of Artificial Sequence: Synthetic oligonucleotide
  Antisense strand to SEQ ID NO: 1737193
uuccuucaaagucaaccuc

SEQ ID NO: 1737195 - RNA, 19 nt, Artificial Sequence
  Description of Artificial Sequence: Synthetic oligonucleotide
  Sense strand starting at position 3627 of SEQ ID NO: 1562303
auauuuccuugagagacca

SEQ ID NO: 1737196 - RNA, 19 nt, Artificial Sequence
  Description of Artificial Sequence: Synthetic oligonucleotide
  Antisense strand to SEQ ID NO: 1737195
uggucucucaaggaaauau

SEQ ID NO: 1737197 - RNA, 19 nt, Artificial Sequence
  Description of Artificial Sequence: Synthetic oligonucleotide
  Sense strand starting at position 3654 of SEQ ID NO: 1562303
uguaaauggccuuguguaa

SEQ ID NO: 1737198 - RNA, 19 nt, Artificial Sequence
  Description of Artificial Sequence: Synthetic oligonucleotide
  Antisense strand to SEQ ID NO: 1737197
uuacacaaggccauuuaca

SEQ ID NO: 1737199 - RNA, 19 nt, Artificial Sequence
  Description of Artificial Sequence: Synthetic oligonucleotide
  Sense strand starting at position 3681 of SEQ ID NO: 1562303
gguccaugagcuuguguac

SEQ ID NO: 1737200 - RNA, 19 nt, Artificial Sequence
  Description of Artificial Sequence: Synthetic oligonucleotide
  Antisense strand to SEQ ID NO: 1737199
guacacaagcucauggacc

SEQ ID NO: 1737201 - RNA, 19 nt, Artificial Sequence
  Description of Artificial Sequence: Synthetic oligonucleotide
  Sense strand starting at position 3690 of SEQ ID NO: 1562303
gcuuguguacuuguguuau

SEQ ID NO: 1737202 - RNA, 19 nt, Artificial Sequence
  Description of Artificial Sequence: Synthetic oligonucleotide
  Antisense strand to SEQ ID NO: 1737201
auaacacaaguacacaagc

SEQ ID NO: 1737203 - RNA, 19 nt, Artificial Sequence
  Description of Artificial Sequence: Synthetic oligonucleotide
  Sense strand starting at position 3692 of SEQ ID NO: 1562303
uuguguacuuguguuauca

SEQ ID NO: 1737204 - RNA, 19 nt, Artificial Sequence
  Description of Artificial Sequence: Synthetic oligonucleotide
  Antisense strand to SEQ ID NO: 1737203
ugauaacacaaguacacaa

SEQ ID NO: 1737205 - RNA, 19 nt, Artificial Sequence
  Description of Artificial Sequence: Synthetic oligonucleotide
  Sense strand starting at position 3714 of SEQ ID NO: 1562303
acacaaauguguguuccau

SEQ ID NO: 1737206 - RNA, 19 nt, Artificial Sequence
  Description of Artificial Sequence: Synthetic oligonucleotide
  Antisense strand to SEQ ID NO: 1737205
auggaacacacauuugugu

SEQ ID NO: 1737207 - RNA, 19 nt, Artificial Sequence
  Description of Artificial Sequence: Synthetic oligonucleotide
  Sense strand starting at position 3808 of SEQ ID NO: 1562303
cgcauaccucuugaguaag

SEQ ID NO: 1737208 - RNA, 19 nt, Artificial Sequence
  Description of Artificial Sequence: Synthetic oligonucleotide
  Antisense strand to SEQ ID NO: 1737207
cuuacucaagagguaugcg

SEQ ID NO: 1737209 - RNA, 19 nt, Artificial Sequence
  Description of Artificial Sequence: Synthetic oligonucleotide
  Sense strand starting at position 3825 of SEQ ID NO: 1562303
agacguuagcgggagauga

SEQ ID NO: 1737210 - RNA, 19 nt, Artificial Sequence
  Description of Artificial Sequence: Synthetic oligonucleotide
  Antisense strand to SEQ ID NO: 1737209
ucaucucccgcuaacgucu

SEQ ID NO: 1737211 - RNA, 19 nt, Artificial Sequence
  Description of Artificial Sequence: Synthetic oligonucleotide
  Sense strand starting at position 3836 of SEQ ID NO: 1562303
ggagaugaggcucgcacau

SEQ ID NO: 1737212 - RNA, 19 nt, Artificial Sequence
  Description of Artificial Sequence: Synthetic oligonucleotide
  Antisense strand to SEQ ID NO: 1737211
augugcgagccucaucucc

SEQ ID NO: 1737213 - RNA, 19 nt, Artificial Sequence
  Description of Artificial Sequence: Synthetic oligonucleotide
  Sense strand starting at position 3856 of SEQ ID NO: 1562303
gucucaaacucucggauuu

SEQ ID NO: 1737214 - RNA, 19 nt, Artificial Sequence
  Description of Artificial Sequence: Synthetic oligonucleotide
  Antisense strand to SEQ ID NO: 1737213
aaauccgagaguuugagac

SEQ ID NO: 1737215 - RNA, 19 nt, Artificial Sequence
  Description of Artificial Sequence: Synthetic oligonucleotide
  Sense strand starting at position 3858 of SEQ ID NO: 1562303
cucaaacucucggauuuga

SEQ ID NO: 1737216 - RNA, 19 nt, Artificial Sequence
  Description of Artificial Sequence: Synthetic oligonucleotide
  Antisense strand to SEQ ID NO: 1737215
ucaaauccgagaguuugag

SEQ ID NO: 1737217 - RNA, 19 nt, Artificial Sequence
  Description of Artificial Sequence: Synthetic oligonucleotide
  Sense strand starting at position 3909 of SEQ ID NO: 1562303
gggcgaugcucuguggaug

SEQ ID NO: 1737218 - RNA, 19 nt, Artificial Sequence
  Description of Artificial Sequence: Synthetic oligonucleotide
  Antisense strand to SEQ ID NO: 1737217
cauccacagagcaucgccc

SEQ ID NO: 1737219 - RNA, 19 nt, Artificial Sequence
  Description of Artificial Sequence: Synthetic oligonucleotide
  Sense strand starting at position 3938 of SEQ ID NO: 1562303
uuuggugagcugugucaug

SEQ ID NO: 1737220 - RNA, 19 nt, Artificial Sequence
  Description of Artificial Sequence: Synthetic oligonucleotide
  Antisense strand to SEQ ID NO: 1737219
caugacacagcucaccaaa

SEQ ID NO: 1737221 - RNA, 19 nt, Artificial Sequence
  Description of Artificial Sequence: Synthetic oligonucleotide
  Sense strand starting at position 4 of SEQ ID NO: 1562304
ccuccuugagggugaguau

SEQ ID NO: 1737222 - RNA, 19 nt, Artificial Sequence
  Description of Artificial Sequence: Synthetic oligonucleotide
  Antisense strand to SEQ ID NO: 1737221
auacucacccucaaggagg

SEQ ID NO: 1737223 - RNA, 19 nt, Artificial Sequence
  Description of Artificial Sequence: Synthetic oligonucleotide
  Sense strand starting at position 7 of SEQ ID NO: 1562304
ccuugagggugaguaucua

SEQ ID NO: 1737224 - RNA, 19 nt, Artificial Sequence
  Description of Artificial Sequence: Synthetic oligonucleotide
  Antisense strand to SEQ ID NO: 1737223
uagauacucacccucaagg

SEQ ID NO: 1737225 - RNA, 19 nt, Artificial Sequence
  Description of Artificial Sequence: Synthetic oligonucleotide
  Sense strand starting at position 11 of SEQ ID NO: 1562304
gagggugaguaucuacaaa

SEQ ID NO: 1737226 - RNA, 19 nt, Artificial Sequence
  Description of Artificial Sequence: Synthetic oligonucleotide
  Antisense strand to SEQ ID NO: 1737225
uuuguagauacucacccuc

SEQ ID NO: 1737227 - RNA, 19 nt, Artificial Sequence
  Description of Artificial Sequence: Synthetic oligonucleotide
  Sense strand starting at position 295 of SEQ ID NO: 1562304
gguggugugccuguaauuc

SEQ ID NO: 1737228 - RNA, 19 nt, Artificial Sequence
  Description of Artificial Sequence: Synthetic oligonucleotide
  Antisense strand to SEQ ID NO: 1737227
gaauuacaggcacaccacc

SEQ ID NO: 1737229 - RNA, 19 nt, Artificial Sequence
  Description of Artificial Sequence: Synthetic oligonucleotide
  Sense strand starting at position 478 of SEQ ID NO: 1562304
agcagaaccucucuaggau

SEQ ID NO: 1737230 - RNA, 19 nt, Artificial Sequence
  Description of Artificial Sequence: Synthetic oligonucleotide
  Antisense strand to SEQ ID NO: 1737229
auccuagagagguucugcu

SEQ ID NO: 1737231 - RNA, 19 nt, Artificial Sequence
  Description of Artificial Sequence: Synthetic oligonucleotide
  Sense strand starting at position 587 of SEQ ID NO: 1562304
acacguaacaguugugaga

SEQ ID NO: 1737232 - RNA, 19 nt, Artificial Sequence
  Description of Artificial Sequence: Synthetic oligonucleotide
  Antisense strand to SEQ ID NO: 1737231
ucucacaacuguuacgugu

SEQ ID NO: 1737233 - RNA, 19 nt, Artificial Sequence
  Description of Artificial Sequence: Synthetic oligonucleotide
  Sense strand starting at position 622 of SEQ ID NO: 1562304
gucucuguuccuggaaagu

SEQ ID NO: 1737234 - RNA, 19 nt, Artificial Sequence
  Description of Artificial Sequence: Synthetic oligonucleotide
  Antisense strand to SEQ ID NO: 1737233
acuuuccaggaacagagac

SEQ ID NO: 1737235 - RNA, 19 nt, Artificial Sequence
  Description of Artificial Sequence: Synthetic oligonucleotide
  Sense strand starting at position 714 of SEQ ID NO: 1562304
cccagaguuugcucaaacc

SEQ ID NO: 1737236 - RNA, 19 nt, Artificial Sequence
  Description of Artificial Sequence: Synthetic oligonucleotide
  Antisense strand to SEQ ID NO: 1737235
gguuugagcaaacucuggg

SEQ ID NO: 1737237 - RNA, 19 nt, Artificial Sequence
  Description of Artificial Sequence: Synthetic oligonucleotide
  Sense strand starting at position 932 of SEQ ID NO: 1562304
aauucugagcgagauucca

SEQ ID NO: 1737238 - RNA, 19 nt, Artificial Sequence
  Description of Artificial Sequence: Synthetic oligonucleotide
  Antisense strand to SEQ ID NO: 1737237
uggaaucucgcucagaauu

SEQ ID NO: 1737239 - RNA, 19 nt, Artificial Sequence
  Description of Artificial Sequence: Synthetic oligonucleotide
  Sense strand starting at position 1048 of SEQ ID NO: 1562304
ucguuacugcugcaaacaa

SEQ ID NO: 1737240 - RNA, 19 nt, Artificial Sequence
  Description of Artificial Sequence: Synthetic oligonucleotide
  Antisense strand to SEQ ID NO: 1737239
uuguuugcagcaguaacga

SEQ ID NO: 1737241 - RNA, 19 nt, Artificial Sequence
  Description of Artificial Sequence: Synthetic oligonucleotide
  Sense strand starting at position 1241 of SEQ ID NO: 1562304
ugccacuucgcuccaguua

SEQ ID NO: 1737242 - RNA, 19 nt, Artificial Sequence
  Description of Artificial Sequence: Synthetic oligonucleotide
  Antisense strand to SEQ ID NO: 1737241
uaacuggagcgaaguggca

SEQ ID NO: 1737243 - RNA, 19 nt, Artificial Sequence
  Description of Artificial Sequence: Synthetic oligonucleotide
  Sense strand starting at position 1252 of SEQ ID NO: 1562304
uccaguuaguuucccaagu

SEQ ID NO: 1737244 - RNA, 19 nt, Artificial Sequence
  Description of Artificial Sequence: Synthetic oligonucleotide
  Antisense strand to SEQ ID NO: 1737243
acuugggaaacuaacugga

SEQ ID NO: 1737245 - RNA, 19 nt, Artificial Sequence
  Description of Artificial Sequence: Synthetic oligonucleotide
  Sense strand starting at position 1253 of SEQ ID NO: 1562304
ccaguuaguuucccaaguu

SEQ ID NO: 1737246 - RNA, 19 nt, Artificial Sequence
  Description of Artificial Sequence: Synthetic oligonucleotide
  Antisense strand to SEQ ID NO: 1737245
aacuugggaaacuaacugg

SEQ ID NO: 1737247 - RNA, 19 nt, Artificial Sequence
  Description of Artificial Sequence: Synthetic oligonucleotide
  Sense strand starting at position 1359 of SEQ ID NO: 1562304
gggcuucgguguccagaga

SEQ ID NO: 1737248 - RNA, 19 nt, Artificial Sequence
  Description of Artificial Sequence: Synthetic oligonucleotide
  Antisense strand to SEQ ID NO: 1737247
ucucuggacaccgaagccc

SEQ ID NO: 1737249 - RNA, 19 nt, Artificial Sequence
  Description of Artificial Sequence: Synthetic oligonucleotide
  Sense strand starting at position 1420 of SEQ ID NO: 1562304
gcuuauguuccgcugagcu

SEQ ID NO: 1737250 - RNA, 19 nt, Artificial Sequence
  Description of Artificial Sequence: Synthetic oligonucleotide
  Antisense strand to SEQ ID NO: 1737249
agcucagcggaacauaagc

SEQ ID NO: 1737251 - RNA, 19 nt, Artificial Sequence
  Description of Artificial Sequence: Synthetic oligonucleotide
  Sense strand starting at position 1422 of SEQ ID NO: 1562304
uuauguuccgcugagcuca

SEQ ID NO: 1737252 - RNA, 19 nt, Artificial Sequence
  Description of Artificial Sequence: Synthetic oligonucleotide
  Antisense strand to SEQ ID NO: 1737251
ugagcucagcggaacauaa

SEQ ID NO: 1737253 - RNA, 19 nt, Artificial Sequence
  Description of Artificial Sequence: Synthetic oligonucleotide
  Sense strand starting at position 1659 of SEQ ID NO: 1562304
cgcauucggccgaguucuu

SEQ ID NO: 1737254 - RNA, 19 nt, Artificial Sequence
  Description of Artificial Sequence: Synthetic oligonucleotide
  Antisense strand to SEQ ID NO: 1737253
aagaacucggccgaaugcg

SEQ ID NO: 1737255 - RNA, 19 nt, Artificial Sequence
  Description of Artificial Sequence: Synthetic oligonucleotide
  Sense strand starting at position 1668 of SEQ ID NO: 1562304
ccgaguucuucucugaaga

SEQ ID NO: 1737256 - RNA, 19 nt, Artificial Sequence
  Description of Artificial Sequence: Synthetic oligonucleotide
  Antisense strand to SEQ ID NO: 1737255
ucuucagagaagaacucgg

SEQ ID NO: 1737257 - RNA, 19 nt, Artificial Sequence
  Description of Artificial Sequence: Synthetic oligonucleotide
  Sense strand starting at position 1669 of SEQ ID NO: 1562304
cgaguucuucucugaagac

SEQ ID NO: 1737258 - RNA, 19 nt, Artificial Sequence
  Description of Artificial Sequence: Synthetic oligonucleotide
  Antisense strand to SEQ ID NO: 1737257
gucuucagagaagaacucg

SEQ ID NO: 1737259 - RNA, 19 nt, Artificial Sequence
  Description of Artificial Sequence: Synthetic oligonucleotide
  Sense strand starting at position 3038 of SEQ ID NO: 1562304
aguccuuacugugugaaag

SEQ ID NO: 1737260 - RNA, 19 nt, Artificial Sequence
  Description of Artificial Sequence: Synthetic oligonucleotide
  Antisense strand to SEQ ID NO: 1737259
cuuucacacaguaaggacu

SEQ ID NO: 1737261 - RNA, 19 nt, Artificial Sequence
  Description of Artificial Sequence: Synthetic oligonucleotide
  Sense strand starting at position 3244 of SEQ ID NO: 1562304
guccuagguuucgugggaa

SEQ ID NO: 1737262 - RNA, 19 nt, Artificial Sequence
  Description of Artificial Sequence: Synthetic oligonucleotide
  Antisense strand to SEQ ID NO: 1737261
uucccacgaaaccuaggac

SEQ ID NO: 1737263 - RNA, 19 nt, Artificial Sequence
  Description of Artificial Sequence: Synthetic oligonucleotide
  Sense strand starting at position 3247 of SEQ ID NO: 1562304
cuagguuucgugggaauaa

SEQ ID NO: 1737264 - RNA, 19 nt, Artificial Sequence
  Description of Artificial Sequence: Synthetic oligonucleotide
  Antisense strand to SEQ ID NO: 1737263
uuauucccacgaaaccuag

SEQ ID NO: 1737265 - RNA, 19 nt, Artificial Sequence
  Description of Artificial Sequence: Synthetic oligonucleotide
  Sense strand starting at position 3582 of SEQ ID NO: 1562304
agaccaggucugugcuaua

SEQ ID NO: 1737266 - RNA, 19 nt, Artificial Sequence
  Description of Artificial Sequence: Synthetic oligonucleotide
  Antisense strand to SEQ ID NO: 1737265
uauagcacagaccuggucu

SEQ ID NO: 1737267 - RNA, 19 nt, Artificial Sequence
  Description of Artificial Sequence: Synthetic oligonucleotide
  Sense strand starting at position 3595 of SEQ ID NO: 1562304
gcuauaucccgacauggau

SEQ ID NO: 1737268 - RNA, 19 nt, Artificial Sequence
  Description of Artificial Sequence: Synthetic oligonucleotide
  Antisense strand to SEQ ID NO: 1737267
auccaugucgggauauagc

SEQ ID NO: 1737269 - RNA, 19 nt, Artificial Sequence
  Description of Artificial Sequence: Synthetic oligonucleotide
  Sense strand starting at position 3643 of SEQ ID NO: 1562304
acgacaugagguugacuuu

SEQ ID NO: 1737270 - RNA, 19 nt, Artificial Sequence
  Description of Artificial Sequence: Synthetic oligonucleotide
  Antisense strand to SEQ ID NO: 1737269
aaagucaaccucaugucgu

SEQ ID NO: 1737271 - RNA, 19 nt, Artificial Sequence
  Description of Artificial Sequence: Synthetic oligonucleotide
  Sense strand starting at position 3646 of SEQ ID NO: 1562304
acaugagguugacuuugaa

SEQ ID NO: 1737272 - RNA, 19 nt, Artificial Sequence
  Description of Artificial Sequence: Synthetic oligonucleotide
  Antisense strand to SEQ ID NO: 1737271
uucaaagucaaccucaugu

SEQ ID NO: 1737273 - RNA, 19 nt, Artificial Sequence
  Description of Artificial Sequence: Synthetic oligonucleotide
  Sense strand starting at position 3649 of SEQ ID NO: 1562304
ugagguugacuuugaagga

SEQ ID NO: 1737274 - RNA, 19 nt, Artificial Sequence
  Description of Artificial Sequence: Synthetic oligonucleotide
  Antisense strand to SEQ ID NO: 1737273
uccuucaaagucaaccuca

SEQ ID NO: 1737275 - RNA, 19 nt, Artificial Sequence
  Description of Artificial Sequence: Synthetic oligonucleotide
  Sense strand starting at position 3650 of SEQ ID NO: 1562304
gagguugacuuugaaggaa

SEQ ID NO: 1737276 - RNA, 19 nt, Artificial Sequence
  Description of Artificial Sequence: Synthetic oligonucleotide
  Antisense strand to SEQ ID NO: 1737275
uuccuucaaagucaaccuc

SEQ ID NO: 1737277 - RNA, 19 nt, Artificial Sequence
  Description of Artificial Sequence: Synthetic oligonucleotide
  Sense strand starting at position 3669 of SEQ ID NO: 1562304
auauuuccuugagagacca

SEQ ID NO: 1737278 - RNA, 19 nt, Artificial Sequence
  Description of Artificial Sequence: Synthetic oligonucleotide
  Antisense strand to SEQ ID NO: 1737277
uggucucucaaggaaauau

SEQ ID NO: 1737279 - RNA, 19 nt, Artificial Sequence
  Description of Artificial Sequence: Synthetic oligonucleotide
  Sense strand starting at position 3696 of SEQ ID NO: 1562304
uguaaauggccuuguguaa

SEQ ID NO: 1737280 - RNA, 19 nt, Artificial Sequence
  Description of Artificial Sequence: Synthetic oligonucleotide
  Antisense strand to SEQ ID NO: 1737279
uuacacaaggccauuuaca

SEQ ID NO: 1737281 - RNA, 19 nt, Artificial Sequence
  Description of Artificial Sequence: Synthetic oligonucleotide
  Sense strand starting at position 3723 of SEQ ID NO: 1562304
gguccaugagcuuguguac

SEQ ID NO: 1737282 - RNA, 19 nt, Artificial Sequence
  Description of Artificial Sequence: Synthetic oligonucleotide
  Antisense strand to SEQ ID NO: 1737281
guacacaagcucauggacc

SEQ ID NO: 1737283 - RNA, 19 nt, Artificial Sequence
  Description of Artificial Sequence: Synthetic oligonucleotide
  Sense strand starting at position 3732 of SEQ ID NO: 1562304
gcuuguguacuuguguuau

SEQ ID NO: 1737284 - RNA, 19 nt, Artificial Sequence
  Description of Artificial Sequence: Synthetic oligonucleotide
  Antisense strand to SEQ ID NO: 1737283
auaacacaaguacacaagc

SEQ ID NO: 1737285 - RNA, 19 nt, Artificial Sequence
  Description of Artificial Sequence: Synthetic oligonucleotide
  Sense strand starting at position 3734 of SEQ ID NO: 1562304
uuguguacuuguguuauca

SEQ ID NO: 1737286 - RNA, 19 nt, Artificial Sequence
  Description of Artificial Sequence: Synthetic oligonucleotide
  Antisense strand to SEQ ID NO: 1737285
ugauaacacaaguacacaa

SEQ ID NO: 1737287 - RNA, 19 nt, Artificial Sequence
  Description of Artificial Sequence: Synthetic oligonucleotide
  Sense strand starting at position 3756 of SEQ ID NO: 1562304
acacaaauguguguuccau

SEQ ID NO: 1737288 - RNA, 19 nt, Artificial Sequence
  Description of Artificial Sequence: Synthetic oligonucleotide
  Antisense strand to SEQ ID NO: 1737287
auggaacacacauuugugu

SEQ ID NO: 1737289 - RNA, 19 nt, Artificial Sequence
  Description of Artificial Sequence: Synthetic oligonucleotide
  Sense strand starting at position 3850 of SEQ ID NO: 1562304
cgcauaccucuugaguaag

SEQ ID NO: 1737290 - RNA, 19 nt, Artificial Sequence
  Description of Artificial Sequence: Synthetic oligonucleotide
  Antisense strand to SEQ ID NO: 1737289
cuuacucaagagguaugcg

SEQ ID NO: 1737291 - RNA, 19 nt, Artificial Sequence
  Description of Artificial Sequence: Synthetic oligonucleotide
  Sense strand starting at position 3867 of SEQ ID NO: 1562304
agacguuagcgggagauga

SEQ ID NO: 1737292 - RNA, 19 nt, Artificial Sequence
  Description of Artificial Sequence: Synthetic oligonucleotide
  Antisense strand to SEQ ID NO: 1737291
ucaucucccgcuaacgucu

SEQ ID NO: 1737293 - RNA, 19 nt, Artificial Sequence
  Description of Artificial Sequence: Synthetic oligonucleotide
  Sense strand starting at position 3878 of SEQ ID NO: 1562304
ggagaugaggcucgcacau

SEQ ID NO: 1737294 - RNA, 19 nt, Artificial Sequence
  Description of Artificial Sequence: Synthetic oligonucleotide
  Antisense strand to SEQ ID NO: 1737293
augugcgagccucaucucc

SEQ ID NO: 1737295 - RNA, 19 nt, Artificial Sequence
  Description of Artificial Sequence: Synthetic oligonucleotide
  Sense strand starting at position 3900 of SEQ ID NO: 1562304
cucaaacucucggauuuga

SEQ ID NO: 1737296 - RNA, 19 nt, Artificial Sequence
  Description of Artificial Sequence: Synthetic oligonucleotide
  Antisense strand to SEQ ID NO: 1737295
ucaaauccgagaguuugag

SEQ ID NO: 1737297 - RNA, 19 nt, Artificial Sequence
  Description of Artificial Sequence: Synthetic oligonucleotide
  Sense strand starting at position 3951 of SEQ ID NO: 1562304
gggcgaugcucuguggaug

SEQ ID NO: 1737298 - RNA, 19 nt, Artificial Sequence
  Description of Artificial Sequence: Synthetic oligonucleotide
  Antisense strand to SEQ ID NO: 1737297
cauccacagagcaucgccc

SEQ ID NO: 1737299 - RNA, 19 nt, Artificial Sequence
  Description of Artificial Sequence: Synthetic oligonucleotide
  Sense strand starting at position 3980 of SEQ ID NO: 1562304
uuuggugagcugugucaug

SEQ ID NO: 1737300 - RNA, 19 nt, Artificial Sequence
  Description of Artificial Sequence: Synthetic oligonucleotide
  Antisense strand to SEQ ID NO: 1737299
caugacacagcucaccaaa

SEQ ID NO: 1737301 - RNA, 19 nt, Artificial Sequence
  Description of Artificial Sequence: Synthetic oligonucleotide
  Sense strand starting at position 64 of SEQ ID NO: 1562305
uauugaguuuguguuggaa

SEQ ID NO: 1737302 - RNA, 19 nt, Artificial Sequence
  Description of Artificial Sequence: Synthetic oligonucleotide
  Antisense strand to SEQ ID NO: 1737301
uuccaacacaaacucaaua

SEQ ID NO: 1737303 - RNA, 19 nt, Artificial Sequence
  Description of Artificial Sequence: Synthetic oligonucleotide
  Sense strand starting at position 122 of SEQ ID NO: 1562305
ccaugacccucaggaauuu

SEQ ID NO: 1737304 - RNA, 19 nt, Artificial Sequence
  Description of Artificial Sequence: Synthetic oligonucleotide
  Antisense strand to SEQ ID NO: 1737303
aaauuccugagggucaugg

SEQ ID NO: 1737305 - RNA, 19 nt, Artificial Sequence
  Description of Artificial Sequence: Synthetic oligonucleotide
  Sense strand starting at position 134 of SEQ ID NO: 1562305
ggaauuucuccacggugca

SEQ ID NO: 1737306 - RNA, 19 nt, Artificial Sequence
  Description of Artificial Sequence: Synthetic oligonucleotide
  Antisense strand to SEQ ID NO: 1737305
ugcaccguggagaaauucc

SEQ ID NO: 1737307 - RNA, 19 nt, Artificial Sequence
  Description of Artificial Sequence: Synthetic oligonucleotide
  Sense strand starting at position 135 of SEQ ID NO: 1562305
gaauuucuccacggugcaa

SEQ ID NO: 1737308 - RNA, 19 nt, Artificial Sequence
  Description of Artificial Sequence: Synthetic oligonucleotide
  Antisense strand to SEQ ID NO: 1737307
uugcaccguggagaaauuc

SEQ ID NO: 1737309 - RNA, 19 nt, Artificial Sequence
  Description of Artificial Sequence: Synthetic oligonucleotide
  Sense strand starting at position 249 of SEQ ID NO: 1562305
gcaaauaguuacguuugua

SEQ ID NO: 1737310 - RNA, 19 nt, Artificial Sequence
  Description of Artificial Sequence: Synthetic oligonucleotide
  Antisense strand to SEQ ID NO: 1737309
uacaaacguaacuauuugc

SEQ ID NO: 1737311 - RNA, 19 nt, Artificial Sequence
  Description of Artificial Sequence: Synthetic oligonucleotide
  Sense strand starting at position 280 of SEQ ID NO: 1562305
acacgauaguuauauaaac

SEQ ID NO: 1737312 - RNA, 19 nt, Artificial Sequence
  Description of Artificial Sequence: Synthetic oligonucleotide
  Antisense strand to SEQ ID NO: 1737311
guuuauauaacuaucgugu

SEQ ID NO: 1737313 - RNA, 19 nt, Artificial Sequence
  Description of Artificial Sequence: Synthetic oligonucleotide
  Sense strand starting at position 322 of SEQ ID NO: 1562305
gaaguaucaucccgucaag

SEQ ID NO: 1737314 - RNA, 19 nt, Artificial Sequence
  Description of Artificial Sequence: Synthetic oligonucleotide
  Antisense strand to SEQ ID NO: 1737313
cuugacgggaugauacuuc

SEQ ID NO: 1737315 - RNA, 19 nt, Artificial Sequence
  Description of Artificial Sequence: Synthetic oligonucleotide
  Sense strand starting at position 325 of SEQ ID NO: 1562305
guaucaucccgucaaguuc

SEQ ID NO: 1737316 - RNA, 19 nt, Artificial Sequence
  Description of Artificial Sequence: Synthetic oligonucleotide
  Antisense strand to SEQ ID NO: 1737315
gaacuugacgggaugauac

SEQ ID NO: 1737317 - RNA, 19 nt, Artificial Sequence
  Description of Artificial Sequence: Synthetic oligonucleotide
  Sense strand starting at position 427 of SEQ ID NO: 1562305
ggaucacacuuguaauccu

SEQ ID NO: 1737318 - RNA, 19 nt, Artificial Sequence
  Description of Artificial Sequence: Synthetic oligonucleotide
  Antisense strand to SEQ ID NO: 1737317
aggauuacaagugugaucc

SEQ ID NO: 1737319 - RNA, 19 nt, Artificial Sequence
  Description of Artificial Sequence: Synthetic oligonucleotide
  Sense strand starting at position 945 of SEQ ID NO: 1562305
ccggaaaguucugcggcaa

SEQ ID NO: 1737320 - RNA, 19 nt, Artificial Sequence
  Description of Artificial Sequence: Synthetic oligonucleotide
  Antisense strand to SEQ ID NO: 1737319
uugccgcagaacuuuccgg

SEQ ID NO: 1737321 - RNA, 19 nt, Artificial Sequence
  Description of Artificial Sequence: Synthetic oligonucleotide
  Sense strand starting at position 946 of SEQ ID NO: 1562305
cggaaaguucugcggcaaa

SEQ ID NO: 1737322 - RNA, 19 nt, Artificial Sequence
  Description of Artificial Sequence: Synthetic oligonucleotide
  Antisense strand to SEQ ID NO: 1737321
uuugccgcagaacuuuccg

SEQ ID NO: 1737323 - RNA, 19 nt, Artificial Sequence
  Description of Artificial Sequence: Synthetic oligonucleotide
  Sense strand starting at position 1094 of SEQ ID NO: 1562305
gcuuuacauugggcgacua

SEQ ID NO: 1737324 - RNA, 19 nt, Artificial Sequence
  Description of Artificial Sequence: Synthetic oligonucleotide
  Antisense strand to SEQ ID NO: 1737323
uagucgcccaauguaaagc

SEQ ID NO: 1737325 - RNA, 19 nt, Artificial Sequence
  Description of Artificial Sequence: Synthetic oligonucleotide
  Sense strand starting at position 1095 of SEQ ID NO: 1562305
cuuuacauugggcgacuaa

SEQ ID NO: 1737326 - RNA, 19 nt, Artificial Sequence
  Description of Artificial Sequence: Synthetic oligonucleotide
  Antisense strand to SEQ ID NO: 1737325
uuagucgcccaauguaaag

SEQ ID NO: 1737327 - RNA, 19 nt, Artificial Sequence
  Description of Artificial Sequence: Synthetic oligonucleotide
  Sense strand starting at position 1096 of SEQ ID NO: 1562305
uuuacauugggcgacuaaa

SEQ ID NO: 1737328 - RNA, 19 nt, Artificial Sequence
  Description of Artificial Sequence: Synthetic oligonucleotide
  Antisense strand to SEQ ID NO: 1737327
uuuagucgcccaauguaaa

SEQ ID NO: 1737329 - RNA, 19 nt, Artificial Sequence
  Description of Artificial Sequence: Synthetic oligonucleotide
  Sense strand starting at position 1165 of SEQ ID NO: 1562305
acacgugauuaauugcacu

SEQ ID NO: 1737330 - RNA, 19 nt, Artificial Sequence
  Description of Artificial Sequence: Synthetic oligonucleotide
  Antisense strand to SEQ ID NO: 1737329
agugcaauuaaucacgugu

SEQ ID NO: 1737331 - RNA, 19 nt, Artificial Sequence
  Description of Artificial Sequence: Synthetic oligonucleotide
  Sense strand starting at position 1168 of SEQ ID NO: 1562305
cgugauuaauugcacuaag

SEQ ID NO: 1737332 - RNA, 19 nt, Artificial Sequence
  Description of Artificial Sequence: Synthetic oligonucleotide
  Antisense strand to SEQ ID NO: 1737331
cuuagugcaauuaaucacg

SEQ ID NO: 1737333 - RNA, 19 nt, Artificial Sequence
  Description of Artificial Sequence: Synthetic oligonucleotide
  Sense strand starting at position 1515 of SEQ ID NO: 1562305
ccuugagccgcccauuaua

SEQ ID NO: 1737334 - RNA, 19 nt, Artificial Sequence
  Description of Artificial Sequence: Synthetic oligonucleotide
  Antisense strand to SEQ ID NO: 1737333
uauaaugggcggcucaagg

SEQ ID NO: 1737335 - RNA, 19 nt, Artificial Sequence
  Description of Artificial Sequence: Synthetic oligonucleotide
  Sense strand starting at position 1651 of SEQ ID NO: 1562305
guacugaggcguugagaag

SEQ ID NO: 1737336 - RNA, 19 nt, Artificial Sequence
  Description of Artificial Sequence: Synthetic oligonucleotide
  Antisense strand to SEQ ID NO: 1737335
cuucucaacgccucaguac

SEQ ID NO: 1737337 - RNA, 19 nt, Artificial Sequence
  Description of Artificial Sequence: Synthetic oligonucleotide
  Sense strand starting at position 1816 of SEQ ID NO: 1562305
ggauguugccaagagcaac

SEQ ID NO: 1737338 - RNA, 19 nt, Artificial Sequence
  Description of Artificial Sequence: Synthetic oligonucleotide
  Antisense strand to SEQ ID NO: 1737337
guugcucuuggcaacaucc

SEQ ID NO: 1737339 - RNA, 19 nt, Artificial Sequence
  Description of Artificial Sequence: Synthetic oligonucleotide
  Sense strand starting at position 2022 of SEQ ID NO: 1562305
gugacuguugucgcggcaa

SEQ ID NO: 1737340 - RNA, 19 nt, Artificial Sequence
  Description of Artificial Sequence: Synthetic oligonucleotide
  Antisense strand to SEQ ID NO: 1737339
uugccgcgacaacagucac

SEQ ID NO: 1737341 - RNA, 19 nt, Artificial Sequence
  Description of Artificial Sequence: Synthetic oligonucleotide
  Sense strand starting at position 2024 of SEQ ID NO: 1562305
gacuguugucgcggcaacu

SEQ ID NO: 1737342 - RNA, 19 nt, Artificial Sequence
  Description of Artificial Sequence: Synthetic oligonucleotide
  Antisense strand to SEQ ID NO: 1737341
aguugccgcgacaacaguc

SEQ ID NO: 1737343 - RNA, 19 nt, Artificial Sequence
  Description of Artificial Sequence: Synthetic oligonucleotide
  Sense strand starting at position 2109 of SEQ ID NO: 1562305
gauuuccacucagggagau

SEQ ID NO: 1737344 - RNA, 19 nt, Artificial Sequence
  Description of Artificial Sequence: Synthetic oligonucleotide
  Antisense strand to SEQ ID NO: 1737343
aucucccugaguggaaauc

SEQ ID NO: 1737345 - RNA, 19 nt, Artificial Sequence
  Description of Artificial Sequence: Synthetic oligonucleotide
  Sense strand starting at position 2122 of SEQ ID NO: 1562305
ggagauacgugggcugaga

SEQ ID NO: 1737346 - RNA, 19 nt, Artificial Sequence
  Description of Artificial Sequence: Synthetic oligonucleotide
  Antisense strand to SEQ ID NO: 1737345
ucucagcccacguaucucc

SEQ ID NO: 1737347 - RNA, 19 nt, Artificial Sequence
  Description of Artificial Sequence: Synthetic oligonucleotide
  Sense strand starting at position 2279 of SEQ ID NO: 1562305
cuguuuccggccugggaaa

SEQ ID NO: 1737348 - RNA, 19 nt, Artificial Sequence
  Description of Artificial Sequence: Synthetic oligonucleotide
  Antisense strand to SEQ ID NO: 1737347
uuucccaggccggaaacag

SEQ ID NO: 1737349 - RNA, 19 nt, Artificial Sequence
  Description of Artificial Sequence: Synthetic oligonucleotide
  Sense strand starting at position 2316 of SEQ ID NO: 1562305
agaacugagucuugcuguu

SEQ ID NO: 1737350 - RNA, 19 nt, Artificial Sequence
  Description of Artificial Sequence: Synthetic oligonucleotide
  Antisense strand to SEQ ID NO: 1737349
aacagcaagacucaguucu

SEQ ID NO: 1737351 - RNA, 19 nt, Artificial Sequence
  Description of Artificial Sequence: Synthetic oligonucleotide
  Sense strand starting at position 2399 of SEQ ID NO: 1562305
cguucagguugauuuggau

SEQ ID NO: 1737352 - RNA, 19 nt, Artificial Sequence
  Description of Artificial Sequence: Synthetic oligonucleotide
  Antisense strand to SEQ ID NO: 1737351
auccaaaucaaccugaacg

SEQ ID NO: 1737353 - RNA, 19 nt, Artificial Sequence
  Description of Artificial Sequence: Synthetic oligonucleotide
  Sense strand starting at position 2405 of SEQ ID NO: 1562305
gguugauuuggauggcguu

SEQ ID NO: 1737354 - RNA, 19 nt, Artificial Sequence
  Description of Artificial Sequence: Synthetic oligonucleotide
  Antisense strand to SEQ ID NO: 1737353
aacgccauccaaaucaacc

SEQ ID NO: 1737355 - RNA, 19 nt, Artificial Sequence
  Description of Artificial Sequence: Synthetic oligonucleotide
  Sense strand starting at position 2452 of SEQ ID NO: 1562305
gagcgacccucccagaaau

SEQ ID NO: 1737356 - RNA, 19 nt, Artificial Sequence
  Description of Artificial Sequence: Synthetic oligonucleotide
  Antisense strand to SEQ ID NO: 1737355
auuucugggagggucgcuc

SEQ ID NO: 1737357 - RNA, 19 nt, Artificial Sequence
  Description of Artificial Sequence: Synthetic oligonucleotide
  Sense strand starting at position 2454 of SEQ ID NO: 1562305
gcgacccucccagaaauau

SEQ ID NO: 1737358 - RNA, 19 nt, Artificial Sequence
  Description of Artificial Sequence: Synthetic oligonucleotide
  Antisense strand to SEQ ID NO: 1737357
auauuucugggagggucgc

SEQ ID NO: 1737359 - RNA, 19 nt, Artificial Sequence
  Description of Artificial Sequence: Synthetic oligonucleotide
  Sense strand starting at position 2510 of SEQ ID NO: 1562305
ggcgucagucgcuguuuau

SEQ ID NO: 1737360 - RNA, 19 nt, Artificial Sequence
  Description of Artificial Sequence: Synthetic oligonucleotide
  Antisense strand to SEQ ID NO: 1737359
auaaacagcgacugacgcc

SEQ ID NO: 1737361 - RNA, 19 nt, Artificial Sequence
  Description of Artificial Sequence: Synthetic oligonucleotide
  Sense strand starting at position 2511 of SEQ ID NO: 1562305
gcgucagucgcuguuuauu

SEQ ID NO: 1737362 - RNA, 19 nt, Artificial Sequence
  Description of Artificial Sequence: Synthetic oligonucleotide
  Antisense strand to SEQ ID NO: 1737361
aauaaacagcgacugacgc

SEQ ID NO: 1737363 - RNA, 19 nt, Artificial Sequence
  Description of Artificial Sequence: Synthetic oligonucleotide
  Sense strand starting at position 2962 of SEQ ID NO: 1562305
auggacuucuuauguuuga

SEQ ID NO: 1737364 - RNA, 19 nt, Artificial Sequence
  Description of Artificial Sequence: Synthetic oligonucleotide
  Antisense strand to SEQ ID NO: 1737363
ucaaacauaagaaguccau

SEQ ID NO: 1737365 - RNA, 19 nt, Artificial Sequence
  Description of Artificial Sequence: Synthetic oligonucleotide
  Sense strand starting at position 2963 of SEQ ID NO: 1562305
uggacuucuuauguuugau

SEQ ID NO: 1737366 - RNA, 19 nt, Artificial Sequence
  Description of Artificial Sequence: Synthetic oligonucleotide
  Antisense strand to SEQ ID NO: 1737365
aucaaacauaagaagucca

SEQ ID NO: 1737367 - RNA, 19 nt, Artificial Sequence
  Description of Artificial Sequence: Synthetic oligonucleotide
  Sense strand starting at position 2972 of SEQ ID NO: 1562305
uauguuugauggucaggga

SEQ ID NO: 1737368 - RNA, 19 nt, Artificial Sequence
  Description of Artificial Sequence: Synthetic oligonucleotide
  Antisense strand to SEQ ID NO: 1737367
ucccugaccaucaaacaua

SEQ ID NO: 1737369 - RNA, 19 nt, Artificial Sequence
  Description of Artificial Sequence: Synthetic oligonucleotide
  Sense strand starting at position 2975 of SEQ ID NO: 1562305
guuugauggucagggaaug

SEQ ID NO: 1737370 - RNA, 19 nt, Artificial Sequence
  Description of Artificial Sequence: Synthetic oligonucleotide
  Antisense strand to SEQ ID NO: 1737369
cauucccugaccaucaaac

SEQ ID NO: 1737371 - RNA, 19 nt, Artificial Sequence
  Description of Artificial Sequence: Synthetic oligonucleotide
  Sense strand starting at position 3013 of SEQ ID NO: 1562305
ggaguaauauuaucgucuc

SEQ ID NO: 1737372 - RNA, 19 nt, Artificial Sequence
  Description of Artificial Sequence: Synthetic oligonucleotide
  Antisense strand to SEQ ID NO: 1737371
gagacgauaauauuacucc

SEQ ID NO: 1737373 - RNA, 19 nt, Artificial Sequence
  Description of Artificial Sequence: Synthetic oligonucleotide
  Sense strand starting at position 3027 of SEQ ID NO: 1562305
gucucccgcccugaauauu

SEQ ID NO: 1737374 - RNA, 19 nt, Artificial Sequence
  Description of Artificial Sequence: Synthetic oligonucleotide
  Antisense strand to SEQ ID NO: 1737373
aauauucagggcgggagac

SEQ ID NO: 1737375 - RNA, 19 nt, Artificial Sequence
  Description of Artificial Sequence: Synthetic oligonucleotide
  Sense strand starting at position 3301 of SEQ ID NO: 1562305
cuucgcuguugggaguaau

SEQ ID NO: 1737376 - RNA, 19 nt, Artificial Sequence
  Description of Artificial Sequence: Synthetic oligonucleotide
  Antisense strand to SEQ ID NO: 1737375
auuacucccaacagcgaag

SEQ ID NO: 1737377 - RNA, 19 nt, Artificial Sequence
  Description of Artificial Sequence: Synthetic oligonucleotide
  Sense strand starting at position 3411 of SEQ ID NO: 1562305
uugggauacuaggaacaau

SEQ ID NO: 1737378 - RNA, 19 nt, Artificial Sequence
  Description of Artificial Sequence: Synthetic oligonucleotide
  Antisense strand to SEQ ID NO: 1737377
auuguuccuaguaucccaa

SEQ ID NO: 1737379 - RNA, 19 nt, Artificial Sequence
  Description of Artificial Sequence: Synthetic oligonucleotide
  Sense strand starting at position 3897 of SEQ ID NO: 1562305
aggugauccgccugauuca

SEQ ID NO: 1737380 - RNA, 19 nt, Artificial Sequence
  Description of Artificial Sequence: Synthetic oligonucleotide
  Antisense strand to SEQ ID NO: 1737379
ugaaucaggcggaucaccu

SEQ ID NO: 1737381 - RNA, 19 nt, Artificial Sequence
  Description of Artificial Sequence: Synthetic oligonucleotide
  Sense strand starting at position 90 of SEQ ID NO: 1562306
guuggucaccaugggaaua

SEQ ID NO: 1737382 - RNA, 19 nt, Artificial Sequence
  Description of Artificial Sequence: Synthetic oligonucleotide
  Antisense strand to SEQ ID NO: 1737381
uauucccauggugaccaac

SEQ ID NO: 1737383 - RNA, 19 nt, Artificial Sequence
  Description of Artificial Sequence: Synthetic oligonucleotide
  Sense strand starting at position 493 of SEQ ID NO: 1562306
ccuugagugacuugguaga

SEQ ID NO: 1737384 - RNA, 19 nt, Artificial Sequence
  Description of Artificial Sequence: Synthetic oligonucleotide
  Antisense strand to SEQ ID NO: 1737383
ucuaccaagucacucaagg

SEQ ID NO: 1737385 - RNA, 19 nt, Artificial Sequence
  Description of Artificial Sequence: Synthetic oligonucleotide
  Sense strand starting at position 495 of SEQ ID NO: 1562306
uugagugacuugguagaca

SEQ ID NO: 1737386 - RNA, 19 nt, Artificial Sequence
  Description of Artificial Sequence: Synthetic oligonucleotide
  Antisense strand to SEQ ID NO: 1737385
ugucuaccaagucacucaa

SEQ ID NO: 1737387 - RNA, 19 nt, Artificial Sequence
  Description of Artificial Sequence: Synthetic oligonucleotide
  Sense strand starting at position 1088 of SEQ ID NO: 1562306
aaugcaagacuguauaugu

SEQ ID NO: 1737388 - RNA, 19 nt, Artificial Sequence
  Description of Artificial Sequence: Synthetic oligonucleotide
  Antisense strand to SEQ ID NO: 1737387
acauauacagucuugcauu

SEQ ID NO: 1737389 - RNA, 19 nt, Artificial Sequence
  Description of Artificial Sequence: Synthetic oligonucleotide
  Sense strand starting at position 1296 of SEQ ID NO: 1562306
uguguaaauaggcaguaaa

SEQ ID NO: 1737390 - RNA, 19 nt, Artificial Sequence
  Description of Artificial Sequence: Synthetic oligonucleotide
  Antisense strand to SEQ ID NO: 1737389
uuuacugccuauuuacaca

SEQ ID NO: 1737391 - RNA, 19 nt, Artificial Sequence
  Description of Artificial Sequence: Synthetic oligonucleotide
  Sense strand starting at position 1299 of SEQ ID NO: 1562306
guaaauaggcaguaaauau

SEQ ID NO: 1737392 - RNA, 19 nt, Artificial Sequence
  Description of Artificial Sequence: Synthetic oligonucleotide
  Antisense strand to SEQ ID NO: 1737391
auauuuacugccuauuuac

SEQ ID NO: 1737393 - RNA, 19 nt, Artificial Sequence
  Description of Artificial Sequence: Synthetic oligonucleotide
  Sense strand starting at position 1387 of SEQ ID NO: 1562306
uuuguuugugaucacaaua

SEQ ID NO: 1737394 - RNA, 19 nt, Artificial Sequence
  Description of Artificial Sequence: Synthetic oligonucleotide
  Antisense strand to SEQ ID NO: 1737393
uauugugaucacaaacaaa

SEQ ID NO: 1737395 - RNA, 19 nt, Artificial Sequence
  Description of Artificial Sequence: Synthetic oligonucleotide
  Sense strand starting at position 1466 of SEQ ID NO: 1562306
aaagucuagccagauguuu

SEQ ID NO: 1737396 - RNA, 19 nt, Artificial Sequence
  Description of Artificial Sequence: Synthetic oligonucleotide
  Antisense strand to SEQ ID NO: 1737395
aaacaucuggcuagacuuu

SEQ ID NO: 1737397 - RNA, 19 nt, Artificial Sequence
  Description of Artificial Sequence: Synthetic oligonucleotide
  Sense strand starting at position 1558 of SEQ ID NO: 1562306
augagaagaccaugucauu

SEQ ID NO: 1737398 - RNA, 19 nt, Artificial Sequence
  Description of Artificial Sequence: Synthetic oligonucleotide
  Antisense strand to SEQ ID NO: 1737397
aaugacauggucuucucau

SEQ ID NO: 1737399 - RNA, 19 nt, Artificial Sequence
  Description of Artificial Sequence: Synthetic oligonucleotide
  Sense strand starting at position 1612 of SEQ ID NO: 1562306
ggcagaaucucaguaaaga

SEQ ID NO: 1737400 - RNA, 19 nt, Artificial Sequence
  Description of Artificial Sequence: Synthetic oligonucleotide
  Antisense strand to SEQ ID NO: 1737399
ucuuuacugagauucugcc

SEQ ID NO: 1737401 - RNA, 19 nt, Artificial Sequence
  Description of Artificial Sequence: Synthetic oligonucleotide
  Sense strand starting at position 1733 of SEQ ID NO: 1562306
ugacaaugguucuuccaac

SEQ ID NO: 1737402 - RNA, 19 nt, Artificial Sequence
  Description of Artificial Sequence: Synthetic oligonucleotide
  Antisense strand to SEQ ID NO: 1737401
guuggaagaaccauuguca

SEQ ID NO: 1737403 - RNA, 19 nt, Artificial Sequence
  Description of Artificial Sequence: Synthetic oligonucleotide
  Sense strand starting at position 2005 of SEQ ID NO: 1562306
gcagccuggucauuuccau

SEQ ID NO: 1737404 - RNA, 19 nt, Artificial Sequence
  Description of Artificial Sequence: Synthetic oligonucleotide
  Antisense strand to SEQ ID NO: 1737403
auggaaaugaccaggcugc

SEQ ID NO: 1737405 - RNA, 19 nt, Artificial Sequence
  Description of Artificial Sequence: Synthetic oligonucleotide
  Sense strand starting at position 2112 of SEQ ID NO: 1562306
ggguucuaaacugggaagu

SEQ ID NO: 1737406 - RNA, 19 nt, Artificial Sequence
  Description of Artificial Sequence: Synthetic oligonucleotide
  Antisense strand to SEQ ID NO: 1737405
acuucccaguuuagaaccc

SEQ ID NO: 1737407 - RNA, 19 nt, Artificial Sequence
  Description of Artificial Sequence: Synthetic oligonucleotide
  Sense strand starting at position 2113 of SEQ ID NO: 1562306
gguucuaaacugggaaguu

SEQ ID NO: 1737408 - RNA, 19 nt, Artificial Sequence
  Description of Artificial Sequence: Synthetic oligonucleotide
  Antisense strand to SEQ ID NO: 1737407
aacuucccaguuuagaacc

SEQ ID NO: 1737409 - RNA, 19 nt, Artificial Sequence
  Description of Artificial Sequence: Synthetic oligonucleotide
  Sense strand starting at position 2164 of SEQ ID NO: 1562306
gcugaucccaaaggauuga

SEQ ID NO: 1737410 - RNA, 19 nt, Artificial Sequence
  Description of Artificial Sequence: Synthetic oligonucleotide
  Antisense strand to SEQ ID NO: 1737409
ucaauccuuugggaucagc

SEQ ID NO: 1737411 - RNA, 19 nt, Artificial Sequence
  Description of Artificial Sequence: Synthetic oligonucleotide
  Sense strand starting at position 2237 of SEQ ID NO: 1562306
uacggagacuccuugauac

SEQ ID NO: 1737412 - RNA, 19 nt, Artificial Sequence
  Description of Artificial Sequence: Synthetic oligonucleotide
  Antisense strand to SEQ ID NO: 1737411
guaucaaggagucuccgua

SEQ ID NO: 1737413 - RNA, 19 nt, Artificial Sequence
  Description of Artificial Sequence: Synthetic oligonucleotide
  Sense strand starting at position 2239 of SEQ ID NO: 1562306
cggagacuccuugauacuu

SEQ ID NO: 1737414 - RNA, 19 nt, Artificial Sequence
  Description of Artificial Sequence: Synthetic oligonucleotide
  Antisense strand to SEQ ID NO: 1737413
aaguaucaaggagucuccg

SEQ ID NO: 1737415 - RNA, 19 nt, Artificial Sequence
  Description of Artificial Sequence: Synthetic oligonucleotide
  Sense strand starting at position 2289 of SEQ ID NO: 1562306
ucugaugaauuguuacuua

SEQ ID NO: 1737416 - RNA, 19 nt, Artificial Sequence
  Description of Artificial Sequence: Synthetic oligonucleotide
  Antisense strand to SEQ ID NO: 1737415
uaaguaacaauucaucaga

SEQ ID NO: 1737417 - RNA, 19 nt, Artificial Sequence
  Description of Artificial Sequence: Synthetic oligonucleotide
  Sense strand starting at position 2293 of SEQ ID NO: 1562306
augaauuguuacuuauggu

SEQ ID NO: 1737418 - RNA, 19 nt, Artificial Sequence
  Description of Artificial Sequence: Synthetic oligonucleotide
  Antisense strand to SEQ ID NO: 1737417
accauaaguaacaauucau

SEQ ID NO: 1737419 - RNA, 19 nt, Artificial Sequence
  Description of Artificial Sequence: Synthetic oligonucleotide
  Sense strand starting at position 2388 of SEQ ID NO: 1562306
agacauuauucucugucuu

SEQ ID NO: 1737420 - RNA, 19 nt, Artificial Sequence
  Description of Artificial Sequence: Synthetic oligonucleotide
  Antisense strand to SEQ ID NO: 1737419
aagacagagaauaaugucu

SEQ ID NO: 1737421 - RNA, 19 nt, Artificial Sequence
  Description of Artificial Sequence: Synthetic oligonucleotide
  Sense strand starting at position 2456 of SEQ ID NO: 1562306
gguaacaauuauucuaugu

SEQ ID NO: 1737422 - RNA, 19 nt, Artificial Sequence
  Description of Artificial Sequence: Synthetic oligonucleotide
  Antisense strand to SEQ ID NO: 1737421
acauagaauaauuguuacc

SEQ ID NO: 1737423 - RNA, 19 nt, Artificial Sequence
  Description of Artificial Sequence: Synthetic oligonucleotide
  Sense strand starting at position 2514 of SEQ ID NO: 1562306
accauuaguuggguaacuu

SEQ ID NO: 1737424 - RNA, 19 nt, Artificial Sequence
  Description of Artificial Sequence: Synthetic oligonucleotide
  Antisense strand to SEQ ID NO: 1737423
aaguuacccaacuaauggu

SEQ ID NO: 1737425 - RNA, 19 nt, Artificial Sequence
  Description of Artificial Sequence: Synthetic oligonucleotide
  Sense strand starting at position 2515 of SEQ ID NO: 1562306
ccauuaguuggguaacuua

SEQ ID NO: 1737426 - RNA, 19 nt, Artificial Sequence
  Description of Artificial Sequence: Synthetic oligonucleotide
  Antisense strand to SEQ ID NO: 1737425
uaaguuacccaacuaaugg

SEQ ID NO: 1737427 - RNA, 19 nt, Artificial Sequence
  Description of Artificial Sequence: Synthetic oligonucleotide
  Sense strand starting at position 2637 of SEQ ID NO: 1562306
gaguccuuacaugguggaa

SEQ ID NO: 1737428 - RNA, 19 nt, Artificial Sequence
  Description of Artificial Sequence: Synthetic oligonucleotide
  Antisense strand to SEQ ID NO: 1737427
uuccaccauguaaggacuc

SEQ ID NO: 1737429 - RNA, 19 nt, Artificial Sequence
  Description of Artificial Sequence: Synthetic oligonucleotide
  Sense strand starting at position 2802 of SEQ ID NO: 1562306
agauaaauaccugggccuu

SEQ ID NO: 1737430 - RNA, 19 nt, Artificial Sequence
  Description of Artificial Sequence: Synthetic oligonucleotide
  Antisense strand to SEQ ID NO: 1737429
aaggcccagguauuuaucu

SEQ ID NO: 1737431 - RNA, 19 nt, Artificial Sequence
  Description of Artificial Sequence: Synthetic oligonucleotide
  Sense strand starting at position 3032 of SEQ ID NO: 1562306
uucucauaggauugaauug

SEQ ID NO: 1737432 - RNA, 19 nt, Artificial Sequence
  Description of Artificial Sequence: Synthetic oligonucleotide
  Antisense strand to SEQ ID NO: 1737431
caauucaauccuaugagaa

SEQ ID NO: 1737433 - RNA, 19 nt, Artificial Sequence
  Description of Artificial Sequence: Synthetic oligonucleotide
  Sense strand starting at position 3043 of SEQ ID NO: 1562306
uugaauugagaaugcuauu

SEQ ID NO: 1737434 - RNA, 19 nt, Artificial Sequence
  Description of Artificial Sequence: Synthetic oligonucleotide
  Antisense strand to SEQ ID NO: 1737433
aauagcauucucaauucaa

SEQ ID NO: 1737435 - RNA, 19 nt, Artificial Sequence
  Description of Artificial Sequence: Synthetic oligonucleotide
  Sense strand starting at position 3049 of SEQ ID NO: 1562306
ugagaaugcuauucuauug

SEQ ID NO: 1737436 - RNA, 19 nt, Artificial Sequence
  Description of Artificial Sequence: Synthetic oligonucleotide
  Antisense strand to SEQ ID NO: 1737435
caauagaauagcauucuca

SEQ ID NO: 1737437 - RNA, 19 nt, Artificial Sequence
  Description of Artificial Sequence: Synthetic oligonucleotide
  Sense strand starting at position 3222 of SEQ ID NO: 1562306
uggugagugguauaaguau

SEQ ID NO: 1737438 - RNA, 19 nt, Artificial Sequence
  Description of Artificial Sequence: Synthetic oligonucleotide
  Antisense strand to SEQ ID NO: 1737437
auacuuauaccacucacca

SEQ ID NO: 1737439 - RNA, 19 nt, Artificial Sequence
  Description of Artificial Sequence: Synthetic oligonucleotide
  Sense strand starting at position 3286 of SEQ ID NO: 1562306
auguaaucgcuugaaucau

SEQ ID NO: 1737440 - RNA, 19 nt, Artificial Sequence
  Description of Artificial Sequence: Synthetic oligonucleotide
  Antisense strand to SEQ ID NO: 1737439
augauucaagcgauuacau

SEQ ID NO: 1737441 - RNA, 19 nt, Artificial Sequence
  Description of Artificial Sequence: Synthetic oligonucleotide
  Sense strand starting at position 3351 of SEQ ID NO: 1562306
ccaugaaacuggucucuag

SEQ ID NO: 1737442 - RNA, 19 nt, Artificial Sequence
  Description of Artificial Sequence: Synthetic oligonucleotide
  Antisense strand to SEQ ID NO: 1737441
cuagagaccaguuucaugg

SEQ ID NO: 1737443 - RNA, 19 nt, Artificial Sequence
  Description of Artificial Sequence: Synthetic oligonucleotide
  Sense strand starting at position 3582 of SEQ ID NO: 1562306
cacagagaucaaugucaug

SEQ ID NO: 1737444 - RNA, 19 nt, Artificial Sequence
  Description of Artificial Sequence: Synthetic oligonucleotide
  Antisense strand to SEQ ID NO: 1737443
caugacauugaucucugug

SEQ ID NO: 1737445 - RNA, 19 nt, Artificial Sequence
  Description of Artificial Sequence: Synthetic oligonucleotide
  Sense strand starting at position 3600 of SEQ ID NO: 1562306
gguucuugucuuuaaggaa

SEQ ID NO: 1737446 - RNA, 19 nt, Artificial Sequence
  Description of Artificial Sequence: Synthetic oligonucleotide
  Antisense strand to SEQ ID NO: 1737445
uuccuuaaagacaagaacc

SEQ ID NO: 1737447 - RNA, 19 nt, Artificial Sequence
  Description of Artificial Sequence: Synthetic oligonucleotide
  Sense strand starting at position 3651 of SEQ ID NO: 1562306
gcaucugggaaauguuuga

SEQ ID NO: 1737448 - RNA, 19 nt, Artificial Sequence
  Description of Artificial Sequence: Synthetic oligonucleotide
  Antisense strand to SEQ ID NO: 1737447
ucaaacauuucccagaugc

SEQ ID NO: 1737449 - RNA, 19 nt, Artificial Sequence
  Description of Artificial Sequence: Synthetic oligonucleotide
  Sense strand starting at position 3782 of SEQ ID NO: 1562306
ugagaucugcauggucaga

SEQ ID NO: 1737450 - RNA, 19 nt, Artificial Sequence
  Description of Artificial Sequence: Synthetic oligonucleotide
  Antisense strand to SEQ ID NO: 1737449
ucugaccaugcagaucuca

SEQ ID NO: 1737451 - RNA, 19 nt, Artificial Sequence
  Description of Artificial Sequence: Synthetic oligonucleotide
  Sense strand starting at position 3817 of SEQ ID NO: 1562306
acgaucucucauggaguga

SEQ ID NO: 1737452 - RNA, 19 nt, Artificial Sequence
  Description of Artificial Sequence: Synthetic oligonucleotide
  Antisense strand to SEQ ID NO: 1737451
ucacuccaugagagaucgu

SEQ ID NO: 1737453 - RNA, 19 nt, Artificial Sequence
  Description of Artificial Sequence: Synthetic oligonucleotide
  Sense strand starting at position 3818 of SEQ ID NO: 1562306
cgaucucucauggagugau

SEQ ID NO: 1737454 - RNA, 19 nt, Artificial Sequence
  Description of Artificial Sequence: Synthetic oligonucleotide
  Antisense strand to SEQ ID NO: 1737453
aucacuccaugagagaucg

SEQ ID NO: 1737455 - RNA, 19 nt, Artificial Sequence
  Description of Artificial Sequence: Synthetic oligonucleotide
  Sense strand starting at position 3821 of SEQ ID NO: 1562306
ucucucauggagugauuau

SEQ ID NO: 1737456 - RNA, 19 nt, Artificial Sequence
  Description of Artificial Sequence: Synthetic oligonucleotide
  Antisense strand to SEQ ID NO: 1737455
auaaucacuccaugagaga

SEQ ID NO: 1737457 - RNA, 19 nt, Artificial Sequence
  Description of Artificial Sequence: Synthetic oligonucleotide
  Sense strand starting at position 3830 of SEQ ID NO: 1562306
gagugauuauuugaugaac

SEQ ID NO: 1737458 - RNA, 19 nt, Artificial Sequence
  Description of Artificial Sequence: Synthetic oligonucleotide
  Antisense strand to SEQ ID NO: 1737457
guucaucaaauaaucacuc

SEQ ID NO: 1737459 - RNA, 19 nt, Artificial Sequence
  Description of Artificial Sequence: Synthetic oligonucleotide
  Sense strand starting at position 3854 of SEQ ID NO: 1562306
auccaagcugauggauaua

SEQ ID NO: 1737460 - RNA, 19 nt, Artificial Sequence
  Description of Artificial Sequence: Synthetic oligonucleotide
  Antisense strand to SEQ ID NO: 1737459
uauauccaucagcuuggau

SEQ ID NO: 1737461 - RNA, 19 nt, Artificial Sequence
  Description of Artificial Sequence: Synthetic oligonucleotide
  Sense strand starting at position 406 of SEQ ID NO: 1562307
gggcucaucucacucaaau

SEQ ID NO: 1737462 - RNA, 19 nt, Artificial Sequence
  Description of Artificial Sequence: Synthetic oligonucleotide
  Antisense strand to SEQ ID NO: 1737461
auuugagugagaugagccc

SEQ ID NO: 1737463 - RNA, 19 nt, Artificial Sequence
  Description of Artificial Sequence: Synthetic oligonucleotide
  Sense strand starting at position 429 of SEQ ID NO: 1562307
gcauaauaggcucgaaaga

SEQ ID NO: 1737464 - RNA, 19 nt, Artificial Sequence
  Description of Artificial Sequence: Synthetic oligonucleotide
  Antisense strand to SEQ ID NO: 1737463
ucuuucgagccuauuaugc

SEQ ID NO: 1737465 - RNA, 19 nt, Artificial Sequence
  Description of Artificial Sequence: Synthetic oligonucleotide
  Sense strand starting at position 837 of SEQ ID NO: 1562307
gaaggagaguguuucuuug

SEQ ID NO: 1737466 - RNA, 19 nt, Artificial Sequence
  Description of Artificial Sequence: Synthetic oligonucleotide
  Antisense strand to SEQ ID NO: 1737465
caaagaaacacucuccuuc

SEQ ID NO: 1737467 - RNA, 19 nt, Artificial Sequence
  Description of Artificial Sequence: Synthetic oligonucleotide
  Sense strand starting at position 839 of SEQ ID NO: 1562307
aggagaguguuucuuuguc

SEQ ID NO: 1737468 - RNA, 19 nt, Artificial Sequence
  Description of Artificial Sequence: Synthetic oligonucleotide
  Antisense strand to SEQ ID NO: 1737467
gacaaagaaacacucuccu

SEQ ID NO: 1737469 - RNA, 19 nt, Artificial Sequence
  Description of Artificial Sequence: Synthetic oligonucleotide
  Sense strand starting at position 1008 of SEQ ID NO: 1562307
gggaacuucuaggaaauaa

SEQ ID NO: 1737470 - RNA, 19 nt, Artificial Sequence
  Description of Artificial Sequence: Synthetic oligonucleotide
  Antisense strand to SEQ ID NO: 1737469
uuauuuccuagaaguuccc

SEQ ID NO: 1737471 - RNA, 19 nt, Artificial Sequence
  Description of Artificial Sequence: Synthetic oligonucleotide
  Sense strand starting at position 1018 of SEQ ID NO: 1562307
aggaaauaaggaugcuguu

SEQ ID NO: 1737472 - RNA, 19 nt, Artificial Sequence
  Description of Artificial Sequence: Synthetic oligonucleotide
  Antisense strand to SEQ ID NO: 1737471
aacagcauccuuauuuccu

SEQ ID NO: 1737473 - RNA, 19 nt, Artificial Sequence
  Description of Artificial Sequence: Synthetic oligonucleotide
  Sense strand starting at position 1178 of SEQ ID NO: 1562307
ccuauaguugauuggguua

SEQ ID NO: 1737474 - RNA, 19 nt, Artificial Sequence
  Description of Artificial Sequence: Synthetic oligonucleotide
  Antisense strand to SEQ ID NO: 1737473
uaacccaaucaacuauagg

SEQ ID NO: 1737475 - RNA, 19 nt, Artificial Sequence
  Description of Artificial Sequence: Synthetic oligonucleotide
  Sense strand starting at position 1258 of SEQ ID NO: 1562307
cgaauaaucagagggcuua

SEQ ID NO: 1737476 - RNA, 19 nt, Artificial Sequence
  Description of Artificial Sequence: Synthetic oligonucleotide
  Antisense strand to SEQ ID NO: 1737475
uaagcccucugauuauucg

SEQ ID NO: 1737477 - RNA, 19 nt, Artificial Sequence
  Description of Artificial Sequence: Synthetic oligonucleotide
  Sense strand starting at position 1314 of SEQ ID NO: 1562307
uaguuaacgcugugagaaa

SEQ ID NO: 1737478 - RNA, 19 nt, Artificial Sequence
  Description of Artificial Sequence: Synthetic oligonucleotide
  Antisense strand to SEQ ID NO: 1737477
uuucucacagcguuaacua

SEQ ID NO: 1737479 - RNA, 19 nt, Artificial Sequence
  Description of Artificial Sequence: Synthetic oligonucleotide
  Sense strand starting at position 1352 of SEQ ID NO: 1562307
gggacacugcuuugcuaac

SEQ ID NO: 1737480 - RNA, 19 nt, Artificial Sequence
  Description of Artificial Sequence: Synthetic oligonucleotide
  Antisense strand to SEQ ID NO: 1737479
guuagcaaagcaguguccc

SEQ ID NO: 1737481 - RNA, 19 nt, Artificial Sequence
  Description of Artificial Sequence: Synthetic oligonucleotide
  Sense strand starting at position 1958 of SEQ ID NO: 1562307
ggguuccuccacuauuguu

SEQ ID NO: 1737482 - RNA, 19 nt, Artificial Sequence
  Description of Artificial Sequence: Synthetic oligonucleotide
  Antisense strand to SEQ ID NO: 1737481
aacaauaguggaggaaccc

SEQ ID NO: 1737483 - RNA, 19 nt, Artificial Sequence
  Description of Artificial Sequence: Synthetic oligonucleotide
  Sense strand starting at position 2154 of SEQ ID NO: 1562307
cugugaucccguguuuccu

SEQ ID NO: 1737484 - RNA, 19 nt, Artificial Sequence
  Description of Artificial Sequence: Synthetic oligonucleotide
  Antisense strand to SEQ ID NO: 1737483
aggaaacacgggaucacag

SEQ ID NO: 1737485 - RNA, 19 nt, Artificial Sequence
  Description of Artificial Sequence: Synthetic oligonucleotide
  Sense strand starting at position 2186 of SEQ ID NO: 1562307
uaccguucucuggaacgua

SEQ ID NO: 1737486 - RNA, 19 nt, Artificial Sequence
  Description of Artificial Sequence: Synthetic oligonucleotide
  Antisense strand to SEQ ID NO: 1737485
uacguuccagagaacggua

SEQ ID NO: 1737487 - RNA, 19 nt, Artificial Sequence
  Description of Artificial Sequence: Synthetic oligonucleotide
  Sense strand starting at position 2198 of SEQ ID NO: 1562307
gaacguagcuccucacaca

SEQ ID NO: 1737488 - RNA, 19 nt, Artificial Sequence
  Description of Artificial Sequence: Synthetic oligonucleotide
  Antisense strand to SEQ ID NO: 1737487
ugugugaggagcuacguuc

SEQ ID NO: 1737489 - RNA, 19 nt, Artificial Sequence
  Description of Artificial Sequence: Synthetic oligonucleotide
  Sense strand starting at position 2387 of SEQ ID NO: 1562307
agaauacugucacugaacu

SEQ ID NO: 1737490 - RNA, 19 nt, Artificial Sequence
  Description of Artificial Sequence: Synthetic oligonucleotide
  Antisense strand to SEQ ID NO: 1737489
aguucagugacaguauucu

SEQ ID NO: 1737491 - RNA, 19 nt, Artificial Sequence
  Description of Artificial Sequence: Synthetic oligonucleotide
  Sense strand starting at position 2420 of SEQ ID NO: 1562307
aguugaaguaucuaacgaa

SEQ ID NO: 1737492 - RNA, 19 nt, Artificial Sequence
  Description of Artificial Sequence: Synthetic oligonucleotide
  Antisense strand to SEQ ID NO: 1737491
uucguuagauacuucaacu

SEQ ID NO: 1737493 - RNA, 19 nt, Artificial Sequence
  Description of Artificial Sequence: Synthetic oligonucleotide
  Sense strand starting at position 2456 of SEQ ID NO: 1562307
ggugucaugauagaggcau

SEQ ID NO: 1737494 - RNA, 19 nt, Artificial Sequence
  Description of Artificial Sequence: Synthetic oligonucleotide
  Antisense strand to SEQ ID NO: 1737493
augccucuaucaugacacc

SEQ ID NO: 1737495 - RNA, 19 nt, Artificial Sequence
  Description of Artificial Sequence: Synthetic oligonucleotide
  Sense strand starting at position 2458 of SEQ ID NO: 1562307
ugucaugauagaggcauaa

SEQ ID NO: 1737496 - RNA, 19 nt, Artificial Sequence
  Description of Artificial Sequence: Synthetic oligonucleotide
  Antisense strand to SEQ ID NO: 1737495
uuaugccucuaucaugaca

SEQ ID NO: 1737497 - RNA, 19 nt, Artificial Sequence
  Description of Artificial Sequence: Synthetic oligonucleotide
  Sense strand starting at position 2690 of SEQ ID NO: 1562307
cauuguaguccucacagua

SEQ ID NO: 1737498 - RNA, 19 nt, Artificial Sequence
  Description of Artificial Sequence: Synthetic oligonucleotide
  Antisense strand to SEQ ID NO: 1737497
uacugugaggacuacaaug

SEQ ID NO: 1737499 - RNA, 19 nt, Artificial Sequence
  Description of Artificial Sequence: Synthetic oligonucleotide
  Sense strand starting at position 2725 of SEQ ID NO: 1562307
caggaacuguucucucaug

SEQ ID NO: 1737500 - RNA, 19 nt, Artificial Sequence
  Description of Artificial Sequence: Synthetic oligonucleotide
  Antisense strand to SEQ ID NO: 1737499
caugagagaacaguuccug

SEQ ID NO: 1737501 - RNA, 19 nt, Artificial Sequence
  Description of Artificial Sequence: Synthetic oligonucleotide
  Sense strand starting at position 2746 of SEQ ID NO: 1562307
gcagccuacgaguaauuga

SEQ ID NO: 1737502 - RNA, 19 nt, Artificial Sequence
  Description of Artificial Sequence: Synthetic oligonucleotide
  Antisense strand to SEQ ID NO: 1737501
ucaauuacucguaggcugc

SEQ ID NO: 1737503 - RNA, 19 nt, Artificial Sequence
  Description of Artificial Sequence: Synthetic oligonucleotide
  Sense strand starting at position 2753 of SEQ ID NO: 1562307
acgaguaauugacccaggu

SEQ ID NO: 1737504 - RNA, 19 nt, Artificial Sequence
  Description of Artificial Sequence: Synthetic oligonucleotide
  Antisense strand to SEQ ID NO: 1737503
accugggucaauuacucgu

SEQ ID NO: 1737505 - RNA, 19 nt, Artificial Sequence
  Description of Artificial Sequence: Synthetic oligonucleotide
  Sense strand starting at position 2757 of SEQ ID NO: 1562307
guaauugacccagguuauc

SEQ ID NO: 1737506 - RNA, 19 nt, Artificial Sequence
  Description of Artificial Sequence: Synthetic oligonucleotide
  Antisense strand to SEQ ID NO: 1737505
gauaaccugggucaauuac

SEQ ID NO: 1737507 - RNA, 19 nt, Artificial Sequence
  Description of Artificial Sequence: Synthetic oligonucleotide
  Sense strand starting at position 2769 of SEQ ID NO: 1562307
gguuaucacaguugguuag

SEQ ID NO: 1737508 - RNA, 19 nt, Artificial Sequence
  Description of Artificial Sequence: Synthetic oligonucleotide
  Antisense strand to SEQ ID NO: 1737507
cuaaccaacugugauaacc

SEQ ID NO: 1737509 - RNA, 19 nt, Artificial Sequence
  Description of Artificial Sequence: Synthetic oligonucleotide
  Sense strand starting at position 2770 of SEQ ID NO: 1562307
guuaucacaguugguuaga

SEQ ID NO: 1737510 - RNA, 19 nt, Artificial Sequence
  Description of Artificial Sequence: Synthetic oligonucleotide
  Antisense strand to SEQ ID NO: 1737509
ucuaaccaacugugauaac

SEQ ID NO: 1737511 - RNA, 19 nt, Artificial Sequence
  Description of Artificial Sequence: Synthetic oligonucleotide
  Sense strand starting at position 2771 of SEQ ID NO: 1562307
uuaucacaguugguuagaa

SEQ ID NO: 1737512 - RNA, 19 nt, Artificial Sequence
  Description of Artificial Sequence: Synthetic oligonucleotide
  Antisense strand to SEQ ID NO: 1737511
uucuaaccaacugugauaa

SEQ ID NO: 1737513 - RNA, 19 nt, Artificial Sequence
  Description of Artificial Sequence: Synthetic oligonucleotide
  Sense strand starting at position 2809 of SEQ ID NO: 1562307
gaaggcuacugaccuaaga

SEQ ID NO: 1737514 - RNA, 19 nt, Artificial Sequence
  Description of Artificial Sequence: Synthetic oligonucleotide
  Antisense strand to SEQ ID NO: 1737513
ucuuaggucaguagccuuc

SEQ ID NO: 1737515 - RNA, 19 nt, Artificial Sequence
  Description of Artificial Sequence: Synthetic oligonucleotide
  Sense strand starting at position 2855 of SEQ ID NO: 1562307
guauguguucugguugcac

SEQ ID NO: 1737516 - RNA, 19 nt, Artificial Sequence
  Description of Artificial Sequence: Synthetic oligonucleotide
  Antisense strand to SEQ ID NO: 1737515
gugcaaccagaacacauac

SEQ ID NO: 1737517 - RNA, 19 nt, Artificial Sequence
  Description of Artificial Sequence: Synthetic oligonucleotide
  Sense strand starting at position 2909 of SEQ ID NO: 1562307
guaggcauucuugaacuga

SEQ ID NO: 1737518 - RNA, 19 nt, Artificial Sequence
  Description of Artificial Sequence: Synthetic oligonucleotide
  Antisense strand to SEQ ID NO: 1737517
ucaguucaagaaugccuac

SEQ ID NO: 1737519 - RNA, 19 nt, Artificial Sequence
  Description of Artificial Sequence: Synthetic oligonucleotide
  Sense strand starting at position 2913 of SEQ ID NO: 1562307
gcauucuugaacugauggu

SEQ ID NO: 1737520 - RNA, 19 nt, Artificial Sequence
  Description of Artificial Sequence: Synthetic oligonucleotide
  Antisense strand to SEQ ID NO: 1737519
accaucaguucaagaaugc

SEQ ID NO: 1737521 - RNA, 19 nt, Artificial Sequence
  Description of Artificial Sequence: Synthetic oligonucleotide
  Sense strand starting at position 2943 of SEQ ID NO: 1562307
ugucuagaucuuggaaacu

SEQ ID NO: 1737522 - RNA, 19 nt, Artificial Sequence
  Description of Artificial Sequence: Synthetic oligonucleotide
  Antisense strand to SEQ ID NO: 1737521
aguuuccaagaucuagaca

SEQ ID NO: 1737523 - RNA, 19 nt, Artificial Sequence
  Description of Artificial Sequence: Synthetic oligonucleotide
  Sense strand starting at position 2954 of SEQ ID NO: 1562307
uggaaacuucugggccaaa

SEQ ID NO: 1737524 - RNA, 19 nt, Artificial Sequence
  Description of Artificial Sequence: Synthetic oligonucleotide
  Antisense strand to SEQ ID NO: 1737523
uuuggcccagaaguuucca

SEQ ID NO: 1737525 - RNA, 19 nt, Artificial Sequence
  Description of Artificial Sequence: Synthetic oligonucleotide
  Sense strand starting at position 2955 of SEQ ID NO: 1562307
ggaaacuucugggccaaau

SEQ ID NO: 1737526 - RNA, 19 nt, Artificial Sequence
  Description of Artificial Sequence: Synthetic oligonucleotide
  Antisense strand to SEQ ID NO: 1737525
auuuggcccagaaguuucc

SEQ ID NO: 1737527 - RNA, 19 nt, Artificial Sequence
  Description of Artificial Sequence: Synthetic oligonucleotide
  Sense strand starting at position 3241 of SEQ ID NO: 1562307
cgacuaagauaccuugcau

SEQ ID NO: 1737528 - RNA, 19 nt, Artificial Sequence
  Description of Artificial Sequence: Synthetic oligonucleotide
  Antisense strand to SEQ ID NO: 1737527
augcaagguaucuuagucg

SEQ ID NO: 1737529 - RNA, 19 nt, Artificial Sequence
  Description of Artificial Sequence: Synthetic oligonucleotide
  Sense strand starting at position 3260 of SEQ ID NO: 1562307
guuggauucuacccaucuu

SEQ ID NO: 1737530 - RNA, 19 nt, Artificial Sequence
  Description of Artificial Sequence: Synthetic oligonucleotide
  Antisense strand to SEQ ID NO: 1737529
aagauggguagaauccaac

SEQ ID NO: 1737531 - RNA, 19 nt, Artificial Sequence
  Description of Artificial Sequence: Synthetic oligonucleotide
  Sense strand starting at position 3512 of SEQ ID NO: 1562307
aaagcauuauuugaugagu

SEQ ID NO: 1737532 - RNA, 19 nt, Artificial Sequence
  Description of Artificial Sequence: Synthetic oligonucleotide
  Antisense strand to SEQ ID NO: 1737531
acucaucaaauaaugcuuu

SEQ ID NO: 1737533 - RNA, 19 nt, Artificial Sequence
  Description of Artificial Sequence: Synthetic oligonucleotide
  Sense strand starting at position 3594 of SEQ ID NO: 1562307
cccgacauuucuuucuguu

SEQ ID NO: 1737534 - RNA, 19 nt, Artificial Sequence
  Description of Artificial Sequence: Synthetic oligonucleotide
  Antisense strand to SEQ ID NO: 1737533
aacagaaagaaaugucggg

SEQ ID NO: 1737535 - RNA, 19 nt, Artificial Sequence
  Description of Artificial Sequence: Synthetic oligonucleotide
  Sense strand starting at position 3712 of SEQ ID NO: 1562307
guguguucauuugugauug

SEQ ID NO: 1737536 - RNA, 19 nt, Artificial Sequence
  Description of Artificial Sequence: Synthetic oligonucleotide
  Antisense strand to SEQ ID NO: 1737535
caaucacaaaugaacacac

SEQ ID NO: 1737537 - RNA, 19 nt, Artificial Sequence
  Description of Artificial Sequence: Synthetic oligonucleotide
  Sense strand starting at position 3754 of SEQ ID NO: 1562307
ugagauucacgaugguauu

SEQ ID NO: 1737538 - RNA, 19 nt, Artificial Sequence
  Description of Artificial Sequence: Synthetic oligonucleotide
  Antisense strand to SEQ ID NO: 1737537
aauaccaucgugaaucuca

SEQ ID NO: 1737539 - RNA, 19 nt, Artificial Sequence
  Description of Artificial Sequence: Synthetic oligonucleotide
  Sense strand starting at position 3800 of SEQ ID NO: 1562307
cgucuuagucaguuugugu

SEQ ID NO: 1737540 - RNA, 19 nt, Artificial Sequence
  Description of Artificial Sequence: Synthetic oligonucleotide
  Antisense strand to SEQ ID NO: 1737539
acacaaacugacuaagacg

SEQ ID NO: 1737541 - RNA, 19 nt, Artificial Sequence
  Description of Artificial Sequence: Synthetic oligonucleotide
  Sense strand starting at position 53 of SEQ ID NO: 1562308
gagacuggugcccaaucaa

SEQ ID NO: 1737542 - RNA, 19 nt, Artificial Sequence
  Description of Artificial Sequence: Synthetic oligonucleotide
  Antisense strand to SEQ ID NO: 1737541
uugauugggcaccagucuc

SEQ ID NO: 1737543 - RNA, 19 nt, Artificial Sequence
  Description of Artificial Sequence: Synthetic oligonucleotide
  Sense strand starting at position 97 of SEQ ID NO: 1562308
cucagaagccuugauucca

SEQ ID NO: 1737544 - RNA, 19 nt, Artificial Sequence
  Description of Artificial Sequence: Synthetic oligonucleotide
  Antisense strand to SEQ ID NO: 1737543
uggaaucaaggcuucugag

SEQ ID NO: 1737545 - RNA, 19 nt, Artificial Sequence
  Description of Artificial Sequence: Synthetic oligonucleotide
  Sense strand starting at position 211 of SEQ ID NO: 1562308
acagcugguuucccugaga

SEQ ID NO: 1737546 - RNA, 19 nt, Artificial Sequence
  Description of Artificial Sequence: Synthetic oligonucleotide
  Antisense strand to SEQ ID NO: 1737545
ucucagggaaaccagcugu

SEQ ID NO: 1737547 - RNA, 19 nt, Artificial Sequence
  Description of Artificial Sequence: Synthetic oligonucleotide
  Sense strand starting at position 214 of SEQ ID NO: 1562308
gcugguuucccugagacac

SEQ ID NO: 1737548 - RNA, 19 nt, Artificial Sequence
  Description of Artificial Sequence: Synthetic oligonucleotide
  Antisense strand to SEQ ID NO: 1737547
gugucucagggaaaccagc

SEQ ID NO: 1737549 - RNA, 19 nt, Artificial Sequence
  Description of Artificial Sequence: Synthetic oligonucleotide
  Sense strand starting at position 633 of SEQ ID NO: 1562308
gcuccaacuucuccuguga

SEQ ID NO: 1737550 - RNA, 19 nt, Artificial Sequence
  Description of Artificial Sequence: Synthetic oligonucleotide
  Antisense strand to SEQ ID NO: 1737549
ucacaggagaaguuggagc

SEQ ID NO: 1737551 - RNA, 19 nt, Artificial Sequence
  Description of Artificial Sequence: Synthetic oligonucleotide
  Sense strand starting at position 646 of SEQ ID NO: 1562308
cugugaaaugccuaagaau

SEQ ID NO: 1737552 - RNA, 19 nt, Artificial Sequence
  Description of Artificial Sequence: Synthetic oligonucleotide
  Antisense strand to SEQ ID NO: 1737551
auucuuaggcauuucacag

SEQ ID NO: 1737553 - RNA, 19 nt, Artificial Sequence
  Description of Artificial Sequence: Synthetic oligonucleotide
  Sense strand starting at position 649 of SEQ ID NO: 1562308
ugaaaugccuaagaauagu

SEQ ID NO: 1737554 - RNA, 19 nt, Artificial Sequence
  Description of Artificial Sequence: Synthetic oligonucleotide
  Antisense strand to SEQ ID NO: 1737553
acuauucuuaggcauuuca

SEQ ID NO: 1737555 - RNA, 19 nt, Artificial Sequence
  Description of Artificial Sequence: Synthetic oligonucleotide
  Sense strand starting at position 675 of SEQ ID NO: 1562308
aggagcuugucguuauacu

SEQ ID NO: 1737556 - RNA, 19 nt, Artificial Sequence
  Description of Artificial Sequence: Synthetic oligonucleotide
  Antisense strand to SEQ ID NO: 1737555
aguauaacgacaagcuccu

SEQ ID NO: 1737557 - RNA, 19 nt, Artificial Sequence
  Description of Artificial Sequence: Synthetic oligonucleotide
  Sense strand starting at position 676 of SEQ ID NO: 1562308
ggagcuugucguuauacua

SEQ ID NO: 1737558 - RNA, 19 nt, Artificial Sequence
  Description of Artificial Sequence: Synthetic oligonucleotide
  Antisense strand to SEQ ID NO: 1737557
uaguauaacgacaagcucc

SEQ ID NO: 1737559 - RNA, 19 nt, Artificial Sequence
  Description of Artificial Sequence: Synthetic oligonucleotide
  Sense strand starting at position 722 of SEQ ID NO: 1562308
acgaguaaucagcgacuac

SEQ ID NO: 1737560 - RNA, 19 nt, Artificial Sequence
  Description of Artificial Sequence: Synthetic oligonucleotide
  Antisense strand to SEQ ID NO: 1737559
guagucgcugauuacucgu

SEQ ID NO: 1737561 - RNA, 19 nt, Artificial Sequence
  Description of Artificial Sequence: Synthetic oligonucleotide
  Sense strand starting at position 723 of SEQ ID NO: 1562308
cgaguaaucagcgacuaca

SEQ ID NO: 1737562 - RNA, 19 nt, Artificial Sequence
  Description of Artificial Sequence: Synthetic oligonucleotide
  Antisense strand to SEQ ID NO: 1737561
uguagucgcugauuacucg

SEQ ID NO: 1737563 - RNA, 19 nt, Artificial Sequence
  Description of Artificial Sequence: Synthetic oligonucleotide
  Sense strand starting at position 726 of SEQ ID NO: 1562308
guaaucagcgacuacagaa

SEQ ID NO: 1737564 - RNA, 19 nt, Artificial Sequence
  Description of Artificial Sequence: Synthetic oligonucleotide
  Antisense strand to SEQ ID NO: 1737563
uucuguagucgcugauuac

SEQ ID NO: 1737565 - RNA, 19 nt, Artificial Sequence
  Description of Artificial Sequence: Synthetic oligonucleotide
  Sense strand starting at position 957 of SEQ ID NO: 1562308
ccgaaagccucgguaggau

SEQ ID NO: 1737566 - RNA, 19 nt, Artificial Sequence
  Description of Artificial Sequence: Synthetic oligonucleotide
  Antisense strand to SEQ ID NO: 1737565
auccuaccgaggcuuucgg

SEQ ID NO: 1737567 - RNA, 19 nt, Artificial Sequence
  Description of Artificial Sequence: Synthetic oligonucleotide
  Sense strand starting at position 996 of SEQ ID NO: 1562308
ucagcaaacggucacuauu

SEQ ID NO: 1737568 - RNA, 19 nt, Artificial Sequence
  Description of Artificial Sequence: Synthetic oligonucleotide
  Antisense strand to SEQ ID NO: 1737567
aauagugaccguuugcuga

SEQ ID NO: 1737569 - RNA, 19 nt, Artificial Sequence
  Description of Artificial Sequence: Synthetic oligonucleotide
  Sense strand starting at position 1028 of SEQ ID NO: 1562308
aaaugcaagucuuuggaga

SEQ ID NO: 1737570 - RNA, 19 nt, Artificial Sequence
  Description of Artificial Sequence: Synthetic oligonucleotide
  Antisense strand to SEQ ID NO: 1737569
ucuccaaagacuugcauuu

SEQ ID NO: 1737571 - RNA, 19 nt, Artificial Sequence
  Description of Artificial Sequence: Synthetic oligonucleotide
  Sense strand starting at position 1029 of SEQ ID NO: 1562308
aaugcaagucuuuggagau

SEQ ID NO: 1737572 - RNA, 19 nt, Artificial Sequence
  Description of Artificial Sequence: Synthetic oligonucleotide
  Antisense strand to SEQ ID NO: 1737571
aucuccaaagacuugcauu

SEQ ID NO: 1737573 - RNA, 19 nt, Artificial Sequence
  Description of Artificial Sequence: Synthetic oligonucleotide
  Sense strand starting at position 1043 of SEQ ID NO: 1562308
gagauaaauucuuggugaa

SEQ ID NO: 1737574 - RNA, 19 nt, Artificial Sequence
  Description of Artificial Sequence: Synthetic oligonucleotide
  Antisense strand to SEQ ID NO: 1737573
uucaccaagaauuuaucuc

SEQ ID NO: 1737575 - RNA, 19 nt, Artificial Sequence
  Description of Artificial Sequence: Synthetic oligonucleotide
  Sense strand starting at position 1045 of SEQ ID NO: 1562308
gauaaauucuuggugaaau

SEQ ID NO: 1737576 - RNA, 19 nt, Artificial Sequence
  Description of Artificial Sequence: Synthetic oligonucleotide
  Antisense strand to SEQ ID NO: 1737575
auuucaccaagaauuuauc

SEQ ID NO: 1737577 - RNA, 19 nt, Artificial Sequence
  Description of Artificial Sequence: Synthetic oligonucleotide
  Sense strand starting at position 1117 of SEQ ID NO: 1562308
gugcaagcucaguaagugu

SEQ ID NO: 1737578 - RNA, 19 nt, Artificial Sequence
  Description of Artificial Sequence: Synthetic oligonucleotide
  Antisense strand to SEQ ID NO: 1737577
acacuuacugagcuugcac

SEQ ID NO: 1737579 - RNA, 19 nt, Artificial Sequence
  Description of Artificial Sequence: Synthetic oligonucleotide
  Sense strand starting at position 1128 of SEQ ID NO: 1562308
guaaguguccgaucgggca

SEQ ID NO: 1737580 - RNA, 19 nt, Artificial Sequence
  Description of Artificial Sequence: Synthetic oligonucleotide
  Antisense strand to SEQ ID NO: 1737579
ugcccgaucggacacuuac

SEQ ID NO: 1737581 - RNA, 19 nt, Artificial Sequence
  Description of Artificial Sequence: Synthetic oligonucleotide
  Sense strand starting at position 1258 of SEQ ID NO: 1562308
gcaccugccguuuggagaa

SEQ ID NO: 1737582 - RNA, 19 nt, Artificial Sequence
  Description of Artificial Sequence: Synthetic oligonucleotide
  Antisense strand to SEQ ID NO: 1737581
uucuccaaacggcaggugc

SEQ ID NO: 1737583 - RNA, 19 nt, Artificial Sequence
  Description of Artificial Sequence: Synthetic oligonucleotide
  Sense strand starting at position 2448 of SEQ ID NO: 1562308
cagggugauuucgaggacu

SEQ ID NO: 1737584 - RNA, 19 nt, Artificial Sequence
  Description of Artificial Sequence: Synthetic oligonucleotide
  Antisense strand to SEQ ID NO: 1737583
aguccucgaaaucacccug

SEQ ID NO: 1737585 - RNA, 19 nt, Artificial Sequence
  Description of Artificial Sequence: Synthetic oligonucleotide
  Sense strand starting at position 2467 of SEQ ID NO: 1562308
gccauuugcucgccagcga

SEQ ID NO: 1737586 - RNA, 19 nt, Artificial Sequence
  Description of Artificial Sequence: Synthetic oligonucleotide
  Antisense strand to SEQ ID NO: 1737585
ucgcuggcgagcaaauggc

SEQ ID NO: 1737587 - RNA, 19 nt, Artificial Sequence
  Description of Artificial Sequence: Synthetic oligonucleotide
  Sense strand starting at position 2495 of SEQ ID NO: 1562308
caggcucaguccucggaaa

SEQ ID NO: 1737588 - RNA, 19 nt, Artificial Sequence
  Description of Artificial Sequence: Synthetic oligonucleotide
  Antisense strand to SEQ ID NO: 1737587
uuuccgaggacugagccug

SEQ ID NO: 1737589 - RNA, 19 nt, Artificial Sequence
  Description of Artificial Sequence: Synthetic oligonucleotide
  Sense strand starting at position 2497 of SEQ ID NO: 1562308
ggcucaguccucggaaagu

SEQ ID NO: 1737590 - RNA, 19 nt, Artificial Sequence
  Description of Artificial Sequence: Synthetic oligonucleotide
  Antisense strand to SEQ ID NO: 1737589
acuuuccgaggacugagcc

SEQ ID NO: 1737591 - RNA, 19 nt, Artificial Sequence
  Description of Artificial Sequence: Synthetic oligonucleotide
  Sense strand starting at position 2506 of SEQ ID NO: 1562308
cucggaaagucccuggaaa

SEQ ID NO: 1737592 - RNA, 19 nt, Artificial Sequence
  Description of Artificial Sequence: Synthetic oligonucleotide
  Antisense strand to SEQ ID NO: 1737591
uuuccagggacuuuccgag

SEQ ID NO: 1737593 - RNA, 19 nt, Artificial Sequence
  Description of Artificial Sequence: Synthetic oligonucleotide
  Sense strand starting at position 2507 of SEQ ID NO: 1562308
ucggaaagucccuggaaau

SEQ ID NO: 1737594 - RNA, 19 nt, Artificial Sequence
  Description of Artificial Sequence: Synthetic oligonucleotide
  Antisense strand to SEQ ID NO: 1737593
auuuccagggacuuuccga

SEQ ID NO: 1737595 - RNA, 19 nt, Artificial Sequence
  Description of Artificial Sequence: Synthetic oligonucleotide
  Sense strand starting at position 2508 of SEQ ID NO: 1562308
cggaaagucccuggaaauc

SEQ ID NO: 1737596 - RNA, 19 nt, Artificial Sequence
  Description of Artificial Sequence: Synthetic oligonucleotide
  Antisense strand to SEQ ID NO: 1737595
gauuuccagggacuuuccg

SEQ ID NO: 1737597 - RNA, 19 nt, Artificial Sequence
  Description of Artificial Sequence: Synthetic oligonucleotide
  Sense strand starting at position 2732 of SEQ ID NO: 1562308
ggauggugugaguguguau

SEQ ID NO: 1737598 - RNA, 19 nt, Artificial Sequence
  Description of Artificial Sequence: Synthetic oligonucleotide
  Antisense strand to SEQ ID NO: 1737597
auacacacucacaccaucc

SEQ ID NO: 1737599 - RNA, 19 nt, Artificial Sequence
  Description of Artificial Sequence: Synthetic oligonucleotide
  Sense strand starting at position 3000 of SEQ ID NO: 1562308
guaugugugauguauaagu

SEQ ID NO: 1737600 - RNA, 19 nt, Artificial Sequence
  Description of Artificial Sequence: Synthetic oligonucleotide
  Antisense strand to SEQ ID NO: 1737599
acuuauacaucacacauac

SEQ ID NO: 1737601 - RNA, 19 nt, Artificial Sequence
  Description of Artificial Sequence: Synthetic oligonucleotide
  Sense strand starting at position 3211 of SEQ ID NO: 1562308
guauguggugugucagugu

SEQ ID NO: 1737602 - RNA, 19 nt, Artificial Sequence
  Description of Artificial Sequence: Synthetic oligonucleotide
  Antisense strand to SEQ ID NO: 1737601
acacugacacaccacauac

SEQ ID NO: 1737603 - RNA, 19 nt, Artificial Sequence
  Description of Artificial Sequence: Synthetic oligonucleotide
  Sense strand starting at position 3294 of SEQ ID NO: 1562308
ggugcuguguguauaugua

SEQ ID NO: 1737604 - RNA, 19 nt, Artificial Sequence
  Description of Artificial Sequence: Synthetic oligonucleotide
  Antisense strand to SEQ ID NO: 1737603
uacauauacacacagcacc

SEQ ID NO: 1737605 - RNA, 19 nt, Artificial Sequence
  Description of Artificial Sequence: Synthetic oligonucleotide
  Sense strand starting at position 3371 of SEQ ID NO: 1562308
guaugugugguacauggau

SEQ ID NO: 1737606 - RNA, 19 nt, Artificial Sequence
  Description of Artificial Sequence: Synthetic oligonucleotide
  Antisense strand to SEQ ID NO: 1737605
auccauguaccacacauac

SEQ ID NO: 1737607 - RNA, 19 nt, Artificial Sequence
  Description of Artificial Sequence: Synthetic oligonucleotide
  Sense strand starting at position 3401 of SEQ ID NO: 1562308
guauguguaaugugugagu

SEQ ID NO: 1737608 - RNA, 19 nt, Artificial Sequence
  Description of Artificial Sequence: Synthetic oligonucleotide
  Antisense strand to SEQ ID NO: 1737607
acucacacauuacacauac

SEQ ID NO: 1737609 - RNA, 19 nt, Artificial Sequence
  Description of Artificial Sequence: Synthetic oligonucleotide
  Sense strand starting at position 3541 of SEQ ID NO: 1562308
guccuuagggagugccaua

SEQ ID NO: 1737610 - RNA, 19 nt, Artificial Sequence
  Description of Artificial Sequence: Synthetic oligonucleotide
  Antisense strand to SEQ ID NO: 1737609
uauggcacucccuaaggac

SEQ ID NO: 1737611 - RNA, 19 nt, Artificial Sequence
  Description of Artificial Sequence: Synthetic oligonucleotide
  Sense strand starting at position 3851 of SEQ ID NO: 1562308
cugucagggaggugaaauu

SEQ ID NO: 1737612 - RNA, 19 nt, Artificial Sequence
  Description of Artificial Sequence: Synthetic oligonucleotide
  Antisense strand to SEQ ID NO: 1737611
aauuucaccucccugacag

SEQ ID NO: 1737613 - RNA, 19 nt, Artificial Sequence
  Description of Artificial Sequence: Synthetic oligonucleotide
  Sense strand starting at position 3906 of SEQ ID NO: 1562308
uugcgagccaggucuguua

SEQ ID NO: 1737614 - RNA, 19 nt, Artificial Sequence
  Description of Artificial Sequence: Synthetic oligonucleotide
  Antisense strand to SEQ ID NO: 1737613
uaacagaccuggcucgcaa

SEQ ID NO: 1737615 - RNA, 19 nt, Artificial Sequence
  Description of Artificial Sequence: Synthetic oligonucleotide
  Sense strand starting at position 3909 of SEQ ID NO: 1562308
cgagccaggucuguuauca

SEQ ID NO: 1737616 - RNA, 19 nt, Artificial Sequence
  Description of Artificial Sequence: Synthetic oligonucleotide
  Antisense strand to SEQ ID NO: 1737615
ugauaacagaccuggcucg

SEQ ID NO: 1737617 - RNA, 19 nt, Artificial Sequence
  Description of Artificial Sequence: Synthetic oligonucleotide
  Sense strand starting at position 3913 of SEQ ID NO: 1562308
ccaggucuguuaucagaaa

SEQ ID NO: 1737618 - RNA, 19 nt, Artificial Sequence
  Description of Artificial Sequence: Synthetic oligonucleotide
  Antisense strand to SEQ ID NO: 1737617
uuucugauaacagaccugg

SEQ ID NO: 1737619 - RNA, 19 nt, Artificial Sequence
  Description of Artificial Sequence: Synthetic oligonucleotide
  Sense strand starting at position 3921 of SEQ ID NO: 1562308
guuaucagaaaguggaaau

SEQ ID NO: 1737620 - RNA, 19 nt, Artificial Sequence
  Description of Artificial Sequence: Synthetic oligonucleotide
  Antisense strand to SEQ ID NO: 1737619
auuuccacuuucugauaac

SEQ ID NO: 1737621 - RNA, 19 nt, Artificial Sequence
  Description of Artificial Sequence: Synthetic oligonucleotide
  Sense strand starting at position 47 of SEQ ID NO: 1562309
cucugagcacugcauaauu

SEQ ID NO: 1737622 - RNA, 19 nt, Artificial Sequence
  Description of Artificial Sequence: Synthetic oligonucleotide
  Antisense strand to SEQ ID NO: 1737621
aauuaugcagugcucagag

SEQ ID NO: 1737623 - RNA, 19 nt, Artificial Sequence
  Description of Artificial Sequence: Synthetic oligonucleotide
  Sense strand starting at position 68 of SEQ ID NO: 1562309
ucuggagccuucucuacua

SEQ ID NO: 1737624 - RNA, 19 nt, Artificial Sequence
  Description of Artificial Sequence: Synthetic oligonucleotide
  Antisense strand to SEQ ID NO: 1737623
uaguagagaaggcuccaga

SEQ ID NO: 1737625 - RNA, 19 nt, Artificial Sequence
  Description of Artificial Sequence: Synthetic oligonucleotide
  Sense strand starting at position 88 of SEQ ID NO: 1562309
gcuaaucagcauuguacca

SEQ ID NO: 1737626 - RNA, 19 nt, Artificial Sequence
  Description of Artificial Sequence: Synthetic oligonucleotide
  Antisense strand to SEQ ID NO: 1737625
ugguacaaugcugauuagc

SEQ ID NO: 1737627 - RNA, 19 nt, Artificial Sequence
  Description of Artificial Sequence: Synthetic oligonucleotide
  Sense strand starting at position 160 of SEQ ID NO: 1562309
guauccaguucugcagaaa

SEQ ID NO: 1737628 - RNA, 19 nt, Artificial Sequence
  Description of Artificial Sequence: Synthetic oligonucleotide
  Antisense strand to SEQ ID NO: 1737627
uuucugcagaacuggauac

SEQ ID NO: 1737629 - RNA, 19 nt, Artificial Sequence
  Description of Artificial Sequence: Synthetic oligonucleotide
  Sense strand starting at position 161 of SEQ ID NO: 1562309
uauccaguucugcagaaag

SEQ ID NO: 1737630 - RNA, 19 nt, Artificial Sequence
  Description of Artificial Sequence: Synthetic oligonucleotide
  Antisense strand to SEQ ID NO: 1737629
cuuucugcagaacuggaua

SEQ ID NO: 1737631 - RNA, 19 nt, Artificial Sequence
  Description of Artificial Sequence: Synthetic oligonucleotide
  Sense strand starting at position 163 of SEQ ID NO: 1562309
uccaguucugcagaaagcu

SEQ ID NO: 1737632 - RNA, 19 nt, Artificial Sequence
  Description of Artificial Sequence: Synthetic oligonucleotide
  Antisense strand to SEQ ID NO: 1737631
agcuuucugcagaacugga

SEQ ID NO: 1737633 - RNA, 19 nt, Artificial Sequence
  Description of Artificial Sequence: Synthetic oligonucleotide
  Sense strand starting at position 187 of SEQ ID NO: 1562309
ccacgcacucccugauaca

SEQ ID NO: 1737634 - RNA, 19 nt, Artificial Sequence
  Description of Artificial Sequence: Synthetic oligonucleotide
  Antisense strand to SEQ ID NO: 1737633
uguaucagggagugcgugg

SEQ ID NO: 1737635 - RNA, 19 nt, Artificial Sequence
  Description of Artificial Sequence: Synthetic oligonucleotide
  Sense strand starting at position 295 of SEQ ID NO: 1562309
gcucauaaguaaucacuga

SEQ ID NO: 1737636 - RNA, 19 nt, Artificial Sequence
  Description of Artificial Sequence: Synthetic oligonucleotide
  Antisense strand to SEQ ID NO: 1737635
ucagugauuacuuaugagc

SEQ ID NO: 1737637 - RNA, 19 nt, Artificial Sequence
  Description of Artificial Sequence: Synthetic oligonucleotide
  Sense strand starting at position 756 of SEQ ID NO: 1562309
ugcguuccagcagaaagaa

SEQ ID NO: 1737638 - RNA, 19 nt, Artificial Sequence
  Description of Artificial Sequence: Synthetic oligonucleotide
  Antisense strand to SEQ ID NO: 1737637
uucuuucugcuggaacgca

SEQ ID NO: 1737639 - RNA, 19 nt, Artificial Sequence
  Description of Artificial Sequence: Synthetic oligonucleotide
  Sense strand starting at position 827 of SEQ ID NO: 1562309
gcuccacuuggagggauaa

SEQ ID NO: 1737640 - RNA, 19 nt, Artificial Sequence
  Description of Artificial Sequence: Synthetic oligonucleotide
  Antisense strand to SEQ ID NO: 1737639
uuaucccuccaaguggagc

SEQ ID NO: 1737641 - RNA, 19 nt, Artificial Sequence
  Description of Artificial Sequence: Synthetic oligonucleotide
  Sense strand starting at position 972 of SEQ ID NO: 1562309
aguguauuaagguguuauc

SEQ ID NO: 1737642 - RNA, 19 nt, Artificial Sequence
  Description of Artificial Sequence: Synthetic oligonucleotide
  Antisense strand to SEQ ID NO: 1737641
gauaacaccuuaauacacu

SEQ ID NO: 1737643 - RNA, 19 nt, Artificial Sequence
  Description of Artificial Sequence: Synthetic oligonucleotide
  Sense strand starting at position 1135 of SEQ ID NO: 1562309
gccagaugucaaggguuaa

SEQ ID NO: 1737644 - RNA, 19 nt, Artificial Sequence
  Description of Artificial Sequence: Synthetic oligonucleotide
  Antisense strand to SEQ ID NO: 1737643
uuaacccuugacaucuggc

SEQ ID NO: 1737645 - RNA, 19 nt, Artificial Sequence
  Description of Artificial Sequence: Synthetic oligonucleotide
  Sense strand starting at position 1136 of SEQ ID NO: 1562309
ccagaugucaaggguuaac

SEQ ID NO: 1737646 - RNA, 19 nt, Artificial Sequence
  Description of Artificial Sequence: Synthetic oligonucleotide
  Antisense strand to SEQ ID NO: 1737645
guuaacccuugacaucugg

SEQ ID NO: 1737647 - RNA, 19 nt, Artificial Sequence
  Description of Artificial Sequence: Synthetic oligonucleotide
  Sense strand starting at position 1306 of SEQ ID NO: 1562309
cugaguguuucccucugaa

SEQ ID NO: 1737648 - RNA, 19 nt, Artificial Sequence
  Description of Artificial Sequence: Synthetic oligonucleotide
  Antisense strand to SEQ ID NO: 1737647
uucagagggaaacacucag

SEQ ID NO: 1737649 - RNA, 19 nt, Artificial Sequence
  Description of Artificial Sequence: Synthetic oligonucleotide
  Sense strand starting at position 1319 of SEQ ID NO: 1562309
ucugaaacagucugcuauu

SEQ ID NO: 1737650 - RNA, 19 nt, Artificial Sequence
  Description of Artificial Sequence: Synthetic oligonucleotide
  Antisense strand to SEQ ID NO: 1737649
aauagcagacuguuucaga

SEQ ID NO: 1737651 - RNA, 19 nt, Artificial Sequence
  Description of Artificial Sequence: Synthetic oligonucleotide
  Sense strand starting at position 1320 of SEQ ID NO: 1562309
cugaaacagucugcuauua

SEQ ID NO: 1737652 - RNA, 19 nt, Artificial Sequence
  Description of Artificial Sequence: Synthetic oligonucleotide
  Antisense strand to SEQ ID NO: 1737651
uaauagcagacuguuucag

SEQ ID NO: 1737653 - RNA, 19 nt, Artificial Sequence
  Description of Artificial Sequence: Synthetic oligonucleotide
  Sense strand starting at position 1474 of SEQ ID NO: 1562309
gcgagcucccucgacaaca

SEQ ID NO: 1737654 - RNA, 19 nt, Artificial Sequence
  Description of Artificial Sequence: Synthetic oligonucleotide
  Antisense strand to SEQ ID NO: 1737653
uguugucgagggagcucgc

SEQ ID NO: 1737655 - RNA, 19 nt, Artificial Sequence
  Description of Artificial Sequence: Synthetic oligonucleotide
  Sense strand starting at position 1587 of SEQ ID NO: 1562309
aagggugaacuuuguauuc

SEQ ID NO: 1737656 - RNA, 19 nt, Artificial Sequence
  Description of Artificial Sequence: Synthetic oligonucleotide
  Antisense strand to SEQ ID NO: 1737655
gaauacaaaguucacccuu

SEQ ID NO: 1737657 - RNA, 19 nt, Artificial Sequence
  Description of Artificial Sequence: Synthetic oligonucleotide
  Sense strand starting at position 1613 of SEQ ID NO: 1562309
acagcuuccucucuguaua

SEQ ID NO: 1737658 - RNA, 19 nt, Artificial Sequence
  Description of Artificial Sequence: Synthetic oligonucleotide
  Antisense strand to SEQ ID NO: 1737657
uauacagagaggaagcugu

SEQ ID NO: 1737659 - RNA, 19 nt, Artificial Sequence
  Description of Artificial Sequence: Synthetic oligonucleotide
  Sense strand starting at position 1616 of SEQ ID NO: 1562309
gcuuccucucuguauaagu

SEQ ID NO: 1737660 - RNA, 19 nt, Artificial Sequence
  Description of Artificial Sequence: Synthetic oligonucleotide
  Antisense strand to SEQ ID NO: 1737659
acuuauacagagaggaagc

SEQ ID NO: 1737661 - RNA, 19 nt, Artificial Sequence
  Description of Artificial Sequence: Synthetic oligonucleotide
  Sense strand starting at position 1618 of SEQ ID NO: 1562309
uuccucucuguauaaguga

SEQ ID NO: 1737662 - RNA, 19 nt, Artificial Sequence
  Description of Artificial Sequence: Synthetic oligonucleotide
  Antisense strand to SEQ ID NO: 1737661
ucacuuauacagagaggaa

SEQ ID NO: 1737663 - RNA, 19 nt, Artificial Sequence
  Description of Artificial Sequence: Synthetic oligonucleotide
  Sense strand starting at position 1627 of SEQ ID NO: 1562309
guauaagugacagaguguu

SEQ ID NO: 1737664 - RNA, 19 nt, Artificial Sequence
  Description of Artificial Sequence: Synthetic oligonucleotide
  Antisense strand to SEQ ID NO: 1737663
aacacucugucacuuauac

SEQ ID NO: 1737665 - RNA, 19 nt, Artificial Sequence
  Description of Artificial Sequence: Synthetic oligonucleotide
  Sense strand starting at position 1659 of SEQ ID NO: 1562309
ggcuauucacgguaaguca

SEQ ID NO: 1737666 - RNA, 19 nt, Artificial Sequence
  Description of Artificial Sequence: Synthetic oligonucleotide
  Antisense strand to SEQ ID NO: 1737665
ugacuuaccgugaauagcc

SEQ ID NO: 1737667 - RNA, 19 nt, Artificial Sequence
  Description of Artificial Sequence: Synthetic oligonucleotide
  Sense strand starting at position 1892 of SEQ ID NO: 1562309
agcgcuuaucuggaaacua

SEQ ID NO: 1737668 - RNA, 19 nt, Artificial Sequence
  Description of Artificial Sequence: Synthetic oligonucleotide
  Antisense strand to SEQ ID NO: 1737667
uaguuuccagauaagcgcu

SEQ ID NO: 1737669 - RNA, 19 nt, Artificial Sequence
  Description of Artificial Sequence: Synthetic oligonucleotide
  Sense strand starting at position 1903 of SEQ ID NO: 1562309
ggaaacuauuccuuuguuu

SEQ ID NO: 1737670 - RNA, 19 nt, Artificial Sequence
  Description of Artificial Sequence: Synthetic oligonucleotide
  Antisense strand to SEQ ID NO: 1737669
aaacaaaggaauaguuucc

SEQ ID NO: 1737671 - RNA, 19 nt, Artificial Sequence
  Description of Artificial Sequence: Synthetic oligonucleotide
  Sense strand starting at position 2058 of SEQ ID NO: 1562309
ucggcuccuucucuuagaa

SEQ ID NO: 1737672 - RNA, 19 nt, Artificial Sequence
  Description of Artificial Sequence: Synthetic oligonucleotide
  Antisense strand to SEQ ID NO: 1737671
uucuaagagaaggagccga

SEQ ID NO: 1737673 - RNA, 19 nt, Artificial Sequence
  Description of Artificial Sequence: Synthetic oligonucleotide
  Sense strand starting at position 2156 of SEQ ID NO: 1562309
agguuuagauacucgaaua

SEQ ID NO: 1737674 - RNA, 19 nt, Artificial Sequence
  Description of Artificial Sequence: Synthetic oligonucleotide
  Antisense strand to SEQ ID NO: 1737673
uauucgaguaucuaaaccu

SEQ ID NO: 1737675 - RNA, 19 nt, Artificial Sequence
  Description of Artificial Sequence: Synthetic oligonucleotide
  Sense strand starting at position 2157 of SEQ ID NO: 1562309
gguuuagauacucgaauaa

SEQ ID NO: 1737676 - RNA, 19 nt, Artificial Sequence
  Description of Artificial Sequence: Synthetic oligonucleotide
  Antisense strand to SEQ ID NO: 1737675
uuauucgaguaucuaaacc

SEQ ID NO: 1737677 - RNA, 19 nt, Artificial Sequence
  Description of Artificial Sequence: Synthetic oligonucleotide
  Sense strand starting at position 2297 of SEQ ID NO: 1562309
agucucaccucuguaaaua

SEQ ID NO: 1737678 - RNA, 19 nt, Artificial Sequence
  Description of Artificial Sequence: Synthetic oligonucleotide
  Antisense strand to SEQ ID NO: 1737677
uauuuacagaggugagacu

SEQ ID NO: 1737679 - RNA, 19 nt, Artificial Sequence
  Description of Artificial Sequence: Synthetic oligonucleotide
  Sense strand starting at position 2298 of SEQ ID NO: 1562309
gucucaccucuguaaauau

SEQ ID NO: 1737680 - RNA, 19 nt, Artificial Sequence
  Description of Artificial Sequence: Synthetic oligonucleotide
  Antisense strand to SEQ ID NO: 1737679
auauuuacagaggugagac

SEQ ID NO: 1737681 - RNA, 19 nt, Artificial Sequence
  Description of Artificial Sequence: Synthetic oligonucleotide
  Sense strand starting at position 2384 of SEQ ID NO: 1562309
aguaaacuccauuagagcu

SEQ ID NO: 1737682 - RNA, 19 nt, Artificial Sequence
  Description of Artificial Sequence: Synthetic oligonucleotide
  Antisense strand to SEQ ID NO: 1737681
agcucuaauggaguuuacu

SEQ ID NO: 1737683 - RNA, 19 nt, Artificial Sequence
  Description of Artificial Sequence: Synthetic oligonucleotide
  Sense strand starting at position 3319 of SEQ ID NO: 1562309
aaugcaucacacgguuuaa

SEQ ID NO: 1737684 - RNA, 19 nt, Artificial Sequence
  Description of Artificial Sequence: Synthetic oligonucleotide
  Antisense strand to SEQ ID NO: 1737683
uuaaaccgugugaugcauu

SEQ ID NO: 1737685 - RNA, 19 nt, Artificial Sequence
  Description of Artificial Sequence: Synthetic oligonucleotide
  Sense strand starting at position 3332 of SEQ ID NO: 1562309
guuuaauguggccauucua

SEQ ID NO: 1737686 - RNA, 19 nt, Artificial Sequence
  Description of Artificial Sequence: Synthetic oligonucleotide
  Antisense strand to SEQ ID NO: 1737685
uagaauggccacauuaaac

SEQ ID NO: 1737687 - RNA, 19 nt, Artificial Sequence
  Description of Artificial Sequence: Synthetic oligonucleotide
  Sense strand starting at position 3352 of SEQ ID NO: 1562309
acagaaagaucuguuugug

SEQ ID NO: 1737688 - RNA, 19 nt, Artificial Sequence
  Description of Artificial Sequence: Synthetic oligonucleotide
  Antisense strand to SEQ ID NO: 1737687
cacaaacagaucuuucugu

SEQ ID NO: 1737689 - RNA, 19 nt, Artificial Sequence
  Description of Artificial Sequence: Synthetic oligonucleotide
  Sense strand starting at position 3355 of SEQ ID NO: 1562309
gaaagaucuguuugugaau

SEQ ID NO: 1737690 - RNA, 19 nt, Artificial Sequence
  Description of Artificial Sequence: Synthetic oligonucleotide
  Antisense strand to SEQ ID NO: 1737689
auucacaaacagaucuuuc

SEQ ID NO: 1737691 - RNA, 19 nt, Artificial Sequence
  Description of Artificial Sequence: Synthetic oligonucleotide
  Sense strand starting at position 3356 of SEQ ID NO: 1562309
aaagaucuguuugugaaug

SEQ ID NO: 1737692 - RNA, 19 nt, Artificial Sequence
  Description of Artificial Sequence: Synthetic oligonucleotide
  Antisense strand to SEQ ID NO: 1737691
cauucacaaacagaucuuu

SEQ ID NO: 1737693 - RNA, 19 nt, Artificial Sequence
  Description of Artificial Sequence: Synthetic oligonucleotide
  Sense strand starting at position 3581 of SEQ ID NO: 1562309
cuguuuccuccaggccaaa

SEQ ID NO: 1737694 - RNA, 19 nt, Artificial Sequence
  Description of Artificial Sequence: Synthetic oligonucleotide
  Antisense strand to SEQ ID NO: 1737693
uuuggccuggaggaaacag

SEQ ID NO: 1737695 - RNA, 19 nt, Artificial Sequence
  Description of Artificial Sequence: Synthetic oligonucleotide
  Sense strand starting at position 3800 of SEQ ID NO: 1562309
gcauaaauuccagguuaau

SEQ ID NO: 1737696 - RNA, 19 nt, Artificial Sequence
  Description of Artificial Sequence: Synthetic oligonucleotide
  Antisense strand to SEQ ID NO: 1737695
auuaaccuggaauuuaugc

SEQ ID NO: 1737697 - RNA, 19 nt, Artificial Sequence
  Description of Artificial Sequence: Synthetic oligonucleotide
  Sense strand starting at position 3891 of SEQ ID NO: 1562309
gagcuuccuguuuacaguu

SEQ ID NO: 1737698 - RNA, 19 nt, Artificial Sequence
  Description of Artificial Sequence: Synthetic oligonucleotide
  Antisense strand to SEQ ID NO: 1737697
aacuguaaacaggaagcuc

SEQ ID NO: 1737699 - RNA, 19 nt, Artificial Sequence
  Description of Artificial Sequence: Synthetic oligonucleotide
  Sense strand starting at position 3907 of SEQ ID NO: 1562309
guuagcuagagugacaaau

SEQ ID NO: 1737700 - RNA, 19 nt, Artificial Sequence
  Description of Artificial Sequence: Synthetic oligonucleotide
  Antisense strand to SEQ ID NO: 1737699
auuugucacucuagcuaac

SEQ ID NO: 1737701 - RNA, 19 nt, Artificial Sequence
  Description of Artificial Sequence: Synthetic oligonucleotide
  Sense strand starting at position 238 of SEQ ID NO: 1562310
gcacaacuccuaggaccua

SEQ ID NO: 1737702 - RNA, 19 nt, Artificial Sequence
  Description of Artificial Sequence: Synthetic oligonucleotide
  Antisense strand to SEQ ID NO: 1737701
uagguccuaggaguugugc

SEQ ID NO: 1737703 - RNA, 19 nt, Artificial Sequence
  Description of Artificial Sequence: Synthetic oligonucleotide
  Sense strand starting at position 411 of SEQ ID NO: 1562310
gcaagacaaccaugugguu

SEQ ID NO: 1737704 - RNA, 19 nt, Artificial Sequence
  Description of Artificial Sequence: Synthetic oligonucleotide
  Antisense strand to SEQ ID NO: 1737703
aaccacaugguugucuugc

SEQ ID NO: 1737705 - RNA, 19 nt, Artificial Sequence
  Description of Artificial Sequence: Synthetic oligonucleotide
  Sense strand starting at position 474 of SEQ ID NO: 1562310
gccuaaugaacugguggua

SEQ ID NO: 1737706 - RNA, 19 nt, Artificial Sequence
  Description of Artificial Sequence: Synthetic oligonucleotide
  Antisense strand to SEQ ID NO: 1737705
uaccaccaguucauuaggc

SEQ ID NO: 1737707 - RNA, 19 nt, Artificial Sequence
  Description of Artificial Sequence: Synthetic oligonucleotide
  Sense strand starting at position 477 of SEQ ID NO: 1562310
uaaugaacuggugguagua

SEQ ID NO: 1737708 - RNA, 19 nt, Artificial Sequence
  Description of Artificial Sequence: Synthetic oligonucleotide
  Antisense strand to SEQ ID NO: 1737707
uacuaccaccaguucauua

SEQ ID NO: 1737709 - RNA, 19 nt, Artificial Sequence
  Description of Artificial Sequence: Synthetic oligonucleotide
  Sense strand starting at position 596 of SEQ ID NO: 1562310
ucaggagacguuugagcua

SEQ ID NO: 1737710 - RNA, 19 nt, Artificial Sequence
  Description of Artificial Sequence: Synthetic oligonucleotide
  Antisense strand to SEQ ID NO: 1737709
uagcucaaacgucuccuga

SEQ ID NO: 1737711 - RNA, 19 nt, Artificial Sequence
  Description of Artificial Sequence: Synthetic oligonucleotide
  Sense strand starting at position 599 of SEQ ID NO: 1562310
ggagacguuugagcuaaga

SEQ ID NO: 1737712 - RNA, 19 nt, Artificial Sequence
  Description of Artificial Sequence: Synthetic oligonucleotide
  Antisense strand to SEQ ID NO: 1737711
ucuuagcucaaacgucucc

SEQ ID NO: 1737713 - RNA, 19 nt, Artificial Sequence
  Description of Artificial Sequence: Synthetic oligonucleotide
  Sense strand starting at position 668 of SEQ ID NO: 1562310
gacgaauggccaugggagu

SEQ ID NO: 1737714 - RNA, 19 nt, Artificial Sequence
  Description of Artificial Sequence: Synthetic oligonucleotide
  Antisense strand to SEQ ID NO: 1737713
acucccauggccauucguc

SEQ ID NO: 1737715 - RNA, 19 nt, Artificial Sequence
  Description of Artificial Sequence: Synthetic oligonucleotide
  Sense strand starting at position 1097 of SEQ ID NO: 1562310
ucuguaucugguuacagua

SEQ ID NO: 1737716 - RNA, 19 nt, Artificial Sequence
  Description of Artificial Sequence: Synthetic oligonucleotide
  Antisense strand to SEQ ID NO: 1737715
uacuguaaccagauacaga

SEQ ID NO: 1737717 - RNA, 19 nt, Artificial Sequence
  Description of Artificial Sequence: Synthetic oligonucleotide
  Sense strand starting at position 1125 of SEQ ID NO: 1562310
ugucaaucuccugguuuga

SEQ ID NO: 1737718 - RNA, 19 nt, Artificial Sequence
  Description of Artificial Sequence: Synthetic oligonucleotide
  Antisense strand to SEQ ID NO: 1737717
ucaaaccaggagauugaca

SEQ ID NO: 1737719 - RNA, 19 nt, Artificial Sequence
  Description of Artificial Sequence: Synthetic oligonucleotide
  Sense strand starting at position 1127 of SEQ ID NO: 1562310
ucaaucuccugguuugauc

SEQ ID NO: 1737720 - RNA, 19 nt, Artificial Sequence
  Description of Artificial Sequence: Synthetic oligonucleotide
  Antisense strand to SEQ ID NO: 1737719
gaucaaaccaggagauuga

SEQ ID NO: 1737721 - RNA, 19 nt, Artificial Sequence
  Description of Artificial Sequence: Synthetic oligonucleotide
  Sense strand starting at position 1207 of SEQ ID NO: 1562310
uggaucuuggcauaaccau

SEQ ID NO: 1737722 - RNA, 19 nt, Artificial Sequence
  Description of Artificial Sequence: Synthetic oligonucleotide
  Antisense strand to SEQ ID NO: 1737721
augguuaugccaagaucca

SEQ ID NO: 1737723 - RNA, 19 nt, Artificial Sequence
  Description of Artificial Sequence: Synthetic oligonucleotide
  Sense strand starting at position 2143 of SEQ ID NO: 1562310
uggccaugugccuagaucu

SEQ ID NO: 1737724 - RNA, 19 nt, Artificial Sequence
  Description of Artificial Sequence: Synthetic oligonucleotide
  Antisense strand to SEQ ID NO: 1737723
agaucuaggcacauggcca

SEQ ID NO: 1737725 - RNA, 19 nt, Artificial Sequence
  Description of Artificial Sequence: Synthetic oligonucleotide
  Sense strand starting at position 2318 of SEQ ID NO: 1562310
agucuuuggagcuagaguu

SEQ ID NO: 1737726 - RNA, 19 nt, Artificial Sequence
  Description of Artificial Sequence: Synthetic oligonucleotide
  Antisense strand to SEQ ID NO: 1737725
aacucuagcuccaaagacu

SEQ ID NO: 1737727 - RNA, 19 nt, Artificial Sequence
  Description of Artificial Sequence: Synthetic oligonucleotide
  Sense strand starting at position 2328 of SEQ ID NO: 1562310
gcuagaguugcagaagaaa

SEQ ID NO: 1737728 - RNA, 19 nt, Artificial Sequence
  Description of Artificial Sequence: Synthetic oligonucleotide
  Antisense strand to SEQ ID NO: 1737727
uuucuucugcaacucuagc

SEQ ID NO: 1737729 - RNA, 19 nt, Artificial Sequence
  Description of Artificial Sequence: Synthetic oligonucleotide
  Sense strand starting at position 2410 of SEQ ID NO: 1562310
gcuacugacuuagccagau

SEQ ID NO: 1737730 - RNA, 19 nt, Artificial Sequence
  Description of Artificial Sequence: Synthetic oligonucleotide
  Antisense strand to SEQ ID NO: 1737729
aucuggcuaagucaguagc

SEQ ID NO: 1737731 - RNA, 19 nt, Artificial Sequence
  Description of Artificial Sequence: Synthetic oligonucleotide
  Sense strand starting at position 2468 of SEQ ID NO: 1562310
agguuacuucucugggcau

SEQ ID NO: 1737732 - RNA, 19 nt, Artificial Sequence
  Description of Artificial Sequence: Synthetic oligonucleotide
  Antisense strand to SEQ ID NO: 1737731
augcccagagaaguaaccu

SEQ ID NO: 1737733 - RNA, 19 nt, Artificial Sequence
  Description of Artificial Sequence: Synthetic oligonucleotide
  Sense strand starting at position 2470 of SEQ ID NO: 1562310
guuacuucucugggcauuu

SEQ ID NO: 1737734 - RNA, 19 nt, Artificial Sequence
  Description of Artificial Sequence: Synthetic oligonucleotide
  Antisense strand to SEQ ID NO: 1737733
aaaugcccagagaaguaac

SEQ ID NO: 1737735 - RNA, 19 nt, Artificial Sequence
  Description of Artificial Sequence: Synthetic oligonucleotide
  Sense strand starting at position 2492 of SEQ ID NO: 1562310
gggccaucaguuuaucugu

SEQ ID NO: 1737736 - RNA, 19 nt, Artificial Sequence
  Description of Artificial Sequence: Synthetic oligonucleotide
  Antisense strand to SEQ ID NO: 1737735
acagauaaacugauggccc

SEQ ID NO: 1737737 - RNA, 19 nt, Artificial Sequence
  Description of Artificial Sequence: Synthetic oligonucleotide
  Sense strand starting at position 2500 of SEQ ID NO: 1562310
aguuuaucugugcauaggu

SEQ ID NO: 1737738 - RNA, 19 nt, Artificial Sequence
  Description of Artificial Sequence: Synthetic oligonucleotide
  Antisense strand to SEQ ID NO: 1737737
accuaugcacagauaaacu

SEQ ID NO: 1737739 - RNA, 19 nt, Artificial Sequence
  Description of Artificial Sequence: Synthetic oligonucleotide
  Sense strand starting at position 2629 of SEQ ID NO: 1562310
uaguucaguggugggaaau

SEQ ID NO: 1737740 - RNA, 19 nt, Artificial Sequence
  Description of Artificial Sequence: Synthetic oligonucleotide
  Antisense strand to SEQ ID NO: 1737739
auuucccaccacugaacua

SEQ ID NO: 1737741 - RNA, 19 nt, Artificial Sequence
  Description of Artificial Sequence: Synthetic oligonucleotide
  Sense strand starting at position 2630 of SEQ ID NO: 1562310
aguucaguggugggaaauu

SEQ ID NO: 1737742 - RNA, 19 nt, Artificial Sequence
  Description of Artificial Sequence: Synthetic oligonucleotide
  Antisense strand to SEQ ID NO: 1737741
aauuucccaccacugaacu

SEQ ID NO: 1737743 - RNA, 19 nt, Artificial Sequence
  Description of Artificial Sequence: Synthetic oligonucleotide
  Sense strand starting at position 2652 of SEQ ID NO: 1562310
agagaaaugccaggaguuu

SEQ ID NO: 1737744 - RNA, 19 nt, Artificial Sequence
  Description of Artificial Sequence: Synthetic oligonucleotide
  Antisense strand to SEQ ID NO: 1737743
aaacuccuggcauuucucu

SEQ ID NO: 1737745 - RNA, 19 nt, Artificial Sequence
  Description of Artificial Sequence: Synthetic oligonucleotide
  Sense strand starting at position 2663 of SEQ ID NO: 1562310
aggaguuuggucuaggucu

SEQ ID NO: 1737746 - RNA, 19 nt, Artificial Sequence
  Description of Artificial Sequence: Synthetic oligonucleotide
  Antisense strand to SEQ ID NO: 1737745
agaccuagaccaaacuccu

SEQ ID NO: 1737747 - RNA, 19 nt, Artificial Sequence
  Description of Artificial Sequence: Synthetic oligonucleotide
  Sense strand starting at position 2682 of SEQ ID NO: 1562310
ggugguucacagcacagaa

SEQ ID NO: 1737748 - RNA, 19 nt, Artificial Sequence
  Description of Artificial Sequence: Synthetic oligonucleotide
  Antisense strand to SEQ ID NO: 1737747
uucugugcugugaaccacc

SEQ ID NO: 1737749 - RNA, 19 nt, Artificial Sequence
  Description of Artificial Sequence: Synthetic oligonucleotide
  Sense strand starting at position 2739 of SEQ ID NO: 1562310
gcauuauuugggugcuaca

SEQ ID NO: 1737750 - RNA, 19 nt, Artificial Sequence
  Description of Artificial Sequence: Synthetic oligonucleotide
  Antisense strand to SEQ ID NO: 1737749
uguagcacccaaauaaugc

SEQ ID NO: 1737751 - RNA, 19 nt, Artificial Sequence
  Description of Artificial Sequence: Synthetic oligonucleotide
  Sense strand starting at position 2823 of SEQ ID NO: 1562310
gaagaaauguaacugcaug

SEQ ID NO: 1737752 - RNA, 19 nt, Artificial Sequence
  Description of Artificial Sequence: Synthetic oligonucleotide
  Antisense strand to SEQ ID NO: 1737751
caugcaguuacauuucuuc

SEQ ID NO: 1737753 - RNA, 19 nt, Artificial Sequence
  Description of Artificial Sequence: Synthetic oligonucleotide
  Sense strand starting at position 2988 of SEQ ID NO: 1562310
gauggcuaguucccugaga

SEQ ID NO: 1737754 - RNA, 19 nt, Artificial Sequence
  Description of Artificial Sequence: Synthetic oligonucleotide
  Antisense strand to SEQ ID NO: 1737753
ucucagggaacuagccauc

SEQ ID NO: 1737755 - RNA, 19 nt, Artificial Sequence
  Description of Artificial Sequence: Synthetic oligonucleotide
  Sense strand starting at position 2989 of SEQ ID NO: 1562310
auggcuaguucccugagaa

SEQ ID NO: 1737756 - RNA, 19 nt, Artificial Sequence
  Description of Artificial Sequence: Synthetic oligonucleotide
  Antisense strand to SEQ ID NO: 1737755
uucucagggaacuagccau

SEQ ID NO: 1737757 - RNA, 19 nt, Artificial Sequence
  Description of Artificial Sequence: Synthetic oligonucleotide
  Sense strand starting at position 2990 of SEQ ID NO: 1562310
uggcuaguucccugagaaa

SEQ ID NO: 1737758 - RNA, 19 nt, Artificial Sequence
  Description of Artificial Sequence: Synthetic oligonucleotide
  Antisense strand to SEQ ID NO: 1737757
uuucucagggaacuagcca

SEQ ID NO: 1737759 - RNA, 19 nt, Artificial Sequence
  Description of Artificial Sequence: Synthetic oligonucleotide
  Sense strand starting at position 3421 of SEQ ID NO: 1562310
acaucuguccuaugggaca

SEQ ID NO: 1737760 - RNA, 19 nt, Artificial Sequence
  Description of Artificial Sequence: Synthetic oligonucleotide
  Antisense strand to SEQ ID NO: 1737759
ugucccauaggacagaugu

SEQ ID NO: 1737761 - RNA, 19 nt, Artificial Sequence
  Description of Artificial Sequence: Synthetic oligonucleotide
  Sense strand starting at position 3434 of SEQ ID NO: 1562310
gggacaauugcaugguuuc

SEQ ID NO: 1737762 - RNA, 19 nt, Artificial Sequence
  Description of Artificial Sequence: Synthetic oligonucleotide
  Antisense strand to SEQ ID NO: 1737761
gaaaccaugcaauuguccc

SEQ ID NO: 1737763 - RNA, 19 nt, Artificial Sequence
  Description of Artificial Sequence: Synthetic oligonucleotide
  Sense strand starting at position 3471 of SEQ ID NO: 1562310
uccuacuuacaagggaauu

SEQ ID NO: 1737764 - RNA, 19 nt, Artificial Sequence
  Description of Artificial Sequence: Synthetic oligonucleotide
  Antisense strand to SEQ ID NO: 1737763
aauucccuuguaaguagga

SEQ ID NO: 1737765 - RNA, 19 nt, Artificial Sequence
  Description of Artificial Sequence: Synthetic oligonucleotide
  Sense strand starting at position 3525 of SEQ ID NO: 1562310
auagguugccacuaucaca

SEQ ID NO: 1737766 - RNA, 19 nt, Artificial Sequence
  Description of Artificial Sequence: Synthetic oligonucleotide
  Antisense strand to SEQ ID NO: 1737765
ugugauaguggcaaccuau

SEQ ID NO: 1737767 - RNA, 19 nt, Artificial Sequence
  Description of Artificial Sequence: Synthetic oligonucleotide
  Sense strand starting at position 3648 of SEQ ID NO: 1562310
cacuguauugggcaguaca

SEQ ID NO: 1737768 - RNA, 19 nt, Artificial Sequence
  Description of Artificial Sequence: Synthetic oligonucleotide
  Antisense strand to SEQ ID NO: 1737767
uguacugcccaauacagug

SEQ ID NO: 1737769 - RNA, 19 nt, Artificial Sequence
  Description of Artificial Sequence: Synthetic oligonucleotide
  Sense strand starting at position 3661 of SEQ ID NO: 1562310
aguacagauuuaggauauu

SEQ ID NO: 1737770 - RNA, 19 nt, Artificial Sequence
  Description of Artificial Sequence: Synthetic oligonucleotide
  Antisense strand to SEQ ID NO: 1737769
aauauccuaaaucuguacu

SEQ ID NO: 1737771 - RNA, 19 nt, Artificial Sequence
  Description of Artificial Sequence: Synthetic oligonucleotide
  Sense strand starting at position 3688 of SEQ ID NO: 1562310
ugcagaaaggucuguugaa

SEQ ID NO: 1737772 - RNA, 19 nt, Artificial Sequence
  Description of Artificial Sequence: Synthetic oligonucleotide
  Antisense strand to SEQ ID NO: 1737771
uucaacagaccuuucugca

SEQ ID NO: 1737773 - RNA, 19 nt, Artificial Sequence
  Description of Artificial Sequence: Synthetic oligonucleotide
  Sense strand starting at position 3689 of SEQ ID NO: 1562310
gcagaaaggucuguugaac

SEQ ID NO: 1737774 - RNA, 19 nt, Artificial Sequence
  Description of Artificial Sequence: Synthetic oligonucleotide
  Antisense strand to SEQ ID NO: 1737773
guucaacagaccuuucugc

SEQ ID NO: 1737775 - RNA, 19 nt, Artificial Sequence
  Description of Artificial Sequence: Synthetic oligonucleotide
  Sense strand starting at position 3701 of SEQ ID NO: 1562310
guugaacaccacugcuuua

SEQ ID NO: 1737776 - RNA, 19 nt, Artificial Sequence
  Description of Artificial Sequence: Synthetic oligonucleotide
  Antisense strand to SEQ ID NO: 1737775
uaaagcagugguguucaac

SEQ ID NO: 1737777 - RNA, 19 nt, Artificial Sequence
  Description of Artificial Sequence: Synthetic oligonucleotide
  Sense strand starting at position 3746 of SEQ ID NO: 1562310
caagguagguuuccaauca

SEQ ID NO: 1737778 - RNA, 19 nt, Artificial Sequence
  Description of Artificial Sequence: Synthetic oligonucleotide
  Antisense strand to SEQ ID NO: 1737777
ugauuggaaaccuaccuug

SEQ ID NO: 1737779 - RNA, 19 nt, Artificial Sequence
  Description of Artificial Sequence: Synthetic oligonucleotide
  Sense strand starting at position 3942 of SEQ ID NO: 1562310
ugaagauauugacaacaaa

SEQ ID NO: 1737780 - RNA, 19 nt, Artificial Sequence
  Description of Artificial Sequence: Synthetic oligonucleotide
  Antisense strand to SEQ ID NO: 1737779
uuuguugucaauaucuuca

SEQ ID NO: 1737781 - RNA, 19 nt, Artificial Sequence
  Description of Artificial Sequence: Synthetic oligonucleotide
  Sense strand starting at position 259 of SEQ ID NO: 1562311
gggagauucugccuugcca

SEQ ID NO: 1737782 - RNA, 19 nt, Artificial Sequence
  Description of Artificial Sequence: Synthetic oligonucleotide
  Antisense strand to SEQ ID NO: 1737781
uggcaaggcagaaucuccc

SEQ ID NO: 1737783 - RNA, 19 nt, Artificial Sequence
  Description of Artificial Sequence: Synthetic oligonucleotide
  Sense strand starting at position 261 of SEQ ID NO: 1562311
gagauucugccuugccaug

SEQ ID NO: 1737784 - RNA, 19 nt, Artificial Sequence
  Description of Artificial Sequence: Synthetic oligonucleotide
  Antisense strand to SEQ ID NO: 1737783
cauggcaaggcagaaucuc

SEQ ID NO: 1737785 - RNA, 19 nt, Artificial Sequence
  Description of Artificial Sequence: Synthetic oligonucleotide
  Sense strand starting at position 620 of SEQ ID NO: 1562311
gccuguuuauuucuccgua

SEQ ID NO: 1737786 - RNA, 19 nt, Artificial Sequence
  Description of Artificial Sequence: Synthetic oligonucleotide
  Antisense strand to SEQ ID NO: 1737785
uacggagaaauaaacaggc

SEQ ID NO: 1737787 - RNA, 19 nt, Artificial Sequence
  Description of Artificial Sequence: Synthetic oligonucleotide
  Sense strand starting at position 622 of SEQ ID NO: 1562311
cuguuuauuucuccguagu

SEQ ID NO: 1737788 - RNA, 19 nt, Artificial Sequence
  Description of Artificial Sequence: Synthetic oligonucleotide
  Antisense strand to SEQ ID NO: 1737787
acuacggagaaauaaacag

SEQ ID NO: 1737789 - RNA, 19 nt, Artificial Sequence
  Description of Artificial Sequence: Synthetic oligonucleotide
  Sense strand starting at position 623 of SEQ ID NO: 1562311
uguuuauuucuccguagua

SEQ ID NO: 1737790 - RNA, 19 nt, Artificial Sequence
  Description of Artificial Sequence: Synthetic oligonucleotide
  Antisense strand to SEQ ID NO: 1737789
uacuacggagaaauaaaca

SEQ ID NO: 1737791 - RNA, 19 nt, Artificial Sequence
  Description of Artificial Sequence: Synthetic oligonucleotide
  Sense strand starting at position 624 of SEQ ID NO: 1562311
guuuauuucuccguaguaa

SEQ ID NO: 1737792 - RNA, 19 nt, Artificial Sequence
  Description of Artificial Sequence: Synthetic oligonucleotide
  Antisense strand to SEQ ID NO: 1737791
uuacuacggagaaauaaac

SEQ ID NO: 1737793 - RNA, 19 nt, Artificial Sequence
  Description of Artificial Sequence: Synthetic oligonucleotide
  Sense strand starting at position 946 of SEQ ID NO: 1562311
uuugccagagccuaucaaa

SEQ ID NO: 1737794 - RNA, 19 nt, Artificial Sequence
  Description of Artificial Sequence: Synthetic oligonucleotide
  Antisense strand to SEQ ID NO: 1737793
uuugauaggcucuggcaaa

SEQ ID NO: 1737795 - RNA, 19 nt, Artificial Sequence
  Description of Artificial Sequence: Synthetic oligonucleotide
  Sense strand starting at position 1109 of SEQ ID NO: 1562311
gagaccguuucuuugcaga

SEQ ID NO: 1737796 - RNA, 19 nt, Artificial Sequence
  Description of Artificial Sequence: Synthetic oligonucleotide
  Antisense strand to SEQ ID NO: 1737795
ucugcaaagaaacggucuc

SEQ ID NO: 1737797 - RNA, 19 nt, Artificial Sequence
  Description of Artificial Sequence: Synthetic oligonucleotide
  Sense strand starting at position 1111 of SEQ ID NO: 1562311
gaccguuucuuugcagaga

SEQ ID NO: 1737798 - RNA, 19 nt, Artificial Sequence
  Description of Artificial Sequence: Synthetic oligonucleotide
  Antisense strand to SEQ ID NO: 1737797
ucucugcaaagaaacgguc

SEQ ID NO: 1737799 - RNA, 19 nt, Artificial Sequence
  Description of Artificial Sequence: Synthetic oligonucleotide
  Sense strand starting at position 2034 of SEQ ID NO: 1562311
gggugaucugcgagguguc

SEQ ID NO: 1737800 - RNA, 19 nt, Artificial Sequence
  Description of Artificial Sequence: Synthetic oligonucleotide
  Antisense strand to SEQ ID NO: 1737799
gacaccucgcagaucaccc

SEQ ID NO: 1737801 - RNA, 19 nt, Artificial Sequence
  Description of Artificial Sequence: Synthetic oligonucleotide
  Sense strand starting at position 2044 of SEQ ID NO: 1562311
cgagguguccgaagccaaa

SEQ ID NO: 1737802 - RNA, 19 nt, Artificial Sequence
  Description of Artificial Sequence: Synthetic oligonucleotide
  Antisense strand to SEQ ID NO: 1737801
uuuggcuucggacaccucg

SEQ ID NO: 1737803 - RNA, 19 nt, Artificial Sequence
  Description of Artificial Sequence: Synthetic oligonucleotide
  Sense strand starting at position 2087 of SEQ ID NO: 1562311
ggcuccagauucuuggcaa

SEQ ID NO: 1737804 - RNA, 19 nt, Artificial Sequence
  Description of Artificial Sequence: Synthetic oligonucleotide
  Antisense strand to SEQ ID NO: 1737803
uugccaagaaucuggagcc

SEQ ID NO: 1737805 - RNA, 19 nt, Artificial Sequence
  Description of Artificial Sequence: Synthetic oligonucleotide
  Sense strand starting at position 2090 of SEQ ID NO: 1562311
uccagauucuuggcaacug

SEQ ID NO: 1737806 - RNA, 19 nt, Artificial Sequence
  Description of Artificial Sequence: Synthetic oligonucleotide
  Antisense strand to SEQ ID NO: 1737805
caguugccaagaaucugga

SEQ ID NO: 1737807 - RNA, 19 nt, Artificial Sequence
  Description of Artificial Sequence: Synthetic oligonucleotide
  Sense strand starting at position 2247 of SEQ ID NO: 1562311
guaacugcuucucuggaca

SEQ ID NO: 1737808 - RNA, 19 nt, Artificial Sequence
  Description of Artificial Sequence: Synthetic oligonucleotide
  Antisense strand to SEQ ID NO: 1737807
uguccagagaagcaguuac

SEQ ID NO: 1737809 - RNA, 19 nt, Artificial Sequence
  Description of Artificial Sequence: Synthetic oligonucleotide
  Sense strand starting at position 2269 of SEQ ID NO: 1562311
guugccuugcuugcuuaaa

SEQ ID NO: 1737810 - RNA, 19 nt, Artificial Sequence
  Description of Artificial Sequence: Synthetic oligonucleotide
  Antisense strand to SEQ ID NO: 1737809
uuuaagcaagcaaggcaac

SEQ ID NO: 1737811 - RNA, 19 nt, Artificial Sequence
  Description of Artificial Sequence: Synthetic oligonucleotide
  Sense strand starting at position 2345 of SEQ ID NO: 1562311
gcgacaucgcucugggauu

SEQ ID NO: 1737812 - RNA, 19 nt, Artificial Sequence
  Description of Artificial Sequence: Synthetic oligonucleotide
  Antisense strand to SEQ ID NO: 1737811
aaucccagagcgaugucgc

SEQ ID NO: 1737813 - RNA, 19 nt, Artificial Sequence
  Description of Artificial Sequence: Synthetic oligonucleotide
  Sense strand starting at position 2357 of SEQ ID NO: 1562311
ugggauucccagugaaugu

SEQ ID NO: 1737814 - RNA, 19 nt, Artificial Sequence
  Description of Artificial Sequence: Synthetic oligonucleotide
  Antisense strand to SEQ ID NO: 1737813
acauucacugggaauccca

SEQ ID NO: 1737815 - RNA, 19 nt, Artificial Sequence
  Description of Artificial Sequence: Synthetic oligonucleotide
  Sense strand starting at position 2358 of SEQ ID NO: 1562311
gggauucccagugaaugug

SEQ ID NO: 1737816 - RNA, 19 nt, Artificial Sequence
  Description of Artificial Sequence: Synthetic oligonucleotide
  Antisense strand to SEQ ID NO: 1737815
cacauucacugggaauccc

SEQ ID NO: 1737817 - RNA, 19 nt, Artificial Sequence
  Description of Artificial Sequence: Synthetic oligonucleotide
  Sense strand starting at position 2447 of SEQ ID NO: 1562311
uagguuuguccagggagga

SEQ ID NO: 1737818 - RNA, 19 nt, Artificial Sequence
  Description of Artificial Sequence: Synthetic oligonucleotide
  Antisense strand to SEQ ID NO: 1737817
uccucccuggacaaaccua

SEQ ID NO: 1737819 - RNA, 19 nt, Artificial Sequence
  Description of Artificial Sequence: Synthetic oligonucleotide
  Sense strand starting at position 2448 of SEQ ID NO: 1562311
agguuuguccagggaggau

SEQ ID NO: 1737820 - RNA, 19 nt, Artificial Sequence
  Description of Artificial Sequence: Synthetic oligonucleotide
  Antisense strand to SEQ ID NO: 1737819
auccucccuggacaaaccu

SEQ ID NO: 1737821 - RNA, 19 nt, Artificial Sequence
  Description of Artificial Sequence: Synthetic oligonucleotide
  Sense strand starting at position 2473 of SEQ ID NO: 1562311
cuauaaagaucuggauuga

SEQ ID NO: 1737822 - RNA, 19 nt, Artificial Sequence
  Description of Artificial Sequence: Synthetic oligonucleotide
  Antisense strand to SEQ ID NO: 1737821
ucaauccagaucuuuauag

SEQ ID NO: 1737823 - RNA, 19 nt, Artificial Sequence
  Description of Artificial Sequence: Synthetic oligonucleotide
  Sense strand starting at position 2488 of SEQ ID NO: 1562311
uugaucauauguucucaca

SEQ ID NO: 1737824 - RNA, 19 nt, Artificial Sequence
  Description of Artificial Sequence: Synthetic oligonucleotide
  Antisense strand to SEQ ID NO: 1737823
ugugagaacauaugaucaa

SEQ ID NO: 1737825 - RNA, 19 nt, Artificial Sequence
  Description of Artificial Sequence: Synthetic oligonucleotide
  Sense strand starting at position 2596 of SEQ ID NO: 1562311
aguguaaacugaguuguuu

SEQ ID NO: 1737826 - RNA, 19 nt, Artificial Sequence
  Description of Artificial Sequence: Synthetic oligonucleotide
  Antisense strand to SEQ ID NO: 1737825
aaacaacucaguuuacacu

SEQ ID NO: 1737827 - RNA, 19 nt, Artificial Sequence
  Description of Artificial Sequence: Synthetic oligonucleotide
  Sense strand starting at position 2598 of SEQ ID NO: 1562311
uguaaacugaguuguuuga

SEQ ID NO: 1737828 - RNA, 19 nt, Artificial Sequence
  Description of Artificial Sequence: Synthetic oligonucleotide
  Antisense strand to SEQ ID NO: 1737827
ucaaacaacucaguuuaca

SEQ ID NO: 1737829 - RNA, 19 nt, Artificial Sequence
  Description of Artificial Sequence: Synthetic oligonucleotide
  Sense strand starting at position 2600 of SEQ ID NO: 1562311
uaaacugaguuguuugauc

SEQ ID NO: 1737830 - RNA, 19 nt, Artificial Sequence
  Description of Artificial Sequence: Synthetic oligonucleotide
  Antisense strand to SEQ ID NO: 1737829
gaucaaacaacucaguuua

SEQ ID NO: 1737831 - RNA, 19 nt, Artificial Sequence
  Description of Artificial Sequence: Synthetic oligonucleotide
  Sense strand starting at position 2602 of SEQ ID NO: 1562311
aacugaguuguuugaucag

SEQ ID NO: 1737832 - RNA, 19 nt, Artificial Sequence
  Description of Artificial Sequence: Synthetic oligonucleotide
  Antisense strand to SEQ ID NO: 1737831
cugaucaaacaacucaguu

SEQ ID NO: 1737833 - RNA, 19 nt, Artificial Sequence
  Description of Artificial Sequence: Synthetic oligonucleotide
  Sense strand starting at position 2605 of SEQ ID NO: 1562311
ugaguuguuugaucaguga

SEQ ID NO: 1737834 - RNA, 19 nt, Artificial Sequence
  Description of Artificial Sequence: Synthetic oligonucleotide
  Antisense strand to SEQ ID NO: 1737833
ucacugaucaaacaacuca

SEQ ID NO: 1737835 - RNA, 19 nt, Artificial Sequence
  Description of Artificial Sequence: Synthetic oligonucleotide
  Sense strand starting at position 2608 of SEQ ID NO: 1562311
guuguuugaucagugacuu

SEQ ID NO: 1737836 - RNA, 19 nt, Artificial Sequence
  Description of Artificial Sequence: Synthetic oligonucleotide
  Antisense strand to SEQ ID NO: 1737835
aagucacugaucaaacaac

SEQ ID NO: 1737837 - RNA, 19 nt, Artificial Sequence
  Description of Artificial Sequence: Synthetic oligonucleotide
  Sense strand starting at position 2609 of SEQ ID NO: 1562311
uuguuugaucagugacuuu

SEQ ID NO: 1737838 - RNA, 19 nt, Artificial Sequence
  Description of Artificial Sequence: Synthetic oligonucleotide
  Antisense strand to SEQ ID NO: 1737837
aaagucacugaucaaacaa

SEQ ID NO: 1737839 - RNA, 19 nt, Artificial Sequence
  Description of Artificial Sequence: Synthetic oligonucleotide
  Sense strand starting at position 2616 of SEQ ID NO: 1562311
aucagugacuuugagauuu

SEQ ID NO: 1737840 - RNA, 19 nt, Artificial Sequence
  Description of Artificial Sequence: Synthetic oligonucleotide
  Antisense strand to SEQ ID NO: 1737839
aaaucucaaagucacugau

SEQ ID NO: 1737841 - RNA, 19 nt, Artificial Sequence
  Description of Artificial Sequence: Synthetic oligonucleotide
  Sense strand starting at position 3317 of SEQ ID NO: 1562311
acaagugugccacagucau

SEQ ID NO: 1737842 - RNA, 19 nt, Artificial Sequence
  Description of Artificial Sequence: Synthetic oligonucleotide
  Antisense strand to SEQ ID NO: 1737841
augacuguggcacacuugu

SEQ ID NO: 1737843 - RNA, 19 nt, Artificial Sequence
  Description of Artificial Sequence: Synthetic oligonucleotide
  Sense strand starting at position 3329 of SEQ ID NO: 1562311
cagucaugccuggauaauu

SEQ ID NO: 1737844 - RNA, 19 nt, Artificial Sequence
  Description of Artificial Sequence: Synthetic oligonucleotide
  Antisense strand to SEQ ID NO: 1737843
aauuauccaggcaugacug

SEQ ID NO: 1737845 - RNA, 19 nt, Artificial Sequence
  Description of Artificial Sequence: Synthetic oligonucleotide
  Sense strand starting at position 3432 of SEQ ID NO: 1562311
cuccgaauccuggguucca

SEQ ID NO: 1737846 - RNA, 19 nt, Artificial Sequence
  Description of Artificial Sequence: Synthetic oligonucleotide
  Antisense strand to SEQ ID NO: 1737845
uggaacccaggauucggag

SEQ ID NO: 1737847 - RNA, 19 nt, Artificial Sequence
  Description of Artificial Sequence: Synthetic oligonucleotide
  Sense strand starting at position 3433 of SEQ ID NO: 1562311
uccgaauccuggguuccaa

SEQ ID NO: 1737848 - RNA, 19 nt, Artificial Sequence
  Description of Artificial Sequence: Synthetic oligonucleotide
  Antisense strand to SEQ ID NO: 1737847
uuggaacccaggauucgga

SEQ ID NO: 1737849 - RNA, 19 nt, Artificial Sequence
  Description of Artificial Sequence: Synthetic oligonucleotide
  Sense strand starting at position 3710 of SEQ ID NO: 1562311
guugcucagacugguugaa

SEQ ID NO: 1737850 - RNA, 19 nt, Artificial Sequence
  Description of Artificial Sequence: Synthetic oligonucleotide
  Antisense strand to SEQ ID NO: 1737849
uucaaccagucugagcaac

SEQ ID NO: 1737851 - RNA, 19 nt, Artificial Sequence
  Description of Artificial Sequence: Synthetic oligonucleotide
  Sense strand starting at position 3712 of SEQ ID NO: 1562311
ugcucagacugguugaacu

SEQ ID NO: 1737852 - RNA, 19 nt, Artificial Sequence
  Description of Artificial Sequence: Synthetic oligonucleotide
  Antisense strand to SEQ ID NO: 1737851
aguucaaccagucugagca

SEQ ID NO: 1737853 - RNA, 19 nt, Artificial Sequence
  Description of Artificial Sequence: Synthetic oligonucleotide
  Sense strand starting at position 3775 of SEQ ID NO: 1562311
guauuacaggcuuguguca

SEQ ID NO: 1737854 - RNA, 19 nt, Artificial Sequence
  Description of Artificial Sequence: Synthetic oligonucleotide
  Antisense strand to SEQ ID NO: 1737853
ugacacaagccuguaauac

SEQ ID NO: 1737855 - RNA, 19 nt, Artificial Sequence
  Description of Artificial Sequence: Synthetic oligonucleotide
  Sense strand starting at position 3808 of SEQ ID NO: 1562311
guucuucuugagugaccuu

SEQ ID NO: 1737856 - RNA, 19 nt, Artificial Sequence
  Description of Artificial Sequence: Synthetic oligonucleotide
  Antisense strand to SEQ ID NO: 1737855
aaggucacucaagaagaac

SEQ ID NO: 1737857 - RNA, 19 nt, Artificial Sequence
  Description of Artificial Sequence: Synthetic oligonucleotide
  Sense strand starting at position 3811 of SEQ ID NO: 1562311
cuucuugagugaccuuaau

SEQ ID NO: 1737858 - RNA, 19 nt, Artificial Sequence
  Description of Artificial Sequence: Synthetic oligonucleotide
  Antisense strand to SEQ ID NO: 1737857
auuaaggucacucaagaag

SEQ ID NO: 1737859 - RNA, 19 nt, Artificial Sequence
  Description of Artificial Sequence: Synthetic oligonucleotide
  Sense strand starting at position 3877 of SEQ ID NO: 1562311
uuuaucauuuggcaggaaa

SEQ ID NO: 1737860 - RNA, 19 nt, Artificial Sequence
  Description of Artificial Sequence: Synthetic oligonucleotide
  Antisense strand to SEQ ID NO: 1737859
uuuccugccaaaugauaaa

SEQ ID NO: 1737861 - RNA, 19 nt, Artificial Sequence
  Description of Artificial Sequence: Synthetic oligonucleotide
  Sense strand starting at position 2893 of SEQ ID NO: 1562313
gagcgauguuccgcagccu

SEQ ID NO: 1737862 - RNA, 19 nt, Artificial Sequence
  Description of Artificial Sequence: Synthetic oligonucleotide
  Antisense strand to SEQ ID NO: 1737861
aggcugcggaacaucgcuc

SEQ ID NO: 1737863 - RNA, 19 nt, Artificial Sequence
  Description of Artificial Sequence: Synthetic oligonucleotide
  Sense strand starting at position 2461 of SEQ ID NO: 1562315
gagcgauguuccgcagccu

SEQ ID NO: 1737864 - RNA, 19 nt, Artificial Sequence
  Description of Artificial Sequence: Synthetic oligonucleotide
  Antisense strand to SEQ ID NO: 1737863
aggcugcggaacaucgcuc

SEQ ID NO: 1737865 - RNA, 19 nt, Artificial Sequence
  Description of Artificial Sequence: Synthetic oligonucleotide
  Sense strand starting at position 2 of SEQ ID NO: 1562316
gugagaaacuaccauuuga

SEQ ID NO: 1737866 - RNA, 19 nt, Artificial Sequence
  Description of Artificial Sequence: Synthetic oligonucleotide
  Antisense strand to SEQ ID NO: 1737865
ucaaaugguaguuucucac

SEQ ID NO: 1737867 - RNA, 19 nt, Artificial Sequence
  Description of Artificial Sequence: Synthetic oligonucleotide
  Sense strand starting at position 102 of SEQ ID NO: 1562316
gaaacaaggcccuacguau

SEQ ID NO: 1737868 - RNA, 19 nt, Artificial Sequence
  Description of Artificial Sequence: Synthetic oligonucleotide
  Antisense strand to SEQ ID NO: 1737867
auacguagggccuuguuuc

SEQ ID NO: 1737869 - RNA, 19 nt, Artificial Sequence
  Description of Artificial Sequence: Synthetic oligonucleotide
  Sense strand starting at position 347 of SEQ ID NO: 1562316
agcuaagaguucuucccua

SEQ ID NO: 1737870 - RNA, 19 nt, Artificial Sequence
  Description of Artificial Sequence: Synthetic oligonucleotide
  Antisense strand to SEQ ID NO: 1737869
uagggaagaacucuuagcu

SEQ ID NO: 1737871 - RNA, 19 nt, Artificial Sequence
  Description of Artificial Sequence: Synthetic oligonucleotide
  Sense strand starting at position 351 of SEQ ID NO: 1562316
aagaguucuucccuaaacg

SEQ ID NO: 1737872 - RNA, 19 nt, Artificial Sequence
  Description of Artificial Sequence: Synthetic oligonucleotide
  Antisense strand to SEQ ID NO: 1737871
cguuuagggaagaacucuu

SEQ ID NO: 1737873 - RNA, 19 nt, Artificial Sequence
  Description of Artificial Sequence: Synthetic oligonucleotide
  Sense strand starting at position 352 of SEQ ID NO: 1562316
agaguucuucccuaaacgu

SEQ ID NO: 1737874 - RNA, 19 nt, Artificial Sequence
  Description of Artificial Sequence: Synthetic oligonucleotide
  Antisense strand to SEQ ID NO: 1737873
acguuuagggaagaacucu

SEQ ID NO: 1737875 - RNA, 19 nt, Artificial Sequence
  Description of Artificial Sequence: Synthetic oligonucleotide
  Sense strand starting at position 368 of SEQ ID NO: 1562316
cgucuaaguguucugucua

SEQ ID NO: 1737876 - RNA, 19 nt, Artificial Sequence
  Description of Artificial Sequence: Synthetic oligonucleotide
  Antisense strand to SEQ ID NO: 1737875
uagacagaacacuuagacg

SEQ ID NO: 1737877 - RNA, 19 nt, Artificial Sequence
  Description of Artificial Sequence: Synthetic oligonucleotide
  Sense strand starting at position 380 of SEQ ID NO: 1562316
cugucuauuccugauccuu

SEQ ID NO: 1737878 - RNA, 19 nt, Artificial Sequence
  Description of Artificial Sequence: Synthetic oligonucleotide
  Antisense strand to SEQ ID NO: 1737877
aaggaucaggaauagacag

SEQ ID NO: 1737879 - RNA, 19 nt, Artificial Sequence
  Description of Artificial Sequence: Synthetic oligonucleotide
  Sense strand starting at position 570 of SEQ ID NO: 1562316
aaagaaauagcucaguguu

SEQ ID NO: 1737880 - RNA, 19 nt, Artificial Sequence
  Description of Artificial Sequence: Synthetic oligonucleotide
  Antisense strand to SEQ ID NO: 1737879
aacacugagcuauuucuuu

SEQ ID NO: 1737881 - RNA, 19 nt, Artificial Sequence
  Description of Artificial Sequence: Synthetic oligonucleotide
  Sense strand starting at position 710 of SEQ ID NO: 1562316
ggaaucagcccauaucauu

SEQ ID NO: 1737882 - RNA, 19 nt, Artificial Sequence
  Description of Artificial Sequence: Synthetic oligonucleotide
  Antisense strand to SEQ ID NO: 1737881
aaugauaugggcugauucc

SEQ ID NO: 1737883 - RNA, 19 nt, Artificial Sequence
  Description of Artificial Sequence: Synthetic oligonucleotide
  Sense strand starting at position 961 of SEQ ID NO: 1562316
ucaauagugcaguaagaua

SEQ ID NO: 1737884 - RNA, 19 nt, Artificial Sequence
  Description of Artificial Sequence: Synthetic oligonucleotide
  Antisense strand to SEQ ID NO: 1737883
uaucuuacugcacuauuga

SEQ ID NO: 1737885 - RNA, 19 nt, Artificial Sequence
  Description of Artificial Sequence: Synthetic oligonucleotide
  Sense strand starting at position 1214 of SEQ ID NO: 1562316
ucugucaacuaagcugaaa

SEQ ID NO: 1737886 - RNA, 19 nt, Artificial Sequence
  Description of Artificial Sequence: Synthetic oligonucleotide
  Antisense strand to SEQ ID NO: 1737885
uuucagcuuaguugacaga

SEQ ID NO: 1737887 - RNA, 19 nt, Artificial Sequence
  Description of Artificial Sequence: Synthetic oligonucleotide
  Sense strand starting at position 1236 of SEQ ID NO: 1562316
guauguuucucacugggaa

SEQ ID NO: 1737888 - RNA, 19 nt, Artificial Sequence
  Description of Artificial Sequence: Synthetic oligonucleotide
  Antisense strand to SEQ ID NO: 1737887
uucccagugagaaacauac

SEQ ID NO: 1737889 - RNA, 19 nt, Artificial Sequence
  Description of Artificial Sequence: Synthetic oligonucleotide
  Sense strand starting at position 1237 of SEQ ID NO: 1562316
uauguuucucacugggaag

SEQ ID NO: 1737890 - RNA, 19 nt, Artificial Sequence
  Description of Artificial Sequence: Synthetic oligonucleotide
  Antisense strand to SEQ ID NO: 1737889
cuucccagugagaaacaua

SEQ ID NO: 1737891 - RNA, 19 nt, Artificial Sequence
  Description of Artificial Sequence: Synthetic oligonucleotide
  Sense strand starting at position 1345 of SEQ ID NO: 1562316
ugauaaucgacgucgcagu

SEQ ID NO: 1737892 - RNA, 19 nt, Artificial Sequence
  Description of Artificial Sequence: Synthetic oligonucleotide
  Antisense strand to SEQ ID NO: 1737891
acugcgacgucgauuauca

SEQ ID NO: 1737893 - RNA, 19 nt, Artificial Sequence
  Description of Artificial Sequence: Synthetic oligonucleotide
  Sense strand starting at position 1358 of SEQ ID NO: 1562316
cgcaguucucaagacaauu

SEQ ID NO: 1737894 - RNA, 19 nt, Artificial Sequence
  Description of Artificial Sequence: Synthetic oligonucleotide
  Antisense strand to SEQ ID NO: 1737893
aauugucuugagaacugcg

SEQ ID NO: 1737895 - RNA, 19 nt, Artificial Sequence
  Description of Artificial Sequence: Synthetic oligonucleotide
  Sense strand starting at position 1995 of SEQ ID NO: 1562316
ccgaucgggucgaucgaua

SEQ ID NO: 1737896 - RNA, 19 nt, Artificial Sequence
  Description of Artificial Sequence: Synthetic oligonucleotide
  Antisense strand to SEQ ID NO: 1737895
uaucgaucgacccgaucgg

SEQ ID NO: 1737897 - RNA, 19 nt, Artificial Sequence
  Description of Artificial Sequence: Synthetic oligonucleotide
  Sense strand starting at position 2113 of SEQ ID NO: 1562316
guagucacggcguuagauu

SEQ ID NO: 1737898 - RNA, 19 nt, Artificial Sequence
  Description of Artificial Sequence: Synthetic oligonucleotide
  Antisense strand to SEQ ID NO: 1737897
aaucuaacgccgugacuac

SEQ ID NO: 1737899 - RNA, 19 nt, Artificial Sequence
  Description of Artificial Sequence: Synthetic oligonucleotide
  Sense strand starting at position 2114 of SEQ ID NO: 1562316
uagucacggcguuagauuu

SEQ ID NO: 1737900 - RNA, 19 nt, Artificial Sequence
  Description of Artificial Sequence: Synthetic oligonucleotide
  Antisense strand to SEQ ID NO: 1737899
aaaucuaacgccgugacua

SEQ ID NO: 1737901 - RNA, 19 nt, Artificial Sequence
  Description of Artificial Sequence: Synthetic oligonucleotide
  Sense strand starting at position 2164 of SEQ ID NO: 1562316
uuagcuuaauuuccacgua

SEQ ID NO: 1737902 - RNA, 19 nt, Artificial Sequence
  Description of Artificial Sequence: Synthetic oligonucleotide
  Antisense strand to SEQ ID NO: 1737901
uacguggaaauuaagcuaa

SEQ ID NO: 1737903 - RNA, 19 nt, Artificial Sequence
  Description of Artificial Sequence: Synthetic oligonucleotide
  Sense strand starting at position 2167 of SEQ ID NO: 1562316
gcuuaauuuccacguaucu

SEQ ID NO: 1737904 - RNA, 19 nt, Artificial Sequence
  Description of Artificial Sequence: Synthetic oligonucleotide
  Antisense strand to SEQ ID NO: 1737903
agauacguggaaauuaagc

SEQ ID NO: 1737905 - RNA, 19 nt, Artificial Sequence
  Description of Artificial Sequence: Synthetic oligonucleotide
  Sense strand starting at position 2308 of SEQ ID NO: 1562316
gggaaugcgcacgauaauu

SEQ ID NO: 1737906 - RNA, 19 nt, Artificial Sequence
  Description of Artificial Sequence: Synthetic oligonucleotide
  Antisense strand to SEQ ID NO: 1737905
aauuaucgugcgcauuccc

SEQ ID NO: 1737907 - RNA, 19 nt, Artificial Sequence
  Description of Artificial Sequence: Synthetic oligonucleotide
  Sense strand starting at position 2310 of SEQ ID NO: 1562316
gaaugcgcacgauaauuaa

SEQ ID NO: 1737908 - RNA, 19 nt, Artificial Sequence
  Description of Artificial Sequence: Synthetic oligonucleotide
  Antisense strand to SEQ ID NO: 1737907
uuaauuaucgugcgcauuc

SEQ ID NO: 1737909 - RNA, 19 nt, Artificial Sequence
  Description of Artificial Sequence: Synthetic oligonucleotide
  Sense strand starting at position 2323 of SEQ ID NO: 1562316
aauuaaagucgucacuaag

SEQ ID NO: 1737910 - RNA, 19 nt, Artificial Sequence
  Description of Artificial Sequence: Synthetic oligonucleotide
  Antisense strand to SEQ ID NO: 1737909
cuuagugacgacuuuaauu

SEQ ID NO: 1737911 - RNA, 19 nt, Artificial Sequence
  Description of Artificial Sequence: Synthetic oligonucleotide
  Sense strand starting at position 2326 of SEQ ID NO: 1562316
uaaagucgucacuaagagu

SEQ ID NO: 1737912 - RNA, 19 nt, Artificial Sequence
  Description of Artificial Sequence: Synthetic oligonucleotide
  Antisense strand to SEQ ID NO: 1737911
acucuuagugacgacuuua

SEQ ID NO: 1737913 - RNA, 19 nt, Artificial Sequence
  Description of Artificial Sequence: Synthetic oligonucleotide
  Sense strand starting at position 2332 of SEQ ID NO: 1562316
cgucacuaagaguaaugua

SEQ ID NO: 1737914 - RNA, 19 nt, Artificial Sequence
  Description of Artificial Sequence: Synthetic oligonucleotide
  Antisense strand to SEQ ID NO: 1737913
uacauuacucuuagugacg

SEQ ID NO: 1737915 - RNA, 19 nt, Artificial Sequence
  Description of Artificial Sequence: Synthetic oligonucleotide
  Sense strand starting at position 2355 of SEQ ID NO: 1562316
acaucaagugcucaagugu

SEQ ID NO: 1737916 - RNA, 19 nt, Artificial Sequence
  Description of Artificial Sequence: Synthetic oligonucleotide
  Antisense strand to SEQ ID NO: 1737915
acacuugagcacuugaugu

SEQ ID NO: 1737917 - RNA, 19 nt, Artificial Sequence
  Description of Artificial Sequence: Synthetic oligonucleotide
  Sense strand starting at position 2433 of SEQ ID NO: 1562316
auuaaugaauugucgguua

SEQ ID NO: 1737918 - RNA, 19 nt, Artificial Sequence
  Description of Artificial Sequence: Synthetic oligonucleotide
  Antisense strand to SEQ ID NO: 1737917
uaaccgacaauucauuaau

SEQ ID NO: 1737919 - RNA, 19 nt, Artificial Sequence
  Description of Artificial Sequence: Synthetic oligonucleotide
  Sense strand starting at position 2435 of SEQ ID NO: 1562316
uaaugaauugucgguuaaa

SEQ ID NO: 1737920 - RNA, 19 nt, Artificial Sequence
  Description of Artificial Sequence: Synthetic oligonucleotide
  Antisense strand to SEQ ID NO: 1737919
uuuaaccgacaauucauua

SEQ ID NO: 1737921 - RNA, 19 nt, Artificial Sequence
  Description of Artificial Sequence: Synthetic oligonucleotide
  Sense strand starting at position 2618 of SEQ ID NO: 1562316
agaucagacuuauugcaaa

SEQ ID NO: 1737922 - RNA, 19 nt, Artificial Sequence
  Description of Artificial Sequence: Synthetic oligonucleotide
  Antisense strand to SEQ ID NO: 1737921
uuugcaauaagucugaucu

SEQ ID NO: 1737923 - RNA, 19 nt, Artificial Sequence
  Description of Artificial Sequence: Synthetic oligonucleotide
  Sense strand starting at position 2671 of SEQ ID NO: 1562316
uucuacuucuuccugggaa

SEQ ID NO: 1737924 - RNA, 19 nt, Artificial Sequence
  Description of Artificial Sequence: Synthetic oligonucleotide
  Antisense strand to SEQ ID NO: 1737923
uucccaggaagaaguagaa

SEQ ID NO: 1737925 - RNA, 19 nt, Artificial Sequence
  Description of Artificial Sequence: Synthetic oligonucleotide
  Sense strand starting at position 2673 of SEQ ID NO: 1562316
cuacuucuuccugggaaua

SEQ ID NO: 1737926 - RNA, 19 nt, Artificial Sequence
  Description of Artificial Sequence: Synthetic oligonucleotide
  Antisense strand to SEQ ID NO: 1737925
uauucccaggaagaaguag

SEQ ID NO: 1737927 - RNA, 19 nt, Artificial Sequence
  Description of Artificial Sequence: Synthetic oligonucleotide
  Sense strand starting at position 3033 of SEQ ID NO: 1562316
ugccacugauauguuugaa

SEQ ID NO: 1737928 - RNA, 19 nt, Artificial Sequence
  Description of Artificial Sequence: Synthetic oligonucleotide
  Antisense strand to SEQ ID NO: 1737927
uucaaacauaucaguggca

SEQ ID NO: 1737929 - RNA, 19 nt, Artificial Sequence
  Description of Artificial Sequence: Synthetic oligonucleotide
  Sense strand starting at position 3036 of SEQ ID NO: 1562316
cacugauauguuugaauug

SEQ ID NO: 1737930 - RNA, 19 nt, Artificial Sequence
  Description of Artificial Sequence: Synthetic oligonucleotide
  Antisense strand to SEQ ID NO: 1737929
caauucaaacauaucagug

SEQ ID NO: 1737931 - RNA, 19 nt, Artificial Sequence
  Description of Artificial Sequence: Synthetic oligonucleotide
  Sense strand starting at position 3048 of SEQ ID NO: 1562316
ugaauugccugcccaaaua

SEQ ID NO: 1737932 - RNA, 19 nt, Artificial Sequence
  Description of Artificial Sequence: Synthetic oligonucleotide
  Antisense strand to SEQ ID NO: 1737931
uauuugggcaggcaauuca

SEQ ID NO: 1737933 - RNA, 19 nt, Artificial Sequence
  Description of Artificial Sequence: Synthetic oligonucleotide
  Sense strand starting at position 3542 of SEQ ID NO: 1562316
gucuaaagguguucugaga

SEQ ID NO: 1737934 - RNA, 19 nt, Artificial Sequence
  Description of Artificial Sequence: Synthetic oligonucleotide
  Antisense strand to SEQ ID NO: 1737933
ucucagaacaccuuuagac

SEQ ID NO: 1737935 - RNA, 19 nt, Artificial Sequence
  Description of Artificial Sequence: Synthetic oligonucleotide
  Sense strand starting at position 3551 of SEQ ID NO: 1562316
uguucugagacugauacgu

SEQ ID NO: 1737936 - RNA, 19 nt, Artificial Sequence
  Description of Artificial Sequence: Synthetic oligonucleotide
  Antisense strand to SEQ ID NO: 1737935
acguaucagucucagaaca

SEQ ID NO: 1737937 - RNA, 19 nt, Artificial Sequence
  Description of Artificial Sequence: Synthetic oligonucleotide
  Sense strand starting at position 3555 of SEQ ID NO: 1562316
cugagacugauacguuaga

SEQ ID NO: 1737938 - RNA, 19 nt, Artificial Sequence
  Description of Artificial Sequence: Synthetic oligonucleotide
  Antisense strand to SEQ ID NO: 1737937
ucuaacguaucagucucag

SEQ ID NO: 1737939 - RNA, 19 nt, Artificial Sequence
  Description of Artificial Sequence: Synthetic oligonucleotide
  Sense strand starting at position 3566 of SEQ ID NO: 1562316
acguuagagaacuacugua

SEQ ID NO: 1737940 - RNA, 19 nt, Artificial Sequence
  Description of Artificial Sequence: Synthetic oligonucleotide
  Antisense strand to SEQ ID NO: 1737939
uacaguaguucucuaacgu

SEQ ID NO: 1737941 - RNA, 19 nt, Artificial Sequence
  Description of Artificial Sequence: Synthetic oligonucleotide
  Sense strand starting at position 3950 of SEQ ID NO: 1562316
uucccuuauggcugaauua

SEQ ID NO: 1737942 - RNA, 19 nt, Artificial Sequence
  Description of Artificial Sequence: Synthetic oligonucleotide
  Antisense strand to SEQ ID NO: 1737941
uaauucagccauaagggaa

SEQ ID NO: 1737943 - RNA, 19 nt, Artificial Sequence
  Description of Artificial Sequence: Synthetic oligonucleotide
  Sense strand starting at position 3951 of SEQ ID NO: 1562316
ucccuuauggcugaauuaa

SEQ ID NO: 1737944 - RNA, 19 nt, Artificial Sequence
  Description of Artificial Sequence: Synthetic oligonucleotide
  Antisense strand to SEQ ID NO: 1737943
uuaauucagccauaaggga

SEQ ID NO: 1737945 - RNA, 19 nt, Artificial Sequence
  Description of Artificial Sequence: Synthetic oligonucleotide
  Sense strand starting at position 37 of SEQ ID NO: 1562317
ccaguuaugcgggaggcuu

SEQ ID NO: 1737946 - RNA, 19 nt, Artificial Sequence
  Description of Artificial Sequence: Synthetic oligonucleotide
  Antisense strand to SEQ ID NO: 1737945
aagccucccgcauaacugg

SEQ ID NO: 1737947 - RNA, 19 nt, Artificial Sequence
  Description of Artificial Sequence: Synthetic oligonucleotide
  Sense strand starting at position 722 of SEQ ID NO: 1562317
uuuagcauucugggcuaga

SEQ ID NO: 1737948 - RNA, 19 nt, Artificial Sequence
  Description of Artificial Sequence: Synthetic oligonucleotide
  Antisense strand to SEQ ID NO: 1737947
ucuagcccagaaugcuaaa

SEQ ID NO: 1737949 - RNA, 19 nt, Artificial Sequence
  Description of Artificial Sequence: Synthetic oligonucleotide
  Sense strand starting at position 723 of SEQ ID NO: 1562317
uuagcauucugggcuagau

SEQ ID NO: 1737950 - RNA, 19 nt, Artificial Sequence
  Description of Artificial Sequence: Synthetic oligonucleotide
  Antisense strand to SEQ ID NO: 1737949
aucuagcccagaaugcuaa

SEQ ID NO: 1737951 - RNA, 19 nt, Artificial Sequence
  Description of Artificial Sequence: Synthetic oligonucleotide
  Sense strand starting at position 725 of SEQ ID NO: 1562317
agcauucugggcuagauga

SEQ ID NO: 1737952 - RNA, 19 nt, Artificial Sequence
  Description of Artificial Sequence: Synthetic oligonucleotide
  Antisense strand to SEQ ID NO: 1737951
ucaucuagcccagaaugcu

SEQ ID NO: 1737953 - RNA, 19 nt, Artificial Sequence
  Description of Artificial Sequence: Synthetic oligonucleotide
  Sense strand starting at position 740 of SEQ ID NO: 1562317
augacaaaguaguuuaguu

SEQ ID NO: 1737954 - RNA, 19 nt, Artificial Sequence
  Description of Artificial Sequence: Synthetic oligonucleotide
  Antisense strand to SEQ ID NO: 1737953
aacuaaacuacuuugucau

SEQ ID NO: 1737955 - RNA, 19 nt, Artificial Sequence
  Description of Artificial Sequence: Synthetic oligonucleotide
  Sense strand starting at position 748 of SEQ ID NO: 1562317
guaguuuaguuuguugaca

SEQ ID NO: 1737956 - RNA, 19 nt, Artificial Sequence
  Description of Artificial Sequence: Synthetic oligonucleotide
  Antisense strand to SEQ ID NO: 1737955
ugucaacaaacuaaacuac

SEQ ID NO: 1737957 - RNA, 19 nt, Artificial Sequence
  Description of Artificial Sequence: Synthetic oligonucleotide
  Sense strand starting at position 1120 of SEQ ID NO: 1562317
cccaguuuacccugacauu

SEQ ID NO: 1737958 - RNA, 19 nt, Artificial Sequence
  Description of Artificial Sequence: Synthetic oligonucleotide
  Antisense strand to SEQ ID NO: 1737957
aaugucaggguaaacuggg

SEQ ID NO: 1737959 - RNA, 19 nt, Artificial Sequence
  Description of Artificial Sequence: Synthetic oligonucleotide
  Sense strand starting at position 1329 of SEQ ID NO: 1562317
aaugcuggugauggauuaa

SEQ ID NO: 1737960 - RNA, 19 nt, Artificial Sequence
  Description of Artificial Sequence: Synthetic oligonucleotide
  Antisense strand to SEQ ID NO: 1737959
uuaauccaucaccagcauu

SEQ ID NO: 1737961 - RNA, 19 nt, Artificial Sequence
  Description of Artificial Sequence: Synthetic oligonucleotide
  Sense strand starting at position 1352 of SEQ ID NO: 1562317
caguguuaacagcagcaaa

SEQ ID NO: 1737962 - RNA, 19 nt, Artificial Sequence
  Description of Artificial Sequence: Synthetic oligonucleotide
  Antisense strand to SEQ ID NO: 1737961
uuugcugcuguuaacacug

SEQ ID NO: 1737963 - RNA, 19 nt, Artificial Sequence
  Description of Artificial Sequence: Synthetic oligonucleotide
  Sense strand starting at position 1369 of SEQ ID NO: 1562317
aaggguuauugagcgcuga

SEQ ID NO: 1737964 - RNA, 19 nt, Artificial Sequence
  Description of Artificial Sequence: Synthetic oligonucleotide
  Antisense strand to SEQ ID NO: 1737963
ucagcgcucaauaacccuu

SEQ ID NO: 1737965 - RNA, 19 nt, Artificial Sequence
  Description of Artificial Sequence: Synthetic oligonucleotide
  Sense strand starting at position 1370 of SEQ ID NO: 1562317
aggguuauugagcgcugaa

SEQ ID NO: 1737966 - RNA, 19 nt, Artificial Sequence
  Description of Artificial Sequence: Synthetic oligonucleotide
  Antisense strand to SEQ ID NO: 1737965
uucagcgcucaauaacccu

SEQ ID NO: 1737967 - RNA, 19 nt, Artificial Sequence
  Description of Artificial Sequence: Synthetic oligonucleotide
  Sense strand starting at position 1373 of SEQ ID NO: 1562317
guuauugagcgcugaauag

SEQ ID NO: 1737968 - RNA, 19 nt, Artificial Sequence
  Description of Artificial Sequence: Synthetic oligonucleotide
  Antisense strand to SEQ ID NO: 1737967
cuauucagcgcucaauaac

SEQ ID NO: 1737969 - RNA, 19 nt, Artificial Sequence
  Description of Artificial Sequence: Synthetic oligonucleotide
  Sense strand starting at position 1431 of SEQ ID NO: 1562317
ggauguuaacguugccauc

SEQ ID NO: 1737970 - RNA, 19 nt, Artificial Sequence
  Description of Artificial Sequence: Synthetic oligonucleotide
  Antisense strand to SEQ ID NO: 1737969
gauggcaacguuaacaucc

SEQ ID NO: 1737971 - RNA, 19 nt, Artificial Sequence
  Description of Artificial Sequence: Synthetic oligonucleotide
  Sense strand starting at position 2233 of SEQ ID NO: 1562317
auuacuuauuccuuguuga

SEQ ID NO: 1737972 - RNA, 19 nt, Artificial Sequence
  Description of Artificial Sequence: Synthetic oligonucleotide
  Antisense strand to SEQ ID NO: 1737971
ucaacaaggaauaaguaau

SEQ ID NO: 1737973 - RNA, 19 nt, Artificial Sequence
  Description of Artificial Sequence: Synthetic oligonucleotide
  Sense strand starting at position 2234 of SEQ ID NO: 1562317
uuacuuauuccuuguugau

SEQ ID NO: 1737974 - RNA, 19 nt, Artificial Sequence
  Description of Artificial Sequence: Synthetic oligonucleotide
  Antisense strand to SEQ ID NO: 1737973
aucaacaaggaauaaguaa

SEQ ID NO: 1737975 - RNA, 19 nt, Artificial Sequence
  Description of Artificial Sequence: Synthetic oligonucleotide
  Sense strand starting at position 2236 of SEQ ID NO: 1562317
acuuauuccuuguugauuc

SEQ ID NO: 1737976 - RNA, 19 nt, Artificial Sequence
  Description of Artificial Sequence: Synthetic oligonucleotide
  Antisense strand to SEQ ID NO: 1737975
gaaucaacaaggaauaagu

SEQ ID NO: 1737977 - RNA, 19 nt, Artificial Sequence
  Description of Artificial Sequence: Synthetic oligonucleotide
  Sense strand starting at position 2288 of SEQ ID NO: 1562317
guguguuagacagacccua

SEQ ID NO: 1737978 - RNA, 19 nt, Artificial Sequence
  Description of Artificial Sequence: Synthetic oligonucleotide
  Antisense strand to SEQ ID NO: 1737977
uagggucugucuaacacac

SEQ ID NO: 1737979 - RNA, 19 nt, Artificial Sequence
  Description of Artificial Sequence: Synthetic oligonucleotide
  Sense strand starting at position 2529 of SEQ ID NO: 1562317
ggcuguaaaucagucggua

SEQ ID NO: 1737980 - RNA, 19 nt, Artificial Sequence
  Description of Artificial Sequence: Synthetic oligonucleotide
  Antisense strand to SEQ ID NO: 1737979
uaccgacugauuuacagcc

SEQ ID NO: 1737981 - RNA, 19 nt, Artificial Sequence
  Description of Artificial Sequence: Synthetic oligonucleotide
  Sense strand starting at position 2542 of SEQ ID NO: 1562317
ucgguaggcagagauagau

SEQ ID NO: 1737982 - RNA, 19 nt, Artificial Sequence
  Description of Artificial Sequence: Synthetic oligonucleotide
  Antisense strand to SEQ ID NO: 1737981
aucuaucucugccuaccga

SEQ ID NO: 1737983 - RNA, 19 nt, Artificial Sequence
  Description of Artificial Sequence: Synthetic oligonucleotide
  Sense strand starting at position 2600 of SEQ ID NO: 1562317
cuaauuuaucugugggcuu

SEQ ID NO: 1737984 - RNA, 19 nt, Artificial Sequence
  Description of Artificial Sequence: Synthetic oligonucleotide
  Antisense strand to SEQ ID NO: 1737983
aagcccacagauaaauuag

SEQ ID NO: 1737985 - RNA, 19 nt, Artificial Sequence
  Description of Artificial Sequence: Synthetic oligonucleotide
  Sense strand starting at position 2683 of SEQ ID NO: 1562317
ggguuaucugaggagccaa

SEQ ID NO: 1737986 - RNA, 19 nt, Artificial Sequence
  Description of Artificial Sequence: Synthetic oligonucleotide
  Antisense strand to SEQ ID NO: 1737985
uuggcuccucagauaaccc

SEQ ID NO: 1737987 - RNA, 19 nt, Artificial Sequence
  Description of Artificial Sequence: Synthetic oligonucleotide
  Sense strand starting at position 2696 of SEQ ID NO: 1562317
agccaacugcucuaggauu

SEQ ID NO: 1737988 - RNA, 19 nt, Artificial Sequence
  Description of Artificial Sequence: Synthetic oligonucleotide
  Antisense strand to SEQ ID NO: 1737987
aauccuagagcaguuggcu

SEQ ID NO: 1737989 - RNA, 19 nt, Artificial Sequence
  Description of Artificial Sequence: Synthetic oligonucleotide
  Sense strand starting at position 2766 of SEQ ID NO: 1562317
uuuagccagcuuuaugaaa

SEQ ID NO: 1737990 - RNA, 19 nt, Artificial Sequence
  Description of Artificial Sequence: Synthetic oligonucleotide
  Antisense strand to SEQ ID NO: 1737989
uuucauaaagcuggcuaaa

SEQ ID NO: 1737991 - RNA, 19 nt, Artificial Sequence
  Description of Artificial Sequence: Synthetic oligonucleotide
  Sense strand starting at position 2798 of SEQ ID NO: 1562317
ccuacaaauccgugucuca

SEQ ID NO: 1737992 - RNA, 19 nt, Artificial Sequence
  Description of Artificial Sequence: Synthetic oligonucleotide
  Antisense strand to SEQ ID NO: 1737991
ugagacacggauuuguagg

SEQ ID NO: 1737993 - RNA, 19 nt, Artificial Sequence
  Description of Artificial Sequence: Synthetic oligonucleotide
  Sense strand starting at position 2809 of SEQ ID NO: 1562317
gugucucauguugaugaga

SEQ ID NO: 1737994 - RNA, 19 nt, Artificial Sequence
  Description of Artificial Sequence: Synthetic oligonucleotide
  Antisense strand to SEQ ID NO: 1737993
ucucaucaacaugagacac

SEQ ID NO: 1737995 - RNA, 19 nt, Artificial Sequence
  Description of Artificial Sequence: Synthetic oligonucleotide
  Sense strand starting at position 2818 of SEQ ID NO: 1562317
guugaugagaauggcugua

SEQ ID NO: 1737996 - RNA, 19 nt, Artificial Sequence
  Description of Artificial Sequence: Synthetic oligonucleotide
  Antisense strand to SEQ ID NO: 1737995
uacagccauucucaucaac

SEQ ID NO: 1737997 - RNA, 19 nt, Artificial Sequence
  Description of Artificial Sequence: Synthetic oligonucleotide
  Sense strand starting at position 2823 of SEQ ID NO: 1562317
ugagaauggcuguaugcuc

SEQ ID NO: 1737998 - RNA, 19 nt, Artificial Sequence
  Description of Artificial Sequence: Synthetic oligonucleotide
  Antisense strand to SEQ ID NO: 1737997
gagcauacagccauucuca

SEQ ID NO: 1737999 - RNA, 19 nt, Artificial Sequence
  Description of Artificial Sequence: Synthetic oligonucleotide
  Sense strand starting at position 2921 of SEQ ID NO: 1562317
cagagcuuggacugggaau

SEQ ID NO: 1738000 - RNA, 19 nt, Artificial Sequence
  Description of Artificial Sequence: Synthetic oligonucleotide
  Antisense strand to SEQ ID NO: 1737999
auucccaguccaagcucug

SEQ ID NO: 1738001 - RNA, 19 nt, Artificial Sequence
  Description of Artificial Sequence: Synthetic oligonucleotide
  Sense strand starting at position 2953 of SEQ ID NO: 1562317
agauaauauggcuguucua

SEQ ID NO: 1738002 - RNA, 19 nt, Artificial Sequence
  Description of Artificial Sequence: Synthetic oligonucleotide
  Antisense strand to SEQ ID NO: 1738001
uagaacagccauauuaucu

SEQ ID NO: 1738003 - RNA, 19 nt, Artificial Sequence
  Description of Artificial Sequence: Synthetic oligonucleotide
  Sense strand starting at position 2977 of SEQ ID NO: 1562317
acagauuccuggcccuacu

SEQ ID NO: 1738004 - RNA, 19 nt, Artificial Sequence
  Description of Artificial Sequence: Synthetic oligonucleotide
  Antisense strand to SEQ ID NO: 1738003
aguagggccaggaaucugu

SEQ ID NO: 1738005 - RNA, 19 nt, Artificial Sequence
  Description of Artificial Sequence: Synthetic oligonucleotide
  Sense strand starting at position 3069 of SEQ ID NO: 1562317
gugugaucaucagucuguu

SEQ ID NO: 1738006 - RNA, 19 nt, Artificial Sequence
  Description of Artificial Sequence: Synthetic oligonucleotide
  Antisense strand to SEQ ID NO: 1738005
aacagacugaugaucacac

SEQ ID NO: 1738007 - RNA, 19 nt, Artificial Sequence
  Description of Artificial Sequence: Synthetic oligonucleotide
  Sense strand starting at position 3087 of SEQ ID NO: 1562317
uuuggaaagcucuggauuc

SEQ ID NO: 1738008 - RNA, 19 nt, Artificial Sequence
  Description of Artificial Sequence: Synthetic oligonucleotide
  Antisense strand to SEQ ID NO: 1738007
gaauccagagcuuuccaaa

SEQ ID NO: 1738009 - RNA, 19 nt, Artificial Sequence
  Description of Artificial Sequence: Synthetic oligonucleotide
  Sense strand starting at position 3101 of SEQ ID NO: 1562317
gauucuucgugucucucaa

SEQ ID NO: 1738010 - RNA, 19 nt, Artificial Sequence
  Description of Artificial Sequence: Synthetic oligonucleotide
  Antisense strand to SEQ ID NO: 1738009
uugagagacacgaagaauc

SEQ ID NO: 1738011 - RNA, 19 nt, Artificial Sequence
  Description of Artificial Sequence: Synthetic oligonucleotide
  Sense strand starting at position 3251 of SEQ ID NO: 1562317
acaugaaggaguuggcuuu

SEQ ID NO: 1738012 - RNA, 19 nt, Artificial Sequence
  Description of Artificial Sequence: Synthetic oligonucleotide
  Antisense strand to SEQ ID NO: 1738011
aaagccaacuccuucaugu

SEQ ID NO: 1738013 - RNA, 19 nt, Artificial Sequence
  Description of Artificial Sequence: Synthetic oligonucleotide
  Sense strand starting at position 3262 of SEQ ID NO: 1562317
uuggcuuucuuggcgaaca

SEQ ID NO: 1738014 - RNA, 19 nt, Artificial Sequence
  Description of Artificial Sequence: Synthetic oligonucleotide
  Antisense strand to SEQ ID NO: 1738013
uguucgccaagaaagccaa

SEQ ID NO: 1738015 - RNA, 19 nt, Artificial Sequence
  Description of Artificial Sequence: Synthetic oligonucleotide
  Sense strand starting at position 3419 of SEQ ID NO: 1562317
ccacaaauguuggacuaaa

SEQ ID NO: 1738016 - RNA, 19 nt, Artificial Sequence
  Description of Artificial Sequence: Synthetic oligonucleotide
  Antisense strand to SEQ ID NO: 1738015
uuuaguccaacauuugugg

SEQ ID NO: 1738017 - RNA, 19 nt, Artificial Sequence
  Description of Artificial Sequence: Synthetic oligonucleotide
  Sense strand starting at position 3749 of SEQ ID NO: 1562317
agggaauuccuauaacgca

SEQ ID NO: 1738018 - RNA, 19 nt, Artificial Sequence
  Description of Artificial Sequence: Synthetic oligonucleotide
  Antisense strand to SEQ ID NO: 1738017
ugcguuauaggaauucccu

SEQ ID NO: 1738019 - RNA, 19 nt, Artificial Sequence
  Description of Artificial Sequence: Synthetic oligonucleotide
  Sense strand starting at position 3763 of SEQ ID NO: 1562317
acgcaauucuaacuagauu

SEQ ID NO: 1738020 - RNA, 19 nt, Artificial Sequence
  Description of Artificial Sequence: Synthetic oligonucleotide
  Antisense strand to SEQ ID NO: 1738019
aaucuaguuagaauugcgu

SEQ ID NO: 1738021 - RNA, 19 nt, Artificial Sequence
  Description of Artificial Sequence: Synthetic oligonucleotide
  Sense strand starting at position 3861 of SEQ ID NO: 1562317
uuauuugguuccugagaac

SEQ ID NO: 1738022 - RNA, 19 nt, Artificial Sequence
  Description of Artificial Sequence: Synthetic oligonucleotide
  Antisense strand to SEQ ID NO: 1738021
guucucaggaaccaaauaa

SEQ ID NO: 1738023 - RNA, 19 nt, Artificial Sequence
  Description of Artificial Sequence: Synthetic oligonucleotide
  Sense strand starting at position 3906 of SEQ ID NO: 1562317
gggacuaacucuuaacuca

SEQ ID NO: 1738024 - RNA, 19 nt, Artificial Sequence
  Description of Artificial Sequence: Synthetic oligonucleotide
  Antisense strand to SEQ ID NO: 1738023
ugaguuaagaguuaguccc

SEQ ID NO: 1738025 - RNA, 19 nt, Artificial Sequence
  Description of Artificial Sequence: Synthetic oligonucleotide
  Sense strand starting at position 155 of SEQ ID NO: 1562318
auaaauaggcuuugauuac

SEQ ID NO: 1738026 - RNA, 19 nt, Artificial Sequence
  Description of Artificial Sequence: Synthetic oligonucleotide
  Antisense strand to SEQ ID NO: 1738025
guaaucaaagccuauuuau

SEQ ID NO: 1738027 - RNA, 19 nt, Artificial Sequence
  Description of Artificial Sequence: Synthetic oligonucleotide
  Sense strand starting at position 161 of SEQ ID NO: 1562318
aggcuuugauuacuaucau

SEQ ID NO: 1738028 - RNA, 19 nt, Artificial Sequence
  Description of Artificial Sequence: Synthetic oligonucleotide
  Antisense strand to SEQ ID NO: 1738027
augauaguaaucaaagccu

SEQ ID NO: 1738029 - RNA, 19 nt, Artificial Sequence
  Description of Artificial Sequence: Synthetic oligonucleotide
  Sense strand starting at position 197 of SEQ ID NO: 1562318
ugcauauucguacaucaaa

SEQ ID NO: 1738030 - RNA, 19 nt, Artificial Sequence
  Description of Artificial Sequence: Synthetic oligonucleotide
  Antisense strand to SEQ ID NO: 1738029
uuugauguacgaauaugca

SEQ ID NO: 1738031 - RNA, 19 nt, Artificial Sequence
  Description of Artificial Sequence: Synthetic oligonucleotide
  Sense strand starting at position 271 of SEQ ID NO: 1562318
uaaaucucaugggucagau

SEQ ID NO: 1738032 - RNA, 19 nt, Artificial Sequence
  Description of Artificial Sequence: Synthetic oligonucleotide
  Antisense strand to SEQ ID NO: 1738031
aucugacccaugagauuua

SEQ ID NO: 1738033 - RNA, 19 nt, Artificial Sequence
  Description of Artificial Sequence: Synthetic oligonucleotide
  Sense strand starting at position 283 of SEQ ID NO: 1562318
gucagauuacgaugacgaa

SEQ ID NO: 1738034 - RNA, 19 nt, Artificial Sequence
  Description of Artificial Sequence: Synthetic oligonucleotide
  Antisense strand to SEQ ID NO: 1738033
uucgucaucguaaucugac

SEQ ID NO: 1738035 - RNA, 19 nt, Artificial Sequence
  Description of Artificial Sequence: Synthetic oligonucleotide
  Sense strand starting at position 295 of SEQ ID NO: 1562318
ugacgaaguuguuugaaau

SEQ ID NO: 1738036 - RNA, 19 nt, Artificial Sequence
  Description of Artificial Sequence: Synthetic oligonucleotide
  Antisense strand to SEQ ID NO: 1738035
auuucaaacaacuucguca

SEQ ID NO: 1738037 - RNA, 19 nt, Artificial Sequence
  Description of Artificial Sequence: Synthetic oligonucleotide
  Sense strand starting at position 296 of SEQ ID NO: 1562318
gacgaaguuguuugaaaug

SEQ ID NO: 1738038 - RNA, 19 nt, Artificial Sequence
  Description of Artificial Sequence: Synthetic oligonucleotide
  Antisense strand to SEQ ID NO: 1738037
cauuucaaacaacuucguc

SEQ ID NO: 1738039 - RNA, 19 nt, Artificial Sequence
  Description of Artificial Sequence: Synthetic oligonucleotide
  Sense strand starting at position 486 of SEQ ID NO: 1562318
auuugaguauccuacauag

SEQ ID NO: 1738040 - RNA, 19 nt, Artificial Sequence
  Description of Artificial Sequence: Synthetic oligonucleotide
  Antisense strand to SEQ ID NO: 1738039
cuauguaggauacucaaau

SEQ ID NO: 1738041 - RNA, 19 nt, Artificial Sequence
  Description of Artificial Sequence: Synthetic oligonucleotide
  Sense strand starting at position 1213 of SEQ ID NO: 1562318
uugcaugaauaauucugau

SEQ ID NO: 1738042 - RNA, 19 nt, Artificial Sequence
  Description of Artificial Sequence: Synthetic oligonucleotide
  Antisense strand to SEQ ID NO: 1738041
aucagaauuauucaugcaa

SEQ ID NO: 1738043 - RNA, 19 nt, Artificial Sequence
  Description of Artificial Sequence: Synthetic oligonucleotide
  Sense strand starting at position 1357 of SEQ ID NO: 1562318
uagagugaucgguaacuac

SEQ ID NO: 1738044 - RNA, 19 nt, Artificial Sequence
  Description of Artificial Sequence: Synthetic oligonucleotide
  Antisense strand to SEQ ID NO: 1738043
guaguuaccgaucacucua

SEQ ID NO: 1738045 - RNA, 19 nt, Artificial Sequence
  Description of Artificial Sequence: Synthetic oligonucleotide
  Sense strand starting at position 1361 of SEQ ID NO: 1562318
gugaucgguaacuacacau

SEQ ID NO: 1738046 - RNA, 19 nt, Artificial Sequence
  Description of Artificial Sequence: Synthetic oligonucleotide
  Antisense strand to SEQ ID NO: 1738045
auguguaguuaccgaucac

SEQ ID NO: 1738047 - RNA, 19 nt, Artificial Sequence
  Description of Artificial Sequence: Synthetic oligonucleotide
  Sense strand starting at position 1399 of SEQ ID NO: 1562318
gcuguagaacaucacaaau

SEQ ID NO: 1738048 - RNA, 19 nt, Artificial Sequence
  Description of Artificial Sequence: Synthetic oligonucleotide
  Antisense strand to SEQ ID NO: 1738047
auuugugauguucuacagc

SEQ ID NO: 1738049 - RNA, 19 nt, Artificial Sequence
  Description of Artificial Sequence: Synthetic oligonucleotide
  Sense strand starting at position 1434 of SEQ ID NO: 1562318
agugacaauuaagcuuaau

SEQ ID NO: 1738050 - RNA, 19 nt, Artificial Sequence
  Description of Artificial Sequence: Synthetic oligonucleotide
  Antisense strand to SEQ ID NO: 1738049
auuaagcuuaauugucacu

SEQ ID NO: 1738051 - RNA, 19 nt, Artificial Sequence
  Description of Artificial Sequence: Synthetic oligonucleotide
  Sense strand starting at position 1496 of SEQ ID NO: 1562318
ugucaucugucaucuauuu

SEQ ID NO: 1738052 - RNA, 19 nt, Artificial Sequence
  Description of Artificial Sequence: Synthetic oligonucleotide
  Antisense strand to SEQ ID NO: 1738051
aaauagaugacagaugaca

SEQ ID NO: 1738053 - RNA, 19 nt, Artificial Sequence
  Description of Artificial Sequence: Synthetic oligonucleotide
  Sense strand starting at position 1664 of SEQ ID NO: 1562318
aauaaaguguagcuaugau

SEQ ID NO: 1738054 - RNA, 19 nt, Artificial Sequence
  Description of Artificial Sequence: Synthetic oligonucleotide
  Antisense strand to SEQ ID NO: 1738053
aucauagcuacacuuuauu

SEQ ID NO: 1738055 - RNA, 19 nt, Artificial Sequence
  Description of Artificial Sequence: Synthetic oligonucleotide
  Sense strand starting at position 1678 of SEQ ID NO: 1562318
augaucagccuuuauguaa

SEQ ID NO: 1738056 - RNA, 19 nt, Artificial Sequence
  Description of Artificial Sequence: Synthetic oligonucleotide
  Antisense strand to SEQ ID NO: 1738055
uuacauaaaggcugaucau

SEQ ID NO: 1738057 - RNA, 19 nt, Artificial Sequence
  Description of Artificial Sequence: Synthetic oligonucleotide
  Sense strand starting at position 1716 of SEQ ID NO: 1562318
cuagguugucgagaaucug

SEQ ID NO: 1738058 - RNA, 19 nt, Artificial Sequence
  Description of Artificial Sequence: Synthetic oligonucleotide
  Antisense strand to SEQ ID NO: 1738057
cagauucucgacaaccuag

SEQ ID NO: 1738059 - RNA, 19 nt, Artificial Sequence
  Description of Artificial Sequence: Synthetic oligonucleotide
  Sense strand starting at position 1765 of SEQ ID NO: 1562318
aagggagaguaauugcaau

SEQ ID NO: 1738060 - RNA, 19 nt, Artificial Sequence
  Description of Artificial Sequence: Synthetic oligonucleotide
  Antisense strand to SEQ ID NO: 1738059
auugcaauuacucucccuu

SEQ ID NO: 1738061 - RNA, 19 nt, Artificial Sequence
  Description of Artificial Sequence: Synthetic oligonucleotide
  Sense strand starting at position 1782 of SEQ ID NO: 1562318
auauaaaucgcucaacgac

SEQ ID NO: 1738062 - RNA, 19 nt, Artificial Sequence
  Description of Artificial Sequence: Synthetic oligonucleotide
  Antisense strand to SEQ ID NO: 1738061
gucguugagcgauuuauau

SEQ ID NO: 1738063 - RNA, 19 nt, Artificial Sequence
  Description of Artificial Sequence: Synthetic oligonucleotide
  Sense strand starting at position 2048 of SEQ ID NO: 1562318
aguaguccugcugagaaca

SEQ ID NO: 1738064 - RNA, 19 nt, Artificial Sequence
  Description of Artificial Sequence: Synthetic oligonucleotide
  Antisense strand to SEQ ID NO: 1738063
uguucucagcaggacuacu

SEQ ID NO: 1738065 - RNA, 19 nt, Artificial Sequence
  Description of Artificial Sequence: Synthetic oligonucleotide
  Sense strand starting at position 2119 of SEQ ID NO: 1562318
acagaaagcauccgaguga

SEQ ID NO: 1738066 - RNA, 19 nt, Artificial Sequence
  Description of Artificial Sequence: Synthetic oligonucleotide
  Antisense strand to SEQ ID NO: 1738065
ucacucggaugcuuucugu

SEQ ID NO: 1738067 - RNA, 19 nt, Artificial Sequence
  Description of Artificial Sequence: Synthetic oligonucleotide
  Sense strand starting at position 2123 of SEQ ID NO: 1562318
aaagcauccgagugaacac

SEQ ID NO: 1738068 - RNA, 19 nt, Artificial Sequence
  Description of Artificial Sequence: Synthetic oligonucleotide
  Antisense strand to SEQ ID NO: 1738067
guguucacucggaugcuuu

SEQ ID NO: 1738069 - RNA, 19 nt, Artificial Sequence
  Description of Artificial Sequence: Synthetic oligonucleotide
  Sense strand starting at position 2309 of SEQ ID NO: 1562318
aaggcuaugccgcucguaa

SEQ ID NO: 1738070 - RNA, 19 nt, Artificial Sequence
  Description of Artificial Sequence: Synthetic oligonucleotide
  Antisense strand to SEQ ID NO: 1738069
uuacgagcggcauagccuu

SEQ ID NO: 1738071 - RNA, 19 nt, Artificial Sequence
  Description of Artificial Sequence: Synthetic oligonucleotide
  Sense strand starting at position 2310 of SEQ ID NO: 1562318
aggcuaugccgcucguaau

SEQ ID NO: 1738072 - RNA, 19 nt, Artificial Sequence
  Description of Artificial Sequence: Synthetic oligonucleotide
  Antisense strand to SEQ ID NO: 1738071
auuacgagcggcauagccu

SEQ ID NO: 1738073 - RNA, 19 nt, Artificial Sequence
  Description of Artificial Sequence: Synthetic oligonucleotide
  Sense strand starting at position 3258 of SEQ ID NO: 1562318
uggauacucuuuguguaaa

SEQ ID NO: 1738074 - RNA, 19 nt, Artificial Sequence
  Description of Artificial Sequence: Synthetic oligonucleotide
  Antisense strand to SEQ ID NO: 1738073
uuuacacaaagaguaucca

SEQ ID NO: 1738075 - RNA, 19 nt, Artificial Sequence
  Description of Artificial Sequence: Synthetic oligonucleotide
  Sense strand starting at position 3401 of SEQ ID NO: 1562318
uauguauugcuagaugcag

SEQ ID NO: 1738076 - RNA, 19 nt, Artificial Sequence
  Description of Artificial Sequence: Synthetic oligonucleotide
  Antisense strand to SEQ ID NO: 1738075
cugcaucuagcaauacaua

SEQ ID NO: 1738077 - RNA, 19 nt, Artificial Sequence
  Description of Artificial Sequence: Synthetic oligonucleotide
  Sense strand starting at position 3440 of SEQ ID NO: 1562318
auggauuggugaagugaga

SEQ ID NO: 1738078 - RNA, 19 nt, Artificial Sequence
  Description of Artificial Sequence: Synthetic oligonucleotide
  Antisense strand to SEQ ID NO: 1738077
ucucacuucaccaauccau

SEQ ID NO: 1738079 - RNA, 19 nt, Artificial Sequence
  Description of Artificial Sequence: Synthetic oligonucleotide
  Sense strand starting at position 3660 of SEQ ID NO: 1562318
uucugaauucuugggaauu

SEQ ID NO: 1738080 - RNA, 19 nt, Artificial Sequence
  Description of Artificial Sequence: Synthetic oligonucleotide
  Antisense strand to SEQ ID NO: 1738079
aauucccaagaauucagaa

SEQ ID NO: 1738081 - RNA, 19 nt, Artificial Sequence
  Description of Artificial Sequence: Synthetic oligonucleotide
  Sense strand starting at position 3662 of SEQ ID NO: 1562318
cugaauucuugggaauuuc

SEQ ID NO: 1738082 - RNA, 19 nt, Artificial Sequence
  Description of Artificial Sequence: Synthetic oligonucleotide
  Antisense strand to SEQ ID NO: 1738081
gaaauucccaagaauucag

SEQ ID NO: 1738083 - RNA, 19 nt, Artificial Sequence
  Description of Artificial Sequence: Synthetic oligonucleotide
  Sense strand starting at position 3699 of SEQ ID NO: 1562318
guauguauuucuuugcaau

SEQ ID NO: 1738084 - RNA, 19 nt, Artificial Sequence
  Description of Artificial Sequence: Synthetic oligonucleotide
  Antisense strand to SEQ ID NO: 1738083
auugcaaagaaauacauac

SEQ ID NO: 1738085 - RNA, 19 nt, Artificial Sequence
  Description of Artificial Sequence: Synthetic oligonucleotide
  Sense strand starting at position 3716 of SEQ ID NO: 1562318
aucaucuaucagugaucua

SEQ ID NO: 1738086 - RNA, 19 nt, Artificial Sequence
  Description of Artificial Sequence: Synthetic oligonucleotide
  Antisense strand to SEQ ID NO: 1738085
uagaucacugauagaugau

SEQ ID NO: 1738087 - RNA, 19 nt, Artificial Sequence
  Description of Artificial Sequence: Synthetic oligonucleotide
  Sense strand starting at position 3719 of SEQ ID NO: 1562318
aucuaucagugaucuacga

SEQ ID NO: 1738088 - RNA, 19 nt, Artificial Sequence
  Description of Artificial Sequence: Synthetic oligonucleotide
  Antisense strand to SEQ ID NO: 1738087
ucguagaucacugauagau

SEQ ID NO: 1738089 - RNA, 19 nt, Artificial Sequence
  Description of Artificial Sequence: Synthetic oligonucleotide
  Sense strand starting at position 3723 of SEQ ID NO: 1562318
aucagugaucuacgauaua

SEQ ID NO: 1738090 - RNA, 19 nt, Artificial Sequence
  Description of Artificial Sequence: Synthetic oligonucleotide
  Antisense strand to SEQ ID NO: 1738089
uauaucguagaucacugau

SEQ ID NO: 1738091 - RNA, 19 nt, Artificial Sequence
  Description of Artificial Sequence: Synthetic oligonucleotide
  Sense strand starting at position 3726 of SEQ ID NO: 1562318
agugaucuacgauauacau

SEQ ID NO: 1738092 - RNA, 19 nt, Artificial Sequence
  Description of Artificial Sequence: Synthetic oligonucleotide
  Antisense strand to SEQ ID NO: 1738091
auguauaucguagaucacu

SEQ ID NO: 1738093 - RNA, 19 nt, Artificial Sequence
  Description of Artificial Sequence: Synthetic oligonucleotide
  Sense strand starting at position 3812 of SEQ ID NO: 1562318
cuacccaaggacugugaua

SEQ ID NO: 1738094 - RNA, 19 nt, Artificial Sequence
  Description of Artificial Sequence: Synthetic oligonucleotide
  Antisense strand to SEQ ID NO: 1738093
uaucacaguccuuggguag

SEQ ID NO: 1738095 - RNA, 19 nt, Artificial Sequence
  Description of Artificial Sequence: Synthetic oligonucleotide
  Sense strand starting at position 3827 of SEQ ID NO: 1562318
gauaccuaguuuccaggaa

SEQ ID NO: 1738096 - RNA, 19 nt, Artificial Sequence
  Description of Artificial Sequence: Synthetic oligonucleotide
  Antisense strand to SEQ ID NO: 1738095
uuccuggaaacuagguauc

SEQ ID NO: 1738097 - RNA, 19 nt, Artificial Sequence
  Description of Artificial Sequence: Synthetic oligonucleotide
  Sense strand starting at position 3831 of SEQ ID NO: 1562318
ccuaguuuccaggaauacu

SEQ ID NO: 1738098 - RNA, 19 nt, Artificial Sequence
  Description of Artificial Sequence: Synthetic oligonucleotide
  Antisense strand to SEQ ID NO: 1738097
aguauuccuggaaacuagg

SEQ ID NO: 1738099 - RNA, 19 nt, Artificial Sequence
  Description of Artificial Sequence: Synthetic oligonucleotide
  Sense strand starting at position 3875 of SEQ ID NO: 1562318
guauaucaaguccauagua

SEQ ID NO: 1738100 - RNA, 19 nt, Artificial Sequence
  Description of Artificial Sequence: Synthetic oligonucleotide
  Antisense strand to SEQ ID NO: 1738099
uacuauggacuugauauac

SEQ ID NO: 1738101 - RNA, 19 nt, Artificial Sequence
  Description of Artificial Sequence: Synthetic oligonucleotide
  Sense strand starting at position 3877 of SEQ ID NO: 1562318
auaucaaguccauaguaug

SEQ ID NO: 1738102 - RNA, 19 nt, Artificial Sequence
  Description of Artificial Sequence: Synthetic oligonucleotide
  Antisense strand to SEQ ID NO: 1738101
cauacuauggacuugauau

SEQ ID NO: 1738103 - RNA, 19 nt, Artificial Sequence
  Description of Artificial Sequence: Synthetic oligonucleotide
  Sense strand starting at position 3954 of SEQ ID NO: 1562318
gcuuuaaaugcaugagaau

SEQ ID NO: 1738104 - RNA, 19 nt, Artificial Sequence
  Description of Artificial Sequence: Synthetic oligonucleotide
  Antisense strand to SEQ ID NO: 1738103
auucucaugcauuuaaagc

SEQ ID NO: 1738105 - RNA, 19 nt, Artificial Sequence
  Description of Artificial Sequence: Synthetic oligonucleotide
  Sense strand starting at position 340 of SEQ ID NO: 1562319
ggugugaggcauggaguua

SEQ ID NO: 1738106 - RNA, 19 nt, Artificial Sequence
  Description of Artificial Sequence: Synthetic oligonucleotide
  Antisense strand to SEQ ID NO: 1738105
uaacuccaugccucacacc

SEQ ID NO: 1738107 - RNA, 19 nt, Artificial Sequence
  Description of Artificial Sequence: Synthetic oligonucleotide
  Sense strand starting at position 551 of SEQ ID NO: 1562319
cuugccuuaccgcagauaa

SEQ ID NO: 1738108 - RNA, 19 nt, Artificial Sequence
  Description of Artificial Sequence: Synthetic oligonucleotide
  Antisense strand to SEQ ID NO: 1738107
uuaucugcgguaaggcaag

SEQ ID NO: 1738109 - RNA, 19 nt, Artificial Sequence
  Description of Artificial Sequence: Synthetic oligonucleotide
  Sense strand starting at position 553 of SEQ ID NO: 1562319
ugccuuaccgcagauaaga

SEQ ID NO: 1738110 - RNA, 19 nt, Artificial Sequence
  Description of Artificial Sequence: Synthetic oligonucleotide
  Antisense strand to SEQ ID NO: 1738109
ucuuaucugcgguaaggca

SEQ ID NO: 1738111 - RNA, 19 nt, Artificial Sequence
  Description of Artificial Sequence: Synthetic oligonucleotide
  Sense strand starting at position 686 of SEQ ID NO: 1562319
guagaaugauaugcuuugu

SEQ ID NO: 1738112 - RNA, 19 nt, Artificial Sequence
  Description of Artificial Sequence: Synthetic oligonucleotide
  Antisense strand to SEQ ID NO: 1738111
acaaagcauaucauucuac

SEQ ID NO: 1738113 - RNA, 19 nt, Artificial Sequence
  Description of Artificial Sequence: Synthetic oligonucleotide
  Sense strand starting at position 752 of SEQ ID NO: 1562319
ccauguguccuaggaggaa

SEQ ID NO: 1738114 - RNA, 19 nt, Artificial Sequence
  Description of Artificial Sequence: Synthetic oligonucleotide
  Antisense strand to SEQ ID NO: 1738113
uuccuccuaggacacaugg

SEQ ID NO: 1738115 - RNA, 19 nt, Artificial Sequence
  Description of Artificial Sequence: Synthetic oligonucleotide
  Sense strand starting at position 1595 of SEQ ID NO: 1562319
gauagacauuugugaacca

SEQ ID NO: 1738116 - RNA, 19 nt, Artificial Sequence
  Description of Artificial Sequence: Synthetic oligonucleotide
  Antisense strand to SEQ ID NO: 1738115
ugguucacaaaugucuauc

SEQ ID NO: 1738117 - RNA, 19 nt, Artificial Sequence
  Description of Artificial Sequence: Synthetic oligonucleotide
  Sense strand starting at position 1674 of SEQ ID NO: 1562319
agguaaucagauggcaaga

SEQ ID NO: 1738118 - RNA, 19 nt, Artificial Sequence
  Description of Artificial Sequence: Synthetic oligonucleotide
  Antisense strand to SEQ ID NO: 1738117
ucuugccaucugauuaccu

SEQ ID NO: 1738119 - RNA, 19 nt, Artificial Sequence
  Description of Artificial Sequence: Synthetic oligonucleotide
  Sense strand starting at position 1764 of SEQ ID NO: 1562319
gggcaugaaucucuuccaa

SEQ ID NO: 1738120 - RNA, 19 nt, Artificial Sequence
  Description of Artificial Sequence: Synthetic oligonucleotide
  Antisense strand to SEQ ID NO: 1738119
uuggaagagauucaugccc

SEQ ID NO: 1738121 - RNA, 19 nt, Artificial Sequence
  Description of Artificial Sequence: Synthetic oligonucleotide
  Sense strand starting at position 1766 of SEQ ID NO: 1562319
gcaugaaucucuuccaagu

SEQ ID NO: 1738122 - RNA, 19 nt, Artificial Sequence
  Description of Artificial Sequence: Synthetic oligonucleotide
  Antisense strand to SEQ ID NO: 1738121
acuuggaagagauucaugc

SEQ ID NO: 1738123 - RNA, 19 nt, Artificial Sequence
  Description of Artificial Sequence: Synthetic oligonucleotide
  Sense strand starting at position 2010 of SEQ ID NO: 1562319
caggaaagccagugaagua

SEQ ID NO: 1738124 - RNA, 19 nt, Artificial Sequence
  Description of Artificial Sequence: Synthetic oligonucleotide
  Antisense strand to SEQ ID NO: 1738123
uacuucacuggcuuuccug

SEQ ID NO: 1738125 - RNA, 19 nt, Artificial Sequence
  Description of Artificial Sequence: Synthetic oligonucleotide
  Sense strand starting at position 2260 of SEQ ID NO: 1562319
cguagucugcuggcucaaa

SEQ ID NO: 1738126 - RNA, 19 nt, Artificial Sequence
  Description of Artificial Sequence: Synthetic oligonucleotide
  Antisense strand to SEQ ID NO: 1738125
uuugagccagcagacuacg

SEQ ID NO: 1738127 - RNA, 19 nt, Artificial Sequence
  Description of Artificial Sequence: Synthetic oligonucleotide
  Sense strand starting at position 2327 of SEQ ID NO: 1562319
accggcucucuggauauua

SEQ ID NO: 1738128 - RNA, 19 nt, Artificial Sequence
  Description of Artificial Sequence: Synthetic oligonucleotide
  Antisense strand to SEQ ID NO: 1738127
uaauauccagagagccggu

SEQ ID NO: 1738129 - RNA, 19 nt, Artificial Sequence
  Description of Artificial Sequence: Synthetic oligonucleotide
  Sense strand starting at position 2329 of SEQ ID NO: 1562319
cggcucucuggauauuacu

SEQ ID NO: 1738130 - RNA, 19 nt, Artificial Sequence
  Description of Artificial Sequence: Synthetic oligonucleotide
  Antisense strand to SEQ ID NO: 1738129
aguaauauccagagagccg

SEQ ID NO: 1738131 - RNA, 19 nt, Artificial Sequence
  Description of Artificial Sequence: Synthetic oligonucleotide
  Sense strand starting at position 2454 of SEQ ID NO: 1562319
ccauuagcccauuggaaua

SEQ ID NO: 1738132 - RNA, 19 nt, Artificial Sequence
  Description of Artificial Sequence: Synthetic oligonucleotide
  Antisense strand to SEQ ID NO: 1738131
uauuccaaugggcuaaugg

SEQ ID NO: 1738133 - RNA, 19 nt, Artificial Sequence
  Description of Artificial Sequence: Synthetic oligonucleotide
  Sense strand starting at position 2466 of SEQ ID NO: 1562319
uggaauauuugcuauaccu

SEQ ID NO: 1738134 - RNA, 19 nt, Artificial Sequence
  Description of Artificial Sequence: Synthetic oligonucleotide
  Antisense strand to SEQ ID NO: 1738133
agguauagcaaauauucca

SEQ ID NO: 1738135 - RNA, 19 nt, Artificial Sequence
  Description of Artificial Sequence: Synthetic oligonucleotide
  Sense strand starting at position 2491 of SEQ ID NO: 1562319
cugggacucugacuuauac

SEQ ID NO: 1738136 - RNA, 19 nt, Artificial Sequence
  Description of Artificial Sequence: Synthetic oligonucleotide
  Antisense strand to SEQ ID NO: 1738135
guauaagucagagucccag

SEQ ID NO: 1738137 - RNA, 19 nt, Artificial Sequence
  Description of Artificial Sequence: Synthetic oligonucleotide
  Sense strand starting at position 2610 of SEQ ID NO: 1562319
agcauaccauguuucugaa

SEQ ID NO: 1738138 - RNA, 19 nt, Artificial Sequence
  Description of Artificial Sequence: Synthetic oligonucleotide
  Antisense strand to SEQ ID NO: 1738137
uucagaaacaugguaugcu

SEQ ID NO: 1738139 - RNA, 19 nt, Artificial Sequence
  Description of Artificial Sequence: Synthetic oligonucleotide
  Sense strand starting at position 2651 of SEQ ID NO: 1562319
gcuggaaaccuccauuaau

SEQ ID NO: 1738140 - RNA, 19 nt, Artificial Sequence
  Description of Artificial Sequence: Synthetic oligonucleotide
  Antisense strand to SEQ ID NO: 1738139
auuaauggagguuuccagc

SEQ ID NO: 1738141 - RNA, 19 nt, Artificial Sequence
  Description of Artificial Sequence: Synthetic oligonucleotide
  Sense strand starting at position 2801 of SEQ ID NO: 1562319
gaaguagcucuacaaguca

SEQ ID NO: 1738142 - RNA, 19 nt, Artificial Sequence
  Description of Artificial Sequence: Synthetic oligonucleotide
  Antisense strand to SEQ ID NO: 1738141
ugacuuguagagcuacuuc

SEQ ID NO: 1738143 - RNA, 19 nt, Artificial Sequence
  Description of Artificial Sequence: Synthetic oligonucleotide
  Sense strand starting at position 2993 of SEQ ID NO: 1562319
auaaaugacuuggagacaa

SEQ ID NO: 1738144 - RNA, 19 nt, Artificial Sequence
  Description of Artificial Sequence: Synthetic oligonucleotide
  Antisense strand to SEQ ID NO: 1738143
uugucuccaagucauuuau

SEQ ID NO: 1738145 - RNA, 19 nt, Artificial Sequence
  Description of Artificial Sequence: Synthetic oligonucleotide
  Sense strand starting at position 3046 of SEQ ID NO: 1562319
uucuuaaucucgguuaauc

SEQ ID NO: 1738146 - RNA, 19 nt, Artificial Sequence
  Description of Artificial Sequence: Synthetic oligonucleotide
  Antisense strand to SEQ ID NO: 1738145
gauuaaccgagauuaagaa

SEQ ID NO: 1738147 - RNA, 19 nt, Artificial Sequence
  Description of Artificial Sequence: Synthetic oligonucleotide
  Sense strand starting at position 3110 of SEQ ID NO: 1562319
ggcuauuugcgguauccaa

SEQ ID NO: 1738148 - RNA, 19 nt, Artificial Sequence
  Description of Artificial Sequence: Synthetic oligonucleotide
  Antisense strand to SEQ ID NO: 1738147
uuggauaccgcaaauagcc

SEQ ID NO: 1738149 - RNA, 19 nt, Artificial Sequence
  Description of Artificial Sequence: Synthetic oligonucleotide
  Sense strand starting at position 3118 of SEQ ID NO: 1562319
gcgguauccaagcaucaga

SEQ ID NO: 1738150 - RNA, 19 nt, Artificial Sequence
  Description of Artificial Sequence: Synthetic oligonucleotide
  Antisense strand to SEQ ID NO: 1738149
ucugaugcuuggauaccgc

SEQ ID NO: 1738151 - RNA, 19 nt, Artificial Sequence
  Description of Artificial Sequence: Synthetic oligonucleotide
  Sense strand starting at position 3277 of SEQ ID NO: 1562319
acuacuggcgauuaagacu

SEQ ID NO: 1738152 - RNA, 19 nt, Artificial Sequence
  Description of Artificial Sequence: Synthetic oligonucleotide
  Antisense strand to SEQ ID NO: 1738151
agucuuaaucgccaguagu

SEQ ID NO: 1738153 - RNA, 19 nt, Artificial Sequence
  Description of Artificial Sequence: Synthetic oligonucleotide
  Sense strand starting at position 3326 of SEQ ID NO: 1562319
agaacaucuguaugauugu

SEQ ID NO: 1738154 - RNA, 19 nt, Artificial Sequence
  Description of Artificial Sequence: Synthetic oligonucleotide
  Antisense strand to SEQ ID NO: 1738153
acaaucauacagauguucu

SEQ ID NO: 1738155 - RNA, 19 nt, Artificial Sequence
  Description of Artificial Sequence: Synthetic oligonucleotide
  Sense strand starting at position 3329 of SEQ ID NO: 1562319
acaucuguaugauugucua

SEQ ID NO: 1738156 - RNA, 19 nt, Artificial Sequence
  Description of Artificial Sequence: Synthetic oligonucleotide
  Antisense strand to SEQ ID NO: 1738155
uagacaaucauacagaugu

SEQ ID NO: 1738157 - RNA, 19 nt, Artificial Sequence
  Description of Artificial Sequence: Synthetic oligonucleotide
  Sense strand starting at position 3333 of SEQ ID NO: 1562319
cuguaugauugucuaaggu

SEQ ID NO: 1738158 - RNA, 19 nt, Artificial Sequence
  Description of Artificial Sequence: Synthetic oligonucleotide
  Antisense strand to SEQ ID NO: 1738157
accuuagacaaucauacag

SEQ ID NO: 1738159 - RNA, 19 nt, Artificial Sequence
  Description of Artificial Sequence: Synthetic oligonucleotide
  Sense strand starting at position 3369 of SEQ ID NO: 1562319
augccaugcggucauuuau

SEQ ID NO: 1738160 - RNA, 19 nt, Artificial Sequence
  Description of Artificial Sequence: Synthetic oligonucleotide
  Antisense strand to SEQ ID NO: 1738159
auaaaugaccgcauggcau

SEQ ID NO: 1738161 - RNA, 19 nt, Artificial Sequence
  Description of Artificial Sequence: Synthetic oligonucleotide
  Sense strand starting at position 3375 of SEQ ID NO: 1562319
ugcggucauuuauugccaa

SEQ ID NO: 1738162 - RNA, 19 nt, Artificial Sequence
  Description of Artificial Sequence: Synthetic oligonucleotide
  Antisense strand to SEQ ID NO: 1738161
uuggcaauaaaugaccgca

SEQ ID NO: 1738163 - RNA, 19 nt, Artificial Sequence
  Description of Artificial Sequence: Synthetic oligonucleotide
  Sense strand starting at position 3432 of SEQ ID NO: 1562319
guccuauauaccggaaugu

SEQ ID NO: 1738164 - RNA, 19 nt, Artificial Sequence
  Description of Artificial Sequence: Synthetic oligonucleotide
  Antisense strand to SEQ ID NO: 1738163
acauuccgguauauaggac

SEQ ID NO: 1738165 - RNA, 19 nt, Artificial Sequence
  Description of Artificial Sequence: Synthetic oligonucleotide
  Sense strand starting at position 3433 of SEQ ID NO: 1562319
uccuauauaccggaaugua

SEQ ID NO: 1738166 - RNA, 19 nt, Artificial Sequence
  Description of Artificial Sequence: Synthetic oligonucleotide
  Antisense strand to SEQ ID NO: 1738165
uacauuccgguauauagga

SEQ ID NO: 1738167 - RNA, 19 nt, Artificial Sequence
  Description of Artificial Sequence: Synthetic oligonucleotide
  Sense strand starting at position 3436 of SEQ ID NO: 1562319
uauauaccggaauguauau

SEQ ID NO: 1738168 - RNA, 19 nt, Artificial Sequence
  Description of Artificial Sequence: Synthetic oligonucleotide
  Antisense strand to SEQ ID NO: 1738167
auauacauuccgguauaua

SEQ ID NO: 1738169 - RNA, 19 nt, Artificial Sequence
  Description of Artificial Sequence: Synthetic oligonucleotide
  Sense strand starting at position 3443 of SEQ ID NO: 1562319
cggaauguauaucucuaau

SEQ ID NO: 1738170 - RNA, 19 nt, Artificial Sequence
  Description of Artificial Sequence: Synthetic oligonucleotide
  Antisense strand to SEQ ID NO: 1738169
auuagagauauacauuccg

SEQ ID NO: 1738171 - RNA, 19 nt, Artificial Sequence
  Description of Artificial Sequence: Synthetic oligonucleotide
  Sense strand starting at position 3453 of SEQ ID NO: 1562319
aucucuaaugacugaagca

SEQ ID NO: 1738172 - RNA, 19 nt, Artificial Sequence
  Description of Artificial Sequence: Synthetic oligonucleotide
  Antisense strand to SEQ ID NO: 1738171
ugcuucagucauuagagau

SEQ ID NO: 1738173 - RNA, 19 nt, Artificial Sequence
  Description of Artificial Sequence: Synthetic oligonucleotide
  Sense strand starting at position 3463 of SEQ ID NO: 1562319
acugaagcauuguuagguu

SEQ ID NO: 1738174 - RNA, 19 nt, Artificial Sequence
  Description of Artificial Sequence: Synthetic oligonucleotide
  Antisense strand to SEQ ID NO: 1738173
aaccuaacaaugcuucagu

SEQ ID NO: 1738175 - RNA, 19 nt, Artificial Sequence
  Description of Artificial Sequence: Synthetic oligonucleotide
  Sense strand starting at position 3482 of SEQ ID NO: 1562319
auaggcuuauaagcucaaa

SEQ ID NO: 1738176 - RNA, 19 nt, Artificial Sequence
  Description of Artificial Sequence: Synthetic oligonucleotide
  Antisense strand to SEQ ID NO: 1738175
uuugagcuuauaagccuau

SEQ ID NO: 1738177 - RNA, 19 nt, Artificial Sequence
  Description of Artificial Sequence: Synthetic oligonucleotide
  Sense strand starting at position 3485 of SEQ ID NO: 1562319
ggcuuauaagcucaaagac

SEQ ID NO: 1738178 - RNA, 19 nt, Artificial Sequence
  Description of Artificial Sequence: Synthetic oligonucleotide
  Antisense strand to SEQ ID NO: 1738177
gucuuugagcuuauaagcc

SEQ ID NO: 1738179 - RNA, 19 nt, Artificial Sequence
  Description of Artificial Sequence: Synthetic oligonucleotide
  Sense strand starting at position 3515 of SEQ ID NO: 1562319
cggguaagucaagauucau

SEQ ID NO: 1738180 - RNA, 19 nt, Artificial Sequence
  Description of Artificial Sequence: Synthetic oligonucleotide
  Antisense strand to SEQ ID NO: 1738179
augaaucuugacuuacccg

SEQ ID NO: 1738181 - RNA, 19 nt, Artificial Sequence
  Description of Artificial Sequence: Synthetic oligonucleotide
  Sense strand starting at position 3696 of SEQ ID NO: 1562319
cucuuugaggcuuagcauu

SEQ ID NO: 1738182 - RNA, 19 nt, Artificial Sequence
  Description of Artificial Sequence: Synthetic oligonucleotide
  Antisense strand to SEQ ID NO: 1738181
aaugcuaagccucaaagag

SEQ ID NO: 1738183 - RNA, 19 nt, Artificial Sequence
  Description of Artificial Sequence: Synthetic oligonucleotide
  Sense strand starting at position 3959 of SEQ ID NO: 1562319
agaaucaacugguccacuu

SEQ ID NO: 1738184 - RNA, 19 nt, Artificial Sequence
  Description of Artificial Sequence: Synthetic oligonucleotide
  Antisense strand to SEQ ID NO: 1738183
aaguggaccaguugauucu

SEQ ID NO: 1738185 - RNA, 19 nt, Artificial Sequence
  Description of Artificial Sequence: Synthetic oligonucleotide
  Sense strand starting at position 171 of SEQ ID NO: 1562320
uugcaugaauaauucugau

SEQ ID NO: 1738186 - RNA, 19 nt, Artificial Sequence
  Description of Artificial Sequence: Synthetic oligonucleotide
  Antisense strand to SEQ ID NO: 1738185
aucagaauuauucaugcaa

SEQ ID NO: 1738187 - RNA, 19 nt, Artificial Sequence
  Description of Artificial Sequence: Synthetic oligonucleotide
  Sense strand starting at position 315 of SEQ ID NO: 1562320
uagagugaucgguaacuac

SEQ ID NO: 1738188 - RNA, 19 nt, Artificial Sequence
  Description of Artificial Sequence: Synthetic oligonucleotide
  Antisense strand to SEQ ID NO: 1738187
guaguuaccgaucacucua

SEQ ID NO: 1738189 - RNA, 19 nt, Artificial Sequence
  Description of Artificial Sequence: Synthetic oligonucleotide
  Sense strand starting at position 319 of SEQ ID NO: 1562320
gugaucgguaacuacacau

SEQ ID NO: 1738190 - RNA, 19 nt, Artificial Sequence
  Description of Artificial Sequence: Synthetic oligonucleotide
  Antisense strand to SEQ ID NO: 1738189
auguguaguuaccgaucac

SEQ ID NO: 1738191 - RNA, 19 nt, Artificial Sequence
  Description of Artificial Sequence: Synthetic oligonucleotide
  Sense strand starting at position 357 of SEQ ID NO: 1562320
gcuguagaacaucacaaau

SEQ ID NO: 1738192 - RNA, 19 nt, Artificial Sequence
  Description of Artificial Sequence: Synthetic oligonucleotide
  Antisense strand to SEQ ID NO: 1738191
auuugugauguucuacagc

SEQ ID NO: 1738193 - RNA, 19 nt, Artificial Sequence
  Description of Artificial Sequence: Synthetic oligonucleotide
  Sense strand starting at position 392 of SEQ ID NO: 1562320
agugacaauuaagcuuaau

SEQ ID NO: 1738194 - RNA, 19 nt, Artificial Sequence
  Description of Artificial Sequence: Synthetic oligonucleotide
  Antisense strand to SEQ ID NO: 1738193
auuaagcuuaauugucacu

SEQ ID NO: 1738195 - RNA, 19 nt, Artificial Sequence
  Description of Artificial Sequence: Synthetic oligonucleotide
  Sense strand starting at position 454 of SEQ ID NO: 1562320
ugucaucugucaucuauuu

SEQ ID NO: 1738196 - RNA, 19 nt, Artificial Sequence
  Description of Artificial Sequence: Synthetic oligonucleotide
  Antisense strand to SEQ ID NO: 1738195
aaauagaugacagaugaca

SEQ ID NO: 1738197 - RNA, 19 nt, Artificial Sequence
  Description of Artificial Sequence: Synthetic oligonucleotide
  Sense strand starting at position 622 of SEQ ID NO: 1562320
aauaaaguguagcuaugau

SEQ ID NO: 1738198 - RNA, 19 nt, Artificial Sequence
  Description of Artificial Sequence: Synthetic oligonucleotide
  Antisense strand to SEQ ID NO: 1738197
aucauagcuacacuuuauu

SEQ ID NO: 1738199 - RNA, 19 nt, Artificial Sequence
  Description of Artificial Sequence: Synthetic oligonucleotide
  Sense strand starting at position 636 of SEQ ID NO: 1562320
augaucagccuuuauguaa

SEQ ID NO: 1738200 - RNA, 19 nt, Artificial Sequence
  Description of Artificial Sequence: Synthetic oligonucleotide
  Antisense strand to SEQ ID NO: 1738199
uuacauaaaggcugaucau

SEQ ID NO: 1738201 - RNA, 19 nt, Artificial Sequence
  Description of Artificial Sequence: Synthetic oligonucleotide
  Sense strand starting at position 674 of SEQ ID NO: 1562320
cuagguugucgagaaucug

SEQ ID NO: 1738202 - RNA, 19 nt, Artificial Sequence
  Description of Artificial Sequence: Synthetic oligonucleotide
  Antisense strand to SEQ ID NO: 1738201
cagauucucgacaaccuag

SEQ ID NO: 1738203 - RNA, 19 nt, Artificial Sequence
  Description of Artificial Sequence: Synthetic oligonucleotide
  Sense strand starting at position 723 of SEQ ID NO: 1562320
aagggagaguaauugcaau

SEQ ID NO: 1738204 - RNA, 19 nt, Artificial Sequence
  Description of Artificial Sequence: Synthetic oligonucleotide
  Antisense strand to SEQ ID NO: 1738203
auugcaauuacucucccuu

SEQ ID NO: 1738205 - RNA, 19 nt, Artificial Sequence
  Description of Artificial Sequence: Synthetic oligonucleotide
  Sense strand starting at position 740 of SEQ ID NO: 1562320
auauaaaucgcucaacgac

SEQ ID NO: 1738206 - RNA, 19 nt, Artificial Sequence
  Description of Artificial Sequence: Synthetic oligonucleotide
  Antisense strand to SEQ ID NO: 1738205
gucguugagcgauuuauau

SEQ ID NO: 1738207 - RNA, 19 nt, Artificial Sequence
  Description of Artificial Sequence: Synthetic oligonucleotide
  Sense strand starting at position 1006 of SEQ ID NO: 1562320
aguaguccugcugagaaca

SEQ ID NO: 1738208 - RNA, 19 nt, Artificial Sequence
  Description of Artificial Sequence: Synthetic oligonucleotide
  Antisense strand to SEQ ID NO: 1738207
uguucucagcaggacuacu

SEQ ID NO: 1738209 - RNA, 19 nt, Artificial Sequence
  Description of Artificial Sequence: Synthetic oligonucleotide
  Sense strand starting at position 1077 of SEQ ID NO: 1562320
acagaaagcauccgaguga

SEQ ID NO: 1738210 - RNA, 19 nt, Artificial Sequence
  Description of Artificial Sequence: Synthetic oligonucleotide
  Antisense strand to SEQ ID NO: 1738209
ucacucggaugcuuucugu

SEQ ID NO: 1738211 - RNA, 19 nt, Artificial Sequence
  Description of Artificial Sequence: Synthetic oligonucleotide
  Sense strand starting at position 1081 of SEQ ID NO: 1562320
aaagcauccgagugaacac

SEQ ID NO: 1738212 - RNA, 19 nt, Artificial Sequence
  Description of Artificial Sequence: Synthetic oligonucleotide
  Antisense strand to SEQ ID NO: 1738211
guguucacucggaugcuuu

SEQ ID NO: 1738213 - RNA, 19 nt, Artificial Sequence
  Description of Artificial Sequence: Synthetic oligonucleotide
  Sense strand starting at position 1267 of SEQ ID NO: 1562320
aaggcuaugccgcucguaa

SEQ ID NO: 1738214 - RNA, 19 nt, Artificial Sequence
  Description of Artificial Sequence: Synthetic oligonucleotide
  Antisense strand to SEQ ID NO: 1738213
uuacgagcggcauagccuu

SEQ ID NO: 1738215 - RNA, 19 nt, Artificial Sequence
  Description of Artificial Sequence: Synthetic oligonucleotide
  Sense strand starting at position 1268 of SEQ ID NO: 1562320
aggcuaugccgcucguaau

SEQ ID NO: 1738216 - RNA, 19 nt, Artificial Sequence
  Description of Artificial Sequence: Synthetic oligonucleotide
  Antisense strand to SEQ ID NO: 1738215
auuacgagcggcauagccu

SEQ ID NO: 1738217 - RNA, 19 nt, Artificial Sequence
  Description of Artificial Sequence: Synthetic oligonucleotide
  Sense strand starting at position 2216 of SEQ ID NO: 1562320
uggauacucuuuguguaaa

SEQ ID NO: 1738218 - RNA, 19 nt, Artificial Sequence
  Description of Artificial Sequence: Synthetic oligonucleotide
  Antisense strand to SEQ ID NO: 1738217
uuuacacaaagaguaucca

SEQ ID NO: 1738219 - RNA, 19 nt, Artificial Sequence
  Description of Artificial Sequence: Synthetic oligonucleotide
  Sense strand starting at position 2248 of SEQ ID NO: 1562320
gcuauuaaacucuggcaaa

SEQ ID NO: 1738220 - RNA, 19 nt, Artificial Sequence
  Description of Artificial Sequence: Synthetic oligonucleotide
  Antisense strand to SEQ ID NO: 1738219
uuugccagaguuuaauagc

SEQ ID NO: 1738221 - RNA, 19 nt, Artificial Sequence
  Description of Artificial Sequence: Synthetic oligonucleotide
  Sense strand starting at position 2359 of SEQ ID NO: 1562320
uauguauugcuagaugcag

SEQ ID NO: 1738222 - RNA, 19 nt, Artificial Sequence
  Description of Artificial Sequence: Synthetic oligonucleotide
  Antisense strand to SEQ ID NO: 1738221
cugcaucuagcaauacaua

SEQ ID NO: 1738223 - RNA, 19 nt, Artificial Sequence
  Description of Artificial Sequence: Synthetic oligonucleotide
  Sense strand starting at position 2398 of SEQ ID NO: 1562320
auggauuggugaagugaga

SEQ ID NO: 1738224 - RNA, 19 nt, Artificial Sequence
  Description of Artificial Sequence: Synthetic oligonucleotide
  Antisense strand to SEQ ID NO: 1738223
ucucacuucaccaauccau

SEQ ID NO: 1738225 - RNA, 19 nt, Artificial Sequence
  Description of Artificial Sequence: Synthetic oligonucleotide
  Sense strand starting at position 2618 of SEQ ID NO: 1562320
uucugaauucuugggaauu

SEQ ID NO: 1738226 - RNA, 19 nt, Artificial Sequence
  Description of Artificial Sequence: Synthetic oligonucleotide
  Antisense strand to SEQ ID NO: 1738225
aauucccaagaauucagaa

SEQ ID NO: 1738227 - RNA, 19 nt, Artificial Sequence
  Description of Artificial Sequence: Synthetic oligonucleotide
  Sense strand starting at position 2620 of SEQ ID NO: 1562320
cugaauucuugggaauuuc

SEQ ID NO: 1738228 - RNA, 19 nt, Artificial Sequence
  Description of Artificial Sequence: Synthetic oligonucleotide
  Antisense strand to SEQ ID NO: 1738227
gaaauucccaagaauucag

SEQ ID NO: 1738229 - RNA, 19 nt, Artificial Sequence
  Description of Artificial Sequence: Synthetic oligonucleotide
  Sense strand starting at position 2657 of SEQ ID NO: 1562320
guauguauuucuuugcaau

SEQ ID NO: 1738230 - RNA, 19 nt, Artificial Sequence
  Description of Artificial Sequence: Synthetic oligonucleotide
  Antisense strand to SEQ ID NO: 1738229
auugcaaagaaauacauac

SEQ ID NO: 1738231 - RNA, 19 nt, Artificial Sequence
  Description of Artificial Sequence: Synthetic oligonucleotide
  Sense strand starting at position 2674 of SEQ ID NO: 1562320
aucaucuaucagugaucua

SEQ ID NO: 1738232 - RNA, 19 nt, Artificial Sequence
  Description of Artificial Sequence: Synthetic oligonucleotide
  Antisense strand to SEQ ID NO: 1738231
uagaucacugauagaugau

SEQ ID NO: 1738233 - RNA, 19 nt, Artificial Sequence
  Description of Artificial Sequence: Synthetic oligonucleotide
  Sense strand starting at position 2677 of SEQ ID NO: 1562320
aucuaucagugaucuacga

SEQ ID NO: 1738234 - RNA, 19 nt, Artificial Sequence
  Description of Artificial Sequence: Synthetic oligonucleotide
  Antisense strand to SEQ ID NO: 1738233
ucguagaucacugauagau

SEQ ID NO: 1738235 - RNA, 19 nt, Artificial Sequence
  Description of Artificial Sequence: Synthetic oligonucleotide
  Sense strand starting at position 2681 of SEQ ID NO: 1562320
aucagugaucuacgauaua

SEQ ID NO: 1738236 - RNA, 19 nt, Artificial Sequence
  Description of Artificial Sequence: Synthetic oligonucleotide
  Antisense strand to SEQ ID NO: 1738235
uauaucguagaucacugau

SEQ ID NO: 1738237 - RNA, 19 nt, Artificial Sequence
  Description of Artificial Sequence: Synthetic oligonucleotide
  Sense strand starting at position 2684 of SEQ ID NO: 1562320
agugaucuacgauauacau

SEQ ID NO: 1738238 - RNA, 19 nt, Artificial Sequence
  Description of Artificial Sequence: Synthetic oligonucleotide
  Antisense strand to SEQ ID NO: 1738237
auguauaucguagaucacu

SEQ ID NO: 1738239 - RNA, 19 nt, Artificial Sequence
  Description of Artificial Sequence: Synthetic oligonucleotide
  Sense strand starting at position 2770 of SEQ ID NO: 1562320
cuacccaaggacugugaua

SEQ ID NO: 1738240 - RNA, 19 nt, Artificial Sequence
  Description of Artificial Sequence: Synthetic oligonucleotide
  Antisense strand to SEQ ID NO: 1738239
uaucacaguccuuggguag

SEQ ID NO: 1738241 - RNA, 19 nt, Artificial Sequence
  Description of Artificial Sequence: Synthetic oligonucleotide
  Sense strand starting at position 2785 of SEQ ID NO: 1562320
gauaccuaguuuccaggaa

SEQ ID NO: 1738242 - RNA, 19 nt, Artificial Sequence
  Description of Artificial Sequence: Synthetic oligonucleotide
  Antisense strand to SEQ ID NO: 1738241
uuccuggaaacuagguauc

SEQ ID NO: 1738243 - RNA, 19 nt, Artificial Sequence
  Description of Artificial Sequence: Synthetic oligonucleotide
  Sense strand starting at position 2789 of SEQ ID NO: 1562320
ccuaguuuccaggaauacu

SEQ ID NO: 1738244 - RNA, 19 nt, Artificial Sequence
  Description of Artificial Sequence: Synthetic oligonucleotide
  Antisense strand to SEQ ID NO: 1738243
aguauuccuggaaacuagg

SEQ ID NO: 1738245 - RNA, 19 nt, Artificial Sequence
  Description of Artificial Sequence: Synthetic oligonucleotide
  Sense strand starting at position 2833 of SEQ ID NO: 1562320
guauaucaaguccauagua

SEQ ID NO: 1738246 - RNA, 19 nt, Artificial Sequence
  Description of Artificial Sequence: Synthetic oligonucleotide
  Antisense strand to SEQ ID NO: 1738245
uacuauggacuugauauac

SEQ ID NO: 1738247 - RNA, 19 nt, Artificial Sequence
  Description of Artificial Sequence: Synthetic oligonucleotide
  Sense strand starting at position 2835 of SEQ ID NO: 1562320
auaucaaguccauaguaug

SEQ ID NO: 1738248 - RNA, 19 nt, Artificial Sequence
  Description of Artificial Sequence: Synthetic oligonucleotide
  Antisense strand to SEQ ID NO: 1738247
cauacuauggacuugauau

SEQ ID NO: 1738249 - RNA, 19 nt, Artificial Sequence
  Description of Artificial Sequence: Synthetic oligonucleotide
  Sense strand starting at position 2912 of SEQ ID NO: 1562320
gcuuuaaaugcaugagaau

SEQ ID NO: 1738250 - RNA, 19 nt, Artificial Sequence
  Description of Artificial Sequence: Synthetic oligonucleotide
  Antisense strand to SEQ ID NO: 1738249
auucucaugcauuuaaagc

SEQ ID NO: 1738251 - RNA, 19 nt, Artificial Sequence
  Description of Artificial Sequence: Synthetic oligonucleotide
  Sense strand starting at position 3134 of SEQ ID NO: 1562320
cacccuacucgugacagua

SEQ ID NO: 1738252 - RNA, 19 nt, Artificial Sequence
  Description of Artificial Sequence: Synthetic oligonucleotide
  Antisense strand to SEQ ID NO: 1738251
uacugucacgaguagggug

SEQ ID NO: 1738253 - RNA, 19 nt, Artificial Sequence
  Description of Artificial Sequence: Synthetic oligonucleotide
  Sense strand starting at position 3632 of SEQ ID NO: 1562320
guauaaaugcuguaaugga

SEQ ID NO: 1738254 - RNA, 19 nt, Artificial Sequence
  Description of Artificial Sequence: Synthetic oligonucleotide
  Antisense strand to SEQ ID NO: 1738253
uccauuacagcauuuauac

SEQ ID NO: 1738255 - RNA, 19 nt, Artificial Sequence
  Description of Artificial Sequence: Synthetic oligonucleotide
  Sense strand starting at position 3640 of SEQ ID NO: 1562320
gcuguaauggaaggaugaa

SEQ ID NO: 1738256 - RNA, 19 nt, Artificial Sequence
  Description of Artificial Sequence: Synthetic oligonucleotide
  Antisense strand to SEQ ID NO: 1738255
uucauccuuccauuacagc

SEQ ID NO: 1738257 - RNA, 19 nt, Artificial Sequence
  Description of Artificial Sequence: Synthetic oligonucleotide
  Sense strand starting at position 3652 of SEQ ID NO: 1562320
ggaugaaucaagugucaug

SEQ ID NO: 1738258 - RNA, 19 nt, Artificial Sequence
  Description of Artificial Sequence: Synthetic oligonucleotide
  Antisense strand to SEQ ID NO: 1738257
caugacacuugauucaucc

SEQ ID NO: 1738259 - RNA, 19 nt, Artificial Sequence
  Description of Artificial Sequence: Synthetic oligonucleotide
  Sense strand starting at position 3731 of SEQ ID NO: 1562320
aagguugaugguggugaua

SEQ ID NO: 1738260 - RNA, 19 nt, Artificial Sequence
  Description of Artificial Sequence: Synthetic oligonucleotide
  Antisense strand to SEQ ID NO: 1738259
uaucaccaccaucaaccuu

SEQ ID NO: 1738261 - RNA, 19 nt, Artificial Sequence
  Description of Artificial Sequence: Synthetic oligonucleotide
  Sense strand starting at position 3855 of SEQ ID NO: 1562320
acagguccuucuuugggaa

SEQ ID NO: 1738262 - RNA, 19 nt, Artificial Sequence
  Description of Artificial Sequence: Synthetic oligonucleotide
  Antisense strand to SEQ ID NO: 1738261
uucccaaagaaggaccugu

SEQ ID NO: 1738263 - RNA, 19 nt, Artificial Sequence
  Description of Artificial Sequence: Synthetic oligonucleotide
  Sense strand starting at position 3856 of SEQ ID NO: 1562320
cagguccuucuuugggaaa

SEQ ID NO: 1738264 - RNA, 19 nt, Artificial Sequence
  Description of Artificial Sequence: Synthetic oligonucleotide
  Antisense strand to SEQ ID NO: 1738263
uuucccaaagaaggaccug

SEQ ID NO: 1738265 - RNA, 19 nt, Artificial Sequence
  Description of Artificial Sequence: Synthetic oligonucleotide
  Sense strand starting at position 51 of SEQ ID NO: 1562321
uuugauuggugguuaccaa

SEQ ID NO: 1738266 - RNA, 19 nt, Artificial Sequence
  Description of Artificial Sequence: Synthetic oligonucleotide
  Antisense strand to SEQ ID NO: 1738265
uugguaaccaccaaucaaa

SEQ ID NO: 1738267 - RNA, 19 nt, Artificial Sequence
  Description of Artificial Sequence: Synthetic oligonucleotide
  Sense strand starting at position 52 of SEQ ID NO: 1562321
uugauuggugguuaccaaa

SEQ ID NO: 1738268 - RNA, 19 nt, Artificial Sequence
  Description of Artificial Sequence: Synthetic oligonucleotide
  Antisense strand to SEQ ID NO: 1738267
uuugguaaccaccaaucaa

SEQ ID NO: 1738269 - RNA, 19 nt, Artificial Sequence
  Description of Artificial Sequence: Synthetic oligonucleotide
  Sense strand starting at position 82 of SEQ ID NO: 1562321
ucugaaagauuguugaacu

SEQ ID NO: 1738270 - RNA, 19 nt, Artificial Sequence
  Description of Artificial Sequence: Synthetic oligonucleotide
  Antisense strand to SEQ ID NO: 1738269
aguucaacaaucuuucaga

SEQ ID NO: 1738271 - RNA, 19 nt, Artificial Sequence
  Description of Artificial Sequence: Synthetic oligonucleotide
  Sense strand starting at position 243 of SEQ ID NO: 1562321
augacaaagcuuugauuga

SEQ ID NO: 1738272 - RNA, 19 nt, Artificial Sequence
  Description of Artificial Sequence: Synthetic oligonucleotide
  Antisense strand to SEQ ID NO: 1738271
ucaaucaaagcuuugucau

SEQ ID NO: 1738273 - RNA, 19 nt, Artificial Sequence
  Description of Artificial Sequence: Synthetic oligonucleotide
  Sense strand starting at position 292 of SEQ ID NO: 1562321
ggauccaggccaugaaagu

SEQ ID NO: 1738274 - RNA, 19 nt, Artificial Sequence
  Description of Artificial Sequence: Synthetic oligonucleotide
  Antisense strand to SEQ ID NO: 1738273
acuuucauggccuggaucc

SEQ ID NO: 1738275 - RNA, 19 nt, Artificial Sequence
  Description of Artificial Sequence: Synthetic oligonucleotide
  Sense strand starting at position 301 of SEQ ID NO: 1562321
ccaugaaaguccuuaaagc

SEQ ID NO: 1738276 - RNA, 19 nt, Artificial Sequence
  Description of Artificial Sequence: Synthetic oligonucleotide
  Antisense strand to SEQ ID NO: 1738275
gcuuuaaggacuuucaugg

SEQ ID NO: 1738277 - RNA, 19 nt, Artificial Sequence
  Description of Artificial Sequence: Synthetic oligonucleotide
  Sense strand starting at position 659 of SEQ ID NO: 1562321
uucuaucggcucuaacuua

SEQ ID NO: 1738278 - RNA, 19 nt, Artificial Sequence
  Description of Artificial Sequence: Synthetic oligonucleotide
  Antisense strand to SEQ ID NO: 1738277
uaaguuagagccgauagaa

SEQ ID NO: 1738279 - RNA, 19 nt, Artificial Sequence
  Description of Artificial Sequence: Synthetic oligonucleotide
  Sense strand starting at position 701 of SEQ ID NO: 1562321
cugugauacucagcaaaug

SEQ ID NO: 1738280 - RNA, 19 nt, Artificial Sequence
  Description of Artificial Sequence: Synthetic oligonucleotide
  Antisense strand to SEQ ID NO: 1738279
cauuugcugaguaucacag

SEQ ID NO: 1738281 - RNA, 19 nt, Artificial Sequence
  Description of Artificial Sequence: Synthetic oligonucleotide
  Sense strand starting at position 702 of SEQ ID NO: 1562321
ugugauacucagcaaauga

SEQ ID NO: 1738282 - RNA, 19 nt, Artificial Sequence
  Description of Artificial Sequence: Synthetic oligonucleotide
  Antisense strand to SEQ ID NO: 1738281
ucauuugcugaguaucaca

SEQ ID NO: 1738283 - RNA, 19 nt, Artificial Sequence
  Description of Artificial Sequence: Synthetic oligonucleotide
  Sense strand starting at position 712 of SEQ ID NO: 1562321
agcaaaugauagcuaauaa

SEQ ID NO: 1738284 - RNA, 19 nt, Artificial Sequence
  Description of Artificial Sequence: Synthetic oligonucleotide
  Antisense strand to SEQ ID NO: 1738283
uuauuagcuaucauuugcu

SEQ ID NO: 1738285 - RNA, 19 nt, Artificial Sequence
  Description of Artificial Sequence: Synthetic oligonucleotide
  Sense strand starting at position 758 of SEQ ID NO: 1562321
gguucuauccuauaucauu

SEQ ID NO: 1738286 - RNA, 19 nt, Artificial Sequence
  Description of Artificial Sequence: Synthetic oligonucleotide
  Antisense strand to SEQ ID NO: 1738285
aaugauauaggauagaacc

SEQ ID NO: 1738287 - RNA, 19 nt, Artificial Sequence
  Description of Artificial Sequence: Synthetic oligonucleotide
  Sense strand starting at position 779 of SEQ ID NO: 1562321
cuuauauuagcugaauugu

SEQ ID NO: 1738288 - RNA, 19 nt, Artificial Sequence
  Description of Artificial Sequence: Synthetic oligonucleotide
  Antisense strand to SEQ ID NO: 1738287
acaauucagcuaauauaag

SEQ ID NO: 1738289 - RNA, 19 nt, Artificial Sequence
  Description of Artificial Sequence: Synthetic oligonucleotide
  Sense strand starting at position 878 of SEQ ID NO: 1562321
guaacuucuaucgaguaug

SEQ ID NO: 1738290 - RNA, 19 nt, Artificial Sequence
  Description of Artificial Sequence: Synthetic oligonucleotide
  Antisense strand to SEQ ID NO: 1738289
cauacucgauagaaguuac

SEQ ID NO: 1738291 - RNA, 19 nt, Artificial Sequence
  Description of Artificial Sequence: Synthetic oligonucleotide
  Sense strand starting at position 889 of SEQ ID NO: 1562321
cgaguaugugucaggguua

SEQ ID NO: 1738292 - RNA, 19 nt, Artificial Sequence
  Description of Artificial Sequence: Synthetic oligonucleotide
  Antisense strand to SEQ ID NO: 1738291
uaacccugacacauacucg

SEQ ID NO: 1738293 - RNA, 19 nt, Artificial Sequence
  Description of Artificial Sequence: Synthetic oligonucleotide
  Sense strand starting at position 1043 of SEQ ID NO: 1562321
gaagacagucuuggcaaua

SEQ ID NO: 1738294 - RNA, 19 nt, Artificial Sequence
  Description of Artificial Sequence: Synthetic oligonucleotide
  Antisense strand to SEQ ID NO: 1738293
uauugccaagacugucuuc

SEQ ID NO: 1738295 - RNA, 19 nt, Artificial Sequence
  Description of Artificial Sequence: Synthetic oligonucleotide
  Sense strand starting at position 1085 of SEQ ID NO: 1562321
ggacaauguuuaucagcau

SEQ ID NO: 1738296 - RNA, 19 nt, Artificial Sequence
  Description of Artificial Sequence: Synthetic oligonucleotide
  Antisense strand to SEQ ID NO: 1738295
augcugauaaacauugucc

SEQ ID NO: 1738297 - RNA, 19 nt, Artificial Sequence
  Description of Artificial Sequence: Synthetic oligonucleotide
  Sense strand starting at position 1091 of SEQ ID NO: 1562321
uguuuaucagcauaaguag

SEQ ID NO: 1738298 - RNA, 19 nt, Artificial Sequence
  Description of Artificial Sequence: Synthetic oligonucleotide
  Antisense strand to SEQ ID NO: 1738297
cuacuuaugcugauaaaca

SEQ ID NO: 1738299 - RNA, 19 nt, Artificial Sequence
  Description of Artificial Sequence: Synthetic oligonucleotide
  Sense strand starting at position 1114 of SEQ ID NO: 1562321
ucacaaauguaguucugau

SEQ ID NO: 1738300 - RNA, 19 nt, Artificial Sequence
  Description of Artificial Sequence: Synthetic oligonucleotide
  Antisense strand to SEQ ID NO: 1738299
aucagaacuacauuuguga

SEQ ID NO: 1738301 - RNA, 19 nt, Artificial Sequence
  Description of Artificial Sequence: Synthetic oligonucleotide
  Sense strand starting at position 1177 of SEQ ID NO: 1562321
ugaugucauuccucuggau

SEQ ID NO: 1738302 - RNA, 19 nt, Artificial Sequence
  Description of Artificial Sequence: Synthetic oligonucleotide
  Antisense strand to SEQ ID NO: 1738301
auccagaggaaugacauca

SEQ ID NO: 1738303 - RNA, 19 nt, Artificial Sequence
  Description of Artificial Sequence: Synthetic oligonucleotide
  Sense strand starting at position 1302 of SEQ ID NO: 1562321
auacgaccucuuuagaguu

SEQ ID NO: 1738304 - RNA, 19 nt, Artificial Sequence
  Description of Artificial Sequence: Synthetic oligonucleotide
  Antisense strand to SEQ ID NO: 1738303
aacucuaaagaggucguau

SEQ ID NO: 1738305 - RNA, 19 nt, Artificial Sequence
  Description of Artificial Sequence: Synthetic oligonucleotide
  Sense strand starting at position 1316 of SEQ ID NO: 1562321
gaguuuguuaauggagacu

SEQ ID NO: 1738306 - RNA, 19 nt, Artificial Sequence
  Description of Artificial Sequence: Synthetic oligonucleotide
  Antisense strand to SEQ ID NO: 1738305
agucuccauuaacaaacuc

SEQ ID NO: 1738307 - RNA, 19 nt, Artificial Sequence
  Description of Artificial Sequence: Synthetic oligonucleotide
  Sense strand starting at position 1319 of SEQ ID NO: 1562321
uuuguuaauggagacugua

SEQ ID NO: 1738308 - RNA, 19 nt, Artificial Sequence
  Description of Artificial Sequence: Synthetic oligonucleotide
  Antisense strand to SEQ ID NO: 1738307
uacagucuccauuaacaaa

SEQ ID NO: 1738309 - RNA, 19 nt, Artificial Sequence
  Description of Artificial Sequence: Synthetic oligonucleotide
  Sense strand starting at position 1474 of SEQ ID NO: 1562321
ccauguacucaguaauuaa

SEQ ID NO: 1738310 - RNA, 19 nt, Artificial Sequence
  Description of Artificial Sequence: Synthetic oligonucleotide
  Antisense strand to SEQ ID NO: 1738309
uuaauuacugaguacaugg

SEQ ID NO: 1738311 - RNA, 19 nt, Artificial Sequence
  Description of Artificial Sequence: Synthetic oligonucleotide
  Sense strand starting at position 1583 of SEQ ID NO: 1562321
ccuagauucuaggcaguca

SEQ ID NO: 1738312 - RNA, 19 nt, Artificial Sequence
  Description of Artificial Sequence: Synthetic oligonucleotide
  Antisense strand to SEQ ID NO: 1738311
ugacugccuagaaucuagg

SEQ ID NO: 1738313 - RNA, 19 nt, Artificial Sequence
  Description of Artificial Sequence: Synthetic oligonucleotide
  Sense strand starting at position 1622 of SEQ ID NO: 1562321
gugaacuaaucauugacac

SEQ ID NO: 1738314 - RNA, 19 nt, Artificial Sequence
  Description of Artificial Sequence: Synthetic oligonucleotide
  Antisense strand to SEQ ID NO: 1738313
gugucaaugauuaguucac

SEQ ID NO: 1738315 - RNA, 19 nt, Artificial Sequence
  Description of Artificial Sequence: Synthetic oligonucleotide
  Sense strand starting at position 1763 of SEQ ID NO: 1562321
cuuccaugguuggcagaaa

SEQ ID NO: 1738316 - RNA, 19 nt, Artificial Sequence
  Description of Artificial Sequence: Synthetic oligonucleotide
  Antisense strand to SEQ ID NO: 1738315
uuucugccaaccauggaag

SEQ ID NO: 1738317 - RNA, 19 nt, Artificial Sequence
  Description of Artificial Sequence: Synthetic oligonucleotide
  Sense strand starting at position 1798 of SEQ ID NO: 1562321
aaacuaagccgagauguaa

SEQ ID NO: 1738318 - RNA, 19 nt, Artificial Sequence
  Description of Artificial Sequence: Synthetic oligonucleotide
  Antisense strand to SEQ ID NO: 1738317
uuacaucucggcuuaguuu

SEQ ID NO: 1738319 - RNA, 19 nt, Artificial Sequence
  Description of Artificial Sequence: Synthetic oligonucleotide
  Sense strand starting at position 1864 of SEQ ID NO: 1562321
aguccagugcuauaucuga

SEQ ID NO: 1738320 - RNA, 19 nt, Artificial Sequence
  Description of Artificial Sequence: Synthetic oligonucleotide
  Antisense strand to SEQ ID NO: 1738319
ucagauauagcacuggacu

SEQ ID NO: 1738321 - RNA, 19 nt, Artificial Sequence
  Description of Artificial Sequence: Synthetic oligonucleotide
  Sense strand starting at position 1877 of SEQ ID NO: 1562321
aucugaaaguucuuccgga

SEQ ID NO: 1738322 - RNA, 19 nt, Artificial Sequence
  Description of Artificial Sequence: Synthetic oligonucleotide
  Antisense strand to SEQ ID NO: 1738321
uccggaagaacuuucagau

SEQ ID NO: 1738323 - RNA, 19 nt, Artificial Sequence
  Description of Artificial Sequence: Synthetic oligonucleotide
  Sense strand starting at position 1878 of SEQ ID NO: 1562321
ucugaaaguucuuccggag

SEQ ID NO: 1738324 - RNA, 19 nt, Artificial Sequence
  Description of Artificial Sequence: Synthetic oligonucleotide
  Antisense strand to SEQ ID NO: 1738323
cuccggaagaacuuucaga

SEQ ID NO: 1738325 - RNA, 19 nt, Artificial Sequence
  Description of Artificial Sequence: Synthetic oligonucleotide
  Sense strand starting at position 2520 of SEQ ID NO: 1562321
guggugaaugaugggugaa

SEQ ID NO: 1738326 - RNA, 19 nt, Artificial Sequence
  Description of Artificial Sequence: Synthetic oligonucleotide
  Antisense strand to SEQ ID NO: 1738325
uucacccaucauucaccac

SEQ ID NO: 1738327 - RNA, 19 nt, Artificial Sequence
  Description of Artificial Sequence: Synthetic oligonucleotide
  Sense strand starting at position 2521 of SEQ ID NO: 1562321
uggugaaugaugggugaau

SEQ ID NO: 1738328 - RNA, 19 nt, Artificial Sequence
  Description of Artificial Sequence: Synthetic oligonucleotide
  Antisense strand to SEQ ID NO: 1738327
auucacccaucauucacca

SEQ ID NO: 1738329 - RNA, 19 nt, Artificial Sequence
  Description of Artificial Sequence: Synthetic oligonucleotide
  Sense strand starting at position 2522 of SEQ ID NO: 1562321
ggugaaugaugggugaauc

SEQ ID NO: 1738330 - RNA, 19 nt, Artificial Sequence
  Description of Artificial Sequence: Synthetic oligonucleotide
  Antisense strand to SEQ ID NO: 1738329
gauucacccaucauucacc

SEQ ID NO: 1738331 - RNA, 19 nt, Artificial Sequence
  Description of Artificial Sequence: Synthetic oligonucleotide
  Sense strand starting at position 2836 of SEQ ID NO: 1562321
gagggagacuuugccuuaa

SEQ ID NO: 1738332 - RNA, 19 nt, Artificial Sequence
  Description of Artificial Sequence: Synthetic oligonucleotide
  Antisense strand to SEQ ID NO: 1738331
uuaaggcaaagucucccuc

SEQ ID NO: 1738333 - RNA, 19 nt, Artificial Sequence
  Description of Artificial Sequence: Synthetic oligonucleotide
  Sense strand starting at position 3469 of SEQ ID NO: 1562321
uuaaauugcgguuaggaau

SEQ ID NO: 1738334 - RNA, 19 nt, Artificial Sequence
  Description of Artificial Sequence: Synthetic oligonucleotide
  Antisense strand to SEQ ID NO: 1738333
auuccuaaccgcaauuuaa

SEQ ID NO: 1738335 - RNA, 19 nt, Artificial Sequence
  Description of Artificial Sequence: Synthetic oligonucleotide
  Sense strand starting at position 3501 of SEQ ID NO: 1562321
aguaguagaagagguguua

SEQ ID NO: 1738336 - RNA, 19 nt, Artificial Sequence
  Description of Artificial Sequence: Synthetic oligonucleotide
  Antisense strand to SEQ ID NO: 1738335
uaacaccucuucuacuacu

SEQ ID NO: 1738337 - RNA, 19 nt, Artificial Sequence
  Description of Artificial Sequence: Synthetic oligonucleotide
  Sense strand starting at position 3631 of SEQ ID NO: 1562321
gggcuaaugcuccaucuga

SEQ ID NO: 1738338 - RNA, 19 nt, Artificial Sequence
  Description of Artificial Sequence: Synthetic oligonucleotide
  Antisense strand to SEQ ID NO: 1738337
ucagauggagcauuagccc

SEQ ID NO: 1738339 - RNA, 19 nt, Artificial Sequence
  Description of Artificial Sequence: Synthetic oligonucleotide
  Sense strand starting at position 3642 of SEQ ID NO: 1562321
ccaucugaucugggcuuga

SEQ ID NO: 1738340 - RNA, 19 nt, Artificial Sequence
  Description of Artificial Sequence: Synthetic oligonucleotide
  Antisense strand to SEQ ID NO: 1738339
ucaagcccagaucagaugg

SEQ ID NO: 1738341 - RNA, 19 nt, Artificial Sequence
  Description of Artificial Sequence: Synthetic oligonucleotide
  Sense strand starting at position 3647 of SEQ ID NO: 1562321
ugaucugggcuugaccaua

SEQ ID NO: 1738342 - RNA, 19 nt, Artificial Sequence
  Description of Artificial Sequence: Synthetic oligonucleotide
  Antisense strand to SEQ ID NO: 1738341
uauggucaagcccagauca

SEQ ID NO: 1738343 - RNA, 19 nt, Artificial Sequence
  Description of Artificial Sequence: Synthetic oligonucleotide
  Sense strand starting at position 3709 of SEQ ID NO: 1562321
cagggaucugaauggugca

SEQ ID NO: 1738344 - RNA, 19 nt, Artificial Sequence
  Description of Artificial Sequence: Synthetic oligonucleotide
  Antisense strand to SEQ ID NO: 1738343
ugcaccauucagaucccug

SEQ ID NO: 1738345 - RNA, 19 nt, Artificial Sequence
  Description of Artificial Sequence: Synthetic oligonucleotide
  Sense strand starting at position 51 of SEQ ID NO: 1562322
uauggugacucuguagcaa

SEQ ID NO: 1738346 - RNA, 19 nt, Artificial Sequence
  Description of Artificial Sequence: Synthetic oligonucleotide
  Antisense strand to SEQ ID NO: 1738345
uugcuacagagucaccaua

SEQ ID NO: 1738347 - RNA, 19 nt, Artificial Sequence
  Description of Artificial Sequence: Synthetic oligonucleotide
  Sense strand starting at position 83 of SEQ ID NO: 1562322
gggcaagaguagaagguau

SEQ ID NO: 1738348 - RNA, 19 nt, Artificial Sequence
  Description of Artificial Sequence: Synthetic oligonucleotide
  Antisense strand to SEQ ID NO: 1738347
auaccuucuacucuugccc

SEQ ID NO: 1738349 - RNA, 19 nt, Artificial Sequence
  Description of Artificial Sequence: Synthetic oligonucleotide
  Sense strand starting at position 109 of SEQ ID NO: 1562322
guccaagugagauaucagu

SEQ ID NO: 1738350 - RNA, 19 nt, Artificial Sequence
  Description of Artificial Sequence: Synthetic oligonucleotide
  Antisense strand to SEQ ID NO: 1738349
acugauaucucacuuggac

SEQ ID NO: 1738351 - RNA, 19 nt, Artificial Sequence
  Description of Artificial Sequence: Synthetic oligonucleotide
  Sense strand starting at position 181 of SEQ ID NO: 1562322
auacacuuugcagguagaa

SEQ ID NO: 1738352 - RNA, 19 nt, Artificial Sequence
  Description of Artificial Sequence: Synthetic oligonucleotide
  Antisense strand to SEQ ID NO: 1738351
uucuaccugcaaaguguau

SEQ ID NO: 1738353 - RNA, 19 nt, Artificial Sequence
  Description of Artificial Sequence: Synthetic oligonucleotide
  Sense strand starting at position 194 of SEQ ID NO: 1562322
guagaauugacaggcuuug

SEQ ID NO: 1738354 - RNA, 19 nt, Artificial Sequence
  Description of Artificial Sequence: Synthetic oligonucleotide
  Antisense strand to SEQ ID NO: 1738353
caaagccugucaauucuac

SEQ ID NO: 1738355 - RNA, 19 nt, Artificial Sequence
  Description of Artificial Sequence: Synthetic oligonucleotide
  Sense strand starting at position 199 of SEQ ID NO: 1562322
auugacaggcuuugcuaau

SEQ ID NO: 1738356 - RNA, 19 nt, Artificial Sequence
  Description of Artificial Sequence: Synthetic oligonucleotide
  Antisense strand to SEQ ID NO: 1738355
auuagcaaagccugucaau

SEQ ID NO: 1738357 - RNA, 19 nt, Artificial Sequence
  Description of Artificial Sequence: Synthetic oligonucleotide
  Sense strand starting at position 404 of SEQ ID NO: 1562322
aguuuaucaaucggguacu

SEQ ID NO: 1738358 - RNA, 19 nt, Artificial Sequence
  Description of Artificial Sequence: Synthetic oligonucleotide
  Antisense strand to SEQ ID NO: 1738357
aguacccgauugauaaacu

SEQ ID NO: 1738359 - RNA, 19 nt, Artificial Sequence
  Description of Artificial Sequence: Synthetic oligonucleotide
  Sense strand starting at position 407 of SEQ ID NO: 1562322
uuaucaaucggguacuugu

SEQ ID NO: 1738360 - RNA, 19 nt, Artificial Sequence
  Description of Artificial Sequence: Synthetic oligonucleotide
  Antisense strand to SEQ ID NO: 1738359
acaaguacccgauugauaa

SEQ ID NO: 1738361 - RNA, 19 nt, Artificial Sequence
  Description of Artificial Sequence: Synthetic oligonucleotide
  Sense strand starting at position 429 of SEQ ID NO: 1562322
gggcuuaucauguauuaag

SEQ ID NO: 1738362 - RNA, 19 nt, Artificial Sequence
  Description of Artificial Sequence: Synthetic oligonucleotide
  Antisense strand to SEQ ID NO: 1738361
cuuaauacaugauaagccc

SEQ ID NO: 1738363 - RNA, 19 nt, Artificial Sequence
  Description of Artificial Sequence: Synthetic oligonucleotide
  Sense strand starting at position 450 of SEQ ID NO: 1562322
cugugcauuuaccuugaca

SEQ ID NO: 1738364 - RNA, 19 nt, Artificial Sequence
  Description of Artificial Sequence: Synthetic oligonucleotide
  Antisense strand to SEQ ID NO: 1738363
ugucaagguaaaugcacag

SEQ ID NO: 1738365 - RNA, 19 nt, Artificial Sequence
  Description of Artificial Sequence: Synthetic oligonucleotide
  Sense strand starting at position 686 of SEQ ID NO: 1562322
uauaaagccgauugucuaa

SEQ ID NO: 1738366 - RNA, 19 nt, Artificial Sequence
  Description of Artificial Sequence: Synthetic oligonucleotide
  Antisense strand to SEQ ID NO: 1738365
uuagacaaucggcuuuaua

SEQ ID NO: 1738367 - RNA, 19 nt, Artificial Sequence
  Description of Artificial Sequence: Synthetic oligonucleotide
  Sense strand starting at position 688 of SEQ ID NO: 1562322
uaaagccgauugucuaaua

SEQ ID NO: 1738368 - RNA, 19 nt, Artificial Sequence
  Description of Artificial Sequence: Synthetic oligonucleotide
  Antisense strand to SEQ ID NO: 1738367
uauuagacaaucggcuuua

SEQ ID NO: 1738369 - RNA, 19 nt, Artificial Sequence
  Description of Artificial Sequence: Synthetic oligonucleotide
  Sense strand starting at position 789 of SEQ ID NO: 1562322
uucuguaagggccaaugau

SEQ ID NO: 1738370 - RNA, 19 nt, Artificial Sequence
  Description of Artificial Sequence: Synthetic oligonucleotide
  Antisense strand to SEQ ID NO: 1738369
aucauuggcccuuacagaa

SEQ ID NO: 1738371 - RNA, 19 nt, Artificial Sequence
  Description of Artificial Sequence: Synthetic oligonucleotide
  Sense strand starting at position 799 of SEQ ID NO: 1562322
gccaaugaucaauauagug

SEQ ID NO: 1738372 - RNA, 19 nt, Artificial Sequence
  Description of Artificial Sequence: Synthetic oligonucleotide
  Antisense strand to SEQ ID NO: 1738371
cacuauauugaucauuggc

SEQ ID NO: 1738373 - RNA, 19 nt, Artificial Sequence
  Description of Artificial Sequence: Synthetic oligonucleotide
  Sense strand starting at position 891 of SEQ ID NO: 1562322
ucccaaaugcccgguagaa

SEQ ID NO: 1738374 - RNA, 19 nt, Artificial Sequence
  Description of Artificial Sequence: Synthetic oligonucleotide
  Antisense strand to SEQ ID NO: 1738373
uucuaccgggcauuuggga

SEQ ID NO: 1738375 - RNA, 19 nt, Artificial Sequence
  Description of Artificial Sequence: Synthetic oligonucleotide
  Sense strand starting at position 893 of SEQ ID NO: 1562322
ccaaaugcccgguagaaug

SEQ ID NO: 1738376 - RNA, 19 nt, Artificial Sequence
  Description of Artificial Sequence: Synthetic oligonucleotide
  Antisense strand to SEQ ID NO: 1738375
cauucuaccgggcauuugg

SEQ ID NO: 1738377 - RNA, 19 nt, Artificial Sequence
  Description of Artificial Sequence: Synthetic oligonucleotide
  Sense strand starting at position 1125 of SEQ ID NO: 1562322
uggaguuggcuguagacuu

SEQ ID NO: 1738378 - RNA, 19 nt, Artificial Sequence
  Description of Artificial Sequence: Synthetic oligonucleotide
  Antisense strand to SEQ ID NO: 1738377
aagucuacagccaacucca

SEQ ID NO: 1738379 - RNA, 19 nt, Artificial Sequence
  Description of Artificial Sequence: Synthetic oligonucleotide
  Sense strand starting at position 2151 of SEQ ID NO: 1562322
guuuaaaugccugcgcaua

SEQ ID NO: 1738380 - RNA, 19 nt, Artificial Sequence
  Description of Artificial Sequence: Synthetic oligonucleotide
  Antisense strand to SEQ ID NO: 1738379
uaugcgcaggcauuuaaac

SEQ ID NO: 1738381 - RNA, 19 nt, Artificial Sequence
  Description of Artificial Sequence: Synthetic oligonucleotide
  Sense strand starting at position 2477 of SEQ ID NO: 1562322
gacaguagggucuauagca

SEQ ID NO: 1738382 - RNA, 19 nt, Artificial Sequence
  Description of Artificial Sequence: Synthetic oligonucleotide
  Antisense strand to SEQ ID NO: 1738381
ugcuauagacccuacuguc

SEQ ID NO: 1738383 - RNA, 19 nt, Artificial Sequence
  Description of Artificial Sequence: Synthetic oligonucleotide
  Sense strand starting at position 2567 of SEQ ID NO: 1562322
auaguucccguaugaagau

SEQ ID NO: 1738384 - RNA, 19 nt, Artificial Sequence
  Description of Artificial Sequence: Synthetic oligonucleotide
  Antisense strand to SEQ ID NO: 1738383
aucuucauacgggaacuau

SEQ ID NO: 1738385 - RNA, 19 nt, Artificial Sequence
  Description of Artificial Sequence: Synthetic oligonucleotide
  Sense strand starting at position 2625 of SEQ ID NO: 1562322
uagggaaguuucucaggau

SEQ ID NO: 1738386 - RNA, 19 nt, Artificial Sequence
  Description of Artificial Sequence: Synthetic oligonucleotide
  Antisense strand to SEQ ID NO: 1738385
auccugagaaacuucccua

SEQ ID NO: 1738387 - RNA, 19 nt, Artificial Sequence
  Description of Artificial Sequence: Synthetic oligonucleotide
  Sense strand starting at position 2629 of SEQ ID NO: 1562322
gaaguuucucaggauguuc

SEQ ID NO: 1738388 - RNA, 19 nt, Artificial Sequence
  Description of Artificial Sequence: Synthetic oligonucleotide
  Antisense strand to SEQ ID NO: 1738387
gaacauccugagaaacuuc

SEQ ID NO: 1738389 - RNA, 19 nt, Artificial Sequence
  Description of Artificial Sequence: Synthetic oligonucleotide
  Sense strand starting at position 2661 of SEQ ID NO: 1562322
uguccugcugugcuuagau

SEQ ID NO: 1738390 - RNA, 19 nt, Artificial Sequence
  Description of Artificial Sequence: Synthetic oligonucleotide
  Antisense strand to SEQ ID NO: 1738389
aucuaagcacagcaggaca

SEQ ID NO: 1738391 - RNA, 19 nt, Artificial Sequence
  Description of Artificial Sequence: Synthetic oligonucleotide
  Sense strand starting at position 2738 of SEQ ID NO: 1562322
ucauguucugggcacuaua

SEQ ID NO: 1738392 - RNA, 19 nt, Artificial Sequence
  Description of Artificial Sequence: Synthetic oligonucleotide
  Antisense strand to SEQ ID NO: 1738391
uauagugcccagaacauga

SEQ ID NO: 1738393 - RNA, 19 nt, Artificial Sequence
  Description of Artificial Sequence: Synthetic oligonucleotide
  Sense strand starting at position 2741 of SEQ ID NO: 1562322
uguucugggcacuauaaua

SEQ ID NO: 1738394 - RNA, 19 nt, Artificial Sequence
  Description of Artificial Sequence: Synthetic oligonucleotide
  Antisense strand to SEQ ID NO: 1738393
uauuauagugcccagaaca

SEQ ID NO: 1738395 - RNA, 19 nt, Artificial Sequence
  Description of Artificial Sequence: Synthetic oligonucleotide
  Sense strand starting at position 2769 of SEQ ID NO: 1562322
gcacuuuggcuuuacauaa

SEQ ID NO: 1738396 - RNA, 19 nt, Artificial Sequence
  Description of Artificial Sequence: Synthetic oligonucleotide
  Antisense strand to SEQ ID NO: 1738395
uuauguaaagccaaagugc

SEQ ID NO: 1738397 - RNA, 19 nt, Artificial Sequence
  Description of Artificial Sequence: Synthetic oligonucleotide
  Sense strand starting at position 2789 of SEQ ID NO: 1562322
cguuguaacuaccuaauga

SEQ ID NO: 1738398 - RNA, 19 nt, Artificial Sequence
  Description of Artificial Sequence: Synthetic oligonucleotide
  Antisense strand to SEQ ID NO: 1738397
ucauuagguaguuacaacg

SEQ ID NO: 1738399 - RNA, 19 nt, Artificial Sequence
  Description of Artificial Sequence: Synthetic oligonucleotide
  Sense strand starting at position 2805 of SEQ ID NO: 1562322
ugacauggaucucuaauug

SEQ ID NO: 1738400 - RNA, 19 nt, Artificial Sequence
  Description of Artificial Sequence: Synthetic oligonucleotide
  Antisense strand to SEQ ID NO: 1738399
caauuagagauccauguca

SEQ ID NO: 1738401 - RNA, 19 nt, Artificial Sequence
  Description of Artificial Sequence: Synthetic oligonucleotide
  Sense strand starting at position 2866 of SEQ ID NO: 1562322
aggccaguagcugaagaau

SEQ ID NO: 1738402 - RNA, 19 nt, Artificial Sequence
  Description of Artificial Sequence: Synthetic oligonucleotide
  Antisense strand to SEQ ID NO: 1738401
auucuucagcuacuggccu

SEQ ID NO: 1738403 - RNA, 19 nt, Artificial Sequence
  Description of Artificial Sequence: Synthetic oligonucleotide
  Sense strand starting at position 2931 of SEQ ID NO: 1562322
ucugaaauacugcacugua

SEQ ID NO: 1738404 - RNA, 19 nt, Artificial Sequence
  Description of Artificial Sequence: Synthetic oligonucleotide
  Antisense strand to SEQ ID NO: 1738403
uacagugcaguauuucaga

SEQ ID NO: 1738405 - RNA, 19 nt, Artificial Sequence
  Description of Artificial Sequence: Synthetic oligonucleotide
  Sense strand starting at position 3022 of SEQ ID NO: 1562322
gcuucugacacguaaacag

SEQ ID NO: 1738406 - RNA, 19 nt, Artificial Sequence
  Description of Artificial Sequence: Synthetic oligonucleotide
  Antisense strand to SEQ ID NO: 1738405
cuguuuacgugucagaagc

SEQ ID NO: 1738407 - RNA, 19 nt, Artificial Sequence
  Description of Artificial Sequence: Synthetic oligonucleotide
  Sense strand starting at position 3080 of SEQ ID NO: 1562322
aguucuaguugauuccuaa

SEQ ID NO: 1738408 - RNA, 19 nt, Artificial Sequence
  Description of Artificial Sequence: Synthetic oligonucleotide
  Antisense strand to SEQ ID NO: 1738407
uuaggaaucaacuagaacu

SEQ ID NO: 1738409 - RNA, 19 nt, Artificial Sequence
  Description of Artificial Sequence: Synthetic oligonucleotide
  Sense strand starting at position 3083 of SEQ ID NO: 1562322
ucuaguugauuccuaaagu

SEQ ID NO: 1738410 - RNA, 19 nt, Artificial Sequence
  Description of Artificial Sequence: Synthetic oligonucleotide
  Antisense strand to SEQ ID NO: 1738409
acuuuaggaaucaacuaga

SEQ ID NO: 1738411 - RNA, 19 nt, Artificial Sequence
  Description of Artificial Sequence: Synthetic oligonucleotide
  Sense strand starting at position 3106 of SEQ ID NO: 1562322
gagagcgugcaugaugaua

SEQ ID NO: 1738412 - RNA, 19 nt, Artificial Sequence
  Description of Artificial Sequence: Synthetic oligonucleotide
  Antisense strand to SEQ ID NO: 1738411
uaucaucaugcacgcucuc

SEQ ID NO: 1738413 - RNA, 19 nt, Artificial Sequence
  Description of Artificial Sequence: Synthetic oligonucleotide
  Sense strand starting at position 3125 of SEQ ID NO: 1562322
gggacuguuuacuuagcaa

SEQ ID NO: 1738414 - RNA, 19 nt, Artificial Sequence
  Description of Artificial Sequence: Synthetic oligonucleotide
  Antisense strand to SEQ ID NO: 1738413
uugcuaaguaaacaguccc

SEQ ID NO: 1738415 - RNA, 19 nt, Artificial Sequence
  Description of Artificial Sequence: Synthetic oligonucleotide
  Sense strand starting at position 3128 of SEQ ID NO: 1562322
acuguuuacuuagcaaaga

SEQ ID NO: 1738416 - RNA, 19 nt, Artificial Sequence
  Description of Artificial Sequence: Synthetic oligonucleotide
  Antisense strand to SEQ ID NO: 1738415
ucuuugcuaaguaaacagu

SEQ ID NO: 1738417 - RNA, 19 nt, Artificial Sequence
  Description of Artificial Sequence: Synthetic oligonucleotide
  Sense strand starting at position 3181 of SEQ ID NO: 1562322
cagggaagccugugucaug

SEQ ID NO: 1738418 - RNA, 19 nt, Artificial Sequence
  Description of Artificial Sequence: Synthetic oligonucleotide
  Antisense strand to SEQ ID NO: 1738417
caugacacaggcuucccug

SEQ ID NO: 1738419 - RNA, 19 nt, Artificial Sequence
  Description of Artificial Sequence: Synthetic oligonucleotide
  Sense strand starting at position 3924 of SEQ ID NO: 1562322
agcgaucacgcugaaauau

SEQ ID NO: 1738420 - RNA, 19 nt, Artificial Sequence
  Description of Artificial Sequence: Synthetic oligonucleotide
  Antisense strand to SEQ ID NO: 1738419
auauuucagcgugaucgcu

SEQ ID NO: 1738421 - RNA, 19 nt, Artificial Sequence
  Description of Artificial Sequence: Synthetic oligonucleotide
  Sense strand starting at position 3962 of SEQ ID NO: 1562322
caaggacauccgcgaagua

SEQ ID NO: 1738422 - RNA, 19 nt, Artificial Sequence
  Description of Artificial Sequence: Synthetic oligonucleotide
  Antisense strand to SEQ ID NO: 1738421
uacuucgcggauguccuug

SEQ ID NO: 1738423 - RNA, 19 nt, Artificial Sequence
  Description of Artificial Sequence: Synthetic oligonucleotide
  Sense strand starting at position 3963 of SEQ ID NO: 1562322
aaggacauccgcgaaguaa

SEQ ID NO: 1738424 - RNA, 19 nt, Artificial Sequence
  Description of Artificial Sequence: Synthetic oligonucleotide
  Antisense strand to SEQ ID NO: 1738423
uuacuucgcggauguccuu

SEQ ID NO: 1738425 - RNA, 19 nt, Artificial Sequence
  Description of Artificial Sequence: Synthetic oligonucleotide
  Sense strand starting at position 55 of SEQ ID NO: 1562323
ggaaauauuuaauagugac

SEQ ID NO: 1738426 - RNA, 19 nt, Artificial Sequence
  Description of Artificial Sequence: Synthetic oligonucleotide
  Antisense strand to SEQ ID NO: 1738425
gucacuauuaaauauuucc

SEQ ID NO: 1738427 - RNA, 19 nt, Artificial Sequence
  Description of Artificial Sequence: Synthetic oligonucleotide
  Sense strand starting at position 155 of SEQ ID NO: 1562323
cuuuauacagauggguaaa

SEQ ID NO: 1738428 - RNA, 19 nt, Artificial Sequence
  Description of Artificial Sequence: Synthetic oligonucleotide
  Antisense strand to SEQ ID NO: 1738427
uuuacccaucuguauaaag

SEQ ID NO: 1738429 - RNA, 19 nt, Artificial Sequence
  Description of Artificial Sequence: Synthetic oligonucleotide
  Sense strand starting at position 179 of SEQ ID NO: 1562323
cacaguaagcuugagauau

SEQ ID NO: 1738430 - RNA, 19 nt, Artificial Sequence
  Description of Artificial Sequence: Synthetic oligonucleotide
  Antisense strand to SEQ ID NO: 1738429
auaucucaagcuuacugug

SEQ ID NO: 1738431 - RNA, 19 nt, Artificial Sequence
  Description of Artificial Sequence: Synthetic oligonucleotide
  Sense strand starting at position 183 of SEQ ID NO: 1562323
guaagcuugagauaugcaa

SEQ ID NO: 1738432 - RNA, 19 nt, Artificial Sequence
  Description of Artificial Sequence: Synthetic oligonucleotide
  Antisense strand to SEQ ID NO: 1738431
uugcauaucucaagcuuac

SEQ ID NO: 1738433 - RNA, 19 nt, Artificial Sequence
  Description of Artificial Sequence: Synthetic oligonucleotide
  Sense strand starting at position 297 of SEQ ID NO: 1562323
aggaaugacugucuacaua

SEQ ID NO: 1738434 - RNA, 19 nt, Artificial Sequence
  Description of Artificial Sequence: Synthetic oligonucleotide
  Antisense strand to SEQ ID NO: 1738433
uauguagacagucauuccu

SEQ ID NO: 1738435 - RNA, 19 nt, Artificial Sequence
  Description of Artificial Sequence: Synthetic oligonucleotide
  Sense strand starting at position 607 of SEQ ID NO: 1562323
aagagauguuuggcuuuga

SEQ ID NO: 1738436 - RNA, 19 nt, Artificial Sequence
  Description of Artificial Sequence: Synthetic oligonucleotide
  Antisense strand to SEQ ID NO: 1738435
ucaaagccaaacaucucuu

SEQ ID NO: 1738437 - RNA, 19 nt, Artificial Sequence
  Description of Artificial Sequence: Synthetic oligonucleotide
  Sense strand starting at position 608 of SEQ ID NO: 1562323
agagauguuuggcuuugaa

SEQ ID NO: 1738438 - RNA, 19 nt, Artificial Sequence
  Description of Artificial Sequence: Synthetic oligonucleotide
  Antisense strand to SEQ ID NO: 1738437
uucaaagccaaacaucucu

SEQ ID NO: 1738439 - RNA, 19 nt, Artificial Sequence
  Description of Artificial Sequence: Synthetic oligonucleotide
  Sense strand starting at position 622 of SEQ ID NO: 1562323
uugaacacugcgggaauua

SEQ ID NO: 1738440 - RNA, 19 nt, Artificial Sequence
  Description of Artificial Sequence: Synthetic oligonucleotide
  Antisense strand to SEQ ID NO: 1738439
uaauucccgcaguguucaa

SEQ ID NO: 1738441 - RNA, 19 nt, Artificial Sequence
  Description of Artificial Sequence: Synthetic oligonucleotide
  Sense strand starting at position 900 of SEQ ID NO: 1562323
ugccaauaugugucugugu

SEQ ID NO: 1738442 - RNA, 19 nt, Artificial Sequence
  Description of Artificial Sequence: Synthetic oligonucleotide
  Antisense strand to SEQ ID NO: 1738441
acacagacacauauuggca

SEQ ID NO: 1738443 - RNA, 19 nt, Artificial Sequence
  Description of Artificial Sequence: Synthetic oligonucleotide
  Sense strand starting at position 944 of SEQ ID NO: 1562323
gcaggagaauguucccaag

SEQ ID NO: 1738444 - RNA, 19 nt, Artificial Sequence
  Description of Artificial Sequence: Synthetic oligonucleotide
  Antisense strand to SEQ ID NO: 1738443
cuugggaacauucuccugc

SEQ ID NO: 1738445 - RNA, 19 nt, Artificial Sequence
  Description of Artificial Sequence: Synthetic oligonucleotide
  Sense strand starting at position 946 of SEQ ID NO: 1562323
aggagaauguucccaaguc

SEQ ID NO: 1738446 - RNA, 19 nt, Artificial Sequence
  Description of Artificial Sequence: Synthetic oligonucleotide
  Antisense strand to SEQ ID NO: 1738445
gacuugggaacauucuccu

SEQ ID NO: 1738447 - RNA, 19 nt, Artificial Sequence
  Description of Artificial Sequence: Synthetic oligonucleotide
  Sense strand starting at position 1562 of SEQ ID NO: 1562323
gacggaguauuugagagaa

SEQ ID NO: 1738448 - RNA, 19 nt, Artificial Sequence
  Description of Artificial Sequence: Synthetic oligonucleotide
  Antisense strand to SEQ ID NO: 1738447
uucucucaaauacuccguc

SEQ ID NO: 1738449 - RNA, 19 nt, Artificial Sequence
  Description of Artificial Sequence: Synthetic oligonucleotide
  Sense strand starting at position 1596 of SEQ ID NO: 1562323
uacaguguuccuuagaaug

SEQ ID NO: 1738450 - RNA, 19 nt, Artificial Sequence
  Description of Artificial Sequence: Synthetic oligonucleotide
  Antisense strand to SEQ ID NO: 1738449
cauucuaaggaacacugua

SEQ ID NO: 1738451 - RNA, 19 nt, Artificial Sequence
  Description of Artificial Sequence: Synthetic oligonucleotide
  Sense strand starting at position 1901 of SEQ ID NO: 1562323
cugauuguuguagauuacu

SEQ ID NO: 1738452 - RNA, 19 nt, Artificial Sequence
  Description of Artificial Sequence: Synthetic oligonucleotide
  Antisense strand to SEQ ID NO: 1738451
aguaaucuacaacaaucag

SEQ ID NO: 1738453 - RNA, 19 nt, Artificial Sequence
  Description of Artificial Sequence: Synthetic oligonucleotide
  Sense strand starting at position 2027 of SEQ ID NO: 1562323
ucugcuauugaguaacuca

SEQ ID NO: 1738454 - RNA, 19 nt, Artificial Sequence
  Description of Artificial Sequence: Synthetic oligonucleotide
  Antisense strand to SEQ ID NO: 1738453
ugaguuacucaauagcaga

SEQ ID NO: 1738455 - RNA, 19 nt, Artificial Sequence
  Description of Artificial Sequence: Synthetic oligonucleotide
  Sense strand starting at position 2092 of SEQ ID NO: 1562323
gauucugaucaacgagcaa

SEQ ID NO: 1738456 - RNA, 19 nt, Artificial Sequence
  Description of Artificial Sequence: Synthetic oligonucleotide
  Antisense strand to SEQ ID NO: 1738455
uugcucguugaucagaauc

SEQ ID NO: 1738457 - RNA, 19 nt, Artificial Sequence
  Description of Artificial Sequence: Synthetic oligonucleotide
  Sense strand starting at position 2226 of SEQ ID NO: 1562323
uugcuacaaguuggagaua

SEQ ID NO: 1738458 - RNA, 19 nt, Artificial Sequence
  Description of Artificial Sequence: Synthetic oligonucleotide
  Antisense strand to SEQ ID NO: 1738457
uaucuccaacuuguagcaa

SEQ ID NO: 1738459 - RNA, 19 nt, Artificial Sequence
  Description of Artificial Sequence: Synthetic oligonucleotide
  Sense strand starting at position 2303 of SEQ ID NO: 1562323
ucaagacacuugcuugaca

SEQ ID NO: 1738460 - RNA, 19 nt, Artificial Sequence
  Description of Artificial Sequence: Synthetic oligonucleotide
  Antisense strand to SEQ ID NO: 1738459
ugucaagcaagugucuuga

SEQ ID NO: 1738461 - RNA, 19 nt, Artificial Sequence
  Description of Artificial Sequence: Synthetic oligonucleotide
  Sense strand starting at position 2344 of SEQ ID NO: 1562323
agaguucugcuggaaguga

SEQ ID NO: 1738462 - RNA, 19 nt, Artificial Sequence
  Description of Artificial Sequence: Synthetic oligonucleotide
  Antisense strand to SEQ ID NO: 1738461
ucacuuccagcagaacucu

SEQ ID NO: 1738463 - RNA, 19 nt, Artificial Sequence
  Description of Artificial Sequence: Synthetic oligonucleotide
  Sense strand starting at position 2424 of SEQ ID NO: 1562323
aggaaugauucgcugauua

SEQ ID NO: 1738464 - RNA, 19 nt, Artificial Sequence
  Description of Artificial Sequence: Synthetic oligonucleotide
  Antisense strand to SEQ ID NO: 1738463
uaaucagcgaaucauuccu

SEQ ID NO: 1738465 - RNA, 19 nt, Artificial Sequence
  Description of Artificial Sequence: Synthetic oligonucleotide
  Sense strand starting at position 2426 of SEQ ID NO: 1562323
gaaugauucgcugauuaag

SEQ ID NO: 1738466 - RNA, 19 nt, Artificial Sequence
  Description of Artificial Sequence: Synthetic oligonucleotide
  Antisense strand to SEQ ID NO: 1738465
cuuaaucagcgaaucauuc

SEQ ID NO: 1738467 - RNA, 19 nt, Artificial Sequence
  Description of Artificial Sequence: Synthetic oligonucleotide
  Sense strand starting at position 2428 of SEQ ID NO: 1562323
augauucgcugauuaagag

SEQ ID NO: 1738468 - RNA, 19 nt, Artificial Sequence
  Description of Artificial Sequence: Synthetic oligonucleotide
  Antisense strand to SEQ ID NO: 1738467
cucuuaaucagcgaaucau

SEQ ID NO: 1738469 - RNA, 19 nt, Artificial Sequence
  Description of Artificial Sequence: Synthetic oligonucleotide
  Sense strand starting at position 2429 of SEQ ID NO: 1562323
ugauucgcugauuaagaga

SEQ ID NO: 1738470 - RNA, 19 nt, Artificial Sequence
  Description of Artificial Sequence: Synthetic oligonucleotide
  Antisense strand to SEQ ID NO: 1738469
ucucuuaaucagcgaauca

SEQ ID NO: 1738471 - RNA, 19 nt, Artificial Sequence
  Description of Artificial Sequence: Synthetic oligonucleotide
  Sense strand starting at position 2472 of SEQ ID NO: 1562323
augaaaucucuugguggga

SEQ ID NO: 1738472 - RNA, 19 nt, Artificial Sequence
  Description of Artificial Sequence: Synthetic oligonucleotide
  Antisense strand to SEQ ID NO: 1738471
ucccaccaagagauuucau

SEQ ID NO: 1738473 - RNA, 19 nt, Artificial Sequence
  Description of Artificial Sequence: Synthetic oligonucleotide
  Sense strand starting at position 2473 of SEQ ID NO: 1562323
ugaaaucucuuggugggaa

SEQ ID NO: 1738474 - RNA, 19 nt, Artificial Sequence
  Description of Artificial Sequence: Synthetic oligonucleotide
  Antisense strand to SEQ ID NO: 1738473
uucccaccaagagauuuca

SEQ ID NO: 1738475 - RNA, 19 nt, Artificial Sequence
  Description of Artificial Sequence: Synthetic oligonucleotide
  Sense strand starting at position 2777 of SEQ ID NO: 1562323
aggaaucugguguggacaa

SEQ ID NO: 1738476 - RNA, 19 nt, Artificial Sequence
  Description of Artificial Sequence: Synthetic oligonucleotide
  Antisense strand to SEQ ID NO: 1738475
uuguccacaccagauuccu

SEQ ID NO: 1738477 - RNA, 19 nt, Artificial Sequence
  Description of Artificial Sequence: Synthetic oligonucleotide
  Sense strand starting at position 2922 of SEQ ID NO: 1562323
guuauugauggaggauuga

SEQ ID NO: 1738478 - RNA, 19 nt, Artificial Sequence
  Description of Artificial Sequence: Synthetic oligonucleotide
  Antisense strand to SEQ ID NO: 1738477
ucaauccuccaucaauaac

SEQ ID NO: 1738479 - RNA, 19 nt, Artificial Sequence
  Description of Artificial Sequence: Synthetic oligonucleotide
  Sense strand starting at position 3035 of SEQ ID NO: 1562323
auccucuauccuuagaggu

SEQ ID NO: 1738480 - RNA, 19 nt, Artificial Sequence
  Description of Artificial Sequence: Synthetic oligonucleotide
  Antisense strand to SEQ ID NO: 1738479
accucuaaggauagaggau

SEQ ID NO: 1738481 - RNA, 19 nt, Artificial Sequence
  Description of Artificial Sequence: Synthetic oligonucleotide
  Sense strand starting at position 3078 of SEQ ID NO: 1562323
uaucuaugccaggaaaguu

SEQ ID NO: 1738482 - RNA, 19 nt, Artificial Sequence
  Description of Artificial Sequence: Synthetic oligonucleotide
  Antisense strand to SEQ ID NO: 1738481
aacuuuccuggcauagaua

SEQ ID NO: 1738483 - RNA, 19 nt, Artificial Sequence
  Description of Artificial Sequence: Synthetic oligonucleotide
  Sense strand starting at position 3116 of SEQ ID NO: 1562323
uuuaccugacaacgaaaua

SEQ ID NO: 1738484 - RNA, 19 nt, Artificial Sequence
  Description of Artificial Sequence: Synthetic oligonucleotide
  Antisense strand to SEQ ID NO: 1738483
uauuucguugucagguaaa

SEQ ID NO: 1738485 - RNA, 19 nt, Artificial Sequence
  Description of Artificial Sequence: Synthetic oligonucleotide
  Sense strand starting at position 3347 of SEQ ID NO: 1562323
auaacuuugucuuugagau

SEQ ID NO: 1738486 - RNA, 19 nt, Artificial Sequence
  Description of Artificial Sequence: Synthetic oligonucleotide
  Antisense strand to SEQ ID NO: 1738485
aucucaaagacaaaguuau

SEQ ID NO: 1738487 - RNA, 19 nt, Artificial Sequence
  Description of Artificial Sequence: Synthetic oligonucleotide
  Sense strand starting at position 3348 of SEQ ID NO: 1562323
uaacuuugucuuugagaug

SEQ ID NO: 1738488 - RNA, 19 nt, Artificial Sequence
  Description of Artificial Sequence: Synthetic oligonucleotide
  Antisense strand to SEQ ID NO: 1738487
caucucaaagacaaaguua

SEQ ID NO: 1738489 - RNA, 19 nt, Artificial Sequence
  Description of Artificial Sequence: Synthetic oligonucleotide
  Sense strand starting at position 3403 of SEQ ID NO: 1562323
ggcuuugauuucuuggcau

SEQ ID NO: 1738490 - RNA, 19 nt, Artificial Sequence
  Description of Artificial Sequence: Synthetic oligonucleotide
  Antisense strand to SEQ ID NO: 1738489
augccaagaaaucaaagcc

SEQ ID NO: 1738491 - RNA, 19 nt, Artificial Sequence
  Description of Artificial Sequence: Synthetic oligonucleotide
  Sense strand starting at position 3405 of SEQ ID NO: 1562323
cuuugauuucuuggcauuc

SEQ ID NO: 1738492 - RNA, 19 nt, Artificial Sequence
  Description of Artificial Sequence: Synthetic oligonucleotide
  Antisense strand to SEQ ID NO: 1738491
gaaugccaagaaaucaaag

SEQ ID NO: 1738493 - RNA, 19 nt, Artificial Sequence
  Description of Artificial Sequence: Synthetic oligonucleotide
  Sense strand starting at position 3415 of SEQ ID NO: 1562323
uuggcauucguuguguauu

SEQ ID NO: 1738494 - RNA, 19 nt, Artificial Sequence
  Description of Artificial Sequence: Synthetic oligonucleotide
  Antisense strand to SEQ ID NO: 1738493
aauacacaacgaaugccaa

SEQ ID NO: 1738495 - RNA, 19 nt, Artificial Sequence
  Description of Artificial Sequence: Synthetic oligonucleotide
  Sense strand starting at position 3500 of SEQ ID NO: 1562323
gggauauuacacugugaca

SEQ ID NO: 1738496 - RNA, 19 nt, Artificial Sequence
  Description of Artificial Sequence: Synthetic oligonucleotide
  Antisense strand to SEQ ID NO: 1738495
ugucacaguguaauauccc

SEQ ID NO: 1738497 - RNA, 19 nt, Artificial Sequence
  Description of Artificial Sequence: Synthetic oligonucleotide
  Sense strand starting at position 3502 of SEQ ID NO: 1562323
gauauuacacugugacagu

SEQ ID NO: 1738498 - RNA, 19 nt, Artificial Sequence
  Description of Artificial Sequence: Synthetic oligonucleotide
  Antisense strand to SEQ ID NO: 1738497
acugucacaguguaauauc

SEQ ID NO: 1738499 - RNA, 19 nt, Artificial Sequence
  Description of Artificial Sequence: Synthetic oligonucleotide
  Sense strand starting at position 3523 of SEQ ID NO: 1562323
augaaauggacguaacguu

SEQ ID NO: 1738500 - RNA, 19 nt, Artificial Sequence
  Description of Artificial Sequence: Synthetic oligonucleotide
  Antisense strand to SEQ ID NO: 1738499
aacguuacguccauuucau

SEQ ID NO: 1738501 - RNA, 19 nt, Artificial Sequence
  Description of Artificial Sequence: Synthetic oligonucleotide
  Sense strand starting at position 3672 of SEQ ID NO: 1562323
caguguuuccuggaccaga

SEQ ID NO: 1738502 - RNA, 19 nt, Artificial Sequence
  Description of Artificial Sequence: Synthetic oligonucleotide
  Antisense strand to SEQ ID NO: 1738501
ucugguccaggaaacacug

SEQ ID NO: 1738503 - RNA, 19 nt, Artificial Sequence
  Description of Artificial Sequence: Synthetic oligonucleotide
  Sense strand starting at position 3757 of SEQ ID NO: 1562323
aucaaauaguuauuggacu

SEQ ID NO: 1738504 - RNA, 19 nt, Artificial Sequence
  Description of Artificial Sequence: Synthetic oligonucleotide
  Antisense strand to SEQ ID NO: 1738503
aguccaauaacuauuugau

SEQ ID NO: 1738505 - RNA, 19 nt, Artificial Sequence
  Description of Artificial Sequence: Synthetic oligonucleotide
  Sense strand starting at position 272 of SEQ ID NO: 1562324
ugguuugaacacugacaca

SEQ ID NO: 1738506 - RNA, 19 nt, Artificial Sequence
  Description of Artificial Sequence: Synthetic oligonucleotide
  Antisense strand to SEQ ID NO: 1738505
ugugucaguguucaaacca

SEQ ID NO: 1738507 - RNA, 19 nt, Artificial Sequence
  Description of Artificial Sequence: Synthetic oligonucleotide
  Sense strand starting at position 481 of SEQ ID NO: 1562324
ugagggauggugugagcaa

SEQ ID NO: 1738508 - RNA, 19 nt, Artificial Sequence
  Description of Artificial Sequence: Synthetic oligonucleotide
  Antisense strand to SEQ ID NO: 1738507
uugcucacaccaucccuca

SEQ ID NO: 1738509 - RNA, 19 nt, Artificial Sequence
  Description of Artificial Sequence: Synthetic oligonucleotide
  Sense strand starting at position 691 of SEQ ID NO: 1562324
ccgaauggccucugagauc

SEQ ID NO: 1738510 - RNA, 19 nt, Artificial Sequence
  Description of Artificial Sequence: Synthetic oligonucleotide
  Antisense strand to SEQ ID NO: 1738509
gaucucagaggccauucgg

SEQ ID NO: 1738511 - RNA, 19 nt, Artificial Sequence
  Description of Artificial Sequence: Synthetic oligonucleotide
  Sense strand starting at position 870 of SEQ ID NO: 1562324
gcaaguggaccagagguuu

SEQ ID NO: 1738512 - RNA, 19 nt, Artificial Sequence
  Description of Artificial Sequence: Synthetic oligonucleotide
  Antisense strand to SEQ ID NO: 1738511
aaaccucugguccacuugc

SEQ ID NO: 1738513 - RNA, 19 nt, Artificial Sequence
  Description of Artificial Sequence: Synthetic oligonucleotide
  Sense strand starting at position 883 of SEQ ID NO: 1562324
agguuuauuggaggucuaa

SEQ ID NO: 1738514 - RNA, 19 nt, Artificial Sequence
  Description of Artificial Sequence: Synthetic oligonucleotide
  Antisense strand to SEQ ID NO: 1738513
uuagaccuccaauaaaccu

SEQ ID NO: 1738515 - RNA, 19 nt, Artificial Sequence
  Description of Artificial Sequence: Synthetic oligonucleotide
  Sense strand starting at position 897 of SEQ ID NO: 1562324
ucuaaauauuuauggagag

SEQ ID NO: 1738516 - RNA, 19 nt, Artificial Sequence
  Description of Artificial Sequence: Synthetic oligonucleotide
  Antisense strand to SEQ ID NO: 1738515
cucuccauaaauauuuaga

SEQ ID NO: 1738517 - RNA, 19 nt, Artificial Sequence
  Description of Artificial Sequence: Synthetic oligonucleotide
  Sense strand starting at position 911 of SEQ ID NO: 1562324
gagagcaaugauggcuaau

SEQ ID NO: 1738518 - RNA, 19 nt, Artificial Sequence
  Description of Artificial Sequence: Synthetic oligonucleotide
  Antisense strand to SEQ ID NO: 1738517
auuagccaucauugcucuc

SEQ ID NO: 1738519 - RNA, 19 nt, Artificial Sequence
  Description of Artificial Sequence: Synthetic oligonucleotide
  Sense strand starting at position 957 of SEQ ID NO: 1562324
aaacgugugcuauaaggau

SEQ ID NO: 1738520 - RNA, 19 nt, Artificial Sequence
  Description of Artificial Sequence: Synthetic oligonucleotide
  Antisense strand to SEQ ID NO: 1738519
auccuuauagcacacguuu

SEQ ID NO: 1738521 - RNA, 19 nt, Artificial Sequence
  Description of Artificial Sequence: Synthetic oligonucleotide
  Sense strand starting at position 976 of SEQ ID NO: 1562324
uugcuaauuuaagaaguga

SEQ ID NO: 1738522 - RNA, 19 nt, Artificial Sequence
  Description of Artificial Sequence: Synthetic oligonucleotide
  Antisense strand to SEQ ID NO: 1738521
ucacuucuuaaauuagcaa

SEQ ID NO: 1738523 - RNA, 19 nt, Artificial Sequence
  Description of Artificial Sequence: Synthetic oligonucleotide
  Sense strand starting at position 984 of SEQ ID NO: 1562324
uuaagaagugaguguuaau

SEQ ID NO: 1738524 - RNA, 19 nt, Artificial Sequence
  Description of Artificial Sequence: Synthetic oligonucleotide
  Antisense strand to SEQ ID NO: 1738523
auuaacacucacuucuuaa

SEQ ID NO: 1738525 - RNA, 19 nt, Artificial Sequence
  Description of Artificial Sequence: Synthetic oligonucleotide
  Sense strand starting at position 1213 of SEQ ID NO: 1562324
gcuguuuguauaggaagga

SEQ ID NO: 1738526 - RNA, 19 nt, Artificial Sequence
  Description of Artificial Sequence: Synthetic oligonucleotide
  Antisense strand to SEQ ID NO: 1738525
uccuuccuauacaaacagc

SEQ ID NO: 1738527 - RNA, 19 nt, Artificial Sequence
  Description of Artificial Sequence: Synthetic oligonucleotide
  Sense strand starting at position 1440 of SEQ ID NO: 1562324
agauguguuagaggaucag

SEQ ID NO: 1738528 - RNA, 19 nt, Artificial Sequence
  Description of Artificial Sequence: Synthetic oligonucleotide
  Antisense strand to SEQ ID NO: 1738527
cugauccucuaacacaucu

SEQ ID NO: 1738529 - RNA, 19 nt, Artificial Sequence
  Description of Artificial Sequence: Synthetic oligonucleotide
  Sense strand starting at position 1444 of SEQ ID NO: 1562324
guguuagaggaucaguacu

SEQ ID NO: 1738530 - RNA, 19 nt, Artificial Sequence
  Description of Artificial Sequence: Synthetic oligonucleotide
  Antisense strand to SEQ ID NO: 1738529
aguacugauccucuaacac

SEQ ID NO: 1738531 - RNA, 19 nt, Artificial Sequence
  Description of Artificial Sequence: Synthetic oligonucleotide
  Sense strand starting at position 1595 of SEQ ID NO: 1562324
ggaugucuuguguggagga

SEQ ID NO: 1738532 - RNA, 19 nt, Artificial Sequence
  Description of Artificial Sequence: Synthetic oligonucleotide
  Antisense strand to SEQ ID NO: 1738531
uccuccacacaagacaucc

SEQ ID NO: 1738533 - RNA, 19 nt, Artificial Sequence
  Description of Artificial Sequence: Synthetic oligonucleotide
  Sense strand starting at position 1597 of SEQ ID NO: 1562324
augucuuguguggaggaca

SEQ ID NO: 1738534 - RNA, 19 nt, Artificial Sequence
  Description of Artificial Sequence: Synthetic oligonucleotide
  Antisense strand to SEQ ID NO: 1738533
uguccuccacacaagacau

SEQ ID NO: 1738535 - RNA, 19 nt, Artificial Sequence
  Description of Artificial Sequence: Synthetic oligonucleotide
  Sense strand starting at position 1659 of SEQ ID NO: 1562324
uucucauagcuggaaacgu

SEQ ID NO: 1738536 - RNA, 19 nt, Artificial Sequence
  Description of Artificial Sequence: Synthetic oligonucleotide
  Antisense strand to SEQ ID NO: 1738535
acguuuccagcuaugagaa

SEQ ID NO: 1738537 - RNA, 19 nt, Artificial Sequence
  Description of Artificial Sequence: Synthetic oligonucleotide
  Sense strand starting at position 1676 of SEQ ID NO: 1562324
gugucaaugugcaucguga

SEQ ID NO: 1738538 - RNA, 19 nt, Artificial Sequence
  Description of Artificial Sequence: Synthetic oligonucleotide
  Antisense strand to SEQ ID NO: 1738537
ucacgaugcacauugacac

SEQ ID NO: 1738539 - RNA, 19 nt, Artificial Sequence
  Description of Artificial Sequence: Synthetic oligonucleotide
  Sense strand starting at position 1691 of SEQ ID NO: 1562324
gugacucucccaggaaaug

SEQ ID NO: 1738540 - RNA, 19 nt, Artificial Sequence
  Description of Artificial Sequence: Synthetic oligonucleotide
  Antisense strand to SEQ ID NO: 1738539
cauuuccugggagagucac

SEQ ID NO: 1738541 - RNA, 19 nt, Artificial Sequence
  Description of Artificial Sequence: Synthetic oligonucleotide
  Sense strand starting at position 1787 of SEQ ID NO: 1562324
augaaaucacuuuggcaca

SEQ ID NO: 1738542 - RNA, 19 nt, Artificial Sequence
  Description of Artificial Sequence: Synthetic oligonucleotide
  Antisense strand to SEQ ID NO: 1738541
ugugccaaagugauuucau

SEQ ID NO: 1738543 - RNA, 19 nt, Artificial Sequence
  Description of Artificial Sequence: Synthetic oligonucleotide
  Sense strand starting at position 1813 of SEQ ID NO: 1562324
ggacuuggcaauggugaga

SEQ ID NO: 1738544 - RNA, 19 nt, Artificial Sequence
  Description of Artificial Sequence: Synthetic oligonucleotide
  Antisense strand to SEQ ID NO: 1738543
ucucaccauugccaagucc

SEQ ID NO: 1738545 - RNA, 19 nt, Artificial Sequence
  Description of Artificial Sequence: Synthetic oligonucleotide
  Sense strand starting at position 1836 of SEQ ID NO: 1562324
guggguugcuguauuaguu

SEQ ID NO: 1738546 - RNA, 19 nt, Artificial Sequence
  Description of Artificial Sequence: Synthetic oligonucleotide
  Antisense strand to SEQ ID NO: 1738545
aacuaauacagcaacccac

SEQ ID NO: 1738547 - RNA, 19 nt, Artificial Sequence
  Description of Artificial Sequence: Synthetic oligonucleotide
  Sense strand starting at position 2089 of SEQ ID NO: 1562324
augagaauagcauggugga

SEQ ID NO: 1738548 - RNA, 19 nt, Artificial Sequence
  Description of Artificial Sequence: Synthetic oligonucleotide
  Antisense strand to SEQ ID NO: 1738547
uccaccaugcuauucucau

SEQ ID NO: 1738549 - RNA, 19 nt, Artificial Sequence
  Description of Artificial Sequence: Synthetic oligonucleotide
  Sense strand starting at position 2580 of SEQ ID NO: 1562324
acgacagagcgguaaagaa

SEQ ID NO: 1738550 - RNA, 19 nt, Artificial Sequence
  Description of Artificial Sequence: Synthetic oligonucleotide
  Antisense strand to SEQ ID NO: 1738549
uucuuuaccgcucugucgu

SEQ ID NO: 1738551 - RNA, 19 nt, Artificial Sequence
  Description of Artificial Sequence: Synthetic oligonucleotide
  Sense strand starting at position 2611 of SEQ ID NO: 1562324
gugaaaggcaauugugaaa

SEQ ID NO: 1738552 - RNA, 19 nt, Artificial Sequence
  Description of Artificial Sequence: Synthetic oligonucleotide
  Antisense strand to SEQ ID NO: 1738551
uuucacaauugccuuucac

SEQ ID NO: 1738553 - RNA, 19 nt, Artificial Sequence
  Description of Artificial Sequence: Synthetic oligonucleotide
  Sense strand starting at position 2618 of SEQ ID NO: 1562324
gcaauugugaaaugcuaga

SEQ ID NO: 1738554 - RNA, 19 nt, Artificial Sequence
  Description of Artificial Sequence: Synthetic oligonucleotide
  Antisense strand to SEQ ID NO: 1738553
ucuagcauuucacaauugc

SEQ ID NO: 1738555 - RNA, 19 nt, Artificial Sequence
  Description of Artificial Sequence: Synthetic oligonucleotide
  Sense strand starting at position 3103 of SEQ ID NO: 1562324
ucaccauugguccaaguga

SEQ ID NO: 1738556 - RNA, 19 nt, Artificial Sequence
  Description of Artificial Sequence: Synthetic oligonucleotide
  Antisense strand to SEQ ID NO: 1738555
ucacuuggaccaaugguga

SEQ ID NO: 1738557 - RNA, 19 nt, Artificial Sequence
  Description of Artificial Sequence: Synthetic oligonucleotide
  Sense strand starting at position 3175 of SEQ ID NO: 1562324
gggugucucuagucaaaua

SEQ ID NO: 1738558 - RNA, 19 nt, Artificial Sequence
  Description of Artificial Sequence: Synthetic oligonucleotide
  Antisense strand to SEQ ID NO: 1738557
uauuugacuagagacaccc

SEQ ID NO: 1738559 - RNA, 19 nt, Artificial Sequence
  Description of Artificial Sequence: Synthetic oligonucleotide
  Sense strand starting at position 3200 of SEQ ID NO: 1562324
auggaugcugcauaugaga

SEQ ID NO: 1738560 - RNA, 19 nt, Artificial Sequence
  Description of Artificial Sequence: Synthetic oligonucleotide
  Antisense strand to SEQ ID NO: 1738559
ucucauaugcagcauccau

SEQ ID NO: 1738561 - RNA, 19 nt, Artificial Sequence
  Description of Artificial Sequence: Synthetic oligonucleotide
  Sense strand starting at position 3341 of SEQ ID NO: 1562324
augaaagcuuuccuaugga

SEQ ID NO: 1738562 - RNA, 19 nt, Artificial Sequence
  Description of Artificial Sequence: Synthetic oligonucleotide
  Antisense strand to SEQ ID NO: 1738561
uccauaggaaagcuuucau

SEQ ID NO: 1738563 - RNA, 19 nt, Artificial Sequence
  Description of Artificial Sequence: Synthetic oligonucleotide
  Sense strand starting at position 3471 of SEQ ID NO: 1562324
guggaaguuucuuuaccca

SEQ ID NO: 1738564 - RNA, 19 nt, Artificial Sequence
  Description of Artificial Sequence: Synthetic oligonucleotide
  Antisense strand to SEQ ID NO: 1738563
uggguaaagaaacuuccac

SEQ ID NO: 1738565 - RNA, 19 nt, Artificial Sequence
  Description of Artificial Sequence: Synthetic oligonucleotide
  Sense strand starting at position 3569 of SEQ ID NO: 1562324
aauggcucucgagauguuu

SEQ ID NO: 1738566 - RNA, 19 nt, Artificial Sequence
  Description of Artificial Sequence: Synthetic oligonucleotide
  Antisense strand to SEQ ID NO: 1738565
aaacaucucgagagccauu

SEQ ID NO: 1738567 - RNA, 19 nt, Artificial Sequence
  Description of Artificial Sequence: Synthetic oligonucleotide
  Sense strand starting at position 3575 of SEQ ID NO: 1562324
ucucgagauguuugggaac

SEQ ID NO: 1738568 - RNA, 19 nt, Artificial Sequence
  Description of Artificial Sequence: Synthetic oligonucleotide
  Antisense strand to SEQ ID NO: 1738567
guucccaaacaucucgaga

SEQ ID NO: 1738569 - RNA, 19 nt, Artificial Sequence
  Description of Artificial Sequence: Synthetic oligonucleotide
  Sense strand starting at position 3586 of SEQ ID NO: 1562324
uugggaacgagccauuaua

SEQ ID NO: 1738570 - RNA, 19 nt, Artificial Sequence
  Description of Artificial Sequence: Synthetic oligonucleotide
  Antisense strand to SEQ ID NO: 1738569
uauaauggcucguucccaa

SEQ ID NO: 1738571 - RNA, 19 nt, Artificial Sequence
  Description of Artificial Sequence: Synthetic oligonucleotide
  Sense strand starting at position 3614 of SEQ ID NO: 1562324
ccucaaaugcucugacaug

SEQ ID NO: 1738572 - RNA, 19 nt, Artificial Sequence
  Description of Artificial Sequence: Synthetic oligonucleotide
  Antisense strand to SEQ ID NO: 1738571
caugucagagcauuugagg

SEQ ID NO: 1738573 - RNA, 19 nt, Artificial Sequence
  Description of Artificial Sequence: Synthetic oligonucleotide
  Sense strand starting at position 3628 of SEQ ID NO: 1562324
acaugauguuggguccauu

SEQ ID NO: 1738574 - RNA, 19 nt, Artificial Sequence
  Description of Artificial Sequence: Synthetic oligonucleotide
  Antisense strand to SEQ ID NO: 1738573
aauggacccaacaucaugu

SEQ ID NO: 1738575 - RNA, 19 nt, Artificial Sequence
  Description of Artificial Sequence: Synthetic oligonucleotide
  Sense strand starting at position 3631 of SEQ ID NO: 1562324
ugauguuggguccauuaua

SEQ ID NO: 1738576 - RNA, 19 nt, Artificial Sequence
  Description of Artificial Sequence: Synthetic oligonucleotide
  Antisense strand to SEQ ID NO: 1738575
uauaauggacccaacauca

SEQ ID NO: 1738577 - RNA, 19 nt, Artificial Sequence
  Description of Artificial Sequence: Synthetic oligonucleotide
  Sense strand starting at position 3665 of SEQ ID NO: 1562324
uugauuugcuuucuguaaa

SEQ ID NO: 1738578 - RNA, 19 nt, Artificial Sequence
  Description of Artificial Sequence: Synthetic oligonucleotide
  Antisense strand to SEQ ID NO: 1738577
uuuacagaaagcaaaucaa

SEQ ID NO: 1738579 - RNA, 19 nt, Artificial Sequence
  Description of Artificial Sequence: Synthetic oligonucleotide
  Sense strand starting at position 3676 of SEQ ID NO: 1562324
ucuguaaacuuauuagaga

SEQ ID NO: 1738580 - RNA, 19 nt, Artificial Sequence
  Description of Artificial Sequence: Synthetic oligonucleotide
  Antisense strand to SEQ ID NO: 1738579
ucucuaauaaguuuacaga

SEQ ID NO: 1738581 - RNA, 19 nt, Artificial Sequence
  Description of Artificial Sequence: Synthetic oligonucleotide
  Sense strand starting at position 3781 of SEQ ID NO: 1562324
accugaauguccucacugu

SEQ ID NO: 1738582 - RNA, 19 nt, Artificial Sequence
  Description of Artificial Sequence: Synthetic oligonucleotide
  Antisense strand to SEQ ID NO: 1738581
acagugaggacauucaggu

SEQ ID NO: 1738583 - RNA, 19 nt, Artificial Sequence
  Description of Artificial Sequence: Synthetic oligonucleotide
  Sense strand starting at position 3845 of SEQ ID NO: 1562324
aaugcuuuaggcuggagau

SEQ ID NO: 1738584 - RNA, 19 nt, Artificial Sequence
  Description of Artificial Sequence: Synthetic oligonucleotide
  Antisense strand to SEQ ID NO: 1738583
aucuccagccuaaagcauu

SEQ ID NO: 1738585 - RNA, 19 nt, Artificial Sequence
  Description of Artificial Sequence: Synthetic oligonucleotide
  Sense strand starting at position 103 of SEQ ID NO: 1562325
acauguaagcacugauuga

SEQ ID NO: 1738586 - RNA, 19 nt, Artificial Sequence
  Description of Artificial Sequence: Synthetic oligonucleotide
  Antisense strand to SEQ ID NO: 1738585
ucaaucagugcuuacaugu

SEQ ID NO: 1738587 - RNA, 19 nt, Artificial Sequence
  Description of Artificial Sequence: Synthetic oligonucleotide
  Sense strand starting at position 162 of SEQ ID NO: 1562325
gugaucuugccucauaaac

SEQ ID NO: 1738588 - RNA, 19 nt, Artificial Sequence
  Description of Artificial Sequence: Synthetic oligonucleotide
  Antisense strand to SEQ ID NO: 1738587
guuuaugaggcaagaucac

SEQ ID NO: 1738589 - RNA, 19 nt, Artificial Sequence
  Description of Artificial Sequence: Synthetic oligonucleotide
  Sense strand starting at position 334 of SEQ ID NO: 1562325
guauuuaucuuagccugac

SEQ ID NO: 1738590 - RNA, 19 nt, Artificial Sequence
  Description of Artificial Sequence: Synthetic oligonucleotide
  Antisense strand to SEQ ID NO: 1738589
gucaggcuaagauaaauac

SEQ ID NO: 1738591 - RNA, 19 nt, Artificial Sequence
  Description of Artificial Sequence: Synthetic oligonucleotide
  Sense strand starting at position 347 of SEQ ID NO: 1562325
ccugacuaauugucugaau

SEQ ID NO: 1738592 - RNA, 19 nt, Artificial Sequence
  Description of Artificial Sequence: Synthetic oligonucleotide
  Antisense strand to SEQ ID NO: 1738591
auucagacaauuagucagg

SEQ ID NO: 1738593 - RNA, 19 nt, Artificial Sequence
  Description of Artificial Sequence: Synthetic oligonucleotide
  Sense strand starting at position 348 of SEQ ID NO: 1562325
cugacuaauugucugaauc

SEQ ID NO: 1738594 - RNA, 19 nt, Artificial Sequence
  Description of Artificial Sequence: Synthetic oligonucleotide
  Antisense strand to SEQ ID NO: 1738593
gauucagacaauuagucag

SEQ ID NO: 1738595 - RNA, 19 nt, Artificial Sequence
  Description of Artificial Sequence: Synthetic oligonucleotide
  Sense strand starting at position 349 of SEQ ID NO: 1562325
ugacuaauugucugaauca

SEQ ID NO: 1738596 - RNA, 19 nt, Artificial Sequence
  Description of Artificial Sequence: Synthetic oligonucleotide
  Antisense strand to SEQ ID NO: 1738595
ugauucagacaauuaguca

SEQ ID NO: 1738597 - RNA, 19 nt, Artificial Sequence
  Description of Artificial Sequence: Synthetic oligonucleotide
  Sense strand starting at position 494 of SEQ ID NO: 1562325
cuagauaagaauugagugu

SEQ ID NO: 1738598 - RNA, 19 nt, Artificial Sequence
  Description of Artificial Sequence: Synthetic oligonucleotide
  Antisense strand to SEQ ID NO: 1738597
acacucaauucuuaucuag

SEQ ID NO: 1738599 - RNA, 19 nt, Artificial Sequence
  Description of Artificial Sequence: Synthetic oligonucleotide
  Sense strand starting at position 531 of SEQ ID NO: 1562325
gugucuuaucaagauagau

SEQ ID NO: 1738600 - RNA, 19 nt, Artificial Sequence
  Description of Artificial Sequence: Synthetic oligonucleotide
  Antisense strand to SEQ ID NO: 1738599
aucuaucuugauaagacac

SEQ ID NO: 1738601 - RNA, 19 nt, Artificial Sequence
  Description of Artificial Sequence: Synthetic oligonucleotide
  Sense strand starting at position 792 of SEQ ID NO: 1562325
ucaacuaacgauuauuguu

SEQ ID NO: 1738602 - RNA, 19 nt, Artificial Sequence
  Description of Artificial Sequence: Synthetic oligonucleotide
  Antisense strand to SEQ ID NO: 1738601
aacaauaaucguuaguuga

SEQ ID NO: 1738603 - RNA, 19 nt, Artificial Sequence
  Description of Artificial Sequence: Synthetic oligonucleotide
  Sense strand starting at position 852 of SEQ ID NO: 1562325
accauuuaguuguuaguau

SEQ ID NO: 1738604 - RNA, 19 nt, Artificial Sequence
  Description of Artificial Sequence: Synthetic oligonucleotide
  Antisense strand to SEQ ID NO: 1738603
auacuaacaacuaaauggu

SEQ ID NO: 1738605 - RNA, 19 nt, Artificial Sequence
  Description of Artificial Sequence: Synthetic oligonucleotide
  Sense strand starting at position 1026 of SEQ ID NO: 1562325
uaaugauuauggguauacu

SEQ ID NO: 1738606 - RNA, 19 nt, Artificial Sequence
  Description of Artificial Sequence: Synthetic oligonucleotide
  Antisense strand to SEQ ID NO: 1738605
aguauacccauaaucauua

SEQ ID NO: 1738607 - RNA, 19 nt, Artificial Sequence
  Description of Artificial Sequence: Synthetic oligonucleotide
  Sense strand starting at position 1071 of SEQ ID NO: 1562325
agcgauuggguccaacaau

SEQ ID NO: 1738608 - RNA, 19 nt, Artificial Sequence
  Description of Artificial Sequence: Synthetic oligonucleotide
  Antisense strand to SEQ ID NO: 1738607
auuguuggacccaaucgcu

SEQ ID NO: 1738609 - RNA, 19 nt, Artificial Sequence
  Description of Artificial Sequence: Synthetic oligonucleotide
  Sense strand starting at position 1113 of SEQ ID NO: 1562325
aagucagaauguccaagua

SEQ ID NO: 1738610 - RNA, 19 nt, Artificial Sequence
  Description of Artificial Sequence: Synthetic oligonucleotide
  Antisense strand to SEQ ID NO: 1738609
uacuuggacauucugacuu

SEQ ID NO: 1738611 - RNA, 19 nt, Artificial Sequence
  Description of Artificial Sequence: Synthetic oligonucleotide
  Sense strand starting at position 1162 of SEQ ID NO: 1562325
auugaaacuuucguaucaa

SEQ ID NO: 1738612 - RNA, 19 nt, Artificial Sequence
  Description of Artificial Sequence: Synthetic oligonucleotide
  Antisense strand to SEQ ID NO: 1738611
uugauacgaaaguuucaau

SEQ ID NO: 1738613 - RNA, 19 nt, Artificial Sequence
  Description of Artificial Sequence: Synthetic oligonucleotide
  Sense strand starting at position 1369 of SEQ ID NO: 1562325
acuggauaucuguacccuu

SEQ ID NO: 1738614 - RNA, 19 nt, Artificial Sequence
  Description of Artificial Sequence: Synthetic oligonucleotide
  Antisense strand to SEQ ID NO: 1738613
aaggguacagauauccagu

SEQ ID NO: 1738615 - RNA, 19 nt, Artificial Sequence
  Description of Artificial Sequence: Synthetic oligonucleotide
  Sense strand starting at position 1517 of SEQ ID NO: 1562325
uguagaaaucucugaugau

SEQ ID NO: 1738616 - RNA, 19 nt, Artificial Sequence
  Description of Artificial Sequence: Synthetic oligonucleotide
  Antisense strand to SEQ ID NO: 1738615
aucaucagagauuucuaca

SEQ ID NO: 1738617 - RNA, 19 nt, Artificial Sequence
  Description of Artificial Sequence: Synthetic oligonucleotide
  Sense strand starting at position 1556 of SEQ ID NO: 1562325
ccggaaucagaacgaagau

SEQ ID NO: 1738618 - RNA, 19 nt, Artificial Sequence
  Description of Artificial Sequence: Synthetic oligonucleotide
  Antisense strand to SEQ ID NO: 1738617
aucuucguucugauuccgg

SEQ ID NO: 1738619 - RNA, 19 nt, Artificial Sequence
  Description of Artificial Sequence: Synthetic oligonucleotide
  Sense strand starting at position 1863 of SEQ ID NO: 1562325
agcugauacucuccacuga

SEQ ID NO: 1738620 - RNA, 19 nt, Artificial Sequence
  Description of Artificial Sequence: Synthetic oligonucleotide
  Antisense strand to SEQ ID NO: 1738619
ucaguggagaguaucagcu

SEQ ID NO: 1738621 - RNA, 19 nt, Artificial Sequence
  Description of Artificial Sequence: Synthetic oligonucleotide
  Sense strand starting at position 1999 of SEQ ID NO: 1562325
gguagaagaugcucaagau

SEQ ID NO: 1738622 - RNA, 19 nt, Artificial Sequence
  Description of Artificial Sequence: Synthetic oligonucleotide
  Antisense strand to SEQ ID NO: 1738621
aucuugagcaucuucuacc

SEQ ID NO: 1738623 - RNA, 19 nt, Artificial Sequence
  Description of Artificial Sequence: Synthetic oligonucleotide
  Sense strand starting at position 2005 of SEQ ID NO: 1562325
agaugcucaagauguagaa

SEQ ID NO: 1738624 - RNA, 19 nt, Artificial Sequence
  Description of Artificial Sequence: Synthetic oligonucleotide
  Antisense strand to SEQ ID NO: 1738623
uucuacaucuugagcaucu

SEQ ID NO: 1738625 - RNA, 19 nt, Artificial Sequence
  Description of Artificial Sequence: Synthetic oligonucleotide
  Sense strand starting at position 2043 of SEQ ID NO: 1562325
uagagaagucuuugaugau

SEQ ID NO: 1738626 - RNA, 19 nt, Artificial Sequence
  Description of Artificial Sequence: Synthetic oligonucleotide
  Antisense strand to SEQ ID NO: 1738625
aucaucaaagacuucucua

SEQ ID NO: 1738627 - RNA, 19 nt, Artificial Sequence
  Description of Artificial Sequence: Synthetic oligonucleotide
  Sense strand starting at position 2331 of SEQ ID NO: 1562325
guggauugcuaauuacaga

SEQ ID NO: 1738628 - RNA, 19 nt, Artificial Sequence
  Description of Artificial Sequence: Synthetic oligonucleotide
  Antisense strand to SEQ ID NO: 1738627
ucuguaauuagcaauccac

SEQ ID NO: 1738629 - RNA, 19 nt, Artificial Sequence
  Description of Artificial Sequence: Synthetic oligonucleotide
  Sense strand starting at position 2390 of SEQ ID NO: 1562325
auaaauacaugugucaaga

SEQ ID NO: 1738630 - RNA, 19 nt, Artificial Sequence
  Description of Artificial Sequence: Synthetic oligonucleotide
  Antisense strand to SEQ ID NO: 1738629
ucuugacacauguauuuau

SEQ ID NO: 1738631 - RNA, 19 nt, Artificial Sequence
  Description of Artificial Sequence: Synthetic oligonucleotide
  Sense strand starting at position 2512 of SEQ ID NO: 1562325
uuaagaugguaaucaauuc

SEQ ID NO: 1738632 - RNA, 19 nt, Artificial Sequence
  Description of Artificial Sequence: Synthetic oligonucleotide
  Antisense strand to SEQ ID NO: 1738631
gaauugauuaccaucuuaa

SEQ ID NO: 1738633 - RNA, 19 nt, Artificial Sequence
  Description of Artificial Sequence: Synthetic oligonucleotide
  Sense strand starting at position 2799 of SEQ ID NO: 1562325
ggcagcuugaaauagauca

SEQ ID NO: 1738634 - RNA, 19 nt, Artificial Sequence
  Description of Artificial Sequence: Synthetic oligonucleotide
  Antisense strand to SEQ ID NO: 1738633
ugaucuauuucaagcugcc

SEQ ID NO: 1738635 - RNA, 19 nt, Artificial Sequence
  Description of Artificial Sequence: Synthetic oligonucleotide
  Sense strand starting at position 2986 of SEQ ID NO: 1562325
ggaggugugcaaaguguuu

SEQ ID NO: 1738636 - RNA, 19 nt, Artificial Sequence
  Description of Artificial Sequence: Synthetic oligonucleotide
  Antisense strand to SEQ ID NO: 1738635
aaacacuuugcacaccucc

SEQ ID NO: 1738637 - RNA, 19 nt, Artificial Sequence
  Description of Artificial Sequence: Synthetic oligonucleotide
  Sense strand starting at position 2995 of SEQ ID NO: 1562325
caaaguguuugacugagac

SEQ ID NO: 1738638 - RNA, 19 nt, Artificial Sequence
  Description of Artificial Sequence: Synthetic oligonucleotide
  Antisense strand to SEQ ID NO: 1738637
gucucagucaaacacuuug

SEQ ID NO: 1738639 - RNA, 19 nt, Artificial Sequence
  Description of Artificial Sequence: Synthetic oligonucleotide
  Sense strand starting at position 3020 of SEQ ID NO: 1562325
ugugguaacugauccagga

SEQ ID NO: 1738640 - RNA, 19 nt, Artificial Sequence
  Description of Artificial Sequence: Synthetic oligonucleotide
  Antisense strand to SEQ ID NO: 1738639
uccuggaucaguuaccaca

SEQ ID NO: 1738641 - RNA, 19 nt, Artificial Sequence
  Description of Artificial Sequence: Synthetic oligonucleotide
  Sense strand starting at position 3444 of SEQ ID NO: 1562325
ucaauuaccggccaaagau

SEQ ID NO: 1738642 - RNA, 19 nt, Artificial Sequence
  Description of Artificial Sequence: Synthetic oligonucleotide
  Antisense strand to SEQ ID NO: 1738641
aucuuuggccgguaauuga

SEQ ID NO: 1738643 - RNA, 19 nt, Artificial Sequence
  Description of Artificial Sequence: Synthetic oligonucleotide
  Sense strand starting at position 3495 of SEQ ID NO: 1562325
agaguccacucacugaauu

SEQ ID NO: 1738644 - RNA, 19 nt, Artificial Sequence
  Description of Artificial Sequence: Synthetic oligonucleotide
  Antisense strand to SEQ ID NO: 1738643
aauucagugaguggacucu

SEQ ID NO: 1738645 - RNA, 19 nt, Artificial Sequence
  Description of Artificial Sequence: Synthetic oligonucleotide
  Sense strand starting at position 3564 of SEQ ID NO: 1562325
cucucuaaggaaugugaau

SEQ ID NO: 1738646 - RNA, 19 nt, Artificial Sequence
  Description of Artificial Sequence: Synthetic oligonucleotide
  Antisense strand to SEQ ID NO: 1738645
auucacauuccuuagagag

SEQ ID NO: 1738647 - RNA, 19 nt, Artificial Sequence
  Description of Artificial Sequence: Synthetic oligonucleotide
  Sense strand starting at position 3573 of SEQ ID NO: 1562325
gaaugugaaucauugagca

SEQ ID NO: 1738648 - RNA, 19 nt, Artificial Sequence
  Description of Artificial Sequence: Synthetic oligonucleotide
  Antisense strand to SEQ ID NO: 1738647
ugcucaaugauucacauuc

SEQ ID NO: 1738649 - RNA, 19 nt, Artificial Sequence
  Description of Artificial Sequence: Synthetic oligonucleotide
  Sense strand starting at position 3577 of SEQ ID NO: 1562325
gugaaucauugagcaaaca

SEQ ID NO: 1738650 - RNA, 19 nt, Artificial Sequence
  Description of Artificial Sequence: Synthetic oligonucleotide
  Antisense strand to SEQ ID NO: 1738649
uguuugcucaaugauucac

SEQ ID NO: 1738651 - RNA, 19 nt, Artificial Sequence
  Description of Artificial Sequence: Synthetic oligonucleotide
  Sense strand starting at position 3668 of SEQ ID NO: 1562325
guuacugagacauaggcuu

SEQ ID NO: 1738652 - RNA, 19 nt, Artificial Sequence
  Description of Artificial Sequence: Synthetic oligonucleotide
  Antisense strand to SEQ ID NO: 1738651
aagccuaugucucaguaac

SEQ ID NO: 1738653 - RNA, 19 nt, Artificial Sequence
  Description of Artificial Sequence: Synthetic oligonucleotide
  Sense strand starting at position 3846 of SEQ ID NO: 1562325
ucucaucagcuagagcaua

SEQ ID NO: 1738654 - RNA, 19 nt, Artificial Sequence
  Description of Artificial Sequence: Synthetic oligonucleotide
  Antisense strand to SEQ ID NO: 1738653
uaugcucuagcugaugaga

SEQ ID NO: 1738655 - RNA, 19 nt, Artificial Sequence
  Description of Artificial Sequence: Synthetic oligonucleotide
  Sense strand starting at position 3868 of SEQ ID NO: 1562325
ucuguauuauaagugagaa

SEQ ID NO: 1738656 - RNA, 19 nt, Artificial Sequence
  Description of Artificial Sequence: Synthetic oligonucleotide
  Antisense strand to SEQ ID NO: 1738655
uucucacuuauaauacaga

SEQ ID NO: 1738657 - RNA, 19 nt, Artificial Sequence
  Description of Artificial Sequence: Synthetic oligonucleotide
  Sense strand starting at position 3882 of SEQ ID NO: 1562325
gagaacacauguuuguuua

SEQ ID NO: 1738658 - RNA, 19 nt, Artificial Sequence
  Description of Artificial Sequence: Synthetic oligonucleotide
  Antisense strand to SEQ ID NO: 1738657
uaaacaaacauguguucuc

SEQ ID NO: 1738659 - RNA, 19 nt, Artificial Sequence
  Description of Artificial Sequence: Synthetic oligonucleotide
  Sense strand starting at position 3883 of SEQ ID NO: 1562325
agaacacauguuuguuuaa

SEQ ID NO: 1738660 - RNA, 19 nt, Artificial Sequence
  Description of Artificial Sequence: Synthetic oligonucleotide
  Antisense strand to SEQ ID NO: 1738659
uuaaacaaacauguguucu

SEQ ID NO: 1738661 - RNA, 19 nt, Artificial Sequence
  Description of Artificial Sequence: Synthetic oligonucleotide
  Sense strand starting at position 3892 of SEQ ID NO: 1562325
guuuguuuaagauauggag

SEQ ID NO: 1738662 - RNA, 19 nt, Artificial Sequence
  Description of Artificial Sequence: Synthetic oligonucleotide
  Antisense strand to SEQ ID NO: 1738661
cuccauaucuuaaacaaac

SEQ ID NO: 1738663 - RNA, 19 nt, Artificial Sequence
  Description of Artificial Sequence: Synthetic oligonucleotide
  Sense strand starting at position 3894 of SEQ ID NO: 1562325
uuguuuaagauauggagau

SEQ ID NO: 1738664 - RNA, 19 nt, Artificial Sequence
  Description of Artificial Sequence: Synthetic oligonucleotide
  Antisense strand to SEQ ID NO: 1738663
aucuccauaucuuaaacaa

SEQ ID NO: 1738665 - RNA, 19 nt, Artificial Sequence
  Description of Artificial Sequence: Synthetic oligonucleotide
  Sense strand starting at position 204 of SEQ ID NO: 1562326
ccucaaagucuguacucaa

SEQ ID NO: 1738666 - RNA, 19 nt, Artificial Sequence
  Description of Artificial Sequence: Synthetic oligonucleotide
  Antisense strand to SEQ ID NO: 1738665
uugaguacagacuuugagg

SEQ ID NO: 1738667 - RNA, 19 nt, Artificial Sequence
  Description of Artificial Sequence: Synthetic oligonucleotide
  Sense strand starting at position 470 of SEQ ID NO: 1562326
uaaagaaguuaggauuucu

SEQ ID NO: 1738668 - RNA, 19 nt, Artificial Sequence
  Description of Artificial Sequence: Synthetic oligonucleotide
  Antisense strand to SEQ ID NO: 1738667
agaaauccuaacuucuuua

SEQ ID NO: 1738669 - RNA, 19 nt, Artificial Sequence
  Description of Artificial Sequence: Synthetic oligonucleotide
  Sense strand starting at position 583 of SEQ ID NO: 1562326
ggacauuaaucccuaagcu

SEQ ID NO: 1738670 - RNA, 19 nt, Artificial Sequence
  Description of Artificial Sequence: Synthetic oligonucleotide
  Antisense strand to SEQ ID NO: 1738669
agcuuagggauuaaugucc

SEQ ID NO: 1738671 - RNA, 19 nt, Artificial Sequence
  Description of Artificial Sequence: Synthetic oligonucleotide
  Sense strand starting at position 683 of SEQ ID NO: 1562326
guguaauggacuggcauuu

SEQ ID NO: 1738672 - RNA, 19 nt, Artificial Sequence
  Description of Artificial Sequence: Synthetic oligonucleotide
  Antisense strand to SEQ ID NO: 1738671
aaaugccaguccauuacac

SEQ ID NO: 1738673 - RNA, 19 nt, Artificial Sequence
  Description of Artificial Sequence: Synthetic oligonucleotide
  Sense strand starting at position 721 of SEQ ID NO: 1562326
uaagcaugucucuauguga

SEQ ID NO: 1738674 - RNA, 19 nt, Artificial Sequence
  Description of Artificial Sequence: Synthetic oligonucleotide
  Antisense strand to SEQ ID NO: 1738673
ucacauagagacaugcuua

SEQ ID NO: 1738675 - RNA, 19 nt, Artificial Sequence
  Description of Artificial Sequence: Synthetic oligonucleotide
  Sense strand starting at position 774 of SEQ ID NO: 1562326
cuaugucguggagaaauua

SEQ ID NO: 1738676 - RNA, 19 nt, Artificial Sequence
  Description of Artificial Sequence: Synthetic oligonucleotide
  Antisense strand to SEQ ID NO: 1738675
uaauuucuccacgacauag

SEQ ID NO: 1738677 - RNA, 19 nt, Artificial Sequence
  Description of Artificial Sequence: Synthetic oligonucleotide
  Sense strand starting at position 847 of SEQ ID NO: 1562326
agaguagaugcuugaacca

SEQ ID NO: 1738678 - RNA, 19 nt, Artificial Sequence
  Description of Artificial Sequence: Synthetic oligonucleotide
  Antisense strand to SEQ ID NO: 1738677
ugguucaagcaucuacucu

SEQ ID NO: 1738679 - RNA, 19 nt, Artificial Sequence
  Description of Artificial Sequence: Synthetic oligonucleotide
  Sense strand starting at position 898 of SEQ ID NO: 1562326
caaucaaagcauuggguuu

SEQ ID NO: 1738680 - RNA, 19 nt, Artificial Sequence
  Description of Artificial Sequence: Synthetic oligonucleotide
  Antisense strand to SEQ ID NO: 1738679
aaacccaaugcuuugauug

SEQ ID NO: 1738681 - RNA, 19 nt, Artificial Sequence
  Description of Artificial Sequence: Synthetic oligonucleotide
  Sense strand starting at position 904 of SEQ ID NO: 1562326
aagcauuggguuuaauauc

SEQ ID NO: 1738682 - RNA, 19 nt, Artificial Sequence
  Description of Artificial Sequence: Synthetic oligonucleotide
  Antisense strand to SEQ ID NO: 1738681
gauauuaaacccaaugcuu

SEQ ID NO: 1738683 - RNA, 19 nt, Artificial Sequence
  Description of Artificial Sequence: Synthetic oligonucleotide
  Sense strand starting at position 921 of SEQ ID NO: 1562326
ucucauucugcugaaauag

SEQ ID NO: 1738684 - RNA, 19 nt, Artificial Sequence
  Description of Artificial Sequence: Synthetic oligonucleotide
  Antisense strand to SEQ ID NO: 1738683
cuauuucagcagaaugaga

SEQ ID NO: 1738685 - RNA, 19 nt, Artificial Sequence
  Description of Artificial Sequence: Synthetic oligonucleotide
  Sense strand starting at position 930 of SEQ ID NO: 1562326
gcugaaauagcuuauagaa

SEQ ID NO: 1738686 - RNA, 19 nt, Artificial Sequence
  Description of Artificial Sequence: Synthetic oligonucleotide
  Antisense strand to SEQ ID NO: 1738685
uucuauaagcuauuucagc

SEQ ID NO: 1738687 - RNA, 19 nt, Artificial Sequence
  Description of Artificial Sequence: Synthetic oligonucleotide
  Sense strand starting at position 977 of SEQ ID NO: 1562326
aauuaagauuaggcaguua

SEQ ID NO: 1738688 - RNA, 19 nt, Artificial Sequence
  Description of Artificial Sequence: Synthetic oligonucleotide
  Antisense strand to SEQ ID NO: 1738687
uaacugccuaaucuuaauu

SEQ ID NO: 1738689 - RNA, 19 nt, Artificial Sequence
  Description of Artificial Sequence: Synthetic oligonucleotide
  Sense strand starting at position 1052 of SEQ ID NO: 1562326
ugucauuugcauggcuuua

SEQ ID NO: 1738690 - RNA, 19 nt, Artificial Sequence
  Description of Artificial Sequence: Synthetic oligonucleotide
  Antisense strand to SEQ ID NO: 1738689
uaaagccaugcaaaugaca

SEQ ID NO: 1738691 - RNA, 19 nt, Artificial Sequence
  Description of Artificial Sequence: Synthetic oligonucleotide
  Sense strand starting at position 1054 of SEQ ID NO: 1562326
ucauuugcauggcuuuaua

SEQ ID NO: 1738692 - RNA, 19 nt, Artificial Sequence
  Description of Artificial Sequence: Synthetic oligonucleotide
  Antisense strand to SEQ ID NO: 1738691
uauaaagccaugcaaauga

SEQ ID NO: 1738693 - RNA, 19 nt, Artificial Sequence
  Description of Artificial Sequence: Synthetic oligonucleotide
  Sense strand starting at position 1173 of SEQ ID NO: 1562326
gaagguaucgaguaucugu

SEQ ID NO: 1738694 - RNA, 19 nt, Artificial Sequence
  Description of Artificial Sequence: Synthetic oligonucleotide
  Antisense strand to SEQ ID NO: 1738693
acagauacucgauaccuuc

SEQ ID NO: 1738695 - RNA, 19 nt, Artificial Sequence
  Description of Artificial Sequence: Synthetic oligonucleotide
  Sense strand starting at position 1265 of SEQ ID NO: 1562326
gguccauccuaaguagaga

SEQ ID NO: 1738696 - RNA, 19 nt, Artificial Sequence
  Description of Artificial Sequence: Synthetic oligonucleotide
  Antisense strand to SEQ ID NO: 1738695
ucucuacuuaggauggacc

SEQ ID NO: 1738697 - RNA, 19 nt, Artificial Sequence
  Description of Artificial Sequence: Synthetic oligonucleotide
  Sense strand starting at position 1775 of SEQ ID NO: 1562326
uauccucugggaugaguuu

SEQ ID NO: 1738698 - RNA, 19 nt, Artificial Sequence
  Description of Artificial Sequence: Synthetic oligonucleotide
  Antisense strand to SEQ ID NO: 1738697
aaacucaucccagaggaua

SEQ ID NO: 1738699 - RNA, 19 nt, Artificial Sequence
  Description of Artificial Sequence: Synthetic oligonucleotide
  Sense strand starting at position 1839 of SEQ ID NO: 1562326
uucucugugccacagaaga

SEQ ID NO: 1738700 - RNA, 19 nt, Artificial Sequence
  Description of Artificial Sequence: Synthetic oligonucleotide
  Antisense strand to SEQ ID NO: 1738699
ucuucuguggcacagagaa

SEQ ID NO: 1738701 - RNA, 19 nt, Artificial Sequence
  Description of Artificial Sequence: Synthetic oligonucleotide
  Sense strand starting at position 1920 of SEQ ID NO: 1562326
gcuacuucuggccagauag

SEQ ID NO: 1738702 - RNA, 19 nt, Artificial Sequence
  Description of Artificial Sequence: Synthetic oligonucleotide
  Antisense strand to SEQ ID NO: 1738701
cuaucuggccagaaguagc

SEQ ID NO: 1738703 - RNA, 19 nt, Artificial Sequence
  Description of Artificial Sequence: Synthetic oligonucleotide
  Sense strand starting at position 1922 of SEQ ID NO: 1562326
uacuucuggccagauagua

SEQ ID NO: 1738704 - RNA, 19 nt, Artificial Sequence
  Description of Artificial Sequence: Synthetic oligonucleotide
  Antisense strand to SEQ ID NO: 1738703
uacuaucuggccagaagua

SEQ ID NO: 1738705 - RNA, 19 nt, Artificial Sequence
  Description of Artificial Sequence: Synthetic oligonucleotide
  Sense strand starting at position 2114 of SEQ ID NO: 1562326
ucggucuuccaagaagaca

SEQ ID NO: 1738706 - RNA, 19 nt, Artificial Sequence
  Description of Artificial Sequence: Synthetic oligonucleotide
  Antisense strand to SEQ ID NO: 1738705
ugucuucuuggaagaccga

SEQ ID NO: 1738707 - RNA, 19 nt, Artificial Sequence
  Description of Artificial Sequence: Synthetic oligonucleotide
  Sense strand starting at position 2125 of SEQ ID NO: 1562326
agaagacagcaguauguuu

SEQ ID NO: 1738708 - RNA, 19 nt, Artificial Sequence
  Description of Artificial Sequence: Synthetic oligonucleotide
  Antisense strand to SEQ ID NO: 1738707
aaacauacugcugucuucu

SEQ ID NO: 1738709 - RNA, 19 nt, Artificial Sequence
  Description of Artificial Sequence: Synthetic oligonucleotide
  Sense strand starting at position 2279 of SEQ ID NO: 1562326
uuaucugccgaagaauucu

SEQ ID NO: 1738710 - RNA, 19 nt, Artificial Sequence
  Description of Artificial Sequence: Synthetic oligonucleotide
  Antisense strand to SEQ ID NO: 1738709
agaauucuucggcagauaa

SEQ ID NO: 1738711 - RNA, 19 nt, Artificial Sequence
  Description of Artificial Sequence: Synthetic oligonucleotide
  Sense strand starting at position 2363 of SEQ ID NO: 1562326
agccacauucuuugggaca

SEQ ID NO: 1738712 - RNA, 19 nt, Artificial Sequence
  Description of Artificial Sequence: Synthetic oligonucleotide
  Antisense strand to SEQ ID NO: 1738711
ugucccaaagaauguggcu

SEQ ID NO: 1738713 - RNA, 19 nt, Artificial Sequence
  Description of Artificial Sequence: Synthetic oligonucleotide
  Sense strand starting at position 2377 of SEQ ID NO: 1562326
ggacacaugugauccaagu

SEQ ID NO: 1738714 - RNA, 19 nt, Artificial Sequence
  Description of Artificial Sequence: Synthetic oligonucleotide
  Antisense strand to SEQ ID NO: 1738713
acuuggaucacaugugucc

SEQ ID NO: 1738715 - RNA, 19 nt, Artificial Sequence
  Description of Artificial Sequence: Synthetic oligonucleotide
  Sense strand starting at position 2383 of SEQ ID NO: 1562326
augugauccaagugauuga

SEQ ID NO: 1738716 - RNA, 19 nt, Artificial Sequence
  Description of Artificial Sequence: Synthetic oligonucleotide
  Antisense strand to SEQ ID NO: 1738715
ucaaucacuuggaucacau

SEQ ID NO: 1738717 - RNA, 19 nt, Artificial Sequence
  Description of Artificial Sequence: Synthetic oligonucleotide
  Sense strand starting at position 2384 of SEQ ID NO: 1562326
ugugauccaagugauugau

SEQ ID NO: 1738718 - RNA, 19 nt, Artificial Sequence
  Description of Artificial Sequence: Synthetic oligonucleotide
  Antisense strand to SEQ ID NO: 1738717
aucaaucacuuggaucaca

SEQ ID NO: 1738719 - RNA, 19 nt, Artificial Sequence
  Description of Artificial Sequence: Synthetic oligonucleotide
  Sense strand starting at position 2430 of SEQ ID NO: 1562326
cucuacuguggugaaauca

SEQ ID NO: 1738720 - RNA, 19 nt, Artificial Sequence
  Description of Artificial Sequence: Synthetic oligonucleotide
  Antisense strand to SEQ ID NO: 1738719
ugauuucaccacaguagag

SEQ ID NO: 1738721 - RNA, 19 nt, Artificial Sequence
  Description of Artificial Sequence: Synthetic oligonucleotide
  Sense strand starting at position 2531 of SEQ ID NO: 1562326
auuggaguucuuuaagcca

SEQ ID NO: 1738722 - RNA, 19 nt, Artificial Sequence
  Description of Artificial Sequence: Synthetic oligonucleotide
  Antisense strand to SEQ ID NO: 1738721
uggcuuaaagaacuccaau

SEQ ID NO: 1738723 - RNA, 19 nt, Artificial Sequence
  Description of Artificial Sequence: Synthetic oligonucleotide
  Sense strand starting at position 2534 of SEQ ID NO: 1562326
ggaguucuuuaagccagaa

SEQ ID NO: 1738724 - RNA, 19 nt, Artificial Sequence
  Description of Artificial Sequence: Synthetic oligonucleotide
  Antisense strand to SEQ ID NO: 1738723
uucuggcuuaaagaacucc

SEQ ID NO: 1738725 - RNA, 19 nt, Artificial Sequence
  Description of Artificial Sequence: Synthetic oligonucleotide
  Sense strand starting at position 2621 of SEQ ID NO: 1562326
ccagaugauuaucuuaugu

SEQ ID NO: 1738726 - RNA, 19 nt, Artificial Sequence
  Description of Artificial Sequence: Synthetic oligonucleotide
  Antisense strand to SEQ ID NO: 1738725
acauaagauaaucaucugg

SEQ ID NO: 1738727 - RNA, 19 nt, Artificial Sequence
  Description of Artificial Sequence: Synthetic oligonucleotide
  Sense strand starting at position 2626 of SEQ ID NO: 1562326
ugauuaucuuauguaucca

SEQ ID NO: 1738728 - RNA, 19 nt, Artificial Sequence
  Description of Artificial Sequence: Synthetic oligonucleotide
  Antisense strand to SEQ ID NO: 1738727
uggauacauaagauaauca

SEQ ID NO: 1738729 - RNA, 19 nt, Artificial Sequence
  Description of Artificial Sequence: Synthetic oligonucleotide
  Sense strand starting at position 2634 of SEQ ID NO: 1562326
uuauguauccagcacuaua

SEQ ID NO: 1738730 - RNA, 19 nt, Artificial Sequence
  Description of Artificial Sequence: Synthetic oligonucleotide
  Antisense strand to SEQ ID NO: 1738729
uauagugcuggauacauaa

SEQ ID NO: 1738731 - RNA, 19 nt, Artificial Sequence
  Description of Artificial Sequence: Synthetic oligonucleotide
  Sense strand starting at position 2684 of SEQ ID NO: 1562326
gguguuauucuugcugcuu

SEQ ID NO: 1738732 - RNA, 19 nt, Artificial Sequence
  Description of Artificial Sequence: Synthetic oligonucleotide
  Antisense strand to SEQ ID NO: 1738731
aagcagcaagaauaacacc

SEQ ID NO: 1738733 - RNA, 19 nt, Artificial Sequence
  Description of Artificial Sequence: Synthetic oligonucleotide
  Sense strand starting at position 2870 of SEQ ID NO: 1562326
uuaugucugcaguaggaca

SEQ ID NO: 1738734 - RNA, 19 nt, Artificial Sequence
  Description of Artificial Sequence: Synthetic oligonucleotide
  Antisense strand to SEQ ID NO: 1738733
uguccuacugcagacauaa

SEQ ID NO: 1738735 - RNA, 19 nt, Artificial Sequence
  Description of Artificial Sequence: Synthetic oligonucleotide
  Sense strand starting at position 2896 of SEQ ID NO: 1562326
cccuaaacgcaagacaauu

SEQ ID NO: 1738736 - RNA, 19 nt, Artificial Sequence
  Description of Artificial Sequence: Synthetic oligonucleotide
  Antisense strand to SEQ ID NO: 1738735
aauugucuugcguuuaggg

SEQ ID NO: 1738737 - RNA, 19 nt, Artificial Sequence
  Description of Artificial Sequence: Synthetic oligonucleotide
  Sense strand starting at position 2904 of SEQ ID NO: 1562326
gcaagacaauuugaacuuu

SEQ ID NO: 1738738 - RNA, 19 nt, Artificial Sequence
  Description of Artificial Sequence: Synthetic oligonucleotide
  Antisense strand to SEQ ID NO: 1738737
aaaguucaaauugucuugc

SEQ ID NO: 1738739 - RNA, 19 nt, Artificial Sequence
  Description of Artificial Sequence: Synthetic oligonucleotide
  Sense strand starting at position 2946 of SEQ ID NO: 1562326
acaguagugcuauacuaag

SEQ ID NO: 1738740 - RNA, 19 nt, Artificial Sequence
  Description of Artificial Sequence: Synthetic oligonucleotide
  Antisense strand to SEQ ID NO: 1738739
cuuaguauagcacuacugu

SEQ ID NO: 1738741 - RNA, 19 nt, Artificial Sequence
  Description of Artificial Sequence: Synthetic oligonucleotide
  Sense strand starting at position 2963 of SEQ ID NO: 1562326
agcauaaauguuuaucuga

SEQ ID NO: 1738742 - RNA, 19 nt, Artificial Sequence
  Description of Artificial Sequence: Synthetic oligonucleotide
  Antisense strand to SEQ ID NO: 1738741
ucagauaaacauuuaugcu

SEQ ID NO: 1738743 - RNA, 19 nt, Artificial Sequence
  Description of Artificial Sequence: Synthetic oligonucleotide
  Sense strand starting at position 3176 of SEQ ID NO: 1562326
cugauuaaacuuugagagu

SEQ ID NO: 1738744 - RNA, 19 nt, Artificial Sequence
  Description of Artificial Sequence: Synthetic oligonucleotide
  Antisense strand to SEQ ID NO: 1738743
acucucaaaguuuaaucag

SEQ ID NO: 1738745 - RNA, 19 nt, Artificial Sequence
  Description of Artificial Sequence: Synthetic oligonucleotide
  Sense strand starting at position 10 of SEQ ID NO: 1562327
acauuaugucaauaaggcu

SEQ ID NO: 1738746 - RNA, 19 nt, Artificial Sequence
  Description of Artificial Sequence: Synthetic oligonucleotide
  Antisense strand to SEQ ID NO: 1738745
agccuuauugacauaaugu

SEQ ID NO: 1738747 - RNA, 19 nt, Artificial Sequence
  Description of Artificial Sequence: Synthetic oligonucleotide
  Sense strand starting at position 43 of SEQ ID NO: 1562327
acguacauuguugauucua

SEQ ID NO: 1738748 - RNA, 19 nt, Artificial Sequence
  Description of Artificial Sequence: Synthetic oligonucleotide
  Antisense strand to SEQ ID NO: 1738747
uagaaucaacaauguacgu

SEQ ID NO: 1738749 - RNA, 19 nt, Artificial Sequence
  Description of Artificial Sequence: Synthetic oligonucleotide
  Sense strand starting at position 105 of SEQ ID NO: 1562327
cugggucuccgagauugag

SEQ ID NO: 1738750 - RNA, 19 nt, Artificial Sequence
  Description of Artificial Sequence: Synthetic oligonucleotide
  Antisense strand to SEQ ID NO: 1738749
cucaaucucggagacccag

SEQ ID NO: 1738751 - RNA, 19 nt, Artificial Sequence
  Description of Artificial Sequence: Synthetic oligonucleotide
  Sense strand starting at position 179 of SEQ ID NO: 1562327
auuaaagcuuccuuuggca

SEQ ID NO: 1738752 - RNA, 19 nt, Artificial Sequence
  Description of Artificial Sequence: Synthetic oligonucleotide
  Antisense strand to SEQ ID NO: 1738751
ugccaaaggaagcuuuaau

SEQ ID NO: 1738753 - RNA, 19 nt, Artificial Sequence
  Description of Artificial Sequence: Synthetic oligonucleotide
  Sense strand starting at position 440 of SEQ ID NO: 1562327
cgcaaaugcccuggaaacu

SEQ ID NO: 1738754 - RNA, 19 nt, Artificial Sequence
  Description of Artificial Sequence: Synthetic oligonucleotide
  Antisense strand to SEQ ID NO: 1738753
aguuuccagggcauuugcg

SEQ ID NO: 1738755 - RNA, 19 nt, Artificial Sequence
  Description of Artificial Sequence: Synthetic oligonucleotide
  Sense strand starting at position 452 of SEQ ID NO: 1562327
ggaaacucuucuccgggaa

SEQ ID NO: 1738756 - RNA, 19 nt, Artificial Sequence
  Description of Artificial Sequence: Synthetic oligonucleotide
  Antisense strand to SEQ ID NO: 1738755
uucccggagaagaguuucc

SEQ ID NO: 1738757 - RNA, 19 nt, Artificial Sequence
  Description of Artificial Sequence: Synthetic oligonucleotide
  Sense strand starting at position 453 of SEQ ID NO: 1562327
gaaacucuucuccgggaaa

SEQ ID NO: 1738758 - RNA, 19 nt, Artificial Sequence
  Description of Artificial Sequence: Synthetic oligonucleotide
  Antisense strand to SEQ ID NO: 1738757
uuucccggagaagaguuuc

SEQ ID NO: 1738759 - RNA, 19 nt, Artificial Sequence
  Description of Artificial Sequence: Synthetic oligonucleotide
  Sense strand starting at position 597 of SEQ ID NO: 1562327
cguccuaagaauugaggga

SEQ ID NO: 1738760 - RNA, 19 nt, Artificial Sequence
  Description of Artificial Sequence: Synthetic oligonucleotide
  Antisense strand to SEQ ID NO: 1738759
ucccucaauucuuaggacg

SEQ ID NO: 1738761 - RNA, 19 nt, Artificial Sequence
  Description of Artificial Sequence: Synthetic oligonucleotide
  Sense strand starting at position 619 of SEQ ID NO: 1562327
gagcuuuaccuugacgaag

SEQ ID NO: 1738762 - RNA, 19 nt, Artificial Sequence
  Description of Artificial Sequence: Synthetic oligonucleotide
  Antisense strand to SEQ ID NO: 1738761
cuucgucaagguaaagcuc

SEQ ID NO: 1738763 - RNA, 19 nt, Artificial Sequence
  Description of Artificial Sequence: Synthetic oligonucleotide
  Sense strand starting at position 2006 of SEQ ID NO: 1562327
gcagaucccuguccuugau

SEQ ID NO: 1738764 - RNA, 19 nt, Artificial Sequence
  Description of Artificial Sequence: Synthetic oligonucleotide
  Antisense strand to SEQ ID NO: 1738763
aucaaggacagggaucugc

SEQ ID NO: 1738765 - RNA, 19 nt, Artificial Sequence
  Description of Artificial Sequence: Synthetic oligonucleotide
  Sense strand starting at position 2090 of SEQ ID NO: 1562327
cucugugcuccuugaagga

SEQ ID NO: 1738766 - RNA, 19 nt, Artificial Sequence
  Description of Artificial Sequence: Synthetic oligonucleotide
  Antisense strand to SEQ ID NO: 1738765
uccuucaaggagcacagag

SEQ ID NO: 1738767 - RNA, 19 nt, Artificial Sequence
  Description of Artificial Sequence: Synthetic oligonucleotide
  Sense strand starting at position 2560 of SEQ ID NO: 1562327
ggguguuguucucuagaau

SEQ ID NO: 1738768 - RNA, 19 nt, Artificial Sequence
  Description of Artificial Sequence: Synthetic oligonucleotide
  Antisense strand to SEQ ID NO: 1738767
auucuagagaacaacaccc

SEQ ID NO: 1738769 - RNA, 19 nt, Artificial Sequence
  Description of Artificial Sequence: Synthetic oligonucleotide
  Sense strand starting at position 2561 of SEQ ID NO: 1562327
gguguuguucucuagaaug

SEQ ID NO: 1738770 - RNA, 19 nt, Artificial Sequence
  Description of Artificial Sequence: Synthetic oligonucleotide
  Antisense strand to SEQ ID NO: 1738769
cauucuagagaacaacacc

SEQ ID NO: 1738771 - RNA, 19 nt, Artificial Sequence
  Description of Artificial Sequence: Synthetic oligonucleotide
  Sense strand starting at position 2587 of SEQ ID NO: 1562327
guuccagagucacuuaaau

SEQ ID NO: 1738772 - RNA, 19 nt, Artificial Sequence
  Description of Artificial Sequence: Synthetic oligonucleotide
  Antisense strand to SEQ ID NO: 1738771
auuuaagugacucuggaac

SEQ ID NO: 1738773 - RNA, 19 nt, Artificial Sequence
  Description of Artificial Sequence: Synthetic oligonucleotide
  Sense strand starting at position 2695 of SEQ ID NO: 1562327
ugaagauguccacauugug

SEQ ID NO: 1738774 - RNA, 19 nt, Artificial Sequence
  Description of Artificial Sequence: Synthetic oligonucleotide
  Antisense strand to SEQ ID NO: 1738773
cacaauguggacaucuuca

SEQ ID NO: 1738775 - RNA, 19 nt, Artificial Sequence
  Description of Artificial Sequence: Synthetic oligonucleotide
  Sense strand starting at position 2732 of SEQ ID NO: 1562327
ggguguaaaucccugagag

SEQ ID NO: 1738776 - RNA, 19 nt, Artificial Sequence
  Description of Artificial Sequence: Synthetic oligonucleotide
  Antisense strand to SEQ ID NO: 1738775
cucucagggauuuacaccc

SEQ ID NO: 1738777 - RNA, 19 nt, Artificial Sequence
  Description of Artificial Sequence: Synthetic oligonucleotide
  Sense strand starting at position 2733 of SEQ ID NO: 1562327
gguguaaaucccugagaga

SEQ ID NO: 1738778 - RNA, 19 nt, Artificial Sequence
  Description of Artificial Sequence: Synthetic oligonucleotide
  Antisense strand to SEQ ID NO: 1738777
ucucucagggauuuacacc

SEQ ID NO: 1738779 - RNA, 19 nt, Artificial Sequence
  Description of Artificial Sequence: Synthetic oligonucleotide
  Sense strand starting at position 2844 of SEQ ID NO: 1562327
agucgaguuucucugacca

SEQ ID NO: 1738780 - RNA, 19 nt, Artificial Sequence
  Description of Artificial Sequence: Synthetic oligonucleotide
  Antisense strand to SEQ ID NO: 1738779
uggucagagaaacucgacu

SEQ ID NO: 1738781 - RNA, 19 nt, Artificial Sequence
  Description of Artificial Sequence: Synthetic oligonucleotide
  Sense strand starting at position 2848 of SEQ ID NO: 1562327
gaguuucucugaccagaga

SEQ ID NO: 1738782 - RNA, 19 nt, Artificial Sequence
  Description of Artificial Sequence: Synthetic oligonucleotide
  Antisense strand to SEQ ID NO: 1738781
ucucuggucagagaaacuc

SEQ ID NO: 1738783 - RNA, 19 nt, Artificial Sequence
  Description of Artificial Sequence: Synthetic oligonucleotide
  Sense strand starting at position 2962 of SEQ ID NO: 1562327
gucucuuaagacuguaaga

SEQ ID NO: 1738784 - RNA, 19 nt, Artificial Sequence
  Description of Artificial Sequence: Synthetic oligonucleotide
  Antisense strand to SEQ ID NO: 1738783
ucuuacagucuuaagagac

SEQ ID NO: 1738785 - RNA, 19 nt, Artificial Sequence
  Description of Artificial Sequence: Synthetic oligonucleotide
  Sense strand starting at position 2964 of SEQ ID NO: 1562327
cucuuaagacuguaagagu

SEQ ID NO: 1738786 - RNA, 19 nt, Artificial Sequence
  Description of Artificial Sequence: Synthetic oligonucleotide
  Antisense strand to SEQ ID NO: 1738785
acucuuacagucuuaagag

SEQ ID NO: 1738787 - RNA, 19 nt, Artificial Sequence
  Description of Artificial Sequence: Synthetic oligonucleotide
  Sense strand starting at position 2991 of SEQ ID NO: 1562327
cuugcugauucuccuagau

SEQ ID NO: 1738788 - RNA, 19 nt, Artificial Sequence
  Description of Artificial Sequence: Synthetic oligonucleotide
  Antisense strand to SEQ ID NO: 1738787
aucuaggagaaucagcaag

SEQ ID NO: 1738789 - RNA, 19 nt, Artificial Sequence
  Description of Artificial Sequence: Synthetic oligonucleotide
  Sense strand starting at position 3026 of SEQ ID NO: 1562327
agugcuucugccuccaagu

SEQ ID NO: 1738790 - RNA, 19 nt, Artificial Sequence
  Description of Artificial Sequence: Synthetic oligonucleotide
  Antisense strand to SEQ ID NO: 1738789
acuuggaggcagaagcacu

SEQ ID NO: 1738791 - RNA, 19 nt, Artificial Sequence
  Description of Artificial Sequence: Synthetic oligonucleotide
  Sense strand starting at position 3027 of SEQ ID NO: 1562327
gugcuucugccuccaaguu

SEQ ID NO: 1738792 - RNA, 19 nt, Artificial Sequence
  Description of Artificial Sequence: Synthetic oligonucleotide
  Antisense strand to SEQ ID NO: 1738791
aacuuggaggcagaagcac

SEQ ID NO: 1738793 - RNA, 19 nt, Artificial Sequence
  Description of Artificial Sequence: Synthetic oligonucleotide
  Sense strand starting at position 3041 of SEQ ID NO: 1562327
aaguuaagagcuugggaau

SEQ ID NO: 1738794 - RNA, 19 nt, Artificial Sequence
  Description of Artificial Sequence: Synthetic oligonucleotide
  Antisense strand to SEQ ID NO: 1738793
auucccaagcucuuaacuu

SEQ ID NO: 1738795 - RNA, 19 nt, Artificial Sequence
  Description of Artificial Sequence: Synthetic oligonucleotide
  Sense strand starting at position 3042 of SEQ ID NO: 1562327
aguuaagagcuugggaauc

SEQ ID NO: 1738796 - RNA, 19 nt, Artificial Sequence
  Description of Artificial Sequence: Synthetic oligonucleotide
  Antisense strand to SEQ ID NO: 1738795
gauucccaagcucuuaacu

SEQ ID NO: 1738797 - RNA, 19 nt, Artificial Sequence
  Description of Artificial Sequence: Synthetic oligonucleotide
  Sense strand starting at position 3104 of SEQ ID NO: 1562327
uauggaauucccuggguua

SEQ ID NO: 1738798 - RNA, 19 nt, Artificial Sequence
  Description of Artificial Sequence: Synthetic oligonucleotide
  Antisense strand to SEQ ID NO: 1738797
uaacccagggaauuccaua

SEQ ID NO: 1738799 - RNA, 19 nt, Artificial Sequence
  Description of Artificial Sequence: Synthetic oligonucleotide
  Sense strand starting at position 3105 of SEQ ID NO: 1562327
auggaauucccuggguuag

SEQ ID NO: 1738800 - RNA, 19 nt, Artificial Sequence
  Description of Artificial Sequence: Synthetic oligonucleotide
  Antisense strand to SEQ ID NO: 1738799
cuaacccagggaauuccau

SEQ ID NO: 1738801 - RNA, 19 nt, Artificial Sequence
  Description of Artificial Sequence: Synthetic oligonucleotide
  Sense strand starting at position 3188 of SEQ ID NO: 1562327
gucguaaguuuauuauaag

SEQ ID NO: 1738802 - RNA, 19 nt, Artificial Sequence
  Description of Artificial Sequence: Synthetic oligonucleotide
  Antisense strand to SEQ ID NO: 1738801
cuuauaauaaacuuacgac

SEQ ID NO: 1738803 - RNA, 19 nt, Artificial Sequence
  Description of Artificial Sequence: Synthetic oligonucleotide
  Sense strand starting at position 3217 of SEQ ID NO: 1562327
ucuaguggguuaccaagaa

SEQ ID NO: 1738804 - RNA, 19 nt, Artificial Sequence
  Description of Artificial Sequence: Synthetic oligonucleotide
  Antisense strand to SEQ ID NO: 1738803
uucuugguaacccacuaga

SEQ ID NO: 1738805 - RNA, 19 nt, Artificial Sequence
  Description of Artificial Sequence: Synthetic oligonucleotide
  Sense strand starting at position 3250 of SEQ ID NO: 1562327
gguggcacuauguaaaugu

SEQ ID NO: 1738806 - RNA, 19 nt, Artificial Sequence
  Description of Artificial Sequence: Synthetic oligonucleotide
  Antisense strand to SEQ ID NO: 1738805
acauuuacauagugccacc

SEQ ID NO: 1738807 - RNA, 19 nt, Artificial Sequence
  Description of Artificial Sequence: Synthetic oligonucleotide
  Sense strand starting at position 3287 of SEQ ID NO: 1562327
gcucaagacugacuugauu

SEQ ID NO: 1738808 - RNA, 19 nt, Artificial Sequence
  Description of Artificial Sequence: Synthetic oligonucleotide
  Antisense strand to SEQ ID NO: 1738807
aaucaagucagucuugagc

SEQ ID NO: 1738809 - RNA, 19 nt, Artificial Sequence
  Description of Artificial Sequence: Synthetic oligonucleotide
  Sense strand starting at position 3311 of SEQ ID NO: 1562327
ggcuuuauauggcuuugau

SEQ ID NO: 1738810 - RNA, 19 nt, Artificial Sequence
  Description of Artificial Sequence: Synthetic oligonucleotide
  Antisense strand to SEQ ID NO: 1738809
aucaaagccauauaaagcc

SEQ ID NO: 1738811 - RNA, 19 nt, Artificial Sequence
  Description of Artificial Sequence: Synthetic oligonucleotide
  Sense strand starting at position 3321 of SEQ ID NO: 1562327
ggcuuugauauuggccuaa

SEQ ID NO: 1738812 - RNA, 19 nt, Artificial Sequence
  Description of Artificial Sequence: Synthetic oligonucleotide
  Antisense strand to SEQ ID NO: 1738811
uuaggccaauaucaaagcc

SEQ ID NO: 1738813 - RNA, 19 nt, Artificial Sequence
  Description of Artificial Sequence: Synthetic oligonucleotide
  Sense strand starting at position 3323 of SEQ ID NO: 1562327
cuuugauauuggccuaaga

SEQ ID NO: 1738814 - RNA, 19 nt, Artificial Sequence
  Description of Artificial Sequence: Synthetic oligonucleotide
  Antisense strand to SEQ ID NO: 1738813
ucuuaggccaauaucaaag

SEQ ID NO: 1738815 - RNA, 19 nt, Artificial Sequence
  Description of Artificial Sequence: Synthetic oligonucleotide
  Sense strand starting at position 3420 of SEQ ID NO: 1562327
accuuuggccaugaacaua

SEQ ID NO: 1738816 - RNA, 19 nt, Artificial Sequence
  Description of Artificial Sequence: Synthetic oligonucleotide
  Antisense strand to SEQ ID NO: 1738815
uauguucauggccaaaggu

SEQ ID NO: 1738817 - RNA, 19 nt, Artificial Sequence
  Description of Artificial Sequence: Synthetic oligonucleotide
  Sense strand starting at position 3579 of SEQ ID NO: 1562327
guggcaucuagucaaagca

SEQ ID NO: 1738818 - RNA, 19 nt, Artificial Sequence
  Description of Artificial Sequence: Synthetic oligonucleotide
  Antisense strand to SEQ ID NO: 1738817
ugcuuugacuagaugccac

SEQ ID NO: 1738819 - RNA, 19 nt, Artificial Sequence
  Description of Artificial Sequence: Synthetic oligonucleotide
  Sense strand starting at position 3866 of SEQ ID NO: 1562327
agaacaucacuuugugauc

SEQ ID NO: 1738820 - RNA, 19 nt, Artificial Sequence
  Description of Artificial Sequence: Synthetic oligonucleotide
  Antisense strand to SEQ ID NO: 1738819
gaucacaaagugauguucu

SEQ ID NO: 1738821 - RNA, 19 nt, Artificial Sequence
  Description of Artificial Sequence: Synthetic oligonucleotide
  Sense strand starting at position 3916 of SEQ ID NO: 1562327
caucacauuuggugagaua

SEQ ID NO: 1738822 - RNA, 19 nt, Artificial Sequence
  Description of Artificial Sequence: Synthetic oligonucleotide
  Antisense strand to SEQ ID NO: 1738821
uaucucaccaaaugugaug

SEQ ID NO: 1738823 - RNA, 19 nt, Artificial Sequence
  Description of Artificial Sequence: Synthetic oligonucleotide
  Sense strand starting at position 3923 of SEQ ID NO: 1562327
uuuggugagauaugguaaa

SEQ ID NO: 1738824 - RNA, 19 nt, Artificial Sequence
  Description of Artificial Sequence: Synthetic oligonucleotide
  Antisense strand to SEQ ID NO: 1738823
uuuaccauaucucaccaaa

SEQ ID NO: 1738825 - RNA, 19 nt, Artificial Sequence
  Description of Artificial Sequence: Synthetic oligonucleotide
  Sense strand starting at position 50 of SEQ ID NO: 1562328
ggcugugugcuucaggaug

SEQ ID NO: 1738826 - RNA, 19 nt, Artificial Sequence
  Description of Artificial Sequence: Synthetic oligonucleotide
  Antisense strand to SEQ ID NO: 1738825
cauccugaagcacacagcc

SEQ ID NO: 1738827 - RNA, 19 nt, Artificial Sequence
  Description of Artificial Sequence: Synthetic oligonucleotide
  Sense strand starting at position 214 of SEQ ID NO: 1562328
agcuuagugaccggagcaa

SEQ ID NO: 1738828 - RNA, 19 nt, Artificial Sequence
  Description of Artificial Sequence: Synthetic oligonucleotide
  Antisense strand to SEQ ID NO: 1738827
uugcuccggucacuaagcu

SEQ ID NO: 1738829 - RNA, 19 nt, Artificial Sequence
  Description of Artificial Sequence: Synthetic oligonucleotide
  Sense strand starting at position 344 of SEQ ID NO: 1562328
gaccgugcugaggacuaaa

SEQ ID NO: 1738830 - RNA, 19 nt, Artificial Sequence
  Description of Artificial Sequence: Synthetic oligonucleotide
  Antisense strand to SEQ ID NO: 1738829
uuuaguccucagcacgguc

SEQ ID NO: 1738831 - RNA, 19 nt, Artificial Sequence
  Description of Artificial Sequence: Synthetic oligonucleotide
  Sense strand starting at position 1016 of SEQ ID NO: 1562328
agggcagaguuauuagcaa

SEQ ID NO: 1738832 - RNA, 19 nt, Artificial Sequence
  Description of Artificial Sequence: Synthetic oligonucleotide
  Antisense strand to SEQ ID NO: 1738831
uugcuaauaacucugcccu

SEQ ID NO: 1738833 - RNA, 19 nt, Artificial Sequence
  Description of Artificial Sequence: Synthetic oligonucleotide
  Sense strand starting at position 1047 of SEQ ID NO: 1562328
cagaguuagccacguggga

SEQ ID NO: 1738834 - RNA, 19 nt, Artificial Sequence
  Description of Artificial Sequence: Synthetic oligonucleotide
  Antisense strand to SEQ ID NO: 1738833
ucccacguggcuaacucug

SEQ ID NO: 1738835 - RNA, 19 nt, Artificial Sequence
  Description of Artificial Sequence: Synthetic oligonucleotide
  Sense strand starting at position 1049 of SEQ ID NO: 1562328
gaguuagccacgugggaga

SEQ ID NO: 1738836 - RNA, 19 nt, Artificial Sequence
  Description of Artificial Sequence: Synthetic oligonucleotide
  Antisense strand to SEQ ID NO: 1738835
ucucccacguggcuaacuc

SEQ ID NO: 1738837 - RNA, 19 nt, Artificial Sequence
  Description of Artificial Sequence: Synthetic oligonucleotide
  Sense strand starting at position 1074 of SEQ ID NO: 1562328
caccgcugucccugguuaa

SEQ ID NO: 1738838 - RNA, 19 nt, Artificial Sequence
  Description of Artificial Sequence: Synthetic oligonucleotide
  Antisense strand to SEQ ID NO: 1738837
uuaaccagggacagcggug

SEQ ID NO: 1738839 - RNA, 19 nt, Artificial Sequence
  Description of Artificial Sequence: Synthetic oligonucleotide
  Sense strand starting at position 1075 of SEQ ID NO: 1562328
accgcugucccugguuaaa

SEQ ID NO: 1738840 - RNA, 19 nt, Artificial Sequence
  Description of Artificial Sequence: Synthetic oligonucleotide
  Antisense strand to SEQ ID NO: 1738839
uuuaaccagggacagcggu

SEQ ID NO: 1738841 - RNA, 19 nt, Artificial Sequence
  Description of Artificial Sequence: Synthetic oligonucleotide
  Sense strand starting at position 1077 of SEQ ID NO: 1562328
cgcugucccugguuaaagu

SEQ ID NO: 1738842 - RNA, 19 nt, Artificial Sequence
  Description of Artificial Sequence: Synthetic oligonucleotide
  Antisense strand to SEQ ID NO: 1738841
acuuuaaccagggacagcg

SEQ ID NO: 1738843 - RNA, 19 nt, Artificial Sequence
  Description of Artificial Sequence: Synthetic oligonucleotide
  Sense strand starting at position 1097 of SEQ ID NO: 1562328
gugacugcgaccugagaca

SEQ ID NO: 1738844 - RNA, 19 nt, Artificial Sequence
  Description of Artificial Sequence: Synthetic oligonucleotide
  Antisense strand to SEQ ID NO: 1738843
ugucucaggucgcagucac

SEQ ID NO: 1738845 - RNA, 19 nt, Artificial Sequence
  Description of Artificial Sequence: Synthetic oligonucleotide
  Sense strand starting at position 1253 of SEQ ID NO: 1562328
ggcgagaguccuuggcugu

SEQ ID NO: 1738846 - RNA, 19 nt, Artificial Sequence
  Description of Artificial Sequence: Synthetic oligonucleotide
  Antisense strand to SEQ ID NO: 1738845
acagccaaggacucucgcc

SEQ ID NO: 1738847 - RNA, 19 nt, Artificial Sequence
  Description of Artificial Sequence: Synthetic oligonucleotide
  Sense strand starting at position 2134 of SEQ ID NO: 1562328
gcaccagccuuggaaucaa

SEQ ID NO: 1738848 - RNA, 19 nt, Artificial Sequence
  Description of Artificial Sequence: Synthetic oligonucleotide
  Antisense strand to SEQ ID NO: 1738847
uugauuccaaggcuggugc

SEQ ID NO: 1738849 - RNA, 19 nt, Artificial Sequence
  Description of Artificial Sequence: Synthetic oligonucleotide
  Sense strand starting at position 2304 of SEQ ID NO: 1562328
gcugcugagucucuggauu

SEQ ID NO: 1738850 - RNA, 19 nt, Artificial Sequence
  Description of Artificial Sequence: Synthetic oligonucleotide
  Antisense strand to SEQ ID NO: 1738849
aauccagagacucagcagc

SEQ ID NO: 1738851 - RNA, 19 nt, Artificial Sequence
  Description of Artificial Sequence: Synthetic oligonucleotide
  Sense strand starting at position 2421 of SEQ ID NO: 1562328
gagccauuguguuguggga

SEQ ID NO: 1738852 - RNA, 19 nt, Artificial Sequence
  Description of Artificial Sequence: Synthetic oligonucleotide
  Antisense strand to SEQ ID NO: 1738851
ucccacaacacaauggcuc

SEQ ID NO: 1738853 - RNA, 19 nt, Artificial Sequence
  Description of Artificial Sequence: Synthetic oligonucleotide
  Sense strand starting at position 2423 of SEQ ID NO: 1562328
gccauuguguugugggaaa

SEQ ID NO: 1738854 - RNA, 19 nt, Artificial Sequence
  Description of Artificial Sequence: Synthetic oligonucleotide
  Antisense strand to SEQ ID NO: 1738853
uuucccacaacacaauggc

SEQ ID NO: 1738855 - RNA, 19 nt, Artificial Sequence
  Description of Artificial Sequence: Synthetic oligonucleotide
  Sense strand starting at position 2425 of SEQ ID NO: 1562328
cauuguguugugggaaacu

SEQ ID NO: 1738856 - RNA, 19 nt, Artificial Sequence
  Description of Artificial Sequence: Synthetic oligonucleotide
  Antisense strand to SEQ ID NO: 1738855
aguuucccacaacacaaug

SEQ ID NO: 1738857 - RNA, 19 nt, Artificial Sequence
  Description of Artificial Sequence: Synthetic oligonucleotide
  Sense strand starting at position 2475 of SEQ ID NO: 1562328
ugccaauuccacuguugca

SEQ ID NO: 1738858 - RNA, 19 nt, Artificial Sequence
  Description of Artificial Sequence: Synthetic oligonucleotide
  Antisense strand to SEQ ID NO: 1738857
ugcaacaguggaauuggca

SEQ ID NO: 1738859 - RNA, 19 nt, Artificial Sequence
  Description of Artificial Sequence: Synthetic oligonucleotide
  Sense strand starting at position 2498 of SEQ ID NO: 1562328
cugcccaagucguuaaaca

SEQ ID NO: 1738860 - RNA, 19 nt, Artificial Sequence
  Description of Artificial Sequence: Synthetic oligonucleotide
  Antisense strand to SEQ ID NO: 1738859
uguuuaacgacuugggcag

SEQ ID NO: 1738861 - RNA, 19 nt, Artificial Sequence
  Description of Artificial Sequence: Synthetic oligonucleotide
  Sense strand starting at position 2499 of SEQ ID NO: 1562328
ugcccaagucguuaaacau

SEQ ID NO: 1738862 - RNA, 19 nt, Artificial Sequence
  Description of Artificial Sequence: Synthetic oligonucleotide
  Antisense strand to SEQ ID NO: 1738861
auguuuaacgacuugggca

SEQ ID NO: 1738863 - RNA, 19 nt, Artificial Sequence
  Description of Artificial Sequence: Synthetic oligonucleotide
  Sense strand starting at position 2621 of SEQ ID NO: 1562328
ugaccuucugcccaggaga

SEQ ID NO: 1738864 - RNA, 19 nt, Artificial Sequence
  Description of Artificial Sequence: Synthetic oligonucleotide
  Antisense strand to SEQ ID NO: 1738863
ucuccugggcagaagguca

SEQ ID NO: 1738865 - RNA, 19 nt, Artificial Sequence
  Description of Artificial Sequence: Synthetic oligonucleotide
  Sense strand starting at position 2718 of SEQ ID NO: 1562328
uccgguuagacuggaacau

SEQ ID NO: 1738866 - RNA, 19 nt, Artificial Sequence
  Description of Artificial Sequence: Synthetic oligonucleotide
  Antisense strand to SEQ ID NO: 1738865
auguuccagucuaaccgga

SEQ ID NO: 1738867 - RNA, 19 nt, Artificial Sequence
  Description of Artificial Sequence: Synthetic oligonucleotide
  Sense strand starting at position 2719 of SEQ ID NO: 1562328
ccgguuagacuggaacauu

SEQ ID NO: 1738868 - RNA, 19 nt, Artificial Sequence
  Description of Artificial Sequence: Synthetic oligonucleotide
  Antisense strand to SEQ ID NO: 1738867
aauguuccagucuaaccgg

SEQ ID NO: 1738869 - RNA, 19 nt, Artificial Sequence
  Description of Artificial Sequence: Synthetic oligonucleotide
  Sense strand starting at position 3155 of SEQ ID NO: 1562328
gucaguuaaugugacagca

SEQ ID NO: 1738870 - RNA, 19 nt, Artificial Sequence
  Description of Artificial Sequence: Synthetic oligonucleotide
  Antisense strand to SEQ ID NO: 1738869
ugcugucacauuaacugac

SEQ ID NO: 1738871 - RNA, 19 nt, Artificial Sequence
  Description of Artificial Sequence: Synthetic oligonucleotide
  Sense strand starting at position 3228 of SEQ ID NO: 1562328
gcuguagccaucggucgau

SEQ ID NO: 1738872 - RNA, 19 nt, Artificial Sequence
  Description of Artificial Sequence: Synthetic oligonucleotide
  Antisense strand to SEQ ID NO: 1738871
aucgaccgauggcuacagc

SEQ ID NO: 1738873 - RNA, 19 nt, Artificial Sequence
  Description of Artificial Sequence: Synthetic oligonucleotide
  Sense strand starting at position 3397 of SEQ ID NO: 1562328
ugcucaaacucgucucaga

SEQ ID NO: 1738874 - RNA, 19 nt, Artificial Sequence
  Description of Artificial Sequence: Synthetic oligonucleotide
  Antisense strand to SEQ ID NO: 1738873
ucugagacgaguuugagca

SEQ ID NO: 1738875 - RNA, 19 nt, Artificial Sequence
  Description of Artificial Sequence: Synthetic oligonucleotide
  Sense strand starting at position 3400 of SEQ ID NO: 1562328
ucaaacucgucucagagau

SEQ ID NO: 1738876 - RNA, 19 nt, Artificial Sequence
  Description of Artificial Sequence: Synthetic oligonucleotide
  Antisense strand to SEQ ID NO: 1738875
aucucugagacgaguuuga

SEQ ID NO: 1738877 - RNA, 19 nt, Artificial Sequence
  Description of Artificial Sequence: Synthetic oligonucleotide
  Sense strand starting at position 3423 of SEQ ID NO: 1562328
agagaagucucuuugcuug

SEQ ID NO: 1738878 - RNA, 19 nt, Artificial Sequence
  Description of Artificial Sequence: Synthetic oligonucleotide
  Antisense strand to SEQ ID NO: 1738877
caagcaaagagacuucucu

SEQ ID NO: 1738879 - RNA, 19 nt, Artificial Sequence
  Description of Artificial Sequence: Synthetic oligonucleotide
  Sense strand starting at position 3425 of SEQ ID NO: 1562328
agaagucucuuugcuugaa

SEQ ID NO: 1738880 - RNA, 19 nt, Artificial Sequence
  Description of Artificial Sequence: Synthetic oligonucleotide
  Antisense strand to SEQ ID NO: 1738879
uucaagcaaagagacuucu

SEQ ID NO: 1738881 - RNA, 19 nt, Artificial Sequence
  Description of Artificial Sequence: Synthetic oligonucleotide
  Sense strand starting at position 3426 of SEQ ID NO: 1562328
gaagucucuuugcuugaaa

SEQ ID NO: 1738882 - RNA, 19 nt, Artificial Sequence
  Description of Artificial Sequence: Synthetic oligonucleotide
  Antisense strand to SEQ ID NO: 1738881
uuucaagcaaagagacuuc

SEQ ID NO: 1738883 - RNA, 19 nt, Artificial Sequence
  Description of Artificial Sequence: Synthetic oligonucleotide
  Sense strand starting at position 3484 of SEQ ID NO: 1562328
uccggaaagucuccaaaca

SEQ ID NO: 1738884 - RNA, 19 nt, Artificial Sequence
  Description of Artificial Sequence: Synthetic oligonucleotide
  Antisense strand to SEQ ID NO: 1738883
uguuuggagacuuuccgga

SEQ ID NO: 1738885 - RNA, 19 nt, Artificial Sequence
  Description of Artificial Sequence: Synthetic oligonucleotide
  Sense strand starting at position 3681 of SEQ ID NO: 1562328
acugauuacgccuagcaau

SEQ ID NO: 1738886 - RNA, 19 nt, Artificial Sequence
  Description of Artificial Sequence: Synthetic oligonucleotide
  Antisense strand to SEQ ID NO: 1738885
auugcuaggcguaaucagu

SEQ ID NO: 1738887 - RNA, 19 nt, Artificial Sequence
  Description of Artificial Sequence: Synthetic oligonucleotide
  Sense strand starting at position 3867 of SEQ ID NO: 1562328
accucuaagugcuuugaga

SEQ ID NO: 1738888 - RNA, 19 nt, Artificial Sequence
  Description of Artificial Sequence: Synthetic oligonucleotide
  Antisense strand to SEQ ID NO: 1738887
ucucaaagcacuuagaggu

SEQ ID NO: 1738889 - RNA, 19 nt, Artificial Sequence
  Description of Artificial Sequence: Synthetic oligonucleotide
  Sense strand starting at position 3929 of SEQ ID NO: 1562328
cacagcaucgcacguuuaa

SEQ ID NO: 1738890 - RNA, 19 nt, Artificial Sequence
  Description of Artificial Sequence: Synthetic oligonucleotide
  Antisense strand to SEQ ID NO: 1738889
uuaaacgugcgaugcugug

SEQ ID NO: 1738891 - RNA, 19 nt, Artificial Sequence
  Description of Artificial Sequence: Synthetic oligonucleotide
  Sense strand starting at position 3941 of SEQ ID NO: 1562328
cguuuaaccuccuggaaau

SEQ ID NO: 1738892 - RNA, 19 nt, Artificial Sequence
  Description of Artificial Sequence: Synthetic oligonucleotide
  Antisense strand to SEQ ID NO: 1738891
auuuccaggagguuaaacg

SEQ ID NO: 1738893 - RNA, 19 nt, Artificial Sequence
  Description of Artificial Sequence: Synthetic oligonucleotide
  Sense strand starting at position 3942 of SEQ ID NO: 1562328
guuuaaccuccuggaaauc

SEQ ID NO: 1738894 - RNA, 19 nt, Artificial Sequence
  Description of Artificial Sequence: Synthetic oligonucleotide
  Antisense strand to SEQ ID NO: 1738893
gauuuccaggagguuaaac

SEQ ID NO: 1738895 - RNA, 19 nt, Artificial Sequence
  Description of Artificial Sequence: Synthetic oligonucleotide
  Sense strand starting at position 312 of SEQ ID NO: 1562329
cuuagaucucaagauugca

SEQ ID NO: 1738896 - RNA, 19 nt, Artificial Sequence
  Description of Artificial Sequence: Synthetic oligonucleotide
  Antisense strand to SEQ ID NO: 1738895
ugcaaucuugagaucuaag

SEQ ID NO: 1738897 - RNA, 19 nt, Artificial Sequence
  Description of Artificial Sequence: Synthetic oligonucleotide
  Sense strand starting at position 334 of SEQ ID NO: 1562329
caccaaagcucgcguuaac

SEQ ID NO: 1738898 - RNA, 19 nt, Artificial Sequence
  Description of Artificial Sequence: Synthetic oligonucleotide
  Antisense strand to SEQ ID NO: 1738897
guuaacgcgagcuuuggug

SEQ ID NO: 1738899 - RNA, 19 nt, Artificial Sequence
  Description of Artificial Sequence: Synthetic oligonucleotide
  Sense strand starting at position 337 of SEQ ID NO: 1562329
caaagcucgcguuaacagu

SEQ ID NO: 1738900 - RNA, 19 nt, Artificial Sequence
  Description of Artificial Sequence: Synthetic oligonucleotide
  Antisense strand to SEQ ID NO: 1738899
acuguuaacgcgagcuuug

SEQ ID NO: 1738901 - RNA, 19 nt, Artificial Sequence
  Description of Artificial Sequence: Synthetic oligonucleotide
  Sense strand starting at position 456 of SEQ ID NO: 1562329
uccuuugucccugugcgau

SEQ ID NO: 1738902 - RNA, 19 nt, Artificial Sequence
  Description of Artificial Sequence: Synthetic oligonucleotide
  Antisense strand to SEQ ID NO: 1738901
aucgcacagggacaaagga

SEQ ID NO: 1738903 - RNA, 19 nt, Artificial Sequence
  Description of Artificial Sequence: Synthetic oligonucleotide
  Sense strand starting at position 458 of SEQ ID NO: 1562329
cuuugucccugugcgauuu

SEQ ID NO: 1738904 - RNA, 19 nt, Artificial Sequence
  Description of Artificial Sequence: Synthetic oligonucleotide
  Antisense strand to SEQ ID NO: 1738903
aaaucgcacagggacaaag

SEQ ID NO: 1738905 - RNA, 19 nt, Artificial Sequence
  Description of Artificial Sequence: Synthetic oligonucleotide
  Sense strand starting at position 460 of SEQ ID NO: 1562329
uugucccugugcgauuuaa

SEQ ID NO: 1738906 - RNA, 19 nt, Artificial Sequence
  Description of Artificial Sequence: Synthetic oligonucleotide
  Antisense strand to SEQ ID NO: 1738905
uuaaaucgcacagggacaa

SEQ ID NO: 1738907 - RNA, 19 nt, Artificial Sequence
  Description of Artificial Sequence: Synthetic oligonucleotide
  Sense strand starting at position 540 of SEQ ID NO: 1562329
gcagcucugcggccugauu

SEQ ID NO: 1738908 - RNA, 19 nt, Artificial Sequence
  Description of Artificial Sequence: Synthetic oligonucleotide
  Antisense strand to SEQ ID NO: 1738907
aaucaggccgcagagcugc

SEQ ID NO: 1738909 - RNA, 19 nt, Artificial Sequence
  Description of Artificial Sequence: Synthetic oligonucleotide
  Sense strand starting at position 541 of SEQ ID NO: 1562329
cagcucugcggccugauua

SEQ ID NO: 1738910 - RNA, 19 nt, Artificial Sequence
  Description of Artificial Sequence: Synthetic oligonucleotide
  Antisense strand to SEQ ID NO: 1738909
uaaucaggccgcagagcug

SEQ ID NO: 1738911 - RNA, 19 nt, Artificial Sequence
  Description of Artificial Sequence: Synthetic oligonucleotide
  Sense strand starting at position 542 of SEQ ID NO: 1562329
agcucugcggccugauuaa

SEQ ID NO: 1738912 - RNA, 19 nt, Artificial Sequence
  Description of Artificial Sequence: Synthetic oligonucleotide
  Antisense strand to SEQ ID NO: 1738911
uuaaucaggccgcagagcu

SEQ ID NO: 1738913 - RNA, 19 nt, Artificial Sequence
  Description of Artificial Sequence: Synthetic oligonucleotide
  Sense strand starting at position 658 of SEQ ID NO: 1562329
ugaggaauugucuacgacu

SEQ ID NO: 1738914 - RNA, 19 nt, Artificial Sequence
  Description of Artificial Sequence: Synthetic oligonucleotide
  Antisense strand to SEQ ID NO: 1738913
agucguagacaauuccuca

SEQ ID NO: 1738915 - RNA, 19 nt, Artificial Sequence
  Description of Artificial Sequence: Synthetic oligonucleotide
  Sense strand starting at position 660 of SEQ ID NO: 1562329
aggaauugucuacgacuca

SEQ ID NO: 1738916 - RNA, 19 nt, Artificial Sequence
  Description of Artificial Sequence: Synthetic oligonucleotide
  Antisense strand to SEQ ID NO: 1738915
ugagucguagacaauuccu

SEQ ID NO: 1738917 - RNA, 19 nt, Artificial Sequence
  Description of Artificial Sequence: Synthetic oligonucleotide
  Sense strand starting at position 661 of SEQ ID NO: 1562329
ggaauugucuacgacucaa

SEQ ID NO: 1738918 - RNA, 19 nt, Artificial Sequence
  Description of Artificial Sequence: Synthetic oligonucleotide
  Antisense strand to SEQ ID NO: 1738917
uugagucguagacaauucc

SEQ ID NO: 1738919 - RNA, 19 nt, Artificial Sequence
  Description of Artificial Sequence: Synthetic oligonucleotide
  Sense strand starting at position 725 of SEQ ID NO: 1562329
uugaaaggucuaugcuacu

SEQ ID NO: 1738920 - RNA, 19 nt, Artificial Sequence
  Description of Artificial Sequence: Synthetic oligonucleotide
  Antisense strand to SEQ ID NO: 1738919
aguagcauagaccuuucaa

SEQ ID NO: 1738921 - RNA, 19 nt, Artificial Sequence
  Description of Artificial Sequence: Synthetic oligonucleotide
  Sense strand starting at position 731 of SEQ ID NO: 1562329
ggucuaugcuacuauuuaa

SEQ ID NO: 1738922 - RNA, 19 nt, Artificial Sequence
  Description of Artificial Sequence: Synthetic oligonucleotide
  Antisense strand to SEQ ID NO: 1738921
uuaaauaguagcauagacc

SEQ ID NO: 1738923 - RNA, 19 nt, Artificial Sequence
  Description of Artificial Sequence: Synthetic oligonucleotide
  Sense strand starting at position 756 of SEQ ID NO: 1562329
gacuaagucgauuggaaac

SEQ ID NO: 1738924 - RNA, 19 nt, Artificial Sequence
  Description of Artificial Sequence: Synthetic oligonucleotide
  Antisense strand to SEQ ID NO: 1738923
guuuccaaucgacuuaguc

SEQ ID NO: 1738925 - RNA, 19 nt, Artificial Sequence
  Description of Artificial Sequence: Synthetic oligonucleotide
  Sense strand starting at position 758 of SEQ ID NO: 1562329
cuaagucgauuggaaacaa

SEQ ID NO: 1738926 - RNA, 19 nt, Artificial Sequence
  Description of Artificial Sequence: Synthetic oligonucleotide
  Antisense strand to SEQ ID NO: 1738925
uuguuuccaaucgacuuag

SEQ ID NO: 1738927 - RNA, 19 nt, Artificial Sequence
  Description of Artificial Sequence: Synthetic oligonucleotide
  Sense strand starting at position 1155 of SEQ ID NO: 1562329
gcgcucgguuggcaucaaa

SEQ ID NO: 1738928 - RNA, 19 nt, Artificial Sequence
  Description of Artificial Sequence: Synthetic oligonucleotide
  Antisense strand to SEQ ID NO: 1738927
uuugaugccaaccgagcgc

SEQ ID NO: 1738929 - RNA, 19 nt, Artificial Sequence
  Description of Artificial Sequence: Synthetic oligonucleotide
  Sense strand starting at position 2345 of SEQ ID NO: 1562329
cgaggaagcccagguuuau

SEQ ID NO: 1738930 - RNA, 19 nt, Artificial Sequence
  Description of Artificial Sequence: Synthetic oligonucleotide
  Antisense strand to SEQ ID NO: 1738929
auaaaccugggcuuccucg

SEQ ID NO: 1738931 - RNA, 19 nt, Artificial Sequence
  Description of Artificial Sequence: Synthetic oligonucleotide
  Sense strand starting at position 2354 of SEQ ID NO: 1562329
ccagguuuaugcggaaggu

SEQ ID NO: 1738932 - RNA, 19 nt, Artificial Sequence
  Description of Artificial Sequence: Synthetic oligonucleotide
  Antisense strand to SEQ ID NO: 1738931
accuuccgcauaaaccugg

SEQ ID NO: 1738933 - RNA, 19 nt, Artificial Sequence
  Description of Artificial Sequence: Synthetic oligonucleotide
  Sense strand starting at position 2818 of SEQ ID NO: 1562329
ucgugugcgcgaaacucau

SEQ ID NO: 1738934 - RNA, 19 nt, Artificial Sequence
  Description of Artificial Sequence: Synthetic oligonucleotide
  Antisense strand to SEQ ID NO: 1738933
augaguuucgcgcacacga

SEQ ID NO: 1738935 - RNA, 19 nt, Artificial Sequence
  Description of Artificial Sequence: Synthetic oligonucleotide
  Sense strand starting at position 2824 of SEQ ID NO: 1562329
gcgcgaaacucauggcacu

SEQ ID NO: 1738936 - RNA, 19 nt, Artificial Sequence
  Description of Artificial Sequence: Synthetic oligonucleotide
  Antisense strand to SEQ ID NO: 1738935
agugccaugaguuucgcgc

SEQ ID NO: 1738937 - RNA, 19 nt, Artificial Sequence
  Description of Artificial Sequence: Synthetic oligonucleotide
  Sense strand starting at position 2918 of SEQ ID NO: 1562329
cuccuaugccuggaccaaa

SEQ ID NO: 1738938 - RNA, 19 nt, Artificial Sequence
  Description of Artificial Sequence: Synthetic oligonucleotide
  Antisense strand to SEQ ID NO: 1738937
uuugguccaggcauaggag

SEQ ID NO: 1738939 - RNA, 19 nt, Artificial Sequence
  Description of Artificial Sequence: Synthetic oligonucleotide
  Sense strand starting at position 3381 of SEQ ID NO: 1562329
aguagaaguggucaucgca

SEQ ID NO: 1738940 - RNA, 19 nt, Artificial Sequence
  Description of Artificial Sequence: Synthetic oligonucleotide
  Antisense strand to SEQ ID NO: 1738939
ugcgaugaccacuucuacu

SEQ ID NO: 1738941 - RNA, 19 nt, Artificial Sequence
  Description of Artificial Sequence: Synthetic oligonucleotide
  Sense strand starting at position 3524 of SEQ ID NO: 1562329
gaccguaccuugugugcau

SEQ ID NO: 1738942 - RNA, 19 nt, Artificial Sequence
  Description of Artificial Sequence: Synthetic oligonucleotide
  Antisense strand to SEQ ID NO: 1738941
augcacacaagguacgguc

SEQ ID NO: 1738943 - RNA, 19 nt, Artificial Sequence
  Description of Artificial Sequence: Synthetic oligonucleotide
  Sense strand starting at position 3582 of SEQ ID NO: 1562329
guguuucuguaacuaugua

SEQ ID NO: 1738944 - RNA, 19 nt, Artificial Sequence
  Description of Artificial Sequence: Synthetic oligonucleotide
  Antisense strand to SEQ ID NO: 1738943
uacauaguuacagaaacac

SEQ ID NO: 1738945 - RNA, 19 nt, Artificial Sequence
  Description of Artificial Sequence: Synthetic oligonucleotide
  Sense strand starting at position 130 of SEQ ID NO: 1562330
caggguuccugguaccaau

SEQ ID NO: 1738946 - RNA, 19 nt, Artificial Sequence
  Description of Artificial Sequence: Synthetic oligonucleotide
  Antisense strand to SEQ ID NO: 1738945
auugguaccaggaacccug

SEQ ID NO: 1738947 - RNA, 19 nt, Artificial Sequence
  Description of Artificial Sequence: Synthetic oligonucleotide
  Sense strand starting at position 1404 of SEQ ID NO: 1562330
gaagguuucucgcuggauu

SEQ ID NO: 1738948 - RNA, 19 nt, Artificial Sequence
  Description of Artificial Sequence: Synthetic oligonucleotide
  Antisense strand to SEQ ID NO: 1738947
aauccagcgagaaaccuuc

SEQ ID NO: 1738949 - RNA, 19 nt, Artificial Sequence
  Description of Artificial Sequence: Synthetic oligonucleotide
  Sense strand starting at position 1405 of SEQ ID NO: 1562330
aagguuucucgcuggauuc

SEQ ID NO: 1738950 - RNA, 19 nt, Artificial Sequence
  Description of Artificial Sequence: Synthetic oligonucleotide
  Antisense strand to SEQ ID NO: 1738949
gaauccagcgagaaaccuu

SEQ ID NO: 1738951 - RNA, 19 nt, Artificial Sequence
  Description of Artificial Sequence: Synthetic oligonucleotide
  Sense strand starting at position 1406 of SEQ ID NO: 1562330
agguuucucgcuggauuca

SEQ ID NO: 1738952 - RNA, 19 nt, Artificial Sequence
  Description of Artificial Sequence: Synthetic oligonucleotide
  Antisense strand to SEQ ID NO: 1738951
ugaauccagcgagaaaccu

SEQ ID NO: 1738953 - RNA, 19 nt, Artificial Sequence
  Description of Artificial Sequence: Synthetic oligonucleotide
  Sense strand starting at position 1434 of SEQ ID NO: 1562330
gcgcacgacuucuucuaga

SEQ ID NO: 1738954 - RNA, 19 nt, Artificial Sequence
  Description of Artificial Sequence: Synthetic oligonucleotide
  Antisense strand to SEQ ID NO: 1738953
ucuagaagaagucgugcgc

SEQ ID NO: 1738955 - RNA, 19 nt, Artificial Sequence
  Description of Artificial Sequence: Synthetic oligonucleotide
  Sense strand starting at position 1598 of SEQ ID NO: 1562330
gcugaaugcugagccucua

SEQ ID NO: 1738956 - RNA, 19 nt, Artificial Sequence
  Description of Artificial Sequence: Synthetic oligonucleotide
  Antisense strand to SEQ ID NO: 1738955
uagaggcucagcauucagc

SEQ ID NO: 1738957 - RNA, 19 nt, Artificial Sequence
  Description of Artificial Sequence: Synthetic oligonucleotide
  Sense strand starting at position 2325 of SEQ ID NO: 1562330
agcugaaucaaacgucuga

SEQ ID NO: 1738958 - RNA, 19 nt, Artificial Sequence
  Description of Artificial Sequence: Synthetic oligonucleotide
  Antisense strand to SEQ ID NO: 1738957
ucagacguuugauucagcu

SEQ ID NO: 1738959 - RNA, 19 nt, Artificial Sequence
  Description of Artificial Sequence: Synthetic oligonucleotide
  Sense strand starting at position 2372 of SEQ ID NO: 1562330
cuugaaacaucuuucggua

SEQ ID NO: 1738960 - RNA, 19 nt, Artificial Sequence
  Description of Artificial Sequence: Synthetic oligonucleotide
  Antisense strand to SEQ ID NO: 1738959
uaccgaaagauguuucaag

SEQ ID NO: 1738961 - RNA, 19 nt, Artificial Sequence
  Description of Artificial Sequence: Synthetic oligonucleotide
  Sense strand starting at position 2374 of SEQ ID NO: 1562330
ugaaacaucuuucgguagu

SEQ ID NO: 1738962 - RNA, 19 nt, Artificial Sequence
  Description of Artificial Sequence: Synthetic oligonucleotide
  Antisense strand to SEQ ID NO: 1738961
acuaccgaaagauguuuca

SEQ ID NO: 1738963 - RNA, 19 nt, Artificial Sequence
  Description of Artificial Sequence: Synthetic oligonucleotide
  Sense strand starting at position 2375 of SEQ ID NO: 1562330
gaaacaucuuucgguaguu

SEQ ID NO: 1738964 - RNA, 19 nt, Artificial Sequence
  Description of Artificial Sequence: Synthetic oligonucleotide
  Antisense strand to SEQ ID NO: 1738963
aacuaccgaaagauguuuc

SEQ ID NO: 1738965 - RNA, 19 nt, Artificial Sequence
  Description of Artificial Sequence: Synthetic oligonucleotide
  Sense strand starting at position 2376 of SEQ ID NO: 1562330
aaacaucuuucgguaguuu

SEQ ID NO: 1738966 - RNA, 19 nt, Artificial Sequence
  Description of Artificial Sequence: Synthetic oligonucleotide
  Antisense strand to SEQ ID NO: 1738965
aaacuaccgaaagauguuu

SEQ ID NO: 1738967 - RNA, 19 nt, Artificial Sequence
  Description of Artificial Sequence: Synthetic oligonucleotide
  Sense strand starting at position 2474 of SEQ ID NO: 1562330
cgccgugagcugaauuguu

SEQ ID NO: 1738968 - RNA, 19 nt, Artificial Sequence
  Description of Artificial Sequence: Synthetic oligonucleotide
  Antisense strand to SEQ ID NO: 1738967
aacaauucagcucacggcg

SEQ ID NO: 1738969 - RNA, 19 nt, Artificial Sequence
  Description of Artificial Sequence: Synthetic oligonucleotide
  Sense strand starting at position 2487 of SEQ ID NO: 1562330
auuguugcuuuaucagauc

SEQ ID NO: 1738970 - RNA, 19 nt, Artificial Sequence
  Description of Artificial Sequence: Synthetic oligonucleotide
  Antisense strand to SEQ ID NO: 1738969
gaucugauaaagcaacaau

SEQ ID NO: 1738971 - RNA, 19 nt, Artificial Sequence
  Description of Artificial Sequence: Synthetic oligonucleotide
  Sense strand starting at position 2498 of SEQ ID NO: 1562330
aucagaucuccgcguucuu

SEQ ID NO: 1738972 - RNA, 19 nt, Artificial Sequence
  Description of Artificial Sequence: Synthetic oligonucleotide
  Antisense strand to SEQ ID NO: 1738971
aagaacgcggagaucugau

SEQ ID NO: 1738973 - RNA, 19 nt, Artificial Sequence
  Description of Artificial Sequence: Synthetic oligonucleotide
  Sense strand starting at position 2499 of SEQ ID NO: 1562330
ucagaucuccgcguucuuu

SEQ ID NO: 1738974 - RNA, 19 nt, Artificial Sequence
  Description of Artificial Sequence: Synthetic oligonucleotide
  Antisense strand to SEQ ID NO: 1738973
aaagaacgcggagaucuga

SEQ ID NO: 1738975 - RNA, 19 nt, Artificial Sequence
  Description of Artificial Sequence: Synthetic oligonucleotide
  Sense strand starting at position 2538 of SEQ ID NO: 1562330
acaguauagucggauacgu

SEQ ID NO: 1738976 - RNA, 19 nt, Artificial Sequence
  Description of Artificial Sequence: Synthetic oligonucleotide
  Antisense strand to SEQ ID NO: 1738975
acguauccgacuauacugu

SEQ ID NO: 1738977 - RNA, 19 nt, Artificial Sequence
  Description of Artificial Sequence: Synthetic oligonucleotide
  Sense strand starting at position 2540 of SEQ ID NO: 1562330
aguauagucggauacguau

SEQ ID NO: 1738978 - RNA, 19 nt, Artificial Sequence
  Description of Artificial Sequence: Synthetic oligonucleotide
  Antisense strand to SEQ ID NO: 1738977
auacguauccgacuauacu

SEQ ID NO: 1738979 - RNA, 19 nt, Artificial Sequence
  Description of Artificial Sequence: Synthetic oligonucleotide
  Sense strand starting at position 2542 of SEQ ID NO: 1562330
uauagucggauacguauuu

SEQ ID NO: 1738980 - RNA, 19 nt, Artificial Sequence
  Description of Artificial Sequence: Synthetic oligonucleotide
  Antisense strand to SEQ ID NO: 1738979
aaauacguauccgacuaua

SEQ ID NO: 1738981 - RNA, 19 nt, Artificial Sequence
  Description of Artificial Sequence: Synthetic oligonucleotide
  Sense strand starting at position 2547 of SEQ ID NO: 1562330
ucggauacguauuugccaa

SEQ ID NO: 1738982 - RNA, 19 nt, Artificial Sequence
  Description of Artificial Sequence: Synthetic oligonucleotide
  Antisense strand to SEQ ID NO: 1738981
uuggcaaauacguauccga

SEQ ID NO: 1738983 - RNA, 19 nt, Artificial Sequence
  Description of Artificial Sequence: Synthetic oligonucleotide
  Sense strand starting at position 2548 of SEQ ID NO: 1562330
cggauacguauuugccaaa

SEQ ID NO: 1738984 - RNA, 19 nt, Artificial Sequence
  Description of Artificial Sequence: Synthetic oligonucleotide
  Antisense strand to SEQ ID NO: 1738983
uuuggcaaauacguauccg

SEQ ID NO: 1738985 - RNA, 19 nt, Artificial Sequence
  Description of Artificial Sequence: Synthetic oligonucleotide
  Sense strand starting at position 2551 of SEQ ID NO: 1562330
auacguauuugccaaagau

SEQ ID NO: 1738986 - RNA, 19 nt, Artificial Sequence
  Description of Artificial Sequence: Synthetic oligonucleotide
  Antisense strand to SEQ ID NO: 1738985
aucuuuggcaaauacguau

SEQ ID NO: 1738987 - RNA, 19 nt, Artificial Sequence
  Description of Artificial Sequence: Synthetic oligonucleotide
  Sense strand starting at position 2574 of SEQ ID NO: 1562330
caguuuguaccgugggaag

SEQ ID NO: 1738988 - RNA, 19 nt, Artificial Sequence
  Description of Artificial Sequence: Synthetic oligonucleotide
  Antisense strand to SEQ ID NO: 1738987
cuucccacgguacaaacug

SEQ ID NO: 1738989 - RNA, 19 nt, Artificial Sequence
  Description of Artificial Sequence: Synthetic oligonucleotide
  Sense strand starting at position 2591 of SEQ ID NO: 1562330
agacaaaguugcucacaau

SEQ ID NO: 1738990 - RNA, 19 nt, Artificial Sequence
  Description of Artificial Sequence: Synthetic oligonucleotide
  Antisense strand to SEQ ID NO: 1738989
auugugagcaacuuugucu

SEQ ID NO: 1738991 - RNA, 19 nt, Artificial Sequence
  Description of Artificial Sequence: Synthetic oligonucleotide
  Sense strand starting at position 2597 of SEQ ID NO: 1562330
aguugcucacaauauaguu

SEQ ID NO: 1738992 - RNA, 19 nt, Artificial Sequence
  Description of Artificial Sequence: Synthetic oligonucleotide
  Antisense strand to SEQ ID NO: 1738991
aacuauauugugagcaacu

SEQ ID NO: 1738993 - RNA, 19 nt, Artificial Sequence
  Description of Artificial Sequence: Synthetic oligonucleotide
  Sense strand starting at position 2602 of SEQ ID NO: 1562330
cucacaauauaguuguuau

SEQ ID NO: 1738994 - RNA, 19 nt, Artificial Sequence
  Description of Artificial Sequence: Synthetic oligonucleotide
  Antisense strand to SEQ ID NO: 1738993
auaacaacuauauugugag

SEQ ID NO: 1738995 - RNA, 19 nt, Artificial Sequence
  Description of Artificial Sequence: Synthetic oligonucleotide
  Sense strand starting at position 3332 of SEQ ID NO: 1562330
gcugcugagacuugccuaa

SEQ ID NO: 1738996 - RNA, 19 nt, Artificial Sequence
  Description of Artificial Sequence: Synthetic oligonucleotide
  Antisense strand to SEQ ID NO: 1738995
uuaggcaagucucagcagc

SEQ ID NO: 1738997 - RNA, 19 nt, Artificial Sequence
  Description of Artificial Sequence: Synthetic oligonucleotide
  Sense strand starting at position 3334 of SEQ ID NO: 1562330
ugcugagacuugccuaaca

SEQ ID NO: 1738998 - RNA, 19 nt, Artificial Sequence
  Description of Artificial Sequence: Synthetic oligonucleotide
  Antisense strand to SEQ ID NO: 1738997
uguuaggcaagucucagca

SEQ ID NO: 1738999 - RNA, 19 nt, Artificial Sequence
  Description of Artificial Sequence: Synthetic oligonucleotide
  Sense strand starting at position 100 of SEQ ID NO: 1562331
acacacggucagugaucaa

SEQ ID NO: 1739000 - RNA, 19 nt, Artificial Sequence
  Description of Artificial Sequence: Synthetic oligonucleotide
  Antisense strand to SEQ ID NO: 1738999
uugaucacugaccgugugu

SEQ ID NO: 1739001 - RNA, 19 nt, Artificial Sequence
  Description of Artificial Sequence: Synthetic oligonucleotide
  Sense strand starting at position 103 of SEQ ID NO: 1562331
cacggucagugaucaaaca

SEQ ID NO: 1739002 - RNA, 19 nt, Artificial Sequence
  Description of Artificial Sequence: Synthetic oligonucleotide
  Antisense strand to SEQ ID NO: 1739001
uguuugaucacugaccgug

SEQ ID NO: 1739003 - RNA, 19 nt, Artificial Sequence
  Description of Artificial Sequence: Synthetic oligonucleotide
  Sense strand starting at position 548 of SEQ ID NO: 1562331
uugcauaaacgugaaauag

SEQ ID NO: 1739004 - RNA, 19 nt, Artificial Sequence
  Description of Artificial Sequence: Synthetic oligonucleotide
  Antisense strand to SEQ ID NO: 1739003
cuauuucacguuuaugcaa

SEQ ID NO: 1739005 - RNA, 19 nt, Artificial Sequence
  Description of Artificial Sequence: Synthetic oligonucleotide
  Sense strand starting at position 589 of SEQ ID NO: 1562331
cgugcagggccguguuuaa

SEQ ID NO: 1739006 - RNA, 19 nt, Artificial Sequence
  Description of Artificial Sequence: Synthetic oligonucleotide
  Antisense strand to SEQ ID NO: 1739005
uuaaacacggcccugcacg

SEQ ID NO: 1739007 - RNA, 19 nt, Artificial Sequence
  Description of Artificial Sequence: Synthetic oligonucleotide
  Sense strand starting at position 594 of SEQ ID NO: 1562331
agggccguguuuaagagaa

SEQ ID NO: 1739008 - RNA, 19 nt, Artificial Sequence
  Description of Artificial Sequence: Synthetic oligonucleotide
  Antisense strand to SEQ ID NO: 1739007
uucucuuaaacacggcccu

SEQ ID NO: 1739009 - RNA, 19 nt, Artificial Sequence
  Description of Artificial Sequence: Synthetic oligonucleotide
  Sense strand starting at position 596 of SEQ ID NO: 1562331
ggccguguuuaagagaaag

SEQ ID NO: 1739010 - RNA, 19 nt, Artificial Sequence
  Description of Artificial Sequence: Synthetic oligonucleotide
  Antisense strand to SEQ ID NO: 1739009
cuuucucuuaaacacggcc

SEQ ID NO: 1739011 - RNA, 19 nt, Artificial Sequence
  Description of Artificial Sequence: Synthetic oligonucleotide
  Sense strand starting at position 598 of SEQ ID NO: 1562331
ccguguuuaagagaaagca

SEQ ID NO: 1739012 - RNA, 19 nt, Artificial Sequence
  Description of Artificial Sequence: Synthetic oligonucleotide
  Antisense strand to SEQ ID NO: 1739011
ugcuuucucuuaaacacgg

SEQ ID NO: 1739013 - RNA, 19 nt, Artificial Sequence
  Description of Artificial Sequence: Synthetic oligonucleotide
  Sense strand starting at position 949 of SEQ ID NO: 1562331
ucuggccuuucuugaaaua

SEQ ID NO: 1739014 - RNA, 19 nt, Artificial Sequence
  Description of Artificial Sequence: Synthetic oligonucleotide
  Antisense strand to SEQ ID NO: 1739013
uauuucaagaaaggccaga

SEQ ID NO: 1739015 - RNA, 19 nt, Artificial Sequence
  Description of Artificial Sequence: Synthetic oligonucleotide
  Sense strand starting at position 950 of SEQ ID NO: 1562331
cuggccuuucuugaaauaa

SEQ ID NO: 1739016 - RNA, 19 nt, Artificial Sequence
  Description of Artificial Sequence: Synthetic oligonucleotide
  Antisense strand to SEQ ID NO: 1739015
uuauuucaagaaaggccag

SEQ ID NO: 1739017 - RNA, 19 nt, Artificial Sequence
  Description of Artificial Sequence: Synthetic oligonucleotide
  Sense strand starting at position 999 of SEQ ID NO: 1562331
aagccagagcuguguuauc

SEQ ID NO: 1739018 - RNA, 19 nt, Artificial Sequence
  Description of Artificial Sequence: Synthetic oligonucleotide
  Antisense strand to SEQ ID NO: 1739017
gauaacacagcucuggcuu

SEQ ID NO: 1739019 - RNA, 19 nt, Artificial Sequence
  Description of Artificial Sequence: Synthetic oligonucleotide
  Sense strand starting at position 1004 of SEQ ID NO: 1562331
agagcuguguuaucccaag

SEQ ID NO: 1739020 - RNA, 19 nt, Artificial Sequence
  Description of Artificial Sequence: Synthetic oligonucleotide
  Antisense strand to SEQ ID NO: 1739019
cuugggauaacacagcucu

SEQ ID NO: 1739021 - RNA, 19 nt, Artificial Sequence
  Description of Artificial Sequence: Synthetic oligonucleotide
  Sense strand starting at position 2859 of SEQ ID NO: 1562331
cagagcuguccuggaaggu

SEQ ID NO: 1739022 - RNA, 19 nt, Artificial Sequence
  Description of Artificial Sequence: Synthetic oligonucleotide
  Antisense strand to SEQ ID NO: 1739021
accuuccaggacagcucug

SEQ ID NO: 1739023 - RNA, 19 nt, Artificial Sequence
  Description of Artificial Sequence: Synthetic oligonucleotide
  Sense strand starting at position 2962 of SEQ ID NO: 1562331
guggugugugcaucugagu

SEQ ID NO: 1739024 - RNA, 19 nt, Artificial Sequence
  Description of Artificial Sequence: Synthetic oligonucleotide
  Antisense strand to SEQ ID NO: 1739023
acucagaugcacacaccac

SEQ ID NO: 1739025 - RNA, 19 nt, Artificial Sequence
  Description of Artificial Sequence: Synthetic oligonucleotide
  Sense strand starting at position 2995 of SEQ ID NO: 1562331
ugugucugagacugaguuu

SEQ ID NO: 1739026 - RNA, 19 nt, Artificial Sequence
  Description of Artificial Sequence: Synthetic oligonucleotide
  Antisense strand to SEQ ID NO: 1739025
aaacucagucucagacaca

SEQ ID NO: 1739027 - RNA, 19 nt, Artificial Sequence
  Description of Artificial Sequence: Synthetic oligonucleotide
  Sense strand starting at position 3010 of SEQ ID NO: 1562331
guuugagucuguggugugu

SEQ ID NO: 1739028 - RNA, 19 nt, Artificial Sequence
  Description of Artificial Sequence: Synthetic oligonucleotide
  Antisense strand to SEQ ID NO: 1739027
acacaccacagacucaaac

SEQ ID NO: 1739029 - RNA, 19 nt, Artificial Sequence
  Description of Artificial Sequence: Synthetic oligonucleotide
  Sense strand starting at position 3097 of SEQ ID NO: 1562331
gucugagguugagugugaa

SEQ ID NO: 1739030 - RNA, 19 nt, Artificial Sequence
  Description of Artificial Sequence: Synthetic oligonucleotide
  Antisense strand to SEQ ID NO: 1739029
uucacacucaaccucagac

SEQ ID NO: 1739031 - RNA, 19 nt, Artificial Sequence
  Description of Artificial Sequence: Synthetic oligonucleotide
  Sense strand starting at position 3100 of SEQ ID NO: 1562331
ugagguugagugugaaugu

SEQ ID NO: 1739032 - RNA, 19 nt, Artificial Sequence
  Description of Artificial Sequence: Synthetic oligonucleotide
  Antisense strand to SEQ ID NO: 1739031
acauucacacucaaccuca

SEQ ID NO: 1739033 - RNA, 19 nt, Artificial Sequence
  Description of Artificial Sequence: Synthetic oligonucleotide
  Sense strand starting at position 3144 of SEQ ID NO: 1562331
aguguaugugccuaagugu

SEQ ID NO: 1739034 - RNA, 19 nt, Artificial Sequence
  Description of Artificial Sequence: Synthetic oligonucleotide
  Antisense strand to SEQ ID NO: 1739033
acacuuaggcacauacacu

SEQ ID NO: 1739035 - RNA, 19 nt, Artificial Sequence
  Description of Artificial Sequence: Synthetic oligonucleotide
  Sense strand starting at position 3363 of SEQ ID NO: 1562331
uuaccuuggcuccagaagu

SEQ ID NO: 1739036 - RNA, 19 nt, Artificial Sequence
  Description of Artificial Sequence: Synthetic oligonucleotide
  Antisense strand to SEQ ID NO: 1739035
acuucuggagccaagguaa

SEQ ID NO: 1739037 - RNA, 19 nt, Artificial Sequence
  Description of Artificial Sequence: Synthetic oligonucleotide
  Sense strand starting at position 3555 of SEQ ID NO: 1562331
gcaccugccucuuggaaga

SEQ ID NO: 1739038 - RNA, 19 nt, Artificial Sequence
  Description of Artificial Sequence: Synthetic oligonucleotide
  Antisense strand to SEQ ID NO: 1739037
ucuuccaagaggcaggugc

SEQ ID NO: 1739039 - RNA, 19 nt, Artificial Sequence
  Description of Artificial Sequence: Synthetic oligonucleotide
  Sense strand starting at position 3626 of SEQ ID NO: 1562331
ggccguuucccggccaaca

SEQ ID NO: 1739040 - RNA, 19 nt, Artificial Sequence
  Description of Artificial Sequence: Synthetic oligonucleotide
  Antisense strand to SEQ ID NO: 1739039
uguuggccgggaaacggcc

SEQ ID NO: 1739041 - RNA, 19 nt, Artificial Sequence
  Description of Artificial Sequence: Synthetic oligonucleotide
  Sense strand starting at position 3649 of SEQ ID NO: 1562331
ggacaccauucugguugau

SEQ ID NO: 1739042 - RNA, 19 nt, Artificial Sequence
  Description of Artificial Sequence: Synthetic oligonucleotide
  Antisense strand to SEQ ID NO: 1739041
aucaaccagaauggugucc

SEQ ID NO: 1739043 - RNA, 19 nt, Artificial Sequence
  Description of Artificial Sequence: Synthetic oligonucleotide
  Sense strand starting at position 3651 of SEQ ID NO: 1562331
acaccauucugguugaugu

SEQ ID NO: 1739044 - RNA, 19 nt, Artificial Sequence
  Description of Artificial Sequence: Synthetic oligonucleotide
  Antisense strand to SEQ ID NO: 1739043
acaucaaccagaauggugu

SEQ ID NO: 1739045 - RNA, 19 nt, Artificial Sequence
  Description of Artificial Sequence: Synthetic oligonucleotide
  Sense strand starting at position 3676 of SEQ ID NO: 1562331
auggguaaucuuuggcaca

SEQ ID NO: 1739046 - RNA, 19 nt, Artificial Sequence
  Description of Artificial Sequence: Synthetic oligonucleotide
  Antisense strand to SEQ ID NO: 1739045
ugugccaaagauuacccau

SEQ ID NO: 1739047 - RNA, 19 nt, Artificial Sequence
  Description of Artificial Sequence: Synthetic oligonucleotide
  Sense strand starting at position 3677 of SEQ ID NO: 1562331
uggguaaucuuuggcacaa

SEQ ID NO: 1739048 - RNA, 19 nt, Artificial Sequence
  Description of Artificial Sequence: Synthetic oligonucleotide
  Antisense strand to SEQ ID NO: 1739047
uugugccaaagauuaccca

SEQ ID NO: 1739049 - RNA, 19 nt, Artificial Sequence
  Description of Artificial Sequence: Synthetic oligonucleotide
  Sense strand starting at position 3678 of SEQ ID NO: 1562331
ggguaaucuuuggcacaaa

SEQ ID NO: 1739050 - RNA, 19 nt, Artificial Sequence
  Description of Artificial Sequence: Synthetic oligonucleotide
  Antisense strand to SEQ ID NO: 1739049
uuugugccaaagauuaccc

SEQ ID NO: 1739051 - RNA, 19 nt, Artificial Sequence
  Description of Artificial Sequence: Synthetic oligonucleotide
  Sense strand starting at position 3679 of SEQ ID NO: 1562331
gguaaucuuuggcacaaag

SEQ ID NO: 1739052 - RNA, 19 nt, Artificial Sequence
  Description of Artificial Sequence: Synthetic oligonucleotide
  Antisense strand to SEQ ID NO: 1739051
cuuugugccaaagauuacc

SEQ ID NO: 1739053 - RNA, 19 nt, Artificial Sequence
  Description of Artificial Sequence: Synthetic oligonucleotide
  Sense strand starting at position 3728 of SEQ ID NO: 1562331
aagagugaucugggacguu

SEQ ID NO: 1739054 - RNA, 19 nt, Artificial Sequence
  Description of Artificial Sequence: Synthetic oligonucleotide
  Antisense strand to SEQ ID NO: 1739053
aacgucccagaucacucuu

SEQ ID NO: 1739055 - RNA, 19 nt, Artificial Sequence
  Description of Artificial Sequence: Synthetic oligonucleotide
  Sense strand starting at position 3836 of SEQ ID NO: 1562331
aauggagauugcgacguua

SEQ ID NO: 1739056 - RNA, 19 nt, Artificial Sequence
  Description of Artificial Sequence: Synthetic oligonucleotide
  Antisense strand to SEQ ID NO: 1739055
uaacgucgcaaucuccauu

SEQ ID NO: 1739057 - RNA, 19 nt, Artificial Sequence
  Description of Artificial Sequence: Synthetic oligonucleotide
  Sense strand starting at position 3870 of SEQ ID NO: 1562331
caggcuuggugugagaaca

SEQ ID NO: 1739058 - RNA, 19 nt, Artificial Sequence
  Description of Artificial Sequence: Synthetic oligonucleotide
  Antisense strand to SEQ ID NO: 1739057
uguucucacaccaagccug

SEQ ID NO: 1739059 - RNA, 19 nt, Artificial Sequence
  Description of Artificial Sequence: Synthetic oligonucleotide
  Sense strand starting at position 3921 of SEQ ID NO: 1562331
auguuuggcagagguagaa

SEQ ID NO: 1739060 - RNA, 19 nt, Artificial Sequence
  Description of Artificial Sequence: Synthetic oligonucleotide
  Antisense strand to SEQ ID NO: 1739059
uucuaccucugccaaacau

SEQ ID NO: 1739061 - RNA, 19 nt, Artificial Sequence
  Description of Artificial Sequence: Synthetic oligonucleotide
  Sense strand starting at position 2389 of SEQ ID NO: 1562332
gacacaucguccucagagu

SEQ ID NO: 1739062 - RNA, 19 nt, Artificial Sequence
  Description of Artificial Sequence: Synthetic oligonucleotide
  Antisense strand to SEQ ID NO: 1739061
acucugaggacgauguguc

SEQ ID NO: 1739063 - RNA, 19 nt, Artificial Sequence
  Description of Artificial Sequence: Synthetic oligonucleotide
  Sense strand starting at position 1056 of SEQ ID NO: 1562333
ggcauugaugccuacugca

SEQ ID NO: 1739064 - RNA, 19 nt, Artificial Sequence
  Description of Artificial Sequence: Synthetic oligonucleotide
  Antisense strand to SEQ ID NO: 1739063
ugcaguaggcaucaaugcc

SEQ ID NO: 1739065 - RNA, 19 nt, Artificial Sequence
  Description of Artificial Sequence: Synthetic oligonucleotide
  Sense strand starting at position 2387 of SEQ ID NO: 1562333
uagacacaucgucgucaga

SEQ ID NO: 1739066 - RNA, 19 nt, Artificial Sequence
  Description of Artificial Sequence: Synthetic oligonucleotide
  Antisense strand to SEQ ID NO: 1739065
ucugacgacgaugugucua

SEQ ID NO: 1739067 - RNA, 19 nt, Artificial Sequence
  Description of Artificial Sequence: Synthetic oligonucleotide
  Sense strand starting at position 2389 of SEQ ID NO: 1562333
gacacaucgucgucagagu

SEQ ID NO: 1739068 - RNA, 19 nt, Artificial Sequence
  Description of Artificial Sequence: Synthetic oligonucleotide
  Antisense strand to SEQ ID NO: 1739067
acucugacgacgauguguc

SEQ ID NO: 1739069 - RNA, 19 nt, Artificial Sequence
  Description of Artificial Sequence: Synthetic oligonucleotide
  Sense strand starting at position 305 of SEQ ID NO: 1562334
cucuccugagcucaaugua

SEQ ID NO: 1739070 - RNA, 19 nt, Artificial Sequence
  Description of Artificial Sequence: Synthetic oligonucleotide
  Antisense strand to SEQ ID NO: 1739069
uacauugagcucaggagag

SEQ ID NO: 1739071 - RNA, 19 nt, Artificial Sequence
  Description of Artificial Sequence: Synthetic oligonucleotide
  Sense strand starting at position 344 of SEQ ID NO: 1562334
gagcauaguuaaucuuaga

SEQ ID NO: 1739072 - RNA, 19 nt, Artificial Sequence
  Description of Artificial Sequence: Synthetic oligonucleotide
  Antisense strand to SEQ ID NO: 1739071
ucuaagauuaacuaugcuc

SEQ ID NO: 1739073 - RNA, 19 nt, Artificial Sequence
  Description of Artificial Sequence: Synthetic oligonucleotide
  Sense strand starting at position 442 of SEQ ID NO: 1562334
ugcuguaagcuggaacaga

SEQ ID NO: 1739074 - RNA, 19 nt, Artificial Sequence
  Description of Artificial Sequence: Synthetic oligonucleotide
  Antisense strand to SEQ ID NO: 1739073
ucuguuccagcuuacagca

SEQ ID NO: 1739075 - RNA, 19 nt, Artificial Sequence
  Description of Artificial Sequence: Synthetic oligonucleotide
  Sense strand starting at position 461 of SEQ ID NO: 1562334
ggcaucgauaagggaaauu

SEQ ID NO: 1739076 - RNA, 19 nt, Artificial Sequence
  Description of Artificial Sequence: Synthetic oligonucleotide
  Antisense strand to SEQ ID NO: 1739075
aauuucccuuaucgaugcc

SEQ ID NO: 1739077 - RNA, 19 nt, Artificial Sequence
  Description of Artificial Sequence: Synthetic oligonucleotide
  Sense strand starting at position 494 of SEQ ID NO: 1562334
guaauuauacacugcaaug

SEQ ID NO: 1739078 - RNA, 19 nt, Artificial Sequence
  Description of Artificial Sequence: Synthetic oligonucleotide
  Antisense strand to SEQ ID NO: 1739077
cauugcaguguauaauuac

SEQ ID NO: 1739079 - RNA, 19 nt, Artificial Sequence
  Description of Artificial Sequence: Synthetic oligonucleotide
  Sense strand starting at position 512 of SEQ ID NO: 1562334
ggcugcgggaucugauuua

SEQ ID NO: 1739080 - RNA, 19 nt, Artificial Sequence
  Description of Artificial Sequence: Synthetic oligonucleotide
  Antisense strand to SEQ ID NO: 1739079
uaaaucagaucccgcagcc

SEQ ID NO: 1739081 - RNA, 19 nt, Artificial Sequence
  Description of Artificial Sequence: Synthetic oligonucleotide
  Sense strand starting at position 519 of SEQ ID NO: 1562334
ggaucugauuuagaaguca

SEQ ID NO: 1739082 - RNA, 19 nt, Artificial Sequence
  Description of Artificial Sequence: Synthetic oligonucleotide
  Antisense strand to SEQ ID NO: 1739081
ugacuucuaaaucagaucc

SEQ ID NO: 1739083 - RNA, 19 nt, Artificial Sequence
  Description of Artificial Sequence: Synthetic oligonucleotide
  Sense strand starting at position 533 of SEQ ID NO: 1562334
agucauaacugacccgagu

SEQ ID NO: 1739084 - RNA, 19 nt, Artificial Sequence
  Description of Artificial Sequence: Synthetic oligonucleotide
  Antisense strand to SEQ ID NO: 1739083
acucgggucaguuaugacu

SEQ ID NO: 1739085 - RNA, 19 nt, Artificial Sequence
  Description of Artificial Sequence: Synthetic oligonucleotide
  Sense strand starting at position 560 of SEQ ID NO: 1562334
gggcuuuccuacuuauuag

SEQ ID NO: 1739086 - RNA, 19 nt, Artificial Sequence
  Description of Artificial Sequence: Synthetic oligonucleotide
  Antisense strand to SEQ ID NO: 1739085
cuaauaaguaggaaagccc

SEQ ID NO: 1739087 - RNA, 19 nt, Artificial Sequence
  Description of Artificial Sequence: Synthetic oligonucleotide
  Sense strand starting at position 568 of SEQ ID NO: 1562334
cuacuuauuagcgguauga

SEQ ID NO: 1739088 - RNA, 19 nt, Artificial Sequence
  Description of Artificial Sequence: Synthetic oligonucleotide
  Antisense strand to SEQ ID NO: 1739087
ucauaccgcuaauaaguag

SEQ ID NO: 1739089 - RNA, 19 nt, Artificial Sequence
  Description of Artificial Sequence: Synthetic oligonucleotide
  Sense strand starting at position 570 of SEQ ID NO: 1562334
acuuauuagcgguaugacu

SEQ ID NO: 1739090 - RNA, 19 nt, Artificial Sequence
  Description of Artificial Sequence: Synthetic oligonucleotide
  Antisense strand to SEQ ID NO: 1739089
agucauaccgcuaauaagu

SEQ ID NO: 1739091 - RNA, 19 nt, Artificial Sequence
  Description of Artificial Sequence: Synthetic oligonucleotide
  Sense strand starting at position 581 of SEQ ID NO: 1562334
guaugacuuugggcuacuu

SEQ ID NO: 1739092 - RNA, 19 nt, Artificial Sequence
  Description of Artificial Sequence: Synthetic oligonucleotide
  Antisense strand to SEQ ID NO: 1739091
aaguagcccaaagucauac

SEQ ID NO: 1739093 - RNA, 19 nt, Artificial Sequence
  Description of Artificial Sequence: Synthetic oligonucleotide
  Sense strand starting at position 583 of SEQ ID NO: 1562334
augacuuugggcuacuuaa

SEQ ID NO: 1739094 - RNA, 19 nt, Artificial Sequence
  Description of Artificial Sequence: Synthetic oligonucleotide
  Antisense strand to SEQ ID NO: 1739093
uuaaguagcccaaagucau

SEQ ID NO: 1739095 - RNA, 19 nt, Artificial Sequence
  Description of Artificial Sequence: Synthetic oligonucleotide
  Sense strand starting at position 653 of SEQ ID NO: 1562334
aucucagaggguugccaua

SEQ ID NO: 1739096 - RNA, 19 nt, Artificial Sequence
  Description of Artificial Sequence: Synthetic oligonucleotide
  Antisense strand to SEQ ID NO: 1739095
uauggcaacccucugagau

SEQ ID NO: 1739097 - RNA, 19 nt, Artificial Sequence
  Description of Artificial Sequence: Synthetic oligonucleotide
  Sense strand starting at position 750 of SEQ ID NO: 1562334
guaaauugggcacaucuca

SEQ ID NO: 1739098 - RNA, 19 nt, Artificial Sequence
  Description of Artificial Sequence: Synthetic oligonucleotide
  Antisense strand to SEQ ID NO: 1739097
ugagaugugcccaauuuac

SEQ ID NO: 1739099 - RNA, 19 nt, Artificial Sequence
  Description of Artificial Sequence: Synthetic oligonucleotide
  Sense strand starting at position 780 of SEQ ID NO: 1562334
ucucuaaaguaguucugaa

SEQ ID NO: 1739100 - RNA, 19 nt, Artificial Sequence
  Description of Artificial Sequence: Synthetic oligonucleotide
  Antisense strand to SEQ ID NO: 1739099
uucagaacuacuuuagaga

SEQ ID NO: 1739101 - RNA, 19 nt, Artificial Sequence
  Description of Artificial Sequence: Synthetic oligonucleotide
  Sense strand starting at position 814 of SEQ ID NO: 1562334
uugcaaaggguuuggucaa

SEQ ID NO: 1739102 - RNA, 19 nt, Artificial Sequence
  Description of Artificial Sequence: Synthetic oligonucleotide
  Antisense strand to SEQ ID NO: 1739101
uugaccaaacccuuugcaa

SEQ ID NO: 1739103 - RNA, 19 nt, Artificial Sequence
  Description of Artificial Sequence: Synthetic oligonucleotide
  Sense strand starting at position 1058 of SEQ ID NO: 1562334
auauuuguuuaagcguuga

SEQ ID NO: 1739104 - RNA, 19 nt, Artificial Sequence
  Description of Artificial Sequence: Synthetic oligonucleotide
  Antisense strand to SEQ ID NO: 1739103
ucaacgcuuaaacaaauau

SEQ ID NO: 1739105 - RNA, 19 nt, Artificial Sequence
  Description of Artificial Sequence: Synthetic oligonucleotide
  Sense strand starting at position 1063 of SEQ ID NO: 1562334
uguuuaagcguugaaauga

SEQ ID NO: 1739106 - RNA, 19 nt, Artificial Sequence
  Description of Artificial Sequence: Synthetic oligonucleotide
  Antisense strand to SEQ ID NO: 1739105
ucauuucaacgcuuaaaca

SEQ ID NO: 1739107 - RNA, 19 nt, Artificial Sequence
  Description of Artificial Sequence: Synthetic oligonucleotide
  Sense strand starting at position 1089 of SEQ ID NO: 1562334
ucagauauacuaggcuaaa

SEQ ID NO: 1739108 - RNA, 19 nt, Artificial Sequence
  Description of Artificial Sequence: Synthetic oligonucleotide
  Antisense strand to SEQ ID NO: 1739107
uuuagccuaguauaucuga

SEQ ID NO: 1739109 - RNA, 19 nt, Artificial Sequence
  Description of Artificial Sequence: Synthetic oligonucleotide
  Sense strand starting at position 1182 of SEQ ID NO: 1562334
acauaagggacucgcauua

SEQ ID NO: 1739110 - RNA, 19 nt, Artificial Sequence
  Description of Artificial Sequence: Synthetic oligonucleotide
  Antisense strand to SEQ ID NO: 1739109
uaaugcgagucccuuaugu

SEQ ID NO: 1739111 - RNA, 19 nt, Artificial Sequence
  Description of Artificial Sequence: Synthetic oligonucleotide
  Sense strand starting at position 1324 of SEQ ID NO: 1562334
caucucgcuccagaugauu

SEQ ID NO: 1739112 - RNA, 19 nt, Artificial Sequence
  Description of Artificial Sequence: Synthetic oligonucleotide
  Antisense strand to SEQ ID NO: 1739111
aaucaucuggagcgagaug

SEQ ID NO: 1739113 - RNA, 19 nt, Artificial Sequence
  Description of Artificial Sequence: Synthetic oligonucleotide
  Sense strand starting at position 1337 of SEQ ID NO: 1562334
augauuccgccguuuagca

SEQ ID NO: 1739114 - RNA, 19 nt, Artificial Sequence
  Description of Artificial Sequence: Synthetic oligonucleotide
  Antisense strand to SEQ ID NO: 1739113
ugcuaaacggcggaaucau

SEQ ID NO: 1739115 - RNA, 19 nt, Artificial Sequence
  Description of Artificial Sequence: Synthetic oligonucleotide
  Sense strand starting at position 1484 of SEQ ID NO: 1562334
cucaaauucuaggaacaag

SEQ ID NO: 1739116 - RNA, 19 nt, Artificial Sequence
  Description of Artificial Sequence: Synthetic oligonucleotide
  Antisense strand to SEQ ID NO: 1739115
cuuguuccuagaauuugag

SEQ ID NO: 1739117 - RNA, 19 nt, Artificial Sequence
  Description of Artificial Sequence: Synthetic oligonucleotide
  Sense strand starting at position 1582 of SEQ ID NO: 1562334
gaugcaaacugagauaaga

SEQ ID NO: 1739118 - RNA, 19 nt, Artificial Sequence
  Description of Artificial Sequence: Synthetic oligonucleotide
  Antisense strand to SEQ ID NO: 1739117
ucuuaucucaguuugcauc

SEQ ID NO: 1739119 - RNA, 19 nt, Artificial Sequence
  Description of Artificial Sequence: Synthetic oligonucleotide
  Sense strand starting at position 1627 of SEQ ID NO: 1562334
aggaaacugucccucaaau

SEQ ID NO: 1739120 - RNA, 19 nt, Artificial Sequence
  Description of Artificial Sequence: Synthetic oligonucleotide
  Antisense strand to SEQ ID NO: 1739119
auuugagggacaguuuccu

SEQ ID NO: 1739121 - RNA, 19 nt, Artificial Sequence
  Description of Artificial Sequence: Synthetic oligonucleotide
  Sense strand starting at position 2057 of SEQ ID NO: 1562334
ccaauaaaugggcgaaguu

SEQ ID NO: 1739122 - RNA, 19 nt, Artificial Sequence
  Description of Artificial Sequence: Synthetic oligonucleotide
  Antisense strand to SEQ ID NO: 1739121
aacuucgcccauuuauugg

SEQ ID NO: 1739123 - RNA, 19 nt, Artificial Sequence
  Description of Artificial Sequence: Synthetic oligonucleotide
  Sense strand starting at position 2228 of SEQ ID NO: 1562334
gucaauuaagugcauccua

SEQ ID NO: 1739124 - RNA, 19 nt, Artificial Sequence
  Description of Artificial Sequence: Synthetic oligonucleotide
  Antisense strand to SEQ ID NO: 1739123
uaggaugcacuuaauugac

SEQ ID NO: 1739125 - RNA, 19 nt, Artificial Sequence
  Description of Artificial Sequence: Synthetic oligonucleotide
  Sense strand starting at position 2278 of SEQ ID NO: 1562334
accgaaaucgugcaacaaa

SEQ ID NO: 1739126 - RNA, 19 nt, Artificial Sequence
  Description of Artificial Sequence: Synthetic oligonucleotide
  Antisense strand to SEQ ID NO: 1739125
uuuguugcacgauuucggu

SEQ ID NO: 1739127 - RNA, 19 nt, Artificial Sequence
  Description of Artificial Sequence: Synthetic oligonucleotide
  Sense strand starting at position 2404 of SEQ ID NO: 1562334
uggcucauucggcuuguca

SEQ ID NO: 1739128 - RNA, 19 nt, Artificial Sequence
  Description of Artificial Sequence: Synthetic oligonucleotide
  Antisense strand to SEQ ID NO: 1739127
ugacaagccgaaugagcca

SEQ ID NO: 1739129 - RNA, 19 nt, Artificial Sequence
  Description of Artificial Sequence: Synthetic oligonucleotide
  Sense strand starting at position 2543 of SEQ ID NO: 1562334
cccacuuaugggcggagau

SEQ ID NO: 1739130 - RNA, 19 nt, Artificial Sequence
  Description of Artificial Sequence: Synthetic oligonucleotide
  Antisense strand to SEQ ID NO: 1739129
aucuccgcccauaaguggg

SEQ ID NO: 1739131 - RNA, 19 nt, Artificial Sequence
  Description of Artificial Sequence: Synthetic oligonucleotide
  Sense strand starting at position 3368 of SEQ ID NO: 1562334
ugcagaauccugggucagu

SEQ ID NO: 1739132 - RNA, 19 nt, Artificial Sequence
  Description of Artificial Sequence: Synthetic oligonucleotide
  Antisense strand to SEQ ID NO: 1739131
acugacccaggauucugca

SEQ ID NO: 1739133 - RNA, 19 nt, Artificial Sequence
  Description of Artificial Sequence: Synthetic oligonucleotide
  Sense strand starting at position 3369 of SEQ ID NO: 1562334
gcagaauccugggucagug

SEQ ID NO: 1739134 - RNA, 19 nt, Artificial Sequence
  Description of Artificial Sequence: Synthetic oligonucleotide
  Antisense strand to SEQ ID NO: 1739133
cacugacccaggauucugc

SEQ ID NO: 1739135 - RNA, 19 nt, Artificial Sequence
  Description of Artificial Sequence: Synthetic oligonucleotide
  Sense strand starting at position 3715 of SEQ ID NO: 1562334
aaggcuuugcuuuggaaga

SEQ ID NO: 1739136 - RNA, 19 nt, Artificial Sequence
  Description of Artificial Sequence: Synthetic oligonucleotide
  Antisense strand to SEQ ID NO: 1739135
ucuuccaaagcaaagccuu

SEQ ID NO: 1739137 - RNA, 19 nt, Artificial Sequence
  Description of Artificial Sequence: Synthetic oligonucleotide
  Sense strand starting at position 3753 of SEQ ID NO: 1562334
uguggaguuggaggcuaua

SEQ ID NO: 1739138 - RNA, 19 nt, Artificial Sequence
  Description of Artificial Sequence: Synthetic oligonucleotide
  Antisense strand to SEQ ID NO: 1739137
uauagccuccaacuccaca

SEQ ID NO: 1739139 - RNA, 19 nt, Artificial Sequence
  Description of Artificial Sequence: Synthetic oligonucleotide
  Sense strand starting at position 3793 of SEQ ID NO: 1562334
auaugaaaguuuccucuag

SEQ ID NO: 1739140 - RNA, 19 nt, Artificial Sequence
  Description of Artificial Sequence: Synthetic oligonucleotide
  Antisense strand to SEQ ID NO: 1739139
cuagaggaaacuuucauau

SEQ ID NO: 1739141 - RNA, 19 nt, Artificial Sequence
  Description of Artificial Sequence: Synthetic oligonucleotide
  Sense strand starting at position 3852 of SEQ ID NO: 1562334
ccuggaaauuuagauacau

SEQ ID NO: 1739142 - RNA, 19 nt, Artificial Sequence
  Description of Artificial Sequence: Synthetic oligonucleotide
  Antisense strand to SEQ ID NO: 1739141
auguaucuaaauuuccagg

SEQ ID NO: 1739143 - RNA, 19 nt, Artificial Sequence
  Description of Artificial Sequence: Synthetic oligonucleotide
  Sense strand starting at position 3879 of SEQ ID NO: 1562334
cggccagaugcguuucuuu

SEQ ID NO: 1739144 - RNA, 19 nt, Artificial Sequence
  Description of Artificial Sequence: Synthetic oligonucleotide
  Antisense strand to SEQ ID NO: 1739143
aaagaaacgcaucuggccg

SEQ ID NO: 1739145 - RNA, 19 nt, Artificial Sequence
  Description of Artificial Sequence: Synthetic oligonucleotide
  Sense strand starting at position 3881 of SEQ ID NO: 1562334
gccagaugcguuucuuugu

SEQ ID NO: 1739146 - RNA, 19 nt, Artificial Sequence
  Description of Artificial Sequence: Synthetic oligonucleotide
  Antisense strand to SEQ ID NO: 1739145
acaaagaaacgcaucuggc

SEQ ID NO: 1739147 - RNA, 19 nt, Artificial Sequence
  Description of Artificial Sequence: Synthetic oligonucleotide
  Sense strand starting at position 3925 of SEQ ID NO: 1562334
gcugcuccucuugaucaaa

SEQ ID NO: 1739148 - RNA, 19 nt, Artificial Sequence
  Description of Artificial Sequence: Synthetic oligonucleotide
  Antisense strand to SEQ ID NO: 1739147
uuugaucaagaggagcagc

SEQ ID NO: 1739149 - RNA, 19 nt, Artificial Sequence
  Description of Artificial Sequence: Synthetic oligonucleotide
  Sense strand starting at position 276 of SEQ ID NO: 1562335
acucuaccuugaugaagua

SEQ ID NO: 1739150 - RNA, 19 nt, Artificial Sequence
  Description of Artificial Sequence: Synthetic oligonucleotide
  Antisense strand to SEQ ID NO: 1739149
uacuucaucaagguagagu

SEQ ID NO: 1739151 - RNA, 19 nt, Artificial Sequence
  Description of Artificial Sequence: Synthetic oligonucleotide
  Sense strand starting at position 309 of SEQ ID NO: 1562335
ccaccuggcucuugaauga

SEQ ID NO: 1739152 - RNA, 19 nt, Artificial Sequence
  Description of Artificial Sequence: Synthetic oligonucleotide
  Antisense strand to SEQ ID NO: 1739151
ucauucaagagccaggugg

SEQ ID NO: 1739153 - RNA, 19 nt, Artificial Sequence
  Description of Artificial Sequence: Synthetic oligonucleotide
  Sense strand starting at position 405 of SEQ ID NO: 1562335
gaggaugucucaguggcuu

SEQ ID NO: 1739154 - RNA, 19 nt, Artificial Sequence
  Description of Artificial Sequence: Synthetic oligonucleotide
  Antisense strand to SEQ ID NO: 1739153
aagccacugagacauccuc

SEQ ID NO: 1739155 - RNA, 19 nt, Artificial Sequence
  Description of Artificial Sequence: Synthetic oligonucleotide
  Sense strand starting at position 426 of SEQ ID NO: 1562335
uggauucccuccugcuaga

SEQ ID NO: 1739156 - RNA, 19 nt, Artificial Sequence
  Description of Artificial Sequence: Synthetic oligonucleotide
  Antisense strand to SEQ ID NO: 1739155
ucuagcaggagggaaucca

SEQ ID NO: 1739157 - RNA, 19 nt, Artificial Sequence
  Description of Artificial Sequence: Synthetic oligonucleotide
  Sense strand starting at position 429 of SEQ ID NO: 1562335
auucccuccugcuagagua

SEQ ID NO: 1739158 - RNA, 19 nt, Artificial Sequence
  Description of Artificial Sequence: Synthetic oligonucleotide
  Antisense strand to SEQ ID NO: 1739157
uacucuagcaggagggaau

SEQ ID NO: 1739159 - RNA, 19 nt, Artificial Sequence
  Description of Artificial Sequence: Synthetic oligonucleotide
  Sense strand starting at position 445 of SEQ ID NO: 1562335
guaacuugcacgcauguga

SEQ ID NO: 1739160 - RNA, 19 nt, Artificial Sequence
  Description of Artificial Sequence: Synthetic oligonucleotide
  Antisense strand to SEQ ID NO: 1739159
ucacaugcgugcaaguuac

SEQ ID NO: 1739161 - RNA, 19 nt, Artificial Sequence
  Description of Artificial Sequence: Synthetic oligonucleotide
  Sense strand starting at position 963 of SEQ ID NO: 1562335
gggcuucuugcacagauga

SEQ ID NO: 1739162 - RNA, 19 nt, Artificial Sequence
  Description of Artificial Sequence: Synthetic oligonucleotide
  Antisense strand to SEQ ID NO: 1739161
ucaucugugcaagaagccc

SEQ ID NO: 1739163 - RNA, 19 nt, Artificial Sequence
  Description of Artificial Sequence: Synthetic oligonucleotide
  Sense strand starting at position 1145 of SEQ ID NO: 1562335
uugaaacagugcuagaauc

SEQ ID NO: 1739164 - RNA, 19 nt, Artificial Sequence
  Description of Artificial Sequence: Synthetic oligonucleotide
  Antisense strand to SEQ ID NO: 1739163
gauucuagcacuguuucaa

SEQ ID NO: 1739165 - RNA, 19 nt, Artificial Sequence
  Description of Artificial Sequence: Synthetic oligonucleotide
  Sense strand starting at position 1153 of SEQ ID NO: 1562335
gugcuagaaucggaagcau

SEQ ID NO: 1739166 - RNA, 19 nt, Artificial Sequence
  Description of Artificial Sequence: Synthetic oligonucleotide
  Antisense strand to SEQ ID NO: 1739165
augcuuccgauucuagcac

SEQ ID NO: 1739167 - RNA, 19 nt, Artificial Sequence
  Description of Artificial Sequence: Synthetic oligonucleotide
  Sense strand starting at position 1270 of SEQ ID NO: 1562335
ucccgaacuagaugaggau

SEQ ID NO: 1739168 - RNA, 19 nt, Artificial Sequence
  Description of Artificial Sequence: Synthetic oligonucleotide
  Antisense strand to SEQ ID NO: 1739167
auccucaucuaguucggga

SEQ ID NO: 1739169 - RNA, 19 nt, Artificial Sequence
  Description of Artificial Sequence: Synthetic oligonucleotide
  Sense strand starting at position 1273 of SEQ ID NO: 1562335
cgaacuagaugaggauauu

SEQ ID NO: 1739170 - RNA, 19 nt, Artificial Sequence
  Description of Artificial Sequence: Synthetic oligonucleotide
  Antisense strand to SEQ ID NO: 1739169
aauauccucaucuaguucg

SEQ ID NO: 1739171 - RNA, 19 nt, Artificial Sequence
  Description of Artificial Sequence: Synthetic oligonucleotide
  Sense strand starting at position 1279 of SEQ ID NO: 1562335
agaugaggauauugacaaa

SEQ ID NO: 1739172 - RNA, 19 nt, Artificial Sequence
  Description of Artificial Sequence: Synthetic oligonucleotide
  Antisense strand to SEQ ID NO: 1739171
uuugucaauauccucaucu

SEQ ID NO: 1739173 - RNA, 19 nt, Artificial Sequence
  Description of Artificial Sequence: Synthetic oligonucleotide
  Sense strand starting at position 1282 of SEQ ID NO: 1562335
ugaggauauugacaaagau

SEQ ID NO: 1739174 - RNA, 19 nt, Artificial Sequence
  Description of Artificial Sequence: Synthetic oligonucleotide
  Antisense strand to SEQ ID NO: 1739173
aucuuugucaauauccuca

SEQ ID NO: 1739175 - RNA, 19 nt, Artificial Sequence
  Description of Artificial Sequence: Synthetic oligonucleotide
  Sense strand starting at position 1297 of SEQ ID NO: 1562335
agauucuugcuuggccaaa

SEQ ID NO: 1739176 - RNA, 19 nt, Artificial Sequence
  Description of Artificial Sequence: Synthetic oligonucleotide
  Antisense strand to SEQ ID NO: 1739175
uuuggccaagcaagaaucu

SEQ ID NO: 1739177 - RNA, 19 nt, Artificial Sequence
  Description of Artificial Sequence: Synthetic oligonucleotide
  Sense strand starting at position 1376 of SEQ ID NO: 1562335
uagcaagaagccuggcuaa

SEQ ID NO: 1739178 - RNA, 19 nt, Artificial Sequence
  Description of Artificial Sequence: Synthetic oligonucleotide
  Antisense strand to SEQ ID NO: 1739177
uuagccaggcuucuugcua

SEQ ID NO: 1739179 - RNA, 19 nt, Artificial Sequence
  Description of Artificial Sequence: Synthetic oligonucleotide
  Sense strand starting at position 1429 of SEQ ID NO: 1562335
aucggaucaccguggagau

SEQ ID NO: 1739180 - RNA, 19 nt, Artificial Sequence
  Description of Artificial Sequence: Synthetic oligonucleotide
  Antisense strand to SEQ ID NO: 1739179
aucuccacggugauccgau

SEQ ID NO: 1739181 - RNA, 19 nt, Artificial Sequence
  Description of Artificial Sequence: Synthetic oligonucleotide
  Sense strand starting at position 1567 of SEQ ID NO: 1562335
ccugcuccgggcuaucaau

SEQ ID NO: 1739182 - RNA, 19 nt, Artificial Sequence
  Description of Artificial Sequence: Synthetic oligonucleotide
  Antisense strand to SEQ ID NO: 1739181
auugauagcccggagcagg

SEQ ID NO: 1739183 - RNA, 19 nt, Artificial Sequence
  Description of Artificial Sequence: Synthetic oligonucleotide
  Sense strand starting at position 2423 of SEQ ID NO: 1562335
ccgcuugugaccgagaaca

SEQ ID NO: 1739184 - RNA, 19 nt, Artificial Sequence
  Description of Artificial Sequence: Synthetic oligonucleotide
  Antisense strand to SEQ ID NO: 1739183
uguucucggucacaagcgg

SEQ ID NO: 1739185 - RNA, 19 nt, Artificial Sequence
  Description of Artificial Sequence: Synthetic oligonucleotide
  Sense strand starting at position 2425 of SEQ ID NO: 1562335
gcuugugaccgagaacacu

SEQ ID NO: 1739186 - RNA, 19 nt, Artificial Sequence
  Description of Artificial Sequence: Synthetic oligonucleotide
  Antisense strand to SEQ ID NO: 1739185
aguguucucggucacaagc

SEQ ID NO: 1739187 - RNA, 19 nt, Artificial Sequence
  Description of Artificial Sequence: Synthetic oligonucleotide
  Sense strand starting at position 2550 of SEQ ID NO: 1562335
aggguucucugguggaauu

SEQ ID NO: 1739188 - RNA, 19 nt, Artificial Sequence
  Description of Artificial Sequence: Synthetic oligonucleotide
  Antisense strand to SEQ ID NO: 1739187
aauuccaccagagaacccu

SEQ ID NO: 1739189 - RNA, 19 nt, Artificial Sequence
  Description of Artificial Sequence: Synthetic oligonucleotide
  Sense strand starting at position 3422 of SEQ ID NO: 1562335
ucuggaacuucugagcgau

SEQ ID NO: 1739190 - RNA, 19 nt, Artificial Sequence
  Description of Artificial Sequence: Synthetic oligonucleotide
  Antisense strand to SEQ ID NO: 1739189
aucgcucagaaguuccaga

SEQ ID NO: 1739191 - RNA, 19 nt, Artificial Sequence
  Description of Artificial Sequence: Synthetic oligonucleotide
  Sense strand starting at position 3424 of SEQ ID NO: 1562335
uggaacuucugagcgaucu

SEQ ID NO: 1739192 - RNA, 19 nt, Artificial Sequence
  Description of Artificial Sequence: Synthetic oligonucleotide
  Antisense strand to SEQ ID NO: 1739191
agaucgcucagaaguucca

SEQ ID NO: 1739193 - RNA, 19 nt, Artificial Sequence
  Description of Artificial Sequence: Synthetic oligonucleotide
  Sense strand starting at position 3425 of SEQ ID NO: 1562335
ggaacuucugagcgaucug

SEQ ID NO: 1739194 - RNA, 19 nt, Artificial Sequence
  Description of Artificial Sequence: Synthetic oligonucleotide
  Antisense strand to SEQ ID NO: 1739193
cagaucgcucagaaguucc

SEQ ID NO: 1739195 - RNA, 19 nt, Artificial Sequence
  Description of Artificial Sequence: Synthetic oligonucleotide
  Sense strand starting at position 3637 of SEQ ID NO: 1562335
uaggguuucuguuagacug

SEQ ID NO: 1739196 - RNA, 19 nt, Artificial Sequence
  Description of Artificial Sequence: Synthetic oligonucleotide
  Antisense strand to SEQ ID NO: 1739195
cagucuaacagaaacccua

SEQ ID NO: 1739197 - RNA, 19 nt, Artificial Sequence
  Description of Artificial Sequence: Synthetic oligonucleotide
  Sense strand starting at position 3639 of SEQ ID NO: 1562335
ggguuucuguuagacugga

SEQ ID NO: 1739198 - RNA, 19 nt, Artificial Sequence
  Description of Artificial Sequence: Synthetic oligonucleotide
  Antisense strand to SEQ ID NO: 1739197
uccagucuaacagaaaccc

SEQ ID NO: 1739199 - RNA, 19 nt, Artificial Sequence
  Description of Artificial Sequence: Synthetic oligonucleotide
  Sense strand starting at position 3717 of SEQ ID NO: 1562335
ggcaccuguuggugugauu

SEQ ID NO: 1739200 - RNA, 19 nt, Artificial Sequence
  Description of Artificial Sequence: Synthetic oligonucleotide
  Antisense strand to SEQ ID NO: 1739199
aaucacaccaacaggugcc

SEQ ID NO: 1739201 - RNA, 19 nt, Artificial Sequence
  Description of Artificial Sequence: Synthetic oligonucleotide
  Sense strand starting at position 3726 of SEQ ID NO: 1562335
uggugugauugacuccuca

SEQ ID NO: 1739202 - RNA, 19 nt, Artificial Sequence
  Description of Artificial Sequence: Synthetic oligonucleotide
  Antisense strand to SEQ ID NO: 1739201
ugaggagucaaucacacca

SEQ ID NO: 1739203 - RNA, 19 nt, Artificial Sequence
  Description of Artificial Sequence: Synthetic oligonucleotide
  Sense strand starting at position 3816 of SEQ ID NO: 1562335
gcuggagcggcccaugaau

SEQ ID NO: 1739204 - RNA, 19 nt, Artificial Sequence
  Description of Artificial Sequence: Synthetic oligonucleotide
  Antisense strand to SEQ ID NO: 1739203
auucaugggccgcuccagc

SEQ ID NO: 1739205 - RNA, 19 nt, Artificial Sequence
  Description of Artificial Sequence: Synthetic oligonucleotide
  Sense strand starting at position 3911 of SEQ ID NO: 1562335
gcagucaggugugguugaa

SEQ ID NO: 1739206 - RNA, 19 nt, Artificial Sequence
  Description of Artificial Sequence: Synthetic oligonucleotide
  Antisense strand to SEQ ID NO: 1739205
uucaaccacaccugacugc

SEQ ID NO: 1739207 - RNA, 19 nt, Artificial Sequence
  Description of Artificial Sequence: Synthetic oligonucleotide
  Sense strand starting at position 3958 of SEQ ID NO: 1562335
aucauuguugaaugaguga

SEQ ID NO: 1739208 - RNA, 19 nt, Artificial Sequence
  Description of Artificial Sequence: Synthetic oligonucleotide
  Antisense strand to SEQ ID NO: 1739207
ucacucauucaacaaugau

SEQ ID NO: 1739209 - RNA, 19 nt, Artificial Sequence
  Description of Artificial Sequence: Synthetic oligonucleotide
  Sense strand starting at position 375 of SEQ ID NO: 1562336
ucagguucggccuagacaa

SEQ ID NO: 1739210 - RNA, 19 nt, Artificial Sequence
  Description of Artificial Sequence: Synthetic oligonucleotide
  Antisense strand to SEQ ID NO: 1739209
uugucuaggccgaaccuga

SEQ ID NO: 1739211 - RNA, 19 nt, Artificial Sequence
  Description of Artificial Sequence: Synthetic oligonucleotide
  Sense strand starting at position 418 of SEQ ID NO: 1562336
gugggaauguaccuguaaa

SEQ ID NO: 1739212 - RNA, 19 nt, Artificial Sequence
  Description of Artificial Sequence: Synthetic oligonucleotide
  Antisense strand to SEQ ID NO: 1739211
uuuacagguacauucccac

SEQ ID NO: 1739213 - RNA, 19 nt, Artificial Sequence
  Description of Artificial Sequence: Synthetic oligonucleotide
  Sense strand starting at position 419 of SEQ ID NO: 1562336
ugggaauguaccuguaaac

SEQ ID NO: 1739214 - RNA, 19 nt, Artificial Sequence
  Description of Artificial Sequence: Synthetic oligonucleotide
  Antisense strand to SEQ ID NO: 1739213
guuuacagguacauuccca

SEQ ID NO: 1739215 - RNA, 19 nt, Artificial Sequence
  Description of Artificial Sequence: Synthetic oligonucleotide
  Sense strand starting at position 429 of SEQ ID NO: 1562336
ccuguaaacugguucuaug

SEQ ID NO: 1739216 - RNA, 19 nt, Artificial Sequence
  Description of Artificial Sequence: Synthetic oligonucleotide
  Antisense strand to SEQ ID NO: 1739215
cauagaaccaguuuacagg

SEQ ID NO: 1739217 - RNA, 19 nt, Artificial Sequence
  Description of Artificial Sequence: Synthetic oligonucleotide
  Sense strand starting at position 465 of SEQ ID NO: 1562336
gaaggcuuacuuuggacau

SEQ ID NO: 1739218 - RNA, 19 nt, Artificial Sequence
  Description of Artificial Sequence: Synthetic oligonucleotide
  Antisense strand to SEQ ID NO: 1739217
auguccaaaguaagccuuc

SEQ ID NO: 1739219 - RNA, 19 nt, Artificial Sequence
  Description of Artificial Sequence: Synthetic oligonucleotide
  Sense strand starting at position 467 of SEQ ID NO: 1562336
aggcuuacuuuggacauuu

SEQ ID NO: 1739220 - RNA, 19 nt, Artificial Sequence
  Description of Artificial Sequence: Synthetic oligonucleotide
  Antisense strand to SEQ ID NO: 1739219
aaauguccaaaguaagccu

SEQ ID NO: 1739221 - RNA, 19 nt, Artificial Sequence
  Description of Artificial Sequence: Synthetic oligonucleotide
  Sense strand starting at position 550 of SEQ ID NO: 1562336
agauuagacuugcuaauag

SEQ ID NO: 1739222 - RNA, 19 nt, Artificial Sequence
  Description of Artificial Sequence: Synthetic oligonucleotide
  Antisense strand to SEQ ID NO: 1739221
cuauuagcaagucuaaucu

SEQ ID NO: 1739223 - RNA, 19 nt, Artificial Sequence
  Description of Artificial Sequence: Synthetic oligonucleotide
  Sense strand starting at position 559 of SEQ ID NO: 1562336
uugcuaauagaauguugau

SEQ ID NO: 1739224 - RNA, 19 nt, Artificial Sequence
  Description of Artificial Sequence: Synthetic oligonucleotide
  Antisense strand to SEQ ID NO: 1739223
aucaacauucuauuagcaa

SEQ ID NO: 1739225 - RNA, 19 nt, Artificial Sequence
  Description of Artificial Sequence: Synthetic oligonucleotide
  Sense strand starting at position 565 of SEQ ID NO: 1562336
auagaauguugaucccaug

SEQ ID NO: 1739226 - RNA, 19 nt, Artificial Sequence
  Description of Artificial Sequence: Synthetic oligonucleotide
  Antisense strand to SEQ ID NO: 1739225
caugggaucaacauucuau

SEQ ID NO: 1739227 - RNA, 19 nt, Artificial Sequence
  Description of Artificial Sequence: Synthetic oligonucleotide
  Sense strand starting at position 571 of SEQ ID NO: 1562336
uguugaucccaugaguaau

SEQ ID NO: 1739228 - RNA, 19 nt, Artificial Sequence
  Description of Artificial Sequence: Synthetic oligonucleotide
  Antisense strand to SEQ ID NO: 1739227
auuacucaugggaucaaca

SEQ ID NO: 1739229 - RNA, 19 nt, Artificial Sequence
  Description of Artificial Sequence: Synthetic oligonucleotide
  Sense strand starting at position 581 of SEQ ID NO: 1562336
augaguaaugcucacagcu

SEQ ID NO: 1739230 - RNA, 19 nt, Artificial Sequence
  Description of Artificial Sequence: Synthetic oligonucleotide
  Antisense strand to SEQ ID NO: 1739229
agcugugagcauuacucau

SEQ ID NO: 1739231 - RNA, 19 nt, Artificial Sequence
  Description of Artificial Sequence: Synthetic oligonucleotide
  Sense strand starting at position 789 of SEQ ID NO: 1562336
aagugcuuaguuugacaaa

SEQ ID NO: 1739232 - RNA, 19 nt, Artificial Sequence
  Description of Artificial Sequence: Synthetic oligonucleotide
  Antisense strand to SEQ ID NO: 1739231
uuugucaaacuaagcacuu

SEQ ID NO: 1739233 - RNA, 19 nt, Artificial Sequence
  Description of Artificial Sequence: Synthetic oligonucleotide
  Sense strand starting at position 807 of SEQ ID NO: 1562336
acaagaucaguugguuaaa

SEQ ID NO: 1739234 - RNA, 19 nt, Artificial Sequence
  Description of Artificial Sequence: Synthetic oligonucleotide
  Antisense strand to SEQ ID NO: 1739233
uuuaaccaacugaucuugu

SEQ ID NO: 1739235 - RNA, 19 nt, Artificial Sequence
  Description of Artificial Sequence: Synthetic oligonucleotide
  Sense strand starting at position 875 of SEQ ID NO: 1562336
ccuaaugguccacgcauuu

SEQ ID NO: 1739236 - RNA, 19 nt, Artificial Sequence
  Description of Artificial Sequence: Synthetic oligonucleotide
  Antisense strand to SEQ ID NO: 1739235
aaaugcguggaccauuagg

SEQ ID NO: 1739237 - RNA, 19 nt, Artificial Sequence
  Description of Artificial Sequence: Synthetic oligonucleotide
  Sense strand starting at position 946 of SEQ ID NO: 1562336
uggcaaauccucuagcaau

SEQ ID NO: 1739238 - RNA, 19 nt, Artificial Sequence
  Description of Artificial Sequence: Synthetic oligonucleotide
  Antisense strand to SEQ ID NO: 1739237
auugcuagaggauuugcca

SEQ ID NO: 1739239 - RNA, 19 nt, Artificial Sequence
  Description of Artificial Sequence: Synthetic oligonucleotide
  Sense strand starting at position 1023 of SEQ ID NO: 1562336
aaacgaggucacugaauuc

SEQ ID NO: 1739240 - RNA, 19 nt, Artificial Sequence
  Description of Artificial Sequence: Synthetic oligonucleotide
  Antisense strand to SEQ ID NO: 1739239
gaauucagugaccucguuu

SEQ ID NO: 1739241 - RNA, 19 nt, Artificial Sequence
  Description of Artificial Sequence: Synthetic oligonucleotide
  Sense strand starting at position 1065 of SEQ ID NO: 1562336
ugcagaaaccaaugcuaca

SEQ ID NO: 1739242 - RNA, 19 nt, Artificial Sequence
  Description of Artificial Sequence: Synthetic oligonucleotide
  Antisense strand to SEQ ID NO: 1739241
uguagcauugguuucugca

SEQ ID NO: 1739243 - RNA, 19 nt, Artificial Sequence
  Description of Artificial Sequence: Synthetic oligonucleotide
  Sense strand starting at position 1161 of SEQ ID NO: 1562336
agcugcuuccaggagacua

SEQ ID NO: 1739244 - RNA, 19 nt, Artificial Sequence
  Description of Artificial Sequence: Synthetic oligonucleotide
  Antisense strand to SEQ ID NO: 1739243
uagucuccuggaagcagcu

SEQ ID NO: 1739245 - RNA, 19 nt, Artificial Sequence
  Description of Artificial Sequence: Synthetic oligonucleotide
  Sense strand starting at position 1208 of SEQ ID NO: 1562336
gccucuuuccuagagguag

SEQ ID NO: 1739246 - RNA, 19 nt, Artificial Sequence
  Description of Artificial Sequence: Synthetic oligonucleotide
  Antisense strand to SEQ ID NO: 1739245
cuaccucuaggaaagaggc

SEQ ID NO: 1739247 - RNA, 19 nt, Artificial Sequence
  Description of Artificial Sequence: Synthetic oligonucleotide
  Sense strand starting at position 1337 of SEQ ID NO: 1562336
uuugaaaucggguaacgcu

SEQ ID NO: 1739248 - RNA, 19 nt, Artificial Sequence
  Description of Artificial Sequence: Synthetic oligonucleotide
  Antisense strand to SEQ ID NO: 1739247
agcguuacccgauuucaaa

SEQ ID NO: 1739249 - RNA, 19 nt, Artificial Sequence
  Description of Artificial Sequence: Synthetic oligonucleotide
  Sense strand starting at position 2373 of SEQ ID NO: 1562336
gccuucgcucucuuaacga

SEQ ID NO: 1739250 - RNA, 19 nt, Artificial Sequence
  Description of Artificial Sequence: Synthetic oligonucleotide
  Antisense strand to SEQ ID NO: 1739249
ucguuaagagagcgaaggc

SEQ ID NO: 1739251 - RNA, 19 nt, Artificial Sequence
  Description of Artificial Sequence: Synthetic oligonucleotide
  Sense strand starting at position 2472 of SEQ ID NO: 1562336
uugggaaauaccugagguu

SEQ ID NO: 1739252 - RNA, 19 nt, Artificial Sequence
  Description of Artificial Sequence: Synthetic oligonucleotide
  Antisense strand to SEQ ID NO: 1739251
aaccucagguauuucccaa

SEQ ID NO: 1739253 - RNA, 19 nt, Artificial Sequence
  Description of Artificial Sequence: Synthetic oligonucleotide
  Sense strand starting at position 2509 of SEQ ID NO: 1562336
aggcuauucuagcccugaa

SEQ ID NO: 1739254 - RNA, 19 nt, Artificial Sequence
  Description of Artificial Sequence: Synthetic oligonucleotide
  Antisense strand to SEQ ID NO: 1739253
uucagggcuagaauagccu

SEQ ID NO: 1739255 - RNA, 19 nt, Artificial Sequence
  Description of Artificial Sequence: Synthetic oligonucleotide
  Sense strand starting at position 2593 of SEQ ID NO: 1562336
caauauuagugagugagcu

SEQ ID NO: 1739256 - RNA, 19 nt, Artificial Sequence
  Description of Artificial Sequence: Synthetic oligonucleotide
  Antisense strand to SEQ ID NO: 1739255
agcucacucacuaauauug

SEQ ID NO: 1739257 - RNA, 19 nt, Artificial Sequence
  Description of Artificial Sequence: Synthetic oligonucleotide
  Sense strand starting at position 2594 of SEQ ID NO: 1562336
aauauuagugagugagcuu

SEQ ID NO: 1739258 - RNA, 19 nt, Artificial Sequence
  Description of Artificial Sequence: Synthetic oligonucleotide
  Antisense strand to SEQ ID NO: 1739257
aagcucacucacuaauauu

SEQ ID NO: 1739259 - RNA, 19 nt, Artificial Sequence
  Description of Artificial Sequence: Synthetic oligonucleotide
  Sense strand starting at position 2595 of SEQ ID NO: 1562336
auauuagugagugagcuuu

SEQ ID NO: 1739260 - RNA, 19 nt, Artificial Sequence
  Description of Artificial Sequence: Synthetic oligonucleotide
  Antisense strand to SEQ ID NO: 1739259
aaagcucacucacuaauau

SEQ ID NO: 1739261 - RNA, 19 nt, Artificial Sequence
  Description of Artificial Sequence: Synthetic oligonucleotide
  Sense strand starting at position 2597 of SEQ ID NO: 1562336
auuagugagugagcuuuga

SEQ ID NO: 1739262 - RNA, 19 nt, Artificial Sequence
  Description of Artificial Sequence: Synthetic oligonucleotide
  Antisense strand to SEQ ID NO: 1739261
ucaaagcucacucacuaau

SEQ ID NO: 1739263 - RNA, 19 nt, Artificial Sequence
  Description of Artificial Sequence: Synthetic oligonucleotide
  Sense strand starting at position 2750 of SEQ ID NO: 1562336
gcgacaguuccauaacaga

SEQ ID NO: 1739264 - RNA, 19 nt, Artificial Sequence
  Description of Artificial Sequence: Synthetic oligonucleotide
  Antisense strand to SEQ ID NO: 1739263
ucuguuauggaacugucgc

SEQ ID NO: 1739265 - RNA, 19 nt, Artificial Sequence
  Description of Artificial Sequence: Synthetic oligonucleotide
  Sense strand starting at position 2973 of SEQ ID NO: 1562336
uuauguagucuauaagcuu

SEQ ID NO: 1739266 - RNA, 19 nt, Artificial Sequence
  Description of Artificial Sequence: Synthetic oligonucleotide
  Antisense strand to SEQ ID NO: 1739265
aagcuuauagacuacauaa

SEQ ID NO: 1739267 - RNA, 19 nt, Artificial Sequence
  Description of Artificial Sequence: Synthetic oligonucleotide
  Sense strand starting at position 2976 of SEQ ID NO: 1562336
uguagucuauaagcuuaca

SEQ ID NO: 1739268 - RNA, 19 nt, Artificial Sequence
  Description of Artificial Sequence: Synthetic oligonucleotide
  Antisense strand to SEQ ID NO: 1739267
uguaagcuuauagacuaca

SEQ ID NO: 1739269 - RNA, 19 nt, Artificial Sequence
  Description of Artificial Sequence: Synthetic oligonucleotide
  Sense strand starting at position 2979 of SEQ ID NO: 1562336
agucuauaagcuuacauag

SEQ ID NO: 1739270 - RNA, 19 nt, Artificial Sequence
  Description of Artificial Sequence: Synthetic oligonucleotide
  Antisense strand to SEQ ID NO: 1739269
cuauguaagcuuauagacu

SEQ ID NO: 1739271 - RNA, 19 nt, Artificial Sequence
  Description of Artificial Sequence: Synthetic oligonucleotide
  Sense strand starting at position 3011 of SEQ ID NO: 1562336
gcuuacuaucuagacuaag

SEQ ID NO: 1739272 - RNA, 19 nt, Artificial Sequence
  Description of Artificial Sequence: Synthetic oligonucleotide
  Antisense strand to SEQ ID NO: 1739271
cuuagucuagauaguaagc

SEQ ID NO: 1739273 - RNA, 19 nt, Artificial Sequence
  Description of Artificial Sequence: Synthetic oligonucleotide
  Sense strand starting at position 3128 of SEQ ID NO: 1562336
gaaaucagguaucaagaag

SEQ ID NO: 1739274 - RNA, 19 nt, Artificial Sequence
  Description of Artificial Sequence: Synthetic oligonucleotide
  Antisense strand to SEQ ID NO: 1739273
cuucuugauaccugauuuc

SEQ ID NO: 1739275 - RNA, 19 nt, Artificial Sequence
  Description of Artificial Sequence: Synthetic oligonucleotide
  Sense strand starting at position 3579 of SEQ ID NO: 1562336
guaccugagccuuacucaa

SEQ ID NO: 1739276 - RNA, 19 nt, Artificial Sequence
  Description of Artificial Sequence: Synthetic oligonucleotide
  Antisense strand to SEQ ID NO: 1739275
uugaguaaggcucagguac

SEQ ID NO: 1739277 - RNA, 19 nt, Artificial Sequence
  Description of Artificial Sequence: Synthetic oligonucleotide
  Sense strand starting at position 3656 of SEQ ID NO: 1562336
acagaugaccagugguagu

SEQ ID NO: 1739278 - RNA, 19 nt, Artificial Sequence
  Description of Artificial Sequence: Synthetic oligonucleotide
  Antisense strand to SEQ ID NO: 1739277
acuaccacuggucaucugu

SEQ ID NO: 1739279 - RNA, 19 nt, Artificial Sequence
  Description of Artificial Sequence: Synthetic oligonucleotide
  Sense strand starting at position 3699 of SEQ ID NO: 1562336
auaccaucugauuguaaag

SEQ ID NO: 1739280 - RNA, 19 nt, Artificial Sequence
  Description of Artificial Sequence: Synthetic oligonucleotide
  Antisense strand to SEQ ID NO: 1739279
cuuuacaaucagaugguau

SEQ ID NO: 1739281 - RNA, 19 nt, Artificial Sequence
  Description of Artificial Sequence: Synthetic oligonucleotide
  Sense strand starting at position 3710 of SEQ ID NO: 1562336
uuguaaaguucugccaaag

SEQ ID NO: 1739282 - RNA, 19 nt, Artificial Sequence
  Description of Artificial Sequence: Synthetic oligonucleotide
  Antisense strand to SEQ ID NO: 1739281
cuuuggcagaacuuuacaa

SEQ ID NO: 1739283 - RNA, 19 nt, Artificial Sequence
  Description of Artificial Sequence: Synthetic oligonucleotide
  Sense strand starting at position 3819 of SEQ ID NO: 1562336
ggauauaauugcguguaaa

SEQ ID NO: 1739284 - RNA, 19 nt, Artificial Sequence
  Description of Artificial Sequence: Synthetic oligonucleotide
  Antisense strand to SEQ ID NO: 1739283
uuuacacgcaauuauaucc

SEQ ID NO: 1739285 - RNA, 19 nt, Artificial Sequence
  Description of Artificial Sequence: Synthetic oligonucleotide
  Sense strand starting at position 3922 of SEQ ID NO: 1562336
aacaguguucuacgagaac

SEQ ID NO: 1739286 - RNA, 19 nt, Artificial Sequence
  Description of Artificial Sequence: Synthetic oligonucleotide
  Antisense strand to SEQ ID NO: 1739285
guucucguagaacacuguu

SEQ ID NO: 1739287 - RNA, 19 nt, Artificial Sequence
  Description of Artificial Sequence: Synthetic oligonucleotide
  Sense strand starting at position 3925 of SEQ ID NO: 1562336
aguguucuacgagaacuuu

SEQ ID NO: 1739288 - RNA, 19 nt, Artificial Sequence
  Description of Artificial Sequence: Synthetic oligonucleotide
  Antisense strand to SEQ ID NO: 1739287
aaaguucucguagaacacu

SEQ ID NO: 1739289 - RNA, 19 nt, Artificial Sequence
  Description of Artificial Sequence: Synthetic oligonucleotide
  Sense strand starting at position 149 of SEQ ID NO: 1562337
cgcugauuuccugagcccu

SEQ ID NO: 1739290 - RNA, 19 nt, Artificial Sequence
  Description of Artificial Sequence: Synthetic oligonucleotide
  Antisense strand to SEQ ID NO: 1739289
agggcucaggaaaucagcg

SEQ ID NO: 1739291 - RNA, 19 nt, Artificial Sequence
  Description of Artificial Sequence: Synthetic oligonucleotide
  Sense strand starting at position 234 of SEQ ID NO: 1562337
aguuuaccacagggaauau

SEQ ID NO: 1739292 - RNA, 19 nt, Artificial Sequence
  Description of Artificial Sequence: Synthetic oligonucleotide
  Antisense strand to SEQ ID NO: 1739291
auauucccugugguaaacu

SEQ ID NO: 1739293 - RNA, 19 nt, Artificial Sequence
  Description of Artificial Sequence: Synthetic oligonucleotide
  Sense strand starting at position 284 of SEQ ID NO: 1562337
gguucaauggagugguuga

SEQ ID NO: 1739294 - RNA, 19 nt, Artificial Sequence
  Description of Artificial Sequence: Synthetic oligonucleotide
  Antisense strand to SEQ ID NO: 1739293
ucaaccacuccauugaacc

SEQ ID NO: 1739295 - RNA, 19 nt, Artificial Sequence
  Description of Artificial Sequence: Synthetic oligonucleotide
  Sense strand starting at position 298 of SEQ ID NO: 1562337
guugaauaagugugaguga

SEQ ID NO: 1739296 - RNA, 19 nt, Artificial Sequence
  Description of Artificial Sequence: Synthetic oligonucleotide
  Antisense strand to SEQ ID NO: 1739295
ucacucacacuuauucaac

SEQ ID NO: 1739297 - RNA, 19 nt, Artificial Sequence
  Description of Artificial Sequence: Synthetic oligonucleotide
  Sense strand starting at position 301 of SEQ ID NO: 1562337
gaauaagugugagugaaag

SEQ ID NO: 1739298 - RNA, 19 nt, Artificial Sequence
  Description of Artificial Sequence: Synthetic oligonucleotide
  Antisense strand to SEQ ID NO: 1739297
cuuucacucacacuuauuc

SEQ ID NO: 1739299 - RNA, 19 nt, Artificial Sequence
  Description of Artificial Sequence: Synthetic oligonucleotide
  Sense strand starting at position 303 of SEQ ID NO: 1562337
auaagugugagugaaagua

SEQ ID NO: 1739300 - RNA, 19 nt, Artificial Sequence
  Description of Artificial Sequence: Synthetic oligonucleotide
  Antisense strand to SEQ ID NO: 1739299
uacuuucacucacacuuau

SEQ ID NO: 1739301 - RNA, 19 nt, Artificial Sequence
  Description of Artificial Sequence: Synthetic oligonucleotide
  Sense strand starting at position 322 of SEQ ID NO: 1562337
uuaaauauugucgagcaga

SEQ ID NO: 1739302 - RNA, 19 nt, Artificial Sequence
  Description of Artificial Sequence: Synthetic oligonucleotide
  Antisense strand to SEQ ID NO: 1739301
ucugcucgacaauauuuaa

SEQ ID NO: 1739303 - RNA, 19 nt, Artificial Sequence
  Description of Artificial Sequence: Synthetic oligonucleotide
  Sense strand starting at position 325 of SEQ ID NO: 1562337
aauauugucgagcagagga

SEQ ID NO: 1739304 - RNA, 19 nt, Artificial Sequence
  Description of Artificial Sequence: Synthetic oligonucleotide
  Antisense strand to SEQ ID NO: 1739303
uccucugcucgacaauauu

SEQ ID NO: 1739305 - RNA, 19 nt, Artificial Sequence
  Description of Artificial Sequence: Synthetic oligonucleotide
  Sense strand starting at position 352 of SEQ ID NO: 1562337
gcauaauuacuucgaaaga

SEQ ID NO: 1739306 - RNA, 19 nt, Artificial Sequence
  Description of Artificial Sequence: Synthetic oligonucleotide
  Antisense strand to SEQ ID NO: 1739305
ucuuucgaaguaauuaugc

SEQ ID NO: 1739307 - RNA, 19 nt, Artificial Sequence
  Description of Artificial Sequence: Synthetic oligonucleotide
  Sense strand starting at position 514 of SEQ ID NO: 1562337
cgaagaacuuauccuacuu

SEQ ID NO: 1739308 - RNA, 19 nt, Artificial Sequence
  Description of Artificial Sequence: Synthetic oligonucleotide
  Antisense strand to SEQ ID NO: 1739307
aaguaggauaaguucuucg

SEQ ID NO: 1739309 - RNA, 19 nt, Artificial Sequence
  Description of Artificial Sequence: Synthetic oligonucleotide
  Sense strand starting at position 545 of SEQ ID NO: 1562337
auauuagaaggucagcauu

SEQ ID NO: 1739310 - RNA, 19 nt, Artificial Sequence
  Description of Artificial Sequence: Synthetic oligonucleotide
  Antisense strand to SEQ ID NO: 1739309
aaugcugaccuucuaauau

SEQ ID NO: 1739311 - RNA, 19 nt, Artificial Sequence
  Description of Artificial Sequence: Synthetic oligonucleotide
  Sense strand starting at position 648 of SEQ ID NO: 1562337
agaaguuauggugacucuu

SEQ ID NO: 1739312 - RNA, 19 nt, Artificial Sequence
  Description of Artificial Sequence: Synthetic oligonucleotide
  Antisense strand to SEQ ID NO: 1739311
aagagucaccauaacuucu

SEQ ID NO: 1739313 - RNA, 19 nt, Artificial Sequence
  Description of Artificial Sequence: Synthetic oligonucleotide
  Sense strand starting at position 891 of SEQ ID NO: 1562337
gugaauaugaacugaugca

SEQ ID NO: 1739314 - RNA, 19 nt, Artificial Sequence
  Description of Artificial Sequence: Synthetic oligonucleotide
  Antisense strand to SEQ ID NO: 1739313
ugcaucaguucauauucac

SEQ ID NO: 1739315 - RNA, 19 nt, Artificial Sequence
  Description of Artificial Sequence: Synthetic oligonucleotide
  Sense strand starting at position 916 of SEQ ID NO: 1562337
acguguguaagacacuuua

SEQ ID NO: 1739316 - RNA, 19 nt, Artificial Sequence
  Description of Artificial Sequence: Synthetic oligonucleotide
  Antisense strand to SEQ ID NO: 1739315
uaaagugucuuacacacgu

SEQ ID NO: 1739317 - RNA, 19 nt, Artificial Sequence
  Description of Artificial Sequence: Synthetic oligonucleotide
  Sense strand starting at position 1066 of SEQ ID NO: 1562337
auaaacaagugucuaucua

SEQ ID NO: 1739318 - RNA, 19 nt, Artificial Sequence
  Description of Artificial Sequence: Synthetic oligonucleotide
  Antisense strand to SEQ ID NO: 1739317
uagauagacacuuguuuau

SEQ ID NO: 1739319 - RNA, 19 nt, Artificial Sequence
  Description of Artificial Sequence: Synthetic oligonucleotide
  Sense strand starting at position 1070 of SEQ ID NO: 1562337
acaagugucuaucuaaauc

SEQ ID NO: 1739320 - RNA, 19 nt, Artificial Sequence
  Description of Artificial Sequence: Synthetic oligonucleotide
  Antisense strand to SEQ ID NO: 1739319
gauuuagauagacacuugu

SEQ ID NO: 1739321 - RNA, 19 nt, Artificial Sequence
  Description of Artificial Sequence: Synthetic oligonucleotide
  Sense strand starting at position 1101 of SEQ ID NO: 1562337
cagauuagacccuggguga

SEQ ID NO: 1739322 - RNA, 19 nt, Artificial Sequence
  Description of Artificial Sequence: Synthetic oligonucleotide
  Antisense strand to SEQ ID NO: 1739321
ucacccagggucuaaucug

SEQ ID NO: 1739323 - RNA, 19 nt, Artificial Sequence
  Description of Artificial Sequence: Synthetic oligonucleotide
  Sense strand starting at position 1104 of SEQ ID NO: 1562337
auuagacccugggugaauu

SEQ ID NO: 1739324 - RNA, 19 nt, Artificial Sequence
  Description of Artificial Sequence: Synthetic oligonucleotide
  Antisense strand to SEQ ID NO: 1739323
aauucacccagggucuaau

SEQ ID NO: 1739325 - RNA, 19 nt, Artificial Sequence
  Description of Artificial Sequence: Synthetic oligonucleotide
  Sense strand starting at position 1154 of SEQ ID NO: 1562337
aguccaauagcucagucua

SEQ ID NO: 1739326 - RNA, 19 nt, Artificial Sequence
  Description of Artificial Sequence: Synthetic oligonucleotide
  Antisense strand to SEQ ID NO: 1739325
uagacugagcuauuggacu

SEQ ID NO: 1739327 - RNA, 19 nt, Artificial Sequence
  Description of Artificial Sequence: Synthetic oligonucleotide
  Sense strand starting at position 1177 of SEQ ID NO: 1562337
acuugugaaucucccaaag

SEQ ID NO: 1739328 - RNA, 19 nt, Artificial Sequence
  Description of Artificial Sequence: Synthetic oligonucleotide
  Antisense strand to SEQ ID NO: 1739327
cuuugggagauucacaagu

SEQ ID NO: 1739329 - RNA, 19 nt, Artificial Sequence
  Description of Artificial Sequence: Synthetic oligonucleotide
  Sense strand starting at position 1281 of SEQ ID NO: 1562337
cuagccuauccagauaagu

SEQ ID NO: 1739330 - RNA, 19 nt, Artificial Sequence
  Description of Artificial Sequence: Synthetic oligonucleotide
  Antisense strand to SEQ ID NO: 1739329
acuuaucuggauaggcuag

SEQ ID NO: 1739331 - RNA, 19 nt, Artificial Sequence
  Description of Artificial Sequence: Synthetic oligonucleotide
  Sense strand starting at position 1304 of SEQ ID NO: 1562337
uuggauauaguuuacucua

SEQ ID NO: 1739332 - RNA, 19 nt, Artificial Sequence
  Description of Artificial Sequence: Synthetic oligonucleotide
  Antisense strand to SEQ ID NO: 1739331
uagaguaaacuauauccaa

SEQ ID NO: 1739333 - RNA, 19 nt, Artificial Sequence
  Description of Artificial Sequence: Synthetic oligonucleotide
  Sense strand starting at position 1312 of SEQ ID NO: 1562337
aguuuacucuauccagaga

SEQ ID NO: 1739334 - RNA, 19 nt, Artificial Sequence
  Description of Artificial Sequence: Synthetic oligonucleotide
  Antisense strand to SEQ ID NO: 1739333
ucucuggauagaguaaacu

SEQ ID NO: 1739335 - RNA, 19 nt, Artificial Sequence
  Description of Artificial Sequence: Synthetic oligonucleotide
  Sense strand starting at position 1746 of SEQ ID NO: 1562337
gggcgaucagauggagaga

SEQ ID NO: 1739336 - RNA, 19 nt, Artificial Sequence
  Description of Artificial Sequence: Synthetic oligonucleotide
  Antisense strand to SEQ ID NO: 1739335
ucucuccaucugaucgccc

SEQ ID NO: 1739337 - RNA, 19 nt, Artificial Sequence
  Description of Artificial Sequence: Synthetic oligonucleotide
  Sense strand starting at position 2118 of SEQ ID NO: 1562337
uugcuuuggcgauugcuau

SEQ ID NO: 1739338 - RNA, 19 nt, Artificial Sequence
  Description of Artificial Sequence: Synthetic oligonucleotide
  Antisense strand to SEQ ID NO: 1739337
auagcaaucgccaaagcaa

SEQ ID NO: 1739339 - RNA, 19 nt, Artificial Sequence
  Description of Artificial Sequence: Synthetic oligonucleotide
  Sense strand starting at position 2184 of SEQ ID NO: 1562337
cuuucuaagcaauggauga

SEQ ID NO: 1739340 - RNA, 19 nt, Artificial Sequence
  Description of Artificial Sequence: Synthetic oligonucleotide
  Antisense strand to SEQ ID NO: 1739339
ucauccauugcuuagaaag

SEQ ID NO: 1739341 - RNA, 19 nt, Artificial Sequence
  Description of Artificial Sequence: Synthetic oligonucleotide
  Sense strand starting at position 2247 of SEQ ID NO: 1562337
gguugaagguauucgacaa

SEQ ID NO: 1739342 - RNA, 19 nt, Artificial Sequence
  Description of Artificial Sequence: Synthetic oligonucleotide
  Antisense strand to SEQ ID NO: 1739341
uugucgaauaccuucaacc

SEQ ID NO: 1739343 - RNA, 19 nt, Artificial Sequence
  Description of Artificial Sequence: Synthetic oligonucleotide
  Sense strand starting at position 2248 of SEQ ID NO: 1562337
guugaagguauucgacaaa

SEQ ID NO: 1739344 - RNA, 19 nt, Artificial Sequence
  Description of Artificial Sequence: Synthetic oligonucleotide
  Antisense strand to SEQ ID NO: 1739343
uuugucgaauaccuucaac

SEQ ID NO: 1739345 - RNA, 19 nt, Artificial Sequence
  Description of Artificial Sequence: Synthetic oligonucleotide
  Sense strand starting at position 2417 of SEQ ID NO: 1562337
gaguuacuggccuaugcaa

SEQ ID NO: 1739346 - RNA, 19 nt, Artificial Sequence
  Description of Artificial Sequence: Synthetic oligonucleotide
  Antisense strand to SEQ ID NO: 1739345
uugcauaggccaguaacuc

SEQ ID NO: 1739347 - RNA, 19 nt, Artificial Sequence
  Description of Artificial Sequence: Synthetic oligonucleotide
  Sense strand starting at position 2493 of SEQ ID NO: 1562337
augaaauacguguauacau

SEQ ID NO: 1739348 - RNA, 19 nt, Artificial Sequence
  Description of Artificial Sequence: Synthetic oligonucleotide
  Antisense strand to SEQ ID NO: 1739347
auguauacacguauuucau

SEQ ID NO: 1739349 - RNA, 19 nt, Artificial Sequence
  Description of Artificial Sequence: Synthetic oligonucleotide
  Sense strand starting at position 2583 of SEQ ID NO: 1562337
aucagaaaguucucaaugu

SEQ ID NO: 1739350 - RNA, 19 nt, Artificial Sequence
  Description of Artificial Sequence: Synthetic oligonucleotide
  Antisense strand to SEQ ID NO: 1739349
acauugagaacuuucugau

SEQ ID NO: 1739351 - RNA, 19 nt, Artificial Sequence
  Description of Artificial Sequence: Synthetic oligonucleotide
  Sense strand starting at position 2587 of SEQ ID NO: 1562337
gaaaguucucaauguuaug

SEQ ID NO: 1739352 - RNA, 19 nt, Artificial Sequence
  Description of Artificial Sequence: Synthetic oligonucleotide
  Antisense strand to SEQ ID NO: 1739351
cauaacauugagaacuuuc

SEQ ID NO: 1739353 - RNA, 19 nt, Artificial Sequence
  Description of Artificial Sequence: Synthetic oligonucleotide
  Sense strand starting at position 2593 of SEQ ID NO: 1562337
ucucaauguuaugcaugaa

SEQ ID NO: 1739354 - RNA, 19 nt, Artificial Sequence
  Description of Artificial Sequence: Synthetic oligonucleotide
  Antisense strand to SEQ ID NO: 1739353
uucaugcauaacauugaga

SEQ ID NO: 1739355 - RNA, 19 nt, Artificial Sequence
  Description of Artificial Sequence: Synthetic oligonucleotide
  Sense strand starting at position 2596 of SEQ ID NO: 1562337
caauguuaugcaugaagga

SEQ ID NO: 1739356 - RNA, 19 nt, Artificial Sequence
  Description of Artificial Sequence: Synthetic oligonucleotide
  Antisense strand to SEQ ID NO: 1739355
uccuucaugcauaacauug

SEQ ID NO: 1739357 - RNA, 19 nt, Artificial Sequence
  Description of Artificial Sequence: Synthetic oligonucleotide
  Sense strand starting at position 2882 of SEQ ID NO: 1562337
agauuaacauuggaauaga

SEQ ID NO: 1739358 - RNA, 19 nt, Artificial Sequence
  Description of Artificial Sequence: Synthetic oligonucleotide
  Antisense strand to SEQ ID NO: 1739357
ucuauuccaauguuaaucu

SEQ ID NO: 1739359 - RNA, 19 nt, Artificial Sequence
  Description of Artificial Sequence: Synthetic oligonucleotide
  Sense strand starting at position 2897 of SEQ ID NO: 1562337
uagauaggcuuagugaaag

SEQ ID NO: 1739360 - RNA, 19 nt, Artificial Sequence
  Description of Artificial Sequence: Synthetic oligonucleotide
  Antisense strand to SEQ ID NO: 1739359
cuuucacuaagccuaucua

SEQ ID NO: 1739361 - RNA, 19 nt, Artificial Sequence
  Description of Artificial Sequence: Synthetic oligonucleotide
  Sense strand starting at position 3360 of SEQ ID NO: 1562337
gaggaaggauauuaauaga

SEQ ID NO: 1739362 - RNA, 19 nt, Artificial Sequence
  Description of Artificial Sequence: Synthetic oligonucleotide
  Antisense strand to SEQ ID NO: 1739361
ucuauuaauauccuuccuc

SEQ ID NO: 1739363 - RNA, 19 nt, Artificial Sequence
  Description of Artificial Sequence: Synthetic oligonucleotide
  Sense strand starting at position 3527 of SEQ ID NO: 1562337
guacuuaauuuagucaguu

SEQ ID NO: 1739364 - RNA, 19 nt, Artificial Sequence
  Description of Artificial Sequence: Synthetic oligonucleotide
  Antisense strand to SEQ ID NO: 1739363
aacugacuaaauuaaguac

SEQ ID NO: 1739365 - RNA, 19 nt, Artificial Sequence
  Description of Artificial Sequence: Synthetic oligonucleotide
  Sense strand starting at position 3858 of SEQ ID NO: 1562337
cagagauguuugccagacu

SEQ ID NO: 1739366 - RNA, 19 nt, Artificial Sequence
  Description of Artificial Sequence: Synthetic oligonucleotide
  Antisense strand to SEQ ID NO: 1739365
agucuggcaaacaucucug

SEQ ID NO: 1739367 - RNA, 19 nt, Artificial Sequence
  Description of Artificial Sequence: Synthetic oligonucleotide
  Sense strand starting at position 3871 of SEQ ID NO: 1562337
cagacugaagcuggaauau

SEQ ID NO: 1739368 - RNA, 19 nt, Artificial Sequence
  Description of Artificial Sequence: Synthetic oligonucleotide
  Antisense strand to SEQ ID NO: 1739367
auauuccagcuucagucug

SEQ ID NO: 1739369 - RNA, 19 nt, Artificial Sequence
  Description of Artificial Sequence: Synthetic oligonucleotide
  Sense strand starting at position 259 of SEQ ID NO: 1562338
augucacaacauuguuaaa

SEQ ID NO: 1739370 - RNA, 19 nt, Artificial Sequence
  Description of Artificial Sequence: Synthetic oligonucleotide
  Antisense strand to SEQ ID NO: 1739369
uuuaacaauguugugacau

SEQ ID NO: 1739371 - RNA, 19 nt, Artificial Sequence
  Description of Artificial Sequence: Synthetic oligonucleotide
  Sense strand starting at position 302 of SEQ ID NO: 1562338
guugcaaguacauguugua

SEQ ID NO: 1739372 - RNA, 19 nt, Artificial Sequence
  Description of Artificial Sequence: Synthetic oligonucleotide
  Antisense strand to SEQ ID NO: 1739371
uacaacauguacuugcaac

SEQ ID NO: 1739373 - RNA, 19 nt, Artificial Sequence
  Description of Artificial Sequence: Synthetic oligonucleotide
  Sense strand starting at position 359 of SEQ ID NO: 1562338
uaagguuggcaaggauuaa

SEQ ID NO: 1739374 - RNA, 19 nt, Artificial Sequence
  Description of Artificial Sequence: Synthetic oligonucleotide
  Antisense strand to SEQ ID NO: 1739373
uuaauccuugccaaccuua

SEQ ID NO: 1739375 - RNA, 19 nt, Artificial Sequence
  Description of Artificial Sequence: Synthetic oligonucleotide
  Sense strand starting at position 379 of SEQ ID NO: 1562338
ugacuuacuguaugcuagu

SEQ ID NO: 1739376 - RNA, 19 nt, Artificial Sequence
  Description of Artificial Sequence: Synthetic oligonucleotide
  Antisense strand to SEQ ID NO: 1739375
acuagcauacaguaaguca

SEQ ID NO: 1739377 - RNA, 19 nt, Artificial Sequence
  Description of Artificial Sequence: Synthetic oligonucleotide
  Sense strand starting at position 569 of SEQ ID NO: 1562338
gacugcaaguccuuucuga

SEQ ID NO: 1739378 - RNA, 19 nt, Artificial Sequence
  Description of Artificial Sequence: Synthetic oligonucleotide
  Antisense strand to SEQ ID NO: 1739377
ucagaaaggacuugcaguc

SEQ ID NO: 1739379 - RNA, 19 nt, Artificial Sequence
  Description of Artificial Sequence: Synthetic oligonucleotide
  Sense strand starting at position 579 of SEQ ID NO: 1562338
ccuuucugacacuggagaa

SEQ ID NO: 1739380 - RNA, 19 nt, Artificial Sequence
  Description of Artificial Sequence: Synthetic oligonucleotide
  Antisense strand to SEQ ID NO: 1739379
uucuccagugucagaaagg

SEQ ID NO: 1739381 - RNA, 19 nt, Artificial Sequence
  Description of Artificial Sequence: Synthetic oligonucleotide
  Sense strand starting at position 697 of SEQ ID NO: 1562338
gccagauuacuccagucua

SEQ ID NO: 1739382 - RNA, 19 nt, Artificial Sequence
  Description of Artificial Sequence: Synthetic oligonucleotide
  Antisense strand to SEQ ID NO: 1739381
uagacuggaguaaucuggc

SEQ ID NO: 1739383 - RNA, 19 nt, Artificial Sequence
  Description of Artificial Sequence: Synthetic oligonucleotide
  Sense strand starting at position 790 of SEQ ID NO: 1562338
aaguguuaugugcuuugca

SEQ ID NO: 1739384 - RNA, 19 nt, Artificial Sequence
  Description of Artificial Sequence: Synthetic oligonucleotide
  Antisense strand to SEQ ID NO: 1739383
ugcaaagcacauaacacuu

SEQ ID NO: 1739385 - RNA, 19 nt, Artificial Sequence
  Description of Artificial Sequence: Synthetic oligonucleotide
  Sense strand starting at position 791 of SEQ ID NO: 1562338
aguguuaugugcuuugcau

SEQ ID NO: 1739386 - RNA, 19 nt, Artificial Sequence
  Description of Artificial Sequence: Synthetic oligonucleotide
  Antisense strand to SEQ ID NO: 1739385
augcaaagcacauaacacu

SEQ ID NO: 1739387 - RNA, 19 nt, Artificial Sequence
  Description of Artificial Sequence: Synthetic oligonucleotide
  Sense strand starting at position 792 of SEQ ID NO: 1562338
guguuaugugcuuugcaua

SEQ ID NO: 1739388 - RNA, 19 nt, Artificial Sequence
  Description of Artificial Sequence: Synthetic oligonucleotide
  Antisense strand to SEQ ID NO: 1739387
uaugcaaagcacauaacac

SEQ ID NO: 1739389 - RNA, 19 nt, Artificial Sequence
  Description of Artificial Sequence: Synthetic oligonucleotide
  Sense strand starting at position 793 of SEQ ID NO: 1562338
uguuaugugcuuugcauau

SEQ ID NO: 1739390 - RNA, 19 nt, Artificial Sequence
  Description of Artificial Sequence: Synthetic oligonucleotide
  Antisense strand to SEQ ID NO: 1739389
auaugcaaagcacauaaca

SEQ ID NO: 1739391 - RNA, 19 nt, Artificial Sequence
  Description of Artificial Sequence: Synthetic oligonucleotide
  Sense strand starting at position 802 of SEQ ID NO: 1562338
cuuugcauauauuaaggua

SEQ ID NO: 1739392 - RNA, 19 nt, Artificial Sequence
  Description of Artificial Sequence: Synthetic oligonucleotide
  Antisense strand to SEQ ID NO: 1739391
uaccuuaauauaugcaaag

SEQ ID NO: 1739393 - RNA, 19 nt, Artificial Sequence
  Description of Artificial Sequence: Synthetic oligonucleotide
  Sense strand starting at position 844 of SEQ ID NO: 1562338
auggaaagugcugguauaa

SEQ ID NO: 1739394 - RNA, 19 nt, Artificial Sequence
  Description of Artificial Sequence: Synthetic oligonucleotide
  Antisense strand to SEQ ID NO: 1739393
uuauaccagcacuuuccau

SEQ ID NO: 1739395 - RNA, 19 nt, Artificial Sequence
  Description of Artificial Sequence: Synthetic oligonucleotide
  Sense strand starting at position 971 of SEQ ID NO: 1562338
cgcagucauccuggugaag

SEQ ID NO: 1739396 - RNA, 19 nt, Artificial Sequence
  Description of Artificial Sequence: Synthetic oligonucleotide
  Antisense strand to SEQ ID NO: 1739395
cuucaccaggaugacugcg

SEQ ID NO: 1739397 - RNA, 19 nt, Artificial Sequence
  Description of Artificial Sequence: Synthetic oligonucleotide
  Sense strand starting at position 1049 of SEQ ID NO: 1562338
aguggucauuccucucaag

SEQ ID NO: 1739398 - RNA, 19 nt, Artificial Sequence
  Description of Artificial Sequence: Synthetic oligonucleotide
  Antisense strand to SEQ ID NO: 1739397
cuugagaggaaugaccacu

SEQ ID NO: 1739399 - RNA, 19 nt, Artificial Sequence
  Description of Artificial Sequence: Synthetic oligonucleotide
  Sense strand starting at position 1496 of SEQ ID NO: 1562338
ggguccuaggguugaggaa

SEQ ID NO: 1739400 - RNA, 19 nt, Artificial Sequence
  Description of Artificial Sequence: Synthetic oligonucleotide
  Antisense strand to SEQ ID NO: 1739399
uuccucaacccuaggaccc

SEQ ID NO: 1739401 - RNA, 19 nt, Artificial Sequence
  Description of Artificial Sequence: Synthetic oligonucleotide
  Sense strand starting at position 2873 of SEQ ID NO: 1562338
caaagcuuugcgggacuua

SEQ ID NO: 1739402 - RNA, 19 nt, Artificial Sequence
  Description of Artificial Sequence: Synthetic oligonucleotide
  Antisense strand to SEQ ID NO: 1739401
uaagucccgcaaagcuuug

SEQ ID NO: 1739403 - RNA, 19 nt, Artificial Sequence
  Description of Artificial Sequence: Synthetic oligonucleotide
  Sense strand starting at position 2932 of SEQ ID NO: 1562338
uccuuucacggguguugau

SEQ ID NO: 1739404 - RNA, 19 nt, Artificial Sequence
  Description of Artificial Sequence: Synthetic oligonucleotide
  Antisense strand to SEQ ID NO: 1739403
aucaacacccgugaaagga

SEQ ID NO: 1739405 - RNA, 19 nt, Artificial Sequence
  Description of Artificial Sequence: Synthetic oligonucleotide
  Sense strand starting at position 3016 of SEQ ID NO: 1562338
agcauuaaagcuggugaga

SEQ ID NO: 1739406 - RNA, 19 nt, Artificial Sequence
  Description of Artificial Sequence: Synthetic oligonucleotide
  Antisense strand to SEQ ID NO: 1739405
ucucaccagcuuuaaugcu

SEQ ID NO: 1739407 - RNA, 19 nt, Artificial Sequence
  Description of Artificial Sequence: Synthetic oligonucleotide
  Sense strand starting at position 3018 of SEQ ID NO: 1562338
cauuaaagcuggugagaag

SEQ ID NO: 1739408 - RNA, 19 nt, Artificial Sequence
  Description of Artificial Sequence: Synthetic oligonucleotide
  Antisense strand to SEQ ID NO: 1739407
cuucucaccagcuuuaaug

SEQ ID NO: 1739409 - RNA, 19 nt, Artificial Sequence
  Description of Artificial Sequence: Synthetic oligonucleotide
  Sense strand starting at position 3054 of SEQ ID NO: 1562338
aucacucaccaguggugaa

SEQ ID NO: 1739410 - RNA, 19 nt, Artificial Sequence
  Description of Artificial Sequence: Synthetic oligonucleotide
  Antisense strand to SEQ ID NO: 1739409
uucaccacuggugagugau

SEQ ID NO: 1739411 - RNA, 19 nt, Artificial Sequence
  Description of Artificial Sequence: Synthetic oligonucleotide
  Sense strand starting at position 3101 of SEQ ID NO: 1562338
ccacgagugggugaaguau

SEQ ID NO: 1739412 - RNA, 19 nt, Artificial Sequence
  Description of Artificial Sequence: Synthetic oligonucleotide
  Antisense strand to SEQ ID NO: 1739411
auacuucacccacucgugg

SEQ ID NO: 1739413 - RNA, 19 nt, Artificial Sequence
  Description of Artificial Sequence: Synthetic oligonucleotide
  Sense strand starting at position 3103 of SEQ ID NO: 1562338
acgagugggugaaguauca

SEQ ID NO: 1739414 - RNA, 19 nt, Artificial Sequence
  Description of Artificial Sequence: Synthetic oligonucleotide
  Antisense strand to SEQ ID NO: 1739413
ugauacuucacccacucgu

SEQ ID NO: 1739415 - RNA, 19 nt, Artificial Sequence
  Description of Artificial Sequence: Synthetic oligonucleotide
  Sense strand starting at position 3110 of SEQ ID NO: 1562338
ggugaaguaucagacauuu

SEQ ID NO: 1739416 - RNA, 19 nt, Artificial Sequence
  Description of Artificial Sequence: Synthetic oligonucleotide
  Antisense strand to SEQ ID NO: 1739415
aaaugucugauacuucacc

SEQ ID NO: 1739417 - RNA, 19 nt, Artificial Sequence
  Description of Artificial Sequence: Synthetic oligonucleotide
  Sense strand starting at position 3130 of SEQ ID NO: 1562338
auauauggugaacguagua

SEQ ID NO: 1739418 - RNA, 19 nt, Artificial Sequence
  Description of Artificial Sequence: Synthetic oligonucleotide
  Antisense strand to SEQ ID NO: 1739417
uacuacguucaccauauau

SEQ ID NO: 1739419 - RNA, 19 nt, Artificial Sequence
  Description of Artificial Sequence: Synthetic oligonucleotide
  Sense strand starting at position 3135 of SEQ ID NO: 1562338
uggugaacguaguagauaa

SEQ ID NO: 1739420 - RNA, 19 nt, Artificial Sequence
  Description of Artificial Sequence: Synthetic oligonucleotide
  Antisense strand to SEQ ID NO: 1739419
uuaucuacuacguucacca

SEQ ID NO: 1739421 - RNA, 19 nt, Artificial Sequence
  Description of Artificial Sequence: Synthetic oligonucleotide
  Sense strand starting at position 3177 of SEQ ID NO: 1562338
agcuauugcuuagugccaa

SEQ ID NO: 1739422 - RNA, 19 nt, Artificial Sequence
  Description of Artificial Sequence: Synthetic oligonucleotide
  Antisense strand to SEQ ID NO: 1739421
uuggcacuaagcaauagcu

SEQ ID NO: 1739423 - RNA, 19 nt, Artificial Sequence
  Description of Artificial Sequence: Synthetic oligonucleotide
  Sense strand starting at position 3197 of SEQ ID NO: 1562338
cgagacucuuaagaauagu

SEQ ID NO: 1739424 - RNA, 19 nt, Artificial Sequence
  Description of Artificial Sequence: Synthetic oligonucleotide
  Antisense strand to SEQ ID NO: 1739423
acuauucuuaagagucucg

SEQ ID NO: 1739425 - RNA, 19 nt, Artificial Sequence
  Description of Artificial Sequence: Synthetic oligonucleotide
  Sense strand starting at position 3207 of SEQ ID NO: 1562338
aagaauaguggucagcuga

SEQ ID NO: 1739426 - RNA, 19 nt, Artificial Sequence
  Description of Artificial Sequence: Synthetic oligonucleotide
  Antisense strand to SEQ ID NO: 1739425
ucagcugaccacuauucuu

SEQ ID NO: 1739427 - RNA, 19 nt, Artificial Sequence
  Description of Artificial Sequence: Synthetic oligonucleotide
  Sense strand starting at position 3239 of SEQ ID NO: 1562338
acaguuguaagccagugaa

SEQ ID NO: 1739428 - RNA, 19 nt, Artificial Sequence
  Description of Artificial Sequence: Synthetic oligonucleotide
  Antisense strand to SEQ ID NO: 1739427
uucacuggcuuacaacugu

SEQ ID NO: 1739429 - RNA, 19 nt, Artificial Sequence
  Description of Artificial Sequence: Synthetic oligonucleotide
  Sense strand starting at position 3242 of SEQ ID NO: 1562338
guuguaagccagugaaucu

SEQ ID NO: 1739430 - RNA, 19 nt, Artificial Sequence
  Description of Artificial Sequence: Synthetic oligonucleotide
  Antisense strand to SEQ ID NO: 1739429
agauucacuggcuuacaac

SEQ ID NO: 1739431 - RNA, 19 nt, Artificial Sequence
  Description of Artificial Sequence: Synthetic oligonucleotide
  Sense strand starting at position 3251 of SEQ ID NO: 1562338
cagugaaucugucccguua

SEQ ID NO: 1739432 - RNA, 19 nt, Artificial Sequence
  Description of Artificial Sequence: Synthetic oligonucleotide
  Antisense strand to SEQ ID NO: 1739431
uaacgggacagauucacug

SEQ ID NO: 1739433 - RNA, 19 nt, Artificial Sequence
  Description of Artificial Sequence: Synthetic oligonucleotide
  Sense strand starting at position 3394 of SEQ ID NO: 1562338
aaguuuggaucccugcuaa

SEQ ID NO: 1739434 - RNA, 19 nt, Artificial Sequence
  Description of Artificial Sequence: Synthetic oligonucleotide
  Antisense strand to SEQ ID NO: 1739433
uuagcagggauccaaacuu

SEQ ID NO: 1739435 - RNA, 19 nt, Artificial Sequence
  Description of Artificial Sequence: Synthetic oligonucleotide
  Sense strand starting at position 3398 of SEQ ID NO: 1562338
uuggaucccugcuaagaaa

SEQ ID NO: 1739436 - RNA, 19 nt, Artificial Sequence
  Description of Artificial Sequence: Synthetic oligonucleotide
  Antisense strand to SEQ ID NO: 1739435
uuucuuagcagggauccaa

SEQ ID NO: 1739437 - RNA, 19 nt, Artificial Sequence
  Description of Artificial Sequence: Synthetic oligonucleotide
  Sense strand starting at position 3728 of SEQ ID NO: 1562338
ccgucauacauggguugga

SEQ ID NO: 1739438 - RNA, 19 nt, Artificial Sequence
  Description of Artificial Sequence: Synthetic oligonucleotide
  Antisense strand to SEQ ID NO: 1739437
uccaacccauguaugacgg

SEQ ID NO: 1739439 - RNA, 19 nt, Artificial Sequence
  Description of Artificial Sequence: Synthetic oligonucleotide
  Sense strand starting at position 3731 of SEQ ID NO: 1562338
ucauacauggguuggagau

SEQ ID NO: 1739440 - RNA, 19 nt, Artificial Sequence
  Description of Artificial Sequence: Synthetic oligonucleotide
  Antisense strand to SEQ ID NO: 1739439
aucuccaacccauguauga

SEQ ID NO: 1739441 - RNA, 19 nt, Artificial Sequence
  Description of Artificial Sequence: Synthetic oligonucleotide
  Sense strand starting at position 3743 of SEQ ID NO: 1562338
uggagauaccuggguagau

SEQ ID NO: 1739442 - RNA, 19 nt, Artificial Sequence
  Description of Artificial Sequence: Synthetic oligonucleotide
  Antisense strand to SEQ ID NO: 1739441
aucuacccagguaucucca

SEQ ID NO: 1739443 - RNA, 19 nt, Artificial Sequence
  Description of Artificial Sequence: Synthetic oligonucleotide
  Sense strand starting at position 3755 of SEQ ID NO: 1562338
gguagaugccuucaaaggu

SEQ ID NO: 1739444 - RNA, 19 nt, Artificial Sequence
  Description of Artificial Sequence: Synthetic oligonucleotide
  Antisense strand to SEQ ID NO: 1739443
accuuugaaggcaucuacc

SEQ ID NO: 1739445 - RNA, 19 nt, Artificial Sequence
  Description of Artificial Sequence: Synthetic oligonucleotide
  Sense strand starting at position 3903 of SEQ ID NO: 1562338
accugagccuccuaaguaa

SEQ ID NO: 1739446 - RNA, 19 nt, Artificial Sequence
  Description of Artificial Sequence: Synthetic oligonucleotide
  Antisense strand to SEQ ID NO: 1739445
uuacuuaggaggcucaggu

SEQ ID NO: 1739447 - RNA, 19 nt, Artificial Sequence
  Description of Artificial Sequence: Synthetic oligonucleotide
  Sense strand starting at position 3963 of SEQ ID NO: 1562338
uuauuacuuguagaggcaa

SEQ ID NO: 1739448 - RNA, 19 nt, Artificial Sequence
  Description of Artificial Sequence: Synthetic oligonucleotide
  Antisense strand to SEQ ID NO: 1739447
uugccucuacaaguaauaa

SEQ ID NO: 1739449 - RNA, 19 nt, Artificial Sequence
  Description of Artificial Sequence: Synthetic oligonucleotide
  Sense strand starting at position 300 of SEQ ID NO: 1562339
gcucaaacgaucugccagu

SEQ ID NO: 1739450 - RNA, 19 nt, Artificial Sequence
  Description of Artificial Sequence: Synthetic oligonucleotide
  Antisense strand to SEQ ID NO: 1739449
acuggcagaucguuugagc

SEQ ID NO: 1739451 - RNA, 19 nt, Artificial Sequence
  Description of Artificial Sequence: Synthetic oligonucleotide
  Sense strand starting at position 313 of SEQ ID NO: 1562339
gccaguuucugccucccaa

SEQ ID NO: 1739452 - RNA, 19 nt, Artificial Sequence
  Description of Artificial Sequence: Synthetic oligonucleotide
  Antisense strand to SEQ ID NO: 1739451
uugggaggcagaaacuggc

SEQ ID NO: 1739453 - RNA, 19 nt, Artificial Sequence
  Description of Artificial Sequence: Synthetic oligonucleotide
  Sense strand starting at position 740 of SEQ ID NO: 1562339
ugaugaaguuuaguguuaa

SEQ ID NO: 1739454 - RNA, 19 nt, Artificial Sequence
  Description of Artificial Sequence: Synthetic oligonucleotide
  Antisense strand to SEQ ID NO: 1739453
uuaacacuaaacuucauca

SEQ ID NO: 1739455 - RNA, 19 nt, Artificial Sequence
  Description of Artificial Sequence: Synthetic oligonucleotide
  Sense strand starting at position 1100 of SEQ ID NO: 1562339
aguggaaaguucuuagaga

SEQ ID NO: 1739456 - RNA, 19 nt, Artificial Sequence
  Description of Artificial Sequence: Synthetic oligonucleotide
  Antisense strand to SEQ ID NO: 1739455
ucucuaagaacuuuccacu

SEQ ID NO: 1739457 - RNA, 19 nt, Artificial Sequence
  Description of Artificial Sequence: Synthetic oligonucleotide
  Sense strand starting at position 1101 of SEQ ID NO: 1562339
guggaaaguucuuagagau

SEQ ID NO: 1739458 - RNA, 19 nt, Artificial Sequence
  Description of Artificial Sequence: Synthetic oligonucleotide
  Antisense strand to SEQ ID NO: 1739457
aucucuaagaacuuuccac

SEQ ID NO: 1739459 - RNA, 19 nt, Artificial Sequence
  Description of Artificial Sequence: Synthetic oligonucleotide
  Sense strand starting at position 1185 of SEQ ID NO: 1562339
gucccauaacaagguguaa

SEQ ID NO: 1739460 - RNA, 19 nt, Artificial Sequence
  Description of Artificial Sequence: Synthetic oligonucleotide
  Antisense strand to SEQ ID NO: 1739459
uuacaccuuguuaugggac

SEQ ID NO: 1739461 - RNA, 19 nt, Artificial Sequence
  Description of Artificial Sequence: Synthetic oligonucleotide
  Sense strand starting at position 1233 of SEQ ID NO: 1562339
aaaggaggcuugcuuaacu

SEQ ID NO: 1739462 - RNA, 19 nt, Artificial Sequence
  Description of Artificial Sequence: Synthetic oligonucleotide
  Antisense strand to SEQ ID NO: 1739461
aguuaagcaagccuccuuu

SEQ ID NO: 1739463 - RNA, 19 nt, Artificial Sequence
  Description of Artificial Sequence: Synthetic oligonucleotide
  Sense strand starting at position 1256 of SEQ ID NO: 1562339
auaccuccagccgauuaua

SEQ ID NO: 1739464 - RNA, 19 nt, Artificial Sequence
  Description of Artificial Sequence: Synthetic oligonucleotide
  Antisense strand to SEQ ID NO: 1739463
uauaaucggcuggagguau

SEQ ID NO: 1739465 - RNA, 19 nt, Artificial Sequence
  Description of Artificial Sequence: Synthetic oligonucleotide
  Sense strand starting at position 1270 of SEQ ID NO: 1562339
uuauaaacugcacgagagu

SEQ ID NO: 1739466 - RNA, 19 nt, Artificial Sequence
  Description of Artificial Sequence: Synthetic oligonucleotide
  Antisense strand to SEQ ID NO: 1739465
acucucgugcaguuuauaa

SEQ ID NO: 1739467 - RNA, 19 nt, Artificial Sequence
  Description of Artificial Sequence: Synthetic oligonucleotide
  Sense strand starting at position 1279 of SEQ ID NO: 1562339
gcacgagagucugcaucau

SEQ ID NO: 1739468 - RNA, 19 nt, Artificial Sequence
  Description of Artificial Sequence: Synthetic oligonucleotide
  Antisense strand to SEQ ID NO: 1739467
augaugcagacucucgugc

SEQ ID NO: 1739469 - RNA, 19 nt, Artificial Sequence
  Description of Artificial Sequence: Synthetic oligonucleotide
  Sense strand starting at position 1283 of SEQ ID NO: 1562339
gagagucugcaucaucuca

SEQ ID NO: 1739470 - RNA, 19 nt, Artificial Sequence
  Description of Artificial Sequence: Synthetic oligonucleotide
  Antisense strand to SEQ ID NO: 1739469
ugagaugaugcagacucuc

SEQ ID NO: 1739471 - RNA, 19 nt, Artificial Sequence
  Description of Artificial Sequence: Synthetic oligonucleotide
  Sense strand starting at position 1285 of SEQ ID NO: 1562339
gagucugcaucaucucaag

SEQ ID NO: 1739472 - RNA, 19 nt, Artificial Sequence
  Description of Artificial Sequence: Synthetic oligonucleotide
  Antisense strand to SEQ ID NO: 1739471
cuugagaugaugcagacuc

SEQ ID NO: 1739473 - RNA, 19 nt, Artificial Sequence
  Description of Artificial Sequence: Synthetic oligonucleotide
  Sense strand starting at position 1291 of SEQ ID NO: 1562339
gcaucaucucaagaagucu

SEQ ID NO: 1739474 - RNA, 19 nt, Artificial Sequence
  Description of Artificial Sequence: Synthetic oligonucleotide
  Antisense strand to SEQ ID NO: 1739473
agacuucuugagaugaugc

SEQ ID NO: 1739475 - RNA, 19 nt, Artificial Sequence
  Description of Artificial Sequence: Synthetic oligonucleotide
  Sense strand starting at position 1335 of SEQ ID NO: 1562339
guacguaccuggucugaua

SEQ ID NO: 1739476 - RNA, 19 nt, Artificial Sequence
  Description of Artificial Sequence: Synthetic oligonucleotide
  Antisense strand to SEQ ID NO: 1739475
uaucagaccagguacguac

SEQ ID NO: 1739477 - RNA, 19 nt, Artificial Sequence
  Description of Artificial Sequence: Synthetic oligonucleotide
  Sense strand starting at position 1344 of SEQ ID NO: 1562339
uggucugauacuggauuga

SEQ ID NO: 1739478 - RNA, 19 nt, Artificial Sequence
  Description of Artificial Sequence: Synthetic oligonucleotide
  Antisense strand to SEQ ID NO: 1739477
ucaauccaguaucagacca

SEQ ID NO: 1739479 - RNA, 19 nt, Artificial Sequence
  Description of Artificial Sequence: Synthetic oligonucleotide
  Sense strand starting at position 1472 of SEQ ID NO: 1562339
cugcuauugcaauaacaug

SEQ ID NO: 1739480 - RNA, 19 nt, Artificial Sequence
  Description of Artificial Sequence: Synthetic oligonucleotide
  Antisense strand to SEQ ID NO: 1739479
cauguuauugcaauagcag

SEQ ID NO: 1739481 - RNA, 19 nt, Artificial Sequence
  Description of Artificial Sequence: Synthetic oligonucleotide
  Sense strand starting at position 1480 of SEQ ID NO: 1562339
gcaauaacauggucucgaa

SEQ ID NO: 1739482 - RNA, 19 nt, Artificial Sequence
  Description of Artificial Sequence: Synthetic oligonucleotide
  Antisense strand to SEQ ID NO: 1739481
uucgagaccauguuauugc

SEQ ID NO: 1739483 - RNA, 19 nt, Artificial Sequence
  Description of Artificial Sequence: Synthetic oligonucleotide
  Sense strand starting at position 1502 of SEQ ID NO: 1562339
gaggaagacuuguacacug

SEQ ID NO: 1739484 - RNA, 19 nt, Artificial Sequence
  Description of Artificial Sequence: Synthetic oligonucleotide
  Antisense strand to SEQ ID NO: 1739483
caguguacaagucuuccuc

SEQ ID NO: 1739485 - RNA, 19 nt, Artificial Sequence
  Description of Artificial Sequence: Synthetic oligonucleotide
  Sense strand starting at position 1639 of SEQ ID NO: 1562339
cugcgaaggugguuaucau

SEQ ID NO: 1739486 - RNA, 19 nt, Artificial Sequence
  Description of Artificial Sequence: Synthetic oligonucleotide
  Antisense strand to SEQ ID NO: 1739485
augauaaccaccuucgcag

SEQ ID NO: 1739487 - RNA, 19 nt, Artificial Sequence
  Description of Artificial Sequence: Synthetic oligonucleotide
  Sense strand starting at position 1867 of SEQ ID NO: 1562339
gcagaaucguaccugauug

SEQ ID NO: 1739488 - RNA, 19 nt, Artificial Sequence
  Description of Artificial Sequence: Synthetic oligonucleotide
  Antisense strand to SEQ ID NO: 1739487
caaucagguacgauucugc

SEQ ID NO: 1739489 - RNA, 19 nt, Artificial Sequence
  Description of Artificial Sequence: Synthetic oligonucleotide
  Sense strand starting at position 1890 of SEQ ID NO: 1562339
aggugaccuuaccaggaaa

SEQ ID NO: 1739490 - RNA, 19 nt, Artificial Sequence
  Description of Artificial Sequence: Synthetic oligonucleotide
  Antisense strand to SEQ ID NO: 1739489
uuuccugguaaggucaccu

SEQ ID NO: 1739491 - RNA, 19 nt, Artificial Sequence
  Description of Artificial Sequence: Synthetic oligonucleotide
  Sense strand starting at position 1911 of SEQ ID NO: 1562339
ggacaaucuuccgccaaac

SEQ ID NO: 1739492 - RNA, 19 nt, Artificial Sequence
  Description of Artificial Sequence: Synthetic oligonucleotide
  Antisense strand to SEQ ID NO: 1739491
guuuggcggaagauugucc

SEQ ID NO: 1739493 - RNA, 19 nt, Artificial Sequence
  Description of Artificial Sequence: Synthetic oligonucleotide
  Sense strand starting at position 1913 of SEQ ID NO: 1562339
acaaucuuccgccaaacga

SEQ ID NO: 1739494 - RNA, 19 nt, Artificial Sequence
  Description of Artificial Sequence: Synthetic oligonucleotide
  Antisense strand to SEQ ID NO: 1739493
ucguuuggcggaagauugu

SEQ ID NO: 1739495 - RNA, 19 nt, Artificial Sequence
  Description of Artificial Sequence: Synthetic oligonucleotide
  Sense strand starting at position 2049 of SEQ ID NO: 1562339
ggagauguaguucgcuaga

SEQ ID NO: 1739496 - RNA, 19 nt, Artificial Sequence
  Description of Artificial Sequence: Synthetic oligonucleotide
  Antisense strand to SEQ ID NO: 1739495
ucuagcgaacuacaucucc

SEQ ID NO: 1739497 - RNA, 19 nt, Artificial Sequence
  Description of Artificial Sequence: Synthetic oligonucleotide
  Sense strand starting at position 2051 of SEQ ID NO: 1562339
agauguaguucgcuagaag

SEQ ID NO: 1739498 - RNA, 19 nt, Artificial Sequence
  Description of Artificial Sequence: Synthetic oligonucleotide
  Antisense strand to SEQ ID NO: 1739497
cuucuagcgaacuacaucu

SEQ ID NO: 1739499 - RNA, 19 nt, Artificial Sequence
  Description of Artificial Sequence: Synthetic oligonucleotide
  Sense strand starting at position 2052 of SEQ ID NO: 1562339
gauguaguucgcuagaagg

SEQ ID NO: 1739500 - RNA, 19 nt, Artificial Sequence
  Description of Artificial Sequence: Synthetic oligonucleotide
  Antisense strand to SEQ ID NO: 1739499
ccuucuagcgaacuacauc

SEQ ID NO: 1739501 - RNA, 19 nt, Artificial Sequence
  Description of Artificial Sequence: Synthetic oligonucleotide
  Sense strand starting at position 2249 of SEQ ID NO: 1562339
aggagucaccugcgcagau

SEQ ID NO: 1739502 - RNA, 19 nt, Artificial Sequence
  Description of Artificial Sequence: Synthetic oligonucleotide
  Antisense strand to SEQ ID NO: 1739501
aucugcgcaggugacuccu

SEQ ID NO: 1739503 - RNA, 19 nt, Artificial Sequence
  Description of Artificial Sequence: Synthetic oligonucleotide
  Sense strand starting at position 2250 of SEQ ID NO: 1562339
ggagucaccugcgcagaua

SEQ ID NO: 1739504 - RNA, 19 nt, Artificial Sequence
  Description of Artificial Sequence: Synthetic oligonucleotide
  Antisense strand to SEQ ID NO: 1739503
uaucugcgcaggugacucc

SEQ ID NO: 1739505 - RNA, 19 nt, Artificial Sequence
  Description of Artificial Sequence: Synthetic oligonucleotide
  Sense strand starting at position 2352 of SEQ ID NO: 1562339
gaucuucuggcuuggaguu

SEQ ID NO: 1739506 - RNA, 19 nt, Artificial Sequence
  Description of Artificial Sequence: Synthetic oligonucleotide
  Antisense strand to SEQ ID NO: 1739505
aacuccaagccagaagauc

SEQ ID NO: 1739507 - RNA, 19 nt, Artificial Sequence
  Description of Artificial Sequence: Synthetic oligonucleotide
  Sense strand starting at position 2573 of SEQ ID NO: 1562339
auaguaugccauugugcua

SEQ ID NO: 1739508 - RNA, 19 nt, Artificial Sequence
  Description of Artificial Sequence: Synthetic oligonucleotide
  Antisense strand to SEQ ID NO: 1739507
uagcacaauggcauacuau

SEQ ID NO: 1739509 - RNA, 19 nt, Artificial Sequence
  Description of Artificial Sequence: Synthetic oligonucleotide
  Sense strand starting at position 2918 of SEQ ID NO: 1562339
acagcccucugagauaaau

SEQ ID NO: 1739510 - RNA, 19 nt, Artificial Sequence
  Description of Artificial Sequence: Synthetic oligonucleotide
  Antisense strand to SEQ ID NO: 1739509
auuuaucucagagggcugu

SEQ ID NO: 1739511 - RNA, 19 nt, Artificial Sequence
  Description of Artificial Sequence: Synthetic oligonucleotide
  Sense strand starting at position 3007 of SEQ ID NO: 1562339
agaauuacacaauguaugu

SEQ ID NO: 1739512 - RNA, 19 nt, Artificial Sequence
  Description of Artificial Sequence: Synthetic oligonucleotide
  Antisense strand to SEQ ID NO: 1739511
acauacauuguguaauucu

SEQ ID NO: 1739513 - RNA, 19 nt, Artificial Sequence
  Description of Artificial Sequence: Synthetic oligonucleotide
  Sense strand starting at position 3070 of SEQ ID NO: 1562339
uuaugacugugucuccuaa

SEQ ID NO: 1739514 - RNA, 19 nt, Artificial Sequence
  Description of Artificial Sequence: Synthetic oligonucleotide
  Antisense strand to SEQ ID NO: 1739513
uuaggagacacagucauaa

SEQ ID NO: 1739515 - RNA, 19 nt, Artificial Sequence
  Description of Artificial Sequence: Synthetic oligonucleotide
  Sense strand starting at position 3105 of SEQ ID NO: 1562339
guauuagccuccucagcuu

SEQ ID NO: 1739516 - RNA, 19 nt, Artificial Sequence
  Description of Artificial Sequence: Synthetic oligonucleotide
  Antisense strand to SEQ ID NO: 1739515
aagcugaggaggcuaauac

SEQ ID NO: 1739517 - RNA, 19 nt, Artificial Sequence
  Description of Artificial Sequence: Synthetic oligonucleotide
  Sense strand starting at position 3150 of SEQ ID NO: 1562339
auugccaucuauguaggaa

SEQ ID NO: 1739518 - RNA, 19 nt, Artificial Sequence
  Description of Artificial Sequence: Synthetic oligonucleotide
  Antisense strand to SEQ ID NO: 1739517
uuccuacauagauggcaau

SEQ ID NO: 1739519 - RNA, 19 nt, Artificial Sequence
  Description of Artificial Sequence: Synthetic oligonucleotide
  Sense strand starting at position 3184 of SEQ ID NO: 1562339
aguauaaacucugauucug

SEQ ID NO: 1739520 - RNA, 19 nt, Artificial Sequence
  Description of Artificial Sequence: Synthetic oligonucleotide
  Antisense strand to SEQ ID NO: 1739519
cagaaucagaguuuauacu

SEQ ID NO: 1739521 - RNA, 19 nt, Artificial Sequence
  Description of Artificial Sequence: Synthetic oligonucleotide
  Sense strand starting at position 3193 of SEQ ID NO: 1562339
ucugauucugagggcuuua

SEQ ID NO: 1739522 - RNA, 19 nt, Artificial Sequence
  Description of Artificial Sequence: Synthetic oligonucleotide
  Antisense strand to SEQ ID NO: 1739521
uaaagcccucagaaucaga

SEQ ID NO: 1739523 - RNA, 19 nt, Artificial Sequence
  Description of Artificial Sequence: Synthetic oligonucleotide
  Sense strand starting at position 3198 of SEQ ID NO: 1562339
uucugagggcuuuaguuau

SEQ ID NO: 1739524 - RNA, 19 nt, Artificial Sequence
  Description of Artificial Sequence: Synthetic oligonucleotide
  Antisense strand to SEQ ID NO: 1739523
auaacuaaagcccucagaa

SEQ ID NO: 1739525 - RNA, 19 nt, Artificial Sequence
  Description of Artificial Sequence: Synthetic oligonucleotide
  Sense strand starting at position 3946 of SEQ ID NO: 1562339
ccaguaaggugccuuauau

SEQ ID NO: 1739526 - RNA, 19 nt, Artificial Sequence
  Description of Artificial Sequence: Synthetic oligonucleotide
  Antisense strand to SEQ ID NO: 1739525
auauaaggcaccuuacugg

SEQ ID NO: 1739527 - RNA, 19 nt, Artificial Sequence
  Description of Artificial Sequence: Synthetic oligonucleotide
  Sense strand starting at position 3953 of SEQ ID NO: 1562339
ggugccuuauaucucucaa

SEQ ID NO: 1739528 - RNA, 19 nt, Artificial Sequence
  Description of Artificial Sequence: Synthetic oligonucleotide
  Antisense strand to SEQ ID NO: 1739527
uugagagauauaaggcacc

SEQ ID NO: 1739529 - RNA, 19 nt, Artificial Sequence
  Description of Artificial Sequence: Synthetic oligonucleotide
  Sense strand starting at position 227 of SEQ ID NO: 1562340
uggauauccugacaugguu

SEQ ID NO: 1739530 - RNA, 19 nt, Artificial Sequence
  Description of Artificial Sequence: Synthetic oligonucleotide
  Antisense strand to SEQ ID NO: 1739529
aaccaugucaggauaucca

SEQ ID NO: 1739531 - RNA, 19 nt, Artificial Sequence
  Description of Artificial Sequence: Synthetic oligonucleotide
  Sense strand starting at position 540 of SEQ ID NO: 1562340
gcucaaacgaucugccagu

SEQ ID NO: 1739532 - RNA, 19 nt, Artificial Sequence
  Description of Artificial Sequence: Synthetic oligonucleotide
  Antisense strand to SEQ ID NO: 1739531
acuggcagaucguuugagc

SEQ ID NO: 1739533 - RNA, 19 nt, Artificial Sequence
  Description of Artificial Sequence: Synthetic oligonucleotide
  Sense strand starting at position 553 of SEQ ID NO: 1562340
gccaguuucugccucccaa

SEQ ID NO: 1739534 - RNA, 19 nt, Artificial Sequence
  Description of Artificial Sequence: Synthetic oligonucleotide
  Antisense strand to SEQ ID NO: 1739533
uugggaggcagaaacuggc

SEQ ID NO: 1739535 - RNA, 19 nt, Artificial Sequence
  Description of Artificial Sequence: Synthetic oligonucleotide
  Sense strand starting at position 980 of SEQ ID NO: 1562340
ugaugaaguuuaguguuaa

SEQ ID NO: 1739536 - RNA, 19 nt, Artificial Sequence
  Description of Artificial Sequence: Synthetic oligonucleotide
  Antisense strand to SEQ ID NO: 1739535
uuaacacuaaacuucauca

SEQ ID NO: 1739537 - RNA, 19 nt, Artificial Sequence
  Description of Artificial Sequence: Synthetic oligonucleotide
  Sense strand starting at position 1340 of SEQ ID NO: 1562340
aguggaaaguucuuagaga

SEQ ID NO: 1739538 - RNA, 19 nt, Artificial Sequence
  Description of Artificial Sequence: Synthetic oligonucleotide
  Antisense strand to SEQ ID NO: 1739537
ucucuaagaacuuuccacu

SEQ ID NO: 1739539 - RNA, 19 nt, Artificial Sequence
  Description of Artificial Sequence: Synthetic oligonucleotide
  Sense strand starting at position 1341 of SEQ ID NO: 1562340
guggaaaguucuuagagau

SEQ ID NO: 1739540 - RNA, 19 nt, Artificial Sequence
  Description of Artificial Sequence: Synthetic oligonucleotide
  Antisense strand to SEQ ID NO: 1739539
aucucuaagaacuuuccac

SEQ ID NO: 1739541 - RNA, 19 nt, Artificial Sequence
  Description of Artificial Sequence: Synthetic oligonucleotide
  Sense strand starting at position 1425 of SEQ ID NO: 1562340
gucccauaacaagguguaa

SEQ ID NO: 1739542 - RNA, 19 nt, Artificial Sequence
  Description of Artificial Sequence: Synthetic oligonucleotide
  Antisense strand to SEQ ID NO: 1739541
uuacaccuuguuaugggac

SEQ ID NO: 1739543 - RNA, 19 nt, Artificial Sequence
  Description of Artificial Sequence: Synthetic oligonucleotide
  Sense strand starting at position 1473 of SEQ ID NO: 1562340
aaaggaggcuugcuuaacu

SEQ ID NO: 1739544 - RNA, 19 nt, Artificial Sequence
  Description of Artificial Sequence: Synthetic oligonucleotide
  Antisense strand to SEQ ID NO: 1739543
aguuaagcaagccuccuuu

SEQ ID NO: 1739545 - RNA, 19 nt, Artificial Sequence
  Description of Artificial Sequence: Synthetic oligonucleotide
  Sense strand starting at position 1496 of SEQ ID NO: 1562340
auaccuccagccgauuaua

SEQ ID NO: 1739546 - RNA, 19 nt, Artificial Sequence
  Description of Artificial Sequence: Synthetic oligonucleotide
  Antisense strand to SEQ ID NO: 1739545
uauaaucggcuggagguau

SEQ ID NO: 1739547 - RNA, 19 nt, Artificial Sequence
  Description of Artificial Sequence: Synthetic oligonucleotide
  Sense strand starting at position 1510 of SEQ ID NO: 1562340
uuauaaacugcacgagagu

SEQ ID NO: 1739548 - RNA, 19 nt, Artificial Sequence
  Description of Artificial Sequence: Synthetic oligonucleotide
  Antisense strand to SEQ ID NO: 1739547
acucucgugcaguuuauaa

SEQ ID NO: 1739549 - RNA, 19 nt, Artificial Sequence
  Description of Artificial Sequence: Synthetic oligonucleotide
  Sense strand starting at position 1519 of SEQ ID NO: 1562340
gcacgagagucugcaucau

SEQ ID NO: 1739550 - RNA, 19 nt, Artificial Sequence
  Description of Artificial Sequence: Synthetic oligonucleotide
  Antisense strand to SEQ ID NO: 1739549
augaugcagacucucgugc

SEQ ID NO: 1739551 - RNA, 19 nt, Artificial Sequence
  Description of Artificial Sequence: Synthetic oligonucleotide
  Sense strand starting at position 1523 of SEQ ID NO: 1562340
gagagucugcaucaucuca

SEQ ID NO: 1739552 - RNA, 19 nt, Artificial Sequence
  Description of Artificial Sequence: Synthetic oligonucleotide
  Antisense strand to SEQ ID NO: 1739551
ugagaugaugcagacucuc

SEQ ID NO: 1739553 - RNA, 19 nt, Artificial Sequence
  Description of Artificial Sequence: Synthetic oligonucleotide
  Sense strand starting at position 1525 of SEQ ID NO: 1562340
gagucugcaucaucucaag

SEQ ID NO: 1739554 - RNA, 19 nt, Artificial Sequence
  Description of Artificial Sequence: Synthetic oligonucleotide
  Antisense strand to SEQ ID NO: 1739553
cuugagaugaugcagacuc

SEQ ID NO: 1739555 - RNA, 19 nt, Artificial Sequence
  Description of Artificial Sequence: Synthetic oligonucleotide
  Sense strand starting at position 1528 of SEQ ID NO: 1562340
ucugcaucaucucaagaag

SEQ ID NO: 1739556 - RNA, 19 nt, Artificial Sequence
  Description of Artificial Sequence: Synthetic oligonucleotide
  Antisense strand to SEQ ID NO: 1739555
cuucuugagaugaugcaga

SEQ ID NO: 1739557 - RNA, 19 nt, Artificial Sequence
  Description of Artificial Sequence: Synthetic oligonucleotide
  Sense strand starting at position 1531 of SEQ ID NO: 1562340
gcaucaucucaagaagucu

SEQ ID NO: 1739558 - RNA, 19 nt, Artificial Sequence
  Description of Artificial Sequence: Synthetic oligonucleotide
  Antisense strand to SEQ ID NO: 1739557
agacuucuugagaugaugc

SEQ ID NO: 1739559 - RNA, 19 nt, Artificial Sequence
  Description of Artificial Sequence: Synthetic oligonucleotide
  Sense strand starting at position 1575 of SEQ ID NO: 1562340
guacguaccuggucugaua

SEQ ID NO: 1739560 - RNA, 19 nt, Artificial Sequence
  Description of Artificial Sequence: Synthetic oligonucleotide
  Antisense strand to SEQ ID NO: 1739559
uaucagaccagguacguac

SEQ ID NO: 1739561 - RNA, 19 nt, Artificial Sequence
  Description of Artificial Sequence: Synthetic oligonucleotide
  Sense strand starting at position 1584 of SEQ ID NO: 1562340
uggucugauacuggauuga

SEQ ID NO: 1739562 - RNA, 19 nt, Artificial Sequence
  Description of Artificial Sequence: Synthetic oligonucleotide
  Antisense strand to SEQ ID NO: 1739561
ucaauccaguaucagacca

SEQ ID NO: 1739563 - RNA, 19 nt, Artificial Sequence
  Description of Artificial Sequence: Synthetic oligonucleotide
  Sense strand starting at position 1712 of SEQ ID NO: 1562340
cugcuauugcaauaacaug

SEQ ID NO: 1739564 - RNA, 19 nt, Artificial Sequence
  Description of Artificial Sequence: Synthetic oligonucleotide
  Antisense strand to SEQ ID NO: 1739563
cauguuauugcaauagcag

SEQ ID NO: 1739565 - RNA, 19 nt, Artificial Sequence
  Description of Artificial Sequence: Synthetic oligonucleotide
  Sense strand starting at position 1720 of SEQ ID NO: 1562340
gcaauaacauggucucgaa

SEQ ID NO: 1739566 - RNA, 19 nt, Artificial Sequence
  Description of Artificial Sequence: Synthetic oligonucleotide
  Antisense strand to SEQ ID NO: 1739565
uucgagaccauguuauugc

SEQ ID NO: 1739567 - RNA, 19 nt, Artificial Sequence
  Description of Artificial Sequence: Synthetic oligonucleotide
  Sense strand starting at position 1742 of SEQ ID NO: 1562340
gaggaagacuuguacacug

SEQ ID NO: 1739568 - RNA, 19 nt, Artificial Sequence
  Description of Artificial Sequence: Synthetic oligonucleotide
  Antisense strand to SEQ ID NO: 1739567
caguguacaagucuuccuc

SEQ ID NO: 1739569 - RNA, 19 nt, Artificial Sequence
  Description of Artificial Sequence: Synthetic oligonucleotide
  Sense strand starting at position 1879 of SEQ ID NO: 1562340
cugcgaaggugguuaucau

SEQ ID NO: 1739570 - RNA, 19 nt, Artificial Sequence
  Description of Artificial Sequence: Synthetic oligonucleotide
  Antisense strand to SEQ ID NO: 1739569
augauaaccaccuucgcag

SEQ ID NO: 1739571 - RNA, 19 nt, Artificial Sequence
  Description of Artificial Sequence: Synthetic oligonucleotide
  Sense strand starting at position 2107 of SEQ ID NO: 1562340
gcagaaucguaccugauug

SEQ ID NO: 1739572 - RNA, 19 nt, Artificial Sequence
  Description of Artificial Sequence: Synthetic oligonucleotide
  Antisense strand to SEQ ID NO: 1739571
caaucagguacgauucugc

SEQ ID NO: 1739573 - RNA, 19 nt, Artificial Sequence
  Description of Artificial Sequence: Synthetic oligonucleotide
  Sense strand starting at position 2130 of SEQ ID NO: 1562340
aggugaccuuaccaggaaa

SEQ ID NO: 1739574 - RNA, 19 nt, Artificial Sequence
  Description of Artificial Sequence: Synthetic oligonucleotide
  Antisense strand to SEQ ID NO: 1739573
uuuccugguaaggucaccu

SEQ ID NO: 1739575 - RNA, 19 nt, Artificial Sequence
  Description of Artificial Sequence: Synthetic oligonucleotide
  Sense strand starting at position 2151 of SEQ ID NO: 1562340
ggacaaucuuccgccaaac

SEQ ID NO: 1739576 - RNA, 19 nt, Artificial Sequence
  Description of Artificial Sequence: Synthetic oligonucleotide
  Antisense strand to SEQ ID NO: 1739575
guuuggcggaagauugucc

SEQ ID NO: 1739577 - RNA, 19 nt, Artificial Sequence
  Description of Artificial Sequence: Synthetic oligonucleotide
  Sense strand starting at position 2153 of SEQ ID NO: 1562340
acaaucuuccgccaaacga

SEQ ID NO: 1739578 - RNA, 19 nt, Artificial Sequence
  Description of Artificial Sequence: Synthetic oligonucleotide
  Antisense strand to SEQ ID NO: 1739577
ucguuuggcggaagauugu

SEQ ID NO: 1739579 - RNA, 19 nt, Artificial Sequence
  Description of Artificial Sequence: Synthetic oligonucleotide
  Sense strand starting at position 2289 of SEQ ID NO: 1562340
ggagauguaguucgcuaga

SEQ ID NO: 1739580 - RNA, 19 nt, Artificial Sequence
  Description of Artificial Sequence: Synthetic oligonucleotide
  Antisense strand to SEQ ID NO: 1739579
ucuagcgaacuacaucucc

SEQ ID NO: 1739581 - RNA, 19 nt, Artificial Sequence
  Description of Artificial Sequence: Synthetic oligonucleotide
  Sense strand starting at position 2291 of SEQ ID NO: 1562340
agauguaguucgcuagaag

SEQ ID NO: 1739582 - RNA, 19 nt, Artificial Sequence
  Description of Artificial Sequence: Synthetic oligonucleotide
  Antisense strand to SEQ ID NO: 1739581
cuucuagcgaacuacaucu

SEQ ID NO: 1739583 - RNA, 19 nt, Artificial Sequence
  Description of Artificial Sequence: Synthetic oligonucleotide
  Sense strand starting at position 2292 of SEQ ID NO: 1562340
gauguaguucgcuagaagg

SEQ ID NO: 1739584 - RNA, 19 nt, Artificial Sequence
  Description of Artificial Sequence: Synthetic oligonucleotide
  Antisense strand to SEQ ID NO: 1739583
ccuucuagcgaacuacauc

SEQ ID NO: 1739585 - RNA, 19 nt, Artificial Sequence
  Description of Artificial Sequence: Synthetic oligonucleotide
  Sense strand starting at position 2489 of SEQ ID NO: 1562340
aggagucaccugcgcagau

SEQ ID NO: 1739586 - RNA, 19 nt, Artificial Sequence
  Description of Artificial Sequence: Synthetic oligonucleotide
  Antisense strand to SEQ ID NO: 1739585
aucugcgcaggugacuccu

SEQ ID NO: 1739587 - RNA, 19 nt, Artificial Sequence
  Description of Artificial Sequence: Synthetic oligonucleotide
  Sense strand starting at position 2490 of SEQ ID NO: 1562340
ggagucaccugcgcagaua

SEQ ID NO: 1739588 - RNA, 19 nt, Artificial Sequence
  Description of Artificial Sequence: Synthetic oligonucleotide
  Antisense strand to SEQ ID NO: 1739587
uaucugcgcaggugacucc

SEQ ID NO: 1739589 - RNA, 19 nt, Artificial Sequence
  Description of Artificial Sequence: Synthetic oligonucleotide
  Sense strand starting at position 2592 of SEQ ID NO: 1562340
gaucuucuggcuuggaguu

SEQ ID NO: 1739590 - RNA, 19 nt, Artificial Sequence
  Description of Artificial Sequence: Synthetic oligonucleotide
  Antisense strand to SEQ ID NO: 1739589
aacuccaagccagaagauc

SEQ ID NO: 1739591 - RNA, 19 nt, Artificial Sequence
  Description of Artificial Sequence: Synthetic oligonucleotide
  Sense strand starting at position 2813 of SEQ ID NO: 1562340
auaguaugccauugugcua

SEQ ID NO: 1739592 - RNA, 19 nt, Artificial Sequence
  Description of Artificial Sequence: Synthetic oligonucleotide
  Antisense strand to SEQ ID NO: 1739591
uagcacaauggcauacuau

SEQ ID NO: 1739593 - RNA, 19 nt, Artificial Sequence
  Description of Artificial Sequence: Synthetic oligonucleotide
  Sense strand starting at position 3158 of SEQ ID NO: 1562340
acagcccucugagauaaau

SEQ ID NO: 1739594 - RNA, 19 nt, Artificial Sequence
  Description of Artificial Sequence: Synthetic oligonucleotide
  Antisense strand to SEQ ID NO: 1739593
auuuaucucagagggcugu

SEQ ID NO: 1739595 - RNA, 19 nt, Artificial Sequence
  Description of Artificial Sequence: Synthetic oligonucleotide
  Sense strand starting at position 3247 of SEQ ID NO: 1562340
agaauuacacaauguaugu

SEQ ID NO: 1739596 - RNA, 19 nt, Artificial Sequence
  Description of Artificial Sequence: Synthetic oligonucleotide
  Antisense strand to SEQ ID NO: 1739595
acauacauuguguaauucu

SEQ ID NO: 1739597 - RNA, 19 nt, Artificial Sequence
  Description of Artificial Sequence: Synthetic oligonucleotide
  Sense strand starting at position 3310 of SEQ ID NO: 1562340
uuaugacugugucuccuaa

SEQ ID NO: 1739598 - RNA, 19 nt, Artificial Sequence
  Description of Artificial Sequence: Synthetic oligonucleotide
  Antisense strand to SEQ ID NO: 1739597
uuaggagacacagucauaa

SEQ ID NO: 1739599 - RNA, 19 nt, Artificial Sequence
  Description of Artificial Sequence: Synthetic oligonucleotide
  Sense strand starting at position 3345 of SEQ ID NO: 1562340
guauuagccuccucagcuu

SEQ ID NO: 1739600 - RNA, 19 nt, Artificial Sequence
  Description of Artificial Sequence: Synthetic oligonucleotide
  Antisense strand to SEQ ID NO: 1739599
aagcugaggaggcuaauac

SEQ ID NO: 1739601 - RNA, 19 nt, Artificial Sequence
  Description of Artificial Sequence: Synthetic oligonucleotide
  Sense strand starting at position 3390 of SEQ ID NO: 1562340
auugccaucuauguaggaa

SEQ ID NO: 1739602 - RNA, 19 nt, Artificial Sequence
  Description of Artificial Sequence: Synthetic oligonucleotide
  Antisense strand to SEQ ID NO: 1739601
uuccuacauagauggcaau

SEQ ID NO: 1739603 - RNA, 19 nt, Artificial Sequence
  Description of Artificial Sequence: Synthetic oligonucleotide
  Sense strand starting at position 3424 of SEQ ID NO: 1562340
aguauaaacucugauucug

SEQ ID NO: 1739604 - RNA, 19 nt, Artificial Sequence
  Description of Artificial Sequence: Synthetic oligonucleotide
  Antisense strand to SEQ ID NO: 1739603
cagaaucagaguuuauacu

SEQ ID NO: 1739605 - RNA, 19 nt, Artificial Sequence
  Description of Artificial Sequence: Synthetic oligonucleotide
  Sense strand starting at position 3433 of SEQ ID NO: 1562340
ucugauucugagggcuuua

SEQ ID NO: 1739606 - RNA, 19 nt, Artificial Sequence
  Description of Artificial Sequence: Synthetic oligonucleotide
  Antisense strand to SEQ ID NO: 1739605
uaaagcccucagaaucaga

SEQ ID NO: 1739607 - RNA, 19 nt, Artificial Sequence
  Description of Artificial Sequence: Synthetic oligonucleotide
  Sense strand starting at position 3438 of SEQ ID NO: 1562340
uucugagggcuuuaguuau

SEQ ID NO: 1739608 - RNA, 19 nt, Artificial Sequence
  Description of Artificial Sequence: Synthetic oligonucleotide
  Antisense strand to SEQ ID NO: 1739607
auaacuaaagcccucagaa

SEQ ID NO: 1739609 - RNA, 19 nt, Artificial Sequence
  Description of Artificial Sequence: Synthetic oligonucleotide
  Sense strand starting at position 20 of SEQ ID NO: 1562341
aggagugguugccuagagu

SEQ ID NO: 1739610 - RNA, 19 nt, Artificial Sequence
  Description of Artificial Sequence: Synthetic oligonucleotide
  Antisense strand to SEQ ID NO: 1739609
acucuaggcaaccacuccu

SEQ ID NO: 1739611 - RNA, 19 nt, Artificial Sequence
  Description of Artificial Sequence: Synthetic oligonucleotide
  Sense strand starting at position 23 of SEQ ID NO: 1562341
agugguugccuagaguuaa

SEQ ID NO: 1739612 - RNA, 19 nt, Artificial Sequence
  Description of Artificial Sequence: Synthetic oligonucleotide
  Antisense strand to SEQ ID NO: 1739611
uuaacucuaggcaaccacu

SEQ ID NO: 1739613 - RNA, 19 nt, Artificial Sequence
  Description of Artificial Sequence: Synthetic oligonucleotide
  Sense strand starting at position 70 of SEQ ID NO: 1562341
gagugacuguuacuagaca

SEQ ID NO: 1739614 - RNA, 19 nt, Artificial Sequence
  Description of Artificial Sequence: Synthetic oligonucleotide
  Antisense strand to SEQ ID NO: 1739613
ugucuaguaacagucacuc

SEQ ID NO: 1739615 - RNA, 19 nt, Artificial Sequence
  Description of Artificial Sequence: Synthetic oligonucleotide
  Sense strand starting at position 77 of SEQ ID NO: 1562341
uguuacuagacauggguuu

SEQ ID NO: 1739616 - RNA, 19 nt, Artificial Sequence
  Description of Artificial Sequence: Synthetic oligonucleotide
  Antisense strand to SEQ ID NO: 1739615
aaacccaugucuaguaaca

SEQ ID NO: 1739617 - RNA, 19 nt, Artificial Sequence
  Description of Artificial Sequence: Synthetic oligonucleotide
  Sense strand starting at position 138 of SEQ ID NO: 1562341
gaugguugcugacucugua

SEQ ID NO: 1739618 - RNA, 19 nt, Artificial Sequence
  Description of Artificial Sequence: Synthetic oligonucleotide
  Antisense strand to SEQ ID NO: 1739617
uacagagucagcaaccauc

SEQ ID NO: 1739619 - RNA, 19 nt, Artificial Sequence
  Description of Artificial Sequence: Synthetic oligonucleotide
  Sense strand starting at position 141 of SEQ ID NO: 1562341
gguugcugacucuguaaau

SEQ ID NO: 1739620 - RNA, 19 nt, Artificial Sequence
  Description of Artificial Sequence: Synthetic oligonucleotide
  Antisense strand to SEQ ID NO: 1739619
auuuacagagucagcaacc

SEQ ID NO: 1739621 - RNA, 19 nt, Artificial Sequence
  Description of Artificial Sequence: Synthetic oligonucleotide
  Sense strand starting at position 142 of SEQ ID NO: 1562341
guugcugacucuguaaaua

SEQ ID NO: 1739622 - RNA, 19 nt, Artificial Sequence
  Description of Artificial Sequence: Synthetic oligonucleotide
  Antisense strand to SEQ ID NO: 1739621
uauuuacagagucagcaac

SEQ ID NO: 1739623 - RNA, 19 nt, Artificial Sequence
  Description of Artificial Sequence: Synthetic oligonucleotide
  Sense strand starting at position 580 of SEQ ID NO: 1562341
uucuauauuucgcugguua

SEQ ID NO: 1739624 - RNA, 19 nt, Artificial Sequence
  Description of Artificial Sequence: Synthetic oligonucleotide
  Antisense strand to SEQ ID NO: 1739623
uaaccagcgaaauauagaa

SEQ ID NO: 1739625 - RNA, 19 nt, Artificial Sequence
  Description of Artificial Sequence: Synthetic oligonucleotide
  Sense strand starting at position 581 of SEQ ID NO: 1562341
ucuauauuucgcugguuag

SEQ ID NO: 1739626 - RNA, 19 nt, Artificial Sequence
  Description of Artificial Sequence: Synthetic oligonucleotide
  Antisense strand to SEQ ID NO: 1739625
cuaaccagcgaaauauaga

SEQ ID NO: 1739627 - RNA, 19 nt, Artificial Sequence
  Description of Artificial Sequence: Synthetic oligonucleotide
  Sense strand starting at position 675 of SEQ ID NO: 1562341
uuuaaauucggccaggaag

SEQ ID NO: 1739628 - RNA, 19 nt, Artificial Sequence
  Description of Artificial Sequence: Synthetic oligonucleotide
  Antisense strand to SEQ ID NO: 1739627
cuuccuggccgaauuuaaa

SEQ ID NO: 1739629 - RNA, 19 nt, Artificial Sequence
  Description of Artificial Sequence: Synthetic oligonucleotide
  Sense strand starting at position 757 of SEQ ID NO: 1562341
caccuuaucuugguguguu

SEQ ID NO: 1739630 - RNA, 19 nt, Artificial Sequence
  Description of Artificial Sequence: Synthetic oligonucleotide
  Antisense strand to SEQ ID NO: 1739629
aacacaccaagauaaggug

SEQ ID NO: 1739631 - RNA, 19 nt, Artificial Sequence
  Description of Artificial Sequence: Synthetic oligonucleotide
  Sense strand starting at position 760 of SEQ ID NO: 1562341
cuuaucuugguguguuaaa

SEQ ID NO: 1739632 - RNA, 19 nt, Artificial Sequence
  Description of Artificial Sequence: Synthetic oligonucleotide
  Antisense strand to SEQ ID NO: 1739631
uuuaacacaccaagauaag

SEQ ID NO: 1739633 - RNA, 19 nt, Artificial Sequence
  Description of Artificial Sequence: Synthetic oligonucleotide
  Sense strand starting at position 761 of SEQ ID NO: 1562341
uuaucuugguguguuaaac

SEQ ID NO: 1739634 - RNA, 19 nt, Artificial Sequence
  Description of Artificial Sequence: Synthetic oligonucleotide
  Antisense strand to SEQ ID NO: 1739633
guuuaacacaccaagauaa

SEQ ID NO: 1739635 - RNA, 19 nt, Artificial Sequence
  Description of Artificial Sequence: Synthetic oligonucleotide
  Sense strand starting at position 771 of SEQ ID NO: 1562341
guguuaaacgcccauaccu

SEQ ID NO: 1739636 - RNA, 19 nt, Artificial Sequence
  Description of Artificial Sequence: Synthetic oligonucleotide
  Antisense strand to SEQ ID NO: 1739635
agguaugggcguuuaacac

SEQ ID NO: 1739637 - RNA, 19 nt, Artificial Sequence
  Description of Artificial Sequence: Synthetic oligonucleotide
  Sense strand starting at position 835 of SEQ ID NO: 1562341
cugaauaaugcaugaauac

SEQ ID NO: 1739638 - RNA, 19 nt, Artificial Sequence
  Description of Artificial Sequence: Synthetic oligonucleotide
  Antisense strand to SEQ ID NO: 1739637
guauucaugcauuauucag

SEQ ID NO: 1739639 - RNA, 19 nt, Artificial Sequence
  Description of Artificial Sequence: Synthetic oligonucleotide
  Sense strand starting at position 842 of SEQ ID NO: 1562341
augcaugaauacuccagaa

SEQ ID NO: 1739640 - RNA, 19 nt, Artificial Sequence
  Description of Artificial Sequence: Synthetic oligonucleotide
  Antisense strand to SEQ ID NO: 1739639
uucuggaguauucaugcau

SEQ ID NO: 1739641 - RNA, 19 nt, Artificial Sequence
  Description of Artificial Sequence: Synthetic oligonucleotide
  Sense strand starting at position 902 of SEQ ID NO: 1562341
cuaagugacugguccaaua

SEQ ID NO: 1739642 - RNA, 19 nt, Artificial Sequence
  Description of Artificial Sequence: Synthetic oligonucleotide
  Antisense strand to SEQ ID NO: 1739641
uauuggaccagucacuuag

SEQ ID NO: 1739643 - RNA, 19 nt, Artificial Sequence
  Description of Artificial Sequence: Synthetic oligonucleotide
  Sense strand starting at position 1097 of SEQ ID NO: 1562341
ugcucagaucccugaugca

SEQ ID NO: 1739644 - RNA, 19 nt, Artificial Sequence
  Description of Artificial Sequence: Synthetic oligonucleotide
  Antisense strand to SEQ ID NO: 1739643
ugcaucagggaucugagca

SEQ ID NO: 1739645 - RNA, 19 nt, Artificial Sequence
  Description of Artificial Sequence: Synthetic oligonucleotide
  Sense strand starting at position 1139 of SEQ ID NO: 1562341
ugagcagaccuugacuagu

SEQ ID NO: 1739646 - RNA, 19 nt, Artificial Sequence
  Description of Artificial Sequence: Synthetic oligonucleotide
  Antisense strand to SEQ ID NO: 1739645
acuagucaaggucugcuca

SEQ ID NO: 1739647 - RNA, 19 nt, Artificial Sequence
  Description of Artificial Sequence: Synthetic oligonucleotide
  Sense strand starting at position 1290 of SEQ ID NO: 1562341
cuguuacaacauggaagau

SEQ ID NO: 1739648 - RNA, 19 nt, Artificial Sequence
  Description of Artificial Sequence: Synthetic oligonucleotide
  Antisense strand to SEQ ID NO: 1739647
aucuuccauguuguaacag

SEQ ID NO: 1739649 - RNA, 19 nt, Artificial Sequence
  Description of Artificial Sequence: Synthetic oligonucleotide
  Sense strand starting at position 2549 of SEQ ID NO: 1562341
uggccuuuagggcaggaua

SEQ ID NO: 1739650 - RNA, 19 nt, Artificial Sequence
  Description of Artificial Sequence: Synthetic oligonucleotide
  Antisense strand to SEQ ID NO: 1739649
uauccugcccuaaaggcca

SEQ ID NO: 1739651 - RNA, 19 nt, Artificial Sequence
  Description of Artificial Sequence: Synthetic oligonucleotide
  Sense strand starting at position 2676 of SEQ ID NO: 1562341
gguccucuggcgggauaga

SEQ ID NO: 1739652 - RNA, 19 nt, Artificial Sequence
  Description of Artificial Sequence: Synthetic oligonucleotide
  Antisense strand to SEQ ID NO: 1739651
ucuaucccgccagaggacc

SEQ ID NO: 1739653 - RNA, 19 nt, Artificial Sequence
  Description of Artificial Sequence: Synthetic oligonucleotide
  Sense strand starting at position 2962 of SEQ ID NO: 1562341
cuuuguuggagggagguua

SEQ ID NO: 1739654 - RNA, 19 nt, Artificial Sequence
  Description of Artificial Sequence: Synthetic oligonucleotide
  Antisense strand to SEQ ID NO: 1739653
uaaccucccuccaacaaag

SEQ ID NO: 1739655 - RNA, 19 nt, Artificial Sequence
  Description of Artificial Sequence: Synthetic oligonucleotide
  Sense strand starting at position 3032 of SEQ ID NO: 1562341
gacaauugugcuggucgaa

SEQ ID NO: 1739656 - RNA, 19 nt, Artificial Sequence
  Description of Artificial Sequence: Synthetic oligonucleotide
  Antisense strand to SEQ ID NO: 1739655
uucgaccagcacaauuguc

SEQ ID NO: 1739657 - RNA, 19 nt, Artificial Sequence
  Description of Artificial Sequence: Synthetic oligonucleotide
  Sense strand starting at position 3106 of SEQ ID NO: 1562341
ugacuuccuucugcaagua

SEQ ID NO: 1739658 - RNA, 19 nt, Artificial Sequence
  Description of Artificial Sequence: Synthetic oligonucleotide
  Antisense strand to SEQ ID NO: 1739657
uacuugcagaaggaaguca

SEQ ID NO: 1739659 - RNA, 19 nt, Artificial Sequence
  Description of Artificial Sequence: Synthetic oligonucleotide
  Sense strand starting at position 3252 of SEQ ID NO: 1562341
cagccucuccaggagugaa

SEQ ID NO: 1739660 - RNA, 19 nt, Artificial Sequence
  Description of Artificial Sequence: Synthetic oligonucleotide
  Antisense strand to SEQ ID NO: 1739659
uucacuccuggagaggcug

SEQ ID NO: 1739661 - RNA, 19 nt, Artificial Sequence
  Description of Artificial Sequence: Synthetic oligonucleotide
  Sense strand starting at position 3387 of SEQ ID NO: 1562341
gcgacaaugaagugucaca

SEQ ID NO: 1739662 - RNA, 19 nt, Artificial Sequence
  Description of Artificial Sequence: Synthetic oligonucleotide
  Antisense strand to SEQ ID NO: 1739661
ugugacacuucauugucgc

SEQ ID NO: 1739663 - RNA, 19 nt, Artificial Sequence
  Description of Artificial Sequence: Synthetic oligonucleotide
  Sense strand starting at position 3394 of SEQ ID NO: 1562341
ugaagugucacaugggauc

SEQ ID NO: 1739664 - RNA, 19 nt, Artificial Sequence
  Description of Artificial Sequence: Synthetic oligonucleotide
  Antisense strand to SEQ ID NO: 1739663
gaucccaugugacacuuca

SEQ ID NO: 1739665 - RNA, 19 nt, Artificial Sequence
  Description of Artificial Sequence: Synthetic oligonucleotide
  Sense strand starting at position 3556 of SEQ ID NO: 1562341
ggacuagcgccucaagguu

SEQ ID NO: 1739666 - RNA, 19 nt, Artificial Sequence
  Description of Artificial Sequence: Synthetic oligonucleotide
  Antisense strand to SEQ ID NO: 1739665
aaccuugaggcgcuagucc

SEQ ID NO: 1739667 - RNA, 19 nt, Artificial Sequence
  Description of Artificial Sequence: Synthetic oligonucleotide
  Sense strand starting at position 3562 of SEQ ID NO: 1562341
gcgccucaagguuuguaua

SEQ ID NO: 1739668 - RNA, 19 nt, Artificial Sequence
  Description of Artificial Sequence: Synthetic oligonucleotide
  Antisense strand to SEQ ID NO: 1739667
uauacaaaccuugaggcgc

SEQ ID NO: 1739669 - RNA, 19 nt, Artificial Sequence
  Description of Artificial Sequence: Synthetic oligonucleotide
  Sense strand starting at position 3563 of SEQ ID NO: 1562341
cgccucaagguuuguauaa

SEQ ID NO: 1739670 - RNA, 19 nt, Artificial Sequence
  Description of Artificial Sequence: Synthetic oligonucleotide
  Antisense strand to SEQ ID NO: 1739669
uuauacaaaccuugaggcg

SEQ ID NO: 1739671 - RNA, 19 nt, Artificial Sequence
  Description of Artificial Sequence: Synthetic oligonucleotide
  Sense strand starting at position 3564 of SEQ ID NO: 1562341
gccucaagguuuguauaac

SEQ ID NO: 1739672 - RNA, 19 nt, Artificial Sequence
  Description of Artificial Sequence: Synthetic oligonucleotide
  Antisense strand to SEQ ID NO: 1739671
guuauacaaaccuugaggc

SEQ ID NO: 1739673 - RNA, 19 nt, Artificial Sequence
  Description of Artificial Sequence: Synthetic oligonucleotide
  Sense strand starting at position 3592 of SEQ ID NO: 1562341
guucuaacauaguuacuuu

SEQ ID NO: 1739674 - RNA, 19 nt, Artificial Sequence
  Description of Artificial Sequence: Synthetic oligonucleotide
  Antisense strand to SEQ ID NO: 1739673
aaaguaacuauguuagaac

SEQ ID NO: 1739675 - RNA, 19 nt, Artificial Sequence
  Description of Artificial Sequence: Synthetic oligonucleotide
  Sense strand starting at position 3631 of SEQ ID NO: 1562341
gggagagaauacugaggau

SEQ ID NO: 1739676 - RNA, 19 nt, Artificial Sequence
  Description of Artificial Sequence: Synthetic oligonucleotide
  Antisense strand to SEQ ID NO: 1739675
auccucaguauucucuccc

SEQ ID NO: 1739677 - RNA, 19 nt, Artificial Sequence
  Description of Artificial Sequence: Synthetic oligonucleotide
  Sense strand starting at position 3646 of SEQ ID NO: 1562341
ggaugacagugagaucacu

SEQ ID NO: 1739678 - RNA, 19 nt, Artificial Sequence
  Description of Artificial Sequence: Synthetic oligonucleotide
  Antisense strand to SEQ ID NO: 1739677
agugaucucacugucaucc

SEQ ID NO: 1739679 - RNA, 19 nt, Artificial Sequence
  Description of Artificial Sequence: Synthetic oligonucleotide
  Sense strand starting at position 3656 of SEQ ID NO: 1562341
gagaucacuucccuguguu

SEQ ID NO: 1739680 - RNA, 19 nt, Artificial Sequence
  Description of Artificial Sequence: Synthetic oligonucleotide
  Antisense strand to SEQ ID NO: 1739679
aacacagggaagugaucuc

SEQ ID NO: 1739681 - RNA, 19 nt, Artificial Sequence
  Description of Artificial Sequence: Synthetic oligonucleotide
  Sense strand starting at position 3657 of SEQ ID NO: 1562341
agaucacuucccuguguuu

SEQ ID NO: 1739682 - RNA, 19 nt, Artificial Sequence
  Description of Artificial Sequence: Synthetic oligonucleotide
  Antisense strand to SEQ ID NO: 1739681
aaacacagggaagugaucu

SEQ ID NO: 1739683 - RNA, 19 nt, Artificial Sequence
  Description of Artificial Sequence: Synthetic oligonucleotide
  Sense strand starting at position 3659 of SEQ ID NO: 1562341
aucacuucccuguguuuga

SEQ ID NO: 1739684 - RNA, 19 nt, Artificial Sequence
  Description of Artificial Sequence: Synthetic oligonucleotide
  Antisense strand to SEQ ID NO: 1739683
ucaaacacagggaagugau

SEQ ID NO: 1739685 - RNA, 19 nt, Artificial Sequence
  Description of Artificial Sequence: Synthetic oligonucleotide
  Sense strand starting at position 3662 of SEQ ID NO: 1562341
acuucccuguguuugagua

SEQ ID NO: 1739686 - RNA, 19 nt, Artificial Sequence
  Description of Artificial Sequence: Synthetic oligonucleotide
  Antisense strand to SEQ ID NO: 1739685
uacucaaacacagggaagu

SEQ ID NO: 1739687 - RNA, 19 nt, Artificial Sequence
  Description of Artificial Sequence: Synthetic oligonucleotide
  Sense strand starting at position 3738 of SEQ ID NO: 1562341
cgggauugaaagugauuag

SEQ ID NO: 1739688 - RNA, 19 nt, Artificial Sequence
  Description of Artificial Sequence: Synthetic oligonucleotide
  Antisense strand to SEQ ID NO: 1739687
cuaaucacuuucaaucccg

SEQ ID NO: 1739689 - RNA, 19 nt, Artificial Sequence
  Description of Artificial Sequence: Synthetic oligonucleotide
  Sense strand starting at position 164 of SEQ ID NO: 1562342
aggugugauccgccugcuu

SEQ ID NO: 1739690 - RNA, 19 nt, Artificial Sequence
  Description of Artificial Sequence: Synthetic oligonucleotide
  Antisense strand to SEQ ID NO: 1739689
aagcaggcggaucacaccu

SEQ ID NO: 1739691 - RNA, 19 nt, Artificial Sequence
  Description of Artificial Sequence: Synthetic oligonucleotide
  Sense strand starting at position 271 of SEQ ID NO: 1562342
ggaacuaucuuggauagac

SEQ ID NO: 1739692 - RNA, 19 nt, Artificial Sequence
  Description of Artificial Sequence: Synthetic oligonucleotide
  Antisense strand to SEQ ID NO: 1739691
gucuauccaagauaguucc

SEQ ID NO: 1739693 - RNA, 19 nt, Artificial Sequence
  Description of Artificial Sequence: Synthetic oligonucleotide
  Sense strand starting at position 299 of SEQ ID NO: 1562342
gucacuuauuuacaagaga

SEQ ID NO: 1739694 - RNA, 19 nt, Artificial Sequence
  Description of Artificial Sequence: Synthetic oligonucleotide
  Antisense strand to SEQ ID NO: 1739693
ucucuuguaaauaagugac

SEQ ID NO: 1739695 - RNA, 19 nt, Artificial Sequence
  Description of Artificial Sequence: Synthetic oligonucleotide
  Sense strand starting at position 343 of SEQ ID NO: 1562342
gccuguucccauuaggaca

SEQ ID NO: 1739696 - RNA, 19 nt, Artificial Sequence
  Description of Artificial Sequence: Synthetic oligonucleotide
  Antisense strand to SEQ ID NO: 1739695
uguccuaaugggaacaggc

SEQ ID NO: 1739697 - RNA, 19 nt, Artificial Sequence
  Description of Artificial Sequence: Synthetic oligonucleotide
  Sense strand starting at position 482 of SEQ ID NO: 1562342
gagggcuggcucugaguga

SEQ ID NO: 1739698 - RNA, 19 nt, Artificial Sequence
  Description of Artificial Sequence: Synthetic oligonucleotide
  Antisense strand to SEQ ID NO: 1739697
ucacucagagccagcccuc

SEQ ID NO: 1739699 - RNA, 19 nt, Artificial Sequence
  Description of Artificial Sequence: Synthetic oligonucleotide
  Sense strand starting at position 486 of SEQ ID NO: 1562342
gcuggcucugagugaugaa

SEQ ID NO: 1739700 - RNA, 19 nt, Artificial Sequence
  Description of Artificial Sequence: Synthetic oligonucleotide
  Antisense strand to SEQ ID NO: 1739699
uucaucacucagagccagc

SEQ ID NO: 1739701 - RNA, 19 nt, Artificial Sequence
  Description of Artificial Sequence: Synthetic oligonucleotide
  Sense strand starting at position 487 of SEQ ID NO: 1562342
cuggcucugagugaugaac

SEQ ID NO: 1739702 - RNA, 19 nt, Artificial Sequence
  Description of Artificial Sequence: Synthetic oligonucleotide
  Antisense strand to SEQ ID NO: 1739701
guucaucacucagagccag

SEQ ID NO: 1739703 - RNA, 19 nt, Artificial Sequence
  Description of Artificial Sequence: Synthetic oligonucleotide
  Sense strand starting at position 507 of SEQ ID NO: 1562342
ggagaagucaacugcccaa

SEQ ID NO: 1739704 - RNA, 19 nt, Artificial Sequence
  Description of Artificial Sequence: Synthetic oligonucleotide
  Antisense strand to SEQ ID NO: 1739703
uugggcaguugacuucucc

SEQ ID NO: 1739705 - RNA, 19 nt, Artificial Sequence
  Description of Artificial Sequence: Synthetic oligonucleotide
  Sense strand starting at position 667 of SEQ ID NO: 1562342
gguugagaugaucaagccu

SEQ ID NO: 1739706 - RNA, 19 nt, Artificial Sequence
  Description of Artificial Sequence: Synthetic oligonucleotide
  Antisense strand to SEQ ID NO: 1739705
aggcuugaucaucucaacc

SEQ ID NO: 1739707 - RNA, 19 nt, Artificial Sequence
  Description of Artificial Sequence: Synthetic oligonucleotide
  Sense strand starting at position 935 of SEQ ID NO: 1562342
ugaaguuugcguuaaauau

SEQ ID NO: 1739708 - RNA, 19 nt, Artificial Sequence
  Description of Artificial Sequence: Synthetic oligonucleotide
  Antisense strand to SEQ ID NO: 1739707
auauuuaacgcaaacuuca

SEQ ID NO: 1739709 - RNA, 19 nt, Artificial Sequence
  Description of Artificial Sequence: Synthetic oligonucleotide
  Sense strand starting at position 942 of SEQ ID NO: 1562342
ugcguuaaauauguacaga

SEQ ID NO: 1739710 - RNA, 19 nt, Artificial Sequence
  Description of Artificial Sequence: Synthetic oligonucleotide
  Antisense strand to SEQ ID NO: 1739709
ucuguacauauuuaacgca

SEQ ID NO: 1739711 - RNA, 19 nt, Artificial Sequence
  Description of Artificial Sequence: Synthetic oligonucleotide
  Sense strand starting at position 943 of SEQ ID NO: 1562342
gcguuaaauauguacagag

SEQ ID NO: 1739712 - RNA, 19 nt, Artificial Sequence
  Description of Artificial Sequence: Synthetic oligonucleotide
  Antisense strand to SEQ ID NO: 1739711
cucuguacauauuuaacgc

SEQ ID NO: 1739713 - RNA, 19 nt, Artificial Sequence
  Description of Artificial Sequence: Synthetic oligonucleotide
  Sense strand starting at position 969 of SEQ ID NO: 1562342
uggcauacauguuucucaa

SEQ ID NO: 1739714 - RNA, 19 nt, Artificial Sequence
  Description of Artificial Sequence: Synthetic oligonucleotide
  Antisense strand to SEQ ID NO: 1739713
uugagaaacauguaugcca

SEQ ID NO: 1739715 - RNA, 19 nt, Artificial Sequence
  Description of Artificial Sequence: Synthetic oligonucleotide
  Sense strand starting at position 1054 of SEQ ID NO: 1562342
gugucugaacuuuaguauc

SEQ ID NO: 1739716 - RNA, 19 nt, Artificial Sequence
  Description of Artificial Sequence: Synthetic oligonucleotide
  Antisense strand to SEQ ID NO: 1739715
gauacuaaaguucagacac

SEQ ID NO: 1739717 - RNA, 19 nt, Artificial Sequence
  Description of Artificial Sequence: Synthetic oligonucleotide
  Sense strand starting at position 1056 of SEQ ID NO: 1562342
gucugaacuuuaguaucaa

SEQ ID NO: 1739718 - RNA, 19 nt, Artificial Sequence
  Description of Artificial Sequence: Synthetic oligonucleotide
  Antisense strand to SEQ ID NO: 1739717
uugauacuaaaguucagac

SEQ ID NO: 1739719 - RNA, 19 nt, Artificial Sequence
  Description of Artificial Sequence: Synthetic oligonucleotide
  Sense strand starting at position 1127 of SEQ ID NO: 1562342
ggguaagacagaugcuagu

SEQ ID NO: 1739720 - RNA, 19 nt, Artificial Sequence
  Description of Artificial Sequence: Synthetic oligonucleotide
  Antisense strand to SEQ ID NO: 1739719
acuagcaucugucuuaccc

SEQ ID NO: 1739721 - RNA, 19 nt, Artificial Sequence
  Description of Artificial Sequence: Synthetic oligonucleotide
  Sense strand starting at position 1157 of SEQ ID NO: 1562342
ccacgaauccucgacauuc

SEQ ID NO: 1739722 - RNA, 19 nt, Artificial Sequence
  Description of Artificial Sequence: Synthetic oligonucleotide
  Antisense strand to SEQ ID NO: 1739721
gaaugucgaggauucgugg

SEQ ID NO: 1739723 - RNA, 19 nt, Artificial Sequence
  Description of Artificial Sequence: Synthetic oligonucleotide
  Sense strand starting at position 1188 of SEQ ID NO: 1562342
aauaauuuggagugcguga

SEQ ID NO: 1739724 - RNA, 19 nt, Artificial Sequence
  Description of Artificial Sequence: Synthetic oligonucleotide
  Antisense strand to SEQ ID NO: 1739723
ucacgcacuccaaauuauu

SEQ ID NO: 1739725 - RNA, 19 nt, Artificial Sequence
  Description of Artificial Sequence: Synthetic oligonucleotide
  Sense strand starting at position 1193 of SEQ ID NO: 1562342
uuuggagugcgugagagaa

SEQ ID NO: 1739726 - RNA, 19 nt, Artificial Sequence
  Description of Artificial Sequence: Synthetic oligonucleotide
  Antisense strand to SEQ ID NO: 1739725
uucucucacgcacuccaaa

SEQ ID NO: 1739727 - RNA, 19 nt, Artificial Sequence
  Description of Artificial Sequence: Synthetic oligonucleotide
  Sense strand starting at position 1362 of SEQ ID NO: 1562342
cccucacuuuccucgggaa

SEQ ID NO: 1739728 - RNA, 19 nt, Artificial Sequence
  Description of Artificial Sequence: Synthetic oligonucleotide
  Antisense strand to SEQ ID NO: 1739727
uucccgaggaaagugaggg

SEQ ID NO: 1739729 - RNA, 19 nt, Artificial Sequence
  Description of Artificial Sequence: Synthetic oligonucleotide
  Sense strand starting at position 1495 of SEQ ID NO: 1562342
cgaagucuucgcgcccauu

SEQ ID NO: 1739730 - RNA, 19 nt, Artificial Sequence
  Description of Artificial Sequence: Synthetic oligonucleotide
  Antisense strand to SEQ ID NO: 1739729
aaugggcgcgaagacuucg

SEQ ID NO: 1739731 - RNA, 19 nt, Artificial Sequence
  Description of Artificial Sequence: Synthetic oligonucleotide
  Sense strand starting at position 1508 of SEQ ID NO: 1562342
cccauuuccuugccucgaa

SEQ ID NO: 1739732 - RNA, 19 nt, Artificial Sequence
  Description of Artificial Sequence: Synthetic oligonucleotide
  Antisense strand to SEQ ID NO: 1739731
uucgaggcaaggaaauggg

SEQ ID NO: 1739733 - RNA, 19 nt, Artificial Sequence
  Description of Artificial Sequence: Synthetic oligonucleotide
  Sense strand starting at position 2263 of SEQ ID NO: 1562342
accgaaauagcuuaacucu

SEQ ID NO: 1739734 - RNA, 19 nt, Artificial Sequence
  Description of Artificial Sequence: Synthetic oligonucleotide
  Antisense strand to SEQ ID NO: 1739733
agaguuaagcuauuucggu

SEQ ID NO: 1739735 - RNA, 19 nt, Artificial Sequence
  Description of Artificial Sequence: Synthetic oligonucleotide
  Sense strand starting at position 2527 of SEQ ID NO: 1562342
agugccuggucaucucaga

SEQ ID NO: 1739736 - RNA, 19 nt, Artificial Sequence
  Description of Artificial Sequence: Synthetic oligonucleotide
  Antisense strand to SEQ ID NO: 1739735
ucugagaugaccaggcacu

SEQ ID NO: 1739737 - RNA, 19 nt, Artificial Sequence
  Description of Artificial Sequence: Synthetic oligonucleotide
  Sense strand starting at position 2601 of SEQ ID NO: 1562342
gccggagugaaugaauagu

SEQ ID NO: 1739738 - RNA, 19 nt, Artificial Sequence
  Description of Artificial Sequence: Synthetic oligonucleotide
  Antisense strand to SEQ ID NO: 1739737
acuauucauucacuccggc

SEQ ID NO: 1739739 - RNA, 19 nt, Artificial Sequence
  Description of Artificial Sequence: Synthetic oligonucleotide
  Sense strand starting at position 2749 of SEQ ID NO: 1562342
uuacuuugauagcuuagca

SEQ ID NO: 1739740 - RNA, 19 nt, Artificial Sequence
  Description of Artificial Sequence: Synthetic oligonucleotide
  Antisense strand to SEQ ID NO: 1739739
ugcuaagcuaucaaaguaa

SEQ ID NO: 1739741 - RNA, 19 nt, Artificial Sequence
  Description of Artificial Sequence: Synthetic oligonucleotide
  Sense strand starting at position 2921 of SEQ ID NO: 1562342
cuugaucauuugcacaaga

SEQ ID NO: 1739742 - RNA, 19 nt, Artificial Sequence
  Description of Artificial Sequence: Synthetic oligonucleotide
  Antisense strand to SEQ ID NO: 1739741
ucuugugcaaaugaucaag

SEQ ID NO: 1739743 - RNA, 19 nt, Artificial Sequence
  Description of Artificial Sequence: Synthetic oligonucleotide
  Sense strand starting at position 2970 of SEQ ID NO: 1562342
ugagcaucuugucuuagca

SEQ ID NO: 1739744 - RNA, 19 nt, Artificial Sequence
  Description of Artificial Sequence: Synthetic oligonucleotide
  Antisense strand to SEQ ID NO: 1739743
ugcuaagacaagaugcuca

SEQ ID NO: 1739745 - RNA, 19 nt, Artificial Sequence
  Description of Artificial Sequence: Synthetic oligonucleotide
  Sense strand starting at position 2974 of SEQ ID NO: 1562342
caucuugucuuagcagaga

SEQ ID NO: 1739746 - RNA, 19 nt, Artificial Sequence
  Description of Artificial Sequence: Synthetic oligonucleotide
  Antisense strand to SEQ ID NO: 1739745
ucucugcuaagacaagaug

SEQ ID NO: 1739747 - RNA, 19 nt, Artificial Sequence
  Description of Artificial Sequence: Synthetic oligonucleotide
  Sense strand starting at position 2977 of SEQ ID NO: 1562342
cuugucuuagcagagaaac

SEQ ID NO: 1739748 - RNA, 19 nt, Artificial Sequence
  Description of Artificial Sequence: Synthetic oligonucleotide
  Antisense strand to SEQ ID NO: 1739747
guuucucugcuaagacaag

SEQ ID NO: 1739749 - RNA, 19 nt, Artificial Sequence
  Description of Artificial Sequence: Synthetic oligonucleotide
  Sense strand starting at position 2979 of SEQ ID NO: 1562342
ugucuuagcagagaaacgu

SEQ ID NO: 1739750 - RNA, 19 nt, Artificial Sequence
  Description of Artificial Sequence: Synthetic oligonucleotide
  Antisense strand to SEQ ID NO: 1739749
acguuucucugcuaagaca

SEQ ID NO: 1739751 - RNA, 19 nt, Artificial Sequence
  Description of Artificial Sequence: Synthetic oligonucleotide
  Sense strand starting at position 2985 of SEQ ID NO: 1562342
agcagagaaacgugcuuaa

SEQ ID NO: 1739752 - RNA, 19 nt, Artificial Sequence
  Description of Artificial Sequence: Synthetic oligonucleotide
  Antisense strand to SEQ ID NO: 1739751
uuaagcacguuucucugcu

SEQ ID NO: 1739753 - RNA, 19 nt, Artificial Sequence
  Description of Artificial Sequence: Synthetic oligonucleotide
  Sense strand starting at position 3087 of SEQ ID NO: 1562342
ccgacugaggucugagaaa

SEQ ID NO: 1739754 - RNA, 19 nt, Artificial Sequence
  Description of Artificial Sequence: Synthetic oligonucleotide
  Antisense strand to SEQ ID NO: 1739753
uuucucagaccucagucgg

SEQ ID NO: 1739755 - RNA, 19 nt, Artificial Sequence
  Description of Artificial Sequence: Synthetic oligonucleotide
  Sense strand starting at position 3188 of SEQ ID NO: 1562342
guggaauggguucauccaa

SEQ ID NO: 1739756 - RNA, 19 nt, Artificial Sequence
  Description of Artificial Sequence: Synthetic oligonucleotide
  Antisense strand to SEQ ID NO: 1739755
uuggaugaacccauuccac

SEQ ID NO: 1739757 - RNA, 19 nt, Artificial Sequence
  Description of Artificial Sequence: Synthetic oligonucleotide
  Sense strand starting at position 3234 of SEQ ID NO: 1562342
aaaugucaggucuaguuaa

SEQ ID NO: 1739758 - RNA, 19 nt, Artificial Sequence
  Description of Artificial Sequence: Synthetic oligonucleotide
  Antisense strand to SEQ ID NO: 1739757
uuaacuagaccugacauuu

SEQ ID NO: 1739759 - RNA, 19 nt, Artificial Sequence
  Description of Artificial Sequence: Synthetic oligonucleotide
  Sense strand starting at position 3242 of SEQ ID NO: 1562342
ggucuaguuaaagauaagu

SEQ ID NO: 1739760 - RNA, 19 nt, Artificial Sequence
  Description of Artificial Sequence: Synthetic oligonucleotide
  Antisense strand to SEQ ID NO: 1739759
acuuaucuuuaacuagacc

SEQ ID NO: 1739761 - RNA, 19 nt, Artificial Sequence
  Description of Artificial Sequence: Synthetic oligonucleotide
  Sense strand starting at position 3269 of SEQ ID NO: 1562342
cagggugguauaugacaaa

SEQ ID NO: 1739762 - RNA, 19 nt, Artificial Sequence
  Description of Artificial Sequence: Synthetic oligonucleotide
  Antisense strand to SEQ ID NO: 1739761
uuugucauauaccacccug

SEQ ID NO: 1739763 - RNA, 19 nt, Artificial Sequence
  Description of Artificial Sequence: Synthetic oligonucleotide
  Sense strand starting at position 3638 of SEQ ID NO: 1562342
aaauucguccauuaguguu

SEQ ID NO: 1739764 - RNA, 19 nt, Artificial Sequence
  Description of Artificial Sequence: Synthetic oligonucleotide
  Antisense strand to SEQ ID NO: 1739763
aacacuaauggacgaauuu

SEQ ID NO: 1739765 - RNA, 19 nt, Artificial Sequence
  Description of Artificial Sequence: Synthetic oligonucleotide
  Sense strand starting at position 3644 of SEQ ID NO: 1562342
guccauuaguguuuccaau

SEQ ID NO: 1739766 - RNA, 19 nt, Artificial Sequence
  Description of Artificial Sequence: Synthetic oligonucleotide
  Antisense strand to SEQ ID NO: 1739765
auuggaaacacuaauggac

SEQ ID NO: 1739767 - RNA, 19 nt, Artificial Sequence
  Description of Artificial Sequence: Synthetic oligonucleotide
  Sense strand starting at position 3646 of SEQ ID NO: 1562342
ccauuaguguuuccaaugu

SEQ ID NO: 1739768 - RNA, 19 nt, Artificial Sequence
  Description of Artificial Sequence: Synthetic oligonucleotide
  Antisense strand to SEQ ID NO: 1739767
acauuggaaacacuaaugg

SEQ ID NO: 1739769 - RNA, 19 nt, Artificial Sequence
  Description of Artificial Sequence: Synthetic oligonucleotide
  Sense strand starting at position 32 of SEQ ID NO: 1562343
cuuauauagagaugugguu

SEQ ID NO: 1739770 - RNA, 19 nt, Artificial Sequence
  Description of Artificial Sequence: Synthetic oligonucleotide
  Antisense strand to SEQ ID NO: 1739769
aaccacaucucuauauaag

SEQ ID NO: 1739771 - RNA, 19 nt, Artificial Sequence
  Description of Artificial Sequence: Synthetic oligonucleotide
  Sense strand starting at position 877 of SEQ ID NO: 1562343
ggguuuaugcuccagugag

SEQ ID NO: 1739772 - RNA, 19 nt, Artificial Sequence
  Description of Artificial Sequence: Synthetic oligonucleotide
  Antisense strand to SEQ ID NO: 1739771
cucacuggagcauaaaccc

SEQ ID NO: 1739773 - RNA, 19 nt, Artificial Sequence
  Description of Artificial Sequence: Synthetic oligonucleotide
  Sense strand starting at position 937 of SEQ ID NO: 1562343
gcaguaaugcucgcucgca

SEQ ID NO: 1739774 - RNA, 19 nt, Artificial Sequence
  Description of Artificial Sequence: Synthetic oligonucleotide
  Antisense strand to SEQ ID NO: 1739773
ugcgagcgagcauuacugc

SEQ ID NO: 1739775 - RNA, 19 nt, Artificial Sequence
  Description of Artificial Sequence: Synthetic oligonucleotide
  Sense strand starting at position 1181 of SEQ ID NO: 1562343
uuuauucuucuaggaguua

SEQ ID NO: 1739776 - RNA, 19 nt, Artificial Sequence
  Description of Artificial Sequence: Synthetic oligonucleotide
  Antisense strand to SEQ ID NO: 1739775
uaacuccuagaagaauaaa

SEQ ID NO: 1739777 - RNA, 19 nt, Artificial Sequence
  Description of Artificial Sequence: Synthetic oligonucleotide
  Sense strand starting at position 1193 of SEQ ID NO: 1562343
ggaguuaccagacagcagu

SEQ ID NO: 1739778 - RNA, 19 nt, Artificial Sequence
  Description of Artificial Sequence: Synthetic oligonucleotide
  Antisense strand to SEQ ID NO: 1739777
acugcugucugguaacucc

SEQ ID NO: 1739779 - RNA, 19 nt, Artificial Sequence
  Description of Artificial Sequence: Synthetic oligonucleotide
  Sense strand starting at position 1312 of SEQ ID NO: 1562343
uuaucuugucuagacauua

SEQ ID NO: 1739780 - RNA, 19 nt, Artificial Sequence
  Description of Artificial Sequence: Synthetic oligonucleotide
  Antisense strand to SEQ ID NO: 1739779
uaaugucuagacaagauaa

SEQ ID NO: 1739781 - RNA, 19 nt, Artificial Sequence
  Description of Artificial Sequence: Synthetic oligonucleotide
  Sense strand starting at position 1416 of SEQ ID NO: 1562343
auagguuaacaguggguaa

SEQ ID NO: 1739782 - RNA, 19 nt, Artificial Sequence
  Description of Artificial Sequence: Synthetic oligonucleotide
  Antisense strand to SEQ ID NO: 1739781
uuacccacuguuaaccuau

SEQ ID NO: 1739783 - RNA, 19 nt, Artificial Sequence
  Description of Artificial Sequence: Synthetic oligonucleotide
  Sense strand starting at position 1444 of SEQ ID NO: 1562343
acagaauuaugagugguuu

SEQ ID NO: 1739784 - RNA, 19 nt, Artificial Sequence
  Description of Artificial Sequence: Synthetic oligonucleotide
  Antisense strand to SEQ ID NO: 1739783
aaaccacucauaauucugu

SEQ ID NO: 1739785 - RNA, 19 nt, Artificial Sequence
  Description of Artificial Sequence: Synthetic oligonucleotide
  Sense strand starting at position 1663 of SEQ ID NO: 1562343
cuacauaccuuguugaguu

SEQ ID NO: 1739786 - RNA, 19 nt, Artificial Sequence
  Description of Artificial Sequence: Synthetic oligonucleotide
  Antisense strand to SEQ ID NO: 1739785
aacucaacaagguauguag

SEQ ID NO: 1739787 - RNA, 19 nt, Artificial Sequence
  Description of Artificial Sequence: Synthetic oligonucleotide
  Sense strand starting at position 1909 of SEQ ID NO: 1562343
gaagacacguguccacaaa

SEQ ID NO: 1739788 - RNA, 19 nt, Artificial Sequence
  Description of Artificial Sequence: Synthetic oligonucleotide
  Antisense strand to SEQ ID NO: 1739787
uuuguggacacgugucuuc

SEQ ID NO: 1739789 - RNA, 19 nt, Artificial Sequence
  Description of Artificial Sequence: Synthetic oligonucleotide
  Sense strand starting at position 2074 of SEQ ID NO: 1562343
gugcuagggcuccaaguaa

SEQ ID NO: 1739790 - RNA, 19 nt, Artificial Sequence
  Description of Artificial Sequence: Synthetic oligonucleotide
  Antisense strand to SEQ ID NO: 1739789
uuacuuggagcccuagcac

SEQ ID NO: 1739791 - RNA, 19 nt, Artificial Sequence
  Description of Artificial Sequence: Synthetic oligonucleotide
  Sense strand starting at position 2111 of SEQ ID NO: 1562343
ggaucaaagcuccaaagcu

SEQ ID NO: 1739792 - RNA, 19 nt, Artificial Sequence
  Description of Artificial Sequence: Synthetic oligonucleotide
  Antisense strand to SEQ ID NO: 1739791
agcuuuggagcuuugaucc

SEQ ID NO: 1739793 - RNA, 19 nt, Artificial Sequence
  Description of Artificial Sequence: Synthetic oligonucleotide
  Sense strand starting at position 2340 of SEQ ID NO: 1562343
ggacuauugggauguauca

SEQ ID NO: 1739794 - RNA, 19 nt, Artificial Sequence
  Description of Artificial Sequence: Synthetic oligonucleotide
  Antisense strand to SEQ ID NO: 1739793
ugauacaucccaauagucc

SEQ ID NO: 1739795 - RNA, 19 nt, Artificial Sequence
  Description of Artificial Sequence: Synthetic oligonucleotide
  Sense strand starting at position 2388 of SEQ ID NO: 1562343
gcaggcaucuacccaacau

SEQ ID NO: 1739796 - RNA, 19 nt, Artificial Sequence
  Description of Artificial Sequence: Synthetic oligonucleotide
  Antisense strand to SEQ ID NO: 1739795
auguuggguagaugccugc

SEQ ID NO: 1739797 - RNA, 19 nt, Artificial Sequence
  Description of Artificial Sequence: Synthetic oligonucleotide
  Sense strand starting at position 2497 of SEQ ID NO: 1562343
gugacagcucuugacaaug

SEQ ID NO: 1739798 - RNA, 19 nt, Artificial Sequence
  Description of Artificial Sequence: Synthetic oligonucleotide
  Antisense strand to SEQ ID NO: 1739797
cauugucaagagcugucac

SEQ ID NO: 1739799 - RNA, 19 nt, Artificial Sequence
  Description of Artificial Sequence: Synthetic oligonucleotide
  Sense strand starting at position 2502 of SEQ ID NO: 1562343
agcucuugacaaugagaug

SEQ ID NO: 1739800 - RNA, 19 nt, Artificial Sequence
  Description of Artificial Sequence: Synthetic oligonucleotide
  Antisense strand to SEQ ID NO: 1739799
caucucauugucaagagcu

SEQ ID NO: 1739801 - RNA, 19 nt, Artificial Sequence
  Description of Artificial Sequence: Synthetic oligonucleotide
  Sense strand starting at position 2503 of SEQ ID NO: 1562343
gcucuugacaaugagaugu

SEQ ID NO: 1739802 - RNA, 19 nt, Artificial Sequence
  Description of Artificial Sequence: Synthetic oligonucleotide
  Antisense strand to SEQ ID NO: 1739801
acaucucauugucaagagc

SEQ ID NO: 1739803 - RNA, 19 nt, Artificial Sequence
  Description of Artificial Sequence: Synthetic oligonucleotide
  Sense strand starting at position 2507 of SEQ ID NO: 1562343
uugacaaugagaugucagu

SEQ ID NO: 1739804 - RNA, 19 nt, Artificial Sequence
  Description of Artificial Sequence: Synthetic oligonucleotide
  Antisense strand to SEQ ID NO: 1739803
acugacaucucauugucaa

SEQ ID NO: 1739805 - RNA, 19 nt, Artificial Sequence
  Description of Artificial Sequence: Synthetic oligonucleotide
  Sense strand starting at position 2513 of SEQ ID NO: 1562343
augagaugucaguagaagc

SEQ ID NO: 1739806 - RNA, 19 nt, Artificial Sequence
  Description of Artificial Sequence: Synthetic oligonucleotide
  Antisense strand to SEQ ID NO: 1739805
gcuucuacugacaucucau

SEQ ID NO: 1739807 - RNA, 19 nt, Artificial Sequence
  Description of Artificial Sequence: Synthetic oligonucleotide
  Sense strand starting at position 2524 of SEQ ID NO: 1562343
guagaagcugugggucaaa

SEQ ID NO: 1739808 - RNA, 19 nt, Artificial Sequence
  Description of Artificial Sequence: Synthetic oligonucleotide
  Antisense strand to SEQ ID NO: 1739807
uuugacccacagcuucuac

SEQ ID NO: 1739809 - RNA, 19 nt, Artificial Sequence
  Description of Artificial Sequence: Synthetic oligonucleotide
  Sense strand starting at position 2559 of SEQ ID NO: 1562343
ggcagacuuccuggcauaa

SEQ ID NO: 1739810 - RNA, 19 nt, Artificial Sequence
  Description of Artificial Sequence: Synthetic oligonucleotide
  Antisense strand to SEQ ID NO: 1739809
uuaugccaggaagucugcc

SEQ ID NO: 1739811 - RNA, 19 nt, Artificial Sequence
  Description of Artificial Sequence: Synthetic oligonucleotide
  Sense strand starting at position 2611 of SEQ ID NO: 1562343
agaacaaaggcaugauguu

SEQ ID NO: 1739812 - RNA, 19 nt, Artificial Sequence
  Description of Artificial Sequence: Synthetic oligonucleotide
  Antisense strand to SEQ ID NO: 1739811
aacaucaugccuuuguucu

SEQ ID NO: 1739813 - RNA, 19 nt, Artificial Sequence
  Description of Artificial Sequence: Synthetic oligonucleotide
  Sense strand starting at position 2618 of SEQ ID NO: 1562343
aggcaugauguuggaguga

SEQ ID NO: 1739814 - RNA, 19 nt, Artificial Sequence
  Description of Artificial Sequence: Synthetic oligonucleotide
  Antisense strand to SEQ ID NO: 1739813
ucacuccaacaucaugccu

SEQ ID NO: 1739815 - RNA, 19 nt, Artificial Sequence
  Description of Artificial Sequence: Synthetic oligonucleotide
  Sense strand starting at position 2620 of SEQ ID NO: 1562343
gcaugauguuggagugaag

SEQ ID NO: 1739816 - RNA, 19 nt, Artificial Sequence
  Description of Artificial Sequence: Synthetic oligonucleotide
  Antisense strand to SEQ ID NO: 1739815
cuucacuccaacaucaugc

SEQ ID NO: 1739817 - RNA, 19 nt, Artificial Sequence
  Description of Artificial Sequence: Synthetic oligonucleotide
  Sense strand starting at position 2623 of SEQ ID NO: 1562343
ugauguuggagugaagcua

SEQ ID NO: 1739818 - RNA, 19 nt, Artificial Sequence
  Description of Artificial Sequence: Synthetic oligonucleotide
  Antisense strand to SEQ ID NO: 1739817
uagcuucacuccaacauca

SEQ ID NO: 1739819 - RNA, 19 nt, Artificial Sequence
  Description of Artificial Sequence: Synthetic oligonucleotide
  Sense strand starting at position 2647 of SEQ ID NO: 1562343
ugcaccugucaugaaacau

SEQ ID NO: 1739820 - RNA, 19 nt, Artificial Sequence
  Description of Artificial Sequence: Synthetic oligonucleotide
  Antisense strand to SEQ ID NO: 1739819
auguuucaugacaggugca

SEQ ID NO: 1739821 - RNA, 19 nt, Artificial Sequence
  Description of Artificial Sequence: Synthetic oligonucleotide
  Sense strand starting at position 2657 of SEQ ID NO: 1562343
augaaacaugcacgaaagu

SEQ ID NO: 1739822 - RNA, 19 nt, Artificial Sequence
  Description of Artificial Sequence: Synthetic oligonucleotide
  Antisense strand to SEQ ID NO: 1739821
acuuucgugcauguuucau

SEQ ID NO: 1739823 - RNA, 19 nt, Artificial Sequence
  Description of Artificial Sequence: Synthetic oligonucleotide
  Sense strand starting at position 2765 of SEQ ID NO: 1562343
uaaugucugguguauguuu

SEQ ID NO: 1739824 - RNA, 19 nt, Artificial Sequence
  Description of Artificial Sequence: Synthetic oligonucleotide
  Antisense strand to SEQ ID NO: 1739823
aaacauacaccagacauua

SEQ ID NO: 1739825 - RNA, 19 nt, Artificial Sequence
  Description of Artificial Sequence: Synthetic oligonucleotide
  Sense strand starting at position 2856 of SEQ ID NO: 1562343
auugauauaugaggacaaa

SEQ ID NO: 1739826 - RNA, 19 nt, Artificial Sequence
  Description of Artificial Sequence: Synthetic oligonucleotide
  Antisense strand to SEQ ID NO: 1739825
uuuguccucauauaucaau

SEQ ID NO: 1739827 - RNA, 19 nt, Artificial Sequence
  Description of Artificial Sequence: Synthetic oligonucleotide
  Sense strand starting at position 2886 of SEQ ID NO: 1562343
caguacugcucagucugaa

SEQ ID NO: 1739828 - RNA, 19 nt, Artificial Sequence
  Description of Artificial Sequence: Synthetic oligonucleotide
  Antisense strand to SEQ ID NO: 1739827
uucagacugagcaguacug

SEQ ID NO: 1739829 - RNA, 19 nt, Artificial Sequence
  Description of Artificial Sequence: Synthetic oligonucleotide
  Sense strand starting at position 2920 of SEQ ID NO: 1562343
agagcaaugcuauauaguu

SEQ ID NO: 1739830 - RNA, 19 nt, Artificial Sequence
  Description of Artificial Sequence: Synthetic oligonucleotide
  Antisense strand to SEQ ID NO: 1739829
aacuauauagcauugcucu

SEQ ID NO: 1739831 - RNA, 19 nt, Artificial Sequence
  Description of Artificial Sequence: Synthetic oligonucleotide
  Sense strand starting at position 2932 of SEQ ID NO: 1562343
uauaguuaaacgugaguga

SEQ ID NO: 1739832 - RNA, 19 nt, Artificial Sequence
  Description of Artificial Sequence: Synthetic oligonucleotide
  Antisense strand to SEQ ID NO: 1739831
ucacucacguuuaacuaua

SEQ ID NO: 1739833 - RNA, 19 nt, Artificial Sequence
  Description of Artificial Sequence: Synthetic oligonucleotide
  Sense strand starting at position 2933 of SEQ ID NO: 1562343
auaguuaaacgugagugaa

SEQ ID NO: 1739834 - RNA, 19 nt, Artificial Sequence
  Description of Artificial Sequence: Synthetic oligonucleotide
  Antisense strand to SEQ ID NO: 1739833
uucacucacguuuaacuau

SEQ ID NO: 1739835 - RNA, 19 nt, Artificial Sequence
  Description of Artificial Sequence: Synthetic oligonucleotide
  Sense strand starting at position 2961 of SEQ ID NO: 1562343
cuggguagauugcuaaaca

SEQ ID NO: 1739836 - RNA, 19 nt, Artificial Sequence
  Description of Artificial Sequence: Synthetic oligonucleotide
  Antisense strand to SEQ ID NO: 1739835
uguuuagcaaucuacccag

SEQ ID NO: 1739837 - RNA, 19 nt, Artificial Sequence
  Description of Artificial Sequence: Synthetic oligonucleotide
  Sense strand starting at position 2977 of SEQ ID NO: 1562343
acaaguuggauguagucaa

SEQ ID NO: 1739838 - RNA, 19 nt, Artificial Sequence
  Description of Artificial Sequence: Synthetic oligonucleotide
  Antisense strand to SEQ ID NO: 1739837
uugacuacauccaacuugu

SEQ ID NO: 1739839 - RNA, 19 nt, Artificial Sequence
  Description of Artificial Sequence: Synthetic oligonucleotide
  Sense strand starting at position 2981 of SEQ ID NO: 1562343
guuggauguagucaaucaa

SEQ ID NO: 1739840 - RNA, 19 nt, Artificial Sequence
  Description of Artificial Sequence: Synthetic oligonucleotide
  Antisense strand to SEQ ID NO: 1739839
uugauugacuacauccaac

SEQ ID NO: 1739841 - RNA, 19 nt, Artificial Sequence
  Description of Artificial Sequence: Synthetic oligonucleotide
  Sense strand starting at position 3052 of SEQ ID NO: 1562343
uucuuuaagcuugagucuu

SEQ ID NO: 1739842 - RNA, 19 nt, Artificial Sequence
  Description of Artificial Sequence: Synthetic oligonucleotide
  Antisense strand to SEQ ID NO: 1739841
aagacucaagcuuaaagaa

SEQ ID NO: 1739843 - RNA, 19 nt, Artificial Sequence
  Description of Artificial Sequence: Synthetic oligonucleotide
  Sense strand starting at position 3491 of SEQ ID NO: 1562343
ucaagucaccaauggcaga

SEQ ID NO: 1739844 - RNA, 19 nt, Artificial Sequence
  Description of Artificial Sequence: Synthetic oligonucleotide
  Antisense strand to SEQ ID NO: 1739843
ucugccauuggugacuuga

SEQ ID NO: 1739845 - RNA, 19 nt, Artificial Sequence
  Description of Artificial Sequence: Synthetic oligonucleotide
  Sense strand starting at position 3621 of SEQ ID NO: 1562343
accagagcuuguuucccau

SEQ ID NO: 1739846 - RNA, 19 nt, Artificial Sequence
  Description of Artificial Sequence: Synthetic oligonucleotide
  Antisense strand to SEQ ID NO: 1739845
augggaaacaagcucuggu

SEQ ID NO: 1739847 - RNA, 19 nt, Artificial Sequence
  Description of Artificial Sequence: Synthetic oligonucleotide
  Sense strand starting at position 3624 of SEQ ID NO: 1562343
agagcuuguuucccaucua

SEQ ID NO: 1739848 - RNA, 19 nt, Artificial Sequence
  Description of Artificial Sequence: Synthetic oligonucleotide
  Antisense strand to SEQ ID NO: 1739847
uagaugggaaacaagcucu

SEQ ID NO: 1739849 - RNA, 19 nt, Artificial Sequence
  Description of Artificial Sequence: Synthetic oligonucleotide
  Sense strand starting at position 22 of SEQ ID NO: 1562344
uauggugcccucugggaaa

SEQ ID NO: 1739850 - RNA, 19 nt, Artificial Sequence
  Description of Artificial Sequence: Synthetic oligonucleotide
  Antisense strand to SEQ ID NO: 1739849
uuucccagagggcaccaua

SEQ ID NO: 1739851 - RNA, 19 nt, Artificial Sequence
  Description of Artificial Sequence: Synthetic oligonucleotide
  Sense strand starting at position 35 of SEQ ID NO: 1562344
gggaaagaugggugucuug

SEQ ID NO: 1739852 - RNA, 19 nt, Artificial Sequence
  Description of Artificial Sequence: Synthetic oligonucleotide
  Antisense strand to SEQ ID NO: 1739851
caagacacccaucuuuccc

SEQ ID NO: 1739853 - RNA, 19 nt, Artificial Sequence
  Description of Artificial Sequence: Synthetic oligonucleotide
  Sense strand starting at position 38 of SEQ ID NO: 1562344
aaagaugggugucuuguca

SEQ ID NO: 1739854 - RNA, 19 nt, Artificial Sequence
  Description of Artificial Sequence: Synthetic oligonucleotide
  Antisense strand to SEQ ID NO: 1739853
ugacaagacacccaucuuu

SEQ ID NO: 1739855 - RNA, 19 nt, Artificial Sequence
  Description of Artificial Sequence: Synthetic oligonucleotide
  Sense strand starting at position 214 of SEQ ID NO: 1562344
auugacaaugcucaugcau

SEQ ID NO: 1739856 - RNA, 19 nt, Artificial Sequence
  Description of Artificial Sequence: Synthetic oligonucleotide
  Antisense strand to SEQ ID NO: 1739855
augcaugagcauugucaau

SEQ ID NO: 1739857 - RNA, 19 nt, Artificial Sequence
  Description of Artificial Sequence: Synthetic oligonucleotide
  Sense strand starting at position 555 of SEQ ID NO: 1562344
cugucaguagguuauacau

SEQ ID NO: 1739858 - RNA, 19 nt, Artificial Sequence
  Description of Artificial Sequence: Synthetic oligonucleotide
  Antisense strand to SEQ ID NO: 1739857
auguauaaccuacugacag

SEQ ID NO: 1739859 - RNA, 19 nt, Artificial Sequence
  Description of Artificial Sequence: Synthetic oligonucleotide
  Sense strand starting at position 606 of SEQ ID NO: 1562344
gggaauuuaagccguagcu

SEQ ID NO: 1739860 - RNA, 19 nt, Artificial Sequence
  Description of Artificial Sequence: Synthetic oligonucleotide
  Antisense strand to SEQ ID NO: 1739859
agcuacggcuuaaauuccc

SEQ ID NO: 1739861 - RNA, 19 nt, Artificial Sequence
  Description of Artificial Sequence: Synthetic oligonucleotide
  Sense strand starting at position 632 of SEQ ID NO: 1562344
ggcgaugucaaaugaugac

SEQ ID NO: 1739862 - RNA, 19 nt, Artificial Sequence
  Description of Artificial Sequence: Synthetic oligonucleotide
  Antisense strand to SEQ ID NO: 1739861
gucaucauuugacaucgcc

SEQ ID NO: 1739863 - RNA, 19 nt, Artificial Sequence
  Description of Artificial Sequence: Synthetic oligonucleotide
  Sense strand starting at position 697 of SEQ ID NO: 1562344
guucauauuuaugcgguga

SEQ ID NO: 1739864 - RNA, 19 nt, Artificial Sequence
  Description of Artificial Sequence: Synthetic oligonucleotide
  Antisense strand to SEQ ID NO: 1739863
ucaccgcauaaauaugaac

SEQ ID NO: 1739865 - RNA, 19 nt, Artificial Sequence
  Description of Artificial Sequence: Synthetic oligonucleotide
  Sense strand starting at position 743 of SEQ ID NO: 1562344
acuaauugggucugacuca

SEQ ID NO: 1739866 - RNA, 19 nt, Artificial Sequence
  Description of Artificial Sequence: Synthetic oligonucleotide
  Antisense strand to SEQ ID NO: 1739865
ugagucagacccaauuagu

SEQ ID NO: 1739867 - RNA, 19 nt, Artificial Sequence
  Description of Artificial Sequence: Synthetic oligonucleotide
  Sense strand starting at position 748 of SEQ ID NO: 1562344
uugggucugacucagucaa

SEQ ID NO: 1739868 - RNA, 19 nt, Artificial Sequence
  Description of Artificial Sequence: Synthetic oligonucleotide
  Antisense strand to SEQ ID NO: 1739867
uugacugagucagacccaa

SEQ ID NO: 1739869 - RNA, 19 nt, Artificial Sequence
  Description of Artificial Sequence: Synthetic oligonucleotide
  Sense strand starting at position 750 of SEQ ID NO: 1562344
gggucugacucagucaaga

SEQ ID NO: 1739870 - RNA, 19 nt, Artificial Sequence
  Description of Artificial Sequence: Synthetic oligonucleotide
  Antisense strand to SEQ ID NO: 1739869
ucuugacugagucagaccc

SEQ ID NO: 1739871 - RNA, 19 nt, Artificial Sequence
  Description of Artificial Sequence: Synthetic oligonucleotide
  Sense strand starting at position 755 of SEQ ID NO: 1562344
ugacucagucaagagcaau

SEQ ID NO: 1739872 - RNA, 19 nt, Artificial Sequence
  Description of Artificial Sequence: Synthetic oligonucleotide
  Antisense strand to SEQ ID NO: 1739871
auugcucuugacugaguca

SEQ ID NO: 1739873 - RNA, 19 nt, Artificial Sequence
  Description of Artificial Sequence: Synthetic oligonucleotide
  Sense strand starting at position 761 of SEQ ID NO: 1562344
agucaagagcaauagcuuu

SEQ ID NO: 1739874 - RNA, 19 nt, Artificial Sequence
  Description of Artificial Sequence: Synthetic oligonucleotide
  Antisense strand to SEQ ID NO: 1739873
aaagcuauugcucuugacu

SEQ ID NO: 1739875 - RNA, 19 nt, Artificial Sequence
  Description of Artificial Sequence: Synthetic oligonucleotide
  Sense strand starting at position 919 of SEQ ID NO: 1562344
ugauguaaugcuuaucagu

SEQ ID NO: 1739876 - RNA, 19 nt, Artificial Sequence
  Description of Artificial Sequence: Synthetic oligonucleotide
  Antisense strand to SEQ ID NO: 1739875
acugauaagcauuacauca

SEQ ID NO: 1739877 - RNA, 19 nt, Artificial Sequence
  Description of Artificial Sequence: Synthetic oligonucleotide
  Sense strand starting at position 927 of SEQ ID NO: 1562344
ugcuuaucagugcauauuu

SEQ ID NO: 1739878 - RNA, 19 nt, Artificial Sequence
  Description of Artificial Sequence: Synthetic oligonucleotide
  Antisense strand to SEQ ID NO: 1739877
aaauaugcacugauaagca

SEQ ID NO: 1739879 - RNA, 19 nt, Artificial Sequence
  Description of Artificial Sequence: Synthetic oligonucleotide
  Sense strand starting at position 1018 of SEQ ID NO: 1562344
cuuggugcuggagauacau

SEQ ID NO: 1739880 - RNA, 19 nt, Artificial Sequence
  Description of Artificial Sequence: Synthetic oligonucleotide
  Antisense strand to SEQ ID NO: 1739879
auguaucuccagcaccaag

SEQ ID NO: 1739881 - RNA, 19 nt, Artificial Sequence
  Description of Artificial Sequence: Synthetic oligonucleotide
  Sense strand starting at position 1035 of SEQ ID NO: 1562344
auuguacuagcaugaaauu

SEQ ID NO: 1739882 - RNA, 19 nt, Artificial Sequence
  Description of Artificial Sequence: Synthetic oligonucleotide
  Antisense strand to SEQ ID NO: 1739881
aauuucaugcuaguacaau

SEQ ID NO: 1739883 - RNA, 19 nt, Artificial Sequence
  Description of Artificial Sequence: Synthetic oligonucleotide
  Sense strand starting at position 1036 of SEQ ID NO: 1562344
uuguacuagcaugaaauua

SEQ ID NO: 1739884 - RNA, 19 nt, Artificial Sequence
  Description of Artificial Sequence: Synthetic oligonucleotide
  Antisense strand to SEQ ID NO: 1739883
uaauuucaugcuaguacaa

SEQ ID NO: 1739885 - RNA, 19 nt, Artificial Sequence
  Description of Artificial Sequence: Synthetic oligonucleotide
  Sense strand starting at position 1091 of SEQ ID NO: 1562344
gggagauguuccucauuga

SEQ ID NO: 1739886 - RNA, 19 nt, Artificial Sequence
  Description of Artificial Sequence: Synthetic oligonucleotide
  Antisense strand to SEQ ID NO: 1739885
ucaaugaggaacaucuccc

SEQ ID NO: 1739887 - RNA, 19 nt, Artificial Sequence
  Description of Artificial Sequence: Synthetic oligonucleotide
  Sense strand starting at position 1207 of SEQ ID NO: 1562344
guuuauucugaaugaggca

SEQ ID NO: 1739888 - RNA, 19 nt, Artificial Sequence
  Description of Artificial Sequence: Synthetic oligonucleotide
  Antisense strand to SEQ ID NO: 1739887
ugccucauucagaauaaac

SEQ ID NO: 1739889 - RNA, 19 nt, Artificial Sequence
  Description of Artificial Sequence: Synthetic oligonucleotide
  Sense strand starting at position 1255 of SEQ ID NO: 1562344
cugucacuuggcuagguaa

SEQ ID NO: 1739890 - RNA, 19 nt, Artificial Sequence
  Description of Artificial Sequence: Synthetic oligonucleotide
  Antisense strand to SEQ ID NO: 1739889
uuaccuagccaagugacag

SEQ ID NO: 1739891 - RNA, 19 nt, Artificial Sequence
  Description of Artificial Sequence: Synthetic oligonucleotide
  Sense strand starting at position 1276 of SEQ ID NO: 1562344
gccuuccaaugauuacaga

SEQ ID NO: 1739892 - RNA, 19 nt, Artificial Sequence
  Description of Artificial Sequence: Synthetic oligonucleotide
  Antisense strand to SEQ ID NO: 1739891
ucuguaaucauuggaaggc

SEQ ID NO: 1739893 - RNA, 19 nt, Artificial Sequence
  Description of Artificial Sequence: Synthetic oligonucleotide
  Sense strand starting at position 1409 of SEQ ID NO: 1562344
agaagacuuuacccaugca

SEQ ID NO: 1739894 - RNA, 19 nt, Artificial Sequence
  Description of Artificial Sequence: Synthetic oligonucleotide
  Antisense strand to SEQ ID NO: 1739893
ugcauggguaaagucuucu

SEQ ID NO: 1739895 - RNA, 19 nt, Artificial Sequence
  Description of Artificial Sequence: Synthetic oligonucleotide
  Sense strand starting at position 2097 of SEQ ID NO: 1562344
gggcgcucugcagucuuaa

SEQ ID NO: 1739896 - RNA, 19 nt, Artificial Sequence
  Description of Artificial Sequence: Synthetic oligonucleotide
  Antisense strand to SEQ ID NO: 1739895
uuaagacugcagagcgccc

SEQ ID NO: 1739897 - RNA, 19 nt, Artificial Sequence
  Description of Artificial Sequence: Synthetic oligonucleotide
  Sense strand starting at position 2098 of SEQ ID NO: 1562344
ggcgcucugcagucuuaaa

SEQ ID NO: 1739898 - RNA, 19 nt, Artificial Sequence
  Description of Artificial Sequence: Synthetic oligonucleotide
  Antisense strand to SEQ ID NO: 1739897
uuuaagacugcagagcgcc

SEQ ID NO: 1739899 - RNA, 19 nt, Artificial Sequence
  Description of Artificial Sequence: Synthetic oligonucleotide
  Sense strand starting at position 2099 of SEQ ID NO: 1562344
gcgcucugcagucuuaaag

SEQ ID NO: 1739900 - RNA, 19 nt, Artificial Sequence
  Description of Artificial Sequence: Synthetic oligonucleotide
  Antisense strand to SEQ ID NO: 1739899
cuuuaagacugcagagcgc

SEQ ID NO: 1739901 - RNA, 19 nt, Artificial Sequence
  Description of Artificial Sequence: Synthetic oligonucleotide
  Sense strand starting at position 2195 of SEQ ID NO: 1562344
ggaggaauuucuuagaggc

SEQ ID NO: 1739902 - RNA, 19 nt, Artificial Sequence
  Description of Artificial Sequence: Synthetic oligonucleotide
  Antisense strand to SEQ ID NO: 1739901
gccucuaagaaauuccucc

SEQ ID NO: 1739903 - RNA, 19 nt, Artificial Sequence
  Description of Artificial Sequence: Synthetic oligonucleotide
  Sense strand starting at position 2197 of SEQ ID NO: 1562344
aggaauuucuuagaggcuu

SEQ ID NO: 1739904 - RNA, 19 nt, Artificial Sequence
  Description of Artificial Sequence: Synthetic oligonucleotide
  Antisense strand to SEQ ID NO: 1739903
aagccucuaagaaauuccu

SEQ ID NO: 1739905 - RNA, 19 nt, Artificial Sequence
  Description of Artificial Sequence: Synthetic oligonucleotide
  Sense strand starting at position 2361 of SEQ ID NO: 1562344
gauuccgauuccguauuua

SEQ ID NO: 1739906 - RNA, 19 nt, Artificial Sequence
  Description of Artificial Sequence: Synthetic oligonucleotide
  Antisense strand to SEQ ID NO: 1739905
uaaauacggaaucggaauc

SEQ ID NO: 1739907 - RNA, 19 nt, Artificial Sequence
  Description of Artificial Sequence: Synthetic oligonucleotide
  Sense strand starting at position 2411 of SEQ ID NO: 1562344
gggaaaugcuccuuccaaa

SEQ ID NO: 1739908 - RNA, 19 nt, Artificial Sequence
  Description of Artificial Sequence: Synthetic oligonucleotide
  Antisense strand to SEQ ID NO: 1739907
uuuggaaggagcauuuccc

SEQ ID NO: 1739909 - RNA, 19 nt, Artificial Sequence
  Description of Artificial Sequence: Synthetic oligonucleotide
  Sense strand starting at position 2442 of SEQ ID NO: 1562344
cuguaaagaucucuaugau

SEQ ID NO: 1739910 - RNA, 19 nt, Artificial Sequence
  Description of Artificial Sequence: Synthetic oligonucleotide
  Antisense strand to SEQ ID NO: 1739909
aucauagagaucuuuacag

SEQ ID NO: 1739911 - RNA, 19 nt, Artificial Sequence
  Description of Artificial Sequence: Synthetic oligonucleotide
  Sense strand starting at position 2483 of SEQ ID NO: 1562344
ucuugaauacaugguagaa

SEQ ID NO: 1739912 - RNA, 19 nt, Artificial Sequence
  Description of Artificial Sequence: Synthetic oligonucleotide
  Antisense strand to SEQ ID NO: 1739911
uucuaccauguauucaaga

SEQ ID NO: 1739913 - RNA, 19 nt, Artificial Sequence
  Description of Artificial Sequence: Synthetic oligonucleotide
  Sense strand starting at position 2551 of SEQ ID NO: 1562344
gcugauugaaauugcugau

SEQ ID NO: 1739914 - RNA, 19 nt, Artificial Sequence
  Description of Artificial Sequence: Synthetic oligonucleotide
  Antisense strand to SEQ ID NO: 1739913
aucagcaauuucaaucagc

SEQ ID NO: 1739915 - RNA, 19 nt, Artificial Sequence
  Description of Artificial Sequence: Synthetic oligonucleotide
  Sense strand starting at position 2557 of SEQ ID NO: 1562344
ugaaauugcugauaauuug

SEQ ID NO: 1739916 - RNA, 19 nt, Artificial Sequence
  Description of Artificial Sequence: Synthetic oligonucleotide
  Antisense strand to SEQ ID NO: 1739915
caaauuaucagcaauuuca

SEQ ID NO: 1739917 - RNA, 19 nt, Artificial Sequence
  Description of Artificial Sequence: Synthetic oligonucleotide
  Sense strand starting at position 2636 of SEQ ID NO: 1562344
ccugaauguucuguaugau

SEQ ID NO: 1739918 - RNA, 19 nt, Artificial Sequence
  Description of Artificial Sequence: Synthetic oligonucleotide
  Antisense strand to SEQ ID NO: 1739917
aucauacagaacauucagg

SEQ ID NO: 1739919 - RNA, 19 nt, Artificial Sequence
  Description of Artificial Sequence: Synthetic oligonucleotide
  Sense strand starting at position 2637 of SEQ ID NO: 1562344
cugaauguucuguaugauu

SEQ ID NO: 1739920 - RNA, 19 nt, Artificial Sequence
  Description of Artificial Sequence: Synthetic oligonucleotide
  Antisense strand to SEQ ID NO: 1739919
aaucauacagaacauucag

SEQ ID NO: 1739921 - RNA, 19 nt, Artificial Sequence
  Description of Artificial Sequence: Synthetic oligonucleotide
  Sense strand starting at position 2645 of SEQ ID NO: 1562344
ucuguaugauucuugaagu

SEQ ID NO: 1739922 - RNA, 19 nt, Artificial Sequence
  Description of Artificial Sequence: Synthetic oligonucleotide
  Antisense strand to SEQ ID NO: 1739921
acuucaagaaucauacaga

SEQ ID NO: 1739923 - RNA, 19 nt, Artificial Sequence
  Description of Artificial Sequence: Synthetic oligonucleotide
  Sense strand starting at position 2867 of SEQ ID NO: 1562344
ggcacuagguauccuaacu

SEQ ID NO: 1739924 - RNA, 19 nt, Artificial Sequence
  Description of Artificial Sequence: Synthetic oligonucleotide
  Antisense strand to SEQ ID NO: 1739923
aguuaggauaccuagugcc

SEQ ID NO: 1739925 - RNA, 19 nt, Artificial Sequence
  Description of Artificial Sequence: Synthetic oligonucleotide
  Sense strand starting at position 3400 of SEQ ID NO: 1562344
ucauaugcagacuggaaau

SEQ ID NO: 1739926 - RNA, 19 nt, Artificial Sequence
  Description of Artificial Sequence: Synthetic oligonucleotide
  Antisense strand to SEQ ID NO: 1739925
auuuccagucugcauauga

SEQ ID NO: 1739927 - RNA, 19 nt, Artificial Sequence
  Description of Artificial Sequence: Synthetic oligonucleotide
  Sense strand starting at position 3434 of SEQ ID NO: 1562344
cucacagaggugugaagau

SEQ ID NO: 1739928 - RNA, 19 nt, Artificial Sequence
  Description of Artificial Sequence: Synthetic oligonucleotide
  Antisense strand to SEQ ID NO: 1739927
aucuucacaccucugugag

SEQ ID NO: 1739929 - RNA, 19 nt, Artificial Sequence
  Description of Artificial Sequence: Synthetic oligonucleotide
  Sense strand starting at position 38 of SEQ ID NO: 1562345
gcauucuauuugguucuca

SEQ ID NO: 1739930 - RNA, 19 nt, Artificial Sequence
  Description of Artificial Sequence: Synthetic oligonucleotide
  Antisense strand to SEQ ID NO: 1739929
ugagaaccaaauagaaugc

SEQ ID NO: 1739931 - RNA, 19 nt, Artificial Sequence
  Description of Artificial Sequence: Synthetic oligonucleotide
  Sense strand starting at position 56 of SEQ ID NO: 1562345
augucccuuuagucuuaua

SEQ ID NO: 1739932 - RNA, 19 nt, Artificial Sequence
  Description of Artificial Sequence: Synthetic oligonucleotide
  Antisense strand to SEQ ID NO: 1739931
uauaagacuaaagggacau

SEQ ID NO: 1739933 - RNA, 19 nt, Artificial Sequence
  Description of Artificial Sequence: Synthetic oligonucleotide
  Sense strand starting at position 64 of SEQ ID NO: 1562345
uuagucuuauagucuagaa

SEQ ID NO: 1739934 - RNA, 19 nt, Artificial Sequence
  Description of Artificial Sequence: Synthetic oligonucleotide
  Antisense strand to SEQ ID NO: 1739933
uucuagacuauaagacuaa

SEQ ID NO: 1739935 - RNA, 19 nt, Artificial Sequence
  Description of Artificial Sequence: Synthetic oligonucleotide
  Sense strand starting at position 109 of SEQ ID NO: 1562345
acugauauuuccgaagaau

SEQ ID NO: 1739936 - RNA, 19 nt, Artificial Sequence
  Description of Artificial Sequence: Synthetic oligonucleotide
  Antisense strand to SEQ ID NO: 1739935
auucuucggaaauaucagu

SEQ ID NO: 1739937 - RNA, 19 nt, Artificial Sequence
  Description of Artificial Sequence: Synthetic oligonucleotide
  Sense strand starting at position 160 of SEQ ID NO: 1562345
uuuggauauuccuuauugu

SEQ ID NO: 1739938 - RNA, 19 nt, Artificial Sequence
  Description of Artificial Sequence: Synthetic oligonucleotide
  Antisense strand to SEQ ID NO: 1739937
acaauaaggaauauccaaa

SEQ ID NO: 1739939 - RNA, 19 nt, Artificial Sequence
  Description of Artificial Sequence: Synthetic oligonucleotide
  Sense strand starting at position 161 of SEQ ID NO: 1562345
uuggauauuccuuauuguu

SEQ ID NO: 1739940 - RNA, 19 nt, Artificial Sequence
  Description of Artificial Sequence: Synthetic oligonucleotide
  Antisense strand to SEQ ID NO: 1739939
aacaauaaggaauauccaa

SEQ ID NO: 1739941 - RNA, 19 nt, Artificial Sequence
  Description of Artificial Sequence: Synthetic oligonucleotide
  Sense strand starting at position 163 of SEQ ID NO: 1562345
ggauauuccuuauuguuuc

SEQ ID NO: 1739942 - RNA, 19 nt, Artificial Sequence
  Description of Artificial Sequence: Synthetic oligonucleotide
  Antisense strand to SEQ ID NO: 1739941
gaaacaauaaggaauaucc

SEQ ID NO: 1739943 - RNA, 19 nt, Artificial Sequence
  Description of Artificial Sequence: Synthetic oligonucleotide
  Sense strand starting at position 170 of SEQ ID NO: 1562345
ccuuauuguuuccuuauga

SEQ ID NO: 1739944 - RNA, 19 nt, Artificial Sequence
  Description of Artificial Sequence: Synthetic oligonucleotide
  Antisense strand to SEQ ID NO: 1739943
ucauaaggaaacaauaagg

SEQ ID NO: 1739945 - RNA, 19 nt, Artificial Sequence
  Description of Artificial Sequence: Synthetic oligonucleotide
  Sense strand starting at position 287 of SEQ ID NO: 1562345
auuaguugugauggugaag

SEQ ID NO: 1739946 - RNA, 19 nt, Artificial Sequence
  Description of Artificial Sequence: Synthetic oligonucleotide
  Antisense strand to SEQ ID NO: 1739945
cuucaccaucacaacuaau

SEQ ID NO: 1739947 - RNA, 19 nt, Artificial Sequence
  Description of Artificial Sequence: Synthetic oligonucleotide
  Sense strand starting at position 301 of SEQ ID NO: 1562345
ugaagugguguucauuguu

SEQ ID NO: 1739948 - RNA, 19 nt, Artificial Sequence
  Description of Artificial Sequence: Synthetic oligonucleotide
  Antisense strand to SEQ ID NO: 1739947
aacaaugaacaccacuuca

SEQ ID NO: 1739949 - RNA, 19 nt, Artificial Sequence
  Description of Artificial Sequence: Synthetic oligonucleotide
  Sense strand starting at position 334 of SEQ ID NO: 1562345
gagugugacuaccagauuu

SEQ ID NO: 1739950 - RNA, 19 nt, Artificial Sequence
  Description of Artificial Sequence: Synthetic oligonucleotide
  Antisense strand to SEQ ID NO: 1739949
aaaucugguagucacacuc

SEQ ID NO: 1739951 - RNA, 19 nt, Artificial Sequence
  Description of Artificial Sequence: Synthetic oligonucleotide
  Sense strand starting at position 721 of SEQ ID NO: 1562345
accauuugagcuuguguaa

SEQ ID NO: 1739952 - RNA, 19 nt, Artificial Sequence
  Description of Artificial Sequence: Synthetic oligonucleotide
  Antisense strand to SEQ ID NO: 1739951
uuacacaagcucaaauggu

SEQ ID NO: 1739953 - RNA, 19 nt, Artificial Sequence
  Description of Artificial Sequence: Synthetic oligonucleotide
  Sense strand starting at position 789 of SEQ ID NO: 1562345
auccaagaccuuugucuga

SEQ ID NO: 1739954 - RNA, 19 nt, Artificial Sequence
  Description of Artificial Sequence: Synthetic oligonucleotide
  Antisense strand to SEQ ID NO: 1739953
ucagacaaaggucuuggau

SEQ ID NO: 1739955 - RNA, 19 nt, Artificial Sequence
  Description of Artificial Sequence: Synthetic oligonucleotide
  Sense strand starting at position 791 of SEQ ID NO: 1562345
ccaagaccuuugucugaaa

SEQ ID NO: 1739956 - RNA, 19 nt, Artificial Sequence
  Description of Artificial Sequence: Synthetic oligonucleotide
  Antisense strand to SEQ ID NO: 1739955
uuucagacaaaggucuugg

SEQ ID NO: 1739957 - RNA, 19 nt, Artificial Sequence
  Description of Artificial Sequence: Synthetic oligonucleotide
  Sense strand starting at position 802 of SEQ ID NO: 1562345
gucugaaauucugucccuu

SEQ ID NO: 1739958 - RNA, 19 nt, Artificial Sequence
  Description of Artificial Sequence: Synthetic oligonucleotide
  Antisense strand to SEQ ID NO: 1739957
aagggacagaauuucagac

SEQ ID NO: 1739959 - RNA, 19 nt, Artificial Sequence
  Description of Artificial Sequence: Synthetic oligonucleotide
  Sense strand starting at position 821 of SEQ ID NO: 1562345
uugagauuacuuugcauua

SEQ ID NO: 1739960 - RNA, 19 nt, Artificial Sequence
  Description of Artificial Sequence: Synthetic oligonucleotide
  Antisense strand to SEQ ID NO: 1739959
uaaugcaaaguaaucucaa

SEQ ID NO: 1739961 - RNA, 19 nt, Artificial Sequence
  Description of Artificial Sequence: Synthetic oligonucleotide
  Sense strand starting at position 822 of SEQ ID NO: 1562345
ugagauuacuuugcauuaa

SEQ ID NO: 1739962 - RNA, 19 nt, Artificial Sequence
  Description of Artificial Sequence: Synthetic oligonucleotide
  Antisense strand to SEQ ID NO: 1739961
uuaaugcaaaguaaucuca

SEQ ID NO: 1739963 - RNA, 19 nt, Artificial Sequence
  Description of Artificial Sequence: Synthetic oligonucleotide
  Sense strand starting at position 906 of SEQ ID NO: 1562345
gcacauauaucaccgguau

SEQ ID NO: 1739964 - RNA, 19 nt, Artificial Sequence
  Description of Artificial Sequence: Synthetic oligonucleotide
  Antisense strand to SEQ ID NO: 1739963
auaccggugauauaugugc

SEQ ID NO: 1739965 - RNA, 19 nt, Artificial Sequence
  Description of Artificial Sequence: Synthetic oligonucleotide
  Sense strand starting at position 974 of SEQ ID NO: 1562345
cugauucugauguagagua

SEQ ID NO: 1739966 - RNA, 19 nt, Artificial Sequence
  Description of Artificial Sequence: Synthetic oligonucleotide
  Antisense strand to SEQ ID NO: 1739965
uacucuacaucagaaucag

SEQ ID NO: 1739967 - RNA, 19 nt, Artificial Sequence
  Description of Artificial Sequence: Synthetic oligonucleotide
  Sense strand starting at position 986 of SEQ ID NO: 1562345
uagaguaaggguugagauu

SEQ ID NO: 1739968 - RNA, 19 nt, Artificial Sequence
  Description of Artificial Sequence: Synthetic oligonucleotide
  Antisense strand to SEQ ID NO: 1739967
aaucucaacccuuacucua

SEQ ID NO: 1739969 - RNA, 19 nt, Artificial Sequence
  Description of Artificial Sequence: Synthetic oligonucleotide
  Sense strand starting at position 1096 of SEQ ID NO: 1562345
cuguuaauggcauagucaa

SEQ ID NO: 1739970 - RNA, 19 nt, Artificial Sequence
  Description of Artificial Sequence: Synthetic oligonucleotide
  Antisense strand to SEQ ID NO: 1739969
uugacuaugccauuaacag

SEQ ID NO: 1739971 - RNA, 19 nt, Artificial Sequence
  Description of Artificial Sequence: Synthetic oligonucleotide
  Sense strand starting at position 1153 of SEQ ID NO: 1562345
cuuugugucagucgaagaa

SEQ ID NO: 1739972 - RNA, 19 nt, Artificial Sequence
  Description of Artificial Sequence: Synthetic oligonucleotide
  Antisense strand to SEQ ID NO: 1739971
uucuucgacugacacaaag

SEQ ID NO: 1739973 - RNA, 19 nt, Artificial Sequence
  Description of Artificial Sequence: Synthetic oligonucleotide
  Sense strand starting at position 1157 of SEQ ID NO: 1562345
gugucagucgaagaauaaa

SEQ ID NO: 1739974 - RNA, 19 nt, Artificial Sequence
  Description of Artificial Sequence: Synthetic oligonucleotide
  Antisense strand to SEQ ID NO: 1739973
uuuauucuucgacugacac

SEQ ID NO: 1739975 - RNA, 19 nt, Artificial Sequence
  Description of Artificial Sequence: Synthetic oligonucleotide
  Sense strand starting at position 1301 of SEQ ID NO: 1562345
gaccuuugcggucaccuua

SEQ ID NO: 1739976 - RNA, 19 nt, Artificial Sequence
  Description of Artificial Sequence: Synthetic oligonucleotide
  Antisense strand to SEQ ID NO: 1739975
uaaggugaccgcaaagguc

SEQ ID NO: 1739977 - RNA, 19 nt, Artificial Sequence
  Description of Artificial Sequence: Synthetic oligonucleotide
  Sense strand starting at position 2055 of SEQ ID NO: 1562345
acagucuuacgccggaaau

SEQ ID NO: 1739978 - RNA, 19 nt, Artificial Sequence
  Description of Artificial Sequence: Synthetic oligonucleotide
  Antisense strand to SEQ ID NO: 1739977
auuuccggcguaagacugu

SEQ ID NO: 1739979 - RNA, 19 nt, Artificial Sequence
  Description of Artificial Sequence: Synthetic oligonucleotide
  Sense strand starting at position 2231 of SEQ ID NO: 1562345
guugucuuucaggagguuu

SEQ ID NO: 1739980 - RNA, 19 nt, Artificial Sequence
  Description of Artificial Sequence: Synthetic oligonucleotide
  Antisense strand to SEQ ID NO: 1739979
aaaccuccugaaagacaac

SEQ ID NO: 1739981 - RNA, 19 nt, Artificial Sequence
  Description of Artificial Sequence: Synthetic oligonucleotide
  Sense strand starting at position 2271 of SEQ ID NO: 1562345
ccucaaauguccuuagucu

SEQ ID NO: 1739982 - RNA, 19 nt, Artificial Sequence
  Description of Artificial Sequence: Synthetic oligonucleotide
  Antisense strand to SEQ ID NO: 1739981
agacuaaggacauuugagg

SEQ ID NO: 1739983 - RNA, 19 nt, Artificial Sequence
  Description of Artificial Sequence: Synthetic oligonucleotide
  Sense strand starting at position 2617 of SEQ ID NO: 1562345
ccuggaaccggguguuaaa

SEQ ID NO: 1739984 - RNA, 19 nt, Artificial Sequence
  Description of Artificial Sequence: Synthetic oligonucleotide
  Antisense strand to SEQ ID NO: 1739983
uuuaacacccgguuccagg

SEQ ID NO: 1739985 - RNA, 19 nt, Artificial Sequence
  Description of Artificial Sequence: Synthetic oligonucleotide
  Sense strand starting at position 2695 of SEQ ID NO: 1562345
cuuggagauugguugcaaa

SEQ ID NO: 1739986 - RNA, 19 nt, Artificial Sequence
  Description of Artificial Sequence: Synthetic oligonucleotide
  Antisense strand to SEQ ID NO: 1739985
uuugcaaccaaucuccaag

SEQ ID NO: 1739987 - RNA, 19 nt, Artificial Sequence
  Description of Artificial Sequence: Synthetic oligonucleotide
  Sense strand starting at position 2702 of SEQ ID NO: 1562345
auugguugcaaaugaaaga

SEQ ID NO: 1739988 - RNA, 19 nt, Artificial Sequence
  Description of Artificial Sequence: Synthetic oligonucleotide
  Antisense strand to SEQ ID NO: 1739987
ucuuucauuugcaaccaau

SEQ ID NO: 1739989 - RNA, 19 nt, Artificial Sequence
  Description of Artificial Sequence: Synthetic oligonucleotide
  Sense strand starting at position 2729 of SEQ ID NO: 1562345
uggagugaaucugccuauu

SEQ ID NO: 1739990 - RNA, 19 nt, Artificial Sequence
  Description of Artificial Sequence: Synthetic oligonucleotide
  Antisense strand to SEQ ID NO: 1739989
aauaggcagauucacucca

SEQ ID NO: 1739991 - RNA, 19 nt, Artificial Sequence
  Description of Artificial Sequence: Synthetic oligonucleotide
  Sense strand starting at position 2731 of SEQ ID NO: 1562345
gagugaaucugccuauuau

SEQ ID NO: 1739992 - RNA, 19 nt, Artificial Sequence
  Description of Artificial Sequence: Synthetic oligonucleotide
  Antisense strand to SEQ ID NO: 1739991
auaauaggcagauucacuc

SEQ ID NO: 1739993 - RNA, 19 nt, Artificial Sequence
  Description of Artificial Sequence: Synthetic oligonucleotide
  Sense strand starting at position 2732 of SEQ ID NO: 1562345
agugaaucugccuauuauu

SEQ ID NO: 1739994 - RNA, 19 nt, Artificial Sequence
  Description of Artificial Sequence: Synthetic oligonucleotide
  Antisense strand to SEQ ID NO: 1739993
aauaauaggcagauucacu

SEQ ID NO: 1739995 - RNA, 19 nt, Artificial Sequence
  Description of Artificial Sequence: Synthetic oligonucleotide
  Sense strand starting at position 2827 of SEQ ID NO: 1562345
uguuaacguacuucguuua

SEQ ID NO: 1739996 - RNA, 19 nt, Artificial Sequence
  Description of Artificial Sequence: Synthetic oligonucleotide
  Antisense strand to SEQ ID NO: 1739995
uaaacgaaguacguuaaca

SEQ ID NO: 1739997 - RNA, 19 nt, Artificial Sequence
  Description of Artificial Sequence: Synthetic oligonucleotide
  Sense strand starting at position 3028 of SEQ ID NO: 1562345
gggauaacaucagaaacua

SEQ ID NO: 1739998 - RNA, 19 nt, Artificial Sequence
  Description of Artificial Sequence: Synthetic oligonucleotide
  Antisense strand to SEQ ID NO: 1739997
uaguuucugauguuauccc

SEQ ID NO: 1739999 - RNA, 19 nt, Artificial Sequence
  Description of Artificial Sequence: Synthetic oligonucleotide
  Sense strand starting at position 3068 of SEQ ID NO: 1562345
acgaaugccucccucuuaa

SEQ ID NO: 1740000 - RNA, 19 nt, Artificial Sequence
  Description of Artificial Sequence: Synthetic oligonucleotide
  Antisense strand to SEQ ID NO: 1739999
uuaagagggaggcauucgu

SEQ ID NO: 1740001 - RNA, 19 nt, Artificial Sequence
  Description of Artificial Sequence: Synthetic oligonucleotide
  Sense strand starting at position 3825 of SEQ ID NO: 1562345
cguguuaaagugucgaucu

SEQ ID NO: 1740002 - RNA, 19 nt, Artificial Sequence
  Description of Artificial Sequence: Synthetic oligonucleotide
  Antisense strand to SEQ ID NO: 1740001
agaucgacacuuuaacacg

SEQ ID NO: 1740003 - RNA, 19 nt, Artificial Sequence
  Description of Artificial Sequence: Synthetic oligonucleotide
  Sense strand starting at position 3827 of SEQ ID NO: 1562345
uguuaaagugucgaucuca

SEQ ID NO: 1740004 - RNA, 19 nt, Artificial Sequence
  Description of Artificial Sequence: Synthetic oligonucleotide
  Antisense strand to SEQ ID NO: 1740003
ugagaucgacacuuuaaca

SEQ ID NO: 1740005 - RNA, 19 nt, Artificial Sequence
  Description of Artificial Sequence: Synthetic oligonucleotide
  Sense strand starting at position 3868 of SEQ ID NO: 1562345
cccuuagugugagugggaa

SEQ ID NO: 1740006 - RNA, 19 nt, Artificial Sequence
  Description of Artificial Sequence: Synthetic oligonucleotide
  Antisense strand to SEQ ID NO: 1740005
uucccacucacacuaaggg

SEQ ID NO: 1740007 - RNA, 19 nt, Artificial Sequence
  Description of Artificial Sequence: Synthetic oligonucleotide
  Sense strand starting at position 3943 of SEQ ID NO: 1562345
ggcuucuguguugagauaa

SEQ ID NO: 1740008 - RNA, 19 nt, Artificial Sequence
  Description of Artificial Sequence: Synthetic oligonucleotide
  Antisense strand to SEQ ID NO: 1740007
uuaucucaacacagaagcc

SEQ ID NO: 1740009 - RNA, 19 nt, Artificial Sequence
  Description of Artificial Sequence: Synthetic oligonucleotide
  Sense strand starting at position 168 of SEQ ID NO: 1562346
ccuuuagagcuauagguaa

SEQ ID NO: 1740010 - RNA, 19 nt, Artificial Sequence
  Description of Artificial Sequence: Synthetic oligonucleotide
  Antisense strand to SEQ ID NO: 1740009
uuaccuauagcucuaaagg

SEQ ID NO: 1740011 - RNA, 19 nt, Artificial Sequence
  Description of Artificial Sequence: Synthetic oligonucleotide
  Sense strand starting at position 214 of SEQ ID NO: 1562346
uaacauguaguagagcaaa

SEQ ID NO: 1740012 - RNA, 19 nt, Artificial Sequence
  Description of Artificial Sequence: Synthetic oligonucleotide
  Antisense strand to SEQ ID NO: 1740011
uuugcucuacuacauguua

SEQ ID NO: 1740013 - RNA, 19 nt, Artificial Sequence
  Description of Artificial Sequence: Synthetic oligonucleotide
  Sense strand starting at position 224 of SEQ ID NO: 1562346
uagagcaaagcauggaaau

SEQ ID NO: 1740014 - RNA, 19 nt, Artificial Sequence
  Description of Artificial Sequence: Synthetic oligonucleotide
  Antisense strand to SEQ ID NO: 1740013
auuuccaugcuuugcucua

SEQ ID NO: 1740015 - RNA, 19 nt, Artificial Sequence
  Description of Artificial Sequence: Synthetic oligonucleotide
  Sense strand starting at position 225 of SEQ ID NO: 1562346
agagcaaagcauggaaauu

SEQ ID NO: 1740016 - RNA, 19 nt, Artificial Sequence
  Description of Artificial Sequence: Synthetic oligonucleotide
  Antisense strand to SEQ ID NO: 1740015
aauuuccaugcuuugcucu

SEQ ID NO: 1740017 - RNA, 19 nt, Artificial Sequence
  Description of Artificial Sequence: Synthetic oligonucleotide
  Sense strand starting at position 268 of SEQ ID NO: 1562346
aagaaugucuaugugguaa

SEQ ID NO: 1740018 - RNA, 19 nt, Artificial Sequence
  Description of Artificial Sequence: Synthetic oligonucleotide
  Antisense strand to SEQ ID NO: 1740017
uuaccacauagacauucuu

SEQ ID NO: 1740019 - RNA, 19 nt, Artificial Sequence
  Description of Artificial Sequence: Synthetic oligonucleotide
  Sense strand starting at position 342 of SEQ ID NO: 1562346
ccgauagcacuuuaguaag

SEQ ID NO: 1740020 - RNA, 19 nt, Artificial Sequence
  Description of Artificial Sequence: Synthetic oligonucleotide
  Antisense strand to SEQ ID NO: 1740019
cuuacuaaagugcuaucgg

SEQ ID NO: 1740021 - RNA, 19 nt, Artificial Sequence
  Description of Artificial Sequence: Synthetic oligonucleotide
  Sense strand starting at position 353 of SEQ ID NO: 1562346
uuaguaagucaagaaugca

SEQ ID NO: 1740022 - RNA, 19 nt, Artificial Sequence
  Description of Artificial Sequence: Synthetic oligonucleotide
  Antisense strand to SEQ ID NO: 1740021
ugcauucuugacuuacuaa

SEQ ID NO: 1740023 - RNA, 19 nt, Artificial Sequence
  Description of Artificial Sequence: Synthetic oligonucleotide
  Sense strand starting at position 660 of SEQ ID NO: 1562346
uaucgacagguugaaagua

SEQ ID NO: 1740024 - RNA, 19 nt, Artificial Sequence
  Description of Artificial Sequence: Synthetic oligonucleotide
  Antisense strand to SEQ ID NO: 1740023
uacuuucaaccugucgaua

SEQ ID NO: 1740025 - RNA, 19 nt, Artificial Sequence
  Description of Artificial Sequence: Synthetic oligonucleotide
  Sense strand starting at position 676 of SEQ ID NO: 1562346
guaaguaagggaugguaaa

SEQ ID NO: 1740026 - RNA, 19 nt, Artificial Sequence
  Description of Artificial Sequence: Synthetic oligonucleotide
  Antisense strand to SEQ ID NO: 1740025
uuuaccaucccuuacuuac

SEQ ID NO: 1740027 - RNA, 19 nt, Artificial Sequence
  Description of Artificial Sequence: Synthetic oligonucleotide
  Sense strand starting at position 932 of SEQ ID NO: 1562346
agcauauuggcuuacauga

SEQ ID NO: 1740028 - RNA, 19 nt, Artificial Sequence
  Description of Artificial Sequence: Synthetic oligonucleotide
  Antisense strand to SEQ ID NO: 1740027
ucauguaagccaauaugcu

SEQ ID NO: 1740029 - RNA, 19 nt, Artificial Sequence
  Description of Artificial Sequence: Synthetic oligonucleotide
  Sense strand starting at position 968 of SEQ ID NO: 1562346
ccagaauccguaggagaag

SEQ ID NO: 1740030 - RNA, 19 nt, Artificial Sequence
  Description of Artificial Sequence: Synthetic oligonucleotide
  Antisense strand to SEQ ID NO: 1740029
cuucuccuacggauucugg

SEQ ID NO: 1740031 - RNA, 19 nt, Artificial Sequence
  Description of Artificial Sequence: Synthetic oligonucleotide
  Sense strand starting at position 1012 of SEQ ID NO: 1562346
aacgauguugcagacuuua

SEQ ID NO: 1740032 - RNA, 19 nt, Artificial Sequence
  Description of Artificial Sequence: Synthetic oligonucleotide
  Antisense strand to SEQ ID NO: 1740031
uaaagucugcaacaucguu

SEQ ID NO: 1740033 - RNA, 19 nt, Artificial Sequence
  Description of Artificial Sequence: Synthetic oligonucleotide
  Sense strand starting at position 1020 of SEQ ID NO: 1562346
ugcagacuuuaggcagaau

SEQ ID NO: 1740034 - RNA, 19 nt, Artificial Sequence
  Description of Artificial Sequence: Synthetic oligonucleotide
  Antisense strand to SEQ ID NO: 1740033
auucugccuaaagucugca

SEQ ID NO: 1740035 - RNA, 19 nt, Artificial Sequence
  Description of Artificial Sequence: Synthetic oligonucleotide
  Sense strand starting at position 1128 of SEQ ID NO: 1562346
aagccaacugauuguagau

SEQ ID NO: 1740036 - RNA, 19 nt, Artificial Sequence
  Description of Artificial Sequence: Synthetic oligonucleotide
  Antisense strand to SEQ ID NO: 1740035
aucuacaaucaguuggcuu

SEQ ID NO: 1740037 - RNA, 19 nt, Artificial Sequence
  Description of Artificial Sequence: Synthetic oligonucleotide
  Sense strand starting at position 1558 of SEQ ID NO: 1562346
acaggaaacuaaucgucau

SEQ ID NO: 1740038 - RNA, 19 nt, Artificial Sequence
  Description of Artificial Sequence: Synthetic oligonucleotide
  Antisense strand to SEQ ID NO: 1740037
augacgauuaguuuccugu

SEQ ID NO: 1740039 - RNA, 19 nt, Artificial Sequence
  Description of Artificial Sequence: Synthetic oligonucleotide
  Sense strand starting at position 1561 of SEQ ID NO: 1562346
ggaaacuaaucgucaugga

SEQ ID NO: 1740040 - RNA, 19 nt, Artificial Sequence
  Description of Artificial Sequence: Synthetic oligonucleotide
  Antisense strand to SEQ ID NO: 1740039
uccaugacgauuaguuucc

SEQ ID NO: 1740041 - RNA, 19 nt, Artificial Sequence
  Description of Artificial Sequence: Synthetic oligonucleotide
  Sense strand starting at position 1565 of SEQ ID NO: 1562346
acuaaucgucauggagacu

SEQ ID NO: 1740042 - RNA, 19 nt, Artificial Sequence
  Description of Artificial Sequence: Synthetic oligonucleotide
  Antisense strand to SEQ ID NO: 1740041
agucuccaugacgauuagu

SEQ ID NO: 1740043 - RNA, 19 nt, Artificial Sequence
  Description of Artificial Sequence: Synthetic oligonucleotide
  Sense strand starting at position 1566 of SEQ ID NO: 1562346
cuaaucgucauggagacuu

SEQ ID NO: 1740044 - RNA, 19 nt, Artificial Sequence
  Description of Artificial Sequence: Synthetic oligonucleotide
  Antisense strand to SEQ ID NO: 1740043
aagucuccaugacgauuag

SEQ ID NO: 1740045 - RNA, 19 nt, Artificial Sequence
  Description of Artificial Sequence: Synthetic oligonucleotide
  Sense strand starting at position 1568 of SEQ ID NO: 1562346
aaucgucauggagacuuua

SEQ ID NO: 1740046 - RNA, 19 nt, Artificial Sequence
  Description of Artificial Sequence: Synthetic oligonucleotide
  Antisense strand to SEQ ID NO: 1740045
uaaagucuccaugacgauu

SEQ ID NO: 1740047 - RNA, 19 nt, Artificial Sequence
  Description of Artificial Sequence: Synthetic oligonucleotide
  Sense strand starting at position 1576 of SEQ ID NO: 1562346
uggagacuuuauccacacu

SEQ ID NO: 1740048 - RNA, 19 nt, Artificial Sequence
  Description of Artificial Sequence: Synthetic oligonucleotide
  Antisense strand to SEQ ID NO: 1740047
aguguggauaaagucucca

SEQ ID NO: 1740049 - RNA, 19 nt, Artificial Sequence
  Description of Artificial Sequence: Synthetic oligonucleotide
  Sense strand starting at position 1735 of SEQ ID NO: 1562346
acauuucuuacggguuguu

SEQ ID NO: 1740050 - RNA, 19 nt, Artificial Sequence
  Description of Artificial Sequence: Synthetic oligonucleotide
  Antisense strand to SEQ ID NO: 1740049
aacaacccguaagaaaugu

SEQ ID NO: 1740051 - RNA, 19 nt, Artificial Sequence
  Description of Artificial Sequence: Synthetic oligonucleotide
  Sense strand starting at position 1866 of SEQ ID NO: 1562346
aucaucucucgucaagaug

SEQ ID NO: 1740052 - RNA, 19 nt, Artificial Sequence
  Description of Artificial Sequence: Synthetic oligonucleotide
  Antisense strand to SEQ ID NO: 1740051
caucuugacgagagaugau

SEQ ID NO: 1740053 - RNA, 19 nt, Artificial Sequence
  Description of Artificial Sequence: Synthetic oligonucleotide
  Sense strand starting at position 1869 of SEQ ID NO: 1562346
aucucucgucaagaugauu

SEQ ID NO: 1740054 - RNA, 19 nt, Artificial Sequence
  Description of Artificial Sequence: Synthetic oligonucleotide
  Antisense strand to SEQ ID NO: 1740053
aaucaucuugacgagagau

SEQ ID NO: 1740055 - RNA, 19 nt, Artificial Sequence
  Description of Artificial Sequence: Synthetic oligonucleotide
  Sense strand starting at position 1897 of SEQ ID NO: 1562346
gacacacaugggugaguua

SEQ ID NO: 1740056 - RNA, 19 nt, Artificial Sequence
  Description of Artificial Sequence: Synthetic oligonucleotide
  Antisense strand to SEQ ID NO: 1740055
uaacucacccauguguguc

SEQ ID NO: 1740057 - RNA, 19 nt, Artificial Sequence
  Description of Artificial Sequence: Synthetic oligonucleotide
  Sense strand starting at position 1900 of SEQ ID NO: 1562346
acacaugggugaguuaaga

SEQ ID NO: 1740058 - RNA, 19 nt, Artificial Sequence
  Description of Artificial Sequence: Synthetic oligonucleotide
  Antisense strand to SEQ ID NO: 1740057
ucuuaacucacccaugugu

SEQ ID NO: 1740059 - RNA, 19 nt, Artificial Sequence
  Description of Artificial Sequence: Synthetic oligonucleotide
  Sense strand starting at position 1910 of SEQ ID NO: 1562346
gaguuaagaagcggaaagu

SEQ ID NO: 1740060 - RNA, 19 nt, Artificial Sequence
  Description of Artificial Sequence: Synthetic oligonucleotide
  Antisense strand to SEQ ID NO: 1740059
acuuuccgcuucuuaacuc

SEQ ID NO: 1740061 - RNA, 19 nt, Artificial Sequence
  Description of Artificial Sequence: Synthetic oligonucleotide
  Sense strand starting at position 1911 of SEQ ID NO: 1562346
aguuaagaagcggaaaguu

SEQ ID NO: 1740062 - RNA, 19 nt, Artificial Sequence
  Description of Artificial Sequence: Synthetic oligonucleotide
  Antisense strand to SEQ ID NO: 1740061
aacuuuccgcuucuuaacu

SEQ ID NO: 1740063 - RNA, 19 nt, Artificial Sequence
  Description of Artificial Sequence: Synthetic oligonucleotide
  Sense strand starting at position 1923 of SEQ ID NO: 1562346
gaaaguuuaauaggcggaa

SEQ ID NO: 1740064 - RNA, 19 nt, Artificial Sequence
  Description of Artificial Sequence: Synthetic oligonucleotide
  Antisense strand to SEQ ID NO: 1740063
uuccgccuauuaaacuuuc

SEQ ID NO: 1740065 - RNA, 19 nt, Artificial Sequence
  Description of Artificial Sequence: Synthetic oligonucleotide
  Sense strand starting at position 2058 of SEQ ID NO: 1562346
cagagauugguucgaccag

SEQ ID NO: 1740066 - RNA, 19 nt, Artificial Sequence
  Description of Artificial Sequence: Synthetic oligonucleotide
  Antisense strand to SEQ ID NO: 1740065
cuggucgaaccaaucucug

SEQ ID NO: 1740067 - RNA, 19 nt, Artificial Sequence
  Description of Artificial Sequence: Synthetic oligonucleotide
  Sense strand starting at position 2452 of SEQ ID NO: 1562346
ggcacaacugccgguauuu

SEQ ID NO: 1740068 - RNA, 19 nt, Artificial Sequence
  Description of Artificial Sequence: Synthetic oligonucleotide
  Antisense strand to SEQ ID NO: 1740067
aaauaccggcaguugugcc

SEQ ID NO: 1740069 - RNA, 19 nt, Artificial Sequence
  Description of Artificial Sequence: Synthetic oligonucleotide
  Sense strand starting at position 2735 of SEQ ID NO: 1562346
accuuuauggauugccaau

SEQ ID NO: 1740070 - RNA, 19 nt, Artificial Sequence
  Description of Artificial Sequence: Synthetic oligonucleotide
  Antisense strand to SEQ ID NO: 1740069
auuggcaauccauaaaggu

SEQ ID NO: 1740071 - RNA, 19 nt, Artificial Sequence
  Description of Artificial Sequence: Synthetic oligonucleotide
  Sense strand starting at position 2752 of SEQ ID NO: 1562346
aucagugacucauuggaag

SEQ ID NO: 1740072 - RNA, 19 nt, Artificial Sequence
  Description of Artificial Sequence: Synthetic oligonucleotide
  Antisense strand to SEQ ID NO: 1740071
cuuccaaugagucacugau

SEQ ID NO: 1740073 - RNA, 19 nt, Artificial Sequence
  Description of Artificial Sequence: Synthetic oligonucleotide
  Sense strand starting at position 2754 of SEQ ID NO: 1562346
cagugacucauuggaagug

SEQ ID NO: 1740074 - RNA, 19 nt, Artificial Sequence
  Description of Artificial Sequence: Synthetic oligonucleotide
  Antisense strand to SEQ ID NO: 1740073
cacuuccaaugagucacug

SEQ ID NO: 1740075 - RNA, 19 nt, Artificial Sequence
  Description of Artificial Sequence: Synthetic oligonucleotide
  Sense strand starting at position 2824 of SEQ ID NO: 1562346
aggcaauuucuuuguaucu

SEQ ID NO: 1740076 - RNA, 19 nt, Artificial Sequence
  Description of Artificial Sequence: Synthetic oligonucleotide
  Antisense strand to SEQ ID NO: 1740075
agauacaaagaaauugccu

SEQ ID NO: 1740077 - RNA, 19 nt, Artificial Sequence
  Description of Artificial Sequence: Synthetic oligonucleotide
  Sense strand starting at position 3429 of SEQ ID NO: 1562346
auaguaugauucuucugag

SEQ ID NO: 1740078 - RNA, 19 nt, Artificial Sequence
  Description of Artificial Sequence: Synthetic oligonucleotide
  Antisense strand to SEQ ID NO: 1740077
cucagaagaaucauacuau

SEQ ID NO: 1740079 - RNA, 19 nt, Artificial Sequence
  Description of Artificial Sequence: Synthetic oligonucleotide
  Sense strand starting at position 3436 of SEQ ID NO: 1562346
gauucuucugagugacuca

SEQ ID NO: 1740080 - RNA, 19 nt, Artificial Sequence
  Description of Artificial Sequence: Synthetic oligonucleotide
  Antisense strand to SEQ ID NO: 1740079
ugagucacucagaagaauc

SEQ ID NO: 1740081 - RNA, 19 nt, Artificial Sequence
  Description of Artificial Sequence: Synthetic oligonucleotide
  Sense strand starting at position 3497 of SEQ ID NO: 1562346
agugaaugcacagauagua

SEQ ID NO: 1740082 - RNA, 19 nt, Artificial Sequence
  Description of Artificial Sequence: Synthetic oligonucleotide
  Antisense strand to SEQ ID NO: 1740081
uacuaucugugcauucacu

SEQ ID NO: 1740083 - RNA, 19 nt, Artificial Sequence
  Description of Artificial Sequence: Synthetic oligonucleotide
  Sense strand starting at position 3510 of SEQ ID NO: 1562346
auaguauauuaaucagggu

SEQ ID NO: 1740084 - RNA, 19 nt, Artificial Sequence
  Description of Artificial Sequence: Synthetic oligonucleotide
  Antisense strand to SEQ ID NO: 1740083
acccugauuaauauacuau

SEQ ID NO: 1740085 - RNA, 19 nt, Artificial Sequence
  Description of Artificial Sequence: Synthetic oligonucleotide
  Sense strand starting at position 3519 of SEQ ID NO: 1562346
uaaucaggguucucuggaa

SEQ ID NO: 1740086 - RNA, 19 nt, Artificial Sequence
  Description of Artificial Sequence: Synthetic oligonucleotide
  Antisense strand to SEQ ID NO: 1740085
uuccagagaacccugauua

SEQ ID NO: 1740087 - RNA, 19 nt, Artificial Sequence
  Description of Artificial Sequence: Synthetic oligonucleotide
  Sense strand starting at position 3691 of SEQ ID NO: 1562346
ggucuaaaggccugagaac

SEQ ID NO: 1740088 - RNA, 19 nt, Artificial Sequence
  Description of Artificial Sequence: Synthetic oligonucleotide
  Antisense strand to SEQ ID NO: 1740087
guucucaggccuuuagacc

SEQ ID NO: 1740089 - RNA, 19 nt, Artificial Sequence
  Description of Artificial Sequence: Synthetic oligonucleotide
  Sense strand starting at position 388 of SEQ ID NO: 1562347
agauaaaucuaugagauac

SEQ ID NO: 1740090 - RNA, 19 nt, Artificial Sequence
  Description of Artificial Sequence: Synthetic oligonucleotide
  Antisense strand to SEQ ID NO: 1740089
guaucucauagauuuaucu

SEQ ID NO: 1740091 - RNA, 19 nt, Artificial Sequence
  Description of Artificial Sequence: Synthetic oligonucleotide
  Sense strand starting at position 446 of SEQ ID NO: 1562347
gugagcaucuacuugguau

SEQ ID NO: 1740092 - RNA, 19 nt, Artificial Sequence
  Description of Artificial Sequence: Synthetic oligonucleotide
  Antisense strand to SEQ ID NO: 1740091
auaccaaguagaugcucac

SEQ ID NO: 1740093 - RNA, 19 nt, Artificial Sequence
  Description of Artificial Sequence: Synthetic oligonucleotide
  Sense strand starting at position 490 of SEQ ID NO: 1562347
ggagcaauccaggagcuga

SEQ ID NO: 1740094 - RNA, 19 nt, Artificial Sequence
  Description of Artificial Sequence: Synthetic oligonucleotide
  Antisense strand to SEQ ID NO: 1740093
ucagcuccuggauugcucc

SEQ ID NO: 1740095 - RNA, 19 nt, Artificial Sequence
  Description of Artificial Sequence: Synthetic oligonucleotide
  Sense strand starting at position 504 of SEQ ID NO: 1562347
gcugacaaugcugagaaau

SEQ ID NO: 1740096 - RNA, 19 nt, Artificial Sequence
  Description of Artificial Sequence: Synthetic oligonucleotide
  Antisense strand to SEQ ID NO: 1740095
auuucucagcauugucagc

SEQ ID NO: 1740097 - RNA, 19 nt, Artificial Sequence
  Description of Artificial Sequence: Synthetic oligonucleotide
  Sense strand starting at position 506 of SEQ ID NO: 1562347
ugacaaugcugagaaauag

SEQ ID NO: 1740098 - RNA, 19 nt, Artificial Sequence
  Description of Artificial Sequence: Synthetic oligonucleotide
  Antisense strand to SEQ ID NO: 1740097
cuauuucucagcauuguca

SEQ ID NO: 1740099 - RNA, 19 nt, Artificial Sequence
  Description of Artificial Sequence: Synthetic oligonucleotide
  Sense strand starting at position 694 of SEQ ID NO: 1562347
cuggcauacuucuaauaug

SEQ ID NO: 1740100 - RNA, 19 nt, Artificial Sequence
  Description of Artificial Sequence: Synthetic oligonucleotide
  Antisense strand to SEQ ID NO: 1740099
cauauuagaaguaugccag

SEQ ID NO: 1740101 - RNA, 19 nt, Artificial Sequence
  Description of Artificial Sequence: Synthetic oligonucleotide
  Sense strand starting at position 736 of SEQ ID NO: 1562347
gccugugugcaugcaugau

SEQ ID NO: 1740102 - RNA, 19 nt, Artificial Sequence
  Description of Artificial Sequence: Synthetic oligonucleotide
  Antisense strand to SEQ ID NO: 1740101
aucaugcaugcacacaggc

SEQ ID NO: 1740103 - RNA, 19 nt, Artificial Sequence
  Description of Artificial Sequence: Synthetic oligonucleotide
  Sense strand starting at position 740 of SEQ ID NO: 1562347
gugugcaugcaugauagau

SEQ ID NO: 1740104 - RNA, 19 nt, Artificial Sequence
  Description of Artificial Sequence: Synthetic oligonucleotide
  Antisense strand to SEQ ID NO: 1740103
aucuaucaugcaugcacac

SEQ ID NO: 1740105 - RNA, 19 nt, Artificial Sequence
  Description of Artificial Sequence: Synthetic oligonucleotide
  Sense strand starting at position 746 of SEQ ID NO: 1562347
augcaugauagaugcguaa

SEQ ID NO: 1740106 - RNA, 19 nt, Artificial Sequence
  Description of Artificial Sequence: Synthetic oligonucleotide
  Antisense strand to SEQ ID NO: 1740105
uuacgcaucuaucaugcau

SEQ ID NO: 1740107 - RNA, 19 nt, Artificial Sequence
  Description of Artificial Sequence: Synthetic oligonucleotide
  Sense strand starting at position 748 of SEQ ID NO: 1562347
gcaugauagaugcguaaca

SEQ ID NO: 1740108 - RNA, 19 nt, Artificial Sequence
  Description of Artificial Sequence: Synthetic oligonucleotide
  Antisense strand to SEQ ID NO: 1740107
uguuacgcaucuaucaugc

SEQ ID NO: 1740109 - RNA, 19 nt, Artificial Sequence
  Description of Artificial Sequence: Synthetic oligonucleotide
  Sense strand starting at position 750 of SEQ ID NO: 1562347
augauagaugcguaacaga

SEQ ID NO: 1740110 - RNA, 19 nt, Artificial Sequence
  Description of Artificial Sequence: Synthetic oligonucleotide
  Antisense strand to SEQ ID NO: 1740109
ucuguuacgcaucuaucau

SEQ ID NO: 1740111 - RNA, 19 nt, Artificial Sequence
  Description of Artificial Sequence: Synthetic oligonucleotide
  Sense strand starting at position 753 of SEQ ID NO: 1562347
auagaugcguaacagagau

SEQ ID NO: 1740112 - RNA, 19 nt, Artificial Sequence
  Description of Artificial Sequence: Synthetic oligonucleotide
  Antisense strand to SEQ ID NO: 1740111
aucucuguuacgcaucuau

SEQ ID NO: 1740113 - RNA, 19 nt, Artificial Sequence
  Description of Artificial Sequence: Synthetic oligonucleotide
  Sense strand starting at position 757 of SEQ ID NO: 1562347
augcguaacagagaugauu

SEQ ID NO: 1740114 - RNA, 19 nt, Artificial Sequence
  Description of Artificial Sequence: Synthetic oligonucleotide
  Antisense strand to SEQ ID NO: 1740113
aaucaucucuguuacgcau

SEQ ID NO: 1740115 - RNA, 19 nt, Artificial Sequence
  Description of Artificial Sequence: Synthetic oligonucleotide
  Sense strand starting at position 777 of SEQ ID NO: 1562347
cucaaucaccuuugacgua

SEQ ID NO: 1740116 - RNA, 19 nt, Artificial Sequence
  Description of Artificial Sequence: Synthetic oligonucleotide
  Antisense strand to SEQ ID NO: 1740115
uacgucaaaggugauugag

SEQ ID NO: 1740117 - RNA, 19 nt, Artificial Sequence
  Description of Artificial Sequence: Synthetic oligonucleotide
  Sense strand starting at position 778 of SEQ ID NO: 1562347
ucaaucaccuuugacguaa

SEQ ID NO: 1740118 - RNA, 19 nt, Artificial Sequence
  Description of Artificial Sequence: Synthetic oligonucleotide
  Antisense strand to SEQ ID NO: 1740117
uuacgucaaaggugauuga

SEQ ID NO: 1740119 - RNA, 19 nt, Artificial Sequence
  Description of Artificial Sequence: Synthetic oligonucleotide
  Sense strand starting at position 820 of SEQ ID NO: 1562347
aauggugacuucuacauga

SEQ ID NO: 1740120 - RNA, 19 nt, Artificial Sequence
  Description of Artificial Sequence: Synthetic oligonucleotide
  Antisense strand to SEQ ID NO: 1740119
ucauguagaagucaccauu

SEQ ID NO: 1740121 - RNA, 19 nt, Artificial Sequence
  Description of Artificial Sequence: Synthetic oligonucleotide
  Sense strand starting at position 824 of SEQ ID NO: 1562347
gugacuucuacaugaacgu

SEQ ID NO: 1740122 - RNA, 19 nt, Artificial Sequence
  Description of Artificial Sequence: Synthetic oligonucleotide
  Antisense strand to SEQ ID NO: 1740121
acguucauguagaagucac

SEQ ID NO: 1740123 - RNA, 19 nt, Artificial Sequence
  Description of Artificial Sequence: Synthetic oligonucleotide
  Sense strand starting at position 830 of SEQ ID NO: 1562347
ucuacaugaacgugaagua

SEQ ID NO: 1740124 - RNA, 19 nt, Artificial Sequence
  Description of Artificial Sequence: Synthetic oligonucleotide
  Antisense strand to SEQ ID NO: 1740123
uacuucacguucauguaga

SEQ ID NO: 1740125 - RNA, 19 nt, Artificial Sequence
  Description of Artificial Sequence: Synthetic oligonucleotide
  Sense strand starting at position 831 of SEQ ID NO: 1562347
cuacaugaacgugaaguau

SEQ ID NO: 1740126 - RNA, 19 nt, Artificial Sequence
  Description of Artificial Sequence: Synthetic oligonucleotide
  Antisense strand to SEQ ID NO: 1740125
auacuucacguucauguag

SEQ ID NO: 1740127 - RNA, 19 nt, Artificial Sequence
  Description of Artificial Sequence: Synthetic oligonucleotide
  Sense strand starting at position 835 of SEQ ID NO: 1562347
augaacgugaaguauuaua

SEQ ID NO: 1740128 - RNA, 19 nt, Artificial Sequence
  Description of Artificial Sequence: Synthetic oligonucleotide
  Antisense strand to SEQ ID NO: 1740127
uauaauacuucacguucau

SEQ ID NO: 1740129 - RNA, 19 nt, Artificial Sequence
  Description of Artificial Sequence: Synthetic oligonucleotide
  Sense strand starting at position 1027 of SEQ ID NO: 1562347
ggcaucuguuagguaucaa

SEQ ID NO: 1740130 - RNA, 19 nt, Artificial Sequence
  Description of Artificial Sequence: Synthetic oligonucleotide
  Antisense strand to SEQ ID NO: 1740129
uugauaccuaacagaugcc

SEQ ID NO: 1740131 - RNA, 19 nt, Artificial Sequence
  Description of Artificial Sequence: Synthetic oligonucleotide
  Sense strand starting at position 1119 of SEQ ID NO: 1562347
aaggcucucugacagaguu

SEQ ID NO: 1740132 - RNA, 19 nt, Artificial Sequence
  Description of Artificial Sequence: Synthetic oligonucleotide
  Antisense strand to SEQ ID NO: 1740131
aacucugucagagagccuu

SEQ ID NO: 1740133 - RNA, 19 nt, Artificial Sequence
  Description of Artificial Sequence: Synthetic oligonucleotide
  Sense strand starting at position 1259 of SEQ ID NO: 1562347
cauagccauguguggaaua

SEQ ID NO: 1740134 - RNA, 19 nt, Artificial Sequence
  Description of Artificial Sequence: Synthetic oligonucleotide
  Antisense strand to SEQ ID NO: 1740133
uauuccacacauggcuaug

SEQ ID NO: 1740135 - RNA, 19 nt, Artificial Sequence
  Description of Artificial Sequence: Synthetic oligonucleotide
  Sense strand starting at position 1490 of SEQ ID NO: 1562347
accguauguauggguauaa

SEQ ID NO: 1740136 - RNA, 19 nt, Artificial Sequence
  Description of Artificial Sequence: Synthetic oligonucleotide
  Antisense strand to SEQ ID NO: 1740135
uuauacccauacauacggu

SEQ ID NO: 1740137 - RNA, 19 nt, Artificial Sequence
  Description of Artificial Sequence: Synthetic oligonucleotide
  Sense strand starting at position 1491 of SEQ ID NO: 1562347
ccguauguauggguauaau

SEQ ID NO: 1740138 - RNA, 19 nt, Artificial Sequence
  Description of Artificial Sequence: Synthetic oligonucleotide
  Antisense strand to SEQ ID NO: 1740137
auuauacccauacauacgg

SEQ ID NO: 1740139 - RNA, 19 nt, Artificial Sequence
  Description of Artificial Sequence: Synthetic oligonucleotide
  Sense strand starting at position 1494 of SEQ ID NO: 1562347
uauguauggguauaauauc

SEQ ID NO: 1740140 - RNA, 19 nt, Artificial Sequence
  Description of Artificial Sequence: Synthetic oligonucleotide
  Antisense strand to SEQ ID NO: 1740139
gauauuauacccauacaua

SEQ ID NO: 1740141 - RNA, 19 nt, Artificial Sequence
  Description of Artificial Sequence: Synthetic oligonucleotide
  Sense strand starting at position 1500 of SEQ ID NO: 1562347
uggguauaauauccuuaac

SEQ ID NO: 1740142 - RNA, 19 nt, Artificial Sequence
  Description of Artificial Sequence: Synthetic oligonucleotide
  Antisense strand to SEQ ID NO: 1740141
guuaaggauauuauaccca

SEQ ID NO: 1740143 - RNA, 19 nt, Artificial Sequence
  Description of Artificial Sequence: Synthetic oligonucleotide
  Sense strand starting at position 1510 of SEQ ID NO: 1562347
auccuuaacuugucagucu

SEQ ID NO: 1740144 - RNA, 19 nt, Artificial Sequence
  Description of Artificial Sequence: Synthetic oligonucleotide
  Antisense strand to SEQ ID NO: 1740143
agacugacaaguuaaggau

SEQ ID NO: 1740145 - RNA, 19 nt, Artificial Sequence
  Description of Artificial Sequence: Synthetic oligonucleotide
  Sense strand starting at position 1611 of SEQ ID NO: 1562347
ccauaaaggugacuguguu

SEQ ID NO: 1740146 - RNA, 19 nt, Artificial Sequence
  Description of Artificial Sequence: Synthetic oligonucleotide
  Antisense strand to SEQ ID NO: 1740145
aacacagucaccuuuaugg

SEQ ID NO: 1740147 - RNA, 19 nt, Artificial Sequence
  Description of Artificial Sequence: Synthetic oligonucleotide
  Sense strand starting at position 1612 of SEQ ID NO: 1562347
cauaaaggugacuguguua

SEQ ID NO: 1740148 - RNA, 19 nt, Artificial Sequence
  Description of Artificial Sequence: Synthetic oligonucleotide
  Antisense strand to SEQ ID NO: 1740147
uaacacagucaccuuuaug

SEQ ID NO: 1740149 - RNA, 19 nt, Artificial Sequence
  Description of Artificial Sequence: Synthetic oligonucleotide
  Sense strand starting at position 1619 of SEQ ID NO: 1562347
gugacuguguuauuuacau

SEQ ID NO: 1740150 - RNA, 19 nt, Artificial Sequence
  Description of Artificial Sequence: Synthetic oligonucleotide
  Antisense strand to SEQ ID NO: 1740149
auguaaauaacacagucac

SEQ ID NO: 1740151 - RNA, 19 nt, Artificial Sequence
  Description of Artificial Sequence: Synthetic oligonucleotide
  Sense strand starting at position 1623 of SEQ ID NO: 1562347
cuguguuauuuacauuaac

SEQ ID NO: 1740152 - RNA, 19 nt, Artificial Sequence
  Description of Artificial Sequence: Synthetic oligonucleotide
  Antisense strand to SEQ ID NO: 1740151
guuaauguaaauaacacag

SEQ ID NO: 1740153 - RNA, 19 nt, Artificial Sequence
  Description of Artificial Sequence: Synthetic oligonucleotide
  Sense strand starting at position 1694 of SEQ ID NO: 1562347
agcauuuacuaugcuguau

SEQ ID NO: 1740154 - RNA, 19 nt, Artificial Sequence
  Description of Artificial Sequence: Synthetic oligonucleotide
  Antisense strand to SEQ ID NO: 1740153
auacagcauaguaaaugcu

SEQ ID NO: 1740155 - RNA, 19 nt, Artificial Sequence
  Description of Artificial Sequence: Synthetic oligonucleotide
  Sense strand starting at position 1871 of SEQ ID NO: 1562347
acauucucuuagccagagu

SEQ ID NO: 1740156 - RNA, 19 nt, Artificial Sequence
  Description of Artificial Sequence: Synthetic oligonucleotide
  Antisense strand to SEQ ID NO: 1740155
acucuggcuaagagaaugu

SEQ ID NO: 1740157 - RNA, 19 nt, Artificial Sequence
  Description of Artificial Sequence: Synthetic oligonucleotide
  Sense strand starting at position 1908 of SEQ ID NO: 1562347
uugagucaccuguaugcau

SEQ ID NO: 1740158 - RNA, 19 nt, Artificial Sequence
  Description of Artificial Sequence: Synthetic oligonucleotide
  Antisense strand to SEQ ID NO: 1740157
augcauacaggugacucaa

SEQ ID NO: 1740159 - RNA, 19 nt, Artificial Sequence
  Description of Artificial Sequence: Synthetic oligonucleotide
  Sense strand starting at position 3401 of SEQ ID NO: 1562347
uaggaauugucucugaaau

SEQ ID NO: 1740160 - RNA, 19 nt, Artificial Sequence
  Description of Artificial Sequence: Synthetic oligonucleotide
  Antisense strand to SEQ ID NO: 1740159
auuucagagacaauuccua

SEQ ID NO: 1740161 - RNA, 19 nt, Artificial Sequence
  Description of Artificial Sequence: Synthetic oligonucleotide
  Sense strand starting at position 3435 of SEQ ID NO: 1562347
agauuccauuccugaagaa

SEQ ID NO: 1740162 - RNA, 19 nt, Artificial Sequence
  Description of Artificial Sequence: Synthetic oligonucleotide
  Antisense strand to SEQ ID NO: 1740161
uucuucaggaauggaaucu

SEQ ID NO: 1740163 - RNA, 19 nt, Artificial Sequence
  Description of Artificial Sequence: Synthetic oligonucleotide
  Sense strand starting at position 3506 of SEQ ID NO: 1562347
acaacuagcugguaucaua

SEQ ID NO: 1740164 - RNA, 19 nt, Artificial Sequence
  Description of Artificial Sequence: Synthetic oligonucleotide
  Antisense strand to SEQ ID NO: 1740163
uaugauaccagcuaguugu

SEQ ID NO: 1740165 - RNA, 19 nt, Artificial Sequence
  Description of Artificial Sequence: Synthetic oligonucleotide
  Sense strand starting at position 3801 of SEQ ID NO: 1562347
ccaguuucgauagaaguag

SEQ ID NO: 1740166 - RNA, 19 nt, Artificial Sequence
  Description of Artificial Sequence: Synthetic oligonucleotide
  Antisense strand to SEQ ID NO: 1740165
cuacuucuaucgaaacugg

SEQ ID NO: 1740167 - RNA, 19 nt, Artificial Sequence
  Description of Artificial Sequence: Synthetic oligonucleotide
  Sense strand starting at position 3815 of SEQ ID NO: 1562347
aguagauauuacugacaca

SEQ ID NO: 1740168 - RNA, 19 nt, Artificial Sequence
  Description of Artificial Sequence: Synthetic oligonucleotide
  Antisense strand to SEQ ID NO: 1740167
ugugucaguaauaucuacu

SEQ ID NO: 1740169 - RNA, 19 nt, Artificial Sequence
  Description of Artificial Sequence: Synthetic oligonucleotide
  Sense strand starting at position 22 of SEQ ID NO: 1562348
uuaacuuucuggcaugguu

SEQ ID NO: 1740170 - RNA, 19 nt, Artificial Sequence
  Description of Artificial Sequence: Synthetic oligonucleotide
  Antisense strand to SEQ ID NO: 1740169
aaccaugccagaaaguuaa

SEQ ID NO: 1740171 - RNA, 19 nt, Artificial Sequence
  Description of Artificial Sequence: Synthetic oligonucleotide
  Sense strand starting at position 29 of SEQ ID NO: 1562348
ucuggcaugguuugaagua

SEQ ID NO: 1740172 - RNA, 19 nt, Artificial Sequence
  Description of Artificial Sequence: Synthetic oligonucleotide
  Antisense strand to SEQ ID NO: 1740171
uacuucaaaccaugccaga

SEQ ID NO: 1740173 - RNA, 19 nt, Artificial Sequence
  Description of Artificial Sequence: Synthetic oligonucleotide
  Sense strand starting at position 30 of SEQ ID NO: 1562348
cuggcaugguuugaaguau

SEQ ID NO: 1740174 - RNA, 19 nt, Artificial Sequence
  Description of Artificial Sequence: Synthetic oligonucleotide
  Antisense strand to SEQ ID NO: 1740173
auacuucaaaccaugccag

SEQ ID NO: 1740175 - RNA, 19 nt, Artificial Sequence
  Description of Artificial Sequence: Synthetic oligonucleotide
  Sense strand starting at position 99 of SEQ ID NO: 1562348
ccuccaaaguacugggaua

SEQ ID NO: 1740176 - RNA, 19 nt, Artificial Sequence
  Description of Artificial Sequence: Synthetic oligonucleotide
  Antisense strand to SEQ ID NO: 1740175
uaucccaguacuuuggagg

SEQ ID NO: 1740177 - RNA, 19 nt, Artificial Sequence
  Description of Artificial Sequence: Synthetic oligonucleotide
  Sense strand starting at position 115 of SEQ ID NO: 1562348
auaccugaaguaugcguaa

SEQ ID NO: 1740178 - RNA, 19 nt, Artificial Sequence
  Description of Artificial Sequence: Synthetic oligonucleotide
  Antisense strand to SEQ ID NO: 1740177
uuacgcauacuucagguau

SEQ ID NO: 1740179 - RNA, 19 nt, Artificial Sequence
  Description of Artificial Sequence: Synthetic oligonucleotide
  Sense strand starting at position 170 of SEQ ID NO: 1562348
accaguuucuuugaaauga

SEQ ID NO: 1740180 - RNA, 19 nt, Artificial Sequence
  Description of Artificial Sequence: Synthetic oligonucleotide
  Antisense strand to SEQ ID NO: 1740179
ucauuucaaagaaacuggu

SEQ ID NO: 1740181 - RNA, 19 nt, Artificial Sequence
  Description of Artificial Sequence: Synthetic oligonucleotide
  Sense strand starting at position 180 of SEQ ID NO: 1562348
uugaaaugaucuucugcag

SEQ ID NO: 1740182 - RNA, 19 nt, Artificial Sequence
  Description of Artificial Sequence: Synthetic oligonucleotide
  Antisense strand to SEQ ID NO: 1740181
cugcagaagaucauuucaa

SEQ ID NO: 1740183 - RNA, 19 nt, Artificial Sequence
  Description of Artificial Sequence: Synthetic oligonucleotide
  Sense strand starting at position 688 of SEQ ID NO: 1562348
gacacaucucuagguuaga

SEQ ID NO: 1740184 - RNA, 19 nt, Artificial Sequence
  Description of Artificial Sequence: Synthetic oligonucleotide
  Antisense strand to SEQ ID NO: 1740183
ucuaaccuagagauguguc

SEQ ID NO: 1740185 - RNA, 19 nt, Artificial Sequence
  Description of Artificial Sequence: Synthetic oligonucleotide
  Sense strand starting at position 689 of SEQ ID NO: 1562348
acacaucucuagguuagaa

SEQ ID NO: 1740186 - RNA, 19 nt, Artificial Sequence
  Description of Artificial Sequence: Synthetic oligonucleotide
  Antisense strand to SEQ ID NO: 1740185
uucuaaccuagagaugugu

SEQ ID NO: 1740187 - RNA, 19 nt, Artificial Sequence
  Description of Artificial Sequence: Synthetic oligonucleotide
  Sense strand starting at position 699 of SEQ ID NO: 1562348
agguuagaacccugaguca

SEQ ID NO: 1740188 - RNA, 19 nt, Artificial Sequence
  Description of Artificial Sequence: Synthetic oligonucleotide
  Antisense strand to SEQ ID NO: 1740187
ugacucaggguucuaaccu

SEQ ID NO: 1740189 - RNA, 19 nt, Artificial Sequence
  Description of Artificial Sequence: Synthetic oligonucleotide
  Sense strand starting at position 702 of SEQ ID NO: 1562348
uuagaacccugagucauua

SEQ ID NO: 1740190 - RNA, 19 nt, Artificial Sequence
  Description of Artificial Sequence: Synthetic oligonucleotide
  Antisense strand to SEQ ID NO: 1740189
uaaugacucaggguucuaa

SEQ ID NO: 1740191 - RNA, 19 nt, Artificial Sequence
  Description of Artificial Sequence: Synthetic oligonucleotide
  Sense strand starting at position 814 of SEQ ID NO: 1562348
uggagucccagcuguauga

SEQ ID NO: 1740192 - RNA, 19 nt, Artificial Sequence
  Description of Artificial Sequence: Synthetic oligonucleotide
  Antisense strand to SEQ ID NO: 1740191
ucauacagcugggacucca

SEQ ID NO: 1740193 - RNA, 19 nt, Artificial Sequence
  Description of Artificial Sequence: Synthetic oligonucleotide
  Sense strand starting at position 824 of SEQ ID NO: 1562348
gcuguaugaccuuagacca

SEQ ID NO: 1740194 - RNA, 19 nt, Artificial Sequence
  Description of Artificial Sequence: Synthetic oligonucleotide
  Antisense strand to SEQ ID NO: 1740193
uggucuaaggucauacagc

SEQ ID NO: 1740195 - RNA, 19 nt, Artificial Sequence
  Description of Artificial Sequence: Synthetic oligonucleotide
  Sense strand starting at position 1008 of SEQ ID NO: 1562348
accaaauggugcuagcauu

SEQ ID NO: 1740196 - RNA, 19 nt, Artificial Sequence
  Description of Artificial Sequence: Synthetic oligonucleotide
  Antisense strand to SEQ ID NO: 1740195
aaugcuagcaccauuuggu

SEQ ID NO: 1740197 - RNA, 19 nt, Artificial Sequence
  Description of Artificial Sequence: Synthetic oligonucleotide
  Sense strand starting at position 1028 of SEQ ID NO: 1562348
cugcgcugugcccagauua

SEQ ID NO: 1740198 - RNA, 19 nt, Artificial Sequence
  Description of Artificial Sequence: Synthetic oligonucleotide
  Antisense strand to SEQ ID NO: 1740197
uaaucugggcacagcgcag

SEQ ID NO: 1740199 - RNA, 19 nt, Artificial Sequence
  Description of Artificial Sequence: Synthetic oligonucleotide
  Sense strand starting at position 1038 of SEQ ID NO: 1562348
cccagauuaugggauucgu

SEQ ID NO: 1740200 - RNA, 19 nt, Artificial Sequence
  Description of Artificial Sequence: Synthetic oligonucleotide
  Antisense strand to SEQ ID NO: 1740199
acgaaucccauaaucuggg

SEQ ID NO: 1740201 - RNA, 19 nt, Artificial Sequence
  Description of Artificial Sequence: Synthetic oligonucleotide
  Sense strand starting at position 1042 of SEQ ID NO: 1562348
gauuaugggauucguguca

SEQ ID NO: 1740202 - RNA, 19 nt, Artificial Sequence
  Description of Artificial Sequence: Synthetic oligonucleotide
  Antisense strand to SEQ ID NO: 1740201
ugacacgaaucccauaauc

SEQ ID NO: 1740203 - RNA, 19 nt, Artificial Sequence
  Description of Artificial Sequence: Synthetic oligonucleotide
  Sense strand starting at position 1051 of SEQ ID NO: 1562348
auucgugucaccuaggguu

SEQ ID NO: 1740204 - RNA, 19 nt, Artificial Sequence
  Description of Artificial Sequence: Synthetic oligonucleotide
  Antisense strand to SEQ ID NO: 1740203
aacccuaggugacacgaau

SEQ ID NO: 1740205 - RNA, 19 nt, Artificial Sequence
  Description of Artificial Sequence: Synthetic oligonucleotide
  Sense strand starting at position 1145 of SEQ ID NO: 1562348
aggagccuuucgccaagua

SEQ ID NO: 1740206 - RNA, 19 nt, Artificial Sequence
  Description of Artificial Sequence: Synthetic oligonucleotide
  Antisense strand to SEQ ID NO: 1740205
uacuuggcgaaaggcuccu

SEQ ID NO: 1740207 - RNA, 19 nt, Artificial Sequence
  Description of Artificial Sequence: Synthetic oligonucleotide
  Sense strand starting at position 1202 of SEQ ID NO: 1562348
guggguuugugccuauaaa

SEQ ID NO: 1740208 - RNA, 19 nt, Artificial Sequence
  Description of Artificial Sequence: Synthetic oligonucleotide
  Antisense strand to SEQ ID NO: 1740207
uuuauaggcacaaacccac

SEQ ID NO: 1740209 - RNA, 19 nt, Artificial Sequence
  Description of Artificial Sequence: Synthetic oligonucleotide
  Sense strand starting at position 1203 of SEQ ID NO: 1562348
uggguuugugccuauaaau

SEQ ID NO: 1740210 - RNA, 19 nt, Artificial Sequence
  Description of Artificial Sequence: Synthetic oligonucleotide
  Antisense strand to SEQ ID NO: 1740209
auuuauaggcacaaaccca

SEQ ID NO: 1740211 - RNA, 19 nt, Artificial Sequence
  Description of Artificial Sequence: Synthetic oligonucleotide
  Sense strand starting at position 1217 of SEQ ID NO: 1562348
uaaauagacuggugaaguu

SEQ ID NO: 1740212 - RNA, 19 nt, Artificial Sequence
  Description of Artificial Sequence: Synthetic oligonucleotide
  Antisense strand to SEQ ID NO: 1740211
aacuucaccagucuauuua

SEQ ID NO: 1740213 - RNA, 19 nt, Artificial Sequence
  Description of Artificial Sequence: Synthetic oligonucleotide
  Sense strand starting at position 1239 of SEQ ID NO: 1562348
uggcgauacacagguaucu

SEQ ID NO: 1740214 - RNA, 19 nt, Artificial Sequence
  Description of Artificial Sequence: Synthetic oligonucleotide
  Antisense strand to SEQ ID NO: 1740213
agauaccuguguaucgcca

SEQ ID NO: 1740215 - RNA, 19 nt, Artificial Sequence
  Description of Artificial Sequence: Synthetic oligonucleotide
  Sense strand starting at position 1241 of SEQ ID NO: 1562348
gcgauacacagguaucuau

SEQ ID NO: 1740216 - RNA, 19 nt, Artificial Sequence
  Description of Artificial Sequence: Synthetic oligonucleotide
  Antisense strand to SEQ ID NO: 1740215
auagauaccuguguaucgc

SEQ ID NO: 1740217 - RNA, 19 nt, Artificial Sequence
  Description of Artificial Sequence: Synthetic oligonucleotide
  Sense strand starting at position 1498 of SEQ ID NO: 1562348
cgugcauuguccuugcgaa

SEQ ID NO: 1740218 - RNA, 19 nt, Artificial Sequence
  Description of Artificial Sequence: Synthetic oligonucleotide
  Antisense strand to SEQ ID NO: 1740217
uucgcaaggacaaugcacg

SEQ ID NO: 1740219 - RNA, 19 nt, Artificial Sequence
  Description of Artificial Sequence: Synthetic oligonucleotide
  Sense strand starting at position 1499 of SEQ ID NO: 1562348
gugcauuguccuugcgaau

SEQ ID NO: 1740220 - RNA, 19 nt, Artificial Sequence
  Description of Artificial Sequence: Synthetic oligonucleotide
  Antisense strand to SEQ ID NO: 1740219
auucgcaaggacaaugcac

SEQ ID NO: 1740221 - RNA, 19 nt, Artificial Sequence
  Description of Artificial Sequence: Synthetic oligonucleotide
  Sense strand starting at position 1500 of SEQ ID NO: 1562348
ugcauuguccuugcgaauc

SEQ ID NO: 1740222 - RNA, 19 nt, Artificial Sequence
  Description of Artificial Sequence: Synthetic oligonucleotide
  Antisense strand to SEQ ID NO: 1740221
gauucgcaaggacaaugca

SEQ ID NO: 1740223 - RNA, 19 nt, Artificial Sequence
  Description of Artificial Sequence: Synthetic oligonucleotide
  Sense strand starting at position 2262 of SEQ ID NO: 1562348
gcuucuucccgaggaggau

SEQ ID NO: 1740224 - RNA, 19 nt, Artificial Sequence
  Description of Artificial Sequence: Synthetic oligonucleotide
  Antisense strand to SEQ ID NO: 1740223
auccuccucgggaagaagc

SEQ ID NO: 1740225 - RNA, 19 nt, Artificial Sequence
  Description of Artificial Sequence: Synthetic oligonucleotide
  Sense strand starting at position 2263 of SEQ ID NO: 1562348
cuucuucccgaggaggauu

SEQ ID NO: 1740226 - RNA, 19 nt, Artificial Sequence
  Description of Artificial Sequence: Synthetic oligonucleotide
  Antisense strand to SEQ ID NO: 1740225
aauccuccucgggaagaag

SEQ ID NO: 1740227 - RNA, 19 nt, Artificial Sequence
  Description of Artificial Sequence: Synthetic oligonucleotide
  Sense strand starting at position 2713 of SEQ ID NO: 1562348
uuauuauucgggcgggaag

SEQ ID NO: 1740228 - RNA, 19 nt, Artificial Sequence
  Description of Artificial Sequence: Synthetic oligonucleotide
  Antisense strand to SEQ ID NO: 1740227
cuucccgcccgaauaauaa

SEQ ID NO: 1740229 - RNA, 19 nt, Artificial Sequence
  Description of Artificial Sequence: Synthetic oligonucleotide
  Sense strand starting at position 2872 of SEQ ID NO: 1562348
gggccuguugcucagguaa

SEQ ID NO: 1740230 - RNA, 19 nt, Artificial Sequence
  Description of Artificial Sequence: Synthetic oligonucleotide
  Antisense strand to SEQ ID NO: 1740229
uuaccugagcaacaggccc

SEQ ID NO: 1740231 - RNA, 19 nt, Artificial Sequence
  Description of Artificial Sequence: Synthetic oligonucleotide
  Sense strand starting at position 2955 of SEQ ID NO: 1562348
aggucacgugaaggauaaa

SEQ ID NO: 1740232 - RNA, 19 nt, Artificial Sequence
  Description of Artificial Sequence: Synthetic oligonucleotide
  Antisense strand to SEQ ID NO: 1740231
uuuauccuucacgugaccu

SEQ ID NO: 1740233 - RNA, 19 nt, Artificial Sequence
  Description of Artificial Sequence: Synthetic oligonucleotide
  Sense strand starting at position 2956 of SEQ ID NO: 1562348
ggucacgugaaggauaaau

SEQ ID NO: 1740234 - RNA, 19 nt, Artificial Sequence
  Description of Artificial Sequence: Synthetic oligonucleotide
  Antisense strand to SEQ ID NO: 1740233
auuuauccuucacgugacc

SEQ ID NO: 1740235 - RNA, 19 nt, Artificial Sequence
  Description of Artificial Sequence: Synthetic oligonucleotide
  Sense strand starting at position 2986 of SEQ ID NO: 1562348
guccgcuacgagugucaga

SEQ ID NO: 1740236 - RNA, 19 nt, Artificial Sequence
  Description of Artificial Sequence: Synthetic oligonucleotide
  Antisense strand to SEQ ID NO: 1740235
ucugacacucguagcggac

SEQ ID NO: 1740237 - RNA, 19 nt, Artificial Sequence
  Description of Artificial Sequence: Synthetic oligonucleotide
  Sense strand starting at position 3625 of SEQ ID NO: 1562348
agaccagcguugggaaauu

SEQ ID NO: 1740238 - RNA, 19 nt, Artificial Sequence
  Description of Artificial Sequence: Synthetic oligonucleotide
  Antisense strand to SEQ ID NO: 1740237
aauuucccaacgcuggucu

SEQ ID NO: 1740239 - RNA, 19 nt, Artificial Sequence
  Description of Artificial Sequence: Synthetic oligonucleotide
  Sense strand starting at position 3752 of SEQ ID NO: 1562348
cggaaugcccuuuagauga

SEQ ID NO: 1740240 - RNA, 19 nt, Artificial Sequence
  Description of Artificial Sequence: Synthetic oligonucleotide
  Antisense strand to SEQ ID NO: 1740239
ucaucuaaagggcauuccg

SEQ ID NO: 1740241 - RNA, 19 nt, Artificial Sequence
  Description of Artificial Sequence: Synthetic oligonucleotide
  Sense strand starting at position 3847 of SEQ ID NO: 1562348
agucuuaauucgccugcuu

SEQ ID NO: 1740242 - RNA, 19 nt, Artificial Sequence
  Description of Artificial Sequence: Synthetic oligonucleotide
  Antisense strand to SEQ ID NO: 1740241
aagcaggcgaauuaagacu

SEQ ID NO: 1740243 - RNA, 19 nt, Artificial Sequence
  Description of Artificial Sequence: Synthetic oligonucleotide
  Sense strand starting at position 3849 of SEQ ID NO: 1562348
ucuuaauucgccugcuugu

SEQ ID NO: 1740244 - RNA, 19 nt, Artificial Sequence
  Description of Artificial Sequence: Synthetic oligonucleotide
  Antisense strand to SEQ ID NO: 1740243
acaagcaggcgaauuaaga

SEQ ID NO: 1740245 - RNA, 19 nt, Artificial Sequence
  Description of Artificial Sequence: Synthetic oligonucleotide
  Sense strand starting at position 3858 of SEQ ID NO: 1562348
gccugcuuguccuuaacca

SEQ ID NO: 1740246 - RNA, 19 nt, Artificial Sequence
  Description of Artificial Sequence: Synthetic oligonucleotide
  Antisense strand to SEQ ID NO: 1740245
ugguuaaggacaagcaggc

SEQ ID NO: 1740247 - RNA, 19 nt, Artificial Sequence
  Description of Artificial Sequence: Synthetic oligonucleotide
  Sense strand starting at position 3953 of SEQ ID NO: 1562348
gggugagcucccgaggcuu

SEQ ID NO: 1740248 - RNA, 19 nt, Artificial Sequence
  Description of Artificial Sequence: Synthetic oligonucleotide
  Antisense strand to SEQ ID NO: 1740247
aagccucgggagcucaccc

SEQ ID NO: 1740249 - RNA, 19 nt, Artificial Sequence
  Description of Artificial Sequence: Synthetic oligonucleotide
  Sense strand starting at position 95 of SEQ ID NO: 1562349
accguauguauggguauaa

SEQ ID NO: 1740250 - RNA, 19 nt, Artificial Sequence
  Description of Artificial Sequence: Synthetic oligonucleotide
  Antisense strand to SEQ ID NO: 1740249
uuauacccauacauacggu

SEQ ID NO: 1740251 - RNA, 19 nt, Artificial Sequence
  Description of Artificial Sequence: Synthetic oligonucleotide
  Sense strand starting at position 96 of SEQ ID NO: 1562349
ccguauguauggguauaau

SEQ ID NO: 1740252 - RNA, 19 nt, Artificial Sequence
  Description of Artificial Sequence: Synthetic oligonucleotide
  Antisense strand to SEQ ID NO: 1740251
auuauacccauacauacgg

SEQ ID NO: 1740253 - RNA, 19 nt, Artificial Sequence
  Description of Artificial Sequence: Synthetic oligonucleotide
  Sense strand starting at position 99 of SEQ ID NO: 1562349
uauguauggguauaauauc

SEQ ID NO: 1740254 - RNA, 19 nt, Artificial Sequence
  Description of Artificial Sequence: Synthetic oligonucleotide
  Antisense strand to SEQ ID NO: 1740253
gauauuauacccauacaua

SEQ ID NO: 1740255 - RNA, 19 nt, Artificial Sequence
  Description of Artificial Sequence: Synthetic oligonucleotide
  Sense strand starting at position 105 of SEQ ID NO: 1562349
uggguauaauauccuuaac

SEQ ID NO: 1740256 - RNA, 19 nt, Artificial Sequence
  Description of Artificial Sequence: Synthetic oligonucleotide
  Antisense strand to SEQ ID NO: 1740255
guuaaggauauuauaccca

SEQ ID NO: 1740257 - RNA, 19 nt, Artificial Sequence
  Description of Artificial Sequence: Synthetic oligonucleotide
  Sense strand starting at position 115 of SEQ ID NO: 1562349
auccuuaacuugucagucu

SEQ ID NO: 1740258 - RNA, 19 nt, Artificial Sequence
  Description of Artificial Sequence: Synthetic oligonucleotide
  Antisense strand to SEQ ID NO: 1740257
agacugacaaguuaaggau

SEQ ID NO: 1740259 - RNA, 19 nt, Artificial Sequence
  Description of Artificial Sequence: Synthetic oligonucleotide
  Sense strand starting at position 176 of SEQ ID NO: 1562349
gccauauucuaauagaguu

SEQ ID NO: 1740260 - RNA, 19 nt, Artificial Sequence
  Description of Artificial Sequence: Synthetic oligonucleotide
  Antisense strand to SEQ ID NO: 1740259
aacucuauuagaauauggc

SEQ ID NO: 1740261 - RNA, 19 nt, Artificial Sequence
  Description of Artificial Sequence: Synthetic oligonucleotide
  Sense strand starting at position 216 of SEQ ID NO: 1562349
ccauaaaggugacuguguu

SEQ ID NO: 1740262 - RNA, 19 nt, Artificial Sequence
  Description of Artificial Sequence: Synthetic oligonucleotide
  Antisense strand to SEQ ID NO: 1740261
aacacagucaccuuuaugg

SEQ ID NO: 1740263 - RNA, 19 nt, Artificial Sequence
  Description of Artificial Sequence: Synthetic oligonucleotide
  Sense strand starting at position 217 of SEQ ID NO: 1562349
cauaaaggugacuguguua

SEQ ID NO: 1740264 - RNA, 19 nt, Artificial Sequence
  Description of Artificial Sequence: Synthetic oligonucleotide
  Antisense strand to SEQ ID NO: 1740263
uaacacagucaccuuuaug

SEQ ID NO: 1740265 - RNA, 19 nt, Artificial Sequence
  Description of Artificial Sequence: Synthetic oligonucleotide
  Sense strand starting at position 224 of SEQ ID NO: 1562349
gugacuguguuauuuacau

SEQ ID NO: 1740266 - RNA, 19 nt, Artificial Sequence
  Description of Artificial Sequence: Synthetic oligonucleotide
  Antisense strand to SEQ ID NO: 1740265
auguaaauaacacagucac

SEQ ID NO: 1740267 - RNA, 19 nt, Artificial Sequence
  Description of Artificial Sequence: Synthetic oligonucleotide
  Sense strand starting at position 228 of SEQ ID NO: 1562349
cuguguuauuuacauuaac

SEQ ID NO: 1740268 - RNA, 19 nt, Artificial Sequence
  Description of Artificial Sequence: Synthetic oligonucleotide
  Antisense strand to SEQ ID NO: 1740267
guuaauguaaauaacacag

SEQ ID NO: 1740269 - RNA, 19 nt, Artificial Sequence
  Description of Artificial Sequence: Synthetic oligonucleotide
  Sense strand starting at position 299 of SEQ ID NO: 1562349
agcauuuacuaugcuguau

SEQ ID NO: 1740270 - RNA, 19 nt, Artificial Sequence
  Description of Artificial Sequence: Synthetic oligonucleotide
  Antisense strand to SEQ ID NO: 1740269
auacagcauaguaaaugcu

SEQ ID NO: 1740271 - RNA, 19 nt, Artificial Sequence
  Description of Artificial Sequence: Synthetic oligonucleotide
  Sense strand starting at position 476 of SEQ ID NO: 1562349
acauucucuuagccagagu

SEQ ID NO: 1740272 - RNA, 19 nt, Artificial Sequence
  Description of Artificial Sequence: Synthetic oligonucleotide
  Antisense strand to SEQ ID NO: 1740271
acucuggcuaagagaaugu

SEQ ID NO: 1740273 - RNA, 19 nt, Artificial Sequence
  Description of Artificial Sequence: Synthetic oligonucleotide
  Sense strand starting at position 513 of SEQ ID NO: 1562349
uugagucaccuguaugcau

SEQ ID NO: 1740274 - RNA, 19 nt, Artificial Sequence
  Description of Artificial Sequence: Synthetic oligonucleotide
  Antisense strand to SEQ ID NO: 1740273
augcauacaggugacucaa

SEQ ID NO: 1740275 - RNA, 19 nt, Artificial Sequence
  Description of Artificial Sequence: Synthetic oligonucleotide
  Sense strand starting at position 2006 of SEQ ID NO: 1562349
uaggaauugucucugaaau

SEQ ID NO: 1740276 - RNA, 19 nt, Artificial Sequence
  Description of Artificial Sequence: Synthetic oligonucleotide
  Antisense strand to SEQ ID NO: 1740275
auuucagagacaauuccua

SEQ ID NO: 1740277 - RNA, 19 nt, Artificial Sequence
  Description of Artificial Sequence: Synthetic oligonucleotide
  Sense strand starting at position 2040 of SEQ ID NO: 1562349
agauuccauuccugaagaa

SEQ ID NO: 1740278 - RNA, 19 nt, Artificial Sequence
  Description of Artificial Sequence: Synthetic oligonucleotide
  Antisense strand to SEQ ID NO: 1740277
uucuucaggaauggaaucu

SEQ ID NO: 1740279 - RNA, 19 nt, Artificial Sequence
  Description of Artificial Sequence: Synthetic oligonucleotide
  Sense strand starting at position 2080 of SEQ ID NO: 1562349
cuguuacgguauuacauua

SEQ ID NO: 1740280 - RNA, 19 nt, Artificial Sequence
  Description of Artificial Sequence: Synthetic oligonucleotide
  Antisense strand to SEQ ID NO: 1740279
uaauguaauaccguaacag

SEQ ID NO: 1740281 - RNA, 19 nt, Artificial Sequence
  Description of Artificial Sequence: Synthetic oligonucleotide
  Sense strand starting at position 2111 of SEQ ID NO: 1562349
acaacuagcugguaucaua

SEQ ID NO: 1740282 - RNA, 19 nt, Artificial Sequence
  Description of Artificial Sequence: Synthetic oligonucleotide
  Antisense strand to SEQ ID NO: 1740281
uaugauaccagcuaguugu

SEQ ID NO: 1740283 - RNA, 19 nt, Artificial Sequence
  Description of Artificial Sequence: Synthetic oligonucleotide
  Sense strand starting at position 2406 of SEQ ID NO: 1562349
ccaguuucgauagaaguag

SEQ ID NO: 1740284 - RNA, 19 nt, Artificial Sequence
  Description of Artificial Sequence: Synthetic oligonucleotide
  Antisense strand to SEQ ID NO: 1740283
cuacuucuaucgaaacugg

SEQ ID NO: 1740285 - RNA, 19 nt, Artificial Sequence
  Description of Artificial Sequence: Synthetic oligonucleotide
  Sense strand starting at position 2420 of SEQ ID NO: 1562349
aguagauauuacugacaca

SEQ ID NO: 1740286 - RNA, 19 nt, Artificial Sequence
  Description of Artificial Sequence: Synthetic oligonucleotide
  Antisense strand to SEQ ID NO: 1740285
ugugucaguaauaucuacu

SEQ ID NO: 1740287 - RNA, 19 nt, Artificial Sequence
  Description of Artificial Sequence: Synthetic oligonucleotide
  Sense strand starting at position 2441 of SEQ ID NO: 1562349
aguucuuuguaagacagua

SEQ ID NO: 1740288 - RNA, 19 nt, Artificial Sequence
  Description of Artificial Sequence: Synthetic oligonucleotide
  Antisense strand to SEQ ID NO: 1740287
uacugucuuacaaagaacu

SEQ ID NO: 1740289 - RNA, 19 nt, Artificial Sequence
  Description of Artificial Sequence: Synthetic oligonucleotide
  Sense strand starting at position 2603 of SEQ ID NO: 1562349
ccuaaaguaucucugaguu

SEQ ID NO: 1740290 - RNA, 19 nt, Artificial Sequence
  Description of Artificial Sequence: Synthetic oligonucleotide
  Antisense strand to SEQ ID NO: 1740289
aacucagagauacuuuagg

SEQ ID NO: 1740291 - RNA, 19 nt, Artificial Sequence
  Description of Artificial Sequence: Synthetic oligonucleotide
  Sense strand starting at position 2713 of SEQ ID NO: 1562349
uaaggacucuagugauuau

SEQ ID NO: 1740292 - RNA, 19 nt, Artificial Sequence
  Description of Artificial Sequence: Synthetic oligonucleotide
  Antisense strand to SEQ ID NO: 1740291
auaaucacuagaguccuua

SEQ ID NO: 1740293 - RNA, 19 nt, Artificial Sequence
  Description of Artificial Sequence: Synthetic oligonucleotide
  Sense strand starting at position 2720 of SEQ ID NO: 1562349
ucuagugauuauuccauau

SEQ ID NO: 1740294 - RNA, 19 nt, Artificial Sequence
  Description of Artificial Sequence: Synthetic oligonucleotide
  Antisense strand to SEQ ID NO: 1740293
auauggaauaaucacuaga

SEQ ID NO: 1740295 - RNA, 19 nt, Artificial Sequence
  Description of Artificial Sequence: Synthetic oligonucleotide
  Sense strand starting at position 2724 of SEQ ID NO: 1562349
gugauuauuccauauaucc

SEQ ID NO: 1740296 - RNA, 19 nt, Artificial Sequence
  Description of Artificial Sequence: Synthetic oligonucleotide
  Antisense strand to SEQ ID NO: 1740295
ggauauauggaauaaucac

SEQ ID NO: 1740297 - RNA, 19 nt, Artificial Sequence
  Description of Artificial Sequence: Synthetic oligonucleotide
  Sense strand starting at position 2776 of SEQ ID NO: 1562349
auguuaauacaaggucaga

SEQ ID NO: 1740298 - RNA, 19 nt, Artificial Sequence
  Description of Artificial Sequence: Synthetic oligonucleotide
  Antisense strand to SEQ ID NO: 1740297
ucugaccuuguauuaacau

SEQ ID NO: 1740299 - RNA, 19 nt, Artificial Sequence
  Description of Artificial Sequence: Synthetic oligonucleotide
  Sense strand starting at position 2830 of SEQ ID NO: 1562349
ccaaaugugcuuugcagau

SEQ ID NO: 1740300 - RNA, 19 nt, Artificial Sequence
  Description of Artificial Sequence: Synthetic oligonucleotide
  Antisense strand to SEQ ID NO: 1740299
aucugcaaagcacauuugg

SEQ ID NO: 1740301 - RNA, 19 nt, Artificial Sequence
  Description of Artificial Sequence: Synthetic oligonucleotide
  Sense strand starting at position 2832 of SEQ ID NO: 1562349
aaaugugcuuugcagauaa

SEQ ID NO: 1740302 - RNA, 19 nt, Artificial Sequence
  Description of Artificial Sequence: Synthetic oligonucleotide
  Antisense strand to SEQ ID NO: 1740301
uuaucugcaaagcacauuu

SEQ ID NO: 1740303 - RNA, 19 nt, Artificial Sequence
  Description of Artificial Sequence: Synthetic oligonucleotide
  Sense strand starting at position 2836 of SEQ ID NO: 1562349
gugcuuugcagauaagcua

SEQ ID NO: 1740304 - RNA, 19 nt, Artificial Sequence
  Description of Artificial Sequence: Synthetic oligonucleotide
  Antisense strand to SEQ ID NO: 1740303
uagcuuaucugcaaagcac

SEQ ID NO: 1740305 - RNA, 19 nt, Artificial Sequence
  Description of Artificial Sequence: Synthetic oligonucleotide
  Sense strand starting at position 3084 of SEQ ID NO: 1562349
ugugaaggucuacgaacaa

SEQ ID NO: 1740306 - RNA, 19 nt, Artificial Sequence
  Description of Artificial Sequence: Synthetic oligonucleotide
  Antisense strand to SEQ ID NO: 1740305
uuguucguagaccuucaca

SEQ ID NO: 1740307 - RNA, 19 nt, Artificial Sequence
  Description of Artificial Sequence: Synthetic oligonucleotide
  Sense strand starting at position 3217 of SEQ ID NO: 1562349
guuuccacaggcuguuaaa

SEQ ID NO: 1740308 - RNA, 19 nt, Artificial Sequence
  Description of Artificial Sequence: Synthetic oligonucleotide
  Antisense strand to SEQ ID NO: 1740307
uuuaacagccuguggaaac

SEQ ID NO: 1740309 - RNA, 19 nt, Artificial Sequence
  Description of Artificial Sequence: Synthetic oligonucleotide
  Sense strand starting at position 3268 of SEQ ID NO: 1562349
gucucuuggugucuguauu

SEQ ID NO: 1740310 - RNA, 19 nt, Artificial Sequence
  Description of Artificial Sequence: Synthetic oligonucleotide
  Antisense strand to SEQ ID NO: 1740309
aauacagacaccaagagac

SEQ ID NO: 1740311 - RNA, 19 nt, Artificial Sequence
  Description of Artificial Sequence: Synthetic oligonucleotide
  Sense strand starting at position 3810 of SEQ ID NO: 1562349
cuaaauggcaggugcaaua

SEQ ID NO: 1740312 - RNA, 19 nt, Artificial Sequence
  Description of Artificial Sequence: Synthetic oligonucleotide
  Antisense strand to SEQ ID NO: 1740311
uauugcaccugccauuuag

SEQ ID NO: 1740313 - RNA, 19 nt, Artificial Sequence
  Description of Artificial Sequence: Synthetic oligonucleotide
  Sense strand starting at position 3820 of SEQ ID NO: 1562349
ggugcaauauguucucuaa

SEQ ID NO: 1740314 - RNA, 19 nt, Artificial Sequence
  Description of Artificial Sequence: Synthetic oligonucleotide
  Antisense strand to SEQ ID NO: 1740313
uuagagaacauauugcacc

SEQ ID NO: 1740315 - RNA, 19 nt, Artificial Sequence
  Description of Artificial Sequence: Synthetic oligonucleotide
  Sense strand starting at position 3822 of SEQ ID NO: 1562349
ugcaauauguucucuaaug

SEQ ID NO: 1740316 - RNA, 19 nt, Artificial Sequence
  Description of Artificial Sequence: Synthetic oligonucleotide
  Antisense strand to SEQ ID NO: 1740315
cauuagagaacauauugca

SEQ ID NO: 1740317 - RNA, 19 nt, Artificial Sequence
  Description of Artificial Sequence: Synthetic oligonucleotide
  Sense strand starting at position 3823 of SEQ ID NO: 1562349
gcaauauguucucuaaugu

SEQ ID NO: 1740318 - RNA, 19 nt, Artificial Sequence
  Description of Artificial Sequence: Synthetic oligonucleotide
  Antisense strand to SEQ ID NO: 1740317
acauuagagaacauauugc

SEQ ID NO: 1740319 - RNA, 19 nt, Artificial Sequence
  Description of Artificial Sequence: Synthetic oligonucleotide
  Sense strand starting at position 3829 of SEQ ID NO: 1562349
uguucucuaaugugacagu

SEQ ID NO: 1740320 - RNA, 19 nt, Artificial Sequence
  Description of Artificial Sequence: Synthetic oligonucleotide
  Antisense strand to SEQ ID NO: 1740319
acugucacauuagagaaca

SEQ ID NO: 1740321 - RNA, 19 nt, Artificial Sequence
  Description of Artificial Sequence: Synthetic oligonucleotide
  Sense strand starting at position 3892 of SEQ ID NO: 1562349
uaacuaaaguaguaugaag

SEQ ID NO: 1740322 - RNA, 19 nt, Artificial Sequence
  Description of Artificial Sequence: Synthetic oligonucleotide
  Antisense strand to SEQ ID NO: 1740321
cuucauacuacuuuaguua

SEQ ID NO: 1740323 - RNA, 19 nt, Artificial Sequence
  Description of Artificial Sequence: Synthetic oligonucleotide
  Sense strand starting at position 3894 of SEQ ID NO: 1562349
acuaaaguaguaugaagua

SEQ ID NO: 1740324 - RNA, 19 nt, Artificial Sequence
  Description of Artificial Sequence: Synthetic oligonucleotide
  Antisense strand to SEQ ID NO: 1740323
uacuucauacuacuuuagu

SEQ ID NO: 1740325 - RNA, 19 nt, Artificial Sequence
  Description of Artificial Sequence: Synthetic oligonucleotide
  Sense strand starting at position 3899 of SEQ ID NO: 1562349
aguaguaugaaguauuaca

SEQ ID NO: 1740326 - RNA, 19 nt, Artificial Sequence
  Description of Artificial Sequence: Synthetic oligonucleotide
  Antisense strand to SEQ ID NO: 1740325
uguaauacuucauacuacu

SEQ ID NO: 1740327 - RNA, 19 nt, Artificial Sequence
  Description of Artificial Sequence: Synthetic oligonucleotide
  Sense strand starting at position 3966 of SEQ ID NO: 1562349
cuaguuaaguacuaccuca

SEQ ID NO: 1740328 - RNA, 19 nt, Artificial Sequence
  Description of Artificial Sequence: Synthetic oligonucleotide
  Antisense strand to SEQ ID NO: 1740327
ugagguaguacuuaacuag

SEQ ID NO: 1740329 - RNA, 19 nt, Artificial Sequence
  Description of Artificial Sequence: Synthetic oligonucleotide
  Sense strand starting at position 387 of SEQ ID NO: 1562350
agauaaaucuaugagauac

SEQ ID NO: 1740330 - RNA, 19 nt, Artificial Sequence
  Description of Artificial Sequence: Synthetic oligonucleotide
  Antisense strand to SEQ ID NO: 1740329
guaucucauagauuuaucu

SEQ ID NO: 1740331 - RNA, 19 nt, Artificial Sequence
  Description of Artificial Sequence: Synthetic oligonucleotide
  Sense strand starting at position 445 of SEQ ID NO: 1562350
gugagcaucuacuugguau

SEQ ID NO: 1740332 - RNA, 19 nt, Artificial Sequence
  Description of Artificial Sequence: Synthetic oligonucleotide
  Antisense strand to SEQ ID NO: 1740331
auaccaaguagaugcucac

SEQ ID NO: 1740333 - RNA, 19 nt, Artificial Sequence
  Description of Artificial Sequence: Synthetic oligonucleotide
  Sense strand starting at position 489 of SEQ ID NO: 1562350
ggagcaauccaggagcuga

SEQ ID NO: 1740334 - RNA, 19 nt, Artificial Sequence
  Description of Artificial Sequence: Synthetic oligonucleotide
  Antisense strand to SEQ ID NO: 1740333
ucagcuccuggauugcucc

SEQ ID NO: 1740335 - RNA, 19 nt, Artificial Sequence
  Description of Artificial Sequence: Synthetic oligonucleotide
  Sense strand starting at position 503 of SEQ ID NO: 1562350
gcugacaaugcugagaaau

SEQ ID NO: 1740336 - RNA, 19 nt, Artificial Sequence
  Description of Artificial Sequence: Synthetic oligonucleotide
  Antisense strand to SEQ ID NO: 1740335
auuucucagcauugucagc

SEQ ID NO: 1740337 - RNA, 19 nt, Artificial Sequence
  Description of Artificial Sequence: Synthetic oligonucleotide
  Sense strand starting at position 505 of SEQ ID NO: 1562350
ugacaaugcugagaaauag

SEQ ID NO: 1740338 - RNA, 19 nt, Artificial Sequence
  Description of Artificial Sequence: Synthetic oligonucleotide
  Antisense strand to SEQ ID NO: 1740337
cuauuucucagcauuguca

SEQ ID NO: 1740339 - RNA, 19 nt, Artificial Sequence
  Description of Artificial Sequence: Synthetic oligonucleotide
  Sense strand starting at position 693 of SEQ ID NO: 1562350
cuggcauacuucuaauaug

SEQ ID NO: 1740340 - RNA, 19 nt, Artificial Sequence
  Description of Artificial Sequence: Synthetic oligonucleotide
  Antisense strand to SEQ ID NO: 1740339
cauauuagaaguaugccag

SEQ ID NO: 1740341 - RNA, 19 nt, Artificial Sequence
  Description of Artificial Sequence: Synthetic oligonucleotide
  Sense strand starting at position 735 of SEQ ID NO: 1562350
gccugugugcaugcaugau

SEQ ID NO: 1740342 - RNA, 19 nt, Artificial Sequence
  Description of Artificial Sequence: Synthetic oligonucleotide
  Antisense strand to SEQ ID NO: 1740341
aucaugcaugcacacaggc

SEQ ID NO: 1740343 - RNA, 19 nt, Artificial Sequence
  Description of Artificial Sequence: Synthetic oligonucleotide
  Sense strand starting at position 739 of SEQ ID NO: 1562350
gugugcaugcaugauagau

SEQ ID NO: 1740344 - RNA, 19 nt, Artificial Sequence
  Description of Artificial Sequence: Synthetic oligonucleotide
  Antisense strand to SEQ ID NO: 1740343
aucuaucaugcaugcacac

SEQ ID NO: 1740345 - RNA, 19 nt, Artificial Sequence
  Description of Artificial Sequence: Synthetic oligonucleotide
  Sense strand starting at position 745 of SEQ ID NO: 1562350
augcaugauagaugcguaa

SEQ ID NO: 1740346 - RNA, 19 nt, Artificial Sequence
  Description of Artificial Sequence: Synthetic oligonucleotide
  Antisense strand to SEQ ID NO: 1740345
uuacgcaucuaucaugcau

SEQ ID NO: 1740347 - RNA, 19 nt, Artificial Sequence
  Description of Artificial Sequence: Synthetic oligonucleotide
  Sense strand starting at position 747 of SEQ ID NO: 1562350
gcaugauagaugcguaaca

SEQ ID NO: 1740348 - RNA, 19 nt, Artificial Sequence
  Description of Artificial Sequence: Synthetic oligonucleotide
  Antisense strand to SEQ ID NO: 1740347
uguuacgcaucuaucaugc

SEQ ID NO: 1740349 - RNA, 19 nt, Artificial Sequence
  Description of Artificial Sequence: Synthetic oligonucleotide
  Sense strand starting at position 749 of SEQ ID NO: 1562350
augauagaugcguaacaga

SEQ ID NO: 1740350 - RNA, 19 nt, Artificial Sequence
  Description of Artificial Sequence: Synthetic oligonucleotide
  Antisense strand to SEQ ID NO: 1740349
ucuguuacgcaucuaucau

SEQ ID NO: 1740351 - RNA, 19 nt, Artificial Sequence
  Description of Artificial Sequence: Synthetic oligonucleotide
  Sense strand starting at position 752 of SEQ ID NO: 1562350
auagaugcguaacagagau

SEQ ID NO: 1740352 - RNA, 19 nt, Artificial Sequence
  Description of Artificial Sequence: Synthetic oligonucleotide
  Antisense strand to SEQ ID NO: 1740351
aucucuguuacgcaucuau

SEQ ID NO: 1740353 - RNA, 19 nt, Artificial Sequence
  Description of Artificial Sequence: Synthetic oligonucleotide
  Sense strand starting at position 756 of SEQ ID NO: 1562350
augcguaacagagaugauu

SEQ ID NO: 1740354 - RNA, 19 nt, Artificial Sequence
  Description of Artificial Sequence: Synthetic oligonucleotide
  Antisense strand to SEQ ID NO: 1740353
aaucaucucuguuacgcau

SEQ ID NO: 1740355 - RNA, 19 nt, Artificial Sequence
  Description of Artificial Sequence: Synthetic oligonucleotide
  Sense strand starting at position 776 of SEQ ID NO: 1562350
cucaaucaccuuugacgua

SEQ ID NO: 1740356 - RNA, 19 nt, Artificial Sequence
  Description of Artificial Sequence: Synthetic oligonucleotide
  Antisense strand to SEQ ID NO: 1740355
uacgucaaaggugauugag

SEQ ID NO: 1740357 - RNA, 19 nt, Artificial Sequence
  Description of Artificial Sequence: Synthetic oligonucleotide
  Sense strand starting at position 777 of SEQ ID NO: 1562350
ucaaucaccuuugacguaa

SEQ ID NO: 1740358 - RNA, 19 nt, Artificial Sequence
  Description of Artificial Sequence: Synthetic oligonucleotide
  Antisense strand to SEQ ID NO: 1740357
uuacgucaaaggugauuga

SEQ ID NO: 1740359 - RNA, 19 nt, Artificial Sequence
  Description of Artificial Sequence: Synthetic oligonucleotide
  Sense strand starting at position 819 of SEQ ID NO: 1562350
aauggugacuucuacauga

SEQ ID NO: 1740360 - RNA, 19 nt, Artificial Sequence
  Description of Artificial Sequence: Synthetic oligonucleotide
  Antisense strand to SEQ ID NO: 1740359
ucauguagaagucaccauu

SEQ ID NO: 1740361 - RNA, 19 nt, Artificial Sequence
  Description of Artificial Sequence: Synthetic oligonucleotide
  Sense strand starting at position 823 of SEQ ID NO: 1562350
gugacuucuacaugaacgu

SEQ ID NO: 1740362 - RNA, 19 nt, Artificial Sequence
  Description of Artificial Sequence: Synthetic oligonucleotide
  Antisense strand to SEQ ID NO: 1740361
acguucauguagaagucac

SEQ ID NO: 1740363 - RNA, 19 nt, Artificial Sequence
  Description of Artificial Sequence: Synthetic oligonucleotide
  Sense strand starting at position 829 of SEQ ID NO: 1562350
ucuacaugaacgugaagua

SEQ ID NO: 1740364 - RNA, 19 nt, Artificial Sequence
  Description of Artificial Sequence: Synthetic oligonucleotide
  Antisense strand to SEQ ID NO: 1740363
uacuucacguucauguaga

SEQ ID NO: 1740365 - RNA, 19 nt, Artificial Sequence
  Description of Artificial Sequence: Synthetic oligonucleotide
  Sense strand starting at position 830 of SEQ ID NO: 1562350
cuacaugaacgugaaguau

SEQ ID NO: 1740366 - RNA, 19 nt, Artificial Sequence
  Description of Artificial Sequence: Synthetic oligonucleotide
  Antisense strand to SEQ ID NO: 1740365
auacuucacguucauguag

SEQ ID NO: 1740367 - RNA, 19 nt, Artificial Sequence
  Description of Artificial Sequence: Synthetic oligonucleotide
  Sense strand starting at position 834 of SEQ ID NO: 1562350
augaacgugaaguauuaua

SEQ ID NO: 1740368 - RNA, 19 nt, Artificial Sequence
  Description of Artificial Sequence: Synthetic oligonucleotide
  Antisense strand to SEQ ID NO: 1740367
uauaauacuucacguucau

SEQ ID NO: 1740369 - RNA, 19 nt, Artificial Sequence
  Description of Artificial Sequence: Synthetic oligonucleotide
  Sense strand starting at position 1026 of SEQ ID NO: 1562350
ggcaucuguuagguaucaa

SEQ ID NO: 1740370 - RNA, 19 nt, Artificial Sequence
  Description of Artificial Sequence: Synthetic oligonucleotide
  Antisense strand to SEQ ID NO: 1740369
uugauaccuaacagaugcc

SEQ ID NO: 1740371 - RNA, 19 nt, Artificial Sequence
  Description of Artificial Sequence: Synthetic oligonucleotide
  Sense strand starting at position 1118 of SEQ ID NO: 1562350
aaggcucucugacagaguu

SEQ ID NO: 1740372 - RNA, 19 nt, Artificial Sequence
  Description of Artificial Sequence: Synthetic oligonucleotide
  Antisense strand to SEQ ID NO: 1740371
aacucugucagagagccuu

SEQ ID NO: 1740373 - RNA, 19 nt, Artificial Sequence
  Description of Artificial Sequence: Synthetic oligonucleotide
  Sense strand starting at position 1258 of SEQ ID NO: 1562350
cauagccauguguggaaua

SEQ ID NO: 1740374 - RNA, 19 nt, Artificial Sequence
  Description of Artificial Sequence: Synthetic oligonucleotide
  Antisense strand to SEQ ID NO: 1740373
uauuccacacauggcuaug

SEQ ID NO: 1740375 - RNA, 19 nt, Artificial Sequence
  Description of Artificial Sequence: Synthetic oligonucleotide
  Sense strand starting at position 1489 of SEQ ID NO: 1562350
accguauguauggguauaa

SEQ ID NO: 1740376 - RNA, 19 nt, Artificial Sequence
  Description of Artificial Sequence: Synthetic oligonucleotide
  Antisense strand to SEQ ID NO: 1740375
uuauacccauacauacggu

SEQ ID NO: 1740377 - RNA, 19 nt, Artificial Sequence
  Description of Artificial Sequence: Synthetic oligonucleotide
  Sense strand starting at position 1490 of SEQ ID NO: 1562350
ccguauguauggguauaau

SEQ ID NO: 1740378 - RNA, 19 nt, Artificial Sequence
  Description of Artificial Sequence: Synthetic oligonucleotide
  Antisense strand to SEQ ID NO: 1740377
auuauacccauacauacgg

SEQ ID NO: 1740379 - RNA, 19 nt, Artificial Sequence
  Description of Artificial Sequence: Synthetic oligonucleotide
  Sense strand starting at position 1493 of SEQ ID NO: 1562350
uauguauggguauaauauc

SEQ ID NO: 1740380 - RNA, 19 nt, Artificial Sequence
  Description of Artificial Sequence: Synthetic oligonucleotide
  Antisense strand to SEQ ID NO: 1740379
gauauuauacccauacaua

SEQ ID NO: 1740381 - RNA, 19 nt, Artificial Sequence
  Description of Artificial Sequence: Synthetic oligonucleotide
  Sense strand starting at position 1499 of SEQ ID NO: 1562350
uggguauaauauccuuaac

SEQ ID NO: 1740382 - RNA, 19 nt, Artificial Sequence
  Description of Artificial Sequence: Synthetic oligonucleotide
  Antisense strand to SEQ ID NO: 1740381
guuaaggauauuauaccca

SEQ ID NO: 1740383 - RNA, 19 nt, Artificial Sequence
  Description of Artificial Sequence: Synthetic oligonucleotide
  Sense strand starting at position 1509 of SEQ ID NO: 1562350
auccuuaacuugucagucu

SEQ ID NO: 1740384 - RNA, 19 nt, Artificial Sequence
  Description of Artificial Sequence: Synthetic oligonucleotide
  Antisense strand to SEQ ID NO: 1740383
agacugacaaguuaaggau

SEQ ID NO: 1740385 - RNA, 19 nt, Artificial Sequence
  Description of Artificial Sequence: Synthetic oligonucleotide
  Sense strand starting at position 1610 of SEQ ID NO: 1562350
ccauaaaggugacuguguu

SEQ ID NO: 1740386 - RNA, 19 nt, Artificial Sequence
  Description of Artificial Sequence: Synthetic oligonucleotide
  Antisense strand to SEQ ID NO: 1740385
aacacagucaccuuuaugg

SEQ ID NO: 1740387 - RNA, 19 nt, Artificial Sequence
  Description of Artificial Sequence: Synthetic oligonucleotide
  Sense strand starting at position 1611 of SEQ ID NO: 1562350
cauaaaggugacuguguua

SEQ ID NO: 1740388 - RNA, 19 nt, Artificial Sequence
  Description of Artificial Sequence: Synthetic oligonucleotide
  Antisense strand to SEQ ID NO: 1740387
uaacacagucaccuuuaug

SEQ ID NO: 1740389 - RNA, 19 nt, Artificial Sequence
  Description of Artificial Sequence: Synthetic oligonucleotide
  Sense strand starting at position 1618 of SEQ ID NO: 1562350
gugacuguguuauuuacau

SEQ ID NO: 1740390 - RNA, 19 nt, Artificial Sequence
  Description of Artificial Sequence: Synthetic oligonucleotide
  Antisense strand to SEQ ID NO: 1740389
auguaaauaacacagucac

SEQ ID NO: 1740391 - RNA, 19 nt, Artificial Sequence
  Description of Artificial Sequence: Synthetic oligonucleotide
  Sense strand starting at position 1622 of SEQ ID NO: 1562350
cuguguuauuuacauuaac

SEQ ID NO: 1740392 - RNA, 19 nt, Artificial Sequence
  Description of Artificial Sequence: Synthetic oligonucleotide
  Antisense strand to SEQ ID NO: 1740391
guuaauguaaauaacacag

SEQ ID NO: 1740393 - RNA, 19 nt, Artificial Sequence
  Description of Artificial Sequence: Synthetic oligonucleotide
  Sense strand starting at position 1693 of SEQ ID NO: 1562350
agcauuuacuaugcuguau

SEQ ID NO: 1740394 - RNA, 19 nt, Artificial Sequence
  Description of Artificial Sequence: Synthetic oligonucleotide
  Antisense strand to SEQ ID NO: 1740393
auacagcauaguaaaugcu

SEQ ID NO: 1740395 - RNA, 19 nt, Artificial Sequence
  Description of Artificial Sequence: Synthetic oligonucleotide
  Sense strand starting at position 1870 of SEQ ID NO: 1562350
acauucucuuagccagagu

SEQ ID NO: 1740396 - RNA, 19 nt, Artificial Sequence
  Description of Artificial Sequence: Synthetic oligonucleotide
  Antisense strand to SEQ ID NO: 1740395
acucuggcuaagagaaugu

SEQ ID NO: 1740397 - RNA, 19 nt, Artificial Sequence
  Description of Artificial Sequence: Synthetic oligonucleotide
  Sense strand starting at position 1907 of SEQ ID NO: 1562350
uugagucaccuguaugcau

SEQ ID NO: 1740398 - RNA, 19 nt, Artificial Sequence
  Description of Artificial Sequence: Synthetic oligonucleotide
  Antisense strand to SEQ ID NO: 1740397
augcauacaggugacucaa

SEQ ID NO: 1740399 - RNA, 19 nt, Artificial Sequence
  Description of Artificial Sequence: Synthetic oligonucleotide
  Sense strand starting at position 3400 of SEQ ID NO: 1562350
uaggaauugucucugaaau

SEQ ID NO: 1740400 - RNA, 19 nt, Artificial Sequence
  Description of Artificial Sequence: Synthetic oligonucleotide
  Antisense strand to SEQ ID NO: 1740399
auuucagagacaauuccua

SEQ ID NO: 1740401 - RNA, 19 nt, Artificial Sequence
  Description of Artificial Sequence: Synthetic oligonucleotide
  Sense strand starting at position 3434 of SEQ ID NO: 1562350
agauuccauuccugaagaa

SEQ ID NO: 1740402 - RNA, 19 nt, Artificial Sequence
  Description of Artificial Sequence: Synthetic oligonucleotide
  Antisense strand to SEQ ID NO: 1740401
uucuucaggaauggaaucu

SEQ ID NO: 1740403 - RNA, 19 nt, Artificial Sequence
  Description of Artificial Sequence: Synthetic oligonucleotide
  Sense strand starting at position 3505 of SEQ ID NO: 1562350
acaacuagcugguaucaua

SEQ ID NO: 1740404 - RNA, 19 nt, Artificial Sequence
  Description of Artificial Sequence: Synthetic oligonucleotide
  Antisense strand to SEQ ID NO: 1740403
uaugauaccagcuaguugu

SEQ ID NO: 1740405 - RNA, 19 nt, Artificial Sequence
  Description of Artificial Sequence: Synthetic oligonucleotide
  Sense strand starting at position 3800 of SEQ ID NO: 1562350
ccaguuucgauagaaguag

SEQ ID NO: 1740406 - RNA, 19 nt, Artificial Sequence
  Description of Artificial Sequence: Synthetic oligonucleotide
  Antisense strand to SEQ ID NO: 1740405
cuacuucuaucgaaacugg

SEQ ID NO: 1740407 - RNA, 19 nt, Artificial Sequence
  Description of Artificial Sequence: Synthetic oligonucleotide
  Sense strand starting at position 3814 of SEQ ID NO: 1562350
aguagauauuacugacaca

SEQ ID NO: 1740408 - RNA, 19 nt, Artificial Sequence
  Description of Artificial Sequence: Synthetic oligonucleotide
  Antisense strand to SEQ ID NO: 1740407
ugugucaguaauaucuacu

SEQ ID NO: 1740409 - RNA, 19 nt, Artificial Sequence
  Description of Artificial Sequence: Synthetic oligonucleotide
  Sense strand starting at position 76 of SEQ ID NO: 1562351
gcaauaaacggacgaugua

SEQ ID NO: 1740410 - RNA, 19 nt, Artificial Sequence
  Description of Artificial Sequence: Synthetic oligonucleotide
  Antisense strand to SEQ ID NO: 1740409
uacaucguccguuuauugc

SEQ ID NO: 1740411 - RNA, 19 nt, Artificial Sequence
  Description of Artificial Sequence: Synthetic oligonucleotide
  Sense strand starting at position 110 of SEQ ID NO: 1562351
agguaaggcuagcugauaa

SEQ ID NO: 1740412 - RNA, 19 nt, Artificial Sequence
  Description of Artificial Sequence: Synthetic oligonucleotide
  Antisense strand to SEQ ID NO: 1740411
uuaucagcuagccuuaccu

SEQ ID NO: 1740413 - RNA, 19 nt, Artificial Sequence
  Description of Artificial Sequence: Synthetic oligonucleotide
  Sense strand starting at position 163 of SEQ ID NO: 1562351
uugcaauuagggugguaaa

SEQ ID NO: 1740414 - RNA, 19 nt, Artificial Sequence
  Description of Artificial Sequence: Synthetic oligonucleotide
  Antisense strand to SEQ ID NO: 1740413
uuuaccacccuaauugcaa

SEQ ID NO: 1740415 - RNA, 19 nt, Artificial Sequence
  Description of Artificial Sequence: Synthetic oligonucleotide
  Sense strand starting at position 731 of SEQ ID NO: 1562351
gcuggacuuaccgagaggu

SEQ ID NO: 1740416 - RNA, 19 nt, Artificial Sequence
  Description of Artificial Sequence: Synthetic oligonucleotide
  Antisense strand to SEQ ID NO: 1740415
accucucgguaaguccagc

SEQ ID NO: 1740417 - RNA, 19 nt, Artificial Sequence
  Description of Artificial Sequence: Synthetic oligonucleotide
  Sense strand starting at position 733 of SEQ ID NO: 1562351
uggacuuaccgagagguua

SEQ ID NO: 1740418 - RNA, 19 nt, Artificial Sequence
  Description of Artificial Sequence: Synthetic oligonucleotide
  Antisense strand to SEQ ID NO: 1740417
uaaccucucgguaagucca

SEQ ID NO: 1740419 - RNA, 19 nt, Artificial Sequence
  Description of Artificial Sequence: Synthetic oligonucleotide
  Sense strand starting at position 1848 of SEQ ID NO: 1562351
cgcgaauuccgaccgcaaa

SEQ ID NO: 1740420 - RNA, 19 nt, Artificial Sequence
  Description of Artificial Sequence: Synthetic oligonucleotide
  Antisense strand to SEQ ID NO: 1740419
uuugcggucggaauucgcg

SEQ ID NO: 1740421 - RNA, 19 nt, Artificial Sequence
  Description of Artificial Sequence: Synthetic oligonucleotide
  Sense strand starting at position 1932 of SEQ ID NO: 1562351
gagcgaucucuaggaaccu

SEQ ID NO: 1740422 - RNA, 19 nt, Artificial Sequence
  Description of Artificial Sequence: Synthetic oligonucleotide
  Antisense strand to SEQ ID NO: 1740421
agguuccuagagaucgcuc

SEQ ID NO: 1740423 - RNA, 19 nt, Artificial Sequence
  Description of Artificial Sequence: Synthetic oligonucleotide
  Sense strand starting at position 1955 of SEQ ID NO: 1562351
cgcagcgaucucuugcaca

SEQ ID NO: 1740424 - RNA, 19 nt, Artificial Sequence
  Description of Artificial Sequence: Synthetic oligonucleotide
  Antisense strand to SEQ ID NO: 1740423
ugugcaagagaucgcugcg

SEQ ID NO: 1740425 - RNA, 19 nt, Artificial Sequence
  Description of Artificial Sequence: Synthetic oligonucleotide
  Sense strand starting at position 2179 of SEQ ID NO: 1562351
uuaauuggucgcuauuaac

SEQ ID NO: 1740426 - RNA, 19 nt, Artificial Sequence
  Description of Artificial Sequence: Synthetic oligonucleotide
  Antisense strand to SEQ ID NO: 1740425
guuaauagcgaccaauuaa

SEQ ID NO: 1740427 - RNA, 19 nt, Artificial Sequence
  Description of Artificial Sequence: Synthetic oligonucleotide
  Sense strand starting at position 2219 of SEQ ID NO: 1562351
cacacagaagucugauugu

SEQ ID NO: 1740428 - RNA, 19 nt, Artificial Sequence
  Description of Artificial Sequence: Synthetic oligonucleotide
  Antisense strand to SEQ ID NO: 1740427
acaaucagacuucugugug

SEQ ID NO: 1740429 - RNA, 19 nt, Artificial Sequence
  Description of Artificial Sequence: Synthetic oligonucleotide
  Sense strand starting at position 2222 of SEQ ID NO: 1562351
acagaagucugauugugag

SEQ ID NO: 1740430 - RNA, 19 nt, Artificial Sequence
  Description of Artificial Sequence: Synthetic oligonucleotide
  Antisense strand to SEQ ID NO: 1740429
cucacaaucagacuucugu

SEQ ID NO: 1740431 - RNA, 19 nt, Artificial Sequence
  Description of Artificial Sequence: Synthetic oligonucleotide
  Sense strand starting at position 2276 of SEQ ID NO: 1562351
gcugcagacguguuuacau

SEQ ID NO: 1740432 - RNA, 19 nt, Artificial Sequence
  Description of Artificial Sequence: Synthetic oligonucleotide
  Antisense strand to SEQ ID NO: 1740431
auguaaacacgucugcagc

SEQ ID NO: 1740433 - RNA, 19 nt, Artificial Sequence
  Description of Artificial Sequence: Synthetic oligonucleotide
  Sense strand starting at position 2278 of SEQ ID NO: 1562351
ugcagacguguuuacauuu

SEQ ID NO: 1740434 - RNA, 19 nt, Artificial Sequence
  Description of Artificial Sequence: Synthetic oligonucleotide
  Antisense strand to SEQ ID NO: 1740433
aaauguaaacacgucugca

SEQ ID NO: 1740435 - RNA, 19 nt, Artificial Sequence
  Description of Artificial Sequence: Synthetic oligonucleotide
  Sense strand starting at position 2288 of SEQ ID NO: 1562351
uuuacauuucugugguuua

SEQ ID NO: 1740436 - RNA, 19 nt, Artificial Sequence
  Description of Artificial Sequence: Synthetic oligonucleotide
  Antisense strand to SEQ ID NO: 1740435
uaaaccacagaaauguaaa

SEQ ID NO: 1740437 - RNA, 19 nt, Artificial Sequence
  Description of Artificial Sequence: Synthetic oligonucleotide
  Sense strand starting at position 2298 of SEQ ID NO: 1562351
ugugguuuagucuauaacu

SEQ ID NO: 1740438 - RNA, 19 nt, Artificial Sequence
  Description of Artificial Sequence: Synthetic oligonucleotide
  Antisense strand to SEQ ID NO: 1740437
aguuauagacuaaaccaca

SEQ ID NO: 1740439 - RNA, 19 nt, Artificial Sequence
  Description of Artificial Sequence: Synthetic oligonucleotide
  Sense strand starting at position 2300 of SEQ ID NO: 1562351
ugguuuagucuauaacuuu

SEQ ID NO: 1740440 - RNA, 19 nt, Artificial Sequence
  Description of Artificial Sequence: Synthetic oligonucleotide
  Antisense strand to SEQ ID NO: 1740439
aaaguuauagacuaaacca

SEQ ID NO: 1740441 - RNA, 19 nt, Artificial Sequence
  Description of Artificial Sequence: Synthetic oligonucleotide
  Sense strand starting at position 2333 of SEQ ID NO: 1562351
ucagaauucugcuccauga

SEQ ID NO: 1740442 - RNA, 19 nt, Artificial Sequence
  Description of Artificial Sequence: Synthetic oligonucleotide
  Antisense strand to SEQ ID NO: 1740441
ucauggagcagaauucuga

SEQ ID NO: 1740443 - RNA, 19 nt, Artificial Sequence
  Description of Artificial Sequence: Synthetic oligonucleotide
  Sense strand starting at position 2709 of SEQ ID NO: 1562351
gacagccuucgugaaacua

SEQ ID NO: 1740444 - RNA, 19 nt, Artificial Sequence
  Description of Artificial Sequence: Synthetic oligonucleotide
  Antisense strand to SEQ ID NO: 1740443
uaguuucacgaaggcuguc

SEQ ID NO: 1740445 - RNA, 19 nt, Artificial Sequence
  Description of Artificial Sequence: Synthetic oligonucleotide
  Sense strand starting at position 2727 of SEQ ID NO: 1562351
acaaaugcauuccuaggaa

SEQ ID NO: 1740446 - RNA, 19 nt, Artificial Sequence
  Description of Artificial Sequence: Synthetic oligonucleotide
  Antisense strand to SEQ ID NO: 1740445
uuccuaggaaugcauuugu

SEQ ID NO: 1740447 - RNA, 19 nt, Artificial Sequence
  Description of Artificial Sequence: Synthetic oligonucleotide
  Sense strand starting at position 2731 of SEQ ID NO: 1562351
augcauuccuaggaaauuu

SEQ ID NO: 1740448 - RNA, 19 nt, Artificial Sequence
  Description of Artificial Sequence: Synthetic oligonucleotide
  Antisense strand to SEQ ID NO: 1740447
aaauuuccuaggaaugcau

SEQ ID NO: 1740449 - RNA, 19 nt, Artificial Sequence
  Description of Artificial Sequence: Synthetic oligonucleotide
  Sense strand starting at position 2766 of SEQ ID NO: 1562351
caccaugguaguugggaua

SEQ ID NO: 1740450 - RNA, 19 nt, Artificial Sequence
  Description of Artificial Sequence: Synthetic oligonucleotide
  Antisense strand to SEQ ID NO: 1740449
uaucccaacuaccauggug

SEQ ID NO: 1740451 - RNA, 19 nt, Artificial Sequence
  Description of Artificial Sequence: Synthetic oligonucleotide
  Sense strand starting at position 2845 of SEQ ID NO: 1562351
agauuaaauuucugacaag

SEQ ID NO: 1740452 - RNA, 19 nt, Artificial Sequence
  Description of Artificial Sequence: Synthetic oligonucleotide
  Antisense strand to SEQ ID NO: 1740451
cuugucagaaauuuaaucu

SEQ ID NO: 1740453 - RNA, 19 nt, Artificial Sequence
  Description of Artificial Sequence: Synthetic oligonucleotide
  Sense strand starting at position 2960 of SEQ ID NO: 1562351
cucgaaucgucauuugcaa

SEQ ID NO: 1740454 - RNA, 19 nt, Artificial Sequence
  Description of Artificial Sequence: Synthetic oligonucleotide
  Antisense strand to SEQ ID NO: 1740453
uugcaaaugacgauucgag

SEQ ID NO: 1740455 - RNA, 19 nt, Artificial Sequence
  Description of Artificial Sequence: Synthetic oligonucleotide
  Sense strand starting at position 2962 of SEQ ID NO: 1562351
cgaaucgucauuugcaaag

SEQ ID NO: 1740456 - RNA, 19 nt, Artificial Sequence
  Description of Artificial Sequence: Synthetic oligonucleotide
  Antisense strand to SEQ ID NO: 1740455
cuuugcaaaugacgauucg

SEQ ID NO: 1740457 - RNA, 19 nt, Artificial Sequence
  Description of Artificial Sequence: Synthetic oligonucleotide
  Sense strand starting at position 2974 of SEQ ID NO: 1562351
ugcaaagucgauugcauuu

SEQ ID NO: 1740458 - RNA, 19 nt, Artificial Sequence
  Description of Artificial Sequence: Synthetic oligonucleotide
  Antisense strand to SEQ ID NO: 1740457
aaaugcaaucgacuuugca

SEQ ID NO: 1740459 - RNA, 19 nt, Artificial Sequence
  Description of Artificial Sequence: Synthetic oligonucleotide
  Sense strand starting at position 2987 of SEQ ID NO: 1562351
gcauuuccuuuaguauuga

SEQ ID NO: 1740460 - RNA, 19 nt, Artificial Sequence
  Description of Artificial Sequence: Synthetic oligonucleotide
  Antisense strand to SEQ ID NO: 1740459
ucaauacuaaaggaaaugc

SEQ ID NO: 1740461 - RNA, 19 nt, Artificial Sequence
  Description of Artificial Sequence: Synthetic oligonucleotide
  Sense strand starting at position 3001 of SEQ ID NO: 1562351
auugaaugugcucacaaau

SEQ ID NO: 1740462 - RNA, 19 nt, Artificial Sequence
  Description of Artificial Sequence: Synthetic oligonucleotide
  Antisense strand to SEQ ID NO: 1740461
auuugugagcacauucaau

SEQ ID NO: 1740463 - RNA, 19 nt, Artificial Sequence
  Description of Artificial Sequence: Synthetic oligonucleotide
  Sense strand starting at position 3348 of SEQ ID NO: 1562351
ucaguauauggugaauauu

SEQ ID NO: 1740464 - RNA, 19 nt, Artificial Sequence
  Description of Artificial Sequence: Synthetic oligonucleotide
  Antisense strand to SEQ ID NO: 1740463
aauauucaccauauacuga

SEQ ID NO: 1740465 - RNA, 19 nt, Artificial Sequence
  Description of Artificial Sequence: Synthetic oligonucleotide
  Sense strand starting at position 3351 of SEQ ID NO: 1562351
guauauggugaauauuauc

SEQ ID NO: 1740466 - RNA, 19 nt, Artificial Sequence
  Description of Artificial Sequence: Synthetic oligonucleotide
  Antisense strand to SEQ ID NO: 1740465
gauaauauucaccauauac

SEQ ID NO: 1740467 - RNA, 19 nt, Artificial Sequence
  Description of Artificial Sequence: Synthetic oligonucleotide
  Sense strand starting at position 3356 of SEQ ID NO: 1562351
uggugaauauuaucacaau

SEQ ID NO: 1740468 - RNA, 19 nt, Artificial Sequence
  Description of Artificial Sequence: Synthetic oligonucleotide
  Antisense strand to SEQ ID NO: 1740467
auugugauaauauucacca

SEQ ID NO: 1740469 - RNA, 19 nt, Artificial Sequence
  Description of Artificial Sequence: Synthetic oligonucleotide
  Sense strand starting at position 3397 of SEQ ID NO: 1562351
augcgugcugaugaacaaa

SEQ ID NO: 1740470 - RNA, 19 nt, Artificial Sequence
  Description of Artificial Sequence: Synthetic oligonucleotide
  Antisense strand to SEQ ID NO: 1740469
uuuguucaucagcacgcau

SEQ ID NO: 1740471 - RNA, 19 nt, Artificial Sequence
  Description of Artificial Sequence: Synthetic oligonucleotide
  Sense strand starting at position 3441 of SEQ ID NO: 1562351
ugaacugcacuuuaauagu

SEQ ID NO: 1740472 - RNA, 19 nt, Artificial Sequence
  Description of Artificial Sequence: Synthetic oligonucleotide
  Antisense strand to SEQ ID NO: 1740471
acuauuaaagugcaguuca

SEQ ID NO: 1740473 - RNA, 19 nt, Artificial Sequence
  Description of Artificial Sequence: Synthetic oligonucleotide
  Sense strand starting at position 3506 of SEQ ID NO: 1562351
gaaacaauguuguuuguga

SEQ ID NO: 1740474 - RNA, 19 nt, Artificial Sequence
  Description of Artificial Sequence: Synthetic oligonucleotide
  Antisense strand to SEQ ID NO: 1740473
ucacaaacaacauuguuuc

SEQ ID NO: 1740475 - RNA, 19 nt, Artificial Sequence
  Description of Artificial Sequence: Synthetic oligonucleotide
  Sense strand starting at position 3639 of SEQ ID NO: 1562351
aaaugugggucauuaaccu

SEQ ID NO: 1740476 - RNA, 19 nt, Artificial Sequence
  Description of Artificial Sequence: Synthetic oligonucleotide
  Antisense strand to SEQ ID NO: 1740475
agguuaaugacccacauuu

SEQ ID NO: 1740477 - RNA, 19 nt, Artificial Sequence
  Description of Artificial Sequence: Synthetic oligonucleotide
  Sense strand starting at position 3643 of SEQ ID NO: 1562351
gugggucauuaaccuugaa

SEQ ID NO: 1740478 - RNA, 19 nt, Artificial Sequence
  Description of Artificial Sequence: Synthetic oligonucleotide
  Antisense strand to SEQ ID NO: 1740477
uucaagguuaaugacccac

SEQ ID NO: 1740479 - RNA, 19 nt, Artificial Sequence
  Description of Artificial Sequence: Synthetic oligonucleotide
  Sense strand starting at position 3646 of SEQ ID NO: 1562351
ggucauuaaccuugaagaa

SEQ ID NO: 1740480 - RNA, 19 nt, Artificial Sequence
  Description of Artificial Sequence: Synthetic oligonucleotide
  Antisense strand to SEQ ID NO: 1740479
uucuucaagguuaaugacc

SEQ ID NO: 1740481 - RNA, 19 nt, Artificial Sequence
  Description of Artificial Sequence: Synthetic oligonucleotide
  Sense strand starting at position 3727 of SEQ ID NO: 1562351
uguaguuauaguuaggaug

SEQ ID NO: 1740482 - RNA, 19 nt, Artificial Sequence
  Description of Artificial Sequence: Synthetic oligonucleotide
  Antisense strand to SEQ ID NO: 1740481
cauccuaacuauaacuaca

SEQ ID NO: 1740483 - RNA, 19 nt, Artificial Sequence
  Description of Artificial Sequence: Synthetic oligonucleotide
  Sense strand starting at position 3902 of SEQ ID NO: 1562351
uucuguauugcaggacaaa

SEQ ID NO: 1740484 - RNA, 19 nt, Artificial Sequence
  Description of Artificial Sequence: Synthetic oligonucleotide
  Antisense strand to SEQ ID NO: 1740483
uuuguccugcaauacagaa

SEQ ID NO: 1740485 - RNA, 19 nt, Artificial Sequence
  Description of Artificial Sequence: Synthetic oligonucleotide
  Sense strand starting at position 3903 of SEQ ID NO: 1562351
ucuguauugcaggacaaac

SEQ ID NO: 1740486 - RNA, 19 nt, Artificial Sequence
  Description of Artificial Sequence: Synthetic oligonucleotide
  Antisense strand to SEQ ID NO: 1740485
guuuguccugcaauacaga

SEQ ID NO: 1740487 - RNA, 19 nt, Artificial Sequence
  Description of Artificial Sequence: Synthetic oligonucleotide
  Sense strand starting at position 3905 of SEQ ID NO: 1562351
uguauugcaggacaaacau

SEQ ID NO: 1740488 - RNA, 19 nt, Artificial Sequence
  Description of Artificial Sequence: Synthetic oligonucleotide
  Antisense strand to SEQ ID NO: 1740487
auguuuguccugcaauaca

SEQ ID NO: 1740489 - RNA, 19 nt, Artificial Sequence
  Description of Artificial Sequence: Synthetic oligonucleotide
  Sense strand starting at position 81 of SEQ ID NO: 1562352
ggguucacuuggguacaua

SEQ ID NO: 1740490 - RNA, 19 nt, Artificial Sequence
  Description of Artificial Sequence: Synthetic oligonucleotide
  Antisense strand to SEQ ID NO: 1740489
uauguacccaagugaaccc

SEQ ID NO: 1740491 - RNA, 19 nt, Artificial Sequence
  Description of Artificial Sequence: Synthetic oligonucleotide
  Sense strand starting at position 298 of SEQ ID NO: 1562352
ucuaaaggauggucuguua

SEQ ID NO: 1740492 - RNA, 19 nt, Artificial Sequence
  Description of Artificial Sequence: Synthetic oligonucleotide
  Antisense strand to SEQ ID NO: 1740491
uaacagaccauccuuuaga

SEQ ID NO: 1740493 - RNA, 19 nt, Artificial Sequence
  Description of Artificial Sequence: Synthetic oligonucleotide
  Sense strand starting at position 596 of SEQ ID NO: 1562352
aggugaaaguucuugguac

SEQ ID NO: 1740494 - RNA, 19 nt, Artificial Sequence
  Description of Artificial Sequence: Synthetic oligonucleotide
  Antisense strand to SEQ ID NO: 1740493
guaccaagaacuuucaccu

SEQ ID NO: 1740495 - RNA, 19 nt, Artificial Sequence
  Description of Artificial Sequence: Synthetic oligonucleotide
  Sense strand starting at position 598 of SEQ ID NO: 1562352
gugaaaguucuugguacac

SEQ ID NO: 1740496 - RNA, 19 nt, Artificial Sequence
  Description of Artificial Sequence: Synthetic oligonucleotide
  Antisense strand to SEQ ID NO: 1740495
guguaccaagaacuuucac

SEQ ID NO: 1740497 - RNA, 19 nt, Artificial Sequence
  Description of Artificial Sequence: Synthetic oligonucleotide
  Sense strand starting at position 602 of SEQ ID NO: 1562352
aaguucuugguacacagau

SEQ ID NO: 1740498 - RNA, 19 nt, Artificial Sequence
  Description of Artificial Sequence: Synthetic oligonucleotide
  Antisense strand to SEQ ID NO: 1740497
aucuguguaccaagaacuu

SEQ ID NO: 1740499 - RNA, 19 nt, Artificial Sequence
  Description of Artificial Sequence: Synthetic oligonucleotide
  Sense strand starting at position 677 of SEQ ID NO: 1562352
guuucuaugguacauauga

SEQ ID NO: 1740500 - RNA, 19 nt, Artificial Sequence
  Description of Artificial Sequence: Synthetic oligonucleotide
  Antisense strand to SEQ ID NO: 1740499
ucauauguaccauagaaac

SEQ ID NO: 1740501 - RNA, 19 nt, Artificial Sequence
  Description of Artificial Sequence: Synthetic oligonucleotide
  Sense strand starting at position 684 of SEQ ID NO: 1562352
ugguacauaugagucaaau

SEQ ID NO: 1740502 - RNA, 19 nt, Artificial Sequence
  Description of Artificial Sequence: Synthetic oligonucleotide
  Antisense strand to SEQ ID NO: 1740501
auuugacucauauguacca

SEQ ID NO: 1740503 - RNA, 19 nt, Artificial Sequence
  Description of Artificial Sequence: Synthetic oligonucleotide
  Sense strand starting at position 769 of SEQ ID NO: 1562352
cccaauucugggcaaacuu

SEQ ID NO: 1740504 - RNA, 19 nt, Artificial Sequence
  Description of Artificial Sequence: Synthetic oligonucleotide
  Antisense strand to SEQ ID NO: 1740503
aaguuugcccagaauuggg

SEQ ID NO: 1740505 - RNA, 19 nt, Artificial Sequence
  Description of Artificial Sequence: Synthetic oligonucleotide
  Sense strand starting at position 1017 of SEQ ID NO: 1562352
acuuguagucaccauuaaa

SEQ ID NO: 1740506 - RNA, 19 nt, Artificial Sequence
  Description of Artificial Sequence: Synthetic oligonucleotide
  Antisense strand to SEQ ID NO: 1740505
uuuaauggugacuacaagu

SEQ ID NO: 1740507 - RNA, 19 nt, Artificial Sequence
  Description of Artificial Sequence: Synthetic oligonucleotide
  Sense strand starting at position 1020 of SEQ ID NO: 1562352
uguagucaccauuaaauug

SEQ ID NO: 1740508 - RNA, 19 nt, Artificial Sequence
  Description of Artificial Sequence: Synthetic oligonucleotide
  Antisense strand to SEQ ID NO: 1740507
caauuuaauggugacuaca

SEQ ID NO: 1740509 - RNA, 19 nt, Artificial Sequence
  Description of Artificial Sequence: Synthetic oligonucleotide
  Sense strand starting at position 1207 of SEQ ID NO: 1562352
cuaaccauugcuggaagaa

SEQ ID NO: 1740510 - RNA, 19 nt, Artificial Sequence
  Description of Artificial Sequence: Synthetic oligonucleotide
  Antisense strand to SEQ ID NO: 1740509
uucuuccagcaaugguuag

SEQ ID NO: 1740511 - RNA, 19 nt, Artificial Sequence
  Description of Artificial Sequence: Synthetic oligonucleotide
  Sense strand starting at position 1301 of SEQ ID NO: 1562352
auuugaguuacgugagcac

SEQ ID NO: 1740512 - RNA, 19 nt, Artificial Sequence
  Description of Artificial Sequence: Synthetic oligonucleotide
  Antisense strand to SEQ ID NO: 1740511
gugcucacguaacucaaau

SEQ ID NO: 1740513 - RNA, 19 nt, Artificial Sequence
  Description of Artificial Sequence: Synthetic oligonucleotide
  Sense strand starting at position 1332 of SEQ ID NO: 1562352
guggaugucccacaaauca

SEQ ID NO: 1740514 - RNA, 19 nt, Artificial Sequence
  Description of Artificial Sequence: Synthetic oligonucleotide
  Antisense strand to SEQ ID NO: 1740513
ugauuugugggacauccac

SEQ ID NO: 1740515 - RNA, 19 nt, Artificial Sequence
  Description of Artificial Sequence: Synthetic oligonucleotide
  Sense strand starting at position 1417 of SEQ ID NO: 1562352
ccuggcaucccugaugcua

SEQ ID NO: 1740516 - RNA, 19 nt, Artificial Sequence
  Description of Artificial Sequence: Synthetic oligonucleotide
  Antisense strand to SEQ ID NO: 1740515
uagcaucagggaugccagg

SEQ ID NO: 1740517 - RNA, 19 nt, Artificial Sequence
  Description of Artificial Sequence: Synthetic oligonucleotide
  Sense strand starting at position 1724 of SEQ ID NO: 1562352
aaggaaaucuuguuguccu

SEQ ID NO: 1740518 - RNA, 19 nt, Artificial Sequence
  Description of Artificial Sequence: Synthetic oligonucleotide
  Antisense strand to SEQ ID NO: 1740517
aggacaacaagauuuccuu

SEQ ID NO: 1740519 - RNA, 19 nt, Artificial Sequence
  Description of Artificial Sequence: Synthetic oligonucleotide
  Sense strand starting at position 1777 of SEQ ID NO: 1562352
cuuaucugccuugauaaag

SEQ ID NO: 1740520 - RNA, 19 nt, Artificial Sequence
  Description of Artificial Sequence: Synthetic oligonucleotide
  Antisense strand to SEQ ID NO: 1740519
cuuuaucaaggcagauaag

SEQ ID NO: 1740521 - RNA, 19 nt, Artificial Sequence
  Description of Artificial Sequence: Synthetic oligonucleotide
  Sense strand starting at position 1873 of SEQ ID NO: 1562352
ccauaaugcgaucaaguuu

SEQ ID NO: 1740522 - RNA, 19 nt, Artificial Sequence
  Description of Artificial Sequence: Synthetic oligonucleotide
  Antisense strand to SEQ ID NO: 1740521
aaacuugaucgcauuaugg

SEQ ID NO: 1740523 - RNA, 19 nt, Artificial Sequence
  Description of Artificial Sequence: Synthetic oligonucleotide
  Sense strand starting at position 1879 of SEQ ID NO: 1562352
ugcgaucaaguuuauugau

SEQ ID NO: 1740524 - RNA, 19 nt, Artificial Sequence
  Description of Artificial Sequence: Synthetic oligonucleotide
  Antisense strand to SEQ ID NO: 1740523
aucaauaaacuugaucgca

SEQ ID NO: 1740525 - RNA, 19 nt, Artificial Sequence
  Description of Artificial Sequence: Synthetic oligonucleotide
  Sense strand starting at position 1925 of SEQ ID NO: 1562352
gcuucucucugaccagaaa

SEQ ID NO: 1740526 - RNA, 19 nt, Artificial Sequence
  Description of Artificial Sequence: Synthetic oligonucleotide
  Antisense strand to SEQ ID NO: 1740525
uuucuggucagagagaagc

SEQ ID NO: 1740527 - RNA, 19 nt, Artificial Sequence
  Description of Artificial Sequence: Synthetic oligonucleotide
  Sense strand starting at position 1959 of SEQ ID NO: 1562352
uuguuuagagcggaugaga

SEQ ID NO: 1740528 - RNA, 19 nt, Artificial Sequence
  Description of Artificial Sequence: Synthetic oligonucleotide
  Antisense strand to SEQ ID NO: 1740527
ucucauccgcucuaaacaa

SEQ ID NO: 1740529 - RNA, 19 nt, Artificial Sequence
  Description of Artificial Sequence: Synthetic oligonucleotide
  Sense strand starting at position 1970 of SEQ ID NO: 1562352
ggaugagauugugcuaagu

SEQ ID NO: 1740530 - RNA, 19 nt, Artificial Sequence
  Description of Artificial Sequence: Synthetic oligonucleotide
  Antisense strand to SEQ ID NO: 1740529
acuuagcacaaucucaucc

SEQ ID NO: 1740531 - RNA, 19 nt, Artificial Sequence
  Description of Artificial Sequence: Synthetic oligonucleotide
  Sense strand starting at position 1980 of SEQ ID NO: 1562352
gugcuaagucugggaaaug

SEQ ID NO: 1740532 - RNA, 19 nt, Artificial Sequence
  Description of Artificial Sequence: Synthetic oligonucleotide
  Antisense strand to SEQ ID NO: 1740531
cauuucccagacuuagcac

SEQ ID NO: 1740533 - RNA, 19 nt, Artificial Sequence
  Description of Artificial Sequence: Synthetic oligonucleotide
  Sense strand starting at position 2057 of SEQ ID NO: 1562352
caggauauuugggagugga

SEQ ID NO: 1740534 - RNA, 19 nt, Artificial Sequence
  Description of Artificial Sequence: Synthetic oligonucleotide
  Antisense strand to SEQ ID NO: 1740533
uccacucccaaauauccug

SEQ ID NO: 1740535 - RNA, 19 nt, Artificial Sequence
  Description of Artificial Sequence: Synthetic oligonucleotide
  Sense strand starting at position 2237 of SEQ ID NO: 1562352
gcaggaugcagaugugaug

SEQ ID NO: 1740536 - RNA, 19 nt, Artificial Sequence
  Description of Artificial Sequence: Synthetic oligonucleotide
  Antisense strand to SEQ ID NO: 1740535
caucacaucugcauccugc

SEQ ID NO: 1740537 - RNA, 19 nt, Artificial Sequence
  Description of Artificial Sequence: Synthetic oligonucleotide
  Sense strand starting at position 2412 of SEQ ID NO: 1562352
gguggaguuuauuucaugu

SEQ ID NO: 1740538 - RNA, 19 nt, Artificial Sequence
  Description of Artificial Sequence: Synthetic oligonucleotide
  Antisense strand to SEQ ID NO: 1740537
acaugaaauaaacuccacc

SEQ ID NO: 1740539 - RNA, 19 nt, Artificial Sequence
  Description of Artificial Sequence: Synthetic oligonucleotide
  Sense strand starting at position 2456 of SEQ ID NO: 1562352
gccauugccuggcugauuu

SEQ ID NO: 1740540 - RNA, 19 nt, Artificial Sequence
  Description of Artificial Sequence: Synthetic oligonucleotide
  Antisense strand to SEQ ID NO: 1740539
aaaucagccaggcaauggc

SEQ ID NO: 1740541 - RNA, 19 nt, Artificial Sequence
  Description of Artificial Sequence: Synthetic oligonucleotide
  Sense strand starting at position 2501 of SEQ ID NO: 1562352
ucauauaaguguuccagaa

SEQ ID NO: 1740542 - RNA, 19 nt, Artificial Sequence
  Description of Artificial Sequence: Synthetic oligonucleotide
  Antisense strand to SEQ ID NO: 1740541
uucuggaacacuuauauga

SEQ ID NO: 1740543 - RNA, 19 nt, Artificial Sequence
  Description of Artificial Sequence: Synthetic oligonucleotide
  Sense strand starting at position 2505 of SEQ ID NO: 1562352
auaaguguuccagaacagu

SEQ ID NO: 1740544 - RNA, 19 nt, Artificial Sequence
  Description of Artificial Sequence: Synthetic oligonucleotide
  Antisense strand to SEQ ID NO: 1740543
acuguucuggaacacuuau

SEQ ID NO: 1740545 - RNA, 19 nt, Artificial Sequence
  Description of Artificial Sequence: Synthetic oligonucleotide
  Sense strand starting at position 2590 of SEQ ID NO: 1562352
ggacucuaggcuuacagua

SEQ ID NO: 1740546 - RNA, 19 nt, Artificial Sequence
  Description of Artificial Sequence: Synthetic oligonucleotide
  Antisense strand to SEQ ID NO: 1740545
uacuguaagccuagagucc

SEQ ID NO: 1740547 - RNA, 19 nt, Artificial Sequence
  Description of Artificial Sequence: Synthetic oligonucleotide
  Sense strand starting at position 2691 of SEQ ID NO: 1562352
uacaaaugucccggaauau

SEQ ID NO: 1740548 - RNA, 19 nt, Artificial Sequence
  Description of Artificial Sequence: Synthetic oligonucleotide
  Antisense strand to SEQ ID NO: 1740547
auauuccgggacauuugua

SEQ ID NO: 1740549 - RNA, 19 nt, Artificial Sequence
  Description of Artificial Sequence: Synthetic oligonucleotide
  Sense strand starting at position 2692 of SEQ ID NO: 1562352
acaaaugucccggaauauc

SEQ ID NO: 1740550 - RNA, 19 nt, Artificial Sequence
  Description of Artificial Sequence: Synthetic oligonucleotide
  Antisense strand to SEQ ID NO: 1740549
gauauuccgggacauuugu

SEQ ID NO: 1740551 - RNA, 19 nt, Artificial Sequence
  Description of Artificial Sequence: Synthetic oligonucleotide
  Sense strand starting at position 2717 of SEQ ID NO: 1562352
cuggucucacucugacaga

SEQ ID NO: 1740552 - RNA, 19 nt, Artificial Sequence
  Description of Artificial Sequence: Synthetic oligonucleotide
  Antisense strand to SEQ ID NO: 1740551
ucugucagagugagaccag

SEQ ID NO: 1740553 - RNA, 19 nt, Artificial Sequence
  Description of Artificial Sequence: Synthetic oligonucleotide
  Sense strand starting at position 2730 of SEQ ID NO: 1562352
gacagacauccauguugca

SEQ ID NO: 1740554 - RNA, 19 nt, Artificial Sequence
  Description of Artificial Sequence: Synthetic oligonucleotide
  Antisense strand to SEQ ID NO: 1740553
ugcaacauggaugucuguc

SEQ ID NO: 1740555 - RNA, 19 nt, Artificial Sequence
  Description of Artificial Sequence: Synthetic oligonucleotide
  Sense strand starting at position 2737 of SEQ ID NO: 1562352
auccauguugcagacaaca

SEQ ID NO: 1740556 - RNA, 19 nt, Artificial Sequence
  Description of Artificial Sequence: Synthetic oligonucleotide
  Antisense strand to SEQ ID NO: 1740555
uguugucugcaacauggau

SEQ ID NO: 1740557 - RNA, 19 nt, Artificial Sequence
  Description of Artificial Sequence: Synthetic oligonucleotide
  Sense strand starting at position 2874 of SEQ ID NO: 1562352
gaaugcaggccugaacauu

SEQ ID NO: 1740558 - RNA, 19 nt, Artificial Sequence
  Description of Artificial Sequence: Synthetic oligonucleotide
  Antisense strand to SEQ ID NO: 1740557
aauguucaggccugcauuc

SEQ ID NO: 1740559 - RNA, 19 nt, Artificial Sequence
  Description of Artificial Sequence: Synthetic oligonucleotide
  Sense strand starting at position 2882 of SEQ ID NO: 1562352
gccugaacauuccuuagag

SEQ ID NO: 1740560 - RNA, 19 nt, Artificial Sequence
  Description of Artificial Sequence: Synthetic oligonucleotide
  Antisense strand to SEQ ID NO: 1740559
cucuaaggaauguucaggc

SEQ ID NO: 1740561 - RNA, 19 nt, Artificial Sequence
  Description of Artificial Sequence: Synthetic oligonucleotide
  Sense strand starting at position 2927 of SEQ ID NO: 1562352
ucaggaaauugcuuggaag

SEQ ID NO: 1740562 - RNA, 19 nt, Artificial Sequence
  Description of Artificial Sequence: Synthetic oligonucleotide
  Antisense strand to SEQ ID NO: 1740561
cuuccaagcaauuuccuga

SEQ ID NO: 1740563 - RNA, 19 nt, Artificial Sequence
  Description of Artificial Sequence: Synthetic oligonucleotide
  Sense strand starting at position 3050 of SEQ ID NO: 1562352
gacaauuccugguugcaga

SEQ ID NO: 1740564 - RNA, 19 nt, Artificial Sequence
  Description of Artificial Sequence: Synthetic oligonucleotide
  Antisense strand to SEQ ID NO: 1740563
ucugcaaccaggaauuguc

SEQ ID NO: 1740565 - RNA, 19 nt, Artificial Sequence
  Description of Artificial Sequence: Synthetic oligonucleotide
  Sense strand starting at position 3759 of SEQ ID NO: 1562352
augaaauagccacggaaga

SEQ ID NO: 1740566 - RNA, 19 nt, Artificial Sequence
  Description of Artificial Sequence: Synthetic oligonucleotide
  Antisense strand to SEQ ID NO: 1740565
ucuuccguggcuauuucau

SEQ ID NO: 1740567 - RNA, 19 nt, Artificial Sequence
  Description of Artificial Sequence: Synthetic oligonucleotide
  Sense strand starting at position 3760 of SEQ ID NO: 1562352
ugaaauagccacggaagaa

SEQ ID NO: 1740568 - RNA, 19 nt, Artificial Sequence
  Description of Artificial Sequence: Synthetic oligonucleotide
  Antisense strand to SEQ ID NO: 1740567
uucuuccguggcuauuuca

SEQ ID NO: 1740569 - RNA, 19 nt, Artificial Sequence
  Description of Artificial Sequence: Synthetic oligonucleotide
  Sense strand starting at position 43 of SEQ ID NO: 1562353
agagaugcuuuccuucuua

SEQ ID NO: 1740570 - RNA, 19 nt, Artificial Sequence
  Description of Artificial Sequence: Synthetic oligonucleotide
  Antisense strand to SEQ ID NO: 1740569
uaagaaggaaagcaucucu

SEQ ID NO: 1740571 - RNA, 19 nt, Artificial Sequence
  Description of Artificial Sequence: Synthetic oligonucleotide
  Sense strand starting at position 71 of SEQ ID NO: 1562353
cugguauuccauugggauc

SEQ ID NO: 1740572 - RNA, 19 nt, Artificial Sequence
  Description of Artificial Sequence: Synthetic oligonucleotide
  Antisense strand to SEQ ID NO: 1740571
gaucccaauggaauaccag

SEQ ID NO: 1740573 - RNA, 19 nt, Artificial Sequence
  Description of Artificial Sequence: Synthetic oligonucleotide
  Sense strand starting at position 72 of SEQ ID NO: 1562353
ugguauuccauugggaucu

SEQ ID NO: 1740574 - RNA, 19 nt, Artificial Sequence
  Description of Artificial Sequence: Synthetic oligonucleotide
  Antisense strand to SEQ ID NO: 1740573
agaucccaauggaauacca

SEQ ID NO: 1740575 - RNA, 19 nt, Artificial Sequence
  Description of Artificial Sequence: Synthetic oligonucleotide
  Sense strand starting at position 526 of SEQ ID NO: 1562353
gcauuugugauguguguag

SEQ ID NO: 1740576 - RNA, 19 nt, Artificial Sequence
  Description of Artificial Sequence: Synthetic oligonucleotide
  Antisense strand to SEQ ID NO: 1740575
cuacacacaucacaaaugc

SEQ ID NO: 1740577 - RNA, 19 nt, Artificial Sequence
  Description of Artificial Sequence: Synthetic oligonucleotide
  Sense strand starting at position 528 of SEQ ID NO: 1562353
auuugugauguguguagcu

SEQ ID NO: 1740578 - RNA, 19 nt, Artificial Sequence
  Description of Artificial Sequence: Synthetic oligonucleotide
  Antisense strand to SEQ ID NO: 1740577
agcuacacacaucacaaau

SEQ ID NO: 1740579 - RNA, 19 nt, Artificial Sequence
  Description of Artificial Sequence: Synthetic oligonucleotide
  Sense strand starting at position 549 of SEQ ID NO: 1562353
ucuaaagccuuucuugaga

SEQ ID NO: 1740580 - RNA, 19 nt, Artificial Sequence
  Description of Artificial Sequence: Synthetic oligonucleotide
  Antisense strand to SEQ ID NO: 1740579
ucucaagaaaggcuuuaga

SEQ ID NO: 1740581 - RNA, 19 nt, Artificial Sequence
  Description of Artificial Sequence: Synthetic oligonucleotide
  Sense strand starting at position 578 of SEQ ID NO: 1562353
uugauauauuagccacaag

SEQ ID NO: 1740582 - RNA, 19 nt, Artificial Sequence
  Description of Artificial Sequence: Synthetic oligonucleotide
  Antisense strand to SEQ ID NO: 1740581
cuuguggcuaauauaucaa

SEQ ID NO: 1740583 - RNA, 19 nt, Artificial Sequence
  Description of Artificial Sequence: Synthetic oligonucleotide
  Sense strand starting at position 788 of SEQ ID NO: 1562353
aaggguuaacuuugggacu

SEQ ID NO: 1740584 - RNA, 19 nt, Artificial Sequence
  Description of Artificial Sequence: Synthetic oligonucleotide
  Antisense strand to SEQ ID NO: 1740583
agucccaaaguuaacccuu

SEQ ID NO: 1740585 - RNA, 19 nt, Artificial Sequence
  Description of Artificial Sequence: Synthetic oligonucleotide
  Sense strand starting at position 794 of SEQ ID NO: 1562353
uaacuuugggacugugaca

SEQ ID NO: 1740586 - RNA, 19 nt, Artificial Sequence
  Description of Artificial Sequence: Synthetic oligonucleotide
  Antisense strand to SEQ ID NO: 1740585
ugucacagucccaaaguua

SEQ ID NO: 1740587 - RNA, 19 nt, Artificial Sequence
  Description of Artificial Sequence: Synthetic oligonucleotide
  Sense strand starting at position 828 of SEQ ID NO: 1562353
gcucuaaacuacuuggaga

SEQ ID NO: 1740588 - RNA, 19 nt, Artificial Sequence
  Description of Artificial Sequence: Synthetic oligonucleotide
  Antisense strand to SEQ ID NO: 1740587
ucuccaaguaguuuagagc

SEQ ID NO: 1740589 - RNA, 19 nt, Artificial Sequence
  Description of Artificial Sequence: Synthetic oligonucleotide
  Sense strand starting at position 900 of SEQ ID NO: 1562353
guaugucacccagggaaga

SEQ ID NO: 1740590 - RNA, 19 nt, Artificial Sequence
  Description of Artificial Sequence: Synthetic oligonucleotide
  Antisense strand to SEQ ID NO: 1740589
ucuucccugggugacauac

SEQ ID NO: 1740591 - RNA, 19 nt, Artificial Sequence
  Description of Artificial Sequence: Synthetic oligonucleotide
  Sense strand starting at position 965 of SEQ ID NO: 1562353
gcuauagagacauguacag

SEQ ID NO: 1740592 - RNA, 19 nt, Artificial Sequence
  Description of Artificial Sequence: Synthetic oligonucleotide
  Antisense strand to SEQ ID NO: 1740591
cuguacaugucucuauagc

SEQ ID NO: 1740593 - RNA, 19 nt, Artificial Sequence
  Description of Artificial Sequence: Synthetic oligonucleotide
  Sense strand starting at position 983 of SEQ ID NO: 1562353
gagugaaaccuguagcaca

SEQ ID NO: 1740594 - RNA, 19 nt, Artificial Sequence
  Description of Artificial Sequence: Synthetic oligonucleotide
  Antisense strand to SEQ ID NO: 1740593
ugugcuacagguuucacuc

SEQ ID NO: 1740595 - RNA, 19 nt, Artificial Sequence
  Description of Artificial Sequence: Synthetic oligonucleotide
  Sense strand starting at position 996 of SEQ ID NO: 1562353
agcacauacgaauauguua

SEQ ID NO: 1740596 - RNA, 19 nt, Artificial Sequence
  Description of Artificial Sequence: Synthetic oligonucleotide
  Antisense strand to SEQ ID NO: 1740595
uaacauauucguaugugcu

SEQ ID NO: 1740597 - RNA, 19 nt, Artificial Sequence
  Description of Artificial Sequence: Synthetic oligonucleotide
  Sense strand starting at position 1040 of SEQ ID NO: 1562353
uuagauuaacgaugaguug

SEQ ID NO: 1740598 - RNA, 19 nt, Artificial Sequence
  Description of Artificial Sequence: Synthetic oligonucleotide
  Antisense strand to SEQ ID NO: 1740597
caacucaucguuaaucuaa

SEQ ID NO: 1740599 - RNA, 19 nt, Artificial Sequence
  Description of Artificial Sequence: Synthetic oligonucleotide
  Sense strand starting at position 1041 of SEQ ID NO: 1562353
uagauuaacgaugaguugu

SEQ ID NO: 1740600 - RNA, 19 nt, Artificial Sequence
  Description of Artificial Sequence: Synthetic oligonucleotide
  Antisense strand to SEQ ID NO: 1740599
acaacucaucguuaaucua

SEQ ID NO: 1740601 - RNA, 19 nt, Artificial Sequence
  Description of Artificial Sequence: Synthetic oligonucleotide
  Sense strand starting at position 1043 of SEQ ID NO: 1562353
gauuaacgaugaguuguau

SEQ ID NO: 1740602 - RNA, 19 nt, Artificial Sequence
  Description of Artificial Sequence: Synthetic oligonucleotide
  Antisense strand to SEQ ID NO: 1740601
auacaacucaucguuaauc

SEQ ID NO: 1740603 - RNA, 19 nt, Artificial Sequence
  Description of Artificial Sequence: Synthetic oligonucleotide
  Sense strand starting at position 1189 of SEQ ID NO: 1562353
gcaauaaacggacgaugua

SEQ ID NO: 1740604 - RNA, 19 nt, Artificial Sequence
  Description of Artificial Sequence: Synthetic oligonucleotide
  Antisense strand to SEQ ID NO: 1740603
uacaucguccguuuauugc

SEQ ID NO: 1740605 - RNA, 19 nt, Artificial Sequence
  Description of Artificial Sequence: Synthetic oligonucleotide
  Sense strand starting at position 1223 of SEQ ID NO: 1562353
agguaaggcuagcugauaa

SEQ ID NO: 1740606 - RNA, 19 nt, Artificial Sequence
  Description of Artificial Sequence: Synthetic oligonucleotide
  Antisense strand to SEQ ID NO: 1740605
uuaucagcuagccuuaccu

SEQ ID NO: 1740607 - RNA, 19 nt, Artificial Sequence
  Description of Artificial Sequence: Synthetic oligonucleotide
  Sense strand starting at position 1276 of SEQ ID NO: 1562353
uugcaauuagggugguaaa

SEQ ID NO: 1740608 - RNA, 19 nt, Artificial Sequence
  Description of Artificial Sequence: Synthetic oligonucleotide
  Antisense strand to SEQ ID NO: 1740607
uuuaccacccuaauugcaa

SEQ ID NO: 1740609 - RNA, 19 nt, Artificial Sequence
  Description of Artificial Sequence: Synthetic oligonucleotide
  Sense strand starting at position 1844 of SEQ ID NO: 1562353
gcuggacuuaccgagaggu

SEQ ID NO: 1740610 - RNA, 19 nt, Artificial Sequence
  Description of Artificial Sequence: Synthetic oligonucleotide
  Antisense strand to SEQ ID NO: 1740609
accucucgguaaguccagc

SEQ ID NO: 1740611 - RNA, 19 nt, Artificial Sequence
  Description of Artificial Sequence: Synthetic oligonucleotide
  Sense strand starting at position 1846 of SEQ ID NO: 1562353
uggacuuaccgagagguua

SEQ ID NO: 1740612 - RNA, 19 nt, Artificial Sequence
  Description of Artificial Sequence: Synthetic oligonucleotide
  Antisense strand to SEQ ID NO: 1740611
uaaccucucgguaagucca

SEQ ID NO: 1740613 - RNA, 19 nt, Artificial Sequence
  Description of Artificial Sequence: Synthetic oligonucleotide
  Sense strand starting at position 2961 of SEQ ID NO: 1562353
cgcgaauuccgaccgcaaa

SEQ ID NO: 1740614 - RNA, 19 nt, Artificial Sequence
  Description of Artificial Sequence: Synthetic oligonucleotide
  Antisense strand to SEQ ID NO: 1740613
uuugcggucggaauucgcg

SEQ ID NO: 1740615 - RNA, 19 nt, Artificial Sequence
  Description of Artificial Sequence: Synthetic oligonucleotide
  Sense strand starting at position 3045 of SEQ ID NO: 1562353
gagcgaucucuaggaaccu

SEQ ID NO: 1740616 - RNA, 19 nt, Artificial Sequence
  Description of Artificial Sequence: Synthetic oligonucleotide
  Antisense strand to SEQ ID NO: 1740615
agguuccuagagaucgcuc

SEQ ID NO: 1740617 - RNA, 19 nt, Artificial Sequence
  Description of Artificial Sequence: Synthetic oligonucleotide
  Sense strand starting at position 3068 of SEQ ID NO: 1562353
cgcagcgaucucuugcaca

SEQ ID NO: 1740618 - RNA, 19 nt, Artificial Sequence
  Description of Artificial Sequence: Synthetic oligonucleotide
  Antisense strand to SEQ ID NO: 1740617
ugugcaagagaucgcugcg

SEQ ID NO: 1740619 - RNA, 19 nt, Artificial Sequence
  Description of Artificial Sequence: Synthetic oligonucleotide
  Sense strand starting at position 3292 of SEQ ID NO: 1562353
uuaauuggucgcuauuaac

SEQ ID NO: 1740620 - RNA, 19 nt, Artificial Sequence
  Description of Artificial Sequence: Synthetic oligonucleotide
  Antisense strand to SEQ ID NO: 1740619
guuaauagcgaccaauuaa

SEQ ID NO: 1740621 - RNA, 19 nt, Artificial Sequence
  Description of Artificial Sequence: Synthetic oligonucleotide
  Sense strand starting at position 3332 of SEQ ID NO: 1562353
cacacagaagucugauugu

SEQ ID NO: 1740622 - RNA, 19 nt, Artificial Sequence
  Description of Artificial Sequence: Synthetic oligonucleotide
  Antisense strand to SEQ ID NO: 1740621
acaaucagacuucugugug

SEQ ID NO: 1740623 - RNA, 19 nt, Artificial Sequence
  Description of Artificial Sequence: Synthetic oligonucleotide
  Sense strand starting at position 3335 of SEQ ID NO: 1562353
acagaagucugauugugag

SEQ ID NO: 1740624 - RNA, 19 nt, Artificial Sequence
  Description of Artificial Sequence: Synthetic oligonucleotide
  Antisense strand to SEQ ID NO: 1740623
cucacaaucagacuucugu

SEQ ID NO: 1740625 - RNA, 19 nt, Artificial Sequence
  Description of Artificial Sequence: Synthetic oligonucleotide
  Sense strand starting at position 3389 of SEQ ID NO: 1562353
gcugcagacguguuuacau

SEQ ID NO: 1740626 - RNA, 19 nt, Artificial Sequence
  Description of Artificial Sequence: Synthetic oligonucleotide
  Antisense strand to SEQ ID NO: 1740625
auguaaacacgucugcagc

SEQ ID NO: 1740627 - RNA, 19 nt, Artificial Sequence
  Description of Artificial Sequence: Synthetic oligonucleotide
  Sense strand starting at position 3391 of SEQ ID NO: 1562353
ugcagacguguuuacauuu

SEQ ID NO: 1740628 - RNA, 19 nt, Artificial Sequence
  Description of Artificial Sequence: Synthetic oligonucleotide
  Antisense strand to SEQ ID NO: 1740627
aaauguaaacacgucugca

SEQ ID NO: 1740629 - RNA, 19 nt, Artificial Sequence
  Description of Artificial Sequence: Synthetic oligonucleotide
  Sense strand starting at position 3401 of SEQ ID NO: 1562353
uuuacauuucugugguuua

SEQ ID NO: 1740630 - RNA, 19 nt, Artificial Sequence
  Description of Artificial Sequence: Synthetic oligonucleotide
  Antisense strand to SEQ ID NO: 1740629
uaaaccacagaaauguaaa

SEQ ID NO: 1740631 - RNA, 19 nt, Artificial Sequence
  Description of Artificial Sequence: Synthetic oligonucleotide
  Sense strand starting at position 3411 of SEQ ID NO: 1562353
ugugguuuagucuauaacu

SEQ ID NO: 1740632 - RNA, 19 nt, Artificial Sequence
  Description of Artificial Sequence: Synthetic oligonucleotide
  Antisense strand to SEQ ID NO: 1740631
aguuauagacuaaaccaca

SEQ ID NO: 1740633 - RNA, 19 nt, Artificial Sequence
  Description of Artificial Sequence: Synthetic oligonucleotide
  Sense strand starting at position 3413 of SEQ ID NO: 1562353
ugguuuagucuauaacuuu

SEQ ID NO: 1740634 - RNA, 19 nt, Artificial Sequence
  Description of Artificial Sequence: Synthetic oligonucleotide
  Antisense strand to SEQ ID NO: 1740633
aaaguuauagacuaaacca

SEQ ID NO: 1740635 - RNA, 19 nt, Artificial Sequence
  Description of Artificial Sequence: Synthetic oligonucleotide
  Sense strand starting at position 3446 of SEQ ID NO: 1562353
ucagaauucugcuccauga

SEQ ID NO: 1740636 - RNA, 19 nt, Artificial Sequence
  Description of Artificial Sequence: Synthetic oligonucleotide
  Antisense strand to SEQ ID NO: 1740635
ucauggagcagaauucuga

SEQ ID NO: 1740637 - RNA, 19 nt, Artificial Sequence
  Description of Artificial Sequence: Synthetic oligonucleotide
  Sense strand starting at position 3819 of SEQ ID NO: 1562353
auggacagccuucgugaaa

SEQ ID NO: 1740638 - RNA, 19 nt, Artificial Sequence
  Description of Artificial Sequence: Synthetic oligonucleotide
  Antisense strand to SEQ ID NO: 1740637
uuucacgaaggcuguccau

SEQ ID NO: 1740639 - RNA, 19 nt, Artificial Sequence
  Description of Artificial Sequence: Synthetic oligonucleotide
  Sense strand starting at position 3822 of SEQ ID NO: 1562353
gacagccuucgugaaacua

SEQ ID NO: 1740640 - RNA, 19 nt, Artificial Sequence
  Description of Artificial Sequence: Synthetic oligonucleotide
  Antisense strand to SEQ ID NO: 1740639
uaguuucacgaaggcuguc

SEQ ID NO: 1740641 - RNA, 19 nt, Artificial Sequence
  Description of Artificial Sequence: Synthetic oligonucleotide
  Sense strand starting at position 3840 of SEQ ID NO: 1562353
acaaaugcauuccuaggaa

SEQ ID NO: 1740642 - RNA, 19 nt, Artificial Sequence
  Description of Artificial Sequence: Synthetic oligonucleotide
  Antisense strand to SEQ ID NO: 1740641
uuccuaggaaugcauuugu

SEQ ID NO: 1740643 - RNA, 19 nt, Artificial Sequence
  Description of Artificial Sequence: Synthetic oligonucleotide
  Sense strand starting at position 3844 of SEQ ID NO: 1562353
augcauuccuaggaaauuu

SEQ ID NO: 1740644 - RNA, 19 nt, Artificial Sequence
  Description of Artificial Sequence: Synthetic oligonucleotide
  Antisense strand to SEQ ID NO: 1740643
aaauuuccuaggaaugcau

SEQ ID NO: 1740645 - RNA, 19 nt, Artificial Sequence
  Description of Artificial Sequence: Synthetic oligonucleotide
  Sense strand starting at position 3879 of SEQ ID NO: 1562353
caccaugguaguugggaua

SEQ ID NO: 1740646 - RNA, 19 nt, Artificial Sequence
  Description of Artificial Sequence: Synthetic oligonucleotide
  Antisense strand to SEQ ID NO: 1740645
uaucccaacuaccauggug

SEQ ID NO: 1740647 - RNA, 19 nt, Artificial Sequence
  Description of Artificial Sequence: Synthetic oligonucleotide
  Sense strand starting at position 3958 of SEQ ID NO: 1562353
agauuaaauuucugacaag

SEQ ID NO: 1740648 - RNA, 19 nt, Artificial Sequence
  Description of Artificial Sequence: Synthetic oligonucleotide
  Antisense strand to SEQ ID NO: 1740647
cuugucagaaauuuaaucu

SEQ ID NO: 1740649 - RNA, 19 nt, Artificial Sequence
  Description of Artificial Sequence: Synthetic oligonucleotide
  Sense strand starting at position 27 of SEQ ID NO: 1562354
auaagagcccuuugucaac

SEQ ID NO: 1740650 - RNA, 19 nt, Artificial Sequence
  Description of Artificial Sequence: Synthetic oligonucleotide
  Antisense strand to SEQ ID NO: 1740649
guugacaaagggcucuuau

SEQ ID NO: 1740651 - RNA, 19 nt, Artificial Sequence
  Description of Artificial Sequence: Synthetic oligonucleotide
  Sense strand starting at position 91 of SEQ ID NO: 1562354
gauaacuagucauuaagug

SEQ ID NO: 1740652 - RNA, 19 nt, Artificial Sequence
  Description of Artificial Sequence: Synthetic oligonucleotide
  Antisense strand to SEQ ID NO: 1740651
cacuuaaugacuaguuauc

SEQ ID NO: 1740653 - RNA, 19 nt, Artificial Sequence
  Description of Artificial Sequence: Synthetic oligonucleotide
  Sense strand starting at position 208 of SEQ ID NO: 1562354
agcagauauuaggcaaauc

SEQ ID NO: 1740654 - RNA, 19 nt, Artificial Sequence
  Description of Artificial Sequence: Synthetic oligonucleotide
  Antisense strand to SEQ ID NO: 1740653
gauuugccuaauaucugcu

SEQ ID NO: 1740655 - RNA, 19 nt, Artificial Sequence
  Description of Artificial Sequence: Synthetic oligonucleotide
  Sense strand starting at position 590 of SEQ ID NO: 1562354
uggcucaucuuuccaaaug

SEQ ID NO: 1740656 - RNA, 19 nt, Artificial Sequence
  Description of Artificial Sequence: Synthetic oligonucleotide
  Antisense strand to SEQ ID NO: 1740655
cauuuggaaagaugagcca

SEQ ID NO: 1740657 - RNA, 19 nt, Artificial Sequence
  Description of Artificial Sequence: Synthetic oligonucleotide
  Sense strand starting at position 619 of SEQ ID NO: 1562354
cuuauagcuauggguugaa

SEQ ID NO: 1740658 - RNA, 19 nt, Artificial Sequence
  Description of Artificial Sequence: Synthetic oligonucleotide
  Antisense strand to SEQ ID NO: 1740657
uucaacccauagcuauaag

SEQ ID NO: 1740659 - RNA, 19 nt, Artificial Sequence
  Description of Artificial Sequence: Synthetic oligonucleotide
  Sense strand starting at position 741 of SEQ ID NO: 1562354
aagugaggucauuagugac

SEQ ID NO: 1740660 - RNA, 19 nt, Artificial Sequence
  Description of Artificial Sequence: Synthetic oligonucleotide
  Antisense strand to SEQ ID NO: 1740659
gucacuaaugaccucacuu

SEQ ID NO: 1740661 - RNA, 19 nt, Artificial Sequence
  Description of Artificial Sequence: Synthetic oligonucleotide
  Sense strand starting at position 763 of SEQ ID NO: 1562354
acccaaugugacugaucca

SEQ ID NO: 1740662 - RNA, 19 nt, Artificial Sequence
  Description of Artificial Sequence: Synthetic oligonucleotide
  Antisense strand to SEQ ID NO: 1740661
uggaucagucacauugggu

SEQ ID NO: 1740663 - RNA, 19 nt, Artificial Sequence
  Description of Artificial Sequence: Synthetic oligonucleotide
  Sense strand starting at position 1040 of SEQ ID NO: 1562354
uuacgaaagucacuuaacu

SEQ ID NO: 1740664 - RNA, 19 nt, Artificial Sequence
  Description of Artificial Sequence: Synthetic oligonucleotide
  Antisense strand to SEQ ID NO: 1740663
aguuaagugacuuucguaa

SEQ ID NO: 1740665 - RNA, 19 nt, Artificial Sequence
  Description of Artificial Sequence: Synthetic oligonucleotide
  Sense strand starting at position 1134 of SEQ ID NO: 1562354
gaacucugacccuggucaa

SEQ ID NO: 1740666 - RNA, 19 nt, Artificial Sequence
  Description of Artificial Sequence: Synthetic oligonucleotide
  Antisense strand to SEQ ID NO: 1740665
uugaccagggucagaguuc

SEQ ID NO: 1740667 - RNA, 19 nt, Artificial Sequence
  Description of Artificial Sequence: Synthetic oligonucleotide
  Sense strand starting at position 1495 of SEQ ID NO: 1562354
aauguaguaguaugauaga

SEQ ID NO: 1740668 - RNA, 19 nt, Artificial Sequence
  Description of Artificial Sequence: Synthetic oligonucleotide
  Antisense strand to SEQ ID NO: 1740667
ucuaucauacuacuacauu

SEQ ID NO: 1740669 - RNA, 19 nt, Artificial Sequence
  Description of Artificial Sequence: Synthetic oligonucleotide
  Sense strand starting at position 1630 of SEQ ID NO: 1562354
cugagaaggcaguaauucu

SEQ ID NO: 1740670 - RNA, 19 nt, Artificial Sequence
  Description of Artificial Sequence: Synthetic oligonucleotide
  Antisense strand to SEQ ID NO: 1740669
agaauuacugccuucucag

SEQ ID NO: 1740671 - RNA, 19 nt, Artificial Sequence
  Description of Artificial Sequence: Synthetic oligonucleotide
  Sense strand starting at position 1699 of SEQ ID NO: 1562354
aucuuaucucagggaaguc

SEQ ID NO: 1740672 - RNA, 19 nt, Artificial Sequence
  Description of Artificial Sequence: Synthetic oligonucleotide
  Antisense strand to SEQ ID NO: 1740671
gacuucccugagauaagau

SEQ ID NO: 1740673 - RNA, 19 nt, Artificial Sequence
  Description of Artificial Sequence: Synthetic oligonucleotide
  Sense strand starting at position 1720 of SEQ ID NO: 1562354
gggugucauguagaaccaa

SEQ ID NO: 1740674 - RNA, 19 nt, Artificial Sequence
  Description of Artificial Sequence: Synthetic oligonucleotide
  Antisense strand to SEQ ID NO: 1740673
uugguucuacaugacaccc

SEQ ID NO: 1740675 - RNA, 19 nt, Artificial Sequence
  Description of Artificial Sequence: Synthetic oligonucleotide
  Sense strand starting at position 1767 of SEQ ID NO: 1562354
ccagaaauggucuguggag

SEQ ID NO: 1740676 - RNA, 19 nt, Artificial Sequence
  Description of Artificial Sequence: Synthetic oligonucleotide
  Antisense strand to SEQ ID NO: 1740675
cuccacagaccauuucugg

SEQ ID NO: 1740677 - RNA, 19 nt, Artificial Sequence
  Description of Artificial Sequence: Synthetic oligonucleotide
  Sense strand starting at position 1769 of SEQ ID NO: 1562354
agaaauggucuguggaggu

SEQ ID NO: 1740678 - RNA, 19 nt, Artificial Sequence
  Description of Artificial Sequence: Synthetic oligonucleotide
  Antisense strand to SEQ ID NO: 1740677
accuccacagaccauuucu

SEQ ID NO: 1740679 - RNA, 19 nt, Artificial Sequence
  Description of Artificial Sequence: Synthetic oligonucleotide
  Sense strand starting at position 1931 of SEQ ID NO: 1562354
cucugugagucauuugucu

SEQ ID NO: 1740680 - RNA, 19 nt, Artificial Sequence
  Description of Artificial Sequence: Synthetic oligonucleotide
  Antisense strand to SEQ ID NO: 1740679
agacaaaugacucacagag

SEQ ID NO: 1740681 - RNA, 19 nt, Artificial Sequence
  Description of Artificial Sequence: Synthetic oligonucleotide
  Sense strand starting at position 1933 of SEQ ID NO: 1562354
cugugagucauuugucuug

SEQ ID NO: 1740682 - RNA, 19 nt, Artificial Sequence
  Description of Artificial Sequence: Synthetic oligonucleotide
  Antisense strand to SEQ ID NO: 1740681
caagacaaaugacucacag

SEQ ID NO: 1740683 - RNA, 19 nt, Artificial Sequence
  Description of Artificial Sequence: Synthetic oligonucleotide
  Sense strand starting at position 1935 of SEQ ID NO: 1562354
gugagucauuugucuugcu

SEQ ID NO: 1740684 - RNA, 19 nt, Artificial Sequence
  Description of Artificial Sequence: Synthetic oligonucleotide
  Antisense strand to SEQ ID NO: 1740683
agcaagacaaaugacucac

SEQ ID NO: 1740685 - RNA, 19 nt, Artificial Sequence
  Description of Artificial Sequence: Synthetic oligonucleotide
  Sense strand starting at position 1936 of SEQ ID NO: 1562354
ugagucauuugucuugcuu

SEQ ID NO: 1740686 - RNA, 19 nt, Artificial Sequence
  Description of Artificial Sequence: Synthetic oligonucleotide
  Antisense strand to SEQ ID NO: 1740685
aagcaagacaaaugacuca

SEQ ID NO: 1740687 - RNA, 19 nt, Artificial Sequence
  Description of Artificial Sequence: Synthetic oligonucleotide
  Sense strand starting at position 2322 of SEQ ID NO: 1562354
auggcuucccuagaucauu

SEQ ID NO: 1740688 - RNA, 19 nt, Artificial Sequence
  Description of Artificial Sequence: Synthetic oligonucleotide
  Antisense strand to SEQ ID NO: 1740687
aaugaucuagggaagccau

SEQ ID NO: 1740689 - RNA, 19 nt, Artificial Sequence
  Description of Artificial Sequence: Synthetic oligonucleotide
  Sense strand starting at position 2331 of SEQ ID NO: 1562354
cuagaucauucuguuagca

SEQ ID NO: 1740690 - RNA, 19 nt, Artificial Sequence
  Description of Artificial Sequence: Synthetic oligonucleotide
  Antisense strand to SEQ ID NO: 1740689
ugcuaacagaaugaucuag

SEQ ID NO: 1740691 - RNA, 19 nt, Artificial Sequence
  Description of Artificial Sequence: Synthetic oligonucleotide
  Sense strand starting at position 2350 of SEQ ID NO: 1562354
cuuucugcugcucagaaca

SEQ ID NO: 1740692 - RNA, 19 nt, Artificial Sequence
  Description of Artificial Sequence: Synthetic oligonucleotide
  Antisense strand to SEQ ID NO: 1740691
uguucugagcagcagaaag

SEQ ID NO: 1740693 - RNA, 19 nt, Artificial Sequence
  Description of Artificial Sequence: Synthetic oligonucleotide
  Sense strand starting at position 2398 of SEQ ID NO: 1562354
ucccgagaacuguaauuaa

SEQ ID NO: 1740694 - RNA, 19 nt, Artificial Sequence
  Description of Artificial Sequence: Synthetic oligonucleotide
  Antisense strand to SEQ ID NO: 1740693
uuaauuacaguucucggga

SEQ ID NO: 1740695 - RNA, 19 nt, Artificial Sequence
  Description of Artificial Sequence: Synthetic oligonucleotide
  Sense strand starting at position 2401 of SEQ ID NO: 1562354
cgagaacuguaauuaagca

SEQ ID NO: 1740696 - RNA, 19 nt, Artificial Sequence
  Description of Artificial Sequence: Synthetic oligonucleotide
  Antisense strand to SEQ ID NO: 1740695
ugcuuaauuacaguucucg

SEQ ID NO: 1740697 - RNA, 19 nt, Artificial Sequence
  Description of Artificial Sequence: Synthetic oligonucleotide
  Sense strand starting at position 2457 of SEQ ID NO: 1562354
uuguaaaugcuaggaggau

SEQ ID NO: 1740698 - RNA, 19 nt, Artificial Sequence
  Description of Artificial Sequence: Synthetic oligonucleotide
  Antisense strand to SEQ ID NO: 1740697
auccuccuagcauuuacaa

SEQ ID NO: 1740699 - RNA, 19 nt, Artificial Sequence
  Description of Artificial Sequence: Synthetic oligonucleotide
  Sense strand starting at position 2776 of SEQ ID NO: 1562354
uuguaaugggcagaauuau

SEQ ID NO: 1740700 - RNA, 19 nt, Artificial Sequence
  Description of Artificial Sequence: Synthetic oligonucleotide
  Antisense strand to SEQ ID NO: 1740699
auaauucugcccauuacaa

SEQ ID NO: 1740701 - RNA, 19 nt, Artificial Sequence
  Description of Artificial Sequence: Synthetic oligonucleotide
  Sense strand starting at position 2868 of SEQ ID NO: 1562354
cuucgaaaccuaugcauag

SEQ ID NO: 1740702 - RNA, 19 nt, Artificial Sequence
  Description of Artificial Sequence: Synthetic oligonucleotide
  Antisense strand to SEQ ID NO: 1740701
cuaugcauagguuucgaag

SEQ ID NO: 1740703 - RNA, 19 nt, Artificial Sequence
  Description of Artificial Sequence: Synthetic oligonucleotide
  Sense strand starting at position 2869 of SEQ ID NO: 1562354
uucgaaaccuaugcauaga

SEQ ID NO: 1740704 - RNA, 19 nt, Artificial Sequence
  Description of Artificial Sequence: Synthetic oligonucleotide
  Antisense strand to SEQ ID NO: 1740703
ucuaugcauagguuucgaa

SEQ ID NO: 1740705 - RNA, 19 nt, Artificial Sequence
  Description of Artificial Sequence: Synthetic oligonucleotide
  Sense strand starting at position 2887 of SEQ ID NO: 1562354
aggcaaauugcccagaugu

SEQ ID NO: 1740706 - RNA, 19 nt, Artificial Sequence
  Description of Artificial Sequence: Synthetic oligonucleotide
  Antisense strand to SEQ ID NO: 1740705
acaucugggcaauuugccu

SEQ ID NO: 1740707 - RNA, 19 nt, Artificial Sequence
  Description of Artificial Sequence: Synthetic oligonucleotide
  Sense strand starting at position 2889 of SEQ ID NO: 1562354
gcaaauugcccagauguca

SEQ ID NO: 1740708 - RNA, 19 nt, Artificial Sequence
  Description of Artificial Sequence: Synthetic oligonucleotide
  Antisense strand to SEQ ID NO: 1740707
ugacaucugggcaauuugc

SEQ ID NO: 1740709 - RNA, 19 nt, Artificial Sequence
  Description of Artificial Sequence: Synthetic oligonucleotide
  Sense strand starting at position 3290 of SEQ ID NO: 1562354
acauguuggaauggcuaaa

SEQ ID NO: 1740710 - RNA, 19 nt, Artificial Sequence
  Description of Artificial Sequence: Synthetic oligonucleotide
  Antisense strand to SEQ ID NO: 1740709
uuuagccauuccaacaugu

SEQ ID NO: 1740711 - RNA, 19 nt, Artificial Sequence
  Description of Artificial Sequence: Synthetic oligonucleotide
  Sense strand starting at position 3301 of SEQ ID NO: 1562354
uggcuaaaguaagcuaauu

SEQ ID NO: 1740712 - RNA, 19 nt, Artificial Sequence
  Description of Artificial Sequence: Synthetic oligonucleotide
  Antisense strand to SEQ ID NO: 1740711
aauuagcuuacuuuagcca

SEQ ID NO: 1740713 - RNA, 19 nt, Artificial Sequence
  Description of Artificial Sequence: Synthetic oligonucleotide
  Sense strand starting at position 3356 of SEQ ID NO: 1562354
gugcgaacacuugaaaucu

SEQ ID NO: 1740714 - RNA, 19 nt, Artificial Sequence
  Description of Artificial Sequence: Synthetic oligonucleotide
  Antisense strand to SEQ ID NO: 1740713
agauuucaaguguucgcac

SEQ ID NO: 1740715 - RNA, 19 nt, Artificial Sequence
  Description of Artificial Sequence: Synthetic oligonucleotide
  Sense strand starting at position 3450 of SEQ ID NO: 1562354
agucacagaucucuugaaa

SEQ ID NO: 1740716 - RNA, 19 nt, Artificial Sequence
  Description of Artificial Sequence: Synthetic oligonucleotide
  Antisense strand to SEQ ID NO: 1740715
uuucaagagaucugugacu

SEQ ID NO: 1740717 - RNA, 19 nt, Artificial Sequence
  Description of Artificial Sequence: Synthetic oligonucleotide
  Sense strand starting at position 3567 of SEQ ID NO: 1562354
aaaucaugaugagugucau

SEQ ID NO: 1740718 - RNA, 19 nt, Artificial Sequence
  Description of Artificial Sequence: Synthetic oligonucleotide
  Antisense strand to SEQ ID NO: 1740717
augacacucaucaugauuu

SEQ ID NO: 1740719 - RNA, 19 nt, Artificial Sequence
  Description of Artificial Sequence: Synthetic oligonucleotide
  Sense strand starting at position 3568 of SEQ ID NO: 1562354
aaucaugaugagugucauc

SEQ ID NO: 1740720 - RNA, 19 nt, Artificial Sequence
  Description of Artificial Sequence: Synthetic oligonucleotide
  Antisense strand to SEQ ID NO: 1740719
gaugacacucaucaugauu

SEQ ID NO: 1740721 - RNA, 19 nt, Artificial Sequence
  Description of Artificial Sequence: Synthetic oligonucleotide
  Sense strand starting at position 3573 of SEQ ID NO: 1562354
ugaugagugucaucucaca

SEQ ID NO: 1740722 - RNA, 19 nt, Artificial Sequence
  Description of Artificial Sequence: Synthetic oligonucleotide
  Antisense strand to SEQ ID NO: 1740721
ugugagaugacacucauca

SEQ ID NO: 1740723 - RNA, 19 nt, Artificial Sequence
  Description of Artificial Sequence: Synthetic oligonucleotide
  Sense strand starting at position 3671 of SEQ ID NO: 1562354
gaacguagaucaguacagu

SEQ ID NO: 1740724 - RNA, 19 nt, Artificial Sequence
  Description of Artificial Sequence: Synthetic oligonucleotide
  Antisense strand to SEQ ID NO: 1740723
acuguacugaucuacguuc

SEQ ID NO: 1740725 - RNA, 19 nt, Artificial Sequence
  Description of Artificial Sequence: Synthetic oligonucleotide
  Sense strand starting at position 3674 of SEQ ID NO: 1562354
cguagaucaguacagucau

SEQ ID NO: 1740726 - RNA, 19 nt, Artificial Sequence
  Description of Artificial Sequence: Synthetic oligonucleotide
  Antisense strand to SEQ ID NO: 1740725
augacuguacugaucuacg

SEQ ID NO: 1740727 - RNA, 19 nt, Artificial Sequence
  Description of Artificial Sequence: Synthetic oligonucleotide
  Sense strand starting at position 3927 of SEQ ID NO: 1562354
aagguauggcaucaaccua

SEQ ID NO: 1740728 - RNA, 19 nt, Artificial Sequence
  Description of Artificial Sequence: Synthetic oligonucleotide
  Antisense strand to SEQ ID NO: 1740727
uagguugaugccauaccuu

SEQ ID NO: 1740729 - RNA, 19 nt, Artificial Sequence
  Description of Artificial Sequence: Synthetic oligonucleotide
  Sense strand starting at position 82 of SEQ ID NO: 1562355
uuugaaagcgaucaguuua

SEQ ID NO: 1740730 - RNA, 19 nt, Artificial Sequence
  Description of Artificial Sequence: Synthetic oligonucleotide
  Antisense strand to SEQ ID NO: 1740729
uaaacugaucgcuuucaaa

SEQ ID NO: 1740731 - RNA, 19 nt, Artificial Sequence
  Description of Artificial Sequence: Synthetic oligonucleotide
  Sense strand starting at position 87 of SEQ ID NO: 1562355
aagcgaucaguuuagagag

SEQ ID NO: 1740732 - RNA, 19 nt, Artificial Sequence
  Description of Artificial Sequence: Synthetic oligonucleotide
  Antisense strand to SEQ ID NO: 1740731
cucucuaaacugaucgcuu

SEQ ID NO: 1740733 - RNA, 19 nt, Artificial Sequence
  Description of Artificial Sequence: Synthetic oligonucleotide
  Sense strand starting at position 122 of SEQ ID NO: 1562355
agaaaugaguaucugagca

SEQ ID NO: 1740734 - RNA, 19 nt, Artificial Sequence
  Description of Artificial Sequence: Synthetic oligonucleotide
  Antisense strand to SEQ ID NO: 1740733
ugcucagauacucauuucu

SEQ ID NO: 1740735 - RNA, 19 nt, Artificial Sequence
  Description of Artificial Sequence: Synthetic oligonucleotide
  Sense strand starting at position 135 of SEQ ID NO: 1562355
ugagcauuucccugcggau

SEQ ID NO: 1740736 - RNA, 19 nt, Artificial Sequence
  Description of Artificial Sequence: Synthetic oligonucleotide
  Antisense strand to SEQ ID NO: 1740735
auccgcagggaaaugcuca

SEQ ID NO: 1740737 - RNA, 19 nt, Artificial Sequence
  Description of Artificial Sequence: Synthetic oligonucleotide
  Sense strand starting at position 294 of SEQ ID NO: 1562355
ucucuuacuggcgaauuaa

SEQ ID NO: 1740738 - RNA, 19 nt, Artificial Sequence
  Description of Artificial Sequence: Synthetic oligonucleotide
  Antisense strand to SEQ ID NO: 1740737
uuaauucgccaguaagaga

SEQ ID NO: 1740739 - RNA, 19 nt, Artificial Sequence
  Description of Artificial Sequence: Synthetic oligonucleotide
  Sense strand starting at position 399 of SEQ ID NO: 1562355
ugaaauuguguacaggcua

SEQ ID NO: 1740740 - RNA, 19 nt, Artificial Sequence
  Description of Artificial Sequence: Synthetic oligonucleotide
  Antisense strand to SEQ ID NO: 1740739
uagccuguacacaauuuca

SEQ ID NO: 1740741 - RNA, 19 nt, Artificial Sequence
  Description of Artificial Sequence: Synthetic oligonucleotide
  Sense strand starting at position 404 of SEQ ID NO: 1562355
uuguguacaggcuaacaua

SEQ ID NO: 1740742 - RNA, 19 nt, Artificial Sequence
  Description of Artificial Sequence: Synthetic oligonucleotide
  Antisense strand to SEQ ID NO: 1740741
uauguuagccuguacacaa

SEQ ID NO: 1740743 - RNA, 19 nt, Artificial Sequence
  Description of Artificial Sequence: Synthetic oligonucleotide
  Sense strand starting at position 793 of SEQ ID NO: 1562355
ccguucgcgaaaucauguu

SEQ ID NO: 1740744 - RNA, 19 nt, Artificial Sequence
  Description of Artificial Sequence: Synthetic oligonucleotide
  Antisense strand to SEQ ID NO: 1740743
aacaugauuucgcgaacgg

SEQ ID NO: 1740745 - RNA, 19 nt, Artificial Sequence
  Description of Artificial Sequence: Synthetic oligonucleotide
  Sense strand starting at position 2305 of SEQ ID NO: 1562355
guggaaaccugaguuuauc

SEQ ID NO: 1740746 - RNA, 19 nt, Artificial Sequence
  Description of Artificial Sequence: Synthetic oligonucleotide
  Antisense strand to SEQ ID NO: 1740745
gauaaacucagguuuccac

SEQ ID NO: 1740747 - RNA, 19 nt, Artificial Sequence
  Description of Artificial Sequence: Synthetic oligonucleotide
  Sense strand starting at position 2412 of SEQ ID NO: 1562355
aggucacaugcucaauauu

SEQ ID NO: 1740748 - RNA, 19 nt, Artificial Sequence
  Description of Artificial Sequence: Synthetic oligonucleotide
  Antisense strand to SEQ ID NO: 1740747
aauauugagcaugugaccu

SEQ ID NO: 1740749 - RNA, 19 nt, Artificial Sequence
  Description of Artificial Sequence: Synthetic oligonucleotide
  Sense strand starting at position 2439 of SEQ ID NO: 1562355
aaguuuagauuccugaagu

SEQ ID NO: 1740750 - RNA, 19 nt, Artificial Sequence
  Description of Artificial Sequence: Synthetic oligonucleotide
  Antisense strand to SEQ ID NO: 1740749
acuucaggaaucuaaacuu

SEQ ID NO: 1740751 - RNA, 19 nt, Artificial Sequence
  Description of Artificial Sequence: Synthetic oligonucleotide
  Sense strand starting at position 2452 of SEQ ID NO: 1562355
ugaaguuguggaugaaaua

SEQ ID NO: 1740752 - RNA, 19 nt, Artificial Sequence
  Description of Artificial Sequence: Synthetic oligonucleotide
  Antisense strand to SEQ ID NO: 1740751
uauuucauccacaacuuca

SEQ ID NO: 1740753 - RNA, 19 nt, Artificial Sequence
  Description of Artificial Sequence: Synthetic oligonucleotide
  Sense strand starting at position 2593 of SEQ ID NO: 1562355
uggugacucuaggucuaga

SEQ ID NO: 1740754 - RNA, 19 nt, Artificial Sequence
  Description of Artificial Sequence: Synthetic oligonucleotide
  Antisense strand to SEQ ID NO: 1740753
ucuagaccuagagucacca

SEQ ID NO: 1740755 - RNA, 19 nt, Artificial Sequence
  Description of Artificial Sequence: Synthetic oligonucleotide
  Sense strand starting at position 2596 of SEQ ID NO: 1562355
ugacucuaggucuagaguu

SEQ ID NO: 1740756 - RNA, 19 nt, Artificial Sequence
  Description of Artificial Sequence: Synthetic oligonucleotide
  Antisense strand to SEQ ID NO: 1740755
aacucuagaccuagaguca

SEQ ID NO: 1740757 - RNA, 19 nt, Artificial Sequence
  Description of Artificial Sequence: Synthetic oligonucleotide
  Sense strand starting at position 2598 of SEQ ID NO: 1562355
acucuaggucuagaguuau

SEQ ID NO: 1740758 - RNA, 19 nt, Artificial Sequence
  Description of Artificial Sequence: Synthetic oligonucleotide
  Antisense strand to SEQ ID NO: 1740757
auaacucuagaccuagagu

SEQ ID NO: 1740759 - RNA, 19 nt, Artificial Sequence
  Description of Artificial Sequence: Synthetic oligonucleotide
  Sense strand starting at position 2606 of SEQ ID NO: 1562355
ucuagaguuauccggauaa

SEQ ID NO: 1740760 - RNA, 19 nt, Artificial Sequence
  Description of Artificial Sequence: Synthetic oligonucleotide
  Antisense strand to SEQ ID NO: 1740759
uuauccggauaacucuaga

SEQ ID NO: 1740761 - RNA, 19 nt, Artificial Sequence
  Description of Artificial Sequence: Synthetic oligonucleotide
  Sense strand starting at position 2608 of SEQ ID NO: 1562355
uagaguuauccggauaauu

SEQ ID NO: 1740762 - RNA, 19 nt, Artificial Sequence
  Description of Artificial Sequence: Synthetic oligonucleotide
  Antisense strand to SEQ ID NO: 1740761
aauuauccggauaacucua

SEQ ID NO: 1740763 - RNA, 19 nt, Artificial Sequence
  Description of Artificial Sequence: Synthetic oligonucleotide
  Sense strand starting at position 2627 of SEQ ID NO: 1562355
gagauaucggugcaccuua

SEQ ID NO: 1740764 - RNA, 19 nt, Artificial Sequence
  Description of Artificial Sequence: Synthetic oligonucleotide
  Antisense strand to SEQ ID NO: 1740763
uaaggugcaccgauaucuc

SEQ ID NO: 1740765 - RNA, 19 nt, Artificial Sequence
  Description of Artificial Sequence: Synthetic oligonucleotide
  Sense strand starting at position 2703 of SEQ ID NO: 1562355
aucuauacggcugaaacaa

SEQ ID NO: 1740766 - RNA, 19 nt, Artificial Sequence
  Description of Artificial Sequence: Synthetic oligonucleotide
  Antisense strand to SEQ ID NO: 1740765
uuguuucagccguauagau

SEQ ID NO: 1740767 - RNA, 19 nt, Artificial Sequence
  Description of Artificial Sequence: Synthetic oligonucleotide
  Sense strand starting at position 2711 of SEQ ID NO: 1562355
ggcugaaacaaucacguau

SEQ ID NO: 1740768 - RNA, 19 nt, Artificial Sequence
  Description of Artificial Sequence: Synthetic oligonucleotide
  Antisense strand to SEQ ID NO: 1740767
auacgugauuguuucagcc

SEQ ID NO: 1740769 - RNA, 19 nt, Artificial Sequence
  Description of Artificial Sequence: Synthetic oligonucleotide
  Sense strand starting at position 2739 of SEQ ID NO: 1562355
gauuauuucuuggagacug

SEQ ID NO: 1740770 - RNA, 19 nt, Artificial Sequence
  Description of Artificial Sequence: Synthetic oligonucleotide
  Antisense strand to SEQ ID NO: 1740769
cagucuccaagaaauaauc

SEQ ID NO: 1740771 - RNA, 19 nt, Artificial Sequence
  Description of Artificial Sequence: Synthetic oligonucleotide
  Sense strand starting at position 2854 of SEQ ID NO: 1562355
guaaguuaccauggagaca

SEQ ID NO: 1740772 - RNA, 19 nt, Artificial Sequence
  Description of Artificial Sequence: Synthetic oligonucleotide
  Antisense strand to SEQ ID NO: 1740771
ugucuccaugguaacuuac

SEQ ID NO: 1740773 - RNA, 19 nt, Artificial Sequence
  Description of Artificial Sequence: Synthetic oligonucleotide
  Sense strand starting at position 2867 of SEQ ID NO: 1562355
gagacaugaguauguuacu

SEQ ID NO: 1740774 - RNA, 19 nt, Artificial Sequence
  Description of Artificial Sequence: Synthetic oligonucleotide
  Antisense strand to SEQ ID NO: 1740773
aguaacauacucaugucuc

SEQ ID NO: 1740775 - RNA, 19 nt, Artificial Sequence
  Description of Artificial Sequence: Synthetic oligonucleotide
  Sense strand starting at position 2868 of SEQ ID NO: 1562355
agacaugaguauguuacua

SEQ ID NO: 1740776 - RNA, 19 nt, Artificial Sequence
  Description of Artificial Sequence: Synthetic oligonucleotide
  Antisense strand to SEQ ID NO: 1740775
uaguaacauacucaugucu

SEQ ID NO: 1740777 - RNA, 19 nt, Artificial Sequence
  Description of Artificial Sequence: Synthetic oligonucleotide
  Sense strand starting at position 2979 of SEQ ID NO: 1562355
cccugagaagcuggguaua

SEQ ID NO: 1740778 - RNA, 19 nt, Artificial Sequence
  Description of Artificial Sequence: Synthetic oligonucleotide
  Antisense strand to SEQ ID NO: 1740777
uauacccagcuucucaggg

SEQ ID NO: 1740779 - RNA, 19 nt, Artificial Sequence
  Description of Artificial Sequence: Synthetic oligonucleotide
  Sense strand starting at position 2981 of SEQ ID NO: 1562355
cugagaagcuggguauaga

SEQ ID NO: 1740780 - RNA, 19 nt, Artificial Sequence
  Description of Artificial Sequence: Synthetic oligonucleotide
  Antisense strand to SEQ ID NO: 1740779
ucuauacccagcuucucag

SEQ ID NO: 1740781 - RNA, 19 nt, Artificial Sequence
  Description of Artificial Sequence: Synthetic oligonucleotide
  Sense strand starting at position 3214 of SEQ ID NO: 1562355
ggcuguuuccaacauauau

SEQ ID NO: 1740782 - RNA, 19 nt, Artificial Sequence
  Description of Artificial Sequence: Synthetic oligonucleotide
  Antisense strand to SEQ ID NO: 1740781
auauauguuggaaacagcc

SEQ ID NO: 1740783 - RNA, 19 nt, Artificial Sequence
  Description of Artificial Sequence: Synthetic oligonucleotide
  Sense strand starting at position 3318 of SEQ ID NO: 1562355
gggccuccucuacagaaua

SEQ ID NO: 1740784 - RNA, 19 nt, Artificial Sequence
  Description of Artificial Sequence: Synthetic oligonucleotide
  Antisense strand to SEQ ID NO: 1740783
uauucuguagaggaggccc

SEQ ID NO: 1740785 - RNA, 19 nt, Artificial Sequence
  Description of Artificial Sequence: Synthetic oligonucleotide
  Sense strand starting at position 3350 of SEQ ID NO: 1562355
gaaccuacguccuuaagac

SEQ ID NO: 1740786 - RNA, 19 nt, Artificial Sequence
  Description of Artificial Sequence: Synthetic oligonucleotide
  Antisense strand to SEQ ID NO: 1740785
gucuuaaggacguagguuc

SEQ ID NO: 1740787 - RNA, 19 nt, Artificial Sequence
  Description of Artificial Sequence: Synthetic oligonucleotide
  Sense strand starting at position 3359 of SEQ ID NO: 1562355
uccuuaagacuauggcaaa

SEQ ID NO: 1740788 - RNA, 19 nt, Artificial Sequence
  Description of Artificial Sequence: Synthetic oligonucleotide
  Antisense strand to SEQ ID NO: 1740787
uuugccauagucuuaagga

SEQ ID NO: 1740789 - RNA, 19 nt, Artificial Sequence
  Description of Artificial Sequence: Synthetic oligonucleotide
  Sense strand starting at position 3390 of SEQ ID NO: 1562355
aaaugugcagaauauguua

SEQ ID NO: 1740790 - RNA, 19 nt, Artificial Sequence
  Description of Artificial Sequence: Synthetic oligonucleotide
  Antisense strand to SEQ ID NO: 1740789
uaacauauucugcacauuu

SEQ ID NO: 1740791 - RNA, 19 nt, Artificial Sequence
  Description of Artificial Sequence: Synthetic oligonucleotide
  Sense strand starting at position 3409 of SEQ ID NO: 1562355
gaguguugaguacauggua

SEQ ID NO: 1740792 - RNA, 19 nt, Artificial Sequence
  Description of Artificial Sequence: Synthetic oligonucleotide
  Antisense strand to SEQ ID NO: 1740791
uaccauguacucaacacuc

SEQ ID NO: 1740793 - RNA, 19 nt, Artificial Sequence
  Description of Artificial Sequence: Synthetic oligonucleotide
  Sense strand starting at position 3472 of SEQ ID NO: 1562355
gcucuccucagggaggauu

SEQ ID NO: 1740794 - RNA, 19 nt, Artificial Sequence
  Description of Artificial Sequence: Synthetic oligonucleotide
  Antisense strand to SEQ ID NO: 1740793
aauccucccugaggagagc

SEQ ID NO: 1740795 - RNA, 19 nt, Artificial Sequence
  Description of Artificial Sequence: Synthetic oligonucleotide
  Sense strand starting at position 3557 of SEQ ID NO: 1562355
ggguuuaaaugugugaaag

SEQ ID NO: 1740796 - RNA, 19 nt, Artificial Sequence
  Description of Artificial Sequence: Synthetic oligonucleotide
  Antisense strand to SEQ ID NO: 1740795
cuuucacacauuuaaaccc

SEQ ID NO: 1740797 - RNA, 19 nt, Artificial Sequence
  Description of Artificial Sequence: Synthetic oligonucleotide
  Sense strand starting at position 3852 of SEQ ID NO: 1562355
auaucaggguuccuuacau

SEQ ID NO: 1740798 - RNA, 19 nt, Artificial Sequence
  Description of Artificial Sequence: Synthetic oligonucleotide
  Antisense strand to SEQ ID NO: 1740797
auguaaggaacccugauau

SEQ ID NO: 1740799 - RNA, 19 nt, Artificial Sequence
  Description of Artificial Sequence: Synthetic oligonucleotide
  Sense strand starting at position 3897 of SEQ ID NO: 1562355
ccaguuacucagcagaauu

SEQ ID NO: 1740800 - RNA, 19 nt, Artificial Sequence
  Description of Artificial Sequence: Synthetic oligonucleotide
  Antisense strand to SEQ ID NO: 1740799
aauucugcugaguaacugg

SEQ ID NO: 1740801 - RNA, 19 nt, Artificial Sequence
  Description of Artificial Sequence: Synthetic oligonucleotide
  Sense strand starting at position 3899 of SEQ ID NO: 1562355
aguuacucagcagaauuaa

SEQ ID NO: 1740802 - RNA, 19 nt, Artificial Sequence
  Description of Artificial Sequence: Synthetic oligonucleotide
  Antisense strand to SEQ ID NO: 1740801
uuaauucugcugaguaacu

SEQ ID NO: 1740803 - RNA, 19 nt, Artificial Sequence
  Description of Artificial Sequence: Synthetic oligonucleotide
  Sense strand starting at position 3950 of SEQ ID NO: 1562355
uugacuguuaucgugcgau

SEQ ID NO: 1740804 - RNA, 19 nt, Artificial Sequence
  Description of Artificial Sequence: Synthetic oligonucleotide
  Antisense strand to SEQ ID NO: 1740803
aucgcacgauaacagucaa

SEQ ID NO: 1740805 - RNA, 19 nt, Artificial Sequence
  Description of Artificial Sequence: Synthetic oligonucleotide
  Sense strand starting at position 3952 of SEQ ID NO: 1562355
gacuguuaucgugcgauuc

SEQ ID NO: 1740806 - RNA, 19 nt, Artificial Sequence
  Description of Artificial Sequence: Synthetic oligonucleotide
  Antisense strand to SEQ ID NO: 1740805
gaaucgcacgauaacaguc

SEQ ID NO: 1740807 - RNA, 19 nt, Artificial Sequence
  Description of Artificial Sequence: Synthetic oligonucleotide
  Sense strand starting at position 3982 of SEQ ID NO: 1562355
ugagcuuuacaguaaauua

SEQ ID NO: 1740808 - RNA, 19 nt, Artificial Sequence
  Description of Artificial Sequence: Synthetic oligonucleotide
  Antisense strand to SEQ ID NO: 1740807
uaauuuacuguaaagcuca

SEQ ID NO: 1740809 - RNA, 19 nt, Artificial Sequence
  Description of Artificial Sequence: Synthetic oligonucleotide
  Sense strand starting at position 163 of SEQ ID NO: 1562356
uguaauuacuagcuacaga

SEQ ID NO: 1740810 - RNA, 19 nt, Artificial Sequence
  Description of Artificial Sequence: Synthetic oligonucleotide
  Antisense strand to SEQ ID NO: 1740809
ucuguagcuaguaauuaca

SEQ ID NO: 1740811 - RNA, 19 nt, Artificial Sequence
  Description of Artificial Sequence: Synthetic oligonucleotide
  Sense strand starting at position 437 of SEQ ID NO: 1562356
agcugagaaugguuacauu

SEQ ID NO: 1740812 - RNA, 19 nt, Artificial Sequence
  Description of Artificial Sequence: Synthetic oligonucleotide
  Antisense strand to SEQ ID NO: 1740811
aauguaaccauucucagcu

SEQ ID NO: 1740813 - RNA, 19 nt, Artificial Sequence
  Description of Artificial Sequence: Synthetic oligonucleotide
  Sense strand starting at position 440 of SEQ ID NO: 1562356
ugagaaugguuacauuuaa

SEQ ID NO: 1740814 - RNA, 19 nt, Artificial Sequence
  Description of Artificial Sequence: Synthetic oligonucleotide
  Antisense strand to SEQ ID NO: 1740813
uuaaauguaaccauucuca

SEQ ID NO: 1740815 - RNA, 19 nt, Artificial Sequence
  Description of Artificial Sequence: Synthetic oligonucleotide
  Sense strand starting at position 503 of SEQ ID NO: 1562356
guaaucacuuauguaagau

SEQ ID NO: 1740816 - RNA, 19 nt, Artificial Sequence
  Description of Artificial Sequence: Synthetic oligonucleotide
  Antisense strand to SEQ ID NO: 1740815
aucuuacauaagugauuac

SEQ ID NO: 1740817 - RNA, 19 nt, Artificial Sequence
  Description of Artificial Sequence: Synthetic oligonucleotide
  Sense strand starting at position 606 of SEQ ID NO: 1562356
uuugaaagcgaucaguuua

SEQ ID NO: 1740818 - RNA, 19 nt, Artificial Sequence
  Description of Artificial Sequence: Synthetic oligonucleotide
  Antisense strand to SEQ ID NO: 1740817
uaaacugaucgcuuucaaa

SEQ ID NO: 1740819 - RNA, 19 nt, Artificial Sequence
  Description of Artificial Sequence: Synthetic oligonucleotide
  Sense strand starting at position 611 of SEQ ID NO: 1562356
aagcgaucaguuuagagag

SEQ ID NO: 1740820 - RNA, 19 nt, Artificial Sequence
  Description of Artificial Sequence: Synthetic oligonucleotide
  Antisense strand to SEQ ID NO: 1740819
cucucuaaacugaucgcuu

SEQ ID NO: 1740821 - RNA, 19 nt, Artificial Sequence
  Description of Artificial Sequence: Synthetic oligonucleotide
  Sense strand starting at position 646 of SEQ ID NO: 1562356
agaaaugaguaucugagca

SEQ ID NO: 1740822 - RNA, 19 nt, Artificial Sequence
  Description of Artificial Sequence: Synthetic oligonucleotide
  Antisense strand to SEQ ID NO: 1740821
ugcucagauacucauuucu

SEQ ID NO: 1740823 - RNA, 19 nt, Artificial Sequence
  Description of Artificial Sequence: Synthetic oligonucleotide
  Sense strand starting at position 659 of SEQ ID NO: 1562356
ugagcauuucccugcggau

SEQ ID NO: 1740824 - RNA, 19 nt, Artificial Sequence
  Description of Artificial Sequence: Synthetic oligonucleotide
  Antisense strand to SEQ ID NO: 1740823
auccgcagggaaaugcuca

SEQ ID NO: 1740825 - RNA, 19 nt, Artificial Sequence
  Description of Artificial Sequence: Synthetic oligonucleotide
  Sense strand starting at position 818 of SEQ ID NO: 1562356
ucucuuacuggcgaauuaa

SEQ ID NO: 1740826 - RNA, 19 nt, Artificial Sequence
  Description of Artificial Sequence: Synthetic oligonucleotide
  Antisense strand to SEQ ID NO: 1740825
uuaauucgccaguaagaga

SEQ ID NO: 1740827 - RNA, 19 nt, Artificial Sequence
  Description of Artificial Sequence: Synthetic oligonucleotide
  Sense strand starting at position 923 of SEQ ID NO: 1562356
ugaaauuguguacaggcua

SEQ ID NO: 1740828 - RNA, 19 nt, Artificial Sequence
  Description of Artificial Sequence: Synthetic oligonucleotide
  Antisense strand to SEQ ID NO: 1740827
uagccuguacacaauuuca

SEQ ID NO: 1740829 - RNA, 19 nt, Artificial Sequence
  Description of Artificial Sequence: Synthetic oligonucleotide
  Sense strand starting at position 928 of SEQ ID NO: 1562356
uuguguacaggcuaacaua

SEQ ID NO: 1740830 - RNA, 19 nt, Artificial Sequence
  Description of Artificial Sequence: Synthetic oligonucleotide
  Antisense strand to SEQ ID NO: 1740829
uauguuagccuguacacaa

SEQ ID NO: 1740831 - RNA, 19 nt, Artificial Sequence
  Description of Artificial Sequence: Synthetic oligonucleotide
  Sense strand starting at position 1317 of SEQ ID NO: 1562356
ccguucgcgaaaucauguu

SEQ ID NO: 1740832 - RNA, 19 nt, Artificial Sequence
  Description of Artificial Sequence: Synthetic oligonucleotide
  Antisense strand to SEQ ID NO: 1740831
aacaugauuucgcgaacgg

SEQ ID NO: 1740833 - RNA, 19 nt, Artificial Sequence
  Description of Artificial Sequence: Synthetic oligonucleotide
  Sense strand starting at position 2829 of SEQ ID NO: 1562356
guggaaaccugaguuuauc

SEQ ID NO: 1740834 - RNA, 19 nt, Artificial Sequence
  Description of Artificial Sequence: Synthetic oligonucleotide
  Antisense strand to SEQ ID NO: 1740833
gauaaacucagguuuccac

SEQ ID NO: 1740835 - RNA, 19 nt, Artificial Sequence
  Description of Artificial Sequence: Synthetic oligonucleotide
  Sense strand starting at position 2839 of SEQ ID NO: 1562356
gaguuuaucugacuccgaa

SEQ ID NO: 1740836 - RNA, 19 nt, Artificial Sequence
  Description of Artificial Sequence: Synthetic oligonucleotide
  Antisense strand to SEQ ID NO: 1740835
uucggagucagauaaacuc

SEQ ID NO: 1740837 - RNA, 19 nt, Artificial Sequence
  Description of Artificial Sequence: Synthetic oligonucleotide
  Sense strand starting at position 2851 of SEQ ID NO: 1562356
cuccgaaacccuggucaaa

SEQ ID NO: 1740838 - RNA, 19 nt, Artificial Sequence
  Description of Artificial Sequence: Synthetic oligonucleotide
  Antisense strand to SEQ ID NO: 1740837
uuugaccaggguuucggag

SEQ ID NO: 1740839 - RNA, 19 nt, Artificial Sequence
  Description of Artificial Sequence: Synthetic oligonucleotide
  Sense strand starting at position 2936 of SEQ ID NO: 1562356
aggucacaugcucaauauu

SEQ ID NO: 1740840 - RNA, 19 nt, Artificial Sequence
  Description of Artificial Sequence: Synthetic oligonucleotide
  Antisense strand to SEQ ID NO: 1740839
aauauugagcaugugaccu

SEQ ID NO: 1740841 - RNA, 19 nt, Artificial Sequence
  Description of Artificial Sequence: Synthetic oligonucleotide
  Sense strand starting at position 2963 of SEQ ID NO: 1562356
aaguuuagauuccugaagu

SEQ ID NO: 1740842 - RNA, 19 nt, Artificial Sequence
  Description of Artificial Sequence: Synthetic oligonucleotide
  Antisense strand to SEQ ID NO: 1740841
acuucaggaaucuaaacuu

SEQ ID NO: 1740843 - RNA, 19 nt, Artificial Sequence
  Description of Artificial Sequence: Synthetic oligonucleotide
  Sense strand starting at position 2970 of SEQ ID NO: 1562356
gauuccugaaguuguggau

SEQ ID NO: 1740844 - RNA, 19 nt, Artificial Sequence
  Description of Artificial Sequence: Synthetic oligonucleotide
  Antisense strand to SEQ ID NO: 1740843
auccacaacuucaggaauc

SEQ ID NO: 1740845 - RNA, 19 nt, Artificial Sequence
  Description of Artificial Sequence: Synthetic oligonucleotide
  Sense strand starting at position 2976 of SEQ ID NO: 1562356
ugaaguuguggaugaaaua

SEQ ID NO: 1740846 - RNA, 19 nt, Artificial Sequence
  Description of Artificial Sequence: Synthetic oligonucleotide
  Antisense strand to SEQ ID NO: 1740845
uauuucauccacaacuuca

SEQ ID NO: 1740847 - RNA, 19 nt, Artificial Sequence
  Description of Artificial Sequence: Synthetic oligonucleotide
  Sense strand starting at position 3117 of SEQ ID NO: 1562356
uggugacucuaggucuaga

SEQ ID NO: 1740848 - RNA, 19 nt, Artificial Sequence
  Description of Artificial Sequence: Synthetic oligonucleotide
  Antisense strand to SEQ ID NO: 1740847
ucuagaccuagagucacca

SEQ ID NO: 1740849 - RNA, 19 nt, Artificial Sequence
  Description of Artificial Sequence: Synthetic oligonucleotide
  Sense strand starting at position 3120 of SEQ ID NO: 1562356
ugacucuaggucuagaguu

SEQ ID NO: 1740850 - RNA, 19 nt, Artificial Sequence
  Description of Artificial Sequence: Synthetic oligonucleotide
  Antisense strand to SEQ ID NO: 1740849
aacucuagaccuagaguca

SEQ ID NO: 1740851 - RNA, 19 nt, Artificial Sequence
  Description of Artificial Sequence: Synthetic oligonucleotide
  Sense strand starting at position 3122 of SEQ ID NO: 1562356
acucuaggucuagaguuau

SEQ ID NO: 1740852 - RNA, 19 nt, Artificial Sequence
  Description of Artificial Sequence: Synthetic oligonucleotide
  Antisense strand to SEQ ID NO: 1740851
auaacucuagaccuagagu

SEQ ID NO: 1740853 - RNA, 19 nt, Artificial Sequence
  Description of Artificial Sequence: Synthetic oligonucleotide
  Sense strand starting at position 3130 of SEQ ID NO: 1562356
ucuagaguuauccggauaa

SEQ ID NO: 1740854 - RNA, 19 nt, Artificial Sequence
  Description of Artificial Sequence: Synthetic oligonucleotide
  Antisense strand to SEQ ID NO: 1740853
uuauccggauaacucuaga

SEQ ID NO: 1740855 - RNA, 19 nt, Artificial Sequence
  Description of Artificial Sequence: Synthetic oligonucleotide
  Sense strand starting at position 3132 of SEQ ID NO: 1562356
uagaguuauccggauaauu

SEQ ID NO: 1740856 - RNA, 19 nt, Artificial Sequence
  Description of Artificial Sequence: Synthetic oligonucleotide
  Antisense strand to SEQ ID NO: 1740855
aauuauccggauaacucua

SEQ ID NO: 1740857 - RNA, 19 nt, Artificial Sequence
  Description of Artificial Sequence: Synthetic oligonucleotide
  Sense strand starting at position 3151 of SEQ ID NO: 1562356
gagauaucggugcaccuua

SEQ ID NO: 1740858 - RNA, 19 nt, Artificial Sequence
  Description of Artificial Sequence: Synthetic oligonucleotide
  Antisense strand to SEQ ID NO: 1740857
uaaggugcaccgauaucuc

SEQ ID NO: 1740859 - RNA, 19 nt, Artificial Sequence
  Description of Artificial Sequence: Synthetic oligonucleotide
  Sense strand starting at position 3227 of SEQ ID NO: 1562356
aucuauacggcugaaacaa

SEQ ID NO: 1740860 - RNA, 19 nt, Artificial Sequence
  Description of Artificial Sequence: Synthetic oligonucleotide
  Antisense strand to SEQ ID NO: 1740859
uuguuucagccguauagau

SEQ ID NO: 1740861 - RNA, 19 nt, Artificial Sequence
  Description of Artificial Sequence: Synthetic oligonucleotide
  Sense strand starting at position 3235 of SEQ ID NO: 1562356
ggcugaaacaaucacguau

SEQ ID NO: 1740862 - RNA, 19 nt, Artificial Sequence
  Description of Artificial Sequence: Synthetic oligonucleotide
  Antisense strand to SEQ ID NO: 1740861
auacgugauuguuucagcc

SEQ ID NO: 1740863 - RNA, 19 nt, Artificial Sequence
  Description of Artificial Sequence: Synthetic oligonucleotide
  Sense strand starting at position 3263 of SEQ ID NO: 1562356
gauuauuucuuggagacug

SEQ ID NO: 1740864 - RNA, 19 nt, Artificial Sequence
  Description of Artificial Sequence: Synthetic oligonucleotide
  Antisense strand to SEQ ID NO: 1740863
cagucuccaagaaauaauc

SEQ ID NO: 1740865 - RNA, 19 nt, Artificial Sequence
  Description of Artificial Sequence: Synthetic oligonucleotide
  Sense strand starting at position 3378 of SEQ ID NO: 1562356
guaaguuaccauggagaca

SEQ ID NO: 1740866 - RNA, 19 nt, Artificial Sequence
  Description of Artificial Sequence: Synthetic oligonucleotide
  Antisense strand to SEQ ID NO: 1740865
ugucuccaugguaacuuac

SEQ ID NO: 1740867 - RNA, 19 nt, Artificial Sequence
  Description of Artificial Sequence: Synthetic oligonucleotide
  Sense strand starting at position 3391 of SEQ ID NO: 1562356
gagacaugaguauguuacu

SEQ ID NO: 1740868 - RNA, 19 nt, Artificial Sequence
  Description of Artificial Sequence: Synthetic oligonucleotide
  Antisense strand to SEQ ID NO: 1740867
aguaacauacucaugucuc

SEQ ID NO: 1740869 - RNA, 19 nt, Artificial Sequence
  Description of Artificial Sequence: Synthetic oligonucleotide
  Sense strand starting at position 3392 of SEQ ID NO: 1562356
agacaugaguauguuacua

SEQ ID NO: 1740870 - RNA, 19 nt, Artificial Sequence
  Description of Artificial Sequence: Synthetic oligonucleotide
  Antisense strand to SEQ ID NO: 1740869
uaguaacauacucaugucu

SEQ ID NO: 1740871 - RNA, 19 nt, Artificial Sequence
  Description of Artificial Sequence: Synthetic oligonucleotide
  Sense strand starting at position 3503 of SEQ ID NO: 1562356
cccugagaagcuggguaua

SEQ ID NO: 1740872 - RNA, 19 nt, Artificial Sequence
  Description of Artificial Sequence: Synthetic oligonucleotide
  Antisense strand to SEQ ID NO: 1740871
uauacccagcuucucaggg

SEQ ID NO: 1740873 - RNA, 19 nt, Artificial Sequence
  Description of Artificial Sequence: Synthetic oligonucleotide
  Sense strand starting at position 3505 of SEQ ID NO: 1562356
cugagaagcuggguauaga

SEQ ID NO: 1740874 - RNA, 19 nt, Artificial Sequence
  Description of Artificial Sequence: Synthetic oligonucleotide
  Antisense strand to SEQ ID NO: 1740873
ucuauacccagcuucucag

SEQ ID NO: 1740875 - RNA, 19 nt, Artificial Sequence
  Description of Artificial Sequence: Synthetic oligonucleotide
  Sense strand starting at position 3738 of SEQ ID NO: 1562356
ggcuguuuccaacauauau

SEQ ID NO: 1740876 - RNA, 19 nt, Artificial Sequence
  Description of Artificial Sequence: Synthetic oligonucleotide
  Antisense strand to SEQ ID NO: 1740875
auauauguuggaaacagcc

SEQ ID NO: 1740877 - RNA, 19 nt, Artificial Sequence
  Description of Artificial Sequence: Synthetic oligonucleotide
  Sense strand starting at position 3842 of SEQ ID NO: 1562356
gggccuccucuacagaaua

SEQ ID NO: 1740878 - RNA, 19 nt, Artificial Sequence
  Description of Artificial Sequence: Synthetic oligonucleotide
  Antisense strand to SEQ ID NO: 1740877
uauucuguagaggaggccc

SEQ ID NO: 1740879 - RNA, 19 nt, Artificial Sequence
  Description of Artificial Sequence: Synthetic oligonucleotide
  Sense strand starting at position 3874 of SEQ ID NO: 1562356
gaaccuacguccuuaagac

SEQ ID NO: 1740880 - RNA, 19 nt, Artificial Sequence
  Description of Artificial Sequence: Synthetic oligonucleotide
  Antisense strand to SEQ ID NO: 1740879
gucuuaaggacguagguuc

SEQ ID NO: 1740881 - RNA, 19 nt, Artificial Sequence
  Description of Artificial Sequence: Synthetic oligonucleotide
  Sense strand starting at position 3883 of SEQ ID NO: 1562356
uccuuaagacuauggcaaa

SEQ ID NO: 1740882 - RNA, 19 nt, Artificial Sequence
  Description of Artificial Sequence: Synthetic oligonucleotide
  Antisense strand to SEQ ID NO: 1740881
uuugccauagucuuaagga

SEQ ID NO: 1740883 - RNA, 19 nt, Artificial Sequence
  Description of Artificial Sequence: Synthetic oligonucleotide
  Sense strand starting at position 3914 of SEQ ID NO: 1562356
aaaugugcagaauauguua

SEQ ID NO: 1740884 - RNA, 19 nt, Artificial Sequence
  Description of Artificial Sequence: Synthetic oligonucleotide
  Antisense strand to SEQ ID NO: 1740883
uaacauauucugcacauuu

SEQ ID NO: 1740885 - RNA, 19 nt, Artificial Sequence
  Description of Artificial Sequence: Synthetic oligonucleotide
  Sense strand starting at position 3916 of SEQ ID NO: 1562356
augugcagaauauguuaga

SEQ ID NO: 1740886 - RNA, 19 nt, Artificial Sequence
  Description of Artificial Sequence: Synthetic oligonucleotide
  Antisense strand to SEQ ID NO: 1740885
ucuaacauauucugcacau

SEQ ID NO: 1740887 - RNA, 19 nt, Artificial Sequence
  Description of Artificial Sequence: Synthetic oligonucleotide
  Sense strand starting at position 3933 of SEQ ID NO: 1562356
gaguguugaguacauggua

SEQ ID NO: 1740888 - RNA, 19 nt, Artificial Sequence
  Description of Artificial Sequence: Synthetic oligonucleotide
  Antisense strand to SEQ ID NO: 1740887
uaccauguacucaacacuc

SEQ ID NO: 1740889 - RNA, 19 nt, Artificial Sequence
  Description of Artificial Sequence: Synthetic oligonucleotide
  Sense strand starting at position 34 of SEQ ID NO: 1562357
gcuagaugguggcugaacu

SEQ ID NO: 1740890 - RNA, 19 nt, Artificial Sequence
  Description of Artificial Sequence: Synthetic oligonucleotide
  Antisense strand to SEQ ID NO: 1740889
aguucagccaccaucuagc

SEQ ID NO: 1740891 - RNA, 19 nt, Artificial Sequence
  Description of Artificial Sequence: Synthetic oligonucleotide
  Sense strand starting at position 220 of SEQ ID NO: 1562357
guggguggcuugccaaaua

SEQ ID NO: 1740892 - RNA, 19 nt, Artificial Sequence
  Description of Artificial Sequence: Synthetic oligonucleotide
  Antisense strand to SEQ ID NO: 1740891
uauuuggcaagccacccac

SEQ ID NO: 1740893 - RNA, 19 nt, Artificial Sequence
  Description of Artificial Sequence: Synthetic oligonucleotide
  Sense strand starting at position 253 of SEQ ID NO: 1562357
uuccuuugcuagguaggaa

SEQ ID NO: 1740894 - RNA, 19 nt, Artificial Sequence
  Description of Artificial Sequence: Synthetic oligonucleotide
  Antisense strand to SEQ ID NO: 1740893
uuccuaccuagcaaaggaa

SEQ ID NO: 1740895 - RNA, 19 nt, Artificial Sequence
  Description of Artificial Sequence: Synthetic oligonucleotide
  Sense strand starting at position 254 of SEQ ID NO: 1562357
uccuuugcuagguaggaau

SEQ ID NO: 1740896 - RNA, 19 nt, Artificial Sequence
  Description of Artificial Sequence: Synthetic oligonucleotide
  Antisense strand to SEQ ID NO: 1740895
auuccuaccuagcaaagga

SEQ ID NO: 1740897 - RNA, 19 nt, Artificial Sequence
  Description of Artificial Sequence: Synthetic oligonucleotide
  Sense strand starting at position 268 of SEQ ID NO: 1562357
ggaauacugccuugauauu

SEQ ID NO: 1740898 - RNA, 19 nt, Artificial Sequence
  Description of Artificial Sequence: Synthetic oligonucleotide
  Antisense strand to SEQ ID NO: 1740897
aauaucaaggcaguauucc

SEQ ID NO: 1740899 - RNA, 19 nt, Artificial Sequence
  Description of Artificial Sequence: Synthetic oligonucleotide
  Sense strand starting at position 317 of SEQ ID NO: 1562357
agggcucuccacuaacaau

SEQ ID NO: 1740900 - RNA, 19 nt, Artificial Sequence
  Description of Artificial Sequence: Synthetic oligonucleotide
  Antisense strand to SEQ ID NO: 1740899
auuguuaguggagagcccu

SEQ ID NO: 1740901 - RNA, 19 nt, Artificial Sequence
  Description of Artificial Sequence: Synthetic oligonucleotide
  Sense strand starting at position 334 of SEQ ID NO: 1562357
augacauucucuguaagua

SEQ ID NO: 1740902 - RNA, 19 nt, Artificial Sequence
  Description of Artificial Sequence: Synthetic oligonucleotide
  Antisense strand to SEQ ID NO: 1740901
uacuuacagagaaugucau

SEQ ID NO: 1740903 - RNA, 19 nt, Artificial Sequence
  Description of Artificial Sequence: Synthetic oligonucleotide
  Sense strand starting at position 335 of SEQ ID NO: 1562357
ugacauucucuguaaguaa

SEQ ID NO: 1740904 - RNA, 19 nt, Artificial Sequence
  Description of Artificial Sequence: Synthetic oligonucleotide
  Antisense strand to SEQ ID NO: 1740903
uuacuuacagagaauguca

SEQ ID NO: 1740905 - RNA, 19 nt, Artificial Sequence
  Description of Artificial Sequence: Synthetic oligonucleotide
  Sense strand starting at position 387 of SEQ ID NO: 1562357
uguucuuugcuauguacua

SEQ ID NO: 1740906 - RNA, 19 nt, Artificial Sequence
  Description of Artificial Sequence: Synthetic oligonucleotide
  Antisense strand to SEQ ID NO: 1740905
uaguacauagcaaagaaca

SEQ ID NO: 1740907 - RNA, 19 nt, Artificial Sequence
  Description of Artificial Sequence: Synthetic oligonucleotide
  Sense strand starting at position 605 of SEQ ID NO: 1562357
gggagauccaggugugcuu

SEQ ID NO: 1740908 - RNA, 19 nt, Artificial Sequence
  Description of Artificial Sequence: Synthetic oligonucleotide
  Antisense strand to SEQ ID NO: 1740907
aagcacaccuggaucuccc

SEQ ID NO: 1740909 - RNA, 19 nt, Artificial Sequence
  Description of Artificial Sequence: Synthetic oligonucleotide
  Sense strand starting at position 626 of SEQ ID NO: 1562357
gcggcaaggacauguguua

SEQ ID NO: 1740910 - RNA, 19 nt, Artificial Sequence
  Description of Artificial Sequence: Synthetic oligonucleotide
  Antisense strand to SEQ ID NO: 1740909
uaacacauguccuugccgc

SEQ ID NO: 1740911 - RNA, 19 nt, Artificial Sequence
  Description of Artificial Sequence: Synthetic oligonucleotide
  Sense strand starting at position 633 of SEQ ID NO: 1562357
ggacauguguuaccuuaag

SEQ ID NO: 1740912 - RNA, 19 nt, Artificial Sequence
  Description of Artificial Sequence: Synthetic oligonucleotide
  Antisense strand to SEQ ID NO: 1740911
cuuaagguaacacaugucc

SEQ ID NO: 1740913 - RNA, 19 nt, Artificial Sequence
  Description of Artificial Sequence: Synthetic oligonucleotide
  Sense strand starting at position 683 of SEQ ID NO: 1562357
uauggcuaucgucaaccua

SEQ ID NO: 1740914 - RNA, 19 nt, Artificial Sequence
  Description of Artificial Sequence: Synthetic oligonucleotide
  Antisense strand to SEQ ID NO: 1740913
uagguugacgauagccaua

SEQ ID NO: 1740915 - RNA, 19 nt, Artificial Sequence
  Description of Artificial Sequence: Synthetic oligonucleotide
  Sense strand starting at position 796 of SEQ ID NO: 1562357
ccuccuaguuuauucgaga

SEQ ID NO: 1740916 - RNA, 19 nt, Artificial Sequence
  Description of Artificial Sequence: Synthetic oligonucleotide
  Antisense strand to SEQ ID NO: 1740915
ucucgaauaaacuaggagg

SEQ ID NO: 1740917 - RNA, 19 nt, Artificial Sequence
  Description of Artificial Sequence: Synthetic oligonucleotide
  Sense strand starting at position 797 of SEQ ID NO: 1562357
cuccuaguuuauucgagag

SEQ ID NO: 1740918 - RNA, 19 nt, Artificial Sequence
  Description of Artificial Sequence: Synthetic oligonucleotide
  Antisense strand to SEQ ID NO: 1740917
cucucgaauaaacuaggag

SEQ ID NO: 1740919 - RNA, 19 nt, Artificial Sequence
  Description of Artificial Sequence: Synthetic oligonucleotide
  Sense strand starting at position 801 of SEQ ID NO: 1562357
uaguuuauucgagaguagg

SEQ ID NO: 1740920 - RNA, 19 nt, Artificial Sequence
  Description of Artificial Sequence: Synthetic oligonucleotide
  Antisense strand to SEQ ID NO: 1740919
ccuacucucgaauaaacua

SEQ ID NO: 1740921 - RNA, 19 nt, Artificial Sequence
  Description of Artificial Sequence: Synthetic oligonucleotide
  Sense strand starting at position 1004 of SEQ ID NO: 1562357
gggcuagucuccuuacaug

SEQ ID NO: 1740922 - RNA, 19 nt, Artificial Sequence
  Description of Artificial Sequence: Synthetic oligonucleotide
  Antisense strand to SEQ ID NO: 1740921
cauguaaggagacuagccc

SEQ ID NO: 1740923 - RNA, 19 nt, Artificial Sequence
  Description of Artificial Sequence: Synthetic oligonucleotide
  Sense strand starting at position 1155 of SEQ ID NO: 1562357
ucccuaaugcuaggaaauu

SEQ ID NO: 1740924 - RNA, 19 nt, Artificial Sequence
  Description of Artificial Sequence: Synthetic oligonucleotide
  Antisense strand to SEQ ID NO: 1740923
aauuuccuagcauuaggga

SEQ ID NO: 1740925 - RNA, 19 nt, Artificial Sequence
  Description of Artificial Sequence: Synthetic oligonucleotide
  Sense strand starting at position 1167 of SEQ ID NO: 1562357
ggaaauugacgaggucaac

SEQ ID NO: 1740926 - RNA, 19 nt, Artificial Sequence
  Description of Artificial Sequence: Synthetic oligonucleotide
  Antisense strand to SEQ ID NO: 1740925
guugaccucgucaauuucc

SEQ ID NO: 1740927 - RNA, 19 nt, Artificial Sequence
  Description of Artificial Sequence: Synthetic oligonucleotide
  Sense strand starting at position 1292 of SEQ ID NO: 1562357
agacaagugucugugagca

SEQ ID NO: 1740928 - RNA, 19 nt, Artificial Sequence
  Description of Artificial Sequence: Synthetic oligonucleotide
  Antisense strand to SEQ ID NO: 1740927
ugcucacagacacuugucu

SEQ ID NO: 1740929 - RNA, 19 nt, Artificial Sequence
  Description of Artificial Sequence: Synthetic oligonucleotide
  Sense strand starting at position 1304 of SEQ ID NO: 1562357
gugagcacgccucaacuuu

SEQ ID NO: 1740930 - RNA, 19 nt, Artificial Sequence
  Description of Artificial Sequence: Synthetic oligonucleotide
  Antisense strand to SEQ ID NO: 1740929
aaaguugaggcgugcucac

SEQ ID NO: 1740931 - RNA, 19 nt, Artificial Sequence
  Description of Artificial Sequence: Synthetic oligonucleotide
  Sense strand starting at position 1415 of SEQ ID NO: 1562357
gcgcucuuaccagagaagu

SEQ ID NO: 1740932 - RNA, 19 nt, Artificial Sequence
  Description of Artificial Sequence: Synthetic oligonucleotide
  Antisense strand to SEQ ID NO: 1740931
acuucucugguaagagcgc

SEQ ID NO: 1740933 - RNA, 19 nt, Artificial Sequence
  Description of Artificial Sequence: Synthetic oligonucleotide
  Sense strand starting at position 2481 of SEQ ID NO: 1562357
gccacagcaucuuucugaa

SEQ ID NO: 1740934 - RNA, 19 nt, Artificial Sequence
  Description of Artificial Sequence: Synthetic oligonucleotide
  Antisense strand to SEQ ID NO: 1740933
uucagaaagaugcuguggc

SEQ ID NO: 1740935 - RNA, 19 nt, Artificial Sequence
  Description of Artificial Sequence: Synthetic oligonucleotide
  Sense strand starting at position 2897 of SEQ ID NO: 1562357
agaggugggccguaaagau

SEQ ID NO: 1740936 - RNA, 19 nt, Artificial Sequence
  Description of Artificial Sequence: Synthetic oligonucleotide
  Antisense strand to SEQ ID NO: 1740935
aucuuuacggcccaccucu

SEQ ID NO: 1740937 - RNA, 19 nt, Artificial Sequence
  Description of Artificial Sequence: Synthetic oligonucleotide
  Sense strand starting at position 2924 of SEQ ID NO: 1562357
gguggauggcauuagauac

SEQ ID NO: 1740938 - RNA, 19 nt, Artificial Sequence
  Description of Artificial Sequence: Synthetic oligonucleotide
  Antisense strand to SEQ ID NO: 1740937
guaucuaaugccauccacc

SEQ ID NO: 1740939 - RNA, 19 nt, Artificial Sequence
  Description of Artificial Sequence: Synthetic oligonucleotide
  Sense strand starting at position 3024 of SEQ ID NO: 1562357
gcuaaacaucaguguuuau

SEQ ID NO: 1740940 - RNA, 19 nt, Artificial Sequence
  Description of Artificial Sequence: Synthetic oligonucleotide
  Antisense strand to SEQ ID NO: 1740939
auaaacacugauguuuagc

SEQ ID NO: 1740941 - RNA, 19 nt, Artificial Sequence
  Description of Artificial Sequence: Synthetic oligonucleotide
  Sense strand starting at position 3027 of SEQ ID NO: 1562357
aaacaucaguguuuaucga

SEQ ID NO: 1740942 - RNA, 19 nt, Artificial Sequence
  Description of Artificial Sequence: Synthetic oligonucleotide
  Antisense strand to SEQ ID NO: 1740941
ucgauaaacacugauguuu

SEQ ID NO: 1740943 - RNA, 19 nt, Artificial Sequence
  Description of Artificial Sequence: Synthetic oligonucleotide
  Sense strand starting at position 3056 of SEQ ID NO: 1562357
gccugucuggcauaaugau

SEQ ID NO: 1740944 - RNA, 19 nt, Artificial Sequence
  Description of Artificial Sequence: Synthetic oligonucleotide
  Antisense strand to SEQ ID NO: 1740943
aucauuaugccagacaggc

SEQ ID NO: 1740945 - RNA, 19 nt, Artificial Sequence
  Description of Artificial Sequence: Synthetic oligonucleotide
  Sense strand starting at position 3176 of SEQ ID NO: 1562357
ugggaguguggguaaggau

SEQ ID NO: 1740946 - RNA, 19 nt, Artificial Sequence
  Description of Artificial Sequence: Synthetic oligonucleotide
  Antisense strand to SEQ ID NO: 1740945
auccuuacccacacuccca

SEQ ID NO: 1740947 - RNA, 19 nt, Artificial Sequence
  Description of Artificial Sequence: Synthetic oligonucleotide
  Sense strand starting at position 3218 of SEQ ID NO: 1562357
guaaguaauguuuguccaa

SEQ ID NO: 1740948 - RNA, 19 nt, Artificial Sequence
  Description of Artificial Sequence: Synthetic oligonucleotide
  Antisense strand to SEQ ID NO: 1740947
uuggacaaacauuacuuac

SEQ ID NO: 1740949 - RNA, 19 nt, Artificial Sequence
  Description of Artificial Sequence: Synthetic oligonucleotide
  Sense strand starting at position 3313 of SEQ ID NO: 1562357
ccagguucugcgcuaguga

SEQ ID NO: 1740950 - RNA, 19 nt, Artificial Sequence
  Description of Artificial Sequence: Synthetic oligonucleotide
  Antisense strand to SEQ ID NO: 1740949
ucacuagcgcagaaccugg

SEQ ID NO: 1740951 - RNA, 19 nt, Artificial Sequence
  Description of Artificial Sequence: Synthetic oligonucleotide
  Sense strand starting at position 3432 of SEQ ID NO: 1562357
acuguuacucacugugaca

SEQ ID NO: 1740952 - RNA, 19 nt, Artificial Sequence
  Description of Artificial Sequence: Synthetic oligonucleotide
  Antisense strand to SEQ ID NO: 1740951
ugucacagugaguaacagu

SEQ ID NO: 1740953 - RNA, 19 nt, Artificial Sequence
  Description of Artificial Sequence: Synthetic oligonucleotide
  Sense strand starting at position 3458 of SEQ ID NO: 1562357
caggcuuucuuaccuggua

SEQ ID NO: 1740954 - RNA, 19 nt, Artificial Sequence
  Description of Artificial Sequence: Synthetic oligonucleotide
  Antisense strand to SEQ ID NO: 1740953
uaccagguaagaaagccug

SEQ ID NO: 1740955 - RNA, 19 nt, Artificial Sequence
  Description of Artificial Sequence: Synthetic oligonucleotide
  Sense strand starting at position 3459 of SEQ ID NO: 1562357
aggcuuucuuaccugguaa

SEQ ID NO: 1740956 - RNA, 19 nt, Artificial Sequence
  Description of Artificial Sequence: Synthetic oligonucleotide
  Antisense strand to SEQ ID NO: 1740955
uuaccagguaagaaagccu

SEQ ID NO: 1740957 - RNA, 19 nt, Artificial Sequence
  Description of Artificial Sequence: Synthetic oligonucleotide
  Sense strand starting at position 3461 of SEQ ID NO: 1562357
gcuuucuuaccugguaaag

SEQ ID NO: 1740958 - RNA, 19 nt, Artificial Sequence
  Description of Artificial Sequence: Synthetic oligonucleotide
  Antisense strand to SEQ ID NO: 1740957
cuuuaccagguaagaaagc

SEQ ID NO: 1740959 - RNA, 19 nt, Artificial Sequence
  Description of Artificial Sequence: Synthetic oligonucleotide
  Sense strand starting at position 3548 of SEQ ID NO: 1562357
gcaacuccaguggaugaau

SEQ ID NO: 1740960 - RNA, 19 nt, Artificial Sequence
  Description of Artificial Sequence: Synthetic oligonucleotide
  Antisense strand to SEQ ID NO: 1740959
auucauccacuggaguugc

SEQ ID NO: 1740961 - RNA, 19 nt, Artificial Sequence
  Description of Artificial Sequence: Synthetic oligonucleotide
  Sense strand starting at position 3836 of SEQ ID NO: 1562357
gagcauggcugucuugaag

SEQ ID NO: 1740962 - RNA, 19 nt, Artificial Sequence
  Description of Artificial Sequence: Synthetic oligonucleotide
  Antisense strand to SEQ ID NO: 1740961
cuucaagacagccaugcuc

SEQ ID NO: 1740963 - RNA, 19 nt, Artificial Sequence
  Description of Artificial Sequence: Synthetic oligonucleotide
  Sense strand starting at position 3839 of SEQ ID NO: 1562357
cauggcugucuugaaggau

SEQ ID NO: 1740964 - RNA, 19 nt, Artificial Sequence
  Description of Artificial Sequence: Synthetic oligonucleotide
  Antisense strand to SEQ ID NO: 1740963
auccuucaagacagccaug

SEQ ID NO: 1740965 - RNA, 19 nt, Artificial Sequence
  Description of Artificial Sequence: Synthetic oligonucleotide
  Sense strand starting at position 3942 of SEQ ID NO: 1562357
agacuuuggugagaauuuc

SEQ ID NO: 1740966 - RNA, 19 nt, Artificial Sequence
  Description of Artificial Sequence: Synthetic oligonucleotide
  Antisense strand to SEQ ID NO: 1740965
gaaauucucaccaaagucu

SEQ ID NO: 1740967 - RNA, 19 nt, Artificial Sequence
  Description of Artificial Sequence: Synthetic oligonucleotide
  Sense strand starting at position 3948 of SEQ ID NO: 1562357
uggugagaauuuccgucuu

SEQ ID NO: 1740968 - RNA, 19 nt, Artificial Sequence
  Description of Artificial Sequence: Synthetic oligonucleotide
  Antisense strand to SEQ ID NO: 1740967
aagacggaaauucucacca

SEQ ID NO: 1740969 - RNA, 19 nt, Artificial Sequence
  Description of Artificial Sequence: Synthetic oligonucleotide
  Sense strand starting at position 115 of SEQ ID NO: 1562358
cuccauagcucugccagaa

SEQ ID NO: 1740970 - RNA, 19 nt, Artificial Sequence
  Description of Artificial Sequence: Synthetic oligonucleotide
  Antisense strand to SEQ ID NO: 1740969
uucuggcagagcuauggag

SEQ ID NO: 1740971 - RNA, 19 nt, Artificial Sequence
  Description of Artificial Sequence: Synthetic oligonucleotide
  Sense strand starting at position 179 of SEQ ID NO: 1562358
ggguguugcugaccaggaa

SEQ ID NO: 1740972 - RNA, 19 nt, Artificial Sequence
  Description of Artificial Sequence: Synthetic oligonucleotide
  Antisense strand to SEQ ID NO: 1740971
uuccuggucagcaacaccc

SEQ ID NO: 1740973 - RNA, 19 nt, Artificial Sequence
  Description of Artificial Sequence: Synthetic oligonucleotide
  Sense strand starting at position 358 of SEQ ID NO: 1562358
gggacucuguaagcuacua

SEQ ID NO: 1740974 - RNA, 19 nt, Artificial Sequence
  Description of Artificial Sequence: Synthetic oligonucleotide
  Antisense strand to SEQ ID NO: 1740973
uaguagcuuacagaguccc

SEQ ID NO: 1740975 - RNA, 19 nt, Artificial Sequence
  Description of Artificial Sequence: Synthetic oligonucleotide
  Sense strand starting at position 388 of SEQ ID NO: 1562358
ugccucugagggcagaaau

SEQ ID NO: 1740976 - RNA, 19 nt, Artificial Sequence
  Description of Artificial Sequence: Synthetic oligonucleotide
  Antisense strand to SEQ ID NO: 1740975
auuucugcccucagaggca

SEQ ID NO: 1740977 - RNA, 19 nt, Artificial Sequence
  Description of Artificial Sequence: Synthetic oligonucleotide
  Sense strand starting at position 418 of SEQ ID NO: 1562358
augugaacacgcugaaucu

SEQ ID NO: 1740978 - RNA, 19 nt, Artificial Sequence
  Description of Artificial Sequence: Synthetic oligonucleotide
  Antisense strand to SEQ ID NO: 1740977
agauucagcguguucacau

SEQ ID NO: 1740979 - RNA, 19 nt, Artificial Sequence
  Description of Artificial Sequence: Synthetic oligonucleotide
  Sense strand starting at position 455 of SEQ ID NO: 1562358
agagguauccagugguaaa

SEQ ID NO: 1740980 - RNA, 19 nt, Artificial Sequence
  Description of Artificial Sequence: Synthetic oligonucleotide
  Antisense strand to SEQ ID NO: 1740979
uuuaccacuggauaccucu

SEQ ID NO: 1740981 - RNA, 19 nt, Artificial Sequence
  Description of Artificial Sequence: Synthetic oligonucleotide
  Sense strand starting at position 505 of SEQ ID NO: 1562358
agaacaauugcugaccagu

SEQ ID NO: 1740982 - RNA, 19 nt, Artificial Sequence
  Description of Artificial Sequence: Synthetic oligonucleotide
  Antisense strand to SEQ ID NO: 1740981
acuggucagcaauuguucu

SEQ ID NO: 1740983 - RNA, 19 nt, Artificial Sequence
  Description of Artificial Sequence: Synthetic oligonucleotide
  Sense strand starting at position 507 of SEQ ID NO: 1562358
aacaauugcugaccaguga

SEQ ID NO: 1740984 - RNA, 19 nt, Artificial Sequence
  Description of Artificial Sequence: Synthetic oligonucleotide
  Antisense strand to SEQ ID NO: 1740983
ucacuggucagcaauuguu

SEQ ID NO: 1740985 - RNA, 19 nt, Artificial Sequence
  Description of Artificial Sequence: Synthetic oligonucleotide
  Sense strand starting at position 526 of SEQ ID NO: 1562358
ggagcuuaagcagauccaa

SEQ ID NO: 1740986 - RNA, 19 nt, Artificial Sequence
  Description of Artificial Sequence: Synthetic oligonucleotide
  Antisense strand to SEQ ID NO: 1740985
uuggaucugcuuaagcucc

SEQ ID NO: 1740987 - RNA, 19 nt, Artificial Sequence
  Description of Artificial Sequence: Synthetic oligonucleotide
  Sense strand starting at position 684 of SEQ ID NO: 1562358
auacuaaucccugguugcu

SEQ ID NO: 1740988 - RNA, 19 nt, Artificial Sequence
  Description of Artificial Sequence: Synthetic oligonucleotide
  Antisense strand to SEQ ID NO: 1740987
agcaaccagggauuaguau

SEQ ID NO: 1740989 - RNA, 19 nt, Artificial Sequence
  Description of Artificial Sequence: Synthetic oligonucleotide
  Sense strand starting at position 864 of SEQ ID NO: 1562358
aagagaccgugucuaaaga

SEQ ID NO: 1740990 - RNA, 19 nt, Artificial Sequence
  Description of Artificial Sequence: Synthetic oligonucleotide
  Antisense strand to SEQ ID NO: 1740989
ucuuuagacacggucucuu

SEQ ID NO: 1740991 - RNA, 19 nt, Artificial Sequence
  Description of Artificial Sequence: Synthetic oligonucleotide
  Sense strand starting at position 1045 of SEQ ID NO: 1562358
ggcagaacaucaguaaacu

SEQ ID NO: 1740992 - RNA, 19 nt, Artificial Sequence
  Description of Artificial Sequence: Synthetic oligonucleotide
  Antisense strand to SEQ ID NO: 1740991
aguuuacugauguucugcc

SEQ ID NO: 1740993 - RNA, 19 nt, Artificial Sequence
  Description of Artificial Sequence: Synthetic oligonucleotide
  Sense strand starting at position 1046 of SEQ ID NO: 1562358
gcagaacaucaguaaacuu

SEQ ID NO: 1740994 - RNA, 19 nt, Artificial Sequence
  Description of Artificial Sequence: Synthetic oligonucleotide
  Antisense strand to SEQ ID NO: 1740993
aaguuuacugauguucugc

SEQ ID NO: 1740995 - RNA, 19 nt, Artificial Sequence
  Description of Artificial Sequence: Synthetic oligonucleotide
  Sense strand starting at position 1152 of SEQ ID NO: 1562358
cguacauauuuauaaugga

SEQ ID NO: 1740996 - RNA, 19 nt, Artificial Sequence
  Description of Artificial Sequence: Synthetic oligonucleotide
  Antisense strand to SEQ ID NO: 1740995
uccauuauaaauauguacg

SEQ ID NO: 1740997 - RNA, 19 nt, Artificial Sequence
  Description of Artificial Sequence: Synthetic oligonucleotide
  Sense strand starting at position 1230 of SEQ ID NO: 1562358
gcugaagacuugccaaugu

SEQ ID NO: 1740998 - RNA, 19 nt, Artificial Sequence
  Description of Artificial Sequence: Synthetic oligonucleotide
  Antisense strand to SEQ ID NO: 1740997
acauuggcaagucuucagc

SEQ ID NO: 1740999 - RNA, 19 nt, Artificial Sequence
  Description of Artificial Sequence: Synthetic oligonucleotide
  Sense strand starting at position 1273 of SEQ ID NO: 1562358
gcaagaagcucagugaaca

SEQ ID NO: 1741000 - RNA, 19 nt, Artificial Sequence
  Description of Artificial Sequence: Synthetic oligonucleotide
  Antisense strand to SEQ ID NO: 1740999
uguucacugagcuucuugc

SEQ ID NO: 1741001 - RNA, 19 nt, Artificial Sequence
  Description of Artificial Sequence: Synthetic oligonucleotide
  Sense strand starting at position 1392 of SEQ ID NO: 1562358
acaugcagugucuagaaua

SEQ ID NO: 1741002 - RNA, 19 nt, Artificial Sequence
  Description of Artificial Sequence: Synthetic oligonucleotide
  Antisense strand to SEQ ID NO: 1741001
uauucuagacacugcaugu

SEQ ID NO: 1741003 - RNA, 19 nt, Artificial Sequence
  Description of Artificial Sequence: Synthetic oligonucleotide
  Sense strand starting at position 1420 of SEQ ID NO: 1562358
gguagauucgugcuugcuu

SEQ ID NO: 1741004 - RNA, 19 nt, Artificial Sequence
  Description of Artificial Sequence: Synthetic oligonucleotide
  Antisense strand to SEQ ID NO: 1741003
aagcaagcacgaaucuacc

SEQ ID NO: 1741005 - RNA, 19 nt, Artificial Sequence
  Description of Artificial Sequence: Synthetic oligonucleotide
  Sense strand starting at position 1517 of SEQ ID NO: 1562358
ucucuaacucugggaacgu

SEQ ID NO: 1741006 - RNA, 19 nt, Artificial Sequence
  Description of Artificial Sequence: Synthetic oligonucleotide
  Antisense strand to SEQ ID NO: 1741005
acguucccagaguuagaga

SEQ ID NO: 1741007 - RNA, 19 nt, Artificial Sequence
  Description of Artificial Sequence: Synthetic oligonucleotide
  Sense strand starting at position 2219 of SEQ ID NO: 1562358
caacgaguuucugucuaga

SEQ ID NO: 1741008 - RNA, 19 nt, Artificial Sequence
  Description of Artificial Sequence: Synthetic oligonucleotide
  Antisense strand to SEQ ID NO: 1741007
ucuagacagaaacucguug

SEQ ID NO: 1741009 - RNA, 19 nt, Artificial Sequence
  Description of Artificial Sequence: Synthetic oligonucleotide
  Sense strand starting at position 2221 of SEQ ID NO: 1562358
acgaguuucugucuagauc

SEQ ID NO: 1741010 - RNA, 19 nt, Artificial Sequence
  Description of Artificial Sequence: Synthetic oligonucleotide
  Antisense strand to SEQ ID NO: 1741009
gaucuagacagaaacucgu

SEQ ID NO: 1741011 - RNA, 19 nt, Artificial Sequence
  Description of Artificial Sequence: Synthetic oligonucleotide
  Sense strand starting at position 2326 of SEQ ID NO: 1562358
uucuauauuugagaaggag

SEQ ID NO: 1741012 - RNA, 19 nt, Artificial Sequence
  Description of Artificial Sequence: Synthetic oligonucleotide
  Antisense strand to SEQ ID NO: 1741011
cuccuucucaaauauagaa

SEQ ID NO: 1741013 - RNA, 19 nt, Artificial Sequence
  Description of Artificial Sequence: Synthetic oligonucleotide
  Sense strand starting at position 2377 of SEQ ID NO: 1562358
gcgcgaaaucggcucauug

SEQ ID NO: 1741014 - RNA, 19 nt, Artificial Sequence
  Description of Artificial Sequence: Synthetic oligonucleotide
  Antisense strand to SEQ ID NO: 1741013
caaugagccgauuucgcgc

SEQ ID NO: 1741015 - RNA, 19 nt, Artificial Sequence
  Description of Artificial Sequence: Synthetic oligonucleotide
  Sense strand starting at position 2689 of SEQ ID NO: 1562358
ucagaacaguucuuuagaa

SEQ ID NO: 1741016 - RNA, 19 nt, Artificial Sequence
  Description of Artificial Sequence: Synthetic oligonucleotide
  Antisense strand to SEQ ID NO: 1741015
uucuaaagaacuguucuga

SEQ ID NO: 1741017 - RNA, 19 nt, Artificial Sequence
  Description of Artificial Sequence: Synthetic oligonucleotide
  Sense strand starting at position 2697 of SEQ ID NO: 1562358
guucuuuagaauuggguau

SEQ ID NO: 1741018 - RNA, 19 nt, Artificial Sequence
  Description of Artificial Sequence: Synthetic oligonucleotide
  Antisense strand to SEQ ID NO: 1741017
auacccaauucuaaagaac

SEQ ID NO: 1741019 - RNA, 19 nt, Artificial Sequence
  Description of Artificial Sequence: Synthetic oligonucleotide
  Sense strand starting at position 2701 of SEQ ID NO: 1562358
uuuagaauuggguauugcu

SEQ ID NO: 1741020 - RNA, 19 nt, Artificial Sequence
  Description of Artificial Sequence: Synthetic oligonucleotide
  Antisense strand to SEQ ID NO: 1741019
agcaauacccaauucuaaa

SEQ ID NO: 1741021 - RNA, 19 nt, Artificial Sequence
  Description of Artificial Sequence: Synthetic oligonucleotide
  Sense strand starting at position 2711 of SEQ ID NO: 1562358
gguauugcuccguuuacgu

SEQ ID NO: 1741022 - RNA, 19 nt, Artificial Sequence
  Description of Artificial Sequence: Synthetic oligonucleotide
  Antisense strand to SEQ ID NO: 1741021
acguaaacggagcaauacc

SEQ ID NO: 1741023 - RNA, 19 nt, Artificial Sequence
  Description of Artificial Sequence: Synthetic oligonucleotide
  Sense strand starting at position 2719 of SEQ ID NO: 1562358
uccguuuacgugggaaaca

SEQ ID NO: 1741024 - RNA, 19 nt, Artificial Sequence
  Description of Artificial Sequence: Synthetic oligonucleotide
  Antisense strand to SEQ ID NO: 1741023
uguuucccacguaaacgga

SEQ ID NO: 1741025 - RNA, 19 nt, Artificial Sequence
  Description of Artificial Sequence: Synthetic oligonucleotide
  Sense strand starting at position 2732 of SEQ ID NO: 1562358
gaaacauagcagcgaggua

SEQ ID NO: 1741026 - RNA, 19 nt, Artificial Sequence
  Description of Artificial Sequence: Synthetic oligonucleotide
  Antisense strand to SEQ ID NO: 1741025
uaccucgcugcuauguuuc

SEQ ID NO: 1741027 - RNA, 19 nt, Artificial Sequence
  Description of Artificial Sequence: Synthetic oligonucleotide
  Sense strand starting at position 2887 of SEQ ID NO: 1562358
cauuguucucaugggaaca

SEQ ID NO: 1741028 - RNA, 19 nt, Artificial Sequence
  Description of Artificial Sequence: Synthetic oligonucleotide
  Antisense strand to SEQ ID NO: 1741027
uguucccaugagaacaaug

SEQ ID NO: 1741029 - RNA, 19 nt, Artificial Sequence
  Description of Artificial Sequence: Synthetic oligonucleotide
  Sense strand starting at position 3208 of SEQ ID NO: 1562358
gauggacucuaggauauau

SEQ ID NO: 1741030 - RNA, 19 nt, Artificial Sequence
  Description of Artificial Sequence: Synthetic oligonucleotide
  Antisense strand to SEQ ID NO: 1741029
auauauccuagaguccauc

SEQ ID NO: 1741031 - RNA, 19 nt, Artificial Sequence
  Description of Artificial Sequence: Synthetic oligonucleotide
  Sense strand starting at position 3244 of SEQ ID NO: 1562358
gcuugaagucgugucuacu

SEQ ID NO: 1741032 - RNA, 19 nt, Artificial Sequence
  Description of Artificial Sequence: Synthetic oligonucleotide
  Antisense strand to SEQ ID NO: 1741031
aguagacacgacuucaagc

SEQ ID NO: 1741033 - RNA, 19 nt, Artificial Sequence
  Description of Artificial Sequence: Synthetic oligonucleotide
  Sense strand starting at position 3321 of SEQ ID NO: 1562358
cguguucucaaccagucua

SEQ ID NO: 1741034 - RNA, 19 nt, Artificial Sequence
  Description of Artificial Sequence: Synthetic oligonucleotide
  Antisense strand to SEQ ID NO: 1741033
uagacugguugagaacacg

SEQ ID NO: 1741035 - RNA, 19 nt, Artificial Sequence
  Description of Artificial Sequence: Synthetic oligonucleotide
  Sense strand starting at position 3370 of SEQ ID NO: 1562358
agaggcugguaucuuuaga

SEQ ID NO: 1741036 - RNA, 19 nt, Artificial Sequence
  Description of Artificial Sequence: Synthetic oligonucleotide
  Antisense strand to SEQ ID NO: 1741035
ucuaaagauaccagccucu

SEQ ID NO: 1741037 - RNA, 19 nt, Artificial Sequence
  Description of Artificial Sequence: Synthetic oligonucleotide
  Sense strand starting at position 3398 of SEQ ID NO: 1562358
gggugcauucagcaucuga

SEQ ID NO: 1741038 - RNA, 19 nt, Artificial Sequence
  Description of Artificial Sequence: Synthetic oligonucleotide
  Antisense strand to SEQ ID NO: 1741037
ucagaugcugaaugcaccc

SEQ ID NO: 1741039 - RNA, 19 nt, Artificial Sequence
  Description of Artificial Sequence: Synthetic oligonucleotide
  Sense strand starting at position 3423 of SEQ ID NO: 1562358
cgacucuugaggugaaagu

SEQ ID NO: 1741040 - RNA, 19 nt, Artificial Sequence
  Description of Artificial Sequence: Synthetic oligonucleotide
  Antisense strand to SEQ ID NO: 1741039
acuuucaccucaagagucg

SEQ ID NO: 1741041 - RNA, 19 nt, Artificial Sequence
  Description of Artificial Sequence: Synthetic oligonucleotide
  Sense strand starting at position 3568 of SEQ ID NO: 1562358
uggaucacuuuaccuguua

SEQ ID NO: 1741042 - RNA, 19 nt, Artificial Sequence
  Description of Artificial Sequence: Synthetic oligonucleotide
  Antisense strand to SEQ ID NO: 1741041
uaacagguaaagugaucca

SEQ ID NO: 1741043 - RNA, 19 nt, Artificial Sequence
  Description of Artificial Sequence: Synthetic oligonucleotide
  Sense strand starting at position 3569 of SEQ ID NO: 1562358
ggaucacuuuaccuguuaa

SEQ ID NO: 1741044 - RNA, 19 nt, Artificial Sequence
  Description of Artificial Sequence: Synthetic oligonucleotide
  Antisense strand to SEQ ID NO: 1741043
uuaacagguaaagugaucc

SEQ ID NO: 1741045 - RNA, 19 nt, Artificial Sequence
  Description of Artificial Sequence: Synthetic oligonucleotide
  Sense strand starting at position 3590 of SEQ ID NO: 1562358
auuccaaugugaguuuacu

SEQ ID NO: 1741046 - RNA, 19 nt, Artificial Sequence
  Description of Artificial Sequence: Synthetic oligonucleotide
  Antisense strand to SEQ ID NO: 1741045
aguaaacucacauuggaau

SEQ ID NO: 1741047 - RNA, 19 nt, Artificial Sequence
  Description of Artificial Sequence: Synthetic oligonucleotide
  Sense strand starting at position 3982 of SEQ ID NO: 1562358
aguguuugagacugcuaug

SEQ ID NO: 1741048 - RNA, 19 nt, Artificial Sequence
  Description of Artificial Sequence: Synthetic oligonucleotide
  Antisense strand to SEQ ID NO: 1741047
cauagcagucucaaacacu

SEQ ID NO: 1741049 - RNA, 19 nt, Artificial Sequence
  Description of Artificial Sequence: Synthetic oligonucleotide
  Sense strand starting at position 35 of SEQ ID NO: 1562359
cugucuuaccaauauguau

SEQ ID NO: 1741050 - RNA, 19 nt, Artificial Sequence
  Description of Artificial Sequence: Synthetic oligonucleotide
  Antisense strand to SEQ ID NO: 1741049
auacauauugguaagacag

SEQ ID NO: 1741051 - RNA, 19 nt, Artificial Sequence
  Description of Artificial Sequence: Synthetic oligonucleotide
  Sense strand starting at position 398 of SEQ ID NO: 1562359
cugggaacgucugccugaa

SEQ ID NO: 1741052 - RNA, 19 nt, Artificial Sequence
  Description of Artificial Sequence: Synthetic oligonucleotide
  Antisense strand to SEQ ID NO: 1741051
uucaggcagacguucccag

SEQ ID NO: 1741053 - RNA, 19 nt, Artificial Sequence
  Description of Artificial Sequence: Synthetic oligonucleotide
  Sense strand starting at position 402 of SEQ ID NO: 1562359
gaacgucugccugaaacaa

SEQ ID NO: 1741054 - RNA, 19 nt, Artificial Sequence
  Description of Artificial Sequence: Synthetic oligonucleotide
  Antisense strand to SEQ ID NO: 1741053
uuguuucaggcagacguuc

SEQ ID NO: 1741055 - RNA, 19 nt, Artificial Sequence
  Description of Artificial Sequence: Synthetic oligonucleotide
  Sense strand starting at position 520 of SEQ ID NO: 1562359
ugggcagcuucuccacaau

SEQ ID NO: 1741056 - RNA, 19 nt, Artificial Sequence
  Description of Artificial Sequence: Synthetic oligonucleotide
  Antisense strand to SEQ ID NO: 1741055
auuguggagaagcugccca

SEQ ID NO: 1741057 - RNA, 19 nt, Artificial Sequence
  Description of Artificial Sequence: Synthetic oligonucleotide
  Sense strand starting at position 565 of SEQ ID NO: 1562359
uggugucaucucgaagcuu

SEQ ID NO: 1741058 - RNA, 19 nt, Artificial Sequence
  Description of Artificial Sequence: Synthetic oligonucleotide
  Antisense strand to SEQ ID NO: 1741057
aagcuucgagaugacacca

SEQ ID NO: 1741059 - RNA, 19 nt, Artificial Sequence
  Description of Artificial Sequence: Synthetic oligonucleotide
  Sense strand starting at position 573 of SEQ ID NO: 1562359
ucucgaagcuuccuacgaa

SEQ ID NO: 1741060 - RNA, 19 nt, Artificial Sequence
  Description of Artificial Sequence: Synthetic oligonucleotide
  Antisense strand to SEQ ID NO: 1741059
uucguaggaagcuucgaga

SEQ ID NO: 1741061 - RNA, 19 nt, Artificial Sequence
  Description of Artificial Sequence: Synthetic oligonucleotide
  Sense strand starting at position 597 of SEQ ID NO: 1562359
cccacagcucaugagugaa

SEQ ID NO: 1741062 - RNA, 19 nt, Artificial Sequence
  Description of Artificial Sequence: Synthetic oligonucleotide
  Antisense strand to SEQ ID NO: 1741061
uucacucaugagcuguggg

SEQ ID NO: 1741063 - RNA, 19 nt, Artificial Sequence
  Description of Artificial Sequence: Synthetic oligonucleotide
  Sense strand starting at position 600 of SEQ ID NO: 1562359
acagcucaugagugaauca

SEQ ID NO: 1741064 - RNA, 19 nt, Artificial Sequence
  Description of Artificial Sequence: Synthetic oligonucleotide
  Antisense strand to SEQ ID NO: 1741063
ugauucacucaugagcugu

SEQ ID NO: 1741065 - RNA, 19 nt, Artificial Sequence
  Description of Artificial Sequence: Synthetic oligonucleotide
  Sense strand starting at position 616 of SEQ ID NO: 1562359
ucaugagguccggauguga

SEQ ID NO: 1741066 - RNA, 19 nt, Artificial Sequence
  Description of Artificial Sequence: Synthetic oligonucleotide
  Antisense strand to SEQ ID NO: 1741065
ucacauccggaccucauga

SEQ ID NO: 1741067 - RNA, 19 nt, Artificial Sequence
  Description of Artificial Sequence: Synthetic oligonucleotide
  Sense strand starting at position 648 of SEQ ID NO: 1562359
gagggaaagcaauguaauc

SEQ ID NO: 1741068 - RNA, 19 nt, Artificial Sequence
  Description of Artificial Sequence: Synthetic oligonucleotide
  Antisense strand to SEQ ID NO: 1741067
gauuacauugcuuucccuc

SEQ ID NO: 1741069 - RNA, 19 nt, Artificial Sequence
  Description of Artificial Sequence: Synthetic oligonucleotide
  Sense strand starting at position 679 of SEQ ID NO: 1562359
guccauaagucaccaggaa

SEQ ID NO: 1741070 - RNA, 19 nt, Artificial Sequence
  Description of Artificial Sequence: Synthetic oligonucleotide
  Antisense strand to SEQ ID NO: 1741069
uuccuggugacuuauggac

SEQ ID NO: 1741071 - RNA, 19 nt, Artificial Sequence
  Description of Artificial Sequence: Synthetic oligonucleotide
  Sense strand starting at position 751 of SEQ ID NO: 1562359
aaugaaagucggugcccua

SEQ ID NO: 1741072 - RNA, 19 nt, Artificial Sequence
  Description of Artificial Sequence: Synthetic oligonucleotide
  Antisense strand to SEQ ID NO: 1741071
uagggcaccgacuuucauu

SEQ ID NO: 1741073 - RNA, 19 nt, Artificial Sequence
  Description of Artificial Sequence: Synthetic oligonucleotide
  Sense strand starting at position 968 of SEQ ID NO: 1562359
caggaauggcgaugguuca

SEQ ID NO: 1741074 - RNA, 19 nt, Artificial Sequence
  Description of Artificial Sequence: Synthetic oligonucleotide
  Antisense strand to SEQ ID NO: 1741073
ugaaccaucgccauuccug

SEQ ID NO: 1741075 - RNA, 19 nt, Artificial Sequence
  Description of Artificial Sequence: Synthetic oligonucleotide
  Sense strand starting at position 1203 of SEQ ID NO: 1562359
ccgagauggucugugacag

SEQ ID NO: 1741076 - RNA, 19 nt, Artificial Sequence
  Description of Artificial Sequence: Synthetic oligonucleotide
  Antisense strand to SEQ ID NO: 1741075
cugucacagaccaucucgg

SEQ ID NO: 1741077 - RNA, 19 nt, Artificial Sequence
  Description of Artificial Sequence: Synthetic oligonucleotide
  Sense strand starting at position 1209 of SEQ ID NO: 1562359
uggucugugacaggaaagu

SEQ ID NO: 1741078 - RNA, 19 nt, Artificial Sequence
  Description of Artificial Sequence: Synthetic oligonucleotide
  Antisense strand to SEQ ID NO: 1741077
acuuuccugucacagacca

SEQ ID NO: 1741079 - RNA, 19 nt, Artificial Sequence
  Description of Artificial Sequence: Synthetic oligonucleotide
  Sense strand starting at position 1332 of SEQ ID NO: 1562359
agugucaagucguuugaaa

SEQ ID NO: 1741080 - RNA, 19 nt, Artificial Sequence
  Description of Artificial Sequence: Synthetic oligonucleotide
  Antisense strand to SEQ ID NO: 1741079
uuucaaacgacuugacacu

SEQ ID NO: 1741081 - RNA, 19 nt, Artificial Sequence
  Description of Artificial Sequence: Synthetic oligonucleotide
  Sense strand starting at position 2143 of SEQ ID NO: 1562359
ggcugaucugaccggagaa

SEQ ID NO: 1741082 - RNA, 19 nt, Artificial Sequence
  Description of Artificial Sequence: Synthetic oligonucleotide
  Antisense strand to SEQ ID NO: 1741081
uucuccggucagaucagcc

SEQ ID NO: 1741083 - RNA, 19 nt, Artificial Sequence
  Description of Artificial Sequence: Synthetic oligonucleotide
  Sense strand starting at position 2144 of SEQ ID NO: 1562359
gcugaucugaccggagaag

SEQ ID NO: 1741084 - RNA, 19 nt, Artificial Sequence
  Description of Artificial Sequence: Synthetic oligonucleotide
  Antisense strand to SEQ ID NO: 1741083
cuucuccggucagaucagc

SEQ ID NO: 1741085 - RNA, 19 nt, Artificial Sequence
  Description of Artificial Sequence: Synthetic oligonucleotide
  Sense strand starting at position 2225 of SEQ ID NO: 1562359
cccaguuaaugucucccaa

SEQ ID NO: 1741086 - RNA, 19 nt, Artificial Sequence
  Description of Artificial Sequence: Synthetic oligonucleotide
  Antisense strand to SEQ ID NO: 1741085
uugggagacauuaacuggg

SEQ ID NO: 1741087 - RNA, 19 nt, Artificial Sequence
  Description of Artificial Sequence: Synthetic oligonucleotide
  Sense strand starting at position 2347 of SEQ ID NO: 1562359
uugcuuccuccagaacagu

SEQ ID NO: 1741088 - RNA, 19 nt, Artificial Sequence
  Description of Artificial Sequence: Synthetic oligonucleotide
  Antisense strand to SEQ ID NO: 1741087
acuguucuggaggaagcaa

SEQ ID NO: 1741089 - RNA, 19 nt, Artificial Sequence
  Description of Artificial Sequence: Synthetic oligonucleotide
  Sense strand starting at position 2671 of SEQ ID NO: 1562359
gacccaugauagucacagu

SEQ ID NO: 1741090 - RNA, 19 nt, Artificial Sequence
  Description of Artificial Sequence: Synthetic oligonucleotide
  Antisense strand to SEQ ID NO: 1741089
acugugacuaucauggguc

SEQ ID NO: 1741091 - RNA, 19 nt, Artificial Sequence
  Description of Artificial Sequence: Synthetic oligonucleotide
  Sense strand starting at position 2806 of SEQ ID NO: 1562359
gguucuugguaguucuacu

SEQ ID NO: 1741092 - RNA, 19 nt, Artificial Sequence
  Description of Artificial Sequence: Synthetic oligonucleotide
  Antisense strand to SEQ ID NO: 1741091
aguagaacuaccaagaacc

SEQ ID NO: 1741093 - RNA, 19 nt, Artificial Sequence
  Description of Artificial Sequence: Synthetic oligonucleotide
  Sense strand starting at position 2832 of SEQ ID NO: 1562359
ggccucugcucucucaaga

SEQ ID NO: 1741094 - RNA, 19 nt, Artificial Sequence
  Description of Artificial Sequence: Synthetic oligonucleotide
  Antisense strand to SEQ ID NO: 1741093
ucuugagagagcagaggcc

SEQ ID NO: 1741095 - RNA, 19 nt, Artificial Sequence
  Description of Artificial Sequence: Synthetic oligonucleotide
  Sense strand starting at position 2864 of SEQ ID NO: 1562359
cugccuucccagggacauu

SEQ ID NO: 1741096 - RNA, 19 nt, Artificial Sequence
  Description of Artificial Sequence: Synthetic oligonucleotide
  Antisense strand to SEQ ID NO: 1741095
aaugucccugggaaggcag

SEQ ID NO: 1741097 - RNA, 19 nt, Artificial Sequence
  Description of Artificial Sequence: Synthetic oligonucleotide
  Sense strand starting at position 2963 of SEQ ID NO: 1562359
acacauguccuguggacaa

SEQ ID NO: 1741098 - RNA, 19 nt, Artificial Sequence
  Description of Artificial Sequence: Synthetic oligonucleotide
  Antisense strand to SEQ ID NO: 1741097
uuguccacaggacaugugu

SEQ ID NO: 1741099 - RNA, 19 nt, Artificial Sequence
  Description of Artificial Sequence: Synthetic oligonucleotide
  Sense strand starting at position 2975 of SEQ ID NO: 1562359
uggacaauguggcuuuauu

SEQ ID NO: 1741100 - RNA, 19 nt, Artificial Sequence
  Description of Artificial Sequence: Synthetic oligonucleotide
  Antisense strand to SEQ ID NO: 1741099
aauaaagccacauugucca

SEQ ID NO: 1741101 - RNA, 19 nt, Artificial Sequence
  Description of Artificial Sequence: Synthetic oligonucleotide
  Sense strand starting at position 3062 of SEQ ID NO: 1562359
aggaauccuuccuaaugac

SEQ ID NO: 1741102 - RNA, 19 nt, Artificial Sequence
  Description of Artificial Sequence: Synthetic oligonucleotide
  Antisense strand to SEQ ID NO: 1741101
gucauuaggaaggauuccu

SEQ ID NO: 1741103 - RNA, 19 nt, Artificial Sequence
  Description of Artificial Sequence: Synthetic oligonucleotide
  Sense strand starting at position 3139 of SEQ ID NO: 1562359
ggaccugcugugcaagaau

SEQ ID NO: 1741104 - RNA, 19 nt, Artificial Sequence
  Description of Artificial Sequence: Synthetic oligonucleotide
  Antisense strand to SEQ ID NO: 1741103
auucuugcacagcaggucc

SEQ ID NO: 1741105 - RNA, 19 nt, Artificial Sequence
  Description of Artificial Sequence: Synthetic oligonucleotide
  Sense strand starting at position 3142 of SEQ ID NO: 1562359
ccugcugugcaagaauacu

SEQ ID NO: 1741106 - RNA, 19 nt, Artificial Sequence
  Description of Artificial Sequence: Synthetic oligonucleotide
  Antisense strand to SEQ ID NO: 1741105
aguauucuugcacagcagg

SEQ ID NO: 1741107 - RNA, 19 nt, Artificial Sequence
  Description of Artificial Sequence: Synthetic oligonucleotide
  Sense strand starting at position 3148 of SEQ ID NO: 1562359
gugcaagaauacuaagaag

SEQ ID NO: 1741108 - RNA, 19 nt, Artificial Sequence
  Description of Artificial Sequence: Synthetic oligonucleotide
  Antisense strand to SEQ ID NO: 1741107
cuucuuaguauucuugcac

SEQ ID NO: 1741109 - RNA, 19 nt, Artificial Sequence
  Description of Artificial Sequence: Synthetic oligonucleotide
  Sense strand starting at position 3335 of SEQ ID NO: 1562359
gccaucuugaaguguaaag

SEQ ID NO: 1741110 - RNA, 19 nt, Artificial Sequence
  Description of Artificial Sequence: Synthetic oligonucleotide
  Antisense strand to SEQ ID NO: 1741109
cuuuacacuucaagauggc

SEQ ID NO: 1741111 - RNA, 19 nt, Artificial Sequence
  Description of Artificial Sequence: Synthetic oligonucleotide
  Sense strand starting at position 3347 of SEQ ID NO: 1562359
uguaaaguccaauagaguu

SEQ ID NO: 1741112 - RNA, 19 nt, Artificial Sequence
  Description of Artificial Sequence: Synthetic oligonucleotide
  Antisense strand to SEQ ID NO: 1741111
aacucuauuggacuuuaca

SEQ ID NO: 1741113 - RNA, 19 nt, Artificial Sequence
  Description of Artificial Sequence: Synthetic oligonucleotide
  Sense strand starting at position 3495 of SEQ ID NO: 1562359
aguugagcacucuagauac

SEQ ID NO: 1741114 - RNA, 19 nt, Artificial Sequence
  Description of Artificial Sequence: Synthetic oligonucleotide
  Antisense strand to SEQ ID NO: 1741113
guaucuagagugcucaacu

SEQ ID NO: 1741115 - RNA, 19 nt, Artificial Sequence
  Description of Artificial Sequence: Synthetic oligonucleotide
  Sense strand starting at position 3497 of SEQ ID NO: 1562359
uugagcacucuagauacuu

SEQ ID NO: 1741116 - RNA, 19 nt, Artificial Sequence
  Description of Artificial Sequence: Synthetic oligonucleotide
  Antisense strand to SEQ ID NO: 1741115
aaguaucuagagugcucaa

SEQ ID NO: 1741117 - RNA, 19 nt, Artificial Sequence
  Description of Artificial Sequence: Synthetic oligonucleotide
  Sense strand starting at position 3570 of SEQ ID NO: 1562359
aguaucauguccuccaagu

SEQ ID NO: 1741118 - RNA, 19 nt, Artificial Sequence
  Description of Artificial Sequence: Synthetic oligonucleotide
  Antisense strand to SEQ ID NO: 1741117
acuuggaggacaugauacu

SEQ ID NO: 1741119 - RNA, 19 nt, Artificial Sequence
  Description of Artificial Sequence: Synthetic oligonucleotide
  Sense strand starting at position 3651 of SEQ ID NO: 1562359
ggacauauguaccacauuu

SEQ ID NO: 1741120 - RNA, 19 nt, Artificial Sequence
  Description of Artificial Sequence: Synthetic oligonucleotide
  Antisense strand to SEQ ID NO: 1741119
aaaugugguacauaugucc

SEQ ID NO: 1741121 - RNA, 19 nt, Artificial Sequence
  Description of Artificial Sequence: Synthetic oligonucleotide
  Sense strand starting at position 3702 of SEQ ID NO: 1562359
gguuucuucugccucuuaa

SEQ ID NO: 1741122 - RNA, 19 nt, Artificial Sequence
  Description of Artificial Sequence: Synthetic oligonucleotide
  Antisense strand to SEQ ID NO: 1741121
uuaagaggcagaagaaacc

SEQ ID NO: 1741123 - RNA, 19 nt, Artificial Sequence
  Description of Artificial Sequence: Synthetic oligonucleotide
  Sense strand starting at position 3712 of SEQ ID NO: 1562359
gccucuuaauuacugugaa

SEQ ID NO: 1741124 - RNA, 19 nt, Artificial Sequence
  Description of Artificial Sequence: Synthetic oligonucleotide
  Antisense strand to SEQ ID NO: 1741123
uucacaguaauuaagaggc

SEQ ID NO: 1741125 - RNA, 19 nt, Artificial Sequence
  Description of Artificial Sequence: Synthetic oligonucleotide
  Sense strand starting at position 3790 of SEQ ID NO: 1562359
uuggauacauacugagaag

SEQ ID NO: 1741126 - RNA, 19 nt, Artificial Sequence
  Description of Artificial Sequence: Synthetic oligonucleotide
  Antisense strand to SEQ ID NO: 1741125
cuucucaguauguauccaa

SEQ ID NO: 1741127 - RNA, 19 nt, Artificial Sequence
  Description of Artificial Sequence: Synthetic oligonucleotide
  Sense strand starting at position 3912 of SEQ ID NO: 1562359
gcauccaguuucucuacau

SEQ ID NO: 1741128 - RNA, 19 nt, Artificial Sequence
  Description of Artificial Sequence: Synthetic oligonucleotide
  Antisense strand to SEQ ID NO: 1741127
auguagagaaacuggaugc

SEQ ID NO: 1741129 - RNA, 19 nt, Artificial Sequence
  Description of Artificial Sequence: Synthetic oligonucleotide
  Sense strand starting at position 39 of SEQ ID NO: 1562360
gcuggccacuuagagauaa

SEQ ID NO: 1741130 - RNA, 19 nt, Artificial Sequence
  Description of Artificial Sequence: Synthetic oligonucleotide
  Antisense strand to SEQ ID NO: 1741129
uuaucucuaaguggccagc

SEQ ID NO: 1741131 - RNA, 19 nt, Artificial Sequence
  Description of Artificial Sequence: Synthetic oligonucleotide
  Sense strand starting at position 524 of SEQ ID NO: 1562360
agggcucggcccugacauu

SEQ ID NO: 1741132 - RNA, 19 nt, Artificial Sequence
  Description of Artificial Sequence: Synthetic oligonucleotide
  Antisense strand to SEQ ID NO: 1741131
aaugucagggccgagcccu

SEQ ID NO: 1741133 - RNA, 19 nt, Artificial Sequence
  Description of Artificial Sequence: Synthetic oligonucleotide
  Sense strand starting at position 586 of SEQ ID NO: 1562360
gugccugcucaugucgaua

SEQ ID NO: 1741134 - RNA, 19 nt, Artificial Sequence
  Description of Artificial Sequence: Synthetic oligonucleotide
  Antisense strand to SEQ ID NO: 1741133
uaucgacaugagcaggcac

SEQ ID NO: 1741135 - RNA, 19 nt, Artificial Sequence
  Description of Artificial Sequence: Synthetic oligonucleotide
  Sense strand starting at position 589 of SEQ ID NO: 1562360
ccugcucaugucgauaagu

SEQ ID NO: 1741136 - RNA, 19 nt, Artificial Sequence
  Description of Artificial Sequence: Synthetic oligonucleotide
  Antisense strand to SEQ ID NO: 1741135
acuuaucgacaugagcagg

SEQ ID NO: 1741137 - RNA, 19 nt, Artificial Sequence
  Description of Artificial Sequence: Synthetic oligonucleotide
  Sense strand starting at position 598 of SEQ ID NO: 1562360
gucgauaagucgggaagcu

SEQ ID NO: 1741138 - RNA, 19 nt, Artificial Sequence
  Description of Artificial Sequence: Synthetic oligonucleotide
  Antisense strand to SEQ ID NO: 1741137
agcuucccgacuuaucgac

SEQ ID NO: 1741139 - RNA, 19 nt, Artificial Sequence
  Description of Artificial Sequence: Synthetic oligonucleotide
  Sense strand starting at position 599 of SEQ ID NO: 1562360
ucgauaagucgggaagcua

SEQ ID NO: 1741140 - RNA, 19 nt, Artificial Sequence
  Description of Artificial Sequence: Synthetic oligonucleotide
  Antisense strand to SEQ ID NO: 1741139
uagcuucccgacuuaucga

SEQ ID NO: 1741141 - RNA, 19 nt, Artificial Sequence
  Description of Artificial Sequence: Synthetic oligonucleotide
  Sense strand starting at position 735 of SEQ ID NO: 1562360
gugugauggcuccagagau

SEQ ID NO: 1741142 - RNA, 19 nt, Artificial Sequence
  Description of Artificial Sequence: Synthetic oligonucleotide
  Antisense strand to SEQ ID NO: 1741141
aucucuggagccaucacac

SEQ ID NO: 1741143 - RNA, 19 nt, Artificial Sequence
  Description of Artificial Sequence: Synthetic oligonucleotide
  Sense strand starting at position 1352 of SEQ ID NO: 1562360
ugcguuuguucccggagga

SEQ ID NO: 1741144 - RNA, 19 nt, Artificial Sequence
  Description of Artificial Sequence: Synthetic oligonucleotide
  Antisense strand to SEQ ID NO: 1741143
uccuccgggaacaaacgca

SEQ ID NO: 1741145 - RNA, 19 nt, Artificial Sequence
  Description of Artificial Sequence: Synthetic oligonucleotide
  Sense strand starting at position 1353 of SEQ ID NO: 1562360
gcguuuguucccggaggag

SEQ ID NO: 1741146 - RNA, 19 nt, Artificial Sequence
  Description of Artificial Sequence: Synthetic oligonucleotide
  Antisense strand to SEQ ID NO: 1741145
cuccuccgggaacaaacgc

SEQ ID NO: 1741147 - RNA, 19 nt, Artificial Sequence
  Description of Artificial Sequence: Synthetic oligonucleotide
  Sense strand starting at position 1488 of SEQ ID NO: 1562360
agcuaacuccaguggagau

SEQ ID NO: 1741148 - RNA, 19 nt, Artificial Sequence
  Description of Artificial Sequence: Synthetic oligonucleotide
  Antisense strand to SEQ ID NO: 1741147
aucuccacuggaguuagcu

SEQ ID NO: 1741149 - RNA, 19 nt, Artificial Sequence
  Description of Artificial Sequence: Synthetic oligonucleotide
  Sense strand starting at position 1608 of SEQ ID NO: 1562360
cccuuugaggcccagagau

SEQ ID NO: 1741150 - RNA, 19 nt, Artificial Sequence
  Description of Artificial Sequence: Synthetic oligonucleotide
  Antisense strand to SEQ ID NO: 1741149
aucucugggccucaaaggg

SEQ ID NO: 1741151 - RNA, 19 nt, Artificial Sequence
  Description of Artificial Sequence: Synthetic oligonucleotide
  Sense strand starting at position 1616 of SEQ ID NO: 1562360
ggcccagagaucugcccaa

SEQ ID NO: 1741152 - RNA, 19 nt, Artificial Sequence
  Description of Artificial Sequence: Synthetic oligonucleotide
  Antisense strand to SEQ ID NO: 1741151
uugggcagaucucugggcc

SEQ ID NO: 1741153 - RNA, 19 nt, Artificial Sequence
  Description of Artificial Sequence: Synthetic oligonucleotide
  Sense strand starting at position 2064 of SEQ ID NO: 1562360
accggcuucucauuaacca

SEQ ID NO: 1741154 - RNA, 19 nt, Artificial Sequence
  Description of Artificial Sequence: Synthetic oligonucleotide
  Antisense strand to SEQ ID NO: 1741153
ugguuaaugagaagccggu

SEQ ID NO: 1741155 - RNA, 19 nt, Artificial Sequence
  Description of Artificial Sequence: Synthetic oligonucleotide
  Sense strand starting at position 2192 of SEQ ID NO: 1562360
gaguguggguucccggaaa

SEQ ID NO: 1741156 - RNA, 19 nt, Artificial Sequence
  Description of Artificial Sequence: Synthetic oligonucleotide
  Antisense strand to SEQ ID NO: 1741155
uuuccgggaacccacacuc

SEQ ID NO: 1741157 - RNA, 19 nt, Artificial Sequence
  Description of Artificial Sequence: Synthetic oligonucleotide
  Sense strand starting at position 2374 of SEQ ID NO: 1562360
ugcguuuguuccuggagga

SEQ ID NO: 1741158 - RNA, 19 nt, Artificial Sequence
  Description of Artificial Sequence: Synthetic oligonucleotide
  Antisense strand to SEQ ID NO: 1741157
uccuccaggaacaaacgca

SEQ ID NO: 1741159 - RNA, 19 nt, Artificial Sequence
  Description of Artificial Sequence: Synthetic oligonucleotide
  Sense strand starting at position 2375 of SEQ ID NO: 1562360
gcguuuguuccuggaggag

SEQ ID NO: 1741160 - RNA, 19 nt, Artificial Sequence
  Description of Artificial Sequence: Synthetic oligonucleotide
  Antisense strand to SEQ ID NO: 1741159
cuccuccaggaacaaacgc

SEQ ID NO: 1741161 - RNA, 19 nt, Artificial Sequence
  Description of Artificial Sequence: Synthetic oligonucleotide
  Sense strand starting at position 2636 of SEQ ID NO: 1562360
gugagagugagcgaggaua

SEQ ID NO: 1741162 - RNA, 19 nt, Artificial Sequence
  Description of Artificial Sequence: Synthetic oligonucleotide
  Antisense strand to SEQ ID NO: 1741161
uauccucgcucacucucac

SEQ ID NO: 1741163 - RNA, 19 nt, Artificial Sequence
  Description of Artificial Sequence: Synthetic oligonucleotide
  Sense strand starting at position 2647 of SEQ ID NO: 1562360
cgaggauacaugugagugu

SEQ ID NO: 1741164 - RNA, 19 nt, Artificial Sequence
  Description of Artificial Sequence: Synthetic oligonucleotide
  Antisense strand to SEQ ID NO: 1741163
acacucacauguauccucg

SEQ ID NO: 1741165 - RNA, 19 nt, Artificial Sequence
  Description of Artificial Sequence: Synthetic oligonucleotide
  Sense strand starting at position 2720 of SEQ ID NO: 1562360
gaagcaagcaugugagagu

SEQ ID NO: 1741166 - RNA, 19 nt, Artificial Sequence
  Description of Artificial Sequence: Synthetic oligonucleotide
  Antisense strand to SEQ ID NO: 1741165
acucucacaugcuugcuuc

SEQ ID NO: 1741167 - RNA, 19 nt, Artificial Sequence
  Description of Artificial Sequence: Synthetic oligonucleotide
  Sense strand starting at position 3146 of SEQ ID NO: 1562360
uuugguagacauggugaua

SEQ ID NO: 1741168 - RNA, 19 nt, Artificial Sequence
  Description of Artificial Sequence: Synthetic oligonucleotide
  Antisense strand to SEQ ID NO: 1741167
uaucaccaugucuaccaaa

SEQ ID NO: 1741169 - RNA, 19 nt, Artificial Sequence
  Description of Artificial Sequence: Synthetic oligonucleotide
  Sense strand starting at position 3200 of SEQ ID NO: 1562360
aauuguagagcccauaguu

SEQ ID NO: 1741170 - RNA, 19 nt, Artificial Sequence
  Description of Artificial Sequence: Synthetic oligonucleotide
  Antisense strand to SEQ ID NO: 1741169
aacuaugggcucuacaauu

SEQ ID NO: 1741171 - RNA, 19 nt, Artificial Sequence
  Description of Artificial Sequence: Synthetic oligonucleotide
  Sense strand starting at position 3294 of SEQ ID NO: 1562360
agugaauggucucacgaga

SEQ ID NO: 1741172 - RNA, 19 nt, Artificial Sequence
  Description of Artificial Sequence: Synthetic oligonucleotide
  Antisense strand to SEQ ID NO: 1741171
ucucgugagaccauucacu

SEQ ID NO: 1741173 - RNA, 19 nt, Artificial Sequence
  Description of Artificial Sequence: Synthetic oligonucleotide
  Sense strand starting at position 3353 of SEQ ID NO: 1562360
ucuuguaagacgugacuuu

SEQ ID NO: 1741174 - RNA, 19 nt, Artificial Sequence
  Description of Artificial Sequence: Synthetic oligonucleotide
  Antisense strand to SEQ ID NO: 1741173
aaagucacgucuuacaaga

SEQ ID NO: 1741175 - RNA, 19 nt, Artificial Sequence
  Description of Artificial Sequence: Synthetic oligonucleotide
  Sense strand starting at position 3406 of SEQ ID NO: 1562360
uguugaguccauuaaacug

SEQ ID NO: 1741176 - RNA, 19 nt, Artificial Sequence
  Description of Artificial Sequence: Synthetic oligonucleotide
  Antisense strand to SEQ ID NO: 1741175
caguuuaauggacucaaca

SEQ ID NO: 1741177 - RNA, 19 nt, Artificial Sequence
  Description of Artificial Sequence: Synthetic oligonucleotide
  Sense strand starting at position 3451 of SEQ ID NO: 1562360
ugcguaugucuuuaucaga

SEQ ID NO: 1741178 - RNA, 19 nt, Artificial Sequence
  Description of Artificial Sequence: Synthetic oligonucleotide
  Antisense strand to SEQ ID NO: 1741177
ucugauaaagacauacgca

SEQ ID NO: 1741179 - RNA, 19 nt, Artificial Sequence
  Description of Artificial Sequence: Synthetic oligonucleotide
  Sense strand starting at position 3454 of SEQ ID NO: 1562360
guaugucuuuaucagacaa

SEQ ID NO: 1741180 - RNA, 19 nt, Artificial Sequence
  Description of Artificial Sequence: Synthetic oligonucleotide
  Antisense strand to SEQ ID NO: 1741179
uugucugauaaagacauac

SEQ ID NO: 1741181 - RNA, 19 nt, Artificial Sequence
  Description of Artificial Sequence: Synthetic oligonucleotide
  Sense strand starting at position 3901 of SEQ ID NO: 1562360
acuugaaguucuuaaugga

SEQ ID NO: 1741182 - RNA, 19 nt, Artificial Sequence
  Description of Artificial Sequence: Synthetic oligonucleotide
  Antisense strand to SEQ ID NO: 1741181
uccauuaagaacuucaagu

SEQ ID NO: 1741183 - RNA, 19 nt, Artificial Sequence
  Description of Artificial Sequence: Synthetic oligonucleotide
  Sense strand starting at position 192 of SEQ ID NO: 1562361
ggguaucugcguguucacu

SEQ ID NO: 1741184 - RNA, 19 nt, Artificial Sequence
  Description of Artificial Sequence: Synthetic oligonucleotide
  Antisense strand to SEQ ID NO: 1741183
agugaacacgcagauaccc

SEQ ID NO: 1741185 - RNA, 19 nt, Artificial Sequence
  Description of Artificial Sequence: Synthetic oligonucleotide
  Sense strand starting at position 225 of SEQ ID NO: 1562361
ccaauucuucuguagguuu

SEQ ID NO: 1741186 - RNA, 19 nt, Artificial Sequence
  Description of Artificial Sequence: Synthetic oligonucleotide
  Antisense strand to SEQ ID NO: 1741185
aaaccuacagaagaauugg

SEQ ID NO: 1741187 - RNA, 19 nt, Artificial Sequence
  Description of Artificial Sequence: Synthetic oligonucleotide
  Sense strand starting at position 296 of SEQ ID NO: 1562361
uaguacucggucugaugau

SEQ ID NO: 1741188 - RNA, 19 nt, Artificial Sequence
  Description of Artificial Sequence: Synthetic oligonucleotide
  Antisense strand to SEQ ID NO: 1741187
aucaucagaccgaguacua

SEQ ID NO: 1741189 - RNA, 19 nt, Artificial Sequence
  Description of Artificial Sequence: Synthetic oligonucleotide
  Sense strand starting at position 371 of SEQ ID NO: 1562361
caugacagaugcucuugua

SEQ ID NO: 1741190 - RNA, 19 nt, Artificial Sequence
  Description of Artificial Sequence: Synthetic oligonucleotide
  Antisense strand to SEQ ID NO: 1741189
uacaagagcaucugucaug

SEQ ID NO: 1741191 - RNA, 19 nt, Artificial Sequence
  Description of Artificial Sequence: Synthetic oligonucleotide
  Sense strand starting at position 502 of SEQ ID NO: 1562361
gcaguugcuaaagaguuga

SEQ ID NO: 1741192 - RNA, 19 nt, Artificial Sequence
  Description of Artificial Sequence: Synthetic oligonucleotide
  Antisense strand to SEQ ID NO: 1741191
ucaacucuuuagcaacugc

SEQ ID NO: 1741193 - RNA, 19 nt, Artificial Sequence
  Description of Artificial Sequence: Synthetic oligonucleotide
  Sense strand starting at position 578 of SEQ ID NO: 1562361
cuacaauucgcucaaguga

SEQ ID NO: 1741194 - RNA, 19 nt, Artificial Sequence
  Description of Artificial Sequence: Synthetic oligonucleotide
  Antisense strand to SEQ ID NO: 1741193
ucacuugagcgaauuguag

SEQ ID NO: 1741195 - RNA, 19 nt, Artificial Sequence
  Description of Artificial Sequence: Synthetic oligonucleotide
  Sense strand starting at position 636 of SEQ ID NO: 1562361
cugcuauuaguggaaacua

SEQ ID NO: 1741196 - RNA, 19 nt, Artificial Sequence
  Description of Artificial Sequence: Synthetic oligonucleotide
  Antisense strand to SEQ ID NO: 1741195
uaguuuccacuaauagcag

SEQ ID NO: 1741197 - RNA, 19 nt, Artificial Sequence
  Description of Artificial Sequence: Synthetic oligonucleotide
  Sense strand starting at position 724 of SEQ ID NO: 1562361
guccgcuaaccugaucaaa

SEQ ID NO: 1741198 - RNA, 19 nt, Artificial Sequence
  Description of Artificial Sequence: Synthetic oligonucleotide
  Antisense strand to SEQ ID NO: 1741197
uuugaucagguuagcggac

SEQ ID NO: 1741199 - RNA, 19 nt, Artificial Sequence
  Description of Artificial Sequence: Synthetic oligonucleotide
  Sense strand starting at position 726 of SEQ ID NO: 1562361
ccgcuaaccugaucaaacu

SEQ ID NO: 1741200 - RNA, 19 nt, Artificial Sequence
  Description of Artificial Sequence: Synthetic oligonucleotide
  Antisense strand to SEQ ID NO: 1741199
aguuugaucagguuagcgg

SEQ ID NO: 1741201 - RNA, 19 nt, Artificial Sequence
  Description of Artificial Sequence: Synthetic oligonucleotide
  Sense strand starting at position 775 of SEQ ID NO: 1562361
gcgugucuucuaguacaca

SEQ ID NO: 1741202 - RNA, 19 nt, Artificial Sequence
  Description of Artificial Sequence: Synthetic oligonucleotide
  Antisense strand to SEQ ID NO: 1741201
uguguacuagaagacacgc

SEQ ID NO: 1741203 - RNA, 19 nt, Artificial Sequence
  Description of Artificial Sequence: Synthetic oligonucleotide
  Sense strand starting at position 877 of SEQ ID NO: 1562361
accauauacgcugauaaau

SEQ ID NO: 1741204 - RNA, 19 nt, Artificial Sequence
  Description of Artificial Sequence: Synthetic oligonucleotide
  Antisense strand to SEQ ID NO: 1741203
auuuaucagcguauauggu

SEQ ID NO: 1741205 - RNA, 19 nt, Artificial Sequence
  Description of Artificial Sequence: Synthetic oligonucleotide
  Sense strand starting at position 906 of SEQ ID NO: 1562361
uguguuguucuauaaagag

SEQ ID NO: 1741206 - RNA, 19 nt, Artificial Sequence
  Description of Artificial Sequence: Synthetic oligonucleotide
  Antisense strand to SEQ ID NO: 1741205
cucuuuauagaacaacaca

SEQ ID NO: 1741207 - RNA, 19 nt, Artificial Sequence
  Description of Artificial Sequence: Synthetic oligonucleotide
  Sense strand starting at position 2256 of SEQ ID NO: 1562361
uuuguagaccuuggaguuu

SEQ ID NO: 1741208 - RNA, 19 nt, Artificial Sequence
  Description of Artificial Sequence: Synthetic oligonucleotide
  Antisense strand to SEQ ID NO: 1741207
aaacuccaaggucuacaaa

SEQ ID NO: 1741209 - RNA, 19 nt, Artificial Sequence
  Description of Artificial Sequence: Synthetic oligonucleotide
  Sense strand starting at position 2275 of SEQ ID NO: 1562361
gccguagacccagaaauaa

SEQ ID NO: 1741210 - RNA, 19 nt, Artificial Sequence
  Description of Artificial Sequence: Synthetic oligonucleotide
  Antisense strand to SEQ ID NO: 1741209
uuauuucugggucuacggc

SEQ ID NO: 1741211 - RNA, 19 nt, Artificial Sequence
  Description of Artificial Sequence: Synthetic oligonucleotide
  Sense strand starting at position 2549 of SEQ ID NO: 1562361
ggcgacuuuauggauuguu

SEQ ID NO: 1741212 - RNA, 19 nt, Artificial Sequence
  Description of Artificial Sequence: Synthetic oligonucleotide
  Antisense strand to SEQ ID NO: 1741211
aacaauccauaaagucgcc

SEQ ID NO: 1741213 - RNA, 19 nt, Artificial Sequence
  Description of Artificial Sequence: Synthetic oligonucleotide
  Sense strand starting at position 2613 of SEQ ID NO: 1562361
ccggucagucaucacuaua

SEQ ID NO: 1741214 - RNA, 19 nt, Artificial Sequence
  Description of Artificial Sequence: Synthetic oligonucleotide
  Antisense strand to SEQ ID NO: 1741213
uauagugaugacugaccgg

SEQ ID NO: 1741215 - RNA, 19 nt, Artificial Sequence
  Description of Artificial Sequence: Synthetic oligonucleotide
  Sense strand starting at position 2616 of SEQ ID NO: 1562361
gucagucaucacuauaaau

SEQ ID NO: 1741216 - RNA, 19 nt, Artificial Sequence
  Description of Artificial Sequence: Synthetic oligonucleotide
  Antisense strand to SEQ ID NO: 1741215
auuuauagugaugacugac

SEQ ID NO: 1741217 - RNA, 19 nt, Artificial Sequence
  Description of Artificial Sequence: Synthetic oligonucleotide
  Sense strand starting at position 2702 of SEQ ID NO: 1562361
agucuuucugaucauguca

SEQ ID NO: 1741218 - RNA, 19 nt, Artificial Sequence
  Description of Artificial Sequence: Synthetic oligonucleotide
  Antisense strand to SEQ ID NO: 1741217
ugacaugaucagaaagacu

SEQ ID NO: 1741219 - RNA, 19 nt, Artificial Sequence
  Description of Artificial Sequence: Synthetic oligonucleotide
  Sense strand starting at position 2714 of SEQ ID NO: 1562361
caugucagacgcuaucaua

SEQ ID NO: 1741220 - RNA, 19 nt, Artificial Sequence
  Description of Artificial Sequence: Synthetic oligonucleotide
  Antisense strand to SEQ ID NO: 1741219
uaugauagcgucugacaug

SEQ ID NO: 1741221 - RNA, 19 nt, Artificial Sequence
  Description of Artificial Sequence: Synthetic oligonucleotide
  Sense strand starting at position 2768 of SEQ ID NO: 1562361
auuuaugucaggugguauu

SEQ ID NO: 1741222 - RNA, 19 nt, Artificial Sequence
  Description of Artificial Sequence: Synthetic oligonucleotide
  Antisense strand to SEQ ID NO: 1741221
aauaccaccugacauaaau

SEQ ID NO: 1741223 - RNA, 19 nt, Artificial Sequence
  Description of Artificial Sequence: Synthetic oligonucleotide
  Sense strand starting at position 2891 of SEQ ID NO: 1562361
uugauaugggauuaugugu

SEQ ID NO: 1741224 - RNA, 19 nt, Artificial Sequence
  Description of Artificial Sequence: Synthetic oligonucleotide
  Antisense strand to SEQ ID NO: 1741223
acacauaaucccauaucaa

SEQ ID NO: 1741225 - RNA, 19 nt, Artificial Sequence
  Description of Artificial Sequence: Synthetic oligonucleotide
  Sense strand starting at position 2916 of SEQ ID NO: 1562361
uuuggaugaguucguagga

SEQ ID NO: 1741226 - RNA, 19 nt, Artificial Sequence
  Description of Artificial Sequence: Synthetic oligonucleotide
  Antisense strand to SEQ ID NO: 1741225
uccuacgaacucauccaaa

SEQ ID NO: 1741227 - RNA, 19 nt, Artificial Sequence
  Description of Artificial Sequence: Synthetic oligonucleotide
  Sense strand starting at position 2947 of SEQ ID NO: 1562361
augagaacuguugaaugcu

SEQ ID NO: 1741228 - RNA, 19 nt, Artificial Sequence
  Description of Artificial Sequence: Synthetic oligonucleotide
  Antisense strand to SEQ ID NO: 1741227
agcauucaacaguucucau

SEQ ID NO: 1741229 - RNA, 19 nt, Artificial Sequence
  Description of Artificial Sequence: Synthetic oligonucleotide
  Sense strand starting at position 2955 of SEQ ID NO: 1562361
uguugaaugcuguggauag

SEQ ID NO: 1741230 - RNA, 19 nt, Artificial Sequence
  Description of Artificial Sequence: Synthetic oligonucleotide
  Antisense strand to SEQ ID NO: 1741229
cuauccacagcauucaaca

SEQ ID NO: 1741231 - RNA, 19 nt, Artificial Sequence
  Description of Artificial Sequence: Synthetic oligonucleotide
  Sense strand starting at position 2957 of SEQ ID NO: 1562361
uugaaugcuguggauagau

SEQ ID NO: 1741232 - RNA, 19 nt, Artificial Sequence
  Description of Artificial Sequence: Synthetic oligonucleotide
  Antisense strand to SEQ ID NO: 1741231
aucuauccacagcauucaa

SEQ ID NO: 1741233 - RNA, 19 nt, Artificial Sequence
  Description of Artificial Sequence: Synthetic oligonucleotide
  Sense strand starting at position 3028 of SEQ ID NO: 1562361
cacuuacaugguggauaau

SEQ ID NO: 1741234 - RNA, 19 nt, Artificial Sequence
  Description of Artificial Sequence: Synthetic oligonucleotide
  Antisense strand to SEQ ID NO: 1741233
auuauccaccauguaagug

SEQ ID NO: 1741235 - RNA, 19 nt, Artificial Sequence
  Description of Artificial Sequence: Synthetic oligonucleotide
  Sense strand starting at position 3085 of SEQ ID NO: 1562361
gaguaacaucuaugcaguc

SEQ ID NO: 1741236 - RNA, 19 nt, Artificial Sequence
  Description of Artificial Sequence: Synthetic oligonucleotide
  Antisense strand to SEQ ID NO: 1741235
gacugcauagauguuacuc

SEQ ID NO: 1741237 - RNA, 19 nt, Artificial Sequence
  Description of Artificial Sequence: Synthetic oligonucleotide
  Sense strand starting at position 3097 of SEQ ID NO: 1562361
ugcagucagacuuagagca

SEQ ID NO: 1741238 - RNA, 19 nt, Artificial Sequence
  Description of Artificial Sequence: Synthetic oligonucleotide
  Antisense strand to SEQ ID NO: 1741237
ugcucuaagucugacugca

SEQ ID NO: 1741239 - RNA, 19 nt, Artificial Sequence
  Description of Artificial Sequence: Synthetic oligonucleotide
  Sense strand starting at position 3113 of SEQ ID NO: 1562361
gcaaauuaacugugagaau

SEQ ID NO: 1741240 - RNA, 19 nt, Artificial Sequence
  Description of Artificial Sequence: Synthetic oligonucleotide
  Antisense strand to SEQ ID NO: 1741239
auucucacaguuaauuugc

SEQ ID NO: 1741241 - RNA, 19 nt, Artificial Sequence
  Description of Artificial Sequence: Synthetic oligonucleotide
  Sense strand starting at position 3125 of SEQ ID NO: 1562361
ugagaauacgugcagcuua

SEQ ID NO: 1741242 - RNA, 19 nt, Artificial Sequence
  Description of Artificial Sequence: Synthetic oligonucleotide
  Antisense strand to SEQ ID NO: 1741241
uaagcugcacguauucuca

SEQ ID NO: 1741243 - RNA, 19 nt, Artificial Sequence
  Description of Artificial Sequence: Synthetic oligonucleotide
  Sense strand starting at position 3191 of SEQ ID NO: 1562361
acuuuaacucuuugagagu

SEQ ID NO: 1741244 - RNA, 19 nt, Artificial Sequence
  Description of Artificial Sequence: Synthetic oligonucleotide
  Antisense strand to SEQ ID NO: 1741243
acucucaaagaguuaaagu

SEQ ID NO: 1741245 - RNA, 19 nt, Artificial Sequence
  Description of Artificial Sequence: Synthetic oligonucleotide
  Sense strand starting at position 3202 of SEQ ID NO: 1562361
uugagaguauugcuguaag

SEQ ID NO: 1741246 - RNA, 19 nt, Artificial Sequence
  Description of Artificial Sequence: Synthetic oligonucleotide
  Antisense strand to SEQ ID NO: 1741245
cuuacagcaauacucucaa

SEQ ID NO: 1741247 - RNA, 19 nt, Artificial Sequence
  Description of Artificial Sequence: Synthetic oligonucleotide
  Sense strand starting at position 3205 of SEQ ID NO: 1562361
agaguauugcuguaagggu

SEQ ID NO: 1741248 - RNA, 19 nt, Artificial Sequence
  Description of Artificial Sequence: Synthetic oligonucleotide
  Antisense strand to SEQ ID NO: 1741247
acccuuacagcaauacucu

SEQ ID NO: 1741249 - RNA, 19 nt, Artificial Sequence
  Description of Artificial Sequence: Synthetic oligonucleotide
  Sense strand starting at position 3270 of SEQ ID NO: 1562361
uaagcaaaugucgggugaa

SEQ ID NO: 1741250 - RNA, 19 nt, Artificial Sequence
  Description of Artificial Sequence: Synthetic oligonucleotide
  Antisense strand to SEQ ID NO: 1741249
uucacccgacauuugcuua

SEQ ID NO: 1741251 - RNA, 19 nt, Artificial Sequence
  Description of Artificial Sequence: Synthetic oligonucleotide
  Sense strand starting at position 3286 of SEQ ID NO: 1562361
gaaccuauugcugaauguu

SEQ ID NO: 1741252 - RNA, 19 nt, Artificial Sequence
  Description of Artificial Sequence: Synthetic oligonucleotide
  Antisense strand to SEQ ID NO: 1741251
aacauucagcaauagguuc

SEQ ID NO: 1741253 - RNA, 19 nt, Artificial Sequence
  Description of Artificial Sequence: Synthetic oligonucleotide
  Sense strand starting at position 3289 of SEQ ID NO: 1562361
ccuauugcugaauguuaag

SEQ ID NO: 1741254 - RNA, 19 nt, Artificial Sequence
  Description of Artificial Sequence: Synthetic oligonucleotide
  Antisense strand to SEQ ID NO: 1741253
cuuaacauucagcaauagg

SEQ ID NO: 1741255 - RNA, 19 nt, Artificial Sequence
  Description of Artificial Sequence: Synthetic oligonucleotide
  Sense strand starting at position 3314 of SEQ ID NO: 1562361
cuuaguuugccagaaggga

SEQ ID NO: 1741256 - RNA, 19 nt, Artificial Sequence
  Description of Artificial Sequence: Synthetic oligonucleotide
  Antisense strand to SEQ ID NO: 1741255
ucccuucuggcaaacuaag

SEQ ID NO: 1741257 - RNA, 19 nt, Artificial Sequence
  Description of Artificial Sequence: Synthetic oligonucleotide
  Sense strand starting at position 3393 of SEQ ID NO: 1562361
guguaacuuugaccagaua

SEQ ID NO: 1741258 - RNA, 19 nt, Artificial Sequence
  Description of Artificial Sequence: Synthetic oligonucleotide
  Antisense strand to SEQ ID NO: 1741257
uaucuggucaaaguuacac

SEQ ID NO: 1741259 - RNA, 19 nt, Artificial Sequence
  Description of Artificial Sequence: Synthetic oligonucleotide
  Sense strand starting at position 3696 of SEQ ID NO: 1562361
cgaccacuuugaccagaua

SEQ ID NO: 1741260 - RNA, 19 nt, Artificial Sequence
  Description of Artificial Sequence: Synthetic oligonucleotide
  Antisense strand to SEQ ID NO: 1741259
uaucuggucaaaguggucg

SEQ ID NO: 1741261 - RNA, 19 nt, Artificial Sequence
  Description of Artificial Sequence: Synthetic oligonucleotide
  Sense strand starting at position 3910 of SEQ ID NO: 1562361
guugauugcauugauagua

SEQ ID NO: 1741262 - RNA, 19 nt, Artificial Sequence
  Description of Artificial Sequence: Synthetic oligonucleotide
  Antisense strand to SEQ ID NO: 1741261
uacuaucaaugcaaucaac

SEQ ID NO: 1741263 - RNA, 19 nt, Artificial Sequence
  Description of Artificial Sequence: Synthetic oligonucleotide
  Sense strand starting at position 9 of SEQ ID NO: 1562362
uggagagcauuauuacaga

SEQ ID NO: 1741264 - RNA, 19 nt, Artificial Sequence
  Description of Artificial Sequence: Synthetic oligonucleotide
  Antisense strand to SEQ ID NO: 1741263
ucuguaauaaugcucucca

SEQ ID NO: 1741265 - RNA, 19 nt, Artificial Sequence
  Description of Artificial Sequence: Synthetic oligonucleotide
  Sense strand starting at position 71 of SEQ ID NO: 1562362
ggguaccugcgagauuaac

SEQ ID NO: 1741266 - RNA, 19 nt, Artificial Sequence
  Description of Artificial Sequence: Synthetic oligonucleotide
  Antisense strand to SEQ ID NO: 1741265
guuaaucucgcagguaccc

SEQ ID NO: 1741267 - RNA, 19 nt, Artificial Sequence
  Description of Artificial Sequence: Synthetic oligonucleotide
  Sense strand starting at position 263 of SEQ ID NO: 1562362
ggguaucugcguguucacu

SEQ ID NO: 1741268 - RNA, 19 nt, Artificial Sequence
  Description of Artificial Sequence: Synthetic oligonucleotide
  Antisense strand to SEQ ID NO: 1741267
agugaacacgcagauaccc

SEQ ID NO: 1741269 - RNA, 19 nt, Artificial Sequence
  Description of Artificial Sequence: Synthetic oligonucleotide
  Sense strand starting at position 296 of SEQ ID NO: 1562362
ccaauucuucuguagguuu

SEQ ID NO: 1741270 - RNA, 19 nt, Artificial Sequence
  Description of Artificial Sequence: Synthetic oligonucleotide
  Antisense strand to SEQ ID NO: 1741269
aaaccuacagaagaauugg

SEQ ID NO: 1741271 - RNA, 19 nt, Artificial Sequence
  Description of Artificial Sequence: Synthetic oligonucleotide
  Sense strand starting at position 442 of SEQ ID NO: 1562362
caugacagaugcucuugua

SEQ ID NO: 1741272 - RNA, 19 nt, Artificial Sequence
  Description of Artificial Sequence: Synthetic oligonucleotide
  Antisense strand to SEQ ID NO: 1741271
uacaagagcaucugucaug

SEQ ID NO: 1741273 - RNA, 19 nt, Artificial Sequence
  Description of Artificial Sequence: Synthetic oligonucleotide
  Sense strand starting at position 573 of SEQ ID NO: 1562362
gcaguugcuaaagaguuga

SEQ ID NO: 1741274 - RNA, 19 nt, Artificial Sequence
  Description of Artificial Sequence: Synthetic oligonucleotide
  Antisense strand to SEQ ID NO: 1741273
ucaacucuuuagcaacugc

SEQ ID NO: 1741275 - RNA, 19 nt, Artificial Sequence
  Description of Artificial Sequence: Synthetic oligonucleotide
  Sense strand starting at position 649 of SEQ ID NO: 1562362
cuacaauucgcucaaguga

SEQ ID NO: 1741276 - RNA, 19 nt, Artificial Sequence
  Description of Artificial Sequence: Synthetic oligonucleotide
  Antisense strand to SEQ ID NO: 1741275
ucacuugagcgaauuguag

SEQ ID NO: 1741277 - RNA, 19 nt, Artificial Sequence
  Description of Artificial Sequence: Synthetic oligonucleotide
  Sense strand starting at position 707 of SEQ ID NO: 1562362
cugcuauuaguggaaacua

SEQ ID NO: 1741278 - RNA, 19 nt, Artificial Sequence
  Description of Artificial Sequence: Synthetic oligonucleotide
  Antisense strand to SEQ ID NO: 1741277
uaguuuccacuaauagcag

SEQ ID NO: 1741279 - RNA, 19 nt, Artificial Sequence
  Description of Artificial Sequence: Synthetic oligonucleotide
  Sense strand starting at position 795 of SEQ ID NO: 1562362
guccgcuaaccugaucaaa

SEQ ID NO: 1741280 - RNA, 19 nt, Artificial Sequence
  Description of Artificial Sequence: Synthetic oligonucleotide
  Antisense strand to SEQ ID NO: 1741279
uuugaucagguuagcggac

SEQ ID NO: 1741281 - RNA, 19 nt, Artificial Sequence
  Description of Artificial Sequence: Synthetic oligonucleotide
  Sense strand starting at position 797 of SEQ ID NO: 1562362
ccgcuaaccugaucaaacu

SEQ ID NO: 1741282 - RNA, 19 nt, Artificial Sequence
  Description of Artificial Sequence: Synthetic oligonucleotide
  Antisense strand to SEQ ID NO: 1741281
aguuugaucagguuagcgg

SEQ ID NO: 1741283 - RNA, 19 nt, Artificial Sequence
  Description of Artificial Sequence: Synthetic oligonucleotide
  Sense strand starting at position 846 of SEQ ID NO: 1562362
gcgugucuucuaguacaca

SEQ ID NO: 1741284 - RNA, 19 nt, Artificial Sequence
  Description of Artificial Sequence: Synthetic oligonucleotide
  Antisense strand to SEQ ID NO: 1741283
uguguacuagaagacacgc

SEQ ID NO: 1741285 - RNA, 19 nt, Artificial Sequence
  Description of Artificial Sequence: Synthetic oligonucleotide
  Sense strand starting at position 948 of SEQ ID NO: 1562362
accauauacgcugauaaau

SEQ ID NO: 1741286 - RNA, 19 nt, Artificial Sequence
  Description of Artificial Sequence: Synthetic oligonucleotide
  Antisense strand to SEQ ID NO: 1741285
auuuaucagcguauauggu

SEQ ID NO: 1741287 - RNA, 19 nt, Artificial Sequence
  Description of Artificial Sequence: Synthetic oligonucleotide
  Sense strand starting at position 977 of SEQ ID NO: 1562362
uguguuguucuauaaagag

SEQ ID NO: 1741288 - RNA, 19 nt, Artificial Sequence
  Description of Artificial Sequence: Synthetic oligonucleotide
  Antisense strand to SEQ ID NO: 1741287
cucuuuauagaacaacaca

SEQ ID NO: 1741289 - RNA, 19 nt, Artificial Sequence
  Description of Artificial Sequence: Synthetic oligonucleotide
  Sense strand starting at position 2327 of SEQ ID NO: 1562362
uuuguagaccuuggaguuu

SEQ ID NO: 1741290 - RNA, 19 nt, Artificial Sequence
  Description of Artificial Sequence: Synthetic oligonucleotide
  Antisense strand to SEQ ID NO: 1741289
aaacuccaaggucuacaaa

SEQ ID NO: 1741291 - RNA, 19 nt, Artificial Sequence
  Description of Artificial Sequence: Synthetic oligonucleotide
  Sense strand starting at position 2346 of SEQ ID NO: 1562362
gccguagacccagaaauaa

SEQ ID NO: 1741292 - RNA, 19 nt, Artificial Sequence
  Description of Artificial Sequence: Synthetic oligonucleotide
  Antisense strand to SEQ ID NO: 1741291
uuauuucugggucuacggc

SEQ ID NO: 1741293 - RNA, 19 nt, Artificial Sequence
  Description of Artificial Sequence: Synthetic oligonucleotide
  Sense strand starting at position 2620 of SEQ ID NO: 1562362
ggcgacuuuauggauuguu

SEQ ID NO: 1741294 - RNA, 19 nt, Artificial Sequence
  Description of Artificial Sequence: Synthetic oligonucleotide
  Antisense strand to SEQ ID NO: 1741293
aacaauccauaaagucgcc

SEQ ID NO: 1741295 - RNA, 19 nt, Artificial Sequence
  Description of Artificial Sequence: Synthetic oligonucleotide
  Sense strand starting at position 2684 of SEQ ID NO: 1562362
ccggucagucaucacuaua

SEQ ID NO: 1741296 - RNA, 19 nt, Artificial Sequence
  Description of Artificial Sequence: Synthetic oligonucleotide
  Antisense strand to SEQ ID NO: 1741295
uauagugaugacugaccgg

SEQ ID NO: 1741297 - RNA, 19 nt, Artificial Sequence
  Description of Artificial Sequence: Synthetic oligonucleotide
  Sense strand starting at position 2687 of SEQ ID NO: 1562362
gucagucaucacuauaaau

SEQ ID NO: 1741298 - RNA, 19 nt, Artificial Sequence
  Description of Artificial Sequence: Synthetic oligonucleotide
  Antisense strand to SEQ ID NO: 1741297
auuuauagugaugacugac

SEQ ID NO: 1741299 - RNA, 19 nt, Artificial Sequence
  Description of Artificial Sequence: Synthetic oligonucleotide
  Sense strand starting at position 2773 of SEQ ID NO: 1562362
agucuuucugaucauguca

SEQ ID NO: 1741300 - RNA, 19 nt, Artificial Sequence
  Description of Artificial Sequence: Synthetic oligonucleotide
  Antisense strand to SEQ ID NO: 1741299
ugacaugaucagaaagacu

SEQ ID NO: 1741301 - RNA, 19 nt, Artificial Sequence
  Description of Artificial Sequence: Synthetic oligonucleotide
  Sense strand starting at position 2785 of SEQ ID NO: 1562362
caugucagacgcuaucaua

SEQ ID NO: 1741302 - RNA, 19 nt, Artificial Sequence
  Description of Artificial Sequence: Synthetic oligonucleotide
  Antisense strand to SEQ ID NO: 1741301
uaugauagcgucugacaug

SEQ ID NO: 1741303 - RNA, 19 nt, Artificial Sequence
  Description of Artificial Sequence: Synthetic oligonucleotide
  Sense strand starting at position 2839 of SEQ ID NO: 1562362
auuuaugucaggugguauu

SEQ ID NO: 1741304 - RNA, 19 nt, Artificial Sequence
  Description of Artificial Sequence: Synthetic oligonucleotide
  Antisense strand to SEQ ID NO: 1741303
aauaccaccugacauaaau

SEQ ID NO: 1741305 - RNA, 19 nt, Artificial Sequence
  Description of Artificial Sequence: Synthetic oligonucleotide
  Sense strand starting at position 2962 of SEQ ID NO: 1562362
uugauaugggauuaugugu

SEQ ID NO: 1741306 - RNA, 19 nt, Artificial Sequence
  Description of Artificial Sequence: Synthetic oligonucleotide
  Antisense strand to SEQ ID NO: 1741305
acacauaaucccauaucaa

SEQ ID NO: 1741307 - RNA, 19 nt, Artificial Sequence
  Description of Artificial Sequence: Synthetic oligonucleotide
  Sense strand starting at position 2987 of SEQ ID NO: 1562362
uuuggaugaguucguagga

SEQ ID NO: 1741308 - RNA, 19 nt, Artificial Sequence
  Description of Artificial Sequence: Synthetic oligonucleotide
  Antisense strand to SEQ ID NO: 1741307
uccuacgaacucauccaaa

SEQ ID NO: 1741309 - RNA, 19 nt, Artificial Sequence
  Description of Artificial Sequence: Synthetic oligonucleotide
  Sense strand starting at position 3018 of SEQ ID NO: 1562362
augagaacuguugaaugcu

SEQ ID NO: 1741310 - RNA, 19 nt, Artificial Sequence
  Description of Artificial Sequence: Synthetic oligonucleotide
  Antisense strand to SEQ ID NO: 1741309
agcauucaacaguucucau

SEQ ID NO: 1741311 - RNA, 19 nt, Artificial Sequence
  Description of Artificial Sequence: Synthetic oligonucleotide
  Sense strand starting at position 3026 of SEQ ID NO: 1562362
uguugaaugcuguggauag

SEQ ID NO: 1741312 - RNA, 19 nt, Artificial Sequence
  Description of Artificial Sequence: Synthetic oligonucleotide
  Antisense strand to SEQ ID NO: 1741311
cuauccacagcauucaaca

SEQ ID NO: 1741313 - RNA, 19 nt, Artificial Sequence
  Description of Artificial Sequence: Synthetic oligonucleotide
  Sense strand starting at position 3028 of SEQ ID NO: 1562362
uugaaugcuguggauagau

SEQ ID NO: 1741314 - RNA, 19 nt, Artificial Sequence
  Description of Artificial Sequence: Synthetic oligonucleotide
  Antisense strand to SEQ ID NO: 1741313
aucuauccacagcauucaa

SEQ ID NO: 1741315 - RNA, 19 nt, Artificial Sequence
  Description of Artificial Sequence: Synthetic oligonucleotide
  Sense strand starting at position 3099 of SEQ ID NO: 1562362
cacuuacaugguggauaau

SEQ ID NO: 1741316 - RNA, 19 nt, Artificial Sequence
  Description of Artificial Sequence: Synthetic oligonucleotide
  Antisense strand to SEQ ID NO: 1741315
auuauccaccauguaagug

SEQ ID NO: 1741317 - RNA, 19 nt, Artificial Sequence
  Description of Artificial Sequence: Synthetic oligonucleotide
  Sense strand starting at position 3168 of SEQ ID NO: 1562362
ugcagucagacuuagagca

SEQ ID NO: 1741318 - RNA, 19 nt, Artificial Sequence
  Description of Artificial Sequence: Synthetic oligonucleotide
  Antisense strand to SEQ ID NO: 1741317
ugcucuaagucugacugca

SEQ ID NO: 1741319 - RNA, 19 nt, Artificial Sequence
  Description of Artificial Sequence: Synthetic oligonucleotide
  Sense strand starting at position 3184 of SEQ ID NO: 1562362
gcaaauuaacugugagaau

SEQ ID NO: 1741320 - RNA, 19 nt, Artificial Sequence
  Description of Artificial Sequence: Synthetic oligonucleotide
  Antisense strand to SEQ ID NO: 1741319
auucucacaguuaauuugc

SEQ ID NO: 1741321 - RNA, 19 nt, Artificial Sequence
  Description of Artificial Sequence: Synthetic oligonucleotide
  Sense strand starting at position 3196 of SEQ ID NO: 1562362
ugagaauacgugcagcuua

SEQ ID NO: 1741322 - RNA, 19 nt, Artificial Sequence
  Description of Artificial Sequence: Synthetic oligonucleotide
  Antisense strand to SEQ ID NO: 1741321
uaagcugcacguauucuca

SEQ ID NO: 1741323 - RNA, 19 nt, Artificial Sequence
  Description of Artificial Sequence: Synthetic oligonucleotide
  Sense strand starting at position 3262 of SEQ ID NO: 1562362
acuuuaacucuuugagagu

SEQ ID NO: 1741324 - RNA, 19 nt, Artificial Sequence
  Description of Artificial Sequence: Synthetic oligonucleotide
  Antisense strand to SEQ ID NO: 1741323
acucucaaagaguuaaagu

SEQ ID NO: 1741325 - RNA, 19 nt, Artificial Sequence
  Description of Artificial Sequence: Synthetic oligonucleotide
  Sense strand starting at position 3273 of SEQ ID NO: 1562362
uugagaguauugcuguaag

SEQ ID NO: 1741326 - RNA, 19 nt, Artificial Sequence
  Description of Artificial Sequence: Synthetic oligonucleotide
  Antisense strand to SEQ ID NO: 1741325
cuuacagcaauacucucaa

SEQ ID NO: 1741327 - RNA, 19 nt, Artificial Sequence
  Description of Artificial Sequence: Synthetic oligonucleotide
  Sense strand starting at position 3276 of SEQ ID NO: 1562362
agaguauugcuguaagggu

SEQ ID NO: 1741328 - RNA, 19 nt, Artificial Sequence
  Description of Artificial Sequence: Synthetic oligonucleotide
  Antisense strand to SEQ ID NO: 1741327
acccuuacagcaauacucu

SEQ ID NO: 1741329 - RNA, 19 nt, Artificial Sequence
  Description of Artificial Sequence: Synthetic oligonucleotide
  Sense strand starting at position 3341 of SEQ ID NO: 1562362
uaagcaaaugucgggugaa

SEQ ID NO: 1741330 - RNA, 19 nt, Artificial Sequence
  Description of Artificial Sequence: Synthetic oligonucleotide
  Antisense strand to SEQ ID NO: 1741329
uucacccgacauuugcuua

SEQ ID NO: 1741331 - RNA, 19 nt, Artificial Sequence
  Description of Artificial Sequence: Synthetic oligonucleotide
  Sense strand starting at position 3357 of SEQ ID NO: 1562362
gaaccuauugcugaauguu

SEQ ID NO: 1741332 - RNA, 19 nt, Artificial Sequence
  Description of Artificial Sequence: Synthetic oligonucleotide
  Antisense strand to SEQ ID NO: 1741331
aacauucagcaauagguuc

SEQ ID NO: 1741333 - RNA, 19 nt, Artificial Sequence
  Description of Artificial Sequence: Synthetic oligonucleotide
  Sense strand starting at position 3360 of SEQ ID NO: 1562362
ccuauugcugaauguuaag

SEQ ID NO: 1741334 - RNA, 19 nt, Artificial Sequence
  Description of Artificial Sequence: Synthetic oligonucleotide
  Antisense strand to SEQ ID NO: 1741333
cuuaacauucagcaauagg

SEQ ID NO: 1741335 - RNA, 19 nt, Artificial Sequence
  Description of Artificial Sequence: Synthetic oligonucleotide
  Sense strand starting at position 3385 of SEQ ID NO: 1562362
cuuaguuugccagaaggga

SEQ ID NO: 1741336 - RNA, 19 nt, Artificial Sequence
  Description of Artificial Sequence: Synthetic oligonucleotide
  Antisense strand to SEQ ID NO: 1741335
ucccuucuggcaaacuaag

SEQ ID NO: 1741337 - RNA, 19 nt, Artificial Sequence
  Description of Artificial Sequence: Synthetic oligonucleotide
  Sense strand starting at position 3464 of SEQ ID NO: 1562362
guguaacuuugaccagaua

SEQ ID NO: 1741338 - RNA, 19 nt, Artificial Sequence
  Description of Artificial Sequence: Synthetic oligonucleotide
  Antisense strand to SEQ ID NO: 1741337
uaucuggucaaaguuacac

SEQ ID NO: 1741339 - RNA, 19 nt, Artificial Sequence
  Description of Artificial Sequence: Synthetic oligonucleotide
  Sense strand starting at position 3767 of SEQ ID NO: 1562362
cgaccacuuugaccagaua

SEQ ID NO: 1741340 - RNA, 19 nt, Artificial Sequence
  Description of Artificial Sequence: Synthetic oligonucleotide
  Antisense strand to SEQ ID NO: 1741339
uaucuggucaaaguggucg

SEQ ID NO: 1741341 - RNA, 19 nt, Artificial Sequence
  Description of Artificial Sequence: Synthetic oligonucleotide
  Sense strand starting at position 3981 of SEQ ID NO: 1562362
guugauugcauugauagua

SEQ ID NO: 1741342 - RNA, 19 nt, Artificial Sequence
  Description of Artificial Sequence: Synthetic oligonucleotide
  Antisense strand to SEQ ID NO: 1741341
uacuaucaaugcaaucaac

SEQ ID NO: 1741343 - RNA, 19 nt, Artificial Sequence
  Description of Artificial Sequence: Synthetic oligonucleotide
  Sense strand starting at position 69 of SEQ ID NO: 1562363
caggcagugggucagagau

SEQ ID NO: 1741344 - RNA, 19 nt, Artificial Sequence
  Description of Artificial Sequence: Synthetic oligonucleotide
  Antisense strand to SEQ ID NO: 1741343
aucucugacccacugccug

SEQ ID NO: 1741345 - RNA, 19 nt, Artificial Sequence
  Description of Artificial Sequence: Synthetic oligonucleotide
  Sense strand starting at position 97 of SEQ ID NO: 1562363
cuaucaguacuuuaaguag

SEQ ID NO: 1741346 - RNA, 19 nt, Artificial Sequence
  Description of Artificial Sequence: Synthetic oligonucleotide
  Antisense strand to SEQ ID NO: 1741345
cuacuuaaaguacugauag

SEQ ID NO: 1741347 - RNA, 19 nt, Artificial Sequence
  Description of Artificial Sequence: Synthetic oligonucleotide
  Sense strand starting at position 123 of SEQ ID NO: 1562363
ccaucaaagguuuguaaca

SEQ ID NO: 1741348 - RNA, 19 nt, Artificial Sequence
  Description of Artificial Sequence: Synthetic oligonucleotide
  Antisense strand to SEQ ID NO: 1741347
uguuacaaaccuuugaugg

SEQ ID NO: 1741349 - RNA, 19 nt, Artificial Sequence
  Description of Artificial Sequence: Synthetic oligonucleotide
  Sense strand starting at position 341 of SEQ ID NO: 1562363
cgcaauaugcuagaauauu

SEQ ID NO: 1741350 - RNA, 19 nt, Artificial Sequence
  Description of Artificial Sequence: Synthetic oligonucleotide
  Antisense strand to SEQ ID NO: 1741349
aauauucuagcauauugcg

SEQ ID NO: 1741351 - RNA, 19 nt, Artificial Sequence
  Description of Artificial Sequence: Synthetic oligonucleotide
  Sense strand starting at position 349 of SEQ ID NO: 1562363
gcuagaauauugguagaga

SEQ ID NO: 1741352 - RNA, 19 nt, Artificial Sequence
  Description of Artificial Sequence: Synthetic oligonucleotide
  Antisense strand to SEQ ID NO: 1741351
ucucuaccaauauucuagc

SEQ ID NO: 1741353 - RNA, 19 nt, Artificial Sequence
  Description of Artificial Sequence: Synthetic oligonucleotide
  Sense strand starting at position 401 of SEQ ID NO: 1562363
aguucuggcaccugagacu

SEQ ID NO: 1741354 - RNA, 19 nt, Artificial Sequence
  Description of Artificial Sequence: Synthetic oligonucleotide
  Antisense strand to SEQ ID NO: 1741353
agucucaggugccagaacu

SEQ ID NO: 1741355 - RNA, 19 nt, Artificial Sequence
  Description of Artificial Sequence: Synthetic oligonucleotide
  Sense strand starting at position 438 of SEQ ID NO: 1562363
agcaguguaaccuaggaga

SEQ ID NO: 1741356 - RNA, 19 nt, Artificial Sequence
  Description of Artificial Sequence: Synthetic oligonucleotide
  Antisense strand to SEQ ID NO: 1741355
ucuccuagguuacacugcu

SEQ ID NO: 1741357 - RNA, 19 nt, Artificial Sequence
  Description of Artificial Sequence: Synthetic oligonucleotide
  Sense strand starting at position 492 of SEQ ID NO: 1562363
ggcacucagcaguaguaaa

SEQ ID NO: 1741358 - RNA, 19 nt, Artificial Sequence
  Description of Artificial Sequence: Synthetic oligonucleotide
  Antisense strand to SEQ ID NO: 1741357
uuuacuacugcugagugcc

SEQ ID NO: 1741359 - RNA, 19 nt, Artificial Sequence
  Description of Artificial Sequence: Synthetic oligonucleotide
  Sense strand starting at position 579 of SEQ ID NO: 1562363
uuugaugauguugggauua

SEQ ID NO: 1741360 - RNA, 19 nt, Artificial Sequence
  Description of Artificial Sequence: Synthetic oligonucleotide
  Antisense strand to SEQ ID NO: 1741359
uaaucccaacaucaucaaa

SEQ ID NO: 1741361 - RNA, 19 nt, Artificial Sequence
  Description of Artificial Sequence: Synthetic oligonucleotide
  Sense strand starting at position 662 of SEQ ID NO: 1562363
ugggcaggguacuauuuaa

SEQ ID NO: 1741362 - RNA, 19 nt, Artificial Sequence
  Description of Artificial Sequence: Synthetic oligonucleotide
  Antisense strand to SEQ ID NO: 1741361
uuaaauaguacccugccca

SEQ ID NO: 1741363 - RNA, 19 nt, Artificial Sequence
  Description of Artificial Sequence: Synthetic oligonucleotide
  Sense strand starting at position 750 of SEQ ID NO: 1562363
aggcccagauagguaaaua

SEQ ID NO: 1741364 - RNA, 19 nt, Artificial Sequence
  Description of Artificial Sequence: Synthetic oligonucleotide
  Antisense strand to SEQ ID NO: 1741363
uauuuaccuaucugggccu

SEQ ID NO: 1741365 - RNA, 19 nt, Artificial Sequence
  Description of Artificial Sequence: Synthetic oligonucleotide
  Sense strand starting at position 760 of SEQ ID NO: 1562363
agguaaauaacuugcugga

SEQ ID NO: 1741366 - RNA, 19 nt, Artificial Sequence
  Description of Artificial Sequence: Synthetic oligonucleotide
  Antisense strand to SEQ ID NO: 1741365
uccagcaaguuauuuaccu

SEQ ID NO: 1741367 - RNA, 19 nt, Artificial Sequence
  Description of Artificial Sequence: Synthetic oligonucleotide
  Sense strand starting at position 776 of SEQ ID NO: 1562363
ggaggucacacagguaaga

SEQ ID NO: 1741368 - RNA, 19 nt, Artificial Sequence
  Description of Artificial Sequence: Synthetic oligonucleotide
  Antisense strand to SEQ ID NO: 1741367
ucuuaccugugugaccucc

SEQ ID NO: 1741369 - RNA, 19 nt, Artificial Sequence
  Description of Artificial Sequence: Synthetic oligonucleotide
  Sense strand starting at position 843 of SEQ ID NO: 1562363
gugaaacgaugaucauuga

SEQ ID NO: 1741370 - RNA, 19 nt, Artificial Sequence
  Description of Artificial Sequence: Synthetic oligonucleotide
  Antisense strand to SEQ ID NO: 1741369
ucaaugaucaucguuucac

SEQ ID NO: 1741371 - RNA, 19 nt, Artificial Sequence
  Description of Artificial Sequence: Synthetic oligonucleotide
  Sense strand starting at position 1264 of SEQ ID NO: 1562363
aucacauccggccagaaau

SEQ ID NO: 1741372 - RNA, 19 nt, Artificial Sequence
  Description of Artificial Sequence: Synthetic oligonucleotide
  Antisense strand to SEQ ID NO: 1741371
auuucuggccggaugugau

SEQ ID NO: 1741373 - RNA, 19 nt, Artificial Sequence
  Description of Artificial Sequence: Synthetic oligonucleotide
  Sense strand starting at position 1310 of SEQ ID NO: 1562363
guuacaucuuuaguuugaa

SEQ ID NO: 1741374 - RNA, 19 nt, Artificial Sequence
  Description of Artificial Sequence: Synthetic oligonucleotide
  Antisense strand to SEQ ID NO: 1741373
uucaaacuaaagauguaac

SEQ ID NO: 1741375 - RNA, 19 nt, Artificial Sequence
  Description of Artificial Sequence: Synthetic oligonucleotide
  Sense strand starting at position 1330 of SEQ ID NO: 1562363
auagcaguagugugggaaa

SEQ ID NO: 1741376 - RNA, 19 nt, Artificial Sequence
  Description of Artificial Sequence: Synthetic oligonucleotide
  Antisense strand to SEQ ID NO: 1741375
uuucccacacuacugcuau

SEQ ID NO: 1741377 - RNA, 19 nt, Artificial Sequence
  Description of Artificial Sequence: Synthetic oligonucleotide
  Sense strand starting at position 1350 of SEQ ID NO: 1562363
uucuguuuacucuagugga

SEQ ID NO: 1741378 - RNA, 19 nt, Artificial Sequence
  Description of Artificial Sequence: Synthetic oligonucleotide
  Antisense strand to SEQ ID NO: 1741377
uccacuagaguaaacagaa

SEQ ID NO: 1741379 - RNA, 19 nt, Artificial Sequence
  Description of Artificial Sequence: Synthetic oligonucleotide
  Sense strand starting at position 1497 of SEQ ID NO: 1562363
gggccucauuccucagaau

SEQ ID NO: 1741380 - RNA, 19 nt, Artificial Sequence
  Description of Artificial Sequence: Synthetic oligonucleotide
  Antisense strand to SEQ ID NO: 1741379
auucugaggaaugaggccc

SEQ ID NO: 1741381 - RNA, 19 nt, Artificial Sequence
  Description of Artificial Sequence: Synthetic oligonucleotide
  Sense strand starting at position 1498 of SEQ ID NO: 1562363
ggccucauuccucagaaug

SEQ ID NO: 1741382 - RNA, 19 nt, Artificial Sequence
  Description of Artificial Sequence: Synthetic oligonucleotide
  Antisense strand to SEQ ID NO: 1741381
cauucugaggaaugaggcc

SEQ ID NO: 1741383 - RNA, 19 nt, Artificial Sequence
  Description of Artificial Sequence: Synthetic oligonucleotide
  Sense strand starting at position 1503 of SEQ ID NO: 1562363
cauuccucagaauggguaa

SEQ ID NO: 1741384 - RNA, 19 nt, Artificial Sequence
  Description of Artificial Sequence: Synthetic oligonucleotide
  Antisense strand to SEQ ID NO: 1741383
uuacccauucugaggaaug

SEQ ID NO: 1741385 - RNA, 19 nt, Artificial Sequence
  Description of Artificial Sequence: Synthetic oligonucleotide
  Sense strand starting at position 1506 of SEQ ID NO: 1562363
uccucagaauggguaacau

SEQ ID NO: 1741386 - RNA, 19 nt, Artificial Sequence
  Description of Artificial Sequence: Synthetic oligonucleotide
  Antisense strand to SEQ ID NO: 1741385
auguuacccauucugagga

SEQ ID NO: 1741387 - RNA, 19 nt, Artificial Sequence
  Description of Artificial Sequence: Synthetic oligonucleotide
  Sense strand starting at position 1542 of SEQ ID NO: 1562363
caaauaaagccguaucaga

SEQ ID NO: 1741388 - RNA, 19 nt, Artificial Sequence
  Description of Artificial Sequence: Synthetic oligonucleotide
  Antisense strand to SEQ ID NO: 1741387
ucugauacggcuuuauuug

SEQ ID NO: 1741389 - RNA, 19 nt, Artificial Sequence
  Description of Artificial Sequence: Synthetic oligonucleotide
  Sense strand starting at position 1549 of SEQ ID NO: 1562363
agccguaucagaggauaug

SEQ ID NO: 1741390 - RNA, 19 nt, Artificial Sequence
  Description of Artificial Sequence: Synthetic oligonucleotide
  Antisense strand to SEQ ID NO: 1741389
cauauccucugauacggcu

SEQ ID NO: 1741391 - RNA, 19 nt, Artificial Sequence
  Description of Artificial Sequence: Synthetic oligonucleotide
  Sense strand starting at position 2319 of SEQ ID NO: 1562363
uuugaaugccggucgcuua

SEQ ID NO: 1741392 - RNA, 19 nt, Artificial Sequence
  Description of Artificial Sequence: Synthetic oligonucleotide
  Antisense strand to SEQ ID NO: 1741391
uaagcgaccggcauucaaa

SEQ ID NO: 1741393 - RNA, 19 nt, Artificial Sequence
  Description of Artificial Sequence: Synthetic oligonucleotide
  Sense strand starting at position 2365 of SEQ ID NO: 1562363
aaaugaggcugguuauaga

SEQ ID NO: 1741394 - RNA, 19 nt, Artificial Sequence
  Description of Artificial Sequence: Synthetic oligonucleotide
  Antisense strand to SEQ ID NO: 1741393
ucuauaaccagccucauuu

SEQ ID NO: 1741395 - RNA, 19 nt, Artificial Sequence
  Description of Artificial Sequence: Synthetic oligonucleotide
  Sense strand starting at position 2999 of SEQ ID NO: 1562363
aggagcuuuccagguaaac

SEQ ID NO: 1741396 - RNA, 19 nt, Artificial Sequence
  Description of Artificial Sequence: Synthetic oligonucleotide
  Antisense strand to SEQ ID NO: 1741395
guuuaccuggaaagcuccu

SEQ ID NO: 1741397 - RNA, 19 nt, Artificial Sequence
  Description of Artificial Sequence: Synthetic oligonucleotide
  Sense strand starting at position 3553 of SEQ ID NO: 1562363
ccguucugauaguuaaaug

SEQ ID NO: 1741398 - RNA, 19 nt, Artificial Sequence
  Description of Artificial Sequence: Synthetic oligonucleotide
  Antisense strand to SEQ ID NO: 1741397
cauuuaacuaucagaacgg

SEQ ID NO: 1741399 - RNA, 19 nt, Artificial Sequence
  Description of Artificial Sequence: Synthetic oligonucleotide
  Sense strand starting at position 3554 of SEQ ID NO: 1562363
cguucugauaguuaaaugu

SEQ ID NO: 1741400 - RNA, 19 nt, Artificial Sequence
  Description of Artificial Sequence: Synthetic oligonucleotide
  Antisense strand to SEQ ID NO: 1741399
acauuuaacuaucagaacg

SEQ ID NO: 1741401 - RNA, 19 nt, Artificial Sequence
  Description of Artificial Sequence: Synthetic oligonucleotide
  Sense strand starting at position 3651 of SEQ ID NO: 1562363
aaugguugcgauuaauuac

SEQ ID NO: 1741402 - RNA, 19 nt, Artificial Sequence
  Description of Artificial Sequence: Synthetic oligonucleotide
  Antisense strand to SEQ ID NO: 1741401
guaauuaaucgcaaccauu

SEQ ID NO: 1741403 - RNA, 19 nt, Artificial Sequence
  Description of Artificial Sequence: Synthetic oligonucleotide
  Sense strand starting at position 3751 of SEQ ID NO: 1562363
gcugguagacuuuacauaa

SEQ ID NO: 1741404 - RNA, 19 nt, Artificial Sequence
  Description of Artificial Sequence: Synthetic oligonucleotide
  Antisense strand to SEQ ID NO: 1741403
uuauguaaagucuaccagc

SEQ ID NO: 1741405 - RNA, 19 nt, Artificial Sequence
  Description of Artificial Sequence: Synthetic oligonucleotide
  Sense strand starting at position 3796 of SEQ ID NO: 1562363
aggcgaagagauuguuaaa

SEQ ID NO: 1741406 - RNA, 19 nt, Artificial Sequence
  Description of Artificial Sequence: Synthetic oligonucleotide
  Antisense strand to SEQ ID NO: 1741405
uuuaacaaucucuucgccu

SEQ ID NO: 1741407 - RNA, 19 nt, Artificial Sequence
  Description of Artificial Sequence: Synthetic oligonucleotide
  Sense strand starting at position 3808 of SEQ ID NO: 1562363
uguuaaagaaaugguuguu

SEQ ID NO: 1741408 - RNA, 19 nt, Artificial Sequence
  Description of Artificial Sequence: Synthetic oligonucleotide
  Antisense strand to SEQ ID NO: 1741407
aacaaccauuucuuuaaca

SEQ ID NO: 1741409 - RNA, 19 nt, Artificial Sequence
  Description of Artificial Sequence: Synthetic oligonucleotide
  Sense strand starting at position 3811 of SEQ ID NO: 1562363
uaaagaaaugguuguuuac

SEQ ID NO: 1741410 - RNA, 19 nt, Artificial Sequence
  Description of Artificial Sequence: Synthetic oligonucleotide
  Antisense strand to SEQ ID NO: 1741409
guaaacaaccauuucuuua

SEQ ID NO: 1741411 - RNA, 19 nt, Artificial Sequence
  Description of Artificial Sequence: Synthetic oligonucleotide
  Sense strand starting at position 3813 of SEQ ID NO: 1562363
aagaaaugguuguuuacuu

SEQ ID NO: 1741412 - RNA, 19 nt, Artificial Sequence
  Description of Artificial Sequence: Synthetic oligonucleotide
  Antisense strand to SEQ ID NO: 1741411
aaguaaacaaccauuucuu

SEQ ID NO: 1741413 - RNA, 19 nt, Artificial Sequence
  Description of Artificial Sequence: Synthetic oligonucleotide
  Sense strand starting at position 3814 of SEQ ID NO: 1562363
agaaaugguuguuuacuua

SEQ ID NO: 1741414 - RNA, 19 nt, Artificial Sequence
  Description of Artificial Sequence: Synthetic oligonucleotide
  Antisense strand to SEQ ID NO: 1741413
uaaguaaacaaccauuucu

SEQ ID NO: 1741415 - RNA, 19 nt, Artificial Sequence
  Description of Artificial Sequence: Synthetic oligonucleotide
  Sense strand starting at position 3817 of SEQ ID NO: 1562363
aaugguuguuuacuuagga

SEQ ID NO: 1741416 - RNA, 19 nt, Artificial Sequence
  Description of Artificial Sequence: Synthetic oligonucleotide
  Antisense strand to SEQ ID NO: 1741415
uccuaaguaaacaaccauu

SEQ ID NO: 1741417 - RNA, 19 nt, Artificial Sequence
  Description of Artificial Sequence: Synthetic oligonucleotide
  Sense strand starting at position 3818 of SEQ ID NO: 1562363
augguuguuuacuuaggaa

SEQ ID NO: 1741418 - RNA, 19 nt, Artificial Sequence
  Description of Artificial Sequence: Synthetic oligonucleotide
  Antisense strand to SEQ ID NO: 1741417
uuccuaaguaaacaaccau

SEQ ID NO: 1741419 - RNA, 19 nt, Artificial Sequence
  Description of Artificial Sequence: Synthetic oligonucleotide
  Sense strand starting at position 3854 of SEQ ID NO: 1562363
agcgguugucucucgauau

SEQ ID NO: 1741420 - RNA, 19 nt, Artificial Sequence
  Description of Artificial Sequence: Synthetic oligonucleotide
  Antisense strand to SEQ ID NO: 1741419
auaucgagagacaaccgcu

SEQ ID NO: 1741421 - RNA, 19 nt, Artificial Sequence
  Description of Artificial Sequence: Synthetic oligonucleotide
  Sense strand starting at position 3923 of SEQ ID NO: 1562363
gaucuugaaacguaagugu

SEQ ID NO: 1741422 - RNA, 19 nt, Artificial Sequence
  Description of Artificial Sequence: Synthetic oligonucleotide
  Antisense strand to SEQ ID NO: 1741421
acacuuacguuucaagauc

SEQ ID NO: 1741423 - RNA, 19 nt, Artificial Sequence
  Description of Artificial Sequence: Synthetic oligonucleotide
  Sense strand starting at position 19 of SEQ ID NO: 1562364
aggcccagauagguaaaua

SEQ ID NO: 1741424 - RNA, 19 nt, Artificial Sequence
  Description of Artificial Sequence: Synthetic oligonucleotide
  Antisense strand to SEQ ID NO: 1741423
uauuuaccuaucugggccu

SEQ ID NO: 1741425 - RNA, 19 nt, Artificial Sequence
  Description of Artificial Sequence: Synthetic oligonucleotide
  Sense strand starting at position 29 of SEQ ID NO: 1562364
agguaaauaacuugcugga

SEQ ID NO: 1741426 - RNA, 19 nt, Artificial Sequence
  Description of Artificial Sequence: Synthetic oligonucleotide
  Antisense strand to SEQ ID NO: 1741425
uccagcaaguuauuuaccu

SEQ ID NO: 1741427 - RNA, 19 nt, Artificial Sequence
  Description of Artificial Sequence: Synthetic oligonucleotide
  Sense strand starting at position 45 of SEQ ID NO: 1562364
ggaggucacacagguaaga

SEQ ID NO: 1741428 - RNA, 19 nt, Artificial Sequence
  Description of Artificial Sequence: Synthetic oligonucleotide
  Antisense strand to SEQ ID NO: 1741427
ucuuaccugugugaccucc

SEQ ID NO: 1741429 - RNA, 19 nt, Artificial Sequence
  Description of Artificial Sequence: Synthetic oligonucleotide
  Sense strand starting at position 112 of SEQ ID NO: 1562364
gugaaacgaugaucauuga

SEQ ID NO: 1741430 - RNA, 19 nt, Artificial Sequence
  Description of Artificial Sequence: Synthetic oligonucleotide
  Antisense strand to SEQ ID NO: 1741429
ucaaugaucaucguuucac

SEQ ID NO: 1741431 - RNA, 19 nt, Artificial Sequence
  Description of Artificial Sequence: Synthetic oligonucleotide
  Sense strand starting at position 533 of SEQ ID NO: 1562364
aucacauccggccagaaau

SEQ ID NO: 1741432 - RNA, 19 nt, Artificial Sequence
  Description of Artificial Sequence: Synthetic oligonucleotide
  Antisense strand to SEQ ID NO: 1741431
auuucuggccggaugugau

SEQ ID NO: 1741433 - RNA, 19 nt, Artificial Sequence
  Description of Artificial Sequence: Synthetic oligonucleotide
  Sense strand starting at position 579 of SEQ ID NO: 1562364
guuacaucuuuaguuugaa

SEQ ID NO: 1741434 - RNA, 19 nt, Artificial Sequence
  Description of Artificial Sequence: Synthetic oligonucleotide
  Antisense strand to SEQ ID NO: 1741433
uucaaacuaaagauguaac

SEQ ID NO: 1741435 - RNA, 19 nt, Artificial Sequence
  Description of Artificial Sequence: Synthetic oligonucleotide
  Sense strand starting at position 599 of SEQ ID NO: 1562364
auagcaguagugugggaaa

SEQ ID NO: 1741436 - RNA, 19 nt, Artificial Sequence
  Description of Artificial Sequence: Synthetic oligonucleotide
  Antisense strand to SEQ ID NO: 1741435
uuucccacacuacugcuau

SEQ ID NO: 1741437 - RNA, 19 nt, Artificial Sequence
  Description of Artificial Sequence: Synthetic oligonucleotide
  Sense strand starting at position 619 of SEQ ID NO: 1562364
uucuguuuacucuagugga

SEQ ID NO: 1741438 - RNA, 19 nt, Artificial Sequence
  Description of Artificial Sequence: Synthetic oligonucleotide
  Antisense strand to SEQ ID NO: 1741437
uccacuagaguaaacagaa

SEQ ID NO: 1741439 - RNA, 19 nt, Artificial Sequence
  Description of Artificial Sequence: Synthetic oligonucleotide
  Sense strand starting at position 766 of SEQ ID NO: 1562364
gggccucauuccucagaau

SEQ ID NO: 1741440 - RNA, 19 nt, Artificial Sequence
  Description of Artificial Sequence: Synthetic oligonucleotide
  Antisense strand to SEQ ID NO: 1741439
auucugaggaaugaggccc

SEQ ID NO: 1741441 - RNA, 19 nt, Artificial Sequence
  Description of Artificial Sequence: Synthetic oligonucleotide
  Sense strand starting at position 767 of SEQ ID NO: 1562364
ggccucauuccucagaaug

SEQ ID NO: 1741442 - RNA, 19 nt, Artificial Sequence
  Description of Artificial Sequence: Synthetic oligonucleotide
  Antisense strand to SEQ ID NO: 1741441
cauucugaggaaugaggcc

SEQ ID NO: 1741443 - RNA, 19 nt, Artificial Sequence
  Description of Artificial Sequence: Synthetic oligonucleotide
  Sense strand starting at position 772 of SEQ ID NO: 1562364
cauuccucagaauggguaa

SEQ ID NO: 1741444 - RNA, 19 nt, Artificial Sequence
  Description of Artificial Sequence: Synthetic oligonucleotide
  Antisense strand to SEQ ID NO: 1741443
uuacccauucugaggaaug

SEQ ID NO: 1741445 - RNA, 19 nt, Artificial Sequence
  Description of Artificial Sequence: Synthetic oligonucleotide
  Sense strand starting at position 775 of SEQ ID NO: 1562364
uccucagaauggguaacau

SEQ ID NO: 1741446 - RNA, 19 nt, Artificial Sequence
  Description of Artificial Sequence: Synthetic oligonucleotide
  Antisense strand to SEQ ID NO: 1741445
auguuacccauucugagga

SEQ ID NO: 1741447 - RNA, 19 nt, Artificial Sequence
  Description of Artificial Sequence: Synthetic oligonucleotide
  Sense strand starting at position 811 of SEQ ID NO: 1562364
caaauaaagccguaucaga

SEQ ID NO: 1741448 - RNA, 19 nt, Artificial Sequence
  Description of Artificial Sequence: Synthetic oligonucleotide
  Antisense strand to SEQ ID NO: 1741447
ucugauacggcuuuauuug

SEQ ID NO: 1741449 - RNA, 19 nt, Artificial Sequence
  Description of Artificial Sequence: Synthetic oligonucleotide
  Sense strand starting at position 818 of SEQ ID NO: 1562364
agccguaucagaggauaug

SEQ ID NO: 1741450 - RNA, 19 nt, Artificial Sequence
  Description of Artificial Sequence: Synthetic oligonucleotide
  Antisense strand to SEQ ID NO: 1741449
cauauccucugauacggcu

SEQ ID NO: 1741451 - RNA, 19 nt, Artificial Sequence
  Description of Artificial Sequence: Synthetic oligonucleotide
  Sense strand starting at position 1588 of SEQ ID NO: 1562364
uuugaaugccggucgcuua

SEQ ID NO: 1741452 - RNA, 19 nt, Artificial Sequence
  Description of Artificial Sequence: Synthetic oligonucleotide
  Antisense strand to SEQ ID NO: 1741451
uaagcgaccggcauucaaa

SEQ ID NO: 1741453 - RNA, 19 nt, Artificial Sequence
  Description of Artificial Sequence: Synthetic oligonucleotide
  Sense strand starting at position 1634 of SEQ ID NO: 1562364
aaaugaggcugguuauaga

SEQ ID NO: 1741454 - RNA, 19 nt, Artificial Sequence
  Description of Artificial Sequence: Synthetic oligonucleotide
  Antisense strand to SEQ ID NO: 1741453
ucuauaaccagccucauuu

SEQ ID NO: 1741455 - RNA, 19 nt, Artificial Sequence
  Description of Artificial Sequence: Synthetic oligonucleotide
  Sense strand starting at position 2268 of SEQ ID NO: 1562364
aggagcuuuccagguaaac

SEQ ID NO: 1741456 - RNA, 19 nt, Artificial Sequence
  Description of Artificial Sequence: Synthetic oligonucleotide
  Antisense strand to SEQ ID NO: 1741455
guuuaccuggaaagcuccu

SEQ ID NO: 1741457 - RNA, 19 nt, Artificial Sequence
  Description of Artificial Sequence: Synthetic oligonucleotide
  Sense strand starting at position 2920 of SEQ ID NO: 1562364
aaugguugcgauuaauuac

SEQ ID NO: 1741458 - RNA, 19 nt, Artificial Sequence
  Description of Artificial Sequence: Synthetic oligonucleotide
  Antisense strand to SEQ ID NO: 1741457
guaauuaaucgcaaccauu

SEQ ID NO: 1741459 - RNA, 19 nt, Artificial Sequence
  Description of Artificial Sequence: Synthetic oligonucleotide
  Sense strand starting at position 3020 of SEQ ID NO: 1562364
gcugguagacuuuacauaa

SEQ ID NO: 1741460 - RNA, 19 nt, Artificial Sequence
  Description of Artificial Sequence: Synthetic oligonucleotide
  Antisense strand to SEQ ID NO: 1741459
uuauguaaagucuaccagc

SEQ ID NO: 1741461 - RNA, 19 nt, Artificial Sequence
  Description of Artificial Sequence: Synthetic oligonucleotide
  Sense strand starting at position 3065 of SEQ ID NO: 1562364
aggcgaagagauuguuaaa

SEQ ID NO: 1741462 - RNA, 19 nt, Artificial Sequence
  Description of Artificial Sequence: Synthetic oligonucleotide
  Antisense strand to SEQ ID NO: 1741461
uuuaacaaucucuucgccu

SEQ ID NO: 1741463 - RNA, 19 nt, Artificial Sequence
  Description of Artificial Sequence: Synthetic oligonucleotide
  Sense strand starting at position 3077 of SEQ ID NO: 1562364
uguuaaagaaaugguuguu

SEQ ID NO: 1741464 - RNA, 19 nt, Artificial Sequence
  Description of Artificial Sequence: Synthetic oligonucleotide
  Antisense strand to SEQ ID NO: 1741463
aacaaccauuucuuuaaca

SEQ ID NO: 1741465 - RNA, 19 nt, Artificial Sequence
  Description of Artificial Sequence: Synthetic oligonucleotide
  Sense strand starting at position 3080 of SEQ ID NO: 1562364
uaaagaaaugguuguuuac

SEQ ID NO: 1741466 - RNA, 19 nt, Artificial Sequence
  Description of Artificial Sequence: Synthetic oligonucleotide
  Antisense strand to SEQ ID NO: 1741465
guaaacaaccauuucuuua

SEQ ID NO: 1741467 - RNA, 19 nt, Artificial Sequence
  Description of Artificial Sequence: Synthetic oligonucleotide
  Sense strand starting at position 3082 of SEQ ID NO: 1562364
aagaaaugguuguuuacuu

SEQ ID NO: 1741468 - RNA, 19 nt, Artificial Sequence
  Description of Artificial Sequence: Synthetic oligonucleotide
  Antisense strand to SEQ ID NO: 1741467
aaguaaacaaccauuucuu

SEQ ID NO: 1741469 - RNA, 19 nt, Artificial Sequence
  Description of Artificial Sequence: Synthetic oligonucleotide
  Sense strand starting at position 3083 of SEQ ID NO: 1562364
agaaaugguuguuuacuua

SEQ ID NO: 1741470 - RNA, 19 nt, Artificial Sequence
  Description of Artificial Sequence: Synthetic oligonucleotide
  Antisense strand to SEQ ID NO: 1741469
uaaguaaacaaccauuucu

SEQ ID NO: 1741471 - RNA, 19 nt, Artificial Sequence
  Description of Artificial Sequence: Synthetic oligonucleotide
  Sense strand starting at position 3086 of SEQ ID NO: 1562364
aaugguuguuuacuuagga

SEQ ID NO: 1741472 - RNA, 19 nt, Artificial Sequence
  Description of Artificial Sequence: Synthetic oligonucleotide
  Antisense strand to SEQ ID NO: 1741471
uccuaaguaaacaaccauu

SEQ ID NO: 1741473 - RNA, 19 nt, Artificial Sequence
  Description of Artificial Sequence: Synthetic oligonucleotide
  Sense strand starting at position 3087 of SEQ ID NO: 1562364
augguuguuuacuuaggaa

SEQ ID NO: 1741474 - RNA, 19 nt, Artificial Sequence
  Description of Artificial Sequence: Synthetic oligonucleotide
  Antisense strand to SEQ ID NO: 1741473
uuccuaaguaaacaaccau

SEQ ID NO: 1741475 - RNA, 19 nt, Artificial Sequence
  Description of Artificial Sequence: Synthetic oligonucleotide
  Sense strand starting at position 3123 of SEQ ID NO: 1562364
agcgguugucucucgauau

SEQ ID NO: 1741476 - RNA, 19 nt, Artificial Sequence
  Description of Artificial Sequence: Synthetic oligonucleotide
  Antisense strand to SEQ ID NO: 1741475
auaucgagagacaaccgcu

SEQ ID NO: 1741477 - RNA, 19 nt, Artificial Sequence
  Description of Artificial Sequence: Synthetic oligonucleotide
  Sense strand starting at position 3192 of SEQ ID NO: 1562364
gaucuugaaacguaagugu

SEQ ID NO: 1741478 - RNA, 19 nt, Artificial Sequence
  Description of Artificial Sequence: Synthetic oligonucleotide
  Antisense strand to SEQ ID NO: 1741477
acacuuacguuucaagauc

SEQ ID NO: 1741479 - RNA, 19 nt, Artificial Sequence
  Description of Artificial Sequence: Synthetic oligonucleotide
  Sense strand starting at position 3319 of SEQ ID NO: 1562364
uuauuagggcaaugaugua

SEQ ID NO: 1741480 - RNA, 19 nt, Artificial Sequence
  Description of Artificial Sequence: Synthetic oligonucleotide
  Antisense strand to SEQ ID NO: 1741479
uacaucauugcccuaauaa

SEQ ID NO: 1741481 - RNA, 19 nt, Artificial Sequence
  Description of Artificial Sequence: Synthetic oligonucleotide
  Sense strand starting at position 3324 of SEQ ID NO: 1562364
agggcaaugauguauuauu

SEQ ID NO: 1741482 - RNA, 19 nt, Artificial Sequence
  Description of Artificial Sequence: Synthetic oligonucleotide
  Antisense strand to SEQ ID NO: 1741481
aauaauacaucauugcccu

SEQ ID NO: 1741483 - RNA, 19 nt, Artificial Sequence
  Description of Artificial Sequence: Synthetic oligonucleotide
  Sense strand starting at position 3332 of SEQ ID NO: 1562364
gauguauuauugcuagaau

SEQ ID NO: 1741484 - RNA, 19 nt, Artificial Sequence
  Description of Artificial Sequence: Synthetic oligonucleotide
  Antisense strand to SEQ ID NO: 1741483
auucuagcaauaauacauc

SEQ ID NO: 1741485 - RNA, 19 nt, Artificial Sequence
  Description of Artificial Sequence: Synthetic oligonucleotide
  Sense strand starting at position 3483 of SEQ ID NO: 1562364
acaaaucucuggcugcaau

SEQ ID NO: 1741486 - RNA, 19 nt, Artificial Sequence
  Description of Artificial Sequence: Synthetic oligonucleotide
  Antisense strand to SEQ ID NO: 1741485
auugcagccagagauuugu

SEQ ID NO: 1741487 - RNA, 19 nt, Artificial Sequence
  Description of Artificial Sequence: Synthetic oligonucleotide
  Sense strand starting at position 3673 of SEQ ID NO: 1562364
ugugauaugugaucaucuu

SEQ ID NO: 1741488 - RNA, 19 nt, Artificial Sequence
  Description of Artificial Sequence: Synthetic oligonucleotide
  Antisense strand to SEQ ID NO: 1741487
aagaugaucacauaucaca

SEQ ID NO: 1741489 - RNA, 19 nt, Artificial Sequence
  Description of Artificial Sequence: Synthetic oligonucleotide
  Sense strand starting at position 3674 of SEQ ID NO: 1562364
gugauaugugaucaucuug

SEQ ID NO: 1741490 - RNA, 19 nt, Artificial Sequence
  Description of Artificial Sequence: Synthetic oligonucleotide
  Antisense strand to SEQ ID NO: 1741489
caagaugaucacauaucac

SEQ ID NO: 1741491 - RNA, 19 nt, Artificial Sequence
  Description of Artificial Sequence: Synthetic oligonucleotide
  Sense strand starting at position 3719 of SEQ ID NO: 1562364
auacguugugaacagguuu

SEQ ID NO: 1741492 - RNA, 19 nt, Artificial Sequence
  Description of Artificial Sequence: Synthetic oligonucleotide
  Antisense strand to SEQ ID NO: 1741491
aaaccuguucacaacguau

SEQ ID NO: 1741493 - RNA, 19 nt, Artificial Sequence
  Description of Artificial Sequence: Synthetic oligonucleotide
  Sense strand starting at position 3779 of SEQ ID NO: 1562364
auagaaucccauuguagga

SEQ ID NO: 1741494 - RNA, 19 nt, Artificial Sequence
  Description of Artificial Sequence: Synthetic oligonucleotide
  Antisense strand to SEQ ID NO: 1741493
uccuacaaugggauucuau

SEQ ID NO: 1741495 - RNA, 19 nt, Artificial Sequence
  Description of Artificial Sequence: Synthetic oligonucleotide
  Sense strand starting at position 3808 of SEQ ID NO: 1562364
gcauauuuaggugguuuga

SEQ ID NO: 1741496 - RNA, 19 nt, Artificial Sequence
  Description of Artificial Sequence: Synthetic oligonucleotide
  Antisense strand to SEQ ID NO: 1741495
ucaaaccaccuaaauaugc

SEQ ID NO: 1741497 - RNA, 19 nt, Artificial Sequence
  Description of Artificial Sequence: Synthetic oligonucleotide
  Sense strand starting at position 3860 of SEQ ID NO: 1562364
gauugcuggcuuuaagaug

SEQ ID NO: 1741498 - RNA, 19 nt, Artificial Sequence
  Description of Artificial Sequence: Synthetic oligonucleotide
  Antisense strand to SEQ ID NO: 1741497
caucuuaaagccagcaauc

SEQ ID NO: 1741499 - RNA, 19 nt, Artificial Sequence
  Description of Artificial Sequence: Synthetic oligonucleotide
  Sense strand starting at position 3881 of SEQ ID NO: 1562364
aucauuacuuccuuguaga

SEQ ID NO: 1741500 - RNA, 19 nt, Artificial Sequence
  Description of Artificial Sequence: Synthetic oligonucleotide
  Antisense strand to SEQ ID NO: 1741499
ucuacaaggaaguaaugau

SEQ ID NO: 1741501 - RNA, 19 nt, Artificial Sequence
  Description of Artificial Sequence: Synthetic oligonucleotide
  Sense strand starting at position 3951 of SEQ ID NO: 1562364
auguauaaaugcuuaggaa

SEQ ID NO: 1741502 - RNA, 19 nt, Artificial Sequence
  Description of Artificial Sequence: Synthetic oligonucleotide
  Antisense strand to SEQ ID NO: 1741501
uuccuaagcauuuauacau

SEQ ID NO: 1741503 - RNA, 19 nt, Artificial Sequence
  Description of Artificial Sequence: Synthetic oligonucleotide
  Sense strand starting at position 16 of SEQ ID NO: 1562365
aggcccagauagguaaaua

SEQ ID NO: 1741504 - RNA, 19 nt, Artificial Sequence
  Description of Artificial Sequence: Synthetic oligonucleotide
  Antisense strand to SEQ ID NO: 1741503
uauuuaccuaucugggccu

SEQ ID NO: 1741505 - RNA, 19 nt, Artificial Sequence
  Description of Artificial Sequence: Synthetic oligonucleotide
  Sense strand starting at position 26 of SEQ ID NO: 1562365
agguaaauaacuugcugga

SEQ ID NO: 1741506 - RNA, 19 nt, Artificial Sequence
  Description of Artificial Sequence: Synthetic oligonucleotide
  Antisense strand to SEQ ID NO: 1741505
uccagcaaguuauuuaccu

SEQ ID NO: 1741507 - RNA, 19 nt, Artificial Sequence
  Description of Artificial Sequence: Synthetic oligonucleotide
  Sense strand starting at position 42 of SEQ ID NO: 1562365
ggaggucacacagguaaga

SEQ ID NO: 1741508 - RNA, 19 nt, Artificial Sequence
  Description of Artificial Sequence: Synthetic oligonucleotide
  Antisense strand to SEQ ID NO: 1741507
ucuuaccugugugaccucc

SEQ ID NO: 1741509 - RNA, 19 nt, Artificial Sequence
  Description of Artificial Sequence: Synthetic oligonucleotide
  Sense strand starting at position 109 of SEQ ID NO: 1562365
gugaaacgaugaucauuga

SEQ ID NO: 1741510 - RNA, 19 nt, Artificial Sequence
  Description of Artificial Sequence: Synthetic oligonucleotide
  Antisense strand to SEQ ID NO: 1741509
ucaaugaucaucguuucac

SEQ ID NO: 1741511 - RNA, 19 nt, Artificial Sequence
  Description of Artificial Sequence: Synthetic oligonucleotide
  Sense strand starting at position 530 of SEQ ID NO: 1562365
aucacauccggccagaaau

SEQ ID NO: 1741512 - RNA, 19 nt, Artificial Sequence
  Description of Artificial Sequence: Synthetic oligonucleotide
  Antisense strand to SEQ ID NO: 1741511
auuucuggccggaugugau

SEQ ID NO: 1741513 - RNA, 19 nt, Artificial Sequence
  Description of Artificial Sequence: Synthetic oligonucleotide
  Sense strand starting at position 576 of SEQ ID NO: 1562365
guuacaucuuuaguuugaa

SEQ ID NO: 1741514 - RNA, 19 nt, Artificial Sequence
  Description of Artificial Sequence: Synthetic oligonucleotide
  Antisense strand to SEQ ID NO: 1741513
uucaaacuaaagauguaac

SEQ ID NO: 1741515 - RNA, 19 nt, Artificial Sequence
  Description of Artificial Sequence: Synthetic oligonucleotide
  Sense strand starting at position 596 of SEQ ID NO: 1562365
auagcaguagugugggaaa

SEQ ID NO: 1741516 - RNA, 19 nt, Artificial Sequence
  Description of Artificial Sequence: Synthetic oligonucleotide
  Antisense strand to SEQ ID NO: 1741515
uuucccacacuacugcuau

SEQ ID NO: 1741517 - RNA, 19 nt, Artificial Sequence
  Description of Artificial Sequence: Synthetic oligonucleotide
  Sense strand starting at position 616 of SEQ ID NO: 1562365
uucuguuuacucuagugga

SEQ ID NO: 1741518 - RNA, 19 nt, Artificial Sequence
  Description of Artificial Sequence: Synthetic oligonucleotide
  Antisense strand to SEQ ID NO: 1741517
uccacuagaguaaacagaa

SEQ ID NO: 1741519 - RNA, 19 nt, Artificial Sequence
  Description of Artificial Sequence: Synthetic oligonucleotide
  Sense strand starting at position 763 of SEQ ID NO: 1562365
gggccucauuccucagaau

SEQ ID NO: 1741520 - RNA, 19 nt, Artificial Sequence
  Description of Artificial Sequence: Synthetic oligonucleotide
  Antisense strand to SEQ ID NO: 1741519
auucugaggaaugaggccc

SEQ ID NO: 1741521 - RNA, 19 nt, Artificial Sequence
  Description of Artificial Sequence: Synthetic oligonucleotide
  Sense strand starting at position 764 of SEQ ID NO: 1562365
ggccucauuccucagaaug

SEQ ID NO: 1741522 - RNA, 19 nt, Artificial Sequence
  Description of Artificial Sequence: Synthetic oligonucleotide
  Antisense strand to SEQ ID NO: 1741521
cauucugaggaaugaggcc

SEQ ID NO: 1741523 - RNA, 19 nt, Artificial Sequence
  Description of Artificial Sequence: Synthetic oligonucleotide
  Sense strand starting at position 769 of SEQ ID NO: 1562365
cauuccucagaauggguaa

SEQ ID NO: 1741524 - RNA, 19 nt, Artificial Sequence
  Description of Artificial Sequence: Synthetic oligonucleotide
  Antisense strand to SEQ ID NO: 1741523
uuacccauucugaggaaug

SEQ ID NO: 1741525 - RNA, 19 nt, Artificial Sequence
  Description of Artificial Sequence: Synthetic oligonucleotide
  Sense strand starting at position 772 of SEQ ID NO: 1562365
uccucagaauggguaacau

SEQ ID NO: 1741526 - RNA, 19 nt, Artificial Sequence
  Description of Artificial Sequence: Synthetic oligonucleotide
  Antisense strand to SEQ ID NO: 1741525
auguuacccauucugagga

SEQ ID NO: 1741527 - RNA, 19 nt, Artificial Sequence
  Description of Artificial Sequence: Synthetic oligonucleotide
  Sense strand starting at position 808 of SEQ ID NO: 1562365
caaauaaagccguaucaga

SEQ ID NO: 1741528 - RNA, 19 nt, Artificial Sequence
  Description of Artificial Sequence: Synthetic oligonucleotide
  Antisense strand to SEQ ID NO: 1741527
ucugauacggcuuuauuug

SEQ ID NO: 1741529 - RNA, 19 nt, Artificial Sequence
  Description of Artificial Sequence: Synthetic oligonucleotide
  Sense strand starting at position 815 of SEQ ID NO: 1562365
agccguaucagaggauaug

SEQ ID NO: 1741530 - RNA, 19 nt, Artificial Sequence
  Description of Artificial Sequence: Synthetic oligonucleotide
  Antisense strand to SEQ ID NO: 1741529
cauauccucugauacggcu

SEQ ID NO: 1741531 - RNA, 19 nt, Artificial Sequence
  Description of Artificial Sequence: Synthetic oligonucleotide
  Sense strand starting at position 1585 of SEQ ID NO: 1562365
uuugaaugccggucgcuua

SEQ ID NO: 1741532 - RNA, 19 nt, Artificial Sequence
  Description of Artificial Sequence: Synthetic oligonucleotide
  Antisense strand to SEQ ID NO: 1741531
uaagcgaccggcauucaaa

SEQ ID NO: 1741533 - RNA, 19 nt, Artificial Sequence
  Description of Artificial Sequence: Synthetic oligonucleotide
  Sense strand starting at position 1631 of SEQ ID NO: 1562365
aaaugaggcugguuauaga

SEQ ID NO: 1741534 - RNA, 19 nt, Artificial Sequence
  Description of Artificial Sequence: Synthetic oligonucleotide
  Antisense strand to SEQ ID NO: 1741533
ucuauaaccagccucauuu

SEQ ID NO: 1741535 - RNA, 19 nt, Artificial Sequence
  Description of Artificial Sequence: Synthetic oligonucleotide
  Sense strand starting at position 2265 of SEQ ID NO: 1562365
aggagcuuuccagguaaac

SEQ ID NO: 1741536 - RNA, 19 nt, Artificial Sequence
  Description of Artificial Sequence: Synthetic oligonucleotide
  Antisense strand to SEQ ID NO: 1741535
guuuaccuggaaagcuccu

SEQ ID NO: 1741537 - RNA, 19 nt, Artificial Sequence
  Description of Artificial Sequence: Synthetic oligonucleotide
  Sense strand starting at position 2917 of SEQ ID NO: 1562365
aaugguugcgauuaauuac

SEQ ID NO: 1741538 - RNA, 19 nt, Artificial Sequence
  Description of Artificial Sequence: Synthetic oligonucleotide
  Antisense strand to SEQ ID NO: 1741537
guaauuaaucgcaaccauu

SEQ ID NO: 1741539 - RNA, 19 nt, Artificial Sequence
  Description of Artificial Sequence: Synthetic oligonucleotide
  Sense strand starting at position 3017 of SEQ ID NO: 1562365
gcugguagacuuuacauaa

SEQ ID NO: 1741540 - RNA, 19 nt, Artificial Sequence
  Description of Artificial Sequence: Synthetic oligonucleotide
  Antisense strand to SEQ ID NO: 1741539
uuauguaaagucuaccagc

SEQ ID NO: 1741541 - RNA, 19 nt, Artificial Sequence
  Description of Artificial Sequence: Synthetic oligonucleotide
  Sense strand starting at position 3062 of SEQ ID NO: 1562365
aggcgaagagauuguuaaa

SEQ ID NO: 1741542 - RNA, 19 nt, Artificial Sequence
  Description of Artificial Sequence: Synthetic oligonucleotide
  Antisense strand to SEQ ID NO: 1741541
uuuaacaaucucuucgccu

SEQ ID NO: 1741543 - RNA, 19 nt, Artificial Sequence
  Description of Artificial Sequence: Synthetic oligonucleotide
  Sense strand starting at position 3074 of SEQ ID NO: 1562365
uguuaaagaaaugguuguu

SEQ ID NO: 1741544 - RNA, 19 nt, Artificial Sequence
  Description of Artificial Sequence: Synthetic oligonucleotide
  Antisense strand to SEQ ID NO: 1741543
aacaaccauuucuuuaaca

SEQ ID NO: 1741545 - RNA, 19 nt, Artificial Sequence
  Description of Artificial Sequence: Synthetic oligonucleotide
  Sense strand starting at position 3077 of SEQ ID NO: 1562365
uaaagaaaugguuguuuac

SEQ ID NO: 1741546 - RNA, 19 nt, Artificial Sequence
  Description of Artificial Sequence: Synthetic oligonucleotide
  Antisense strand to SEQ ID NO: 1741545
guaaacaaccauuucuuua

SEQ ID NO: 1741547 - RNA, 19 nt, Artificial Sequence
  Description of Artificial Sequence: Synthetic oligonucleotide
  Sense strand starting at position 3079 of SEQ ID NO: 1562365
aagaaaugguuguuuacuu

SEQ ID NO: 1741548 - RNA, 19 nt, Artificial Sequence
  Description of Artificial Sequence: Synthetic oligonucleotide
  Antisense strand to SEQ ID NO: 1741547
aaguaaacaaccauuucuu

SEQ ID NO: 1741549 - RNA, 19 nt, Artificial Sequence
  Description of Artificial Sequence: Synthetic oligonucleotide
  Sense strand starting at position 3080 of SEQ ID NO: 1562365
agaaaugguuguuuacuua

SEQ ID NO: 1741550 - RNA, 19 nt, Artificial Sequence
  Description of Artificial Sequence: Synthetic oligonucleotide
  Antisense strand to SEQ ID NO: 1741549
uaaguaaacaaccauuucu

SEQ ID NO: 1741551 - RNA, 19 nt, Artificial Sequence
  Description of Artificial Sequence: Synthetic oligonucleotide
  Sense strand starting at position 3083 of SEQ ID NO: 1562365
aaugguuguuuacuuagga

SEQ ID NO: 1741552 - RNA, 19 nt, Artificial Sequence
  Description of Artificial Sequence: Synthetic oligonucleotide
  Antisense strand to SEQ ID NO: 1741551
uccuaaguaaacaaccauu

SEQ ID NO: 1741553 - RNA, 19 nt, Artificial Sequence
  Description of Artificial Sequence: Synthetic oligonucleotide
  Sense strand starting at position 3084 of SEQ ID NO: 1562365
augguuguuuacuuaggaa

SEQ ID NO: 1741554 - RNA, 19 nt, Artificial Sequence
  Description of Artificial Sequence: Synthetic oligonucleotide
  Antisense strand to SEQ ID NO: 1741553
uuccuaaguaaacaaccau

SEQ ID NO: 1741555 - RNA, 19 nt, Artificial Sequence
  Description of Artificial Sequence: Synthetic oligonucleotide
  Sense strand starting at position 3120 of SEQ ID NO: 1562365
agcgguugucucucgauau

SEQ ID NO: 1741556 - RNA, 19 nt, Artificial Sequence
  Description of Artificial Sequence: Synthetic oligonucleotide
  Antisense strand to SEQ ID NO: 1741555
auaucgagagacaaccgcu

SEQ ID NO: 1741557 - RNA, 19 nt, Artificial Sequence
  Description of Artificial Sequence: Synthetic oligonucleotide
  Sense strand starting at position 3189 of SEQ ID NO: 1562365
gaucuugaaacguaagugu

SEQ ID NO: 1741558 - RNA, 19 nt, Artificial Sequence
  Description of Artificial Sequence: Synthetic oligonucleotide
  Antisense strand to SEQ ID NO: 1741557
acacuuacguuucaagauc

SEQ ID NO: 1741559 - RNA, 19 nt, Artificial Sequence
  Description of Artificial Sequence: Synthetic oligonucleotide
  Sense strand starting at position 3316 of SEQ ID NO: 1562365
uuauuagggcaaugaugua

SEQ ID NO: 1741560 - RNA, 19 nt, Artificial Sequence
  Description of Artificial Sequence: Synthetic oligonucleotide
  Antisense strand to SEQ ID NO: 1741559
uacaucauugcccuaauaa

SEQ ID NO: 1741561 - RNA, 19 nt, Artificial Sequence
  Description of Artificial Sequence: Synthetic oligonucleotide
  Sense strand starting at position 3321 of SEQ ID NO: 1562365
agggcaaugauguauuauu

SEQ ID NO: 1741562 - RNA, 19 nt, Artificial Sequence
  Description of Artificial Sequence: Synthetic oligonucleotide
  Antisense strand to SEQ ID NO: 1741561
aauaauacaucauugcccu

SEQ ID NO: 1741563 - RNA, 19 nt, Artificial Sequence
  Description of Artificial Sequence: Synthetic oligonucleotide
  Sense strand starting at position 3329 of SEQ ID NO: 1562365
gauguauuauugcuagaau

SEQ ID NO: 1741564 - RNA, 19 nt, Artificial Sequence
  Description of Artificial Sequence: Synthetic oligonucleotide
  Antisense strand to SEQ ID NO: 1741563
auucuagcaauaauacauc

SEQ ID NO: 1741565 - RNA, 19 nt, Artificial Sequence
  Description of Artificial Sequence: Synthetic oligonucleotide
  Sense strand starting at position 3480 of SEQ ID NO: 1562365
acaaaucucuggcugcaau

SEQ ID NO: 1741566 - RNA, 19 nt, Artificial Sequence
  Description of Artificial Sequence: Synthetic oligonucleotide
  Antisense strand to SEQ ID NO: 1741565
auugcagccagagauuugu

SEQ ID NO: 1741567 - RNA, 19 nt, Artificial Sequence
  Description of Artificial Sequence: Synthetic oligonucleotide
  Sense strand starting at position 3670 of SEQ ID NO: 1562365
ugugauaugugaucaucuu

SEQ ID NO: 1741568 - RNA, 19 nt, Artificial Sequence
  Description of Artificial Sequence: Synthetic oligonucleotide
  Antisense strand to SEQ ID NO: 1741567
aagaugaucacauaucaca

SEQ ID NO: 1741569 - RNA, 19 nt, Artificial Sequence
  Description of Artificial Sequence: Synthetic oligonucleotide
  Sense strand starting at position 3671 of SEQ ID NO: 1562365
gugauaugugaucaucuug

SEQ ID NO: 1741570 - RNA, 19 nt, Artificial Sequence
  Description of Artificial Sequence: Synthetic oligonucleotide
  Antisense strand to SEQ ID NO: 1741569
caagaugaucacauaucac

SEQ ID NO: 1741571 - RNA, 19 nt, Artificial Sequence
  Description of Artificial Sequence: Synthetic oligonucleotide
  Sense strand starting at position 3716 of SEQ ID NO: 1562365
auacguugugaacagguuu

SEQ ID NO: 1741572 - RNA, 19 nt, Artificial Sequence
  Description of Artificial Sequence: Synthetic oligonucleotide
  Antisense strand to SEQ ID NO: 1741571
aaaccuguucacaacguau

SEQ ID NO: 1741573 - RNA, 19 nt, Artificial Sequence
  Description of Artificial Sequence: Synthetic oligonucleotide
  Sense strand starting at position 3776 of SEQ ID NO: 1562365
auagaaucccauuguagga

SEQ ID NO: 1741574 - RNA, 19 nt, Artificial Sequence
  Description of Artificial Sequence: Synthetic oligonucleotide
  Antisense strand to SEQ ID NO: 1741573
uccuacaaugggauucuau

SEQ ID NO: 1741575 - RNA, 19 nt, Artificial Sequence
  Description of Artificial Sequence: Synthetic oligonucleotide
  Sense strand starting at position 3805 of SEQ ID NO: 1562365
gcauauuuaggugguuuga

SEQ ID NO: 1741576 - RNA, 19 nt, Artificial Sequence
  Description of Artificial Sequence: Synthetic oligonucleotide
  Antisense strand to SEQ ID NO: 1741575
ucaaaccaccuaaauaugc

SEQ ID NO: 1741577 - RNA, 19 nt, Artificial Sequence
  Description of Artificial Sequence: Synthetic oligonucleotide
  Sense strand starting at position 3857 of SEQ ID NO: 1562365
gauugcuggcuuuaagaug

SEQ ID NO: 1741578 - RNA, 19 nt, Artificial Sequence
  Description of Artificial Sequence: Synthetic oligonucleotide
  Antisense strand to SEQ ID NO: 1741577
caucuuaaagccagcaauc

SEQ ID NO: 1741579 - RNA, 19 nt, Artificial Sequence
  Description of Artificial Sequence: Synthetic oligonucleotide
  Sense strand starting at position 3878 of SEQ ID NO: 1562365
aucauuacuuccuuguaga

SEQ ID NO: 1741580 - RNA, 19 nt, Artificial Sequence
  Description of Artificial Sequence: Synthetic oligonucleotide
  Antisense strand to SEQ ID NO: 1741579
ucuacaaggaaguaaugau

SEQ ID NO: 1741581 - RNA, 19 nt, Artificial Sequence
  Description of Artificial Sequence: Synthetic oligonucleotide
  Sense strand starting at position 3948 of SEQ ID NO: 1562365
auguauaaaugcuuaggaa

SEQ ID NO: 1741582 - RNA, 19 nt, Artificial Sequence
  Description of Artificial Sequence: Synthetic oligonucleotide
  Antisense strand to SEQ ID NO: 1741581
uuccuaagcauuuauacau

SEQ ID NO: 1741583 - RNA, 19 nt, Artificial Sequence
  Description of Artificial Sequence: Synthetic oligonucleotide
  Sense strand starting at position 168 of SEQ ID NO: 1562366
ugacuaauuguaggucaga

SEQ ID NO: 1741584 - RNA, 19 nt, Artificial Sequence
  Description of Artificial Sequence: Synthetic oligonucleotide
  Antisense strand to SEQ ID NO: 1741583
ucugaccuacaauuaguca

SEQ ID NO: 1741585 - RNA, 19 nt, Artificial Sequence
  Description of Artificial Sequence: Synthetic oligonucleotide
  Sense strand starting at position 169 of SEQ ID NO: 1562366
gacuaauuguaggucagag

SEQ ID NO: 1741586 - RNA, 19 nt, Artificial Sequence
  Description of Artificial Sequence: Synthetic oligonucleotide
  Antisense strand to SEQ ID NO: 1741585
cucugaccuacaauuaguc

SEQ ID NO: 1741587 - RNA, 19 nt, Artificial Sequence
  Description of Artificial Sequence: Synthetic oligonucleotide
  Sense strand starting at position 177 of SEQ ID NO: 1562366
guaggucagagcuaguaua

SEQ ID NO: 1741588 - RNA, 19 nt, Artificial Sequence
  Description of Artificial Sequence: Synthetic oligonucleotide
  Antisense strand to SEQ ID NO: 1741587
uauacuagcucugaccuac

SEQ ID NO: 1741589 - RNA, 19 nt, Artificial Sequence
  Description of Artificial Sequence: Synthetic oligonucleotide
  Sense strand starting at position 265 of SEQ ID NO: 1562366
cuguuaguuccuggaaagg

SEQ ID NO: 1741590 - RNA, 19 nt, Artificial Sequence
  Description of Artificial Sequence: Synthetic oligonucleotide
  Antisense strand to SEQ ID NO: 1741589
ccuuuccaggaacuaacag

SEQ ID NO: 1741591 - RNA, 19 nt, Artificial Sequence
  Description of Artificial Sequence: Synthetic oligonucleotide
  Sense strand starting at position 349 of SEQ ID NO: 1562366
cuaagagacccaugugaug

SEQ ID NO: 1741592 - RNA, 19 nt, Artificial Sequence
  Description of Artificial Sequence: Synthetic oligonucleotide
  Antisense strand to SEQ ID NO: 1741591
caucacaugggucucuuag

SEQ ID NO: 1741593 - RNA, 19 nt, Artificial Sequence
  Description of Artificial Sequence: Synthetic oligonucleotide
  Sense strand starting at position 454 of SEQ ID NO: 1562366
cgaacaauaacuggguuua

SEQ ID NO: 1741594 - RNA, 19 nt, Artificial Sequence
  Description of Artificial Sequence: Synthetic oligonucleotide
  Antisense strand to SEQ ID NO: 1741593
uaaacccaguuauuguucg

SEQ ID NO: 1741595 - RNA, 19 nt, Artificial Sequence
  Description of Artificial Sequence: Synthetic oligonucleotide
  Sense strand starting at position 456 of SEQ ID NO: 1562366
aacaauaacuggguuuagu

SEQ ID NO: 1741596 - RNA, 19 nt, Artificial Sequence
  Description of Artificial Sequence: Synthetic oligonucleotide
  Antisense strand to SEQ ID NO: 1741595
acuaaacccaguuauuguu

SEQ ID NO: 1741597 - RNA, 19 nt, Artificial Sequence
  Description of Artificial Sequence: Synthetic oligonucleotide
  Sense strand starting at position 491 of SEQ ID NO: 1562366
ugugucaacccucaaaguu

SEQ ID NO: 1741598 - RNA, 19 nt, Artificial Sequence
  Description of Artificial Sequence: Synthetic oligonucleotide
  Antisense strand to SEQ ID NO: 1741597
aacuuugaggguugacaca

SEQ ID NO: 1741599 - RNA, 19 nt, Artificial Sequence
  Description of Artificial Sequence: Synthetic oligonucleotide
  Sense strand starting at position 661 of SEQ ID NO: 1562366
agaucagagcccugaaucu

SEQ ID NO: 1741600 - RNA, 19 nt, Artificial Sequence
  Description of Artificial Sequence: Synthetic oligonucleotide
  Antisense strand to SEQ ID NO: 1741599
agauucagggcucugaucu

SEQ ID NO: 1741601 - RNA, 19 nt, Artificial Sequence
  Description of Artificial Sequence: Synthetic oligonucleotide
  Sense strand starting at position 847 of SEQ ID NO: 1562366
aguggaacccgucagaguu

SEQ ID NO: 1741602 - RNA, 19 nt, Artificial Sequence
  Description of Artificial Sequence: Synthetic oligonucleotide
  Antisense strand to SEQ ID NO: 1741601
aacucugacggguuccacu

SEQ ID NO: 1741603 - RNA, 19 nt, Artificial Sequence
  Description of Artificial Sequence: Synthetic oligonucleotide
  Sense strand starting at position 867 of SEQ ID NO: 1562366
gcagacuccauguggaaga

SEQ ID NO: 1741604 - RNA, 19 nt, Artificial Sequence
  Description of Artificial Sequence: Synthetic oligonucleotide
  Antisense strand to SEQ ID NO: 1741603
ucuuccacauggagucugc

SEQ ID NO: 1741605 - RNA, 19 nt, Artificial Sequence
  Description of Artificial Sequence: Synthetic oligonucleotide
  Sense strand starting at position 1438 of SEQ ID NO: 1562366
ggcggucugagggaggaua

SEQ ID NO: 1741606 - RNA, 19 nt, Artificial Sequence
  Description of Artificial Sequence: Synthetic oligonucleotide
  Antisense strand to SEQ ID NO: 1741605
uauccucccucagaccgcc

SEQ ID NO: 1741607 - RNA, 19 nt, Artificial Sequence
  Description of Artificial Sequence: Synthetic oligonucleotide
  Sense strand starting at position 1440 of SEQ ID NO: 1562366
cggucugagggaggauaua

SEQ ID NO: 1741608 - RNA, 19 nt, Artificial Sequence
  Description of Artificial Sequence: Synthetic oligonucleotide
  Antisense strand to SEQ ID NO: 1741607
uauauccucccucagaccg

SEQ ID NO: 1741609 - RNA, 19 nt, Artificial Sequence
  Description of Artificial Sequence: Synthetic oligonucleotide
  Sense strand starting at position 2250 of SEQ ID NO: 1562366
agucgaucgaguguugcau

SEQ ID NO: 1741610 - RNA, 19 nt, Artificial Sequence
  Description of Artificial Sequence: Synthetic oligonucleotide
  Antisense strand to SEQ ID NO: 1741609
augcaacacucgaucgacu

SEQ ID NO: 1741611 - RNA, 19 nt, Artificial Sequence
  Description of Artificial Sequence: Synthetic oligonucleotide
  Sense strand starting at position 2251 of SEQ ID NO: 1562366
gucgaucgaguguugcauu

SEQ ID NO: 1741612 - RNA, 19 nt, Artificial Sequence
  Description of Artificial Sequence: Synthetic oligonucleotide
  Antisense strand to SEQ ID NO: 1741611
aaugcaacacucgaucgac

SEQ ID NO: 1741613 - RNA, 19 nt, Artificial Sequence
  Description of Artificial Sequence: Synthetic oligonucleotide
  Sense strand starting at position 2263 of SEQ ID NO: 1562366
uugcauucucaagacagau

SEQ ID NO: 1741614 - RNA, 19 nt, Artificial Sequence
  Description of Artificial Sequence: Synthetic oligonucleotide
  Antisense strand to SEQ ID NO: 1741613
aucugucuugagaaugcaa

SEQ ID NO: 1741615 - RNA, 19 nt, Artificial Sequence
  Description of Artificial Sequence: Synthetic oligonucleotide
  Sense strand starting at position 2338 of SEQ ID NO: 1562366
aaggaagccuucuugguaa

SEQ ID NO: 1741616 - RNA, 19 nt, Artificial Sequence
  Description of Artificial Sequence: Synthetic oligonucleotide
  Antisense strand to SEQ ID NO: 1741615
uuaccaagaaggcuuccuu

SEQ ID NO: 1741617 - RNA, 19 nt, Artificial Sequence
  Description of Artificial Sequence: Synthetic oligonucleotide
  Sense strand starting at position 2649 of SEQ ID NO: 1562366
aacugucaggucugaauac

SEQ ID NO: 1741618 - RNA, 19 nt, Artificial Sequence
  Description of Artificial Sequence: Synthetic oligonucleotide
  Antisense strand to SEQ ID NO: 1741617
guauucagaccugacaguu

SEQ ID NO: 1741619 - RNA, 19 nt, Artificial Sequence
  Description of Artificial Sequence: Synthetic oligonucleotide
  Sense strand starting at position 2701 of SEQ ID NO: 1562366
gagacuguuucucuguaga

SEQ ID NO: 1741620 - RNA, 19 nt, Artificial Sequence
  Description of Artificial Sequence: Synthetic oligonucleotide
  Antisense strand to SEQ ID NO: 1741619
ucuacagagaaacagucuc

SEQ ID NO: 1741621 - RNA, 19 nt, Artificial Sequence
  Description of Artificial Sequence: Synthetic oligonucleotide
  Sense strand starting at position 2703 of SEQ ID NO: 1562366
gacuguuucucuguagaag

SEQ ID NO: 1741622 - RNA, 19 nt, Artificial Sequence
  Description of Artificial Sequence: Synthetic oligonucleotide
  Antisense strand to SEQ ID NO: 1741621
cuucuacagagaaacaguc

SEQ ID NO: 1741623 - RNA, 19 nt, Artificial Sequence
  Description of Artificial Sequence: Synthetic oligonucleotide
  Sense strand starting at position 2766 of SEQ ID NO: 1562366
auuaauuuccuucgaguuu

SEQ ID NO: 1741624 - RNA, 19 nt, Artificial Sequence
  Description of Artificial Sequence: Synthetic oligonucleotide
  Antisense strand to SEQ ID NO: 1741623
aaacucgaaggaaauuaau

SEQ ID NO: 1741625 - RNA, 19 nt, Artificial Sequence
  Description of Artificial Sequence: Synthetic oligonucleotide
  Sense strand starting at position 2810 of SEQ ID NO: 1562366
uugcuaggucuauauuaac

SEQ ID NO: 1741626 - RNA, 19 nt, Artificial Sequence
  Description of Artificial Sequence: Synthetic oligonucleotide
  Antisense strand to SEQ ID NO: 1741625
guuaauauagaccuagcaa

SEQ ID NO: 1741627 - RNA, 19 nt, Artificial Sequence
  Description of Artificial Sequence: Synthetic oligonucleotide
  Sense strand starting at position 2901 of SEQ ID NO: 1562366
guuauaugagccuagagug

SEQ ID NO: 1741628 - RNA, 19 nt, Artificial Sequence
  Description of Artificial Sequence: Synthetic oligonucleotide
  Antisense strand to SEQ ID NO: 1741627
cacucuaggcucauauaac

SEQ ID NO: 1741629 - RNA, 19 nt, Artificial Sequence
  Description of Artificial Sequence: Synthetic oligonucleotide
  Sense strand starting at position 3021 of SEQ ID NO: 1562366
uguggugucagacacuaua

SEQ ID NO: 1741630 - RNA, 19 nt, Artificial Sequence
  Description of Artificial Sequence: Synthetic oligonucleotide
  Antisense strand to SEQ ID NO: 1741629
uauagugucugacaccaca

SEQ ID NO: 1741631 - RNA, 19 nt, Artificial Sequence
  Description of Artificial Sequence: Synthetic oligonucleotide
  Sense strand starting at position 3024 of SEQ ID NO: 1562366
ggugucagacacuauacuu

SEQ ID NO: 1741632 - RNA, 19 nt, Artificial Sequence
  Description of Artificial Sequence: Synthetic oligonucleotide
  Antisense strand to SEQ ID NO: 1741631
aaguauagugucugacacc

SEQ ID NO: 1741633 - RNA, 19 nt, Artificial Sequence
  Description of Artificial Sequence: Synthetic oligonucleotide
  Sense strand starting at position 3095 of SEQ ID NO: 1562366
uuagaacuccacuguggaa

SEQ ID NO: 1741634 - RNA, 19 nt, Artificial Sequence
  Description of Artificial Sequence: Synthetic oligonucleotide
  Antisense strand to SEQ ID NO: 1741633
uuccacaguggaguucuaa

SEQ ID NO: 1741635 - RNA, 19 nt, Artificial Sequence
  Description of Artificial Sequence: Synthetic oligonucleotide
  Sense strand starting at position 3154 of SEQ ID NO: 1562366
gacacuuugggaugagagu

SEQ ID NO: 1741636 - RNA, 19 nt, Artificial Sequence
  Description of Artificial Sequence: Synthetic oligonucleotide
  Antisense strand to SEQ ID NO: 1741635
acucucaucccaaaguguc

SEQ ID NO: 1741637 - RNA, 19 nt, Artificial Sequence
  Description of Artificial Sequence: Synthetic oligonucleotide
  Sense strand starting at position 3181 of SEQ ID NO: 1562366
cagaacaugucugcagaua

SEQ ID NO: 1741638 - RNA, 19 nt, Artificial Sequence
  Description of Artificial Sequence: Synthetic oligonucleotide
  Antisense strand to SEQ ID NO: 1741637
uaucugcagacauguucug

SEQ ID NO: 1741639 - RNA, 19 nt, Artificial Sequence
  Description of Artificial Sequence: Synthetic oligonucleotide
  Sense strand starting at position 3205 of SEQ ID NO: 1562366
agggacugauagggauuua

SEQ ID NO: 1741640 - RNA, 19 nt, Artificial Sequence
  Description of Artificial Sequence: Synthetic oligonucleotide
  Antisense strand to SEQ ID NO: 1741639
uaaaucccuaucagucccu

SEQ ID NO: 1741641 - RNA, 19 nt, Artificial Sequence
  Description of Artificial Sequence: Synthetic oligonucleotide
  Sense strand starting at position 3335 of SEQ ID NO: 1562366
caguguuagauaugugaga

SEQ ID NO: 1741642 - RNA, 19 nt, Artificial Sequence
  Description of Artificial Sequence: Synthetic oligonucleotide
  Antisense strand to SEQ ID NO: 1741641
ucucacauaucuaacacug

SEQ ID NO: 1741643 - RNA, 19 nt, Artificial Sequence
  Description of Artificial Sequence: Synthetic oligonucleotide
  Sense strand starting at position 3336 of SEQ ID NO: 1562366
aguguuagauaugugagaa

SEQ ID NO: 1741644 - RNA, 19 nt, Artificial Sequence
  Description of Artificial Sequence: Synthetic oligonucleotide
  Antisense strand to SEQ ID NO: 1741643
uucucacauaucuaacacu

SEQ ID NO: 1741645 - RNA, 19 nt, Artificial Sequence
  Description of Artificial Sequence: Synthetic oligonucleotide
  Sense strand starting at position 3337 of SEQ ID NO: 1562366
guguuagauaugugagaag

SEQ ID NO: 1741646 - RNA, 19 nt, Artificial Sequence
  Description of Artificial Sequence: Synthetic oligonucleotide
  Antisense strand to SEQ ID NO: 1741645
cuucucacauaucuaacac

SEQ ID NO: 1741647 - RNA, 19 nt, Artificial Sequence
  Description of Artificial Sequence: Synthetic oligonucleotide
  Sense strand starting at position 3660 of SEQ ID NO: 1562366
ccacguugugugagguauu

SEQ ID NO: 1741648 - RNA, 19 nt, Artificial Sequence
  Description of Artificial Sequence: Synthetic oligonucleotide
  Antisense strand to SEQ ID NO: 1741647
aauaccucacacaacgugg

SEQ ID NO: 1741649 - RNA, 19 nt, Artificial Sequence
  Description of Artificial Sequence: Synthetic oligonucleotide
  Sense strand starting at position 3721 of SEQ ID NO: 1562366
ucuggaacucauuggcauu

SEQ ID NO: 1741650 - RNA, 19 nt, Artificial Sequence
  Description of Artificial Sequence: Synthetic oligonucleotide
  Antisense strand to SEQ ID NO: 1741649
aaugccaaugaguuccaga

SEQ ID NO: 1741651 - RNA, 19 nt, Artificial Sequence
  Description of Artificial Sequence: Synthetic oligonucleotide
  Sense strand starting at position 3723 of SEQ ID NO: 1562366
uggaacucauuggcauuaa

SEQ ID NO: 1741652 - RNA, 19 nt, Artificial Sequence
  Description of Artificial Sequence: Synthetic oligonucleotide
  Antisense strand to SEQ ID NO: 1741651
uuaaugccaaugaguucca

SEQ ID NO: 1741653 - RNA, 19 nt, Artificial Sequence
  Description of Artificial Sequence: Synthetic oligonucleotide
  Sense strand starting at position 3727 of SEQ ID NO: 1562366
acucauuggcauuaaagua

SEQ ID NO: 1741654 - RNA, 19 nt, Artificial Sequence
  Description of Artificial Sequence: Synthetic oligonucleotide
  Antisense strand to SEQ ID NO: 1741653
uacuuuaaugccaaugagu

SEQ ID NO: 1741655 - RNA, 19 nt, Artificial Sequence
  Description of Artificial Sequence: Synthetic oligonucleotide
  Sense strand starting at position 3761 of SEQ ID NO: 1562366
aaugguguuauggaaguaa

SEQ ID NO: 1741656 - RNA, 19 nt, Artificial Sequence
  Description of Artificial Sequence: Synthetic oligonucleotide
  Antisense strand to SEQ ID NO: 1741655
uuacuuccauaacaccauu

SEQ ID NO: 1741657 - RNA, 19 nt, Artificial Sequence
  Description of Artificial Sequence: Synthetic oligonucleotide
  Sense strand starting at position 3848 of SEQ ID NO: 1562366
cucaaagaaucagugguuu

SEQ ID NO: 1741658 - RNA, 19 nt, Artificial Sequence
  Description of Artificial Sequence: Synthetic oligonucleotide
  Antisense strand to SEQ ID NO: 1741657
aaaccacugauucuuugag

SEQ ID NO: 1741659 - RNA, 19 nt, Artificial Sequence
  Description of Artificial Sequence: Synthetic oligonucleotide
  Sense strand starting at position 3902 of SEQ ID NO: 1562366
gaauguaaaucuguuagag

SEQ ID NO: 1741660 - RNA, 19 nt, Artificial Sequence
  Description of Artificial Sequence: Synthetic oligonucleotide
  Antisense strand to SEQ ID NO: 1741659
cucuaacagauuuacauuc

SEQ ID NO: 1741661 - RNA, 19 nt, Artificial Sequence
  Description of Artificial Sequence: Synthetic oligonucleotide
  Sense strand starting at position 3934 of SEQ ID NO: 1562366
accuaaaggucugugguaa

SEQ ID NO: 1741662 - RNA, 19 nt, Artificial Sequence
  Description of Artificial Sequence: Synthetic oligonucleotide
  Antisense strand to SEQ ID NO: 1741661
uuaccacagaccuuuaggu

SEQ ID NO: 1741663 - RNA, 19 nt, Artificial Sequence
  Description of Artificial Sequence: Synthetic oligonucleotide
  Sense strand starting at position 70 of SEQ ID NO: 1562367
guacucucuguuuaacuuu

SEQ ID NO: 1741664 - RNA, 19 nt, Artificial Sequence
  Description of Artificial Sequence: Synthetic oligonucleotide
  Antisense strand to SEQ ID NO: 1741663
aaaguuaaacagagaguac

SEQ ID NO: 1741665 - RNA, 19 nt, Artificial Sequence
  Description of Artificial Sequence: Synthetic oligonucleotide
  Sense strand starting at position 101 of SEQ ID NO: 1562367
aguacuguauacccuagaa

SEQ ID NO: 1741666 - RNA, 19 nt, Artificial Sequence
  Description of Artificial Sequence: Synthetic oligonucleotide
  Antisense strand to SEQ ID NO: 1741665
uucuaggguauacaguacu

SEQ ID NO: 1741667 - RNA, 19 nt, Artificial Sequence
  Description of Artificial Sequence: Synthetic oligonucleotide
  Sense strand starting at position 174 of SEQ ID NO: 1562367
guggauguaccaggguuua

SEQ ID NO: 1741668 - RNA, 19 nt, Artificial Sequence
  Description of Artificial Sequence: Synthetic oligonucleotide
  Antisense strand to SEQ ID NO: 1741667
uaaacccugguacauccac

SEQ ID NO: 1741669 - RNA, 19 nt, Artificial Sequence
  Description of Artificial Sequence: Synthetic oligonucleotide
  Sense strand starting at position 265 of SEQ ID NO: 1562367
agugaccuuguacauauau

SEQ ID NO: 1741670 - RNA, 19 nt, Artificial Sequence
  Description of Artificial Sequence: Synthetic oligonucleotide
  Antisense strand to SEQ ID NO: 1741669
auauauguacaaggucacu

SEQ ID NO: 1741671 - RNA, 19 nt, Artificial Sequence
  Description of Artificial Sequence: Synthetic oligonucleotide
  Sense strand starting at position 306 of SEQ ID NO: 1562367
guuucuccagaguaaauuc

SEQ ID NO: 1741672 - RNA, 19 nt, Artificial Sequence
  Description of Artificial Sequence: Synthetic oligonucleotide
  Antisense strand to SEQ ID NO: 1741671
gaauuuacucuggagaaac

SEQ ID NO: 1741673 - RNA, 19 nt, Artificial Sequence
  Description of Artificial Sequence: Synthetic oligonucleotide
  Sense strand starting at position 317 of SEQ ID NO: 1562367
guaaauuccuaccuguaga

SEQ ID NO: 1741674 - RNA, 19 nt, Artificial Sequence
  Description of Artificial Sequence: Synthetic oligonucleotide
  Antisense strand to SEQ ID NO: 1741673
ucuacagguaggaauuuac

SEQ ID NO: 1741675 - RNA, 19 nt, Artificial Sequence
  Description of Artificial Sequence: Synthetic oligonucleotide
  Sense strand starting at position 385 of SEQ ID NO: 1562367
aaauguuccucucuaggag

SEQ ID NO: 1741676 - RNA, 19 nt, Artificial Sequence
  Description of Artificial Sequence: Synthetic oligonucleotide
  Antisense strand to SEQ ID NO: 1741675
cuccuagagaggaacauuu

SEQ ID NO: 1741677 - RNA, 19 nt, Artificial Sequence
  Description of Artificial Sequence: Synthetic oligonucleotide
  Sense strand starting at position 386 of SEQ ID NO: 1562367
aauguuccucucuaggagu

SEQ ID NO: 1741678 - RNA, 19 nt, Artificial Sequence
  Description of Artificial Sequence: Synthetic oligonucleotide
  Antisense strand to SEQ ID NO: 1741677
acuccuagagaggaacauu

SEQ ID NO: 1741679 - RNA, 19 nt, Artificial Sequence
  Description of Artificial Sequence: Synthetic oligonucleotide
  Sense strand starting at position 513 of SEQ ID NO: 1562367
cucagaguacccugcauuu

SEQ ID NO: 1741680 - RNA, 19 nt, Artificial Sequence
  Description of Artificial Sequence: Synthetic oligonucleotide
  Antisense strand to SEQ ID NO: 1741679
aaaugcaggguacucugag

SEQ ID NO: 1741681 - RNA, 19 nt, Artificial Sequence
  Description of Artificial Sequence: Synthetic oligonucleotide
  Sense strand starting at position 664 of SEQ ID NO: 1562367
uugggaucuuaacccuuua

SEQ ID NO: 1741682 - RNA, 19 nt, Artificial Sequence
  Description of Artificial Sequence: Synthetic oligonucleotide
  Antisense strand to SEQ ID NO: 1741681
uaaaggguuaagaucccaa

SEQ ID NO: 1741683 - RNA, 19 nt, Artificial Sequence
  Description of Artificial Sequence: Synthetic oligonucleotide
  Sense strand starting at position 675 of SEQ ID NO: 1562367
acccuuuaucugugauaga

SEQ ID NO: 1741684 - RNA, 19 nt, Artificial Sequence
  Description of Artificial Sequence: Synthetic oligonucleotide
  Antisense strand to SEQ ID NO: 1741683
ucuaucacagauaaagggu

SEQ ID NO: 1741685 - RNA, 19 nt, Artificial Sequence
  Description of Artificial Sequence: Synthetic oligonucleotide
  Sense strand starting at position 2351 of SEQ ID NO: 1562367
cugaauuagcgcgaaacua

SEQ ID NO: 1741686 - RNA, 19 nt, Artificial Sequence
  Description of Artificial Sequence: Synthetic oligonucleotide
  Antisense strand to SEQ ID NO: 1741685
uaguuucgcgcuaauucag

SEQ ID NO: 1741687 - RNA, 19 nt, Artificial Sequence
  Description of Artificial Sequence: Synthetic oligonucleotide
  Sense strand starting at position 2379 of SEQ ID NO: 1562367
ggauuagcccagggagacu

SEQ ID NO: 1741688 - RNA, 19 nt, Artificial Sequence
  Description of Artificial Sequence: Synthetic oligonucleotide
  Antisense strand to SEQ ID NO: 1741687
agucucccugggcuaaucc

SEQ ID NO: 1741689 - RNA, 19 nt, Artificial Sequence
  Description of Artificial Sequence: Synthetic oligonucleotide
  Sense strand starting at position 2429 of SEQ ID NO: 1562367
ccagaaugcccgcauuucu

SEQ ID NO: 1741690 - RNA, 19 nt, Artificial Sequence
  Description of Artificial Sequence: Synthetic oligonucleotide
  Antisense strand to SEQ ID NO: 1741689
agaaaugcgggcauucugg

SEQ ID NO: 1741691 - RNA, 19 nt, Artificial Sequence
  Description of Artificial Sequence: Synthetic oligonucleotide
  Sense strand starting at position 2495 of SEQ ID NO: 1562367
cagcaauucccugggacga

SEQ ID NO: 1741692 - RNA, 19 nt, Artificial Sequence
  Description of Artificial Sequence: Synthetic oligonucleotide
  Antisense strand to SEQ ID NO: 1741691
ucgucccagggaauugcug

SEQ ID NO: 1741693 - RNA, 19 nt, Artificial Sequence
  Description of Artificial Sequence: Synthetic oligonucleotide
  Sense strand starting at position 2538 of SEQ ID NO: 1562367
cuguuagaagauuauugua

SEQ ID NO: 1741694 - RNA, 19 nt, Artificial Sequence
  Description of Artificial Sequence: Synthetic oligonucleotide
  Antisense strand to SEQ ID NO: 1741693
uacaauaaucuucuaacag

SEQ ID NO: 1741695 - RNA, 19 nt, Artificial Sequence
  Description of Artificial Sequence: Synthetic oligonucleotide
  Sense strand starting at position 2667 of SEQ ID NO: 1562367
ccgaacccuguuuaagaga

SEQ ID NO: 1741696 - RNA, 19 nt, Artificial Sequence
  Description of Artificial Sequence: Synthetic oligonucleotide
  Antisense strand to SEQ ID NO: 1741695
ucucuuaaacaggguucgg

SEQ ID NO: 1741697 - RNA, 19 nt, Artificial Sequence
  Description of Artificial Sequence: Synthetic oligonucleotide
  Sense strand starting at position 2707 of SEQ ID NO: 1562367
gucauuggccauuagugau

SEQ ID NO: 1741698 - RNA, 19 nt, Artificial Sequence
  Description of Artificial Sequence: Synthetic oligonucleotide
  Antisense strand to SEQ ID NO: 1741697
aucacuaauggccaaugac

SEQ ID NO: 1741699 - RNA, 19 nt, Artificial Sequence
  Description of Artificial Sequence: Synthetic oligonucleotide
  Sense strand starting at position 2711 of SEQ ID NO: 1562367
uuggccauuagugauugaa

SEQ ID NO: 1741700 - RNA, 19 nt, Artificial Sequence
  Description of Artificial Sequence: Synthetic oligonucleotide
  Antisense strand to SEQ ID NO: 1741699
uucaaucacuaauggccaa

SEQ ID NO: 1741701 - RNA, 19 nt, Artificial Sequence
  Description of Artificial Sequence: Synthetic oligonucleotide
  Sense strand starting at position 2713 of SEQ ID NO: 1562367
ggccauuagugauugaauu

SEQ ID NO: 1741702 - RNA, 19 nt, Artificial Sequence
  Description of Artificial Sequence: Synthetic oligonucleotide
  Antisense strand to SEQ ID NO: 1741701
aauucaaucacuaauggcc

SEQ ID NO: 1741703 - RNA, 19 nt, Artificial Sequence
  Description of Artificial Sequence: Synthetic oligonucleotide
  Sense strand starting at position 2714 of SEQ ID NO: 1562367
gccauuagugauugaauuc

SEQ ID NO: 1741704 - RNA, 19 nt, Artificial Sequence
  Description of Artificial Sequence: Synthetic oligonucleotide
  Antisense strand to SEQ ID NO: 1741703
gaauucaaucacuaauggc

SEQ ID NO: 1741705 - RNA, 19 nt, Artificial Sequence
  Description of Artificial Sequence: Synthetic oligonucleotide
  Sense strand starting at position 2772 of SEQ ID NO: 1562367
acauguuggagcugaauga

SEQ ID NO: 1741706 - RNA, 19 nt, Artificial Sequence
  Description of Artificial Sequence: Synthetic oligonucleotide
  Antisense strand to SEQ ID NO: 1741705
ucauucagcuccaacaugu

SEQ ID NO: 1741707 - RNA, 19 nt, Artificial Sequence
  Description of Artificial Sequence: Synthetic oligonucleotide
  Sense strand starting at position 2776 of SEQ ID NO: 1562367
guuggagcugaaugaaagu

SEQ ID NO: 1741708 - RNA, 19 nt, Artificial Sequence
  Description of Artificial Sequence: Synthetic oligonucleotide
  Antisense strand to SEQ ID NO: 1741707
acuuucauucagcuccaac

SEQ ID NO: 1741709 - RNA, 19 nt, Artificial Sequence
  Description of Artificial Sequence: Synthetic oligonucleotide
  Sense strand starting at position 2863 of SEQ ID NO: 1562367
gccaccucauuaguagaaa

SEQ ID NO: 1741710 - RNA, 19 nt, Artificial Sequence
  Description of Artificial Sequence: Synthetic oligonucleotide
  Antisense strand to SEQ ID NO: 1741709
uuucuacuaaugagguggc

SEQ ID NO: 1741711 - RNA, 19 nt, Artificial Sequence
  Description of Artificial Sequence: Synthetic oligonucleotide
  Sense strand starting at position 2874 of SEQ ID NO: 1562367
aguagaaacugugauuuga

SEQ ID NO: 1741712 - RNA, 19 nt, Artificial Sequence
  Description of Artificial Sequence: Synthetic oligonucleotide
  Antisense strand to SEQ ID NO: 1741711
ucaaaucacaguuucuacu

SEQ ID NO: 1741713 - RNA, 19 nt, Artificial Sequence
  Description of Artificial Sequence: Synthetic oligonucleotide
  Sense strand starting at position 2922 of SEQ ID NO: 1562367
acuccuauugccuaggaaa

SEQ ID NO: 1741714 - RNA, 19 nt, Artificial Sequence
  Description of Artificial Sequence: Synthetic oligonucleotide
  Antisense strand to SEQ ID NO: 1741713
uuuccuaggcaauaggagu

SEQ ID NO: 1741715 - RNA, 19 nt, Artificial Sequence
  Description of Artificial Sequence: Synthetic oligonucleotide
  Sense strand starting at position 2924 of SEQ ID NO: 1562367
uccuauugccuaggaaauu

SEQ ID NO: 1741716 - RNA, 19 nt, Artificial Sequence
  Description of Artificial Sequence: Synthetic oligonucleotide
  Antisense strand to SEQ ID NO: 1741715
aauuuccuaggcaauagga

SEQ ID NO: 1741717 - RNA, 19 nt, Artificial Sequence
  Description of Artificial Sequence: Synthetic oligonucleotide
  Sense strand starting at position 3108 of SEQ ID NO: 1562367
uugugaauguggucagaau

SEQ ID NO: 1741718 - RNA, 19 nt, Artificial Sequence
  Description of Artificial Sequence: Synthetic oligonucleotide
  Antisense strand to SEQ ID NO: 1741717
auucugaccacauucacaa

SEQ ID NO: 1741719 - RNA, 19 nt, Artificial Sequence
  Description of Artificial Sequence: Synthetic oligonucleotide
  Sense strand starting at position 3109 of SEQ ID NO: 1562367
ugugaauguggucagaauc

SEQ ID NO: 1741720 - RNA, 19 nt, Artificial Sequence
  Description of Artificial Sequence: Synthetic oligonucleotide
  Antisense strand to SEQ ID NO: 1741719
gauucugaccacauucaca

SEQ ID NO: 1741721 - RNA, 19 nt, Artificial Sequence
  Description of Artificial Sequence: Synthetic oligonucleotide
  Sense strand starting at position 3133 of SEQ ID NO: 1562367
gguggagucauuuguguua

SEQ ID NO: 1741722 - RNA, 19 nt, Artificial Sequence
  Description of Artificial Sequence: Synthetic oligonucleotide
  Antisense strand to SEQ ID NO: 1741721
uaacacaaaugacuccacc

SEQ ID NO: 1741723 - RNA, 19 nt, Artificial Sequence
  Description of Artificial Sequence: Synthetic oligonucleotide
  Sense strand starting at position 3200 of SEQ ID NO: 1562367
agaggauucuuguuccuaa

SEQ ID NO: 1741724 - RNA, 19 nt, Artificial Sequence
  Description of Artificial Sequence: Synthetic oligonucleotide
  Antisense strand to SEQ ID NO: 1741723
uuaggaacaagaauccucu

SEQ ID NO: 1741725 - RNA, 19 nt, Artificial Sequence
  Description of Artificial Sequence: Synthetic oligonucleotide
  Sense strand starting at position 3201 of SEQ ID NO: 1562367
gaggauucuuguuccuaaa

SEQ ID NO: 1741726 - RNA, 19 nt, Artificial Sequence
  Description of Artificial Sequence: Synthetic oligonucleotide
  Antisense strand to SEQ ID NO: 1741725
uuuaggaacaagaauccuc

SEQ ID NO: 1741727 - RNA, 19 nt, Artificial Sequence
  Description of Artificial Sequence: Synthetic oligonucleotide
  Sense strand starting at position 3203 of SEQ ID NO: 1562367
ggauucuuguuccuaaaug

SEQ ID NO: 1741728 - RNA, 19 nt, Artificial Sequence
  Description of Artificial Sequence: Synthetic oligonucleotide
  Antisense strand to SEQ ID NO: 1741727
cauuuaggaacaagaaucc

SEQ ID NO: 1741729 - RNA, 19 nt, Artificial Sequence
  Description of Artificial Sequence: Synthetic oligonucleotide
  Sense strand starting at position 3338 of SEQ ID NO: 1562367
cugguaucacccugaucga

SEQ ID NO: 1741730 - RNA, 19 nt, Artificial Sequence
  Description of Artificial Sequence: Synthetic oligonucleotide
  Antisense strand to SEQ ID NO: 1741729
ucgaucagggugauaccag

SEQ ID NO: 1741731 - RNA, 19 nt, Artificial Sequence
  Description of Artificial Sequence: Synthetic oligonucleotide
  Sense strand starting at position 3339 of SEQ ID NO: 1562367
ugguaucacccugaucgau

SEQ ID NO: 1741732 - RNA, 19 nt, Artificial Sequence
  Description of Artificial Sequence: Synthetic oligonucleotide
  Antisense strand to SEQ ID NO: 1741731
aucgaucagggugauacca

SEQ ID NO: 1741733 - RNA, 19 nt, Artificial Sequence
  Description of Artificial Sequence: Synthetic oligonucleotide
  Sense strand starting at position 3341 of SEQ ID NO: 1562367
guaucacccugaucgauac

SEQ ID NO: 1741734 - RNA, 19 nt, Artificial Sequence
  Description of Artificial Sequence: Synthetic oligonucleotide
  Antisense strand to SEQ ID NO: 1741733
guaucgaucagggugauac

SEQ ID NO: 1741735 - RNA, 19 nt, Artificial Sequence
  Description of Artificial Sequence: Synthetic oligonucleotide
  Sense strand starting at position 3361 of SEQ ID NO: 1562367
uguagcugaggcuaauuau

SEQ ID NO: 1741736 - RNA, 19 nt, Artificial Sequence
  Description of Artificial Sequence: Synthetic oligonucleotide
  Antisense strand to SEQ ID NO: 1741735
auaauuagccucagcuaca

SEQ ID NO: 1741737 - RNA, 19 nt, Artificial Sequence
  Description of Artificial Sequence: Synthetic oligonucleotide
  Sense strand starting at position 3364 of SEQ ID NO: 1562367
agcugaggcuaauuaucaa

SEQ ID NO: 1741738 - RNA, 19 nt, Artificial Sequence
  Description of Artificial Sequence: Synthetic oligonucleotide
  Antisense strand to SEQ ID NO: 1741737
uugauaauuagccucagcu

SEQ ID NO: 1741739 - RNA, 19 nt, Artificial Sequence
  Description of Artificial Sequence: Synthetic oligonucleotide
  Sense strand starting at position 3523 of SEQ ID NO: 1562367
agagaaccucucuguuaug

SEQ ID NO: 1741740 - RNA, 19 nt, Artificial Sequence
  Description of Artificial Sequence: Synthetic oligonucleotide
  Antisense strand to SEQ ID NO: 1741739
cauaacagagagguucucu

SEQ ID NO: 1741741 - RNA, 19 nt, Artificial Sequence
  Description of Artificial Sequence: Synthetic oligonucleotide
  Sense strand starting at position 3629 of SEQ ID NO: 1562367
agugguguccuagauggga

SEQ ID NO: 1741742 - RNA, 19 nt, Artificial Sequence
  Description of Artificial Sequence: Synthetic oligonucleotide
  Antisense strand to SEQ ID NO: 1741741
ucccaucuaggacaccacu

SEQ ID NO: 1741743 - RNA, 19 nt, Artificial Sequence
  Description of Artificial Sequence: Synthetic oligonucleotide
  Sense strand starting at position 57 of SEQ ID NO: 1562368
acuaguuaugguuagugua

SEQ ID NO: 1741744 - RNA, 19 nt, Artificial Sequence
  Description of Artificial Sequence: Synthetic oligonucleotide
  Antisense strand to SEQ ID NO: 1741743
uacacuaaccauaacuagu

SEQ ID NO: 1741745 - RNA, 19 nt, Artificial Sequence
  Description of Artificial Sequence: Synthetic oligonucleotide
  Sense strand starting at position 59 of SEQ ID NO: 1562368
uaguuaugguuaguguagu

SEQ ID NO: 1741746 - RNA, 19 nt, Artificial Sequence
  Description of Artificial Sequence: Synthetic oligonucleotide
  Antisense strand to SEQ ID NO: 1741745
acuacacuaaccauaacua

SEQ ID NO: 1741747 - RNA, 19 nt, Artificial Sequence
  Description of Artificial Sequence: Synthetic oligonucleotide
  Sense strand starting at position 65 of SEQ ID NO: 1562368
ugguuaguguaguuaacag

SEQ ID NO: 1741748 - RNA, 19 nt, Artificial Sequence
  Description of Artificial Sequence: Synthetic oligonucleotide
  Antisense strand to SEQ ID NO: 1741747
cuguuaacuacacuaacca

SEQ ID NO: 1741749 - RNA, 19 nt, Artificial Sequence
  Description of Artificial Sequence: Synthetic oligonucleotide
  Sense strand starting at position 203 of SEQ ID NO: 1562368
ugauccaauuuggaaacua

SEQ ID NO: 1741750 - RNA, 19 nt, Artificial Sequence
  Description of Artificial Sequence: Synthetic oligonucleotide
  Antisense strand to SEQ ID NO: 1741749
uaguuuccaaauuggauca

SEQ ID NO: 1741751 - RNA, 19 nt, Artificial Sequence
  Description of Artificial Sequence: Synthetic oligonucleotide
  Sense strand starting at position 281 of SEQ ID NO: 1562368
guuaauucccaacgcucua

SEQ ID NO: 1741752 - RNA, 19 nt, Artificial Sequence
  Description of Artificial Sequence: Synthetic oligonucleotide
  Antisense strand to SEQ ID NO: 1741751
uagagcguugggaauuaac

SEQ ID NO: 1741753 - RNA, 19 nt, Artificial Sequence
  Description of Artificial Sequence: Synthetic oligonucleotide
  Sense strand starting at position 300 of SEQ ID NO: 1562368
agccauacauuguauguaa

SEQ ID NO: 1741754 - RNA, 19 nt, Artificial Sequence
  Description of Artificial Sequence: Synthetic oligonucleotide
  Antisense strand to SEQ ID NO: 1741753
uuacauacaauguauggcu

SEQ ID NO: 1741755 - RNA, 19 nt, Artificial Sequence
  Description of Artificial Sequence: Synthetic oligonucleotide
  Sense strand starting at position 302 of SEQ ID NO: 1562368
ccauacauuguauguaaug

SEQ ID NO: 1741756 - RNA, 19 nt, Artificial Sequence
  Description of Artificial Sequence: Synthetic oligonucleotide
  Antisense strand to SEQ ID NO: 1741755
cauuacauacaauguaugg

SEQ ID NO: 1741757 - RNA, 19 nt, Artificial Sequence
  Description of Artificial Sequence: Synthetic oligonucleotide
  Sense strand starting at position 311 of SEQ ID NO: 1562368
guauguaaugcaugaacuu

SEQ ID NO: 1741758 - RNA, 19 nt, Artificial Sequence
  Description of Artificial Sequence: Synthetic oligonucleotide
  Antisense strand to SEQ ID NO: 1741757
aaguucaugcauuacauac

SEQ ID NO: 1741759 - RNA, 19 nt, Artificial Sequence
  Description of Artificial Sequence: Synthetic oligonucleotide
  Sense strand starting at position 343 of SEQ ID NO: 1562368
cuggguagugucaguuaug

SEQ ID NO: 1741760 - RNA, 19 nt, Artificial Sequence
  Description of Artificial Sequence: Synthetic oligonucleotide
  Antisense strand to SEQ ID NO: 1741759
cauaacugacacuacccag

SEQ ID NO: 1741761 - RNA, 19 nt, Artificial Sequence
  Description of Artificial Sequence: Synthetic oligonucleotide
  Sense strand starting at position 344 of SEQ ID NO: 1562368
uggguagugucaguuaugu

SEQ ID NO: 1741762 - RNA, 19 nt, Artificial Sequence
  Description of Artificial Sequence: Synthetic oligonucleotide
  Antisense strand to SEQ ID NO: 1741761
acauaacugacacuaccca

SEQ ID NO: 1741763 - RNA, 19 nt, Artificial Sequence
  Description of Artificial Sequence: Synthetic oligonucleotide
  Sense strand starting at position 350 of SEQ ID NO: 1562368
gugucaguuauguggaggu

SEQ ID NO: 1741764 - RNA, 19 nt, Artificial Sequence
  Description of Artificial Sequence: Synthetic oligonucleotide
  Antisense strand to SEQ ID NO: 1741763
accuccacauaacugacac

SEQ ID NO: 1741765 - RNA, 19 nt, Artificial Sequence
  Description of Artificial Sequence: Synthetic oligonucleotide
  Sense strand starting at position 353 of SEQ ID NO: 1562368
ucaguuauguggagguggu

SEQ ID NO: 1741766 - RNA, 19 nt, Artificial Sequence
  Description of Artificial Sequence: Synthetic oligonucleotide
  Antisense strand to SEQ ID NO: 1741765
accaccuccacauaacuga

SEQ ID NO: 1741767 - RNA, 19 nt, Artificial Sequence
  Description of Artificial Sequence: Synthetic oligonucleotide
  Sense strand starting at position 354 of SEQ ID NO: 1562368
caguuauguggagguggua

SEQ ID NO: 1741768 - RNA, 19 nt, Artificial Sequence
  Description of Artificial Sequence: Synthetic oligonucleotide
  Antisense strand to SEQ ID NO: 1741767
uaccaccuccacauaacug

SEQ ID NO: 1741769 - RNA, 19 nt, Artificial Sequence
  Description of Artificial Sequence: Synthetic oligonucleotide
  Sense strand starting at position 368 of SEQ ID NO: 1562368
ugguacuaguuauuugcau

SEQ ID NO: 1741770 - RNA, 19 nt, Artificial Sequence
  Description of Artificial Sequence: Synthetic oligonucleotide
  Antisense strand to SEQ ID NO: 1741769
augcaaauaacuaguacca

SEQ ID NO: 1741771 - RNA, 19 nt, Artificial Sequence
  Description of Artificial Sequence: Synthetic oligonucleotide
  Sense strand starting at position 369 of SEQ ID NO: 1562368
gguacuaguuauuugcaua

SEQ ID NO: 1741772 - RNA, 19 nt, Artificial Sequence
  Description of Artificial Sequence: Synthetic oligonucleotide
  Antisense strand to SEQ ID NO: 1741771
uaugcaaauaacuaguacc

SEQ ID NO: 1741773 - RNA, 19 nt, Artificial Sequence
  Description of Artificial Sequence: Synthetic oligonucleotide
  Sense strand starting at position 474 of SEQ ID NO: 1562368
uuuauuugcuaguggcaca

SEQ ID NO: 1741774 - RNA, 19 nt, Artificial Sequence
  Description of Artificial Sequence: Synthetic oligonucleotide
  Antisense strand to SEQ ID NO: 1741773
ugugccacuagcaaauaaa

SEQ ID NO: 1741775 - RNA, 19 nt, Artificial Sequence
  Description of Artificial Sequence: Synthetic oligonucleotide
  Sense strand starting at position 564 of SEQ ID NO: 1562368
ggcuuuacggugugacaua

SEQ ID NO: 1741776 - RNA, 19 nt, Artificial Sequence
  Description of Artificial Sequence: Synthetic oligonucleotide
  Antisense strand to SEQ ID NO: 1741775
uaugucacaccguaaagcc

SEQ ID NO: 1741777 - RNA, 19 nt, Artificial Sequence
  Description of Artificial Sequence: Synthetic oligonucleotide
  Sense strand starting at position 571 of SEQ ID NO: 1562368
cggugugacauaugcagaa

SEQ ID NO: 1741778 - RNA, 19 nt, Artificial Sequence
  Description of Artificial Sequence: Synthetic oligonucleotide
  Antisense strand to SEQ ID NO: 1741777
uucugcauaugucacaccg

SEQ ID NO: 1741779 - RNA, 19 nt, Artificial Sequence
  Description of Artificial Sequence: Synthetic oligonucleotide
  Sense strand starting at position 690 of SEQ ID NO: 1562368
caaugcuaccgauguccau

SEQ ID NO: 1741780 - RNA, 19 nt, Artificial Sequence
  Description of Artificial Sequence: Synthetic oligonucleotide
  Antisense strand to SEQ ID NO: 1741779
auggacaucgguagcauug

SEQ ID NO: 1741781 - RNA, 19 nt, Artificial Sequence
  Description of Artificial Sequence: Synthetic oligonucleotide
  Sense strand starting at position 694 of SEQ ID NO: 1562368
gcuaccgauguccaugaaa

SEQ ID NO: 1741782 - RNA, 19 nt, Artificial Sequence
  Description of Artificial Sequence: Synthetic oligonucleotide
  Antisense strand to SEQ ID NO: 1741781
uuucauggacaucgguagc

SEQ ID NO: 1741783 - RNA, 19 nt, Artificial Sequence
  Description of Artificial Sequence: Synthetic oligonucleotide
  Sense strand starting at position 696 of SEQ ID NO: 1562368
uaccgauguccaugaaauu

SEQ ID NO: 1741784 - RNA, 19 nt, Artificial Sequence
  Description of Artificial Sequence: Synthetic oligonucleotide
  Antisense strand to SEQ ID NO: 1741783
aauuucauggacaucggua

SEQ ID NO: 1741785 - RNA, 19 nt, Artificial Sequence
  Description of Artificial Sequence: Synthetic oligonucleotide
  Sense strand starting at position 719 of SEQ ID NO: 1562368
gcaguacugcacugugaag

SEQ ID NO: 1741786 - RNA, 19 nt, Artificial Sequence
  Description of Artificial Sequence: Synthetic oligonucleotide
  Antisense strand to SEQ ID NO: 1741785
cuucacagugcaguacugc

SEQ ID NO: 1741787 - RNA, 19 nt, Artificial Sequence
  Description of Artificial Sequence: Synthetic oligonucleotide
  Sense strand starting at position 954 of SEQ ID NO: 1562368
gcccaaguuggugaaugau

SEQ ID NO: 1741788 - RNA, 19 nt, Artificial Sequence
  Description of Artificial Sequence: Synthetic oligonucleotide
  Antisense strand to SEQ ID NO: 1741787
aucauucaccaacuugggc

SEQ ID NO: 1741789 - RNA, 19 nt, Artificial Sequence
  Description of Artificial Sequence: Synthetic oligonucleotide
  Sense strand starting at position 2350 of SEQ ID NO: 1562368
ugaggagugggauggguau

SEQ ID NO: 1741790 - RNA, 19 nt, Artificial Sequence
  Description of Artificial Sequence: Synthetic oligonucleotide
  Antisense strand to SEQ ID NO: 1741789
auacccaucccacuccuca

SEQ ID NO: 1741791 - RNA, 19 nt, Artificial Sequence
  Description of Artificial Sequence: Synthetic oligonucleotide
  Sense strand starting at position 2359 of SEQ ID NO: 1562368
ggauggguauguuguggau

SEQ ID NO: 1741792 - RNA, 19 nt, Artificial Sequence
  Description of Artificial Sequence: Synthetic oligonucleotide
  Antisense strand to SEQ ID NO: 1741791
auccacaacauacccaucc

SEQ ID NO: 1741793 - RNA, 19 nt, Artificial Sequence
  Description of Artificial Sequence: Synthetic oligonucleotide
  Sense strand starting at position 2773 of SEQ ID NO: 1562368
gggucaacaguuugacugu

SEQ ID NO: 1741794 - RNA, 19 nt, Artificial Sequence
  Description of Artificial Sequence: Synthetic oligonucleotide
  Antisense strand to SEQ ID NO: 1741793
acagucaaacuguugaccc

SEQ ID NO: 1741795 - RNA, 19 nt, Artificial Sequence
  Description of Artificial Sequence: Synthetic oligonucleotide
  Sense strand starting at position 2774 of SEQ ID NO: 1562368
ggucaacaguuugacugua

SEQ ID NO: 1741796 - RNA, 19 nt, Artificial Sequence
  Description of Artificial Sequence: Synthetic oligonucleotide
  Antisense strand to SEQ ID NO: 1741795
uacagucaaacuguugacc

SEQ ID NO: 1741797 - RNA, 19 nt, Artificial Sequence
  Description of Artificial Sequence: Synthetic oligonucleotide
  Sense strand starting at position 2779 of SEQ ID NO: 1562368
acaguuugacuguaagcau

SEQ ID NO: 1741798 - RNA, 19 nt, Artificial Sequence
  Description of Artificial Sequence: Synthetic oligonucleotide
  Antisense strand to SEQ ID NO: 1741797
augcuuacagucaaacugu

SEQ ID NO: 1741799 - RNA, 19 nt, Artificial Sequence
  Description of Artificial Sequence: Synthetic oligonucleotide
  Sense strand starting at position 2797 of SEQ ID NO: 1562368
uccuaacaccagugggaaa

SEQ ID NO: 1741800 - RNA, 19 nt, Artificial Sequence
  Description of Artificial Sequence: Synthetic oligonucleotide
  Antisense strand to SEQ ID NO: 1741799
uuucccacugguguuagga

SEQ ID NO: 1741801 - RNA, 19 nt, Artificial Sequence
  Description of Artificial Sequence: Synthetic oligonucleotide
  Sense strand starting at position 2839 of SEQ ID NO: 1562368
uguucuugucuccaaggga

SEQ ID NO: 1741802 - RNA, 19 nt, Artificial Sequence
  Description of Artificial Sequence: Synthetic oligonucleotide
  Antisense strand to SEQ ID NO: 1741801
ucccuuggagacaagaaca

SEQ ID NO: 1741803 - RNA, 19 nt, Artificial Sequence
  Description of Artificial Sequence: Synthetic oligonucleotide
  Sense strand starting at position 2878 of SEQ ID NO: 1562368
agaggcuucucccauagaa

SEQ ID NO: 1741804 - RNA, 19 nt, Artificial Sequence
  Description of Artificial Sequence: Synthetic oligonucleotide
  Antisense strand to SEQ ID NO: 1741803
uucuaugggagaagccucu

SEQ ID NO: 1741805 - RNA, 19 nt, Artificial Sequence
  Description of Artificial Sequence: Synthetic oligonucleotide
  Sense strand starting at position 2922 of SEQ ID NO: 1562368
uaaagaacguguucugaac

SEQ ID NO: 1741806 - RNA, 19 nt, Artificial Sequence
  Description of Artificial Sequence: Synthetic oligonucleotide
  Antisense strand to SEQ ID NO: 1741805
guucagaacacguucuuua

SEQ ID NO: 1741807 - RNA, 19 nt, Artificial Sequence
  Description of Artificial Sequence: Synthetic oligonucleotide
  Sense strand starting at position 3034 of SEQ ID NO: 1562368
acaccacguccaugucuua

SEQ ID NO: 1741808 - RNA, 19 nt, Artificial Sequence
  Description of Artificial Sequence: Synthetic oligonucleotide
  Antisense strand to SEQ ID NO: 1741807
uaagacauggacguggugu

SEQ ID NO: 1741809 - RNA, 19 nt, Artificial Sequence
  Description of Artificial Sequence: Synthetic oligonucleotide
  Sense strand starting at position 3047 of SEQ ID NO: 1562368
gucuuaaucuaaggauagu

SEQ ID NO: 1741810 - RNA, 19 nt, Artificial Sequence
  Description of Artificial Sequence: Synthetic oligonucleotide
  Antisense strand to SEQ ID NO: 1741809
acuauccuuagauuaagac

SEQ ID NO: 1741811 - RNA, 19 nt, Artificial Sequence
  Description of Artificial Sequence: Synthetic oligonucleotide
  Sense strand starting at position 3558 of SEQ ID NO: 1562368
ccuggucucgagcagucaa

SEQ ID NO: 1741812 - RNA, 19 nt, Artificial Sequence
  Description of Artificial Sequence: Synthetic oligonucleotide
  Antisense strand to SEQ ID NO: 1741811
uugacugcucgagaccagg

SEQ ID NO: 1741813 - RNA, 19 nt, Artificial Sequence
  Description of Artificial Sequence: Synthetic oligonucleotide
  Sense strand starting at position 3625 of SEQ ID NO: 1562368
ggcgccuagccauaaagau

SEQ ID NO: 1741814 - RNA, 19 nt, Artificial Sequence
  Description of Artificial Sequence: Synthetic oligonucleotide
  Antisense strand to SEQ ID NO: 1741813
aucuuuauggcuaggcgcc

SEQ ID NO: 1741815 - RNA, 19 nt, Artificial Sequence
  Description of Artificial Sequence: Synthetic oligonucleotide
  Sense strand starting at position 3678 of SEQ ID NO: 1562368
gcuuuaauauagcugcaua

SEQ ID NO: 1741816 - RNA, 19 nt, Artificial Sequence
  Description of Artificial Sequence: Synthetic oligonucleotide
  Antisense strand to SEQ ID NO: 1741815
uaugcagcuauauuaaagc

SEQ ID NO: 1741817 - RNA, 19 nt, Artificial Sequence
  Description of Artificial Sequence: Synthetic oligonucleotide
  Sense strand starting at position 3681 of SEQ ID NO: 1562368
uuaauauagcugcauagaa

SEQ ID NO: 1741818 - RNA, 19 nt, Artificial Sequence
  Description of Artificial Sequence: Synthetic oligonucleotide
  Antisense strand to SEQ ID NO: 1741817
uucuaugcagcuauauuaa

SEQ ID NO: 1741819 - RNA, 19 nt, Artificial Sequence
  Description of Artificial Sequence: Synthetic oligonucleotide
  Sense strand starting at position 3725 of SEQ ID NO: 1562368
uugguuagauaacauagua

SEQ ID NO: 1741820 - RNA, 19 nt, Artificial Sequence
  Description of Artificial Sequence: Synthetic oligonucleotide
  Antisense strand to SEQ ID NO: 1741819
uacuauguuaucuaaccaa

SEQ ID NO: 1741821 - RNA, 19 nt, Artificial Sequence
  Description of Artificial Sequence: Synthetic oligonucleotide
  Sense strand starting at position 3754 of SEQ ID NO: 1562368
cuugcauauagcgauagau

SEQ ID NO: 1741822 - RNA, 19 nt, Artificial Sequence
  Description of Artificial Sequence: Synthetic oligonucleotide
  Antisense strand to SEQ ID NO: 1741821
aucuaucgcuauaugcaag

SEQ ID NO: 1741823 - RNA, 19 nt, Artificial Sequence
  Description of Artificial Sequence: Synthetic oligonucleotide
  Sense strand starting at position 371 of SEQ ID NO: 1562369
uuuaauggagcuggaaaua

SEQ ID NO: 1741824 - RNA, 19 nt, Artificial Sequence
  Description of Artificial Sequence: Synthetic oligonucleotide
  Antisense strand to SEQ ID NO: 1741823
uauuuccagcuccauuaaa

SEQ ID NO: 1741825 - RNA, 19 nt, Artificial Sequence
  Description of Artificial Sequence: Synthetic oligonucleotide
  Sense strand starting at position 459 of SEQ ID NO: 1562369
ggaacuagcuccuuuguuu

SEQ ID NO: 1741826 - RNA, 19 nt, Artificial Sequence
  Description of Artificial Sequence: Synthetic oligonucleotide
  Antisense strand to SEQ ID NO: 1741825
aaacaaaggagcuaguucc

SEQ ID NO: 1741827 - RNA, 19 nt, Artificial Sequence
  Description of Artificial Sequence: Synthetic oligonucleotide
  Sense strand starting at position 509 of SEQ ID NO: 1562369
aggauugagucuccuauag

SEQ ID NO: 1741828 - RNA, 19 nt, Artificial Sequence
  Description of Artificial Sequence: Synthetic oligonucleotide
  Antisense strand to SEQ ID NO: 1741827
cuauaggagacucaauccu

SEQ ID NO: 1741829 - RNA, 19 nt, Artificial Sequence
  Description of Artificial Sequence: Synthetic oligonucleotide
  Sense strand starting at position 614 of SEQ ID NO: 1562369
acgacauguuuagcccaaa

SEQ ID NO: 1741830 - RNA, 19 nt, Artificial Sequence
  Description of Artificial Sequence: Synthetic oligonucleotide
  Antisense strand to SEQ ID NO: 1741829
uuugggcuaaacaugucgu

SEQ ID NO: 1741831 - RNA, 19 nt, Artificial Sequence
  Description of Artificial Sequence: Synthetic oligonucleotide
  Sense strand starting at position 615 of SEQ ID NO: 1562369
cgacauguuuagcccaaau

SEQ ID NO: 1741832 - RNA, 19 nt, Artificial Sequence
  Description of Artificial Sequence: Synthetic oligonucleotide
  Antisense strand to SEQ ID NO: 1741831
auuugggcuaaacaugucg

SEQ ID NO: 1741833 - RNA, 19 nt, Artificial Sequence
  Description of Artificial Sequence: Synthetic oligonucleotide
  Sense strand starting at position 742 of SEQ ID NO: 1562369
ggaguuugagaccggucuu

SEQ ID NO: 1741834 - RNA, 19 nt, Artificial Sequence
  Description of Artificial Sequence: Synthetic oligonucleotide
  Antisense strand to SEQ ID NO: 1741833
aagaccggucucaaacucc

SEQ ID NO: 1741835 - RNA, 19 nt, Artificial Sequence
  Description of Artificial Sequence: Synthetic oligonucleotide
  Sense strand starting at position 743 of SEQ ID NO: 1562369
gaguuugagaccggucuuu

SEQ ID NO: 1741836 - RNA, 19 nt, Artificial Sequence
  Description of Artificial Sequence: Synthetic oligonucleotide
  Antisense strand to SEQ ID NO: 1741835
aaagaccggucucaaacuc

SEQ ID NO: 1741837 - RNA, 19 nt, Artificial Sequence
  Description of Artificial Sequence: Synthetic oligonucleotide
  Sense strand starting at position 749 of SEQ ID NO: 1562369
gagaccggucuuugcaaca

SEQ ID NO: 1741838 - RNA, 19 nt, Artificial Sequence
  Description of Artificial Sequence: Synthetic oligonucleotide
  Antisense strand to SEQ ID NO: 1741837
uguugcaaagaccggucuc

SEQ ID NO: 1741839 - RNA, 19 nt, Artificial Sequence
  Description of Artificial Sequence: Synthetic oligonucleotide
  Sense strand starting at position 772 of SEQ ID NO: 1562369
gagacuccaucuguacaga

SEQ ID NO: 1741840 - RNA, 19 nt, Artificial Sequence
  Description of Artificial Sequence: Synthetic oligonucleotide
  Antisense strand to SEQ ID NO: 1741839
ucuguacagauggagucuc

SEQ ID NO: 1741841 - RNA, 19 nt, Artificial Sequence
  Description of Artificial Sequence: Synthetic oligonucleotide
  Sense strand starting at position 1171 of SEQ ID NO: 1562369
cugcgaucacaucaaugca

SEQ ID NO: 1741842 - RNA, 19 nt, Artificial Sequence
  Description of Artificial Sequence: Synthetic oligonucleotide
  Antisense strand to SEQ ID NO: 1741841
ugcauugaugugaucgcag

SEQ ID NO: 1741843 - RNA, 19 nt, Artificial Sequence
  Description of Artificial Sequence: Synthetic oligonucleotide
  Sense strand starting at position 1213 of SEQ ID NO: 1562369
gugagacccugacuauauu

SEQ ID NO: 1741844 - RNA, 19 nt, Artificial Sequence
  Description of Artificial Sequence: Synthetic oligonucleotide
  Antisense strand to SEQ ID NO: 1741843
aauauagucagggucucac

SEQ ID NO: 1741845 - RNA, 19 nt, Artificial Sequence
  Description of Artificial Sequence: Synthetic oligonucleotide
  Sense strand starting at position 1490 of SEQ ID NO: 1562369
acgauuccugucuauaaau

SEQ ID NO: 1741846 - RNA, 19 nt, Artificial Sequence
  Description of Artificial Sequence: Synthetic oligonucleotide
  Antisense strand to SEQ ID NO: 1741845
auuuauagacaggaaucgu

SEQ ID NO: 1741847 - RNA, 19 nt, Artificial Sequence
  Description of Artificial Sequence: Synthetic oligonucleotide
  Sense strand starting at position 1561 of SEQ ID NO: 1562369
ggaaucugguaaguucuua

SEQ ID NO: 1741848 - RNA, 19 nt, Artificial Sequence
  Description of Artificial Sequence: Synthetic oligonucleotide
  Antisense strand to SEQ ID NO: 1741847
uaagaacuuaccagauucc

SEQ ID NO: 1741849 - RNA, 19 nt, Artificial Sequence
  Description of Artificial Sequence: Synthetic oligonucleotide
  Sense strand starting at position 1565 of SEQ ID NO: 1562369
ucugguaaguucuuaggaa

SEQ ID NO: 1741850 - RNA, 19 nt, Artificial Sequence
  Description of Artificial Sequence: Synthetic oligonucleotide
  Antisense strand to SEQ ID NO: 1741849
uuccuaagaacuuaccaga

SEQ ID NO: 1741851 - RNA, 19 nt, Artificial Sequence
  Description of Artificial Sequence: Synthetic oligonucleotide
  Sense strand starting at position 1763 of SEQ ID NO: 1562369
ggcguagucgccaaggaca

SEQ ID NO: 1741852 - RNA, 19 nt, Artificial Sequence
  Description of Artificial Sequence: Synthetic oligonucleotide
  Antisense strand to SEQ ID NO: 1741851
uguccuuggcgacuacgcc

SEQ ID NO: 1741853 - RNA, 19 nt, Artificial Sequence
  Description of Artificial Sequence: Synthetic oligonucleotide
  Sense strand starting at position 2134 of SEQ ID NO: 1562369
cuugauaacugcuuguaaa

SEQ ID NO: 1741854 - RNA, 19 nt, Artificial Sequence
  Description of Artificial Sequence: Synthetic oligonucleotide
  Antisense strand to SEQ ID NO: 1741853
uuuacaagcaguuaucaag

SEQ ID NO: 1741855 - RNA, 19 nt, Artificial Sequence
  Description of Artificial Sequence: Synthetic oligonucleotide
  Sense strand starting at position 2135 of SEQ ID NO: 1562369
uugauaacugcuuguaaag

SEQ ID NO: 1741856 - RNA, 19 nt, Artificial Sequence
  Description of Artificial Sequence: Synthetic oligonucleotide
  Antisense strand to SEQ ID NO: 1741855
cuuuacaagcaguuaucaa

SEQ ID NO: 1741857 - RNA, 19 nt, Artificial Sequence
  Description of Artificial Sequence: Synthetic oligonucleotide
  Sense strand starting at position 2286 of SEQ ID NO: 1562369
ggcacuccugauggguuau

SEQ ID NO: 1741858 - RNA, 19 nt, Artificial Sequence
  Description of Artificial Sequence: Synthetic oligonucleotide
  Antisense strand to SEQ ID NO: 1741857
auaacccaucaggagugcc

SEQ ID NO: 1741859 - RNA, 19 nt, Artificial Sequence
  Description of Artificial Sequence: Synthetic oligonucleotide
  Sense strand starting at position 2287 of SEQ ID NO: 1562369
gcacuccugauggguuauu

SEQ ID NO: 1741860 - RNA, 19 nt, Artificial Sequence
  Description of Artificial Sequence: Synthetic oligonucleotide
  Antisense strand to SEQ ID NO: 1741859
aauaacccaucaggagugc

SEQ ID NO: 1741861 - RNA, 19 nt, Artificial Sequence
  Description of Artificial Sequence: Synthetic oligonucleotide
  Sense strand starting at position 2297 of SEQ ID NO: 1562369
uggguuauuugaugaagga

SEQ ID NO: 1741862 - RNA, 19 nt, Artificial Sequence
  Description of Artificial Sequence: Synthetic oligonucleotide
  Antisense strand to SEQ ID NO: 1741861
uccuucaucaaauaaccca

SEQ ID NO: 1741863 - RNA, 19 nt, Artificial Sequence
  Description of Artificial Sequence: Synthetic oligonucleotide
  Sense strand starting at position 2321 of SEQ ID NO: 1562369
aauguaugggcuuaacuag

SEQ ID NO: 1741864 - RNA, 19 nt, Artificial Sequence
  Description of Artificial Sequence: Synthetic oligonucleotide
  Antisense strand to SEQ ID NO: 1741863
cuaguuaagcccauacauu

SEQ ID NO: 1741865 - RNA, 19 nt, Artificial Sequence
  Description of Artificial Sequence: Synthetic oligonucleotide
  Sense strand starting at position 2328 of SEQ ID NO: 1562369
gggcuuaacuaguuauucu

SEQ ID NO: 1741866 - RNA, 19 nt, Artificial Sequence
  Description of Artificial Sequence: Synthetic oligonucleotide
  Antisense strand to SEQ ID NO: 1741865
agaauaacuaguuaagccc

SEQ ID NO: 1741867 - RNA, 19 nt, Artificial Sequence
  Description of Artificial Sequence: Synthetic oligonucleotide
  Sense strand starting at position 2332 of SEQ ID NO: 1562369
uuaacuaguuauucuggau

SEQ ID NO: 1741868 - RNA, 19 nt, Artificial Sequence
  Description of Artificial Sequence: Synthetic oligonucleotide
  Antisense strand to SEQ ID NO: 1741867
auccagaauaacuaguuaa

SEQ ID NO: 1741869 - RNA, 19 nt, Artificial Sequence
  Description of Artificial Sequence: Synthetic oligonucleotide
  Sense strand starting at position 2387 of SEQ ID NO: 1562369
ggaacugagagcugaaucu

SEQ ID NO: 1741870 - RNA, 19 nt, Artificial Sequence
  Description of Artificial Sequence: Synthetic oligonucleotide
  Antisense strand to SEQ ID NO: 1741869
agauucagcucucaguucc

SEQ ID NO: 1741871 - RNA, 19 nt, Artificial Sequence
  Description of Artificial Sequence: Synthetic oligonucleotide
  Sense strand starting at position 2988 of SEQ ID NO: 1562369
ccgggaaguguuuauggau

SEQ ID NO: 1741872 - RNA, 19 nt, Artificial Sequence
  Description of Artificial Sequence: Synthetic oligonucleotide
  Antisense strand to SEQ ID NO: 1741871
auccauaaacacuucccgg

SEQ ID NO: 1741873 - RNA, 19 nt, Artificial Sequence
  Description of Artificial Sequence: Synthetic oligonucleotide
  Sense strand starting at position 3000 of SEQ ID NO: 1562369
uauggauguugugcagaau

SEQ ID NO: 1741874 - RNA, 19 nt, Artificial Sequence
  Description of Artificial Sequence: Synthetic oligonucleotide
  Antisense strand to SEQ ID NO: 1741873
auucugcacaacauccaua

SEQ ID NO: 1741875 - RNA, 19 nt, Artificial Sequence
  Description of Artificial Sequence: Synthetic oligonucleotide
  Sense strand starting at position 3001 of SEQ ID NO: 1562369
auggauguugugcagaaua

SEQ ID NO: 1741876 - RNA, 19 nt, Artificial Sequence
  Description of Artificial Sequence: Synthetic oligonucleotide
  Antisense strand to SEQ ID NO: 1741875
uauucugcacaacauccau

SEQ ID NO: 1741877 - RNA, 19 nt, Artificial Sequence
  Description of Artificial Sequence: Synthetic oligonucleotide
  Sense strand starting at position 3012 of SEQ ID NO: 1562369
gcagaauagcccuaccaca

SEQ ID NO: 1741878 - RNA, 19 nt, Artificial Sequence
  Description of Artificial Sequence: Synthetic oligonucleotide
  Antisense strand to SEQ ID NO: 1741877
ugugguagggcuauucugc

SEQ ID NO: 1741879 - RNA, 19 nt, Artificial Sequence
  Description of Artificial Sequence: Synthetic oligonucleotide
  Sense strand starting at position 3251 of SEQ ID NO: 1562369
uugugaucauauccuacuu

SEQ ID NO: 1741880 - RNA, 19 nt, Artificial Sequence
  Description of Artificial Sequence: Synthetic oligonucleotide
  Antisense strand to SEQ ID NO: 1741879
aaguaggauaugaucacaa

SEQ ID NO: 1741881 - RNA, 19 nt, Artificial Sequence
  Description of Artificial Sequence: Synthetic oligonucleotide
  Sense strand starting at position 3312 of SEQ ID NO: 1562369
guuuguuuccucuaacaaa

SEQ ID NO: 1741882 - RNA, 19 nt, Artificial Sequence
  Description of Artificial Sequence: Synthetic oligonucleotide
  Antisense strand to SEQ ID NO: 1741881
uuuguuagaggaaacaaac

SEQ ID NO: 1741883 - RNA, 19 nt, Artificial Sequence
  Description of Artificial Sequence: Synthetic oligonucleotide
  Sense strand starting at position 3374 of SEQ ID NO: 1562369
caagcauuucucugggugu

SEQ ID NO: 1741884 - RNA, 19 nt, Artificial Sequence
  Description of Artificial Sequence: Synthetic oligonucleotide
  Antisense strand to SEQ ID NO: 1741883
acacccagagaaaugcuug

SEQ ID NO: 1741885 - RNA, 19 nt, Artificial Sequence
  Description of Artificial Sequence: Synthetic oligonucleotide
  Sense strand starting at position 3377 of SEQ ID NO: 1562369
gcauuucucugggugugga

SEQ ID NO: 1741886 - RNA, 19 nt, Artificial Sequence
  Description of Artificial Sequence: Synthetic oligonucleotide
  Antisense strand to SEQ ID NO: 1741885
uccacacccagagaaaugc

SEQ ID NO: 1741887 - RNA, 19 nt, Artificial Sequence
  Description of Artificial Sequence: Synthetic oligonucleotide
  Sense strand starting at position 3420 of SEQ ID NO: 1562369
ccagcaagcuaauuaaugu

SEQ ID NO: 1741888 - RNA, 19 nt, Artificial Sequence
  Description of Artificial Sequence: Synthetic oligonucleotide
  Antisense strand to SEQ ID NO: 1741887
acauuaauuagcuugcugg

SEQ ID NO: 1741889 - RNA, 19 nt, Artificial Sequence
  Description of Artificial Sequence: Synthetic oligonucleotide
  Sense strand starting at position 3427 of SEQ ID NO: 1562369
gcuaauuaaugugcagaau

SEQ ID NO: 1741890 - RNA, 19 nt, Artificial Sequence
  Description of Artificial Sequence: Synthetic oligonucleotide
  Antisense strand to SEQ ID NO: 1741889
auucugcacauuaauuagc

SEQ ID NO: 1741891 - RNA, 19 nt, Artificial Sequence
  Description of Artificial Sequence: Synthetic oligonucleotide
  Sense strand starting at position 3428 of SEQ ID NO: 1562369
cuaauuaaugugcagaauu

SEQ ID NO: 1741892 - RNA, 19 nt, Artificial Sequence
  Description of Artificial Sequence: Synthetic oligonucleotide
  Antisense strand to SEQ ID NO: 1741891
aauucugcacauuaauuag

SEQ ID NO: 1741893 - RNA, 19 nt, Artificial Sequence
  Description of Artificial Sequence: Synthetic oligonucleotide
  Sense strand starting at position 3582 of SEQ ID NO: 1562369
acaaacugucuuggagaau

SEQ ID NO: 1741894 - RNA, 19 nt, Artificial Sequence
  Description of Artificial Sequence: Synthetic oligonucleotide
  Antisense strand to SEQ ID NO: 1741893
auucuccaagacaguuugu

SEQ ID NO: 1741895 - RNA, 19 nt, Artificial Sequence
  Description of Artificial Sequence: Synthetic oligonucleotide
  Sense strand starting at position 3631 of SEQ ID NO: 1562369
ugugguucuuagucaagaa

SEQ ID NO: 1741896 - RNA, 19 nt, Artificial Sequence
  Description of Artificial Sequence: Synthetic oligonucleotide
  Antisense strand to SEQ ID NO: 1741895
uucuugacuaagaaccaca

SEQ ID NO: 1741897 - RNA, 19 nt, Artificial Sequence
  Description of Artificial Sequence: Synthetic oligonucleotide
  Sense strand starting at position 3632 of SEQ ID NO: 1562369
gugguucuuagucaagaaa

SEQ ID NO: 1741898 - RNA, 19 nt, Artificial Sequence
  Description of Artificial Sequence: Synthetic oligonucleotide
  Antisense strand to SEQ ID NO: 1741897
uuucuugacuaagaaccac

SEQ ID NO: 1741899 - RNA, 19 nt, Artificial Sequence
  Description of Artificial Sequence: Synthetic oligonucleotide
  Sense strand starting at position 3666 of SEQ ID NO: 1562369
ugauccagcuaauuacaga

SEQ ID NO: 1741900 - RNA, 19 nt, Artificial Sequence
  Description of Artificial Sequence: Synthetic oligonucleotide
  Antisense strand to SEQ ID NO: 1741899
ucuguaauuagcuggauca

SEQ ID NO: 1741901 - RNA, 19 nt, Artificial Sequence
  Description of Artificial Sequence: Synthetic oligonucleotide
  Sense strand starting at position 3700 of SEQ ID NO: 1562369
gucuaaauuuacgcauugu

SEQ ID NO: 1741902 - RNA, 19 nt, Artificial Sequence
  Description of Artificial Sequence: Synthetic oligonucleotide
  Antisense strand to SEQ ID NO: 1741901
acaaugcguaaauuuagac

SEQ ID NO: 1741903 - RNA, 19 nt, Artificial Sequence
  Description of Artificial Sequence: Synthetic oligonucleotide
  Sense strand starting at position 3 of SEQ ID NO: 1562370
uuaacaaggucagcuaauu

SEQ ID NO: 1741904 - RNA, 19 nt, Artificial Sequence
  Description of Artificial Sequence: Synthetic oligonucleotide
  Antisense strand to SEQ ID NO: 1741903
aauuagcugaccuuguuaa

SEQ ID NO: 1741905 - RNA, 19 nt, Artificial Sequence
  Description of Artificial Sequence: Synthetic oligonucleotide
  Sense strand starting at position 70 of SEQ ID NO: 1562370
accacauggucuucuggua

SEQ ID NO: 1741906 - RNA, 19 nt, Artificial Sequence
  Description of Artificial Sequence: Synthetic oligonucleotide
  Antisense strand to SEQ ID NO: 1741905
uaccagaagaccauguggu

SEQ ID NO: 1741907 - RNA, 19 nt, Artificial Sequence
  Description of Artificial Sequence: Synthetic oligonucleotide
  Sense strand starting at position 121 of SEQ ID NO: 1562370
cauaccuuccgugaagcuu

SEQ ID NO: 1741908 - RNA, 19 nt, Artificial Sequence
  Description of Artificial Sequence: Synthetic oligonucleotide
  Antisense strand to SEQ ID NO: 1741907
aagcuucacggaagguaug

SEQ ID NO: 1741909 - RNA, 19 nt, Artificial Sequence
  Description of Artificial Sequence: Synthetic oligonucleotide
  Sense strand starting at position 162 of SEQ ID NO: 1562370
acagaacuuucuguuaaag

SEQ ID NO: 1741910 - RNA, 19 nt, Artificial Sequence
  Description of Artificial Sequence: Synthetic oligonucleotide
  Antisense strand to SEQ ID NO: 1741909
cuuuaacagaaaguucugu

SEQ ID NO: 1741911 - RNA, 19 nt, Artificial Sequence
  Description of Artificial Sequence: Synthetic oligonucleotide
  Sense strand starting at position 299 of SEQ ID NO: 1562370
ccucaaugucaaggaaauu

SEQ ID NO: 1741912 - RNA, 19 nt, Artificial Sequence
  Description of Artificial Sequence: Synthetic oligonucleotide
  Antisense strand to SEQ ID NO: 1741911
aauuuccuugacauugagg

SEQ ID NO: 1741913 - RNA, 19 nt, Artificial Sequence
  Description of Artificial Sequence: Synthetic oligonucleotide
  Sense strand starting at position 332 of SEQ ID NO: 1562370
ugaugacugcagugcuaaa

SEQ ID NO: 1741914 - RNA, 19 nt, Artificial Sequence
  Description of Artificial Sequence: Synthetic oligonucleotide
  Antisense strand to SEQ ID NO: 1741913
uuuagcacugcagucauca

SEQ ID NO: 1741915 - RNA, 19 nt, Artificial Sequence
  Description of Artificial Sequence: Synthetic oligonucleotide
  Sense strand starting at position 617 of SEQ ID NO: 1562370
ucacgaauuuguuagggag

SEQ ID NO: 1741916 - RNA, 19 nt, Artificial Sequence
  Description of Artificial Sequence: Synthetic oligonucleotide
  Antisense strand to SEQ ID NO: 1741915
cucccuaacaaauucguga

SEQ ID NO: 1741917 - RNA, 19 nt, Artificial Sequence
  Description of Artificial Sequence: Synthetic oligonucleotide
  Sense strand starting at position 654 of SEQ ID NO: 1562370
uguauaacugcugaugaac

SEQ ID NO: 1741918 - RNA, 19 nt, Artificial Sequence
  Description of Artificial Sequence: Synthetic oligonucleotide
  Antisense strand to SEQ ID NO: 1741917
guucaucagcaguuauaca

SEQ ID NO: 1741919 - RNA, 19 nt, Artificial Sequence
  Description of Artificial Sequence: Synthetic oligonucleotide
  Sense strand starting at position 668 of SEQ ID NO: 1562370
ugaacacuuccagaguagu

SEQ ID NO: 1741920 - RNA, 19 nt, Artificial Sequence
  Description of Artificial Sequence: Synthetic oligonucleotide
  Antisense strand to SEQ ID NO: 1741919
acuacucuggaaguguuca

SEQ ID NO: 1741921 - RNA, 19 nt, Artificial Sequence
  Description of Artificial Sequence: Synthetic oligonucleotide
  Sense strand starting at position 758 of SEQ ID NO: 1562370
cgaaguuggcuuggaaacu

SEQ ID NO: 1741922 - RNA, 19 nt, Artificial Sequence
  Description of Artificial Sequence: Synthetic oligonucleotide
  Antisense strand to SEQ ID NO: 1741921
aguuuccaagccaacuucg

SEQ ID NO: 1741923 - RNA, 19 nt, Artificial Sequence
  Description of Artificial Sequence: Synthetic oligonucleotide
  Sense strand starting at position 764 of SEQ ID NO: 1562370
uggcuuggaaacuguauau

SEQ ID NO: 1741924 - RNA, 19 nt, Artificial Sequence
  Description of Artificial Sequence: Synthetic oligonucleotide
  Antisense strand to SEQ ID NO: 1741923
auauacaguuuccaagcca

SEQ ID NO: 1741925 - RNA, 19 nt, Artificial Sequence
  Description of Artificial Sequence: Synthetic oligonucleotide
  Sense strand starting at position 816 of SEQ ID NO: 1562370
cggugcuaucuugacucuu

SEQ ID NO: 1741926 - RNA, 19 nt, Artificial Sequence
  Description of Artificial Sequence: Synthetic oligonucleotide
  Antisense strand to SEQ ID NO: 1741925
aagagucaagauagcaccg

SEQ ID NO: 1741927 - RNA, 19 nt, Artificial Sequence
  Description of Artificial Sequence: Synthetic oligonucleotide
  Sense strand starting at position 850 of SEQ ID NO: 1562370
gaaguacaagcacgaauua

SEQ ID NO: 1741928 - RNA, 19 nt, Artificial Sequence
  Description of Artificial Sequence: Synthetic oligonucleotide
  Antisense strand to SEQ ID NO: 1741927
uaauucgugcuuguacuuc

SEQ ID NO: 1741929 - RNA, 19 nt, Artificial Sequence
  Description of Artificial Sequence: Synthetic oligonucleotide
  Sense strand starting at position 947 of SEQ ID NO: 1562370
cguccuaagucuccuaaca

SEQ ID NO: 1741930 - RNA, 19 nt, Artificial Sequence
  Description of Artificial Sequence: Synthetic oligonucleotide
  Antisense strand to SEQ ID NO: 1741929
uguuaggagacuuaggacg

SEQ ID NO: 1741931 - RNA, 19 nt, Artificial Sequence
  Description of Artificial Sequence: Synthetic oligonucleotide
  Sense strand starting at position 972 of SEQ ID NO: 1562370
gcagcauuagugugauaua

SEQ ID NO: 1741932 - RNA, 19 nt, Artificial Sequence
  Description of Artificial Sequence: Synthetic oligonucleotide
  Antisense strand to SEQ ID NO: 1741931
uauaucacacuaaugcugc

SEQ ID NO: 1741933 - RNA, 19 nt, Artificial Sequence
  Description of Artificial Sequence: Synthetic oligonucleotide
  Sense strand starting at position 977 of SEQ ID NO: 1562370
auuagugugauauaguucu

SEQ ID NO: 1741934 - RNA, 19 nt, Artificial Sequence
  Description of Artificial Sequence: Synthetic oligonucleotide
  Antisense strand to SEQ ID NO: 1741933
agaacuauaucacacuaau

SEQ ID NO: 1741935 - RNA, 19 nt, Artificial Sequence
  Description of Artificial Sequence: Synthetic oligonucleotide
  Sense strand starting at position 1109 of SEQ ID NO: 1562370
cgcauuaagaagcagugua

SEQ ID NO: 1741936 - RNA, 19 nt, Artificial Sequence
  Description of Artificial Sequence: Synthetic oligonucleotide
  Antisense strand to SEQ ID NO: 1741935
uacacugcuucuuaaugcg

SEQ ID NO: 1741937 - RNA, 19 nt, Artificial Sequence
  Description of Artificial Sequence: Synthetic oligonucleotide
  Sense strand starting at position 1321 of SEQ ID NO: 1562370
uccucuugggcuuggagaa

SEQ ID NO: 1741938 - RNA, 19 nt, Artificial Sequence
  Description of Artificial Sequence: Synthetic oligonucleotide
  Antisense strand to SEQ ID NO: 1741937
uucuccaagcccaagagga

SEQ ID NO: 1741939 - RNA, 19 nt, Artificial Sequence
  Description of Artificial Sequence: Synthetic oligonucleotide
  Sense strand starting at position 1322 of SEQ ID NO: 1562370
ccucuugggcuuggagaaa

SEQ ID NO: 1741940 - RNA, 19 nt, Artificial Sequence
  Description of Artificial Sequence: Synthetic oligonucleotide
  Antisense strand to SEQ ID NO: 1741939
uuucuccaagcccaagagg

SEQ ID NO: 1741941 - RNA, 19 nt, Artificial Sequence
  Description of Artificial Sequence: Synthetic oligonucleotide
  Sense strand starting at position 2104 of SEQ ID NO: 1562370
gcccuuaauugaucccgga

SEQ ID NO: 1741942 - RNA, 19 nt, Artificial Sequence
  Description of Artificial Sequence: Synthetic oligonucleotide
  Antisense strand to SEQ ID NO: 1741941
uccgggaucaauuaagggc

SEQ ID NO: 1741943 - RNA, 19 nt, Artificial Sequence
  Description of Artificial Sequence: Synthetic oligonucleotide
  Sense strand starting at position 2383 of SEQ ID NO: 1562370
gugaauuggguucgaacau

SEQ ID NO: 1741944 - RNA, 19 nt, Artificial Sequence
  Description of Artificial Sequence: Synthetic oligonucleotide
  Antisense strand to SEQ ID NO: 1741943
auguucgaacccaauucac

SEQ ID NO: 1741945 - RNA, 19 nt, Artificial Sequence
  Description of Artificial Sequence: Synthetic oligonucleotide
  Sense strand starting at position 2398 of SEQ ID NO: 1562370
acauuuauaguucguaucu

SEQ ID NO: 1741946 - RNA, 19 nt, Artificial Sequence
  Description of Artificial Sequence: Synthetic oligonucleotide
  Antisense strand to SEQ ID NO: 1741945
agauacgaacuauaaaugu

SEQ ID NO: 1741947 - RNA, 19 nt, Artificial Sequence
  Description of Artificial Sequence: Synthetic oligonucleotide
  Sense strand starting at position 2403 of SEQ ID NO: 1562370
uauaguucguaucuuagac

SEQ ID NO: 1741948 - RNA, 19 nt, Artificial Sequence
  Description of Artificial Sequence: Synthetic oligonucleotide
  Antisense strand to SEQ ID NO: 1741947
gucuaagauacgaacuaua

SEQ ID NO: 1741949 - RNA, 19 nt, Artificial Sequence
  Description of Artificial Sequence: Synthetic oligonucleotide
  Sense strand starting at position 3027 of SEQ ID NO: 1562370
ucuccauagcauugauuga

SEQ ID NO: 1741950 - RNA, 19 nt, Artificial Sequence
  Description of Artificial Sequence: Synthetic oligonucleotide
  Antisense strand to SEQ ID NO: 1741949
ucaaucaaugcuauggaga

SEQ ID NO: 1741951 - RNA, 19 nt, Artificial Sequence
  Description of Artificial Sequence: Synthetic oligonucleotide
  Sense strand starting at position 3126 of SEQ ID NO: 1562370
gugggaagauugaggguaa

SEQ ID NO: 1741952 - RNA, 19 nt, Artificial Sequence
  Description of Artificial Sequence: Synthetic oligonucleotide
  Antisense strand to SEQ ID NO: 1741951
uuacccucaaucuucccac

SEQ ID NO: 1741953 - RNA, 19 nt, Artificial Sequence
  Description of Artificial Sequence: Synthetic oligonucleotide
  Sense strand starting at position 3180 of SEQ ID NO: 1562370
uuccuaucugcauggauua

SEQ ID NO: 1741954 - RNA, 19 nt, Artificial Sequence
  Description of Artificial Sequence: Synthetic oligonucleotide
  Antisense strand to SEQ ID NO: 1741953
uaauccaugcagauaggaa

SEQ ID NO: 1741955 - RNA, 19 nt, Artificial Sequence
  Description of Artificial Sequence: Synthetic oligonucleotide
  Sense strand starting at position 3187 of SEQ ID NO: 1562370
cugcauggauuaccuuaaa

SEQ ID NO: 1741956 - RNA, 19 nt, Artificial Sequence
  Description of Artificial Sequence: Synthetic oligonucleotide
  Antisense strand to SEQ ID NO: 1741955
uuuaagguaauccaugcag

SEQ ID NO: 1741957 - RNA, 19 nt, Artificial Sequence
  Description of Artificial Sequence: Synthetic oligonucleotide
  Sense strand starting at position 3230 of SEQ ID NO: 1562370
aaguuuguggcacaagcau

SEQ ID NO: 1741958 - RNA, 19 nt, Artificial Sequence
  Description of Artificial Sequence: Synthetic oligonucleotide
  Antisense strand to SEQ ID NO: 1741957
augcuugugccacaaacuu

SEQ ID NO: 1741959 - RNA, 19 nt, Artificial Sequence
  Description of Artificial Sequence: Synthetic oligonucleotide
  Sense strand starting at position 3319 of SEQ ID NO: 1562370
aagcacugggucuaguaau

SEQ ID NO: 1741960 - RNA, 19 nt, Artificial Sequence
  Description of Artificial Sequence: Synthetic oligonucleotide
  Antisense strand to SEQ ID NO: 1741959
auuacuagacccagugcuu

SEQ ID NO: 1741961 - RNA, 19 nt, Artificial Sequence
  Description of Artificial Sequence: Synthetic oligonucleotide
  Sense strand starting at position 3356 of SEQ ID NO: 1562370
acccaauuggccuaguaaa

SEQ ID NO: 1741962 - RNA, 19 nt, Artificial Sequence
  Description of Artificial Sequence: Synthetic oligonucleotide
  Antisense strand to SEQ ID NO: 1741961
uuuacuaggccaauugggu

SEQ ID NO: 1741963 - RNA, 19 nt, Artificial Sequence
  Description of Artificial Sequence: Synthetic oligonucleotide
  Sense strand starting at position 3534 of SEQ ID NO: 1562370
cgucaugaaguucgaucau

SEQ ID NO: 1741964 - RNA, 19 nt, Artificial Sequence
  Description of Artificial Sequence: Synthetic oligonucleotide
  Antisense strand to SEQ ID NO: 1741963
augaucgaacuucaugacg

SEQ ID NO: 1741965 - RNA, 19 nt, Artificial Sequence
  Description of Artificial Sequence: Synthetic oligonucleotide
  Sense strand starting at position 3540 of SEQ ID NO: 1562370
gaaguucgaucauuaucca

SEQ ID NO: 1741966 - RNA, 19 nt, Artificial Sequence
  Description of Artificial Sequence: Synthetic oligonucleotide
  Antisense strand to SEQ ID NO: 1741965
uggauaaugaucgaacuuc

SEQ ID NO: 1741967 - RNA, 19 nt, Artificial Sequence
  Description of Artificial Sequence: Synthetic oligonucleotide
  Sense strand starting at position 3543 of SEQ ID NO: 1562370
guucgaucauuauccaaag

SEQ ID NO: 1741968 - RNA, 19 nt, Artificial Sequence
  Description of Artificial Sequence: Synthetic oligonucleotide
  Antisense strand to SEQ ID NO: 1741967
cuuuggauaaugaucgaac

SEQ ID NO: 1741969 - RNA, 19 nt, Artificial Sequence
  Description of Artificial Sequence: Synthetic oligonucleotide
  Sense strand starting at position 3544 of SEQ ID NO: 1562370
uucgaucauuauccaaaga

SEQ ID NO: 1741970 - RNA, 19 nt, Artificial Sequence
  Description of Artificial Sequence: Synthetic oligonucleotide
  Antisense strand to SEQ ID NO: 1741969
ucuuuggauaaugaucgaa

SEQ ID NO: 1741971 - RNA, 19 nt, Artificial Sequence
  Description of Artificial Sequence: Synthetic oligonucleotide
  Sense strand starting at position 3567 of SEQ ID NO: 1562370
gggauacugcaaggucuua

SEQ ID NO: 1741972 - RNA, 19 nt, Artificial Sequence
  Description of Artificial Sequence: Synthetic oligonucleotide
  Antisense strand to SEQ ID NO: 1741971
uaagaccuugcaguauccc

SEQ ID NO: 1741973 - RNA, 19 nt, Artificial Sequence
  Description of Artificial Sequence: Synthetic oligonucleotide
  Sense strand starting at position 3587 of SEQ ID NO: 1562370
gcaagcgaacucuaugcuu

SEQ ID NO: 1741974 - RNA, 19 nt, Artificial Sequence
  Description of Artificial Sequence: Synthetic oligonucleotide
  Antisense strand to SEQ ID NO: 1741973
aagcauagaguucgcuugc

SEQ ID NO: 1741975 - RNA, 19 nt, Artificial Sequence
  Description of Artificial Sequence: Synthetic oligonucleotide
  Sense strand starting at position 3608 of SEQ ID NO: 1562370
ggacuuaccucauaaagaa

SEQ ID NO: 1741976 - RNA, 19 nt, Artificial Sequence
  Description of Artificial Sequence: Synthetic oligonucleotide
  Antisense strand to SEQ ID NO: 1741975
uucuuuaugagguaagucc

SEQ ID NO: 1741977 - RNA, 19 nt, Artificial Sequence
  Description of Artificial Sequence: Synthetic oligonucleotide
  Sense strand starting at position 3671 of SEQ ID NO: 1562370
acugaugguccacagaugu

SEQ ID NO: 1741978 - RNA, 19 nt, Artificial Sequence
  Description of Artificial Sequence: Synthetic oligonucleotide
  Antisense strand to SEQ ID NO: 1741977
acaucuguggaccaucagu

SEQ ID NO: 1741979 - RNA, 19 nt, Artificial Sequence
  Description of Artificial Sequence: Synthetic oligonucleotide
  Sense strand starting at position 3859 of SEQ ID NO: 1562370
cguggaaagucaccauaau

SEQ ID NO: 1741980 - RNA, 19 nt, Artificial Sequence
  Description of Artificial Sequence: Synthetic oligonucleotide
  Antisense strand to SEQ ID NO: 1741979
auuauggugacuuuccacg

SEQ ID NO: 1741981 - RNA, 19 nt, Artificial Sequence
  Description of Artificial Sequence: Synthetic oligonucleotide
  Sense strand starting at position 3886 of SEQ ID NO: 1562370
cgaccugaucagcauaaca

SEQ ID NO: 1741982 - RNA, 19 nt, Artificial Sequence
  Description of Artificial Sequence: Synthetic oligonucleotide
  Antisense strand to SEQ ID NO: 1741981
uguuaugcugaucaggucg

SEQ ID NO: 1741983 - RNA, 19 nt, Artificial Sequence
  Description of Artificial Sequence: Synthetic oligonucleotide
  Sense strand starting at position 29 of SEQ ID NO: 1562371
ccuccaagauugucuagau

SEQ ID NO: 1741984 - RNA, 19 nt, Artificial Sequence
  Description of Artificial Sequence: Synthetic oligonucleotide
  Antisense strand to SEQ ID NO: 1741983
aucuagacaaucuuggagg

SEQ ID NO: 1741985 - RNA, 19 nt, Artificial Sequence
  Description of Artificial Sequence: Synthetic oligonucleotide
  Sense strand starting at position 30 of SEQ ID NO: 1562371
cuccaagauugucuagaug

SEQ ID NO: 1741986 - RNA, 19 nt, Artificial Sequence
  Description of Artificial Sequence: Synthetic oligonucleotide
  Antisense strand to SEQ ID NO: 1741985
caucuagacaaucuuggag

SEQ ID NO: 1741987 - RNA, 19 nt, Artificial Sequence
  Description of Artificial Sequence: Synthetic oligonucleotide
  Sense strand starting at position 63 of SEQ ID NO: 1562371
ggagcuagaugacucucaa

SEQ ID NO: 1741988 - RNA, 19 nt, Artificial Sequence
  Description of Artificial Sequence: Synthetic oligonucleotide
  Antisense strand to SEQ ID NO: 1741987
uugagagucaucuagcucc

SEQ ID NO: 1741989 - RNA, 19 nt, Artificial Sequence
  Description of Artificial Sequence: Synthetic oligonucleotide
  Sense strand starting at position 108 of SEQ ID NO: 1562371
gcaggaugugaacacggau

SEQ ID NO: 1741990 - RNA, 19 nt, Artificial Sequence
  Description of Artificial Sequence: Synthetic oligonucleotide
  Antisense strand to SEQ ID NO: 1741989
auccguguucacauccugc

SEQ ID NO: 1741991 - RNA, 19 nt, Artificial Sequence
  Description of Artificial Sequence: Synthetic oligonucleotide
  Sense strand starting at position 188 of SEQ ID NO: 1562371
gagggcagauucucucuaa

SEQ ID NO: 1741992 - RNA, 19 nt, Artificial Sequence
  Description of Artificial Sequence: Synthetic oligonucleotide
  Antisense strand to SEQ ID NO: 1741991
uuagagagaaucugcccuc

SEQ ID NO: 1741993 - RNA, 19 nt, Artificial Sequence
  Description of Artificial Sequence: Synthetic oligonucleotide
  Sense strand starting at position 189 of SEQ ID NO: 1562371
agggcagauucucucuaag

SEQ ID NO: 1741994 - RNA, 19 nt, Artificial Sequence
  Description of Artificial Sequence: Synthetic oligonucleotide
  Antisense strand to SEQ ID NO: 1741993
cuuagagagaaucugcccu

SEQ ID NO: 1741995 - RNA, 19 nt, Artificial Sequence
  Description of Artificial Sequence: Synthetic oligonucleotide
  Sense strand starting at position 192 of SEQ ID NO: 1562371
gcagauucucucuaagccu

SEQ ID NO: 1741996 - RNA, 19 nt, Artificial Sequence
  Description of Artificial Sequence: Synthetic oligonucleotide
  Antisense strand to SEQ ID NO: 1741995
aggcuuagagagaaucugc

SEQ ID NO: 1741997 - RNA, 19 nt, Artificial Sequence
  Description of Artificial Sequence: Synthetic oligonucleotide
  Sense strand starting at position 438 of SEQ ID NO: 1562371
ggaggaagucuccaggcuu

SEQ ID NO: 1741998 - RNA, 19 nt, Artificial Sequence
  Description of Artificial Sequence: Synthetic oligonucleotide
  Antisense strand to SEQ ID NO: 1741997
aagccuggagacuuccucc

SEQ ID NO: 1741999 - RNA, 19 nt, Artificial Sequence
  Description of Artificial Sequence: Synthetic oligonucleotide
  Sense strand starting at position 727 of SEQ ID NO: 1562371
cccagaauuugcgcaguau

SEQ ID NO: 1742000 - RNA, 19 nt, Artificial Sequence
  Description of Artificial Sequence: Synthetic oligonucleotide
  Antisense strand to SEQ ID NO: 1741999
auacugcgcaaauucuggg

SEQ ID NO: 1742001 - RNA, 19 nt, Artificial Sequence
  Description of Artificial Sequence: Synthetic oligonucleotide
  Sense strand starting at position 728 of SEQ ID NO: 1562371
ccagaauuugcgcaguauu

SEQ ID NO: 1742002 - RNA, 19 nt, Artificial Sequence
  Description of Artificial Sequence: Synthetic oligonucleotide
  Antisense strand to SEQ ID NO: 1742001
aauacugcgcaaauucugg

SEQ ID NO: 1742003 - RNA, 19 nt, Artificial Sequence
  Description of Artificial Sequence: Synthetic oligonucleotide
  Sense strand starting at position 742 of SEQ ID NO: 1562371
guauucucggccuagagag

SEQ ID NO: 1742004 - RNA, 19 nt, Artificial Sequence
  Description of Artificial Sequence: Synthetic oligonucleotide
  Antisense strand to SEQ ID NO: 1742003
cucucuaggccgagaauac

SEQ ID NO: 1742005 - RNA, 19 nt, Artificial Sequence
  Description of Artificial Sequence: Synthetic oligonucleotide
  Sense strand starting at position 819 of SEQ ID NO: 1562371
acuuguuaucugcaaagca

SEQ ID NO: 1742006 - RNA, 19 nt, Artificial Sequence
  Description of Artificial Sequence: Synthetic oligonucleotide
  Antisense strand to SEQ ID NO: 1742005
ugcuuugcagauaacaagu

SEQ ID NO: 1742007 - RNA, 19 nt, Artificial Sequence
  Description of Artificial Sequence: Synthetic oligonucleotide
  Sense strand starting at position 852 of SEQ ID NO: 1562371
cccugauguaagugucaag

SEQ ID NO: 1742008 - RNA, 19 nt, Artificial Sequence
  Description of Artificial Sequence: Synthetic oligonucleotide
  Antisense strand to SEQ ID NO: 1742007
cuugacacuuacaucaggg

SEQ ID NO: 1742009 - RNA, 19 nt, Artificial Sequence
  Description of Artificial Sequence: Synthetic oligonucleotide
  Sense strand starting at position 939 of SEQ ID NO: 1562371
ugggcagucuuugcuggaa

SEQ ID NO: 1742010 - RNA, 19 nt, Artificial Sequence
  Description of Artificial Sequence: Synthetic oligonucleotide
  Antisense strand to SEQ ID NO: 1742009
uuccagcaaagacugccca

SEQ ID NO: 1742011 - RNA, 19 nt, Artificial Sequence
  Description of Artificial Sequence: Synthetic oligonucleotide
  Sense strand starting at position 943 of SEQ ID NO: 1562371
cagucuuugcuggaaaccu

SEQ ID NO: 1742012 - RNA, 19 nt, Artificial Sequence
  Description of Artificial Sequence: Synthetic oligonucleotide
  Antisense strand to SEQ ID NO: 1742011
agguuuccagcaaagacug

SEQ ID NO: 1742013 - RNA, 19 nt, Artificial Sequence
  Description of Artificial Sequence: Synthetic oligonucleotide
  Sense strand starting at position 1488 of SEQ ID NO: 1562371
aggugugcuaaaugggauu

SEQ ID NO: 1742014 - RNA, 19 nt, Artificial Sequence
  Description of Artificial Sequence: Synthetic oligonucleotide
  Antisense strand to SEQ ID NO: 1742013
aaucccauuuagcacaccu

SEQ ID NO: 1742015 - RNA, 19 nt, Artificial Sequence
  Description of Artificial Sequence: Synthetic oligonucleotide
  Sense strand starting at position 1490 of SEQ ID NO: 1562371
gugugcuaaaugggauuaa

SEQ ID NO: 1742016 - RNA, 19 nt, Artificial Sequence
  Description of Artificial Sequence: Synthetic oligonucleotide
  Antisense strand to SEQ ID NO: 1742015
uuaaucccauuuagcacac

SEQ ID NO: 1742017 - RNA, 19 nt, Artificial Sequence
  Description of Artificial Sequence: Synthetic oligonucleotide
  Sense strand starting at position 1897 of SEQ ID NO: 1562371
ccgucuacagccugaauuu

SEQ ID NO: 1742018 - RNA, 19 nt, Artificial Sequence
  Description of Artificial Sequence: Synthetic oligonucleotide
  Antisense strand to SEQ ID NO: 1742017
aaauucaggcuguagacgg

SEQ ID NO: 1742019 - RNA, 19 nt, Artificial Sequence
  Description of Artificial Sequence: Synthetic oligonucleotide
  Sense strand starting at position 2497 of SEQ ID NO: 1562371
ggguuccguuacuuaugaa

SEQ ID NO: 1742020 - RNA, 19 nt, Artificial Sequence
  Description of Artificial Sequence: Synthetic oligonucleotide
  Antisense strand to SEQ ID NO: 1742019
uucauaaguaacggaaccc

SEQ ID NO: 1742021 - RNA, 19 nt, Artificial Sequence
  Description of Artificial Sequence: Synthetic oligonucleotide
  Sense strand starting at position 2498 of SEQ ID NO: 1562371
gguuccguuacuuaugaaa

SEQ ID NO: 1742022 - RNA, 19 nt, Artificial Sequence
  Description of Artificial Sequence: Synthetic oligonucleotide
  Antisense strand to SEQ ID NO: 1742021
uuucauaaguaacggaacc

SEQ ID NO: 1742023 - RNA, 19 nt, Artificial Sequence
  Description of Artificial Sequence: Synthetic oligonucleotide
  Sense strand starting at position 2739 of SEQ ID NO: 1562371
uaaaguagaccuuguguaa

SEQ ID NO: 1742024 - RNA, 19 nt, Artificial Sequence
  Description of Artificial Sequence: Synthetic oligonucleotide
  Antisense strand to SEQ ID NO: 1742023
uuacacaaggucuacuuua

SEQ ID NO: 1742025 - RNA, 19 nt, Artificial Sequence
  Description of Artificial Sequence: Synthetic oligonucleotide
  Sense strand starting at position 3123 of SEQ ID NO: 1562371
gaaggagguugcucuucuu

SEQ ID NO: 1742026 - RNA, 19 nt, Artificial Sequence
  Description of Artificial Sequence: Synthetic oligonucleotide
  Antisense strand to SEQ ID NO: 1742025
aagaagagcaaccuccuuc

SEQ ID NO: 1742027 - RNA, 19 nt, Artificial Sequence
  Description of Artificial Sequence: Synthetic oligonucleotide
  Sense strand starting at position 3126 of SEQ ID NO: 1562371
ggagguugcucuucuugau

SEQ ID NO: 1742028 - RNA, 19 nt, Artificial Sequence
  Description of Artificial Sequence: Synthetic oligonucleotide
  Antisense strand to SEQ ID NO: 1742027
aucaagaagagcaaccucc

SEQ ID NO: 1742029 - RNA, 19 nt, Artificial Sequence
  Description of Artificial Sequence: Synthetic oligonucleotide
  Sense strand starting at position 3159 of SEQ ID NO: 1562371
aggccucucugggcugaua

SEQ ID NO: 1742030 - RNA, 19 nt, Artificial Sequence
  Description of Artificial Sequence: Synthetic oligonucleotide
  Antisense strand to SEQ ID NO: 1742029
uaucagcccagagaggccu

SEQ ID NO: 1742031 - RNA, 19 nt, Artificial Sequence
  Description of Artificial Sequence: Synthetic oligonucleotide
  Sense strand starting at position 3161 of SEQ ID NO: 1562371
gccucucugggcugauaau

SEQ ID NO: 1742032 - RNA, 19 nt, Artificial Sequence
  Description of Artificial Sequence: Synthetic oligonucleotide
  Antisense strand to SEQ ID NO: 1742031
auuaucagcccagagaggc

SEQ ID NO: 1742033 - RNA, 19 nt, Artificial Sequence
  Description of Artificial Sequence: Synthetic oligonucleotide
  Sense strand starting at position 3170 of SEQ ID NO: 1562371
ggcugauaaucagcucaga

SEQ ID NO: 1742034 - RNA, 19 nt, Artificial Sequence
  Description of Artificial Sequence: Synthetic oligonucleotide
  Antisense strand to SEQ ID NO: 1742033
ucugagcugauuaucagcc

SEQ ID NO: 1742035 - RNA, 19 nt, Artificial Sequence
  Description of Artificial Sequence: Synthetic oligonucleotide
  Sense strand starting at position 3173 of SEQ ID NO: 1562371
ugauaaucagcucagaucu

SEQ ID NO: 1742036 - RNA, 19 nt, Artificial Sequence
  Description of Artificial Sequence: Synthetic oligonucleotide
  Antisense strand to SEQ ID NO: 1742035
agaucugagcugauuauca

SEQ ID NO: 1742037 - RNA, 19 nt, Artificial Sequence
  Description of Artificial Sequence: Synthetic oligonucleotide
  Sense strand starting at position 3180 of SEQ ID NO: 1562371
cagcucagaucugaagaga

SEQ ID NO: 1742038 - RNA, 19 nt, Artificial Sequence
  Description of Artificial Sequence: Synthetic oligonucleotide
  Antisense strand to SEQ ID NO: 1742037
ucucuucagaucugagcug

SEQ ID NO: 1742039 - RNA, 19 nt, Artificial Sequence
  Description of Artificial Sequence: Synthetic oligonucleotide
  Sense strand starting at position 3247 of SEQ ID NO: 1562371
cuaggagugguuugaaaga

SEQ ID NO: 1742040 - RNA, 19 nt, Artificial Sequence
  Description of Artificial Sequence: Synthetic oligonucleotide
  Antisense strand to SEQ ID NO: 1742039
ucuuucaaaccacuccuag

SEQ ID NO: 1742041 - RNA, 19 nt, Artificial Sequence
  Description of Artificial Sequence: Synthetic oligonucleotide
  Sense strand starting at position 3291 of SEQ ID NO: 1562371
aguguuaugagaugaaguu

SEQ ID NO: 1742042 - RNA, 19 nt, Artificial Sequence
  Description of Artificial Sequence: Synthetic oligonucleotide
  Antisense strand to SEQ ID NO: 1742041
aacuucaucucauaacacu

SEQ ID NO: 1742043 - RNA, 19 nt, Artificial Sequence
  Description of Artificial Sequence: Synthetic oligonucleotide
  Sense strand starting at position 3292 of SEQ ID NO: 1562371
guguuaugagaugaaguug

SEQ ID NO: 1742044 - RNA, 19 nt, Artificial Sequence
  Description of Artificial Sequence: Synthetic oligonucleotide
  Antisense strand to SEQ ID NO: 1742043
caacuucaucucauaacac

SEQ ID NO: 1742045 - RNA, 19 nt, Artificial Sequence
  Description of Artificial Sequence: Synthetic oligonucleotide
  Sense strand starting at position 3338 of SEQ ID NO: 1562371
agggcuuuguaguuuagau

SEQ ID NO: 1742046 - RNA, 19 nt, Artificial Sequence
  Description of Artificial Sequence: Synthetic oligonucleotide
  Antisense strand to SEQ ID NO: 1742045
aucuaaacuacaaagcccu

SEQ ID NO: 1742047 - RNA, 19 nt, Artificial Sequence
  Description of Artificial Sequence: Synthetic oligonucleotide
  Sense strand starting at position 3415 of SEQ ID NO: 1562371
acucuugagugagcccaua

SEQ ID NO: 1742048 - RNA, 19 nt, Artificial Sequence
  Description of Artificial Sequence: Synthetic oligonucleotide
  Antisense strand to SEQ ID NO: 1742047
uaugggcucacucaagagu

SEQ ID NO: 1742049 - RNA, 19 nt, Artificial Sequence
  Description of Artificial Sequence: Synthetic oligonucleotide
  Sense strand starting at position 3481 of SEQ ID NO: 1562371
uuaguuacugaugguacua

SEQ ID NO: 1742050 - RNA, 19 nt, Artificial Sequence
  Description of Artificial Sequence: Synthetic oligonucleotide
  Antisense strand to SEQ ID NO: 1742049
uaguaccaucaguaacuaa

SEQ ID NO: 1742051 - RNA, 19 nt, Artificial Sequence
  Description of Artificial Sequence: Synthetic oligonucleotide
  Sense strand starting at position 3607 of SEQ ID NO: 1562371
auacacuuuccugggaagu

SEQ ID NO: 1742052 - RNA, 19 nt, Artificial Sequence
  Description of Artificial Sequence: Synthetic oligonucleotide
  Antisense strand to SEQ ID NO: 1742051
acuucccaggaaaguguau

SEQ ID NO: 1742053 - RNA, 19 nt, Artificial Sequence
  Description of Artificial Sequence: Synthetic oligonucleotide
  Sense strand starting at position 3608 of SEQ ID NO: 1562371
uacacuuuccugggaaguc

SEQ ID NO: 1742054 - RNA, 19 nt, Artificial Sequence
  Description of Artificial Sequence: Synthetic oligonucleotide
  Antisense strand to SEQ ID NO: 1742053
gacuucccaggaaagugua

SEQ ID NO: 1742055 - RNA, 19 nt, Artificial Sequence
  Description of Artificial Sequence: Synthetic oligonucleotide
  Sense strand starting at position 3659 of SEQ ID NO: 1562371
gacuuugauucuguuaaga

SEQ ID NO: 1742056 - RNA, 19 nt, Artificial Sequence
  Description of Artificial Sequence: Synthetic oligonucleotide
  Antisense strand to SEQ ID NO: 1742055
ucuuaacagaaucaaaguc

SEQ ID NO: 1742057 - RNA, 19 nt, Artificial Sequence
  Description of Artificial Sequence: Synthetic oligonucleotide
  Sense strand starting at position 3720 of SEQ ID NO: 1562371
cccauauaugcuggugguu

SEQ ID NO: 1742058 - RNA, 19 nt, Artificial Sequence
  Description of Artificial Sequence: Synthetic oligonucleotide
  Antisense strand to SEQ ID NO: 1742057
aaccaccagcauauauggg

SEQ ID NO: 1742059 - RNA, 19 nt, Artificial Sequence
  Description of Artificial Sequence: Synthetic oligonucleotide
  Sense strand starting at position 3725 of SEQ ID NO: 1562371
auaugcuggugguuucuaa

SEQ ID NO: 1742060 - RNA, 19 nt, Artificial Sequence
  Description of Artificial Sequence: Synthetic oligonucleotide
  Antisense strand to SEQ ID NO: 1742059
uuagaaaccaccagcauau

SEQ ID NO: 1742061 - RNA, 19 nt, Artificial Sequence
  Description of Artificial Sequence: Synthetic oligonucleotide
  Sense strand starting at position 3965 of SEQ ID NO: 1562371
ccuggacuccucugaauuc

SEQ ID NO: 1742062 - RNA, 19 nt, Artificial Sequence
  Description of Artificial Sequence: Synthetic oligonucleotide
  Antisense strand to SEQ ID NO: 1742061
gaauucagaggaguccagg

SEQ ID NO: 1742063 - RNA, 19 nt, Artificial Sequence
  Description of Artificial Sequence: Synthetic oligonucleotide
  Sense strand starting at position 281 of SEQ ID NO: 1562372
ucacuuuaggaguaggcaa

SEQ ID NO: 1742064 - RNA, 19 nt, Artificial Sequence
  Description of Artificial Sequence: Synthetic oligonucleotide
  Antisense strand to SEQ ID NO: 1742063
uugccuacuccuaaaguga

SEQ ID NO: 1742065 - RNA, 19 nt, Artificial Sequence
  Description of Artificial Sequence: Synthetic oligonucleotide
  Sense strand starting at position 289 of SEQ ID NO: 1562372
ggaguaggcaaugguaaau

SEQ ID NO: 1742066 - RNA, 19 nt, Artificial Sequence
  Description of Artificial Sequence: Synthetic oligonucleotide
  Antisense strand to SEQ ID NO: 1742065
auuuaccauugccuacucc

SEQ ID NO: 1742067 - RNA, 19 nt, Artificial Sequence
  Description of Artificial Sequence: Synthetic oligonucleotide
  Sense strand starting at position 346 of SEQ ID NO: 1562372
acagccgauccugaaauaa

SEQ ID NO: 1742068 - RNA, 19 nt, Artificial Sequence
  Description of Artificial Sequence: Synthetic oligonucleotide
  Antisense strand to SEQ ID NO: 1742067
uuauuucaggaucggcugu

SEQ ID NO: 1742069 - RNA, 19 nt, Artificial Sequence
  Description of Artificial Sequence: Synthetic oligonucleotide
  Sense strand starting at position 581 of SEQ ID NO: 1562372
acccuauaacuguauguuu

SEQ ID NO: 1742070 - RNA, 19 nt, Artificial Sequence
  Description of Artificial Sequence: Synthetic oligonucleotide
  Antisense strand to SEQ ID NO: 1742069
aaacauacaguuauagggu

SEQ ID NO: 1742071 - RNA, 19 nt, Artificial Sequence
  Description of Artificial Sequence: Synthetic oligonucleotide
  Sense strand starting at position 599 of SEQ ID NO: 1562372
ugugucauucucuaauaaa

SEQ ID NO: 1742072 - RNA, 19 nt, Artificial Sequence
  Description of Artificial Sequence: Synthetic oligonucleotide
  Antisense strand to SEQ ID NO: 1742071
uuuauuagagaaugacaca

SEQ ID NO: 1742073 - RNA, 19 nt, Artificial Sequence
  Description of Artificial Sequence: Synthetic oligonucleotide
  Sense strand starting at position 898 of SEQ ID NO: 1562372
uuugaaaguuccuuagaua

SEQ ID NO: 1742074 - RNA, 19 nt, Artificial Sequence
  Description of Artificial Sequence: Synthetic oligonucleotide
  Antisense strand to SEQ ID NO: 1742073
uaucuaaggaacuuucaaa

SEQ ID NO: 1742075 - RNA, 19 nt, Artificial Sequence
  Description of Artificial Sequence: Synthetic oligonucleotide
  Sense strand starting at position 1155 of SEQ ID NO: 1562372
gaacaaaugccacgcagau

SEQ ID NO: 1742076 - RNA, 19 nt, Artificial Sequence
  Description of Artificial Sequence: Synthetic oligonucleotide
  Antisense strand to SEQ ID NO: 1742075
aucugcguggcauuuguuc

SEQ ID NO: 1742077 - RNA, 19 nt, Artificial Sequence
  Description of Artificial Sequence: Synthetic oligonucleotide
  Sense strand starting at position 1214 of SEQ ID NO: 1562372
ugaaucucguauuugguau

SEQ ID NO: 1742078 - RNA, 19 nt, Artificial Sequence
  Description of Artificial Sequence: Synthetic oligonucleotide
  Antisense strand to SEQ ID NO: 1742077
auaccaaauacgagauuca

SEQ ID NO: 1742079 - RNA, 19 nt, Artificial Sequence
  Description of Artificial Sequence: Synthetic oligonucleotide
  Sense strand starting at position 1464 of SEQ ID NO: 1562372
uuccaaacccgaugugaug

SEQ ID NO: 1742080 - RNA, 19 nt, Artificial Sequence
  Description of Artificial Sequence: Synthetic oligonucleotide
  Antisense strand to SEQ ID NO: 1742079
caucacaucggguuuggaa

SEQ ID NO: 1742081 - RNA, 19 nt, Artificial Sequence
  Description of Artificial Sequence: Synthetic oligonucleotide
  Sense strand starting at position 1905 of SEQ ID NO: 1562372
accuaagaucgucaucucu

SEQ ID NO: 1742082 - RNA, 19 nt, Artificial Sequence
  Description of Artificial Sequence: Synthetic oligonucleotide
  Antisense strand to SEQ ID NO: 1742081
agagaugacgaucuuaggu

SEQ ID NO: 1742083 - RNA, 19 nt, Artificial Sequence
  Description of Artificial Sequence: Synthetic oligonucleotide
  Sense strand starting at position 1947 of SEQ ID NO: 1562372
caggcuugugaugacugua

SEQ ID NO: 1742084 - RNA, 19 nt, Artificial Sequence
  Description of Artificial Sequence: Synthetic oligonucleotide
  Antisense strand to SEQ ID NO: 1742083
uacagucaucacaagccug

SEQ ID NO: 1742085 - RNA, 19 nt, Artificial Sequence
  Description of Artificial Sequence: Synthetic oligonucleotide
  Sense strand starting at position 1952 of SEQ ID NO: 1562372
uugugaugacuguaccaga

SEQ ID NO: 1742086 - RNA, 19 nt, Artificial Sequence
  Description of Artificial Sequence: Synthetic oligonucleotide
  Antisense strand to SEQ ID NO: 1742085
ucugguacagucaucacaa

SEQ ID NO: 1742087 - RNA, 19 nt, Artificial Sequence
  Description of Artificial Sequence: Synthetic oligonucleotide
  Sense strand starting at position 2039 of SEQ ID NO: 1562372
gaggcaaucggagaagcua

SEQ ID NO: 1742088 - RNA, 19 nt, Artificial Sequence
  Description of Artificial Sequence: Synthetic oligonucleotide
  Antisense strand to SEQ ID NO: 1742087
uagcuucuccgauugccuc

SEQ ID NO: 1742089 - RNA, 19 nt, Artificial Sequence
  Description of Artificial Sequence: Synthetic oligonucleotide
  Sense strand starting at position 2205 of SEQ ID NO: 1562372
gagacuggcguuuauaauc

SEQ ID NO: 1742090 - RNA, 19 nt, Artificial Sequence
  Description of Artificial Sequence: Synthetic oligonucleotide
  Antisense strand to SEQ ID NO: 1742089
gauuauaaacgccagucuc

SEQ ID NO: 1742091 - RNA, 19 nt, Artificial Sequence
  Description of Artificial Sequence: Synthetic oligonucleotide
  Sense strand starting at position 2406 of SEQ ID NO: 1562372
cgaguuuguguucuuucgu

SEQ ID NO: 1742092 - RNA, 19 nt, Artificial Sequence
  Description of Artificial Sequence: Synthetic oligonucleotide
  Antisense strand to SEQ ID NO: 1742091
acgaaagaacacaaacucg

SEQ ID NO: 1742093 - RNA, 19 nt, Artificial Sequence
  Description of Artificial Sequence: Synthetic oligonucleotide
  Sense strand starting at position 2707 of SEQ ID NO: 1562372
acugacgugggccauuaaa

SEQ ID NO: 1742094 - RNA, 19 nt, Artificial Sequence
  Description of Artificial Sequence: Synthetic oligonucleotide
  Antisense strand to SEQ ID NO: 1742093
uuuaauggcccacgucagu

SEQ ID NO: 1742095 - RNA, 19 nt, Artificial Sequence
  Description of Artificial Sequence: Synthetic oligonucleotide
  Sense strand starting at position 2864 of SEQ ID NO: 1562372
ucuagucugaaguaggauu

SEQ ID NO: 1742096 - RNA, 19 nt, Artificial Sequence
  Description of Artificial Sequence: Synthetic oligonucleotide
  Antisense strand to SEQ ID NO: 1742095
aauccuacuucagacuaga

SEQ ID NO: 1742097 - RNA, 19 nt, Artificial Sequence
  Description of Artificial Sequence: Synthetic oligonucleotide
  Sense strand starting at position 2910 of SEQ ID NO: 1562372
cuuaaugacuccucugaga

SEQ ID NO: 1742098 - RNA, 19 nt, Artificial Sequence
  Description of Artificial Sequence: Synthetic oligonucleotide
  Antisense strand to SEQ ID NO: 1742097
ucucagaggagucauuaag

SEQ ID NO: 1742099 - RNA, 19 nt, Artificial Sequence
  Description of Artificial Sequence: Synthetic oligonucleotide
  Sense strand starting at position 2912 of SEQ ID NO: 1562372
uaaugacuccucugagagu

SEQ ID NO: 1742100 - RNA, 19 nt, Artificial Sequence
  Description of Artificial Sequence: Synthetic oligonucleotide
  Antisense strand to SEQ ID NO: 1742099
acucucagaggagucauua

SEQ ID NO: 1742101 - RNA, 19 nt, Artificial Sequence
  Description of Artificial Sequence: Synthetic oligonucleotide
  Sense strand starting at position 3049 of SEQ ID NO: 1562372
gggaauacauugcugguua

SEQ ID NO: 1742102 - RNA, 19 nt, Artificial Sequence
  Description of Artificial Sequence: Synthetic oligonucleotide
  Antisense strand to SEQ ID NO: 1742101
uaaccagcaauguauuccc

SEQ ID NO: 1742103 - RNA, 19 nt, Artificial Sequence
  Description of Artificial Sequence: Synthetic oligonucleotide
  Sense strand starting at position 3051 of SEQ ID NO: 1562372
gaauacauugcugguuauu

SEQ ID NO: 1742104 - RNA, 19 nt, Artificial Sequence
  Description of Artificial Sequence: Synthetic oligonucleotide
  Antisense strand to SEQ ID NO: 1742103
aauaaccagcaauguauuc

SEQ ID NO: 1742105 - RNA, 19 nt, Artificial Sequence
  Description of Artificial Sequence: Synthetic oligonucleotide
  Sense strand starting at position 3056 of SEQ ID NO: 1562372
cauugcugguuauuucuga

SEQ ID NO: 1742106 - RNA, 19 nt, Artificial Sequence
  Description of Artificial Sequence: Synthetic oligonucleotide
  Antisense strand to SEQ ID NO: 1742105
ucagaaauaaccagcaaug

SEQ ID NO: 1742107 - RNA, 19 nt, Artificial Sequence
  Description of Artificial Sequence: Synthetic oligonucleotide
  Sense strand starting at position 3071 of SEQ ID NO: 1562372
cugacuuaucaaugugaau

SEQ ID NO: 1742108 - RNA, 19 nt, Artificial Sequence
  Description of Artificial Sequence: Synthetic oligonucleotide
  Antisense strand to SEQ ID NO: 1742107
auucacauugauaagucag

SEQ ID NO: 1742109 - RNA, 19 nt, Artificial Sequence
  Description of Artificial Sequence: Synthetic oligonucleotide
  Sense strand starting at position 3103 of SEQ ID NO: 1562372
gcugaauucugguugauag

SEQ ID NO: 1742110 - RNA, 19 nt, Artificial Sequence
  Description of Artificial Sequence: Synthetic oligonucleotide
  Antisense strand to SEQ ID NO: 1742109
cuaucaaccagaauucagc

SEQ ID NO: 1742111 - RNA, 19 nt, Artificial Sequence
  Description of Artificial Sequence: Synthetic oligonucleotide
  Sense strand starting at position 3104 of SEQ ID NO: 1562372
cugaauucugguugauagg

SEQ ID NO: 1742112 - RNA, 19 nt, Artificial Sequence
  Description of Artificial Sequence: Synthetic oligonucleotide
  Antisense strand to SEQ ID NO: 1742111
ccuaucaaccagaauucag

SEQ ID NO: 1742113 - RNA, 19 nt, Artificial Sequence
  Description of Artificial Sequence: Synthetic oligonucleotide
  Sense strand starting at position 3202 of SEQ ID NO: 1562372
gugagugcuguucaauaag

SEQ ID NO: 1742114 - RNA, 19 nt, Artificial Sequence
  Description of Artificial Sequence: Synthetic oligonucleotide
  Antisense strand to SEQ ID NO: 1742113
cuuauugaacagcacucac

SEQ ID NO: 1742115 - RNA, 19 nt, Artificial Sequence
  Description of Artificial Sequence: Synthetic oligonucleotide
  Sense strand starting at position 3354 of SEQ ID NO: 1562372
agauuagaaagugguggau

SEQ ID NO: 1742116 - RNA, 19 nt, Artificial Sequence
  Description of Artificial Sequence: Synthetic oligonucleotide
  Antisense strand to SEQ ID NO: 1742115
auccaccacuuucuaaucu

SEQ ID NO: 1742117 - RNA, 19 nt, Artificial Sequence
  Description of Artificial Sequence: Synthetic oligonucleotide
  Sense strand starting at position 3357 of SEQ ID NO: 1562372
uuagaaagugguggaucau

SEQ ID NO: 1742118 - RNA, 19 nt, Artificial Sequence
  Description of Artificial Sequence: Synthetic oligonucleotide
  Antisense strand to SEQ ID NO: 1742117
augauccaccacuuucuaa

SEQ ID NO: 1742119 - RNA, 19 nt, Artificial Sequence
  Description of Artificial Sequence: Synthetic oligonucleotide
  Sense strand starting at position 3370 of SEQ ID NO: 1562372
gaucauaaagcaugaggua

SEQ ID NO: 1742120 - RNA, 19 nt, Artificial Sequence
  Description of Artificial Sequence: Synthetic oligonucleotide
  Antisense strand to SEQ ID NO: 1742119
uaccucaugcuuuaugauc

SEQ ID NO: 1742121 - RNA, 19 nt, Artificial Sequence
  Description of Artificial Sequence: Synthetic oligonucleotide
  Sense strand starting at position 3447 of SEQ ID NO: 1562372
agcacuggucauugggauu

SEQ ID NO: 1742122 - RNA, 19 nt, Artificial Sequence
  Description of Artificial Sequence: Synthetic oligonucleotide
  Antisense strand to SEQ ID NO: 1742121
aaucccaaugaccagugcu

SEQ ID NO: 1742123 - RNA, 19 nt, Artificial Sequence
  Description of Artificial Sequence: Synthetic oligonucleotide
  Sense strand starting at position 3494 of SEQ ID NO: 1562372
cuaacaagauccugauuug

SEQ ID NO: 1742124 - RNA, 19 nt, Artificial Sequence
  Description of Artificial Sequence: Synthetic oligonucleotide
  Antisense strand to SEQ ID NO: 1742123
caaaucaggaucuuguuag

SEQ ID NO: 1742125 - RNA, 19 nt, Artificial Sequence
  Description of Artificial Sequence: Synthetic oligonucleotide
  Sense strand starting at position 3521 of SEQ ID NO: 1562372
gcagguaaagauuauguga

SEQ ID NO: 1742126 - RNA, 19 nt, Artificial Sequence
  Description of Artificial Sequence: Synthetic oligonucleotide
  Antisense strand to SEQ ID NO: 1742125
ucacauaaucuuuaccugc

SEQ ID NO: 1742127 - RNA, 19 nt, Artificial Sequence
  Description of Artificial Sequence: Synthetic oligonucleotide
  Sense strand starting at position 3524 of SEQ ID NO: 1562372
gguaaagauuaugugaucu

SEQ ID NO: 1742128 - RNA, 19 nt, Artificial Sequence
  Description of Artificial Sequence: Synthetic oligonucleotide
  Antisense strand to SEQ ID NO: 1742127
agaucacauaaucuuuacc

SEQ ID NO: 1742129 - RNA, 19 nt, Artificial Sequence
  Description of Artificial Sequence: Synthetic oligonucleotide
  Sense strand starting at position 3528 of SEQ ID NO: 1562372
aagauuaugugaucucaga

SEQ ID NO: 1742130 - RNA, 19 nt, Artificial Sequence
  Description of Artificial Sequence: Synthetic oligonucleotide
  Antisense strand to SEQ ID NO: 1742129
ucugagaucacauaaucuu

SEQ ID NO: 1742131 - RNA, 19 nt, Artificial Sequence
  Description of Artificial Sequence: Synthetic oligonucleotide
  Sense strand starting at position 3547 of SEQ ID NO: 1562372
guagaaggccuuuagaauu

SEQ ID NO: 1742132 - RNA, 19 nt, Artificial Sequence
  Description of Artificial Sequence: Synthetic oligonucleotide
  Antisense strand to SEQ ID NO: 1742131
aauucuaaaggccuucuac

SEQ ID NO: 1742133 - RNA, 19 nt, Artificial Sequence
  Description of Artificial Sequence: Synthetic oligonucleotide
  Sense strand starting at position 3659 of SEQ ID NO: 1562372
uuuacaguucgguauauca

SEQ ID NO: 1742134 - RNA, 19 nt, Artificial Sequence
  Description of Artificial Sequence: Synthetic oligonucleotide
  Antisense strand to SEQ ID NO: 1742133
ugauauaccgaacuguaaa

SEQ ID NO: 1742135 - RNA, 19 nt, Artificial Sequence
  Description of Artificial Sequence: Synthetic oligonucleotide
  Sense strand starting at position 3661 of SEQ ID NO: 1562372
uacaguucgguauaucaga

SEQ ID NO: 1742136 - RNA, 19 nt, Artificial Sequence
  Description of Artificial Sequence: Synthetic oligonucleotide
  Antisense strand to SEQ ID NO: 1742135
ucugauauaccgaacugua

SEQ ID NO: 1742137 - RNA, 19 nt, Artificial Sequence
  Description of Artificial Sequence: Synthetic oligonucleotide
  Sense strand starting at position 3753 of SEQ ID NO: 1562372
gagaaucaguuuccugcua

SEQ ID NO: 1742138 - RNA, 19 nt, Artificial Sequence
  Description of Artificial Sequence: Synthetic oligonucleotide
  Antisense strand to SEQ ID NO: 1742137
uagcaggaaacugauucuc

SEQ ID NO: 1742139 - RNA, 19 nt, Artificial Sequence
  Description of Artificial Sequence: Synthetic oligonucleotide
  Sense strand starting at position 3754 of SEQ ID NO: 1562372
agaaucaguuuccugcuaa

SEQ ID NO: 1742140 - RNA, 19 nt, Artificial Sequence
  Description of Artificial Sequence: Synthetic oligonucleotide
  Antisense strand to SEQ ID NO: 1742139
uuagcaggaaacugauucu

SEQ ID NO: 1742141 - RNA, 19 nt, Artificial Sequence
  Description of Artificial Sequence: Synthetic oligonucleotide
  Sense strand starting at position 3761 of SEQ ID NO: 1562372
guuuccugcuaauuugagu

SEQ ID NO: 1742142 - RNA, 19 nt, Artificial Sequence
  Description of Artificial Sequence: Synthetic oligonucleotide
  Antisense strand to SEQ ID NO: 1742141
acucaaauuagcaggaaac

SEQ ID NO: 1742143 - RNA, 19 nt, Artificial Sequence
  Description of Artificial Sequence: Synthetic oligonucleotide
  Sense strand starting at position 291 of SEQ ID NO: 1562373
cagucuugagcccgagaug

SEQ ID NO: 1742144 - RNA, 19 nt, Artificial Sequence
  Description of Artificial Sequence: Synthetic oligonucleotide
  Antisense strand to SEQ ID NO: 1742143
caucucgggcucaagacug

SEQ ID NO: 1742145 - RNA, 19 nt, Artificial Sequence
  Description of Artificial Sequence: Synthetic oligonucleotide
  Sense strand starting at position 292 of SEQ ID NO: 1562373
agucuugagcccgagauga

SEQ ID NO: 1742146 - RNA, 19 nt, Artificial Sequence
  Description of Artificial Sequence: Synthetic oligonucleotide
  Antisense strand to SEQ ID NO: 1742145
ucaucucgggcucaagacu

SEQ ID NO: 1742147 - RNA, 19 nt, Artificial Sequence
  Description of Artificial Sequence: Synthetic oligonucleotide
  Sense strand starting at position 294 of SEQ ID NO: 1562373
ucuugagcccgagaugaca

SEQ ID NO: 1742148 - RNA, 19 nt, Artificial Sequence
  Description of Artificial Sequence: Synthetic oligonucleotide
  Antisense strand to SEQ ID NO: 1742147
ugucaucucgggcucaaga

SEQ ID NO: 1742149 - RNA, 19 nt, Artificial Sequence
  Description of Artificial Sequence: Synthetic oligonucleotide
  Sense strand starting at position 595 of SEQ ID NO: 1562373
uaguucuguuccugccagu

SEQ ID NO: 1742150 - RNA, 19 nt, Artificial Sequence
  Description of Artificial Sequence: Synthetic oligonucleotide
  Antisense strand to SEQ ID NO: 1742149
acuggcaggaacagaacua

SEQ ID NO: 1742151 - RNA, 19 nt, Artificial Sequence
  Description of Artificial Sequence: Synthetic oligonucleotide
  Sense strand starting at position 703 of SEQ ID NO: 1562373
ugagaauggugggugauga

SEQ ID NO: 1742152 - RNA, 19 nt, Artificial Sequence
  Description of Artificial Sequence: Synthetic oligonucleotide
  Antisense strand to SEQ ID NO: 1742151
ucaucacccaccauucuca

SEQ ID NO: 1742153 - RNA, 19 nt, Artificial Sequence
  Description of Artificial Sequence: Synthetic oligonucleotide
  Sense strand starting at position 2505 of SEQ ID NO: 1562373
uggaccuuucggcggugaa

SEQ ID NO: 1742154 - RNA, 19 nt, Artificial Sequence
  Description of Artificial Sequence: Synthetic oligonucleotide
  Antisense strand to SEQ ID NO: 1742153
uucaccgccgaaaggucca

SEQ ID NO: 1742155 - RNA, 19 nt, Artificial Sequence
  Description of Artificial Sequence: Synthetic oligonucleotide
  Sense strand starting at position 2506 of SEQ ID NO: 1562373
ggaccuuucggcggugaaa

SEQ ID NO: 1742156 - RNA, 19 nt, Artificial Sequence
  Description of Artificial Sequence: Synthetic oligonucleotide
  Antisense strand to SEQ ID NO: 1742155
uuucaccgccgaaaggucc

SEQ ID NO: 1742157 - RNA, 19 nt, Artificial Sequence
  Description of Artificial Sequence: Synthetic oligonucleotide
  Sense strand starting at position 2508 of SEQ ID NO: 1562373
accuuucggcggugaaauc

SEQ ID NO: 1742158 - RNA, 19 nt, Artificial Sequence
  Description of Artificial Sequence: Synthetic oligonucleotide
  Antisense strand to SEQ ID NO: 1742157
gauuucaccgccgaaaggu

SEQ ID NO: 1742159 - RNA, 19 nt, Artificial Sequence
  Description of Artificial Sequence: Synthetic oligonucleotide
  Sense strand starting at position 2825 of SEQ ID NO: 1562373
uuugccuuccauugaaaug

SEQ ID NO: 1742160 - RNA, 19 nt, Artificial Sequence
  Description of Artificial Sequence: Synthetic oligonucleotide
  Antisense strand to SEQ ID NO: 1742159
cauuucaauggaaggcaaa

SEQ ID NO: 1742161 - RNA, 19 nt, Artificial Sequence
  Description of Artificial Sequence: Synthetic oligonucleotide
  Sense strand starting at position 2836 of SEQ ID NO: 1562373
uugaaaugaugccugugau

SEQ ID NO: 1742162 - RNA, 19 nt, Artificial Sequence
  Description of Artificial Sequence: Synthetic oligonucleotide
  Antisense strand to SEQ ID NO: 1742161
aucacaggcaucauuucaa

SEQ ID NO: 1742163 - RNA, 19 nt, Artificial Sequence
  Description of Artificial Sequence: Synthetic oligonucleotide
  Sense strand starting at position 2837 of SEQ ID NO: 1562373
ugaaaugaugccugugauu

SEQ ID NO: 1742164 - RNA, 19 nt, Artificial Sequence
  Description of Artificial Sequence: Synthetic oligonucleotide
  Antisense strand to SEQ ID NO: 1742163
aaucacaggcaucauuuca

SEQ ID NO: 1742165 - RNA, 19 nt, Artificial Sequence
  Description of Artificial Sequence: Synthetic oligonucleotide
  Sense strand starting at position 2839 of SEQ ID NO: 1562373
aaaugaugccugugauugc

SEQ ID NO: 1742166 - RNA, 19 nt, Artificial Sequence
  Description of Artificial Sequence: Synthetic oligonucleotide
  Antisense strand to SEQ ID NO: 1742165
gcaaucacaggcaucauuu

SEQ ID NO: 1742167 - RNA, 19 nt, Artificial Sequence
  Description of Artificial Sequence: Synthetic oligonucleotide
  Sense strand starting at position 2912 of SEQ ID NO: 1562373
gacugugcucaucgcauaa

SEQ ID NO: 1742168 - RNA, 19 nt, Artificial Sequence
  Description of Artificial Sequence: Synthetic oligonucleotide
  Antisense strand to SEQ ID NO: 1742167
uuaugcgaugagcacaguc

SEQ ID NO: 1742169 - RNA, 19 nt, Artificial Sequence
  Description of Artificial Sequence: Synthetic oligonucleotide
  Sense strand starting at position 2916 of SEQ ID NO: 1562373
gugcucaucgcauaaacaa

SEQ ID NO: 1742170 - RNA, 19 nt, Artificial Sequence
  Description of Artificial Sequence: Synthetic oligonucleotide
  Antisense strand to SEQ ID NO: 1742169
uuguuuaugcgaugagcac

SEQ ID NO: 1742171 - RNA, 19 nt, Artificial Sequence
  Description of Artificial Sequence: Synthetic oligonucleotide
  Sense strand starting at position 2999 of SEQ ID NO: 1562373
ugaagaaucuugugaggga

SEQ ID NO: 1742172 - RNA, 19 nt, Artificial Sequence
  Description of Artificial Sequence: Synthetic oligonucleotide
  Antisense strand to SEQ ID NO: 1742171
ucccucacaagauucuuca

SEQ ID NO: 1742173 - RNA, 19 nt, Artificial Sequence
  Description of Artificial Sequence: Synthetic oligonucleotide
  Sense strand starting at position 3000 of SEQ ID NO: 1562373
gaagaaucuugugagggag

SEQ ID NO: 1742174 - RNA, 19 nt, Artificial Sequence
  Description of Artificial Sequence: Synthetic oligonucleotide
  Antisense strand to SEQ ID NO: 1742173
cucccucacaagauucuuc

SEQ ID NO: 1742175 - RNA, 19 nt, Artificial Sequence
  Description of Artificial Sequence: Synthetic oligonucleotide
  Sense strand starting at position 3002 of SEQ ID NO: 1562373
agaaucuugugagggagaa

SEQ ID NO: 1742176 - RNA, 19 nt, Artificial Sequence
  Description of Artificial Sequence: Synthetic oligonucleotide
  Antisense strand to SEQ ID NO: 1742175
uucucccucacaagauucu

SEQ ID NO: 1742177 - RNA, 19 nt, Artificial Sequence
  Description of Artificial Sequence: Synthetic oligonucleotide
  Sense strand starting at position 3125 of SEQ ID NO: 1562373
aggauuugguccuaacaaa

SEQ ID NO: 1742178 - RNA, 19 nt, Artificial Sequence
  Description of Artificial Sequence: Synthetic oligonucleotide
  Antisense strand to SEQ ID NO: 1742177
uuuguuaggaccaaauccu

SEQ ID NO: 1742179 - RNA, 19 nt, Artificial Sequence
  Description of Artificial Sequence: Synthetic oligonucleotide
  Sense strand starting at position 3153 of SEQ ID NO: 1562373
auuguuuauuccugaguaa

SEQ ID NO: 1742180 - RNA, 19 nt, Artificial Sequence
  Description of Artificial Sequence: Synthetic oligonucleotide
  Antisense strand to SEQ ID NO: 1742179
uuacucaggaauaaacaau

SEQ ID NO: 1742181 - RNA, 19 nt, Artificial Sequence
  Description of Artificial Sequence: Synthetic oligonucleotide
  Sense strand starting at position 3154 of SEQ ID NO: 1562373
uuguuuauuccugaguaaa

SEQ ID NO: 1742182 - RNA, 19 nt, Artificial Sequence
  Description of Artificial Sequence: Synthetic oligonucleotide
  Antisense strand to SEQ ID NO: 1742181
uuuacucaggaauaaacaa

SEQ ID NO: 1742183 - RNA, 19 nt, Artificial Sequence
  Description of Artificial Sequence: Synthetic oligonucleotide
  Sense strand starting at position 3156 of SEQ ID NO: 1562373
guuuauuccugaguaaaca

SEQ ID NO: 1742184 - RNA, 19 nt, Artificial Sequence
  Description of Artificial Sequence: Synthetic oligonucleotide
  Antisense strand to SEQ ID NO: 1742183
uguuuacucaggaauaaac

SEQ ID NO: 1742185 - RNA, 19 nt, Artificial Sequence
  Description of Artificial Sequence: Synthetic oligonucleotide
  Sense strand starting at position 3191 of SEQ ID NO: 1562373
auagcaaugcuuugagauu

SEQ ID NO: 1742186 - RNA, 19 nt, Artificial Sequence
  Description of Artificial Sequence: Synthetic oligonucleotide
  Antisense strand to SEQ ID NO: 1742185
aaucucaaagcauugcuau

SEQ ID NO: 1742187 - RNA, 19 nt, Artificial Sequence
  Description of Artificial Sequence: Synthetic oligonucleotide
  Sense strand starting at position 3192 of SEQ ID NO: 1562373
uagcaaugcuuugagauug

SEQ ID NO: 1742188 - RNA, 19 nt, Artificial Sequence
  Description of Artificial Sequence: Synthetic oligonucleotide
  Antisense strand to SEQ ID NO: 1742187
caaucucaaagcauugcua

SEQ ID NO: 1742189 - RNA, 19 nt, Artificial Sequence
  Description of Artificial Sequence: Synthetic oligonucleotide
  Sense strand starting at position 3197 of SEQ ID NO: 1562373
augcuuugagauugggagu

SEQ ID NO: 1742190 - RNA, 19 nt, Artificial Sequence
  Description of Artificial Sequence: Synthetic oligonucleotide
  Antisense strand to SEQ ID NO: 1742189
acucccaaucucaaagcau

SEQ ID NO: 1742191 - RNA, 19 nt, Artificial Sequence
  Description of Artificial Sequence: Synthetic oligonucleotide
  Sense strand starting at position 3342 of SEQ ID NO: 1562373
ccaccuaccuguuacaagu

SEQ ID NO: 1742192 - RNA, 19 nt, Artificial Sequence
  Description of Artificial Sequence: Synthetic oligonucleotide
  Antisense strand to SEQ ID NO: 1742191
acuuguaacagguaggugg

SEQ ID NO: 1742193 - RNA, 19 nt, Artificial Sequence
  Description of Artificial Sequence: Synthetic oligonucleotide
  Sense strand starting at position 3360 of SEQ ID NO: 1562373
ucaccagccucaguuauua

SEQ ID NO: 1742194 - RNA, 19 nt, Artificial Sequence
  Description of Artificial Sequence: Synthetic oligonucleotide
  Antisense strand to SEQ ID NO: 1742193
uaauaacugaggcugguga

SEQ ID NO: 1742195 - RNA, 19 nt, Artificial Sequence
  Description of Artificial Sequence: Synthetic oligonucleotide
  Sense strand starting at position 3368 of SEQ ID NO: 1562373
cucaguuauuaugacggaa

SEQ ID NO: 1742196 - RNA, 19 nt, Artificial Sequence
  Description of Artificial Sequence: Synthetic oligonucleotide
  Antisense strand to SEQ ID NO: 1742195
uuccgucauaauaacugag

SEQ ID NO: 1742197 - RNA, 19 nt, Artificial Sequence
  Description of Artificial Sequence: Synthetic oligonucleotide
  Sense strand starting at position 3370 of SEQ ID NO: 1562373
caguuauuaugacggaaca

SEQ ID NO: 1742198 - RNA, 19 nt, Artificial Sequence
  Description of Artificial Sequence: Synthetic oligonucleotide
  Antisense strand to SEQ ID NO: 1742197
uguuccgucauaauaacug

SEQ ID NO: 1742199 - RNA, 19 nt, Artificial Sequence
  Description of Artificial Sequence: Synthetic oligonucleotide
  Sense strand starting at position 3371 of SEQ ID NO: 1562373
aguuauuaugacggaacau

SEQ ID NO: 1742200 - RNA, 19 nt, Artificial Sequence
  Description of Artificial Sequence: Synthetic oligonucleotide
  Antisense strand to SEQ ID NO: 1742199
auguuccgucauaauaacu

SEQ ID NO: 1742201 - RNA, 19 nt, Artificial Sequence
  Description of Artificial Sequence: Synthetic oligonucleotide
  Sense strand starting at position 3401 of SEQ ID NO: 1562373
uguuguucugucucauugu

SEQ ID NO: 1742202 - RNA, 19 nt, Artificial Sequence
  Description of Artificial Sequence: Synthetic oligonucleotide
  Antisense strand to SEQ ID NO: 1742201
acaaugagacagaacaaca

SEQ ID NO: 1742203 - RNA, 19 nt, Artificial Sequence
  Description of Artificial Sequence: Synthetic oligonucleotide
  Sense strand starting at position 3402 of SEQ ID NO: 1562373
guuguucugucucauuguu

SEQ ID NO: 1742204 - RNA, 19 nt, Artificial Sequence
  Description of Artificial Sequence: Synthetic oligonucleotide
  Antisense strand to SEQ ID NO: 1742203
aacaaugagacagaacaac

SEQ ID NO: 1742205 - RNA, 19 nt, Artificial Sequence
  Description of Artificial Sequence: Synthetic oligonucleotide
  Sense strand starting at position 3410 of SEQ ID NO: 1562373
gucucauuguucccguuua

SEQ ID NO: 1742206 - RNA, 19 nt, Artificial Sequence
  Description of Artificial Sequence: Synthetic oligonucleotide
  Antisense strand to SEQ ID NO: 1742205
uaaacgggaacaaugagac

SEQ ID NO: 1742207 - RNA, 19 nt, Artificial Sequence
  Description of Artificial Sequence: Synthetic oligonucleotide
  Sense strand starting at position 3415 of SEQ ID NO: 1562373
auuguucccguuuaccaau

SEQ ID NO: 1742208 - RNA, 19 nt, Artificial Sequence
  Description of Artificial Sequence: Synthetic oligonucleotide
  Antisense strand to SEQ ID NO: 1742207
auugguaaacgggaacaau

SEQ ID NO: 1742209 - RNA, 19 nt, Artificial Sequence
  Description of Artificial Sequence: Synthetic oligonucleotide
  Sense strand starting at position 3418 of SEQ ID NO: 1562373
guucccguuuaccaauauu

SEQ ID NO: 1742210 - RNA, 19 nt, Artificial Sequence
  Description of Artificial Sequence: Synthetic oligonucleotide
  Antisense strand to SEQ ID NO: 1742209
aauauugguaaacgggaac

SEQ ID NO: 1742211 - RNA, 19 nt, Artificial Sequence
  Description of Artificial Sequence: Synthetic oligonucleotide
  Sense strand starting at position 3612 of SEQ ID NO: 1562373
auagauguccagcaacugu

SEQ ID NO: 1742212 - RNA, 19 nt, Artificial Sequence
  Description of Artificial Sequence: Synthetic oligonucleotide
  Antisense strand to SEQ ID NO: 1742211
acaguugcuggacaucuau

SEQ ID NO: 1742213 - RNA, 19 nt, Artificial Sequence
  Description of Artificial Sequence: Synthetic oligonucleotide
  Sense strand starting at position 3619 of SEQ ID NO: 1562373
uccagcaacugucuaaaga

SEQ ID NO: 1742214 - RNA, 19 nt, Artificial Sequence
  Description of Artificial Sequence: Synthetic oligonucleotide
  Antisense strand to SEQ ID NO: 1742213
ucuuuagacaguugcugga

SEQ ID NO: 1742215 - RNA, 19 nt, Artificial Sequence
  Description of Artificial Sequence: Synthetic oligonucleotide
  Sense strand starting at position 3620 of SEQ ID NO: 1562373
ccagcaacugucuaaagaa

SEQ ID NO: 1742216 - RNA, 19 nt, Artificial Sequence
  Description of Artificial Sequence: Synthetic oligonucleotide
  Antisense strand to SEQ ID NO: 1742215
uucuuuagacaguugcugg

SEQ ID NO: 1742217 - RNA, 19 nt, Artificial Sequence
  Description of Artificial Sequence: Synthetic oligonucleotide
  Sense strand starting at position 3630 of SEQ ID NO: 1562373
ucuaaagaaugaggaauau

SEQ ID NO: 1742218 - RNA, 19 nt, Artificial Sequence
  Description of Artificial Sequence: Synthetic oligonucleotide
  Antisense strand to SEQ ID NO: 1742217
auauuccucauucuuuaga

SEQ ID NO: 1742219 - RNA, 19 nt, Artificial Sequence
  Description of Artificial Sequence: Synthetic oligonucleotide
  Sense strand starting at position 350 of SEQ ID NO: 1562374
guggccucugccugggaaa

SEQ ID NO: 1742220 - RNA, 19 nt, Artificial Sequence
  Description of Artificial Sequence: Synthetic oligonucleotide
  Antisense strand to SEQ ID NO: 1742219
uuucccaggcagaggccac

SEQ ID NO: 1742221 - RNA, 19 nt, Artificial Sequence
  Description of Artificial Sequence: Synthetic oligonucleotide
  Sense strand starting at position 376 of SEQ ID NO: 1562374
ggcuuuguaagucaaaggu

SEQ ID NO: 1742222 - RNA, 19 nt, Artificial Sequence
  Description of Artificial Sequence: Synthetic oligonucleotide
  Antisense strand to SEQ ID NO: 1742221
accuuugacuuacaaagcc

SEQ ID NO: 1742223 - RNA, 19 nt, Artificial Sequence
  Description of Artificial Sequence: Synthetic oligonucleotide
  Sense strand starting at position 389 of SEQ ID NO: 1562374
aaagguuggucuuguggga

SEQ ID NO: 1742224 - RNA, 19 nt, Artificial Sequence
  Description of Artificial Sequence: Synthetic oligonucleotide
  Antisense strand to SEQ ID NO: 1742223
ucccacaagaccaaccuuu

SEQ ID NO: 1742225 - RNA, 19 nt, Artificial Sequence
  Description of Artificial Sequence: Synthetic oligonucleotide
  Sense strand starting at position 489 of SEQ ID NO: 1562374
ggaggugugucugugccaa

SEQ ID NO: 1742226 - RNA, 19 nt, Artificial Sequence
  Description of Artificial Sequence: Synthetic oligonucleotide
  Antisense strand to SEQ ID NO: 1742225
uuggcacagacacaccucc

SEQ ID NO: 1742227 - RNA, 19 nt, Artificial Sequence
  Description of Artificial Sequence: Synthetic oligonucleotide
  Sense strand starting at position 493 of SEQ ID NO: 1562374
gugugucugugccaaguga

SEQ ID NO: 1742228 - RNA, 19 nt, Artificial Sequence
  Description of Artificial Sequence: Synthetic oligonucleotide
  Antisense strand to SEQ ID NO: 1742227
ucacuuggcacagacacac

SEQ ID NO: 1742229 - RNA, 19 nt, Artificial Sequence
  Description of Artificial Sequence: Synthetic oligonucleotide
  Sense strand starting at position 602 of SEQ ID NO: 1562374
ccaccauucuggcuggcaa

SEQ ID NO: 1742230 - RNA, 19 nt, Artificial Sequence
  Description of Artificial Sequence: Synthetic oligonucleotide
  Antisense strand to SEQ ID NO: 1742229
uugccagccagaauggugg

SEQ ID NO: 1742231 - RNA, 19 nt, Artificial Sequence
  Description of Artificial Sequence: Synthetic oligonucleotide
  Sense strand starting at position 615 of SEQ ID NO: 1562374
uggcaagauggcugugaug

SEQ ID NO: 1742232 - RNA, 19 nt, Artificial Sequence
  Description of Artificial Sequence: Synthetic oligonucleotide
  Antisense strand to SEQ ID NO: 1742231
caucacagccaucuugcca

SEQ ID NO: 1742233 - RNA, 19 nt, Artificial Sequence
  Description of Artificial Sequence: Synthetic oligonucleotide
  Sense strand starting at position 1021 of SEQ ID NO: 1562374
uugggagggcuaugacauu

SEQ ID NO: 1742234 - RNA, 19 nt, Artificial Sequence
  Description of Artificial Sequence: Synthetic oligonucleotide
  Antisense strand to SEQ ID NO: 1742233
aaugucauagcccucccaa

SEQ ID NO: 1742235 - RNA, 19 nt, Artificial Sequence
  Description of Artificial Sequence: Synthetic oligonucleotide
  Sense strand starting at position 1032 of SEQ ID NO: 1562374
augacauuccgggaccuuu

SEQ ID NO: 1742236 - RNA, 19 nt, Artificial Sequence
  Description of Artificial Sequence: Synthetic oligonucleotide
  Antisense strand to SEQ ID NO: 1742235
aaaggucccggaaugucau

SEQ ID NO: 1742237 - RNA, 19 nt, Artificial Sequence
  Description of Artificial Sequence: Synthetic oligonucleotide
  Sense strand starting at position 1069 of SEQ ID NO: 1562374
gcaggaucauaacugcaua

SEQ ID NO: 1742238 - RNA, 19 nt, Artificial Sequence
  Description of Artificial Sequence: Synthetic oligonucleotide
  Antisense strand to SEQ ID NO: 1742237
uaugcaguuaugauccugc

SEQ ID NO: 1742239 - RNA, 19 nt, Artificial Sequence
  Description of Artificial Sequence: Synthetic oligonucleotide
  Sense strand starting at position 1220 of SEQ ID NO: 1562374
guggguugcgaagaguaua

SEQ ID NO: 1742240 - RNA, 19 nt, Artificial Sequence
  Description of Artificial Sequence: Synthetic oligonucleotide
  Antisense strand to SEQ ID NO: 1742239
uauacucuucgcaacccac

SEQ ID NO: 1742241 - RNA, 19 nt, Artificial Sequence
  Description of Artificial Sequence: Synthetic oligonucleotide
  Sense strand starting at position 2398 of SEQ ID NO: 1562374
uccgaugaucuccaggacu

SEQ ID NO: 1742242 - RNA, 19 nt, Artificial Sequence
  Description of Artificial Sequence: Synthetic oligonucleotide
  Antisense strand to SEQ ID NO: 1742241
aguccuggagaucaucgga

SEQ ID NO: 1742243 - RNA, 19 nt, Artificial Sequence
  Description of Artificial Sequence: Synthetic oligonucleotide
  Sense strand starting at position 2400 of SEQ ID NO: 1562374
cgaugaucuccaggacuua

SEQ ID NO: 1742244 - RNA, 19 nt, Artificial Sequence
  Description of Artificial Sequence: Synthetic oligonucleotide
  Antisense strand to SEQ ID NO: 1742243
uaaguccuggagaucaucg

SEQ ID NO: 1742245 - RNA, 19 nt, Artificial Sequence
  Description of Artificial Sequence: Synthetic oligonucleotide
  Sense strand starting at position 2434 of SEQ ID NO: 1562374
gcgacugcugaggaaugaa

SEQ ID NO: 1742246 - RNA, 19 nt, Artificial Sequence
  Description of Artificial Sequence: Synthetic oligonucleotide
  Antisense strand to SEQ ID NO: 1742245
uucauuccucagcagucgc

SEQ ID NO: 1742247 - RNA, 19 nt, Artificial Sequence
  Description of Artificial Sequence: Synthetic oligonucleotide
  Sense strand starting at position 2584 of SEQ ID NO: 1562374
gcagccucuuugcuuaaca

SEQ ID NO: 1742248 - RNA, 19 nt, Artificial Sequence
  Description of Artificial Sequence: Synthetic oligonucleotide
  Antisense strand to SEQ ID NO: 1742247
uguuaagcaaagaggcugc

SEQ ID NO: 1742249 - RNA, 19 nt, Artificial Sequence
  Description of Artificial Sequence: Synthetic oligonucleotide
  Sense strand starting at position 2598 of SEQ ID NO: 1562374
uaacacuggcucugaggau

SEQ ID NO: 1742250 - RNA, 19 nt, Artificial Sequence
  Description of Artificial Sequence: Synthetic oligonucleotide
  Antisense strand to SEQ ID NO: 1742249
auccucagagccaguguua

SEQ ID NO: 1742251 - RNA, 19 nt, Artificial Sequence
  Description of Artificial Sequence: Synthetic oligonucleotide
  Sense strand starting at position 3893 of SEQ ID NO: 1562374
agcagagccucccaaauua

SEQ ID NO: 1742252 - RNA, 19 nt, Artificial Sequence
  Description of Artificial Sequence: Synthetic oligonucleotide
  Antisense strand to SEQ ID NO: 1742251
uaauuugggaggcucugcu

SEQ ID NO: 1742253 - RNA, 19 nt, Artificial Sequence
  Description of Artificial Sequence: Synthetic oligonucleotide
  Sense strand starting at position 351 of SEQ ID NO: 1562375
guggccucugccugggaaa

SEQ ID NO: 1742254 - RNA, 19 nt, Artificial Sequence
  Description of Artificial Sequence: Synthetic oligonucleotide
  Antisense strand to SEQ ID NO: 1742253
uuucccaggcagaggccac

SEQ ID NO: 1742255 - RNA, 19 nt, Artificial Sequence
  Description of Artificial Sequence: Synthetic oligonucleotide
  Sense strand starting at position 377 of SEQ ID NO: 1562375
ggcuuuguaagucaaaggu

SEQ ID NO: 1742256 - RNA, 19 nt, Artificial Sequence
  Description of Artificial Sequence: Synthetic oligonucleotide
  Antisense strand to SEQ ID NO: 1742255
accuuugacuuacaaagcc

SEQ ID NO: 1742257 - RNA, 19 nt, Artificial Sequence
  Description of Artificial Sequence: Synthetic oligonucleotide
  Sense strand starting at position 390 of SEQ ID NO: 1562375
aaagguuggucuuguggga

SEQ ID NO: 1742258 - RNA, 19 nt, Artificial Sequence
  Description of Artificial Sequence: Synthetic oligonucleotide
  Antisense strand to SEQ ID NO: 1742257
ucccacaagaccaaccuuu

SEQ ID NO: 1742259 - RNA, 19 nt, Artificial Sequence
  Description of Artificial Sequence: Synthetic oligonucleotide
  Sense strand starting at position 490 of SEQ ID NO: 1562375
ggaggugugucugugccaa

SEQ ID NO: 1742260 - RNA, 19 nt, Artificial Sequence
  Description of Artificial Sequence: Synthetic oligonucleotide
  Antisense strand to SEQ ID NO: 1742259
uuggcacagacacaccucc

SEQ ID NO: 1742261 - RNA, 19 nt, Artificial Sequence
  Description of Artificial Sequence: Synthetic oligonucleotide
  Sense strand starting at position 494 of SEQ ID NO: 1562375
gugugucugugccaaguga

SEQ ID NO: 1742262 - RNA, 19 nt, Artificial Sequence
  Description of Artificial Sequence: Synthetic oligonucleotide
  Antisense strand to SEQ ID NO: 1742261
ucacuuggcacagacacac

SEQ ID NO: 1742263 - RNA, 19 nt, Artificial Sequence
  Description of Artificial Sequence: Synthetic oligonucleotide
  Sense strand starting at position 603 of SEQ ID NO: 1562375
ccaccauucuggcuggcaa

SEQ ID NO: 1742264 - RNA, 19 nt, Artificial Sequence
  Description of Artificial Sequence: Synthetic oligonucleotide
  Antisense strand to SEQ ID NO: 1742263
uugccagccagaauggugg

SEQ ID NO: 1742265 - RNA, 19 nt, Artificial Sequence
  Description of Artificial Sequence: Synthetic oligonucleotide
  Sense strand starting at position 616 of SEQ ID NO: 1562375
uggcaagauggcugugaug

SEQ ID NO: 1742266 - RNA, 19 nt, Artificial Sequence
  Description of Artificial Sequence: Synthetic oligonucleotide
  Antisense strand to SEQ ID NO: 1742265
caucacagccaucuugcca

SEQ ID NO: 1742267 - RNA, 19 nt, Artificial Sequence
  Description of Artificial Sequence: Synthetic oligonucleotide
  Sense strand starting at position 1022 of SEQ ID NO: 1562375
uugggagggcuaugacauu

SEQ ID NO: 1742268 - RNA, 19 nt, Artificial Sequence
  Description of Artificial Sequence: Synthetic oligonucleotide
  Antisense strand to SEQ ID NO: 1742267
aaugucauagcccucccaa

SEQ ID NO: 1742269 - RNA, 19 nt, Artificial Sequence
  Description of Artificial Sequence: Synthetic oligonucleotide
  Sense strand starting at position 1033 of SEQ ID NO: 1562375
augacauuccgggaccuuu

SEQ ID NO: 1742270 - RNA, 19 nt, Artificial Sequence
  Description of Artificial Sequence: Synthetic oligonucleotide
  Antisense strand to SEQ ID NO: 1742269
aaaggucccggaaugucau

SEQ ID NO: 1742271 - RNA, 19 nt, Artificial Sequence
  Description of Artificial Sequence: Synthetic oligonucleotide
  Sense strand starting at position 1070 of SEQ ID NO: 1562375
gcaggaucauaacugcaua

SEQ ID NO: 1742272 - RNA, 19 nt, Artificial Sequence
  Description of Artificial Sequence: Synthetic oligonucleotide
  Antisense strand to SEQ ID NO: 1742271
uaugcaguuaugauccugc

SEQ ID NO: 1742273 - RNA, 19 nt, Artificial Sequence
  Description of Artificial Sequence: Synthetic oligonucleotide
  Sense strand starting at position 1221 of SEQ ID NO: 1562375
guggguugcgaagaguaua

SEQ ID NO: 1742274 - RNA, 19 nt, Artificial Sequence
  Description of Artificial Sequence: Synthetic oligonucleotide
  Antisense strand to SEQ ID NO: 1742273
uauacucuucgcaacccac

SEQ ID NO: 1742275 - RNA, 19 nt, Artificial Sequence
  Description of Artificial Sequence: Synthetic oligonucleotide
  Sense strand starting at position 2399 of SEQ ID NO: 1562375
uccgaugaucuccaggacu

SEQ ID NO: 1742276 - RNA, 19 nt, Artificial Sequence
  Description of Artificial Sequence: Synthetic oligonucleotide
  Antisense strand to SEQ ID NO: 1742275
aguccuggagaucaucgga

SEQ ID NO: 1742277 - RNA, 19 nt, Artificial Sequence
  Description of Artificial Sequence: Synthetic oligonucleotide
  Sense strand starting at position 2401 of SEQ ID NO: 1562375
cgaugaucuccaggacuua

SEQ ID NO: 1742278 - RNA, 19 nt, Artificial Sequence
  Description of Artificial Sequence: Synthetic oligonucleotide
  Antisense strand to SEQ ID NO: 1742277
uaaguccuggagaucaucg

SEQ ID NO: 1742279 - RNA, 19 nt, Artificial Sequence
  Description of Artificial Sequence: Synthetic oligonucleotide
  Sense strand starting at position 2435 of SEQ ID NO: 1562375
gcgacugcugaggaaugaa

SEQ ID NO: 1742280 - RNA, 19 nt, Artificial Sequence
  Description of Artificial Sequence: Synthetic oligonucleotide
  Antisense strand to SEQ ID NO: 1742279
uucauuccucagcagucgc

SEQ ID NO: 1742281 - RNA, 19 nt, Artificial Sequence
  Description of Artificial Sequence: Synthetic oligonucleotide
  Sense strand starting at position 2585 of SEQ ID NO: 1562375
gcagccucuuugcuuaaca

SEQ ID NO: 1742282 - RNA, 19 nt, Artificial Sequence
  Description of Artificial Sequence: Synthetic oligonucleotide
  Antisense strand to SEQ ID NO: 1742281
uguuaagcaaagaggcugc

SEQ ID NO: 1742283 - RNA, 19 nt, Artificial Sequence
  Description of Artificial Sequence: Synthetic oligonucleotide
  Sense strand starting at position 2599 of SEQ ID NO: 1562375
uaacacuggcucugaggau

SEQ ID NO: 1742284 - RNA, 19 nt, Artificial Sequence
  Description of Artificial Sequence: Synthetic oligonucleotide
  Antisense strand to SEQ ID NO: 1742283
auccucagagccaguguua

SEQ ID NO: 1742285 - RNA, 19 nt, Artificial Sequence
  Description of Artificial Sequence: Synthetic oligonucleotide
  Sense strand starting at position 3894 of SEQ ID NO: 1562375
agcagagccucccaaauua

SEQ ID NO: 1742286 - RNA, 19 nt, Artificial Sequence
  Description of Artificial Sequence: Synthetic oligonucleotide
  Antisense strand to SEQ ID NO: 1742285
uaauuugggaggcucugcu

SEQ ID NO: 1742287 - RNA, 19 nt, Artificial Sequence
  Description of Artificial Sequence: Synthetic oligonucleotide
  Sense strand starting at position 33 of SEQ ID NO: 1562376
ccaaguaaguaugaagaau

SEQ ID NO: 1742288 - RNA, 19 nt, Artificial Sequence
  Description of Artificial Sequence: Synthetic oligonucleotide
  Antisense strand to SEQ ID NO: 1742287
auucuucauacuuacuugg

SEQ ID NO: 1742289 - RNA, 19 nt, Artificial Sequence
  Description of Artificial Sequence: Synthetic oligonucleotide
  Sense strand starting at position 214 of SEQ ID NO: 1562376
ggcuguuacuagcauuaug

SEQ ID NO: 1742290 - RNA, 19 nt, Artificial Sequence
  Description of Artificial Sequence: Synthetic oligonucleotide
  Antisense strand to SEQ ID NO: 1742289
cauaaugcuaguaacagcc

SEQ ID NO: 1742291 - RNA, 19 nt, Artificial Sequence
  Description of Artificial Sequence: Synthetic oligonucleotide
  Sense strand starting at position 282 of SEQ ID NO: 1562376
gggcuacccugacagauca

SEQ ID NO: 1742292 - RNA, 19 nt, Artificial Sequence
  Description of Artificial Sequence: Synthetic oligonucleotide
  Antisense strand to SEQ ID NO: 1742291
ugaucugucaggguagccc

SEQ ID NO: 1742293 - RNA, 19 nt, Artificial Sequence
  Description of Artificial Sequence: Synthetic oligonucleotide
  Sense strand starting at position 315 of SEQ ID NO: 1562376
cuuugcuggucucccauaa

SEQ ID NO: 1742294 - RNA, 19 nt, Artificial Sequence
  Description of Artificial Sequence: Synthetic oligonucleotide
  Antisense strand to SEQ ID NO: 1742293
uuaugggagaccagcaaag

SEQ ID NO: 1742295 - RNA, 19 nt, Artificial Sequence
  Description of Artificial Sequence: Synthetic oligonucleotide
  Sense strand starting at position 319 of SEQ ID NO: 1562376
gcuggucucccauaaacaa

SEQ ID NO: 1742296 - RNA, 19 nt, Artificial Sequence
  Description of Artificial Sequence: Synthetic oligonucleotide
  Antisense strand to SEQ ID NO: 1742295
uuguuuaugggagaccagc

SEQ ID NO: 1742297 - RNA, 19 nt, Artificial Sequence
  Description of Artificial Sequence: Synthetic oligonucleotide
  Sense strand starting at position 368 of SEQ ID NO: 1562376
accuaagucuaguuccuaa

SEQ ID NO: 1742298 - RNA, 19 nt, Artificial Sequence
  Description of Artificial Sequence: Synthetic oligonucleotide
  Antisense strand to SEQ ID NO: 1742297
uuaggaacuagacuuaggu

SEQ ID NO: 1742299 - RNA, 19 nt, Artificial Sequence
  Description of Artificial Sequence: Synthetic oligonucleotide
  Sense strand starting at position 455 of SEQ ID NO: 1562376
gcugaaguggauuguuuga

SEQ ID NO: 1742300 - RNA, 19 nt, Artificial Sequence
  Description of Artificial Sequence: Synthetic oligonucleotide
  Antisense strand to SEQ ID NO: 1742299
ucaaacaauccacuucagc

SEQ ID NO: 1742301 - RNA, 19 nt, Artificial Sequence
  Description of Artificial Sequence: Synthetic oligonucleotide
  Sense strand starting at position 735 of SEQ ID NO: 1562376
uucuuagucuuggguccua

SEQ ID NO: 1742302 - RNA, 19 nt, Artificial Sequence
  Description of Artificial Sequence: Synthetic oligonucleotide
  Antisense strand to SEQ ID NO: 1742301
uaggacccaagacuaagaa

SEQ ID NO: 1742303 - RNA, 19 nt, Artificial Sequence
  Description of Artificial Sequence: Synthetic oligonucleotide
  Sense strand starting at position 740 of SEQ ID NO: 1562376
agucuuggguccuagaauu

SEQ ID NO: 1742304 - RNA, 19 nt, Artificial Sequence
  Description of Artificial Sequence: Synthetic oligonucleotide
  Antisense strand to SEQ ID NO: 1742303
aauucuaggacccaagacu

SEQ ID NO: 1742305 - RNA, 19 nt, Artificial Sequence
  Description of Artificial Sequence: Synthetic oligonucleotide
  Sense strand starting at position 1019 of SEQ ID NO: 1562376
cuuaucuucucaggugcaa

SEQ ID NO: 1742306 - RNA, 19 nt, Artificial Sequence
  Description of Artificial Sequence: Synthetic oligonucleotide
  Antisense strand to SEQ ID NO: 1742305
uugcaccugagaagauaag

SEQ ID NO: 1742307 - RNA, 19 nt, Artificial Sequence
  Description of Artificial Sequence: Synthetic oligonucleotide
  Sense strand starting at position 1064 of SEQ ID NO: 1562376
gaggcaucugcauaacuga

SEQ ID NO: 1742308 - RNA, 19 nt, Artificial Sequence
  Description of Artificial Sequence: Synthetic oligonucleotide
  Antisense strand to SEQ ID NO: 1742307
ucaguuaugcagaugccuc

SEQ ID NO: 1742309 - RNA, 19 nt, Artificial Sequence
  Description of Artificial Sequence: Synthetic oligonucleotide
  Sense strand starting at position 1106 of SEQ ID NO: 1562376
ucaagacacucaugguauc

SEQ ID NO: 1742310 - RNA, 19 nt, Artificial Sequence
  Description of Artificial Sequence: Synthetic oligonucleotide
  Antisense strand to SEQ ID NO: 1742309
gauaccaugagugucuuga

SEQ ID NO: 1742311 - RNA, 19 nt, Artificial Sequence
  Description of Artificial Sequence: Synthetic oligonucleotide
  Sense strand starting at position 1109 of SEQ ID NO: 1562376
agacacucaugguaucuua

SEQ ID NO: 1742312 - RNA, 19 nt, Artificial Sequence
  Description of Artificial Sequence: Synthetic oligonucleotide
  Antisense strand to SEQ ID NO: 1742311
uaagauaccaugagugucu

SEQ ID NO: 1742313 - RNA, 19 nt, Artificial Sequence
  Description of Artificial Sequence: Synthetic oligonucleotide
  Sense strand starting at position 1132 of SEQ ID NO: 1562376
acagauuucuugggcacua

SEQ ID NO: 1742314 - RNA, 19 nt, Artificial Sequence
  Description of Artificial Sequence: Synthetic oligonucleotide
  Antisense strand to SEQ ID NO: 1742313
uagugcccaagaaaucugu

SEQ ID NO: 1742315 - RNA, 19 nt, Artificial Sequence
  Description of Artificial Sequence: Synthetic oligonucleotide
  Sense strand starting at position 1273 of SEQ ID NO: 1562376
cuuaguaaaccucgagaac

SEQ ID NO: 1742316 - RNA, 19 nt, Artificial Sequence
  Description of Artificial Sequence: Synthetic oligonucleotide
  Antisense strand to SEQ ID NO: 1742315
guucucgagguuuacuaag

SEQ ID NO: 1742317 - RNA, 19 nt, Artificial Sequence
  Description of Artificial Sequence: Synthetic oligonucleotide
  Sense strand starting at position 1274 of SEQ ID NO: 1562376
uuaguaaaccucgagaacu

SEQ ID NO: 1742318 - RNA, 19 nt, Artificial Sequence
  Description of Artificial Sequence: Synthetic oligonucleotide
  Antisense strand to SEQ ID NO: 1742317
aguucucgagguuuacuaa

SEQ ID NO: 1742319 - RNA, 19 nt, Artificial Sequence
  Description of Artificial Sequence: Synthetic oligonucleotide
  Sense strand starting at position 1307 of SEQ ID NO: 1562376
agucacuccgacugucauu

SEQ ID NO: 1742320 - RNA, 19 nt, Artificial Sequence
  Description of Artificial Sequence: Synthetic oligonucleotide
  Antisense strand to SEQ ID NO: 1742319
aaugacagucggagugacu

SEQ ID NO: 1742321 - RNA, 19 nt, Artificial Sequence
  Description of Artificial Sequence: Synthetic oligonucleotide
  Sense strand starting at position 1327 of SEQ ID NO: 1562376
uuuauuggccuguaugaau

SEQ ID NO: 1742322 - RNA, 19 nt, Artificial Sequence
  Description of Artificial Sequence: Synthetic oligonucleotide
  Antisense strand to SEQ ID NO: 1742321
auucauacaggccaauaaa

SEQ ID NO: 1742323 - RNA, 19 nt, Artificial Sequence
  Description of Artificial Sequence: Synthetic oligonucleotide
  Sense strand starting at position 1339 of SEQ ID NO: 1562376
uaugaauccugagggcaga

SEQ ID NO: 1742324 - RNA, 19 nt, Artificial Sequence
  Description of Artificial Sequence: Synthetic oligonucleotide
  Antisense strand to SEQ ID NO: 1742323
ucugcccucaggauucaua

SEQ ID NO: 1742325 - RNA, 19 nt, Artificial Sequence
  Description of Artificial Sequence: Synthetic oligonucleotide
  Sense strand starting at position 1419 of SEQ ID NO: 1562376
ggaaaugcauuucgggaaa

SEQ ID NO: 1742326 - RNA, 19 nt, Artificial Sequence
  Description of Artificial Sequence: Synthetic oligonucleotide
  Antisense strand to SEQ ID NO: 1742325
uuucccgaaaugcauuucc

SEQ ID NO: 1742327 - RNA, 19 nt, Artificial Sequence
  Description of Artificial Sequence: Synthetic oligonucleotide
  Sense strand starting at position 1421 of SEQ ID NO: 1562376
aaaugcauuucgggaaaug

SEQ ID NO: 1742328 - RNA, 19 nt, Artificial Sequence
  Description of Artificial Sequence: Synthetic oligonucleotide
  Antisense strand to SEQ ID NO: 1742327
cauuucccgaaaugcauuu

SEQ ID NO: 1742329 - RNA, 19 nt, Artificial Sequence
  Description of Artificial Sequence: Synthetic oligonucleotide
  Sense strand starting at position 1471 of SEQ ID NO: 1562376
cgcgguacuuucccggaaa

SEQ ID NO: 1742330 - RNA, 19 nt, Artificial Sequence
  Description of Artificial Sequence: Synthetic oligonucleotide
  Antisense strand to SEQ ID NO: 1742329
uuuccgggaaaguaccgcg

SEQ ID NO: 1742331 - RNA, 19 nt, Artificial Sequence
  Description of Artificial Sequence: Synthetic oligonucleotide
  Sense strand starting at position 1472 of SEQ ID NO: 1562376
gcgguacuuucccggaaag

SEQ ID NO: 1742332 - RNA, 19 nt, Artificial Sequence
  Description of Artificial Sequence: Synthetic oligonucleotide
  Antisense strand to SEQ ID NO: 1742331
cuuuccgggaaaguaccgc

SEQ ID NO: 1742333 - RNA, 19 nt, Artificial Sequence
  Description of Artificial Sequence: Synthetic oligonucleotide
  Sense strand starting at position 1473 of SEQ ID NO: 1562376
cgguacuuucccggaaaga

SEQ ID NO: 1742334 - RNA, 19 nt, Artificial Sequence
  Description of Artificial Sequence: Synthetic oligonucleotide
  Antisense strand to SEQ ID NO: 1742333
ucuuuccgggaaaguaccg

SEQ ID NO: 1742335 - RNA, 19 nt, Artificial Sequence
  Description of Artificial Sequence: Synthetic oligonucleotide
  Sense strand starting at position 1601 of SEQ ID NO: 1562376
accacuuucuccugguuga

SEQ ID NO: 1742336 - RNA, 19 nt, Artificial Sequence
  Description of Artificial Sequence: Synthetic oligonucleotide
  Antisense strand to SEQ ID NO: 1742335
ucaaccaggagaaaguggu

SEQ ID NO: 1742337 - RNA, 19 nt, Artificial Sequence
  Description of Artificial Sequence: Synthetic oligonucleotide
  Sense strand starting at position 1602 of SEQ ID NO: 1562376
ccacuuucuccugguugau

SEQ ID NO: 1742338 - RNA, 19 nt, Artificial Sequence
  Description of Artificial Sequence: Synthetic oligonucleotide
  Antisense strand to SEQ ID NO: 1742337
aucaaccaggagaaagugg

SEQ ID NO: 1742339 - RNA, 19 nt, Artificial Sequence
  Description of Artificial Sequence: Synthetic oligonucleotide
  Sense strand starting at position 1641 of SEQ ID NO: 1562376
uaaucuuuggcgcggcaaa

SEQ ID NO: 1742340 - RNA, 19 nt, Artificial Sequence
  Description of Artificial Sequence: Synthetic oligonucleotide
  Antisense strand to SEQ ID NO: 1742339
uuugccgcgccaaagauua

SEQ ID NO: 1742341 - RNA, 19 nt, Artificial Sequence
  Description of Artificial Sequence: Synthetic oligonucleotide
  Sense strand starting at position 2052 of SEQ ID NO: 1562376
gcgccuuuccuccuagcua

SEQ ID NO: 1742342 - RNA, 19 nt, Artificial Sequence
  Description of Artificial Sequence: Synthetic oligonucleotide
  Antisense strand to SEQ ID NO: 1742341
uagcuaggaggaaaggcgc

SEQ ID NO: 1742343 - RNA, 19 nt, Artificial Sequence
  Description of Artificial Sequence: Synthetic oligonucleotide
  Sense strand starting at position 2564 of SEQ ID NO: 1562376
gcgagauggucccuuggag

SEQ ID NO: 1742344 - RNA, 19 nt, Artificial Sequence
  Description of Artificial Sequence: Synthetic oligonucleotide
  Antisense strand to SEQ ID NO: 1742343
cuccaagggaccaucucgc

SEQ ID NO: 1742345 - RNA, 19 nt, Artificial Sequence
  Description of Artificial Sequence: Synthetic oligonucleotide
  Sense strand starting at position 2568 of SEQ ID NO: 1562376
gauggucccuuggagagaa

SEQ ID NO: 1742346 - RNA, 19 nt, Artificial Sequence
  Description of Artificial Sequence: Synthetic oligonucleotide
  Antisense strand to SEQ ID NO: 1742345
uucucuccaagggaccauc

SEQ ID NO: 1742347 - RNA, 19 nt, Artificial Sequence
  Description of Artificial Sequence: Synthetic oligonucleotide
  Sense strand starting at position 2646 of SEQ ID NO: 1562376
cgggcuuuaucaguaaaca

SEQ ID NO: 1742348 - RNA, 19 nt, Artificial Sequence
  Description of Artificial Sequence: Synthetic oligonucleotide
  Antisense strand to SEQ ID NO: 1742347
uguuuacugauaaagcccg

SEQ ID NO: 1742349 - RNA, 19 nt, Artificial Sequence
  Description of Artificial Sequence: Synthetic oligonucleotide
  Sense strand starting at position 2647 of SEQ ID NO: 1562376
gggcuuuaucaguaaacaa

SEQ ID NO: 1742350 - RNA, 19 nt, Artificial Sequence
  Description of Artificial Sequence: Synthetic oligonucleotide
  Antisense strand to SEQ ID NO: 1742349
uuguuuacugauaaagccc

SEQ ID NO: 1742351 - RNA, 19 nt, Artificial Sequence
  Description of Artificial Sequence: Synthetic oligonucleotide
  Sense strand starting at position 2670 of SEQ ID NO: 1562376
agcccaugguucgaaugau

SEQ ID NO: 1742352 - RNA, 19 nt, Artificial Sequence
  Description of Artificial Sequence: Synthetic oligonucleotide
  Antisense strand to SEQ ID NO: 1742351
aucauucgaaccaugggcu

SEQ ID NO: 1742353 - RNA, 19 nt, Artificial Sequence
  Description of Artificial Sequence: Synthetic oligonucleotide
  Sense strand starting at position 2714 of SEQ ID NO: 1562376
gauccagugcauugugaaa

SEQ ID NO: 1742354 - RNA, 19 nt, Artificial Sequence
  Description of Artificial Sequence: Synthetic oligonucleotide
  Antisense strand to SEQ ID NO: 1742353
uuucacaaugcacuggauc

SEQ ID NO: 1742355 - RNA, 19 nt, Artificial Sequence
  Description of Artificial Sequence: Synthetic oligonucleotide
  Sense strand starting at position 2773 of SEQ ID NO: 1562376
aucaaauacuucguuguua

SEQ ID NO: 1742356 - RNA, 19 nt, Artificial Sequence
  Description of Artificial Sequence: Synthetic oligonucleotide
  Antisense strand to SEQ ID NO: 1742355
uaacaacgaaguauuugau

SEQ ID NO: 1742357 - RNA, 19 nt, Artificial Sequence
  Description of Artificial Sequence: Synthetic oligonucleotide
  Sense strand starting at position 2774 of SEQ ID NO: 1562376
ucaaauacuucguuguuau

SEQ ID NO: 1742358 - RNA, 19 nt, Artificial Sequence
  Description of Artificial Sequence: Synthetic oligonucleotide
  Antisense strand to SEQ ID NO: 1742357
auaacaacgaaguauuuga

SEQ ID NO: 1742359 - RNA, 19 nt, Artificial Sequence
  Description of Artificial Sequence: Synthetic oligonucleotide
  Sense strand starting at position 2778 of SEQ ID NO: 1562376
auacuucguuguuauaaca

SEQ ID NO: 1742360 - RNA, 19 nt, Artificial Sequence
  Description of Artificial Sequence: Synthetic oligonucleotide
  Antisense strand to SEQ ID NO: 1742359
uguuauaacaacgaaguau

SEQ ID NO: 1742361 - RNA, 19 nt, Artificial Sequence
  Description of Artificial Sequence: Synthetic oligonucleotide
  Sense strand starting at position 2835 of SEQ ID NO: 1562376
guuuguaaagaacaaugca

SEQ ID NO: 1742362 - RNA, 19 nt, Artificial Sequence
  Description of Artificial Sequence: Synthetic oligonucleotide
  Antisense strand to SEQ ID NO: 1742361
ugcauuguucuuuacaaac

SEQ ID NO: 1742363 - RNA, 19 nt, Artificial Sequence
  Description of Artificial Sequence: Synthetic oligonucleotide
  Sense strand starting at position 214 of SEQ ID NO: 1562377
ucuugaacaguuugaaggu

SEQ ID NO: 1742364 - RNA, 19 nt, Artificial Sequence
  Description of Artificial Sequence: Synthetic oligonucleotide
  Antisense strand to SEQ ID NO: 1742363
accuucaaacuguucaaga

SEQ ID NO: 1742365 - RNA, 19 nt, Artificial Sequence
  Description of Artificial Sequence: Synthetic oligonucleotide
  Sense strand starting at position 230 of SEQ ID NO: 1562377
gguuuauaaagguagcaga

SEQ ID NO: 1742366 - RNA, 19 nt, Artificial Sequence
  Description of Artificial Sequence: Synthetic oligonucleotide
  Antisense strand to SEQ ID NO: 1742365
ucugcuaccuuuauaaacc

SEQ ID NO: 1742367 - RNA, 19 nt, Artificial Sequence
  Description of Artificial Sequence: Synthetic oligonucleotide
  Sense strand starting at position 251 of SEQ ID NO: 1562377
aaaugaguccaauguggcu

SEQ ID NO: 1742368 - RNA, 19 nt, Artificial Sequence
  Description of Artificial Sequence: Synthetic oligonucleotide
  Antisense strand to SEQ ID NO: 1742367
agccacauuggacucauuu

SEQ ID NO: 1742369 - RNA, 19 nt, Artificial Sequence
  Description of Artificial Sequence: Synthetic oligonucleotide
  Sense strand starting at position 278 of SEQ ID NO: 1562377
gcaagugugagccauggaa

SEQ ID NO: 1742370 - RNA, 19 nt, Artificial Sequence
  Description of Artificial Sequence: Synthetic oligonucleotide
  Antisense strand to SEQ ID NO: 1742369
uuccauggcucacacuugc

SEQ ID NO: 1742371 - RNA, 19 nt, Artificial Sequence
  Description of Artificial Sequence: Synthetic oligonucleotide
  Sense strand starting at position 280 of SEQ ID NO: 1562377
aagugugagccauggaaua

SEQ ID NO: 1742372 - RNA, 19 nt, Artificial Sequence
  Description of Artificial Sequence: Synthetic oligonucleotide
  Antisense strand to SEQ ID NO: 1742371
uauuccauggcucacacuu

SEQ ID NO: 1742373 - RNA, 19 nt, Artificial Sequence
  Description of Artificial Sequence: Synthetic oligonucleotide
  Sense strand starting at position 282 of SEQ ID NO: 1562377
gugugagccauggaauaua

SEQ ID NO: 1742374 - RNA, 19 nt, Artificial Sequence
  Description of Artificial Sequence: Synthetic oligonucleotide
  Antisense strand to SEQ ID NO: 1742373
uauauuccauggcucacac

SEQ ID NO: 1742375 - RNA, 19 nt, Artificial Sequence
  Description of Artificial Sequence: Synthetic oligonucleotide
  Sense strand starting at position 328 of SEQ ID NO: 1562377
acaguaccucuaggguuau

SEQ ID NO: 1742376 - RNA, 19 nt, Artificial Sequence
  Description of Artificial Sequence: Synthetic oligonucleotide
  Antisense strand to SEQ ID NO: 1742375
auaacccuagagguacugu

SEQ ID NO: 1742377 - RNA, 19 nt, Artificial Sequence
  Description of Artificial Sequence: Synthetic oligonucleotide
  Sense strand starting at position 448 of SEQ ID NO: 1562377
ugagaaacuuuagaggaaa

SEQ ID NO: 1742378 - RNA, 19 nt, Artificial Sequence
  Description of Artificial Sequence: Synthetic oligonucleotide
  Antisense strand to SEQ ID NO: 1742377
uuuccucuaaaguuucuca

SEQ ID NO: 1742379 - RNA, 19 nt, Artificial Sequence
  Description of Artificial Sequence: Synthetic oligonucleotide
  Sense strand starting at position 597 of SEQ ID NO: 1562377
cccuaauugcuaggagugu

SEQ ID NO: 1742380 - RNA, 19 nt, Artificial Sequence
  Description of Artificial Sequence: Synthetic oligonucleotide
  Antisense strand to SEQ ID NO: 1742379
acacuccuagcaauuaggg

SEQ ID NO: 1742381 - RNA, 19 nt, Artificial Sequence
  Description of Artificial Sequence: Synthetic oligonucleotide
  Sense strand starting at position 705 of SEQ ID NO: 1562377
uggacaggauacugagaaa

SEQ ID NO: 1742382 - RNA, 19 nt, Artificial Sequence
  Description of Artificial Sequence: Synthetic oligonucleotide
  Antisense strand to SEQ ID NO: 1742381
uuucucaguauccugucca

SEQ ID NO: 1742383 - RNA, 19 nt, Artificial Sequence
  Description of Artificial Sequence: Synthetic oligonucleotide
  Sense strand starting at position 708 of SEQ ID NO: 1562377
acaggauacugagaaaccu

SEQ ID NO: 1742384 - RNA, 19 nt, Artificial Sequence
  Description of Artificial Sequence: Synthetic oligonucleotide
  Antisense strand to SEQ ID NO: 1742383
agguuucucaguauccugu

SEQ ID NO: 1742385 - RNA, 19 nt, Artificial Sequence
  Description of Artificial Sequence: Synthetic oligonucleotide
  Sense strand starting at position 801 of SEQ ID NO: 1562377
ggcacuucucaccacugaa

SEQ ID NO: 1742386 - RNA, 19 nt, Artificial Sequence
  Description of Artificial Sequence: Synthetic oligonucleotide
  Antisense strand to SEQ ID NO: 1742385
uucaguggugagaagugcc

SEQ ID NO: 1742387 - RNA, 19 nt, Artificial Sequence
  Description of Artificial Sequence: Synthetic oligonucleotide
  Sense strand starting at position 836 of SEQ ID NO: 1562377
cuauauucguuucuaagac

SEQ ID NO: 1742388 - RNA, 19 nt, Artificial Sequence
  Description of Artificial Sequence: Synthetic oligonucleotide
  Antisense strand to SEQ ID NO: 1742387
gucuuagaaacgaauauag

SEQ ID NO: 1742389 - RNA, 19 nt, Artificial Sequence
  Description of Artificial Sequence: Synthetic oligonucleotide
  Sense strand starting at position 978 of SEQ ID NO: 1562377
cguguaacggauugauuug

SEQ ID NO: 1742390 - RNA, 19 nt, Artificial Sequence
  Description of Artificial Sequence: Synthetic oligonucleotide
  Antisense strand to SEQ ID NO: 1742389
caaaucaauccguuacacg

SEQ ID NO: 1742391 - RNA, 19 nt, Artificial Sequence
  Description of Artificial Sequence: Synthetic oligonucleotide
  Sense strand starting at position 993 of SEQ ID NO: 1562377
uuugcucaggguugaaaug

SEQ ID NO: 1742392 - RNA, 19 nt, Artificial Sequence
  Description of Artificial Sequence: Synthetic oligonucleotide
  Antisense strand to SEQ ID NO: 1742391
cauuucaacccugagcaaa

SEQ ID NO: 1742393 - RNA, 19 nt, Artificial Sequence
  Description of Artificial Sequence: Synthetic oligonucleotide
  Sense strand starting at position 1016 of SEQ ID NO: 1562377
ugccgaucgccucuccaua

SEQ ID NO: 1742394 - RNA, 19 nt, Artificial Sequence
  Description of Artificial Sequence: Synthetic oligonucleotide
  Antisense strand to SEQ ID NO: 1742393
uauggagaggcgaucggca

SEQ ID NO: 1742395 - RNA, 19 nt, Artificial Sequence
  Description of Artificial Sequence: Synthetic oligonucleotide
  Sense strand starting at position 1029 of SEQ ID NO: 1562377
uccauauucgcggaguauc

SEQ ID NO: 1742396 - RNA, 19 nt, Artificial Sequence
  Description of Artificial Sequence: Synthetic oligonucleotide
  Antisense strand to SEQ ID NO: 1742395
gauacuccgcgaauaugga

SEQ ID NO: 1742397 - RNA, 19 nt, Artificial Sequence
  Description of Artificial Sequence: Synthetic oligonucleotide
  Sense strand starting at position 1039 of SEQ ID NO: 1562377
cggaguaucuucccaguau

SEQ ID NO: 1742398 - RNA, 19 nt, Artificial Sequence
  Description of Artificial Sequence: Synthetic oligonucleotide
  Antisense strand to SEQ ID NO: 1742397
auacugggaagauacuccg

SEQ ID NO: 1742399 - RNA, 19 nt, Artificial Sequence
  Description of Artificial Sequence: Synthetic oligonucleotide
  Sense strand starting at position 1336 of SEQ ID NO: 1562377
cacaucuugcaguggcaaa

SEQ ID NO: 1742400 - RNA, 19 nt, Artificial Sequence
  Description of Artificial Sequence: Synthetic oligonucleotide
  Antisense strand to SEQ ID NO: 1742399
uuugccacugcaagaugug

SEQ ID NO: 1742401 - RNA, 19 nt, Artificial Sequence
  Description of Artificial Sequence: Synthetic oligonucleotide
  Sense strand starting at position 2190 of SEQ ID NO: 1562377
ggaagaauuugggacuguu

SEQ ID NO: 1742402 - RNA, 19 nt, Artificial Sequence
  Description of Artificial Sequence: Synthetic oligonucleotide
  Antisense strand to SEQ ID NO: 1742401
aacagucccaaauucuucc

SEQ ID NO: 1742403 - RNA, 19 nt, Artificial Sequence
  Description of Artificial Sequence: Synthetic oligonucleotide
  Sense strand starting at position 2235 of SEQ ID NO: 1562377
uagaauagugccuggcauu

SEQ ID NO: 1742404 - RNA, 19 nt, Artificial Sequence
  Description of Artificial Sequence: Synthetic oligonucleotide
  Antisense strand to SEQ ID NO: 1742403
aaugccaggcacuauucua

SEQ ID NO: 1742405 - RNA, 19 nt, Artificial Sequence
  Description of Artificial Sequence: Synthetic oligonucleotide
  Sense strand starting at position 2236 of SEQ ID NO: 1562377
agaauagugccuggcauuu

SEQ ID NO: 1742406 - RNA, 19 nt, Artificial Sequence
  Description of Artificial Sequence: Synthetic oligonucleotide
  Antisense strand to SEQ ID NO: 1742405
aaaugccaggcacuauucu

SEQ ID NO: 1742407 - RNA, 19 nt, Artificial Sequence
  Description of Artificial Sequence: Synthetic oligonucleotide
  Sense strand starting at position 2262 of SEQ ID NO: 1562377
acccaaagauguguugacu

SEQ ID NO: 1742408 - RNA, 19 nt, Artificial Sequence
  Description of Artificial Sequence: Synthetic oligonucleotide
  Antisense strand to SEQ ID NO: 1742407
agucaacacaucuuugggu

SEQ ID NO: 1742409 - RNA, 19 nt, Artificial Sequence
  Description of Artificial Sequence: Synthetic oligonucleotide
  Sense strand starting at position 2268 of SEQ ID NO: 1562377
agauguguugacugacuga

SEQ ID NO: 1742410 - RNA, 19 nt, Artificial Sequence
  Description of Artificial Sequence: Synthetic oligonucleotide
  Antisense strand to SEQ ID NO: 1742409
ucagucagucaacacaucu

SEQ ID NO: 1742411 - RNA, 19 nt, Artificial Sequence
  Description of Artificial Sequence: Synthetic oligonucleotide
  Sense strand starting at position 2344 of SEQ ID NO: 1562377
uguauaaaccugcaugaua

SEQ ID NO: 1742412 - RNA, 19 nt, Artificial Sequence
  Description of Artificial Sequence: Synthetic oligonucleotide
  Antisense strand to SEQ ID NO: 1742411
uaucaugcagguuuauaca

SEQ ID NO: 1742413 - RNA, 19 nt, Artificial Sequence
  Description of Artificial Sequence: Synthetic oligonucleotide
  Sense strand starting at position 2397 of SEQ ID NO: 1562377
ccuaccauugaguaaaugu

SEQ ID NO: 1742414 - RNA, 19 nt, Artificial Sequence
  Description of Artificial Sequence: Synthetic oligonucleotide
  Antisense strand to SEQ ID NO: 1742413
acauuuacucaaugguagg

SEQ ID NO: 1742415 - RNA, 19 nt, Artificial Sequence
  Description of Artificial Sequence: Synthetic oligonucleotide
  Sense strand starting at position 2413 of SEQ ID NO: 1562377
uguuguaaauaucuacaac

SEQ ID NO: 1742416 - RNA, 19 nt, Artificial Sequence
  Description of Artificial Sequence: Synthetic oligonucleotide
  Antisense strand to SEQ ID NO: 1742415
guuguagauauuuacaaca

SEQ ID NO: 1742417 - RNA, 19 nt, Artificial Sequence
  Description of Artificial Sequence: Synthetic oligonucleotide
  Sense strand starting at position 2429 of SEQ ID NO: 1562377
aacauuauccguuguagau

SEQ ID NO: 1742418 - RNA, 19 nt, Artificial Sequence
  Description of Artificial Sequence: Synthetic oligonucleotide
  Antisense strand to SEQ ID NO: 1742417
aucuacaacggauaauguu

SEQ ID NO: 1742419 - RNA, 19 nt, Artificial Sequence
  Description of Artificial Sequence: Synthetic oligonucleotide
  Sense strand starting at position 2507 of SEQ ID NO: 1562377
ugaucaacguguuucggga

SEQ ID NO: 1742420 - RNA, 19 nt, Artificial Sequence
  Description of Artificial Sequence: Synthetic oligonucleotide
  Antisense strand to SEQ ID NO: 1742419
ucccgaaacacguugauca

SEQ ID NO: 1742421 - RNA, 19 nt, Artificial Sequence
  Description of Artificial Sequence: Synthetic oligonucleotide
  Sense strand starting at position 2550 of SEQ ID NO: 1562377
auuaauuugucugcuuguu

SEQ ID NO: 1742422 - RNA, 19 nt, Artificial Sequence
  Description of Artificial Sequence: Synthetic oligonucleotide
  Antisense strand to SEQ ID NO: 1742421
aacaagcagacaaauuaau

SEQ ID NO: 1742423 - RNA, 19 nt, Artificial Sequence
  Description of Artificial Sequence: Synthetic oligonucleotide
  Sense strand starting at position 2555 of SEQ ID NO: 1562377
uuugucugcuuguuauuua

SEQ ID NO: 1742424 - RNA, 19 nt, Artificial Sequence
  Description of Artificial Sequence: Synthetic oligonucleotide
  Antisense strand to SEQ ID NO: 1742423
uaaauaacaagcagacaaa

SEQ ID NO: 1742425 - RNA, 19 nt, Artificial Sequence
  Description of Artificial Sequence: Synthetic oligonucleotide
  Sense strand starting at position 2558 of SEQ ID NO: 1562377
gucugcuuguuauuuauag

SEQ ID NO: 1742426 - RNA, 19 nt, Artificial Sequence
  Description of Artificial Sequence: Synthetic oligonucleotide
  Antisense strand to SEQ ID NO: 1742425
cuauaaauaacaagcagac

SEQ ID NO: 1742427 - RNA, 19 nt, Artificial Sequence
  Description of Artificial Sequence: Synthetic oligonucleotide
  Sense strand starting at position 2565 of SEQ ID NO: 1562377
uguuauuuauagccuguca

SEQ ID NO: 1742428 - RNA, 19 nt, Artificial Sequence
  Description of Artificial Sequence: Synthetic oligonucleotide
  Antisense strand to SEQ ID NO: 1742427
ugacaggcuauaaauaaca

SEQ ID NO: 1742429 - RNA, 19 nt, Artificial Sequence
  Description of Artificial Sequence: Synthetic oligonucleotide
  Sense strand starting at position 3171 of SEQ ID NO: 1562377
ugcugauacuccuuuaagg

SEQ ID NO: 1742430 - RNA, 19 nt, Artificial Sequence
  Description of Artificial Sequence: Synthetic oligonucleotide
  Antisense strand to SEQ ID NO: 1742429
ccuuaaaggaguaucagca

SEQ ID NO: 1742431 - RNA, 19 nt, Artificial Sequence
  Description of Artificial Sequence: Synthetic oligonucleotide
  Sense strand starting at position 3173 of SEQ ID NO: 1562377
cugauacuccuuuaaggcu

SEQ ID NO: 1742432 - RNA, 19 nt, Artificial Sequence
  Description of Artificial Sequence: Synthetic oligonucleotide
  Antisense strand to SEQ ID NO: 1742431
agccuuaaaggaguaucag

SEQ ID NO: 1742433 - RNA, 19 nt, Artificial Sequence
  Description of Artificial Sequence: Synthetic oligonucleotide
  Sense strand starting at position 3194 of SEQ ID NO: 1562377
gcacaagggugaucauaaa

SEQ ID NO: 1742434 - RNA, 19 nt, Artificial Sequence
  Description of Artificial Sequence: Synthetic oligonucleotide
  Antisense strand to SEQ ID NO: 1742433
uuuaugaucacccuugugc

SEQ ID NO: 1742435 - RNA, 19 nt, Artificial Sequence
  Description of Artificial Sequence: Synthetic oligonucleotide
  Sense strand starting at position 3235 of SEQ ID NO: 1562377
uuaugugacccuuggcaga

SEQ ID NO: 1742436 - RNA, 19 nt, Artificial Sequence
  Description of Artificial Sequence: Synthetic oligonucleotide
  Antisense strand to SEQ ID NO: 1742435
ucugccaagggucacauaa

SEQ ID NO: 1742437 - RNA, 19 nt, Artificial Sequence
  Description of Artificial Sequence: Synthetic oligonucleotide
  Sense strand starting at position 3237 of SEQ ID NO: 1562377
augugacccuuggcagaau

SEQ ID NO: 1742438 - RNA, 19 nt, Artificial Sequence
  Description of Artificial Sequence: Synthetic oligonucleotide
  Antisense strand to SEQ ID NO: 1742437
auucugccaagggucacau

SEQ ID NO: 1742439 - RNA, 19 nt, Artificial Sequence
  Description of Artificial Sequence: Synthetic oligonucleotide
  Sense strand starting at position 3282 of SEQ ID NO: 1562377
ggaacuuaucuaggauccu

SEQ ID NO: 1742440 - RNA, 19 nt, Artificial Sequence
  Description of Artificial Sequence: Synthetic oligonucleotide
  Antisense strand to SEQ ID NO: 1742439
aggauccuagauaaguucc

SEQ ID NO: 1742441 - RNA, 19 nt, Artificial Sequence
  Description of Artificial Sequence: Synthetic oligonucleotide
  Sense strand starting at position 3957 of SEQ ID NO: 1562377
guaucagugaauugaguca

SEQ ID NO: 1742442 - RNA, 19 nt, Artificial Sequence
  Description of Artificial Sequence: Synthetic oligonucleotide
  Antisense strand to SEQ ID NO: 1742441
ugacucaauucacugauac

SEQ ID NO: 1742443 - RNA, 19 nt, Artificial Sequence
  Description of Artificial Sequence: Synthetic oligonucleotide
  Sense strand starting at position 66 of SEQ ID NO: 1562378
auguuuggcucauaagcgu

SEQ ID NO: 1742444 - RNA, 19 nt, Artificial Sequence
  Description of Artificial Sequence: Synthetic oligonucleotide
  Antisense strand to SEQ ID NO: 1742443
acgcuuaugagccaaacau

SEQ ID NO: 1742445 - RNA, 19 nt, Artificial Sequence
  Description of Artificial Sequence: Synthetic oligonucleotide
  Sense strand starting at position 83 of SEQ ID NO: 1562378
guggucagcuggugucaga

SEQ ID NO: 1742446 - RNA, 19 nt, Artificial Sequence
  Description of Artificial Sequence: Synthetic oligonucleotide
  Antisense strand to SEQ ID NO: 1742445
ucugacaccagcugaccac

SEQ ID NO: 1742447 - RNA, 19 nt, Artificial Sequence
  Description of Artificial Sequence: Synthetic oligonucleotide
  Sense strand starting at position 90 of SEQ ID NO: 1562378
gcuggugucagagguuaag

SEQ ID NO: 1742448 - RNA, 19 nt, Artificial Sequence
  Description of Artificial Sequence: Synthetic oligonucleotide
  Antisense strand to SEQ ID NO: 1742447
cuuaaccucugacaccagc

SEQ ID NO: 1742449 - RNA, 19 nt, Artificial Sequence
  Description of Artificial Sequence: Synthetic oligonucleotide
  Sense strand starting at position 120 of SEQ ID NO: 1562378
guaagaagcucucugggua

SEQ ID NO: 1742450 - RNA, 19 nt, Artificial Sequence
  Description of Artificial Sequence: Synthetic oligonucleotide
  Antisense strand to SEQ ID NO: 1742449
uacccagagagcuucuuac

SEQ ID NO: 1742451 - RNA, 19 nt, Artificial Sequence
  Description of Artificial Sequence: Synthetic oligonucleotide
  Sense strand starting at position 607 of SEQ ID NO: 1562378
cggccaaagucggaauuga

SEQ ID NO: 1742452 - RNA, 19 nt, Artificial Sequence
  Description of Artificial Sequence: Synthetic oligonucleotide
  Antisense strand to SEQ ID NO: 1742451
ucaauuccgacuuuggccg

SEQ ID NO: 1742453 - RNA, 19 nt, Artificial Sequence
  Description of Artificial Sequence: Synthetic oligonucleotide
  Sense strand starting at position 617 of SEQ ID NO: 1562378
cggaauugagucuggguca

SEQ ID NO: 1742454 - RNA, 19 nt, Artificial Sequence
  Description of Artificial Sequence: Synthetic oligonucleotide
  Antisense strand to SEQ ID NO: 1742453
ugacccagacucaauuccg

SEQ ID NO: 1742455 - RNA, 19 nt, Artificial Sequence
  Description of Artificial Sequence: Synthetic oligonucleotide
  Sense strand starting at position 785 of SEQ ID NO: 1562378
gccggagcccuggauucaa

SEQ ID NO: 1742456 - RNA, 19 nt, Artificial Sequence
  Description of Artificial Sequence: Synthetic oligonucleotide
  Antisense strand to SEQ ID NO: 1742455
uugaauccagggcuccggc

SEQ ID NO: 1742457 - RNA, 19 nt, Artificial Sequence
  Description of Artificial Sequence: Synthetic oligonucleotide
  Sense strand starting at position 820 of SEQ ID NO: 1562378
ccgagaaauucggagacug

SEQ ID NO: 1742458 - RNA, 19 nt, Artificial Sequence
  Description of Artificial Sequence: Synthetic oligonucleotide
  Antisense strand to SEQ ID NO: 1742457
cagucuccgaauuucucgg

SEQ ID NO: 1742459 - RNA, 19 nt, Artificial Sequence
  Description of Artificial Sequence: Synthetic oligonucleotide
  Sense strand starting at position 1118 of SEQ ID NO: 1562378
aucugagcacuccgcauau

SEQ ID NO: 1742460 - RNA, 19 nt, Artificial Sequence
  Description of Artificial Sequence: Synthetic oligonucleotide
  Antisense strand to SEQ ID NO: 1742459
auaugcggagugcucagau

SEQ ID NO: 1742461 - RNA, 19 nt, Artificial Sequence
  Description of Artificial Sequence: Synthetic oligonucleotide
  Sense strand starting at position 2269 of SEQ ID NO: 1562378
cugcccuguucuuccaaga

SEQ ID NO: 1742462 - RNA, 19 nt, Artificial Sequence
  Description of Artificial Sequence: Synthetic oligonucleotide
  Antisense strand to SEQ ID NO: 1742461
ucuuggaagaacagggcag

SEQ ID NO: 1742463 - RNA, 19 nt, Artificial Sequence
  Description of Artificial Sequence: Synthetic oligonucleotide
  Sense strand starting at position 2283 of SEQ ID NO: 1562378
caagaugcgucauaaagcu

SEQ ID NO: 1742464 - RNA, 19 nt, Artificial Sequence
  Description of Artificial Sequence: Synthetic oligonucleotide
  Antisense strand to SEQ ID NO: 1742463
agcuuuaugacgcaucuug

SEQ ID NO: 1742465 - RNA, 19 nt, Artificial Sequence
  Description of Artificial Sequence: Synthetic oligonucleotide
  Sense strand starting at position 2434 of SEQ ID NO: 1562378
ugcauuuccucuuuguaga

SEQ ID NO: 1742466 - RNA, 19 nt, Artificial Sequence
  Description of Artificial Sequence: Synthetic oligonucleotide
  Antisense strand to SEQ ID NO: 1742465
ucuacaaagaggaaaugca

SEQ ID NO: 1742467 - RNA, 19 nt, Artificial Sequence
  Description of Artificial Sequence: Synthetic oligonucleotide
  Sense strand starting at position 2435 of SEQ ID NO: 1562378
gcauuuccucuuuguagaa

SEQ ID NO: 1742468 - RNA, 19 nt, Artificial Sequence
  Description of Artificial Sequence: Synthetic oligonucleotide
  Antisense strand to SEQ ID NO: 1742467
uucuacaaagaggaaaugc

SEQ ID NO: 1742469 - RNA, 19 nt, Artificial Sequence
  Description of Artificial Sequence: Synthetic oligonucleotide
  Sense strand starting at position 2489 of SEQ ID NO: 1562378
gaugaaauaccucgcagac

SEQ ID NO: 1742470 - RNA, 19 nt, Artificial Sequence
  Description of Artificial Sequence: Synthetic oligonucleotide
  Antisense strand to SEQ ID NO: 1742469
gucugcgagguauuucauc

SEQ ID NO: 1742471 - RNA, 19 nt, Artificial Sequence
  Description of Artificial Sequence: Synthetic oligonucleotide
  Sense strand starting at position 2491 of SEQ ID NO: 1562378
ugaaauaccucgcagacaa

SEQ ID NO: 1742472 - RNA, 19 nt, Artificial Sequence
  Description of Artificial Sequence: Synthetic oligonucleotide
  Antisense strand to SEQ ID NO: 1742471
uugucugcgagguauuuca

SEQ ID NO: 1742473 - RNA, 19 nt, Artificial Sequence
  Description of Artificial Sequence: Synthetic oligonucleotide
  Sense strand starting at position 2511 of SEQ ID NO: 1562378
ugaauuaugcauuggauau

SEQ ID NO: 1742474 - RNA, 19 nt, Artificial Sequence
  Description of Artificial Sequence: Synthetic oligonucleotide
  Antisense strand to SEQ ID NO: 1742473
auauccaaugcauaauuca

SEQ ID NO: 1742475 - RNA, 19 nt, Artificial Sequence
  Description of Artificial Sequence: Synthetic oligonucleotide
  Sense strand starting at position 2521 of SEQ ID NO: 1562378
auuggauauuucuagauac

SEQ ID NO: 1742476 - RNA, 19 nt, Artificial Sequence
  Description of Artificial Sequence: Synthetic oligonucleotide
  Antisense strand to SEQ ID NO: 1742475
guaucuagaaauauccaau

SEQ ID NO: 1742477 - RNA, 19 nt, Artificial Sequence
  Description of Artificial Sequence: Synthetic oligonucleotide
  Sense strand starting at position 2546 of SEQ ID NO: 1562378
guauuuauauguuacacga

SEQ ID NO: 1742478 - RNA, 19 nt, Artificial Sequence
  Description of Artificial Sequence: Synthetic oligonucleotide
  Antisense strand to SEQ ID NO: 1742477
ucguguaacauauaaauac

SEQ ID NO: 1742479 - RNA, 19 nt, Artificial Sequence
  Description of Artificial Sequence: Synthetic oligonucleotide
  Sense strand starting at position 2572 of SEQ ID NO: 1562378
gggcgauaacuuggaauca

SEQ ID NO: 1742480 - RNA, 19 nt, Artificial Sequence
  Description of Artificial Sequence: Synthetic oligonucleotide
  Antisense strand to SEQ ID NO: 1742479
ugauuccaaguuaucgccc

SEQ ID NO: 1742481 - RNA, 19 nt, Artificial Sequence
  Description of Artificial Sequence: Synthetic oligonucleotide
  Sense strand starting at position 2573 of SEQ ID NO: 1562378
ggcgauaacuuggaaucac

SEQ ID NO: 1742482 - RNA, 19 nt, Artificial Sequence
  Description of Artificial Sequence: Synthetic oligonucleotide
  Antisense strand to SEQ ID NO: 1742481
gugauuccaaguuaucgcc

SEQ ID NO: 1742483 - RNA, 19 nt, Artificial Sequence
  Description of Artificial Sequence: Synthetic oligonucleotide
  Sense strand starting at position 3007 of SEQ ID NO: 1562378
ggugaaagaugccaacauu

SEQ ID NO: 1742484 - RNA, 19 nt, Artificial Sequence
  Description of Artificial Sequence: Synthetic oligonucleotide
  Antisense strand to SEQ ID NO: 1742483
aauguuggcaucuuucacc

SEQ ID NO: 1742485 - RNA, 19 nt, Artificial Sequence
  Description of Artificial Sequence: Synthetic oligonucleotide
  Sense strand starting at position 3127 of SEQ ID NO: 1562378
gcaagaugugguggaaaga

SEQ ID NO: 1742486 - RNA, 19 nt, Artificial Sequence
  Description of Artificial Sequence: Synthetic oligonucleotide
  Antisense strand to SEQ ID NO: 1742485
ucuuuccaccacaucuugc

SEQ ID NO: 1742487 - RNA, 19 nt, Artificial Sequence
  Description of Artificial Sequence: Synthetic oligonucleotide
  Sense strand starting at position 3137 of SEQ ID NO: 1562378
guggaaagaaagugacuuu

SEQ ID NO: 1742488 - RNA, 19 nt, Artificial Sequence
  Description of Artificial Sequence: Synthetic oligonucleotide
  Antisense strand to SEQ ID NO: 1742487
aaagucacuuucuuuccac

SEQ ID NO: 1742489 - RNA, 19 nt, Artificial Sequence
  Description of Artificial Sequence: Synthetic oligonucleotide
  Sense strand starting at position 3200 of SEQ ID NO: 1562378
aagcaaucacguugaauug

SEQ ID NO: 1742490 - RNA, 19 nt, Artificial Sequence
  Description of Artificial Sequence: Synthetic oligonucleotide
  Antisense strand to SEQ ID NO: 1742489
caauucaacgugauugcuu

SEQ ID NO: 1742491 - RNA, 19 nt, Artificial Sequence
  Description of Artificial Sequence: Synthetic oligonucleotide
  Sense strand starting at position 3234 of SEQ ID NO: 1562378
gggaaaggcaaggguuauu

SEQ ID NO: 1742492 - RNA, 19 nt, Artificial Sequence
  Description of Artificial Sequence: Synthetic oligonucleotide
  Antisense strand to SEQ ID NO: 1742491
aauaacccuugccuuuccc

SEQ ID NO: 1742493 - RNA, 19 nt, Artificial Sequence
  Description of Artificial Sequence: Synthetic oligonucleotide
  Sense strand starting at position 3609 of SEQ ID NO: 1562378
guggaagucaggcaaggau

SEQ ID NO: 1742494 - RNA, 19 nt, Artificial Sequence
  Description of Artificial Sequence: Synthetic oligonucleotide
  Antisense strand to SEQ ID NO: 1742493
auccuugccugacuuccac

SEQ ID NO: 1742495 - RNA, 19 nt, Artificial Sequence
  Description of Artificial Sequence: Synthetic oligonucleotide
  Sense strand starting at position 3612 of SEQ ID NO: 1562378
gaagucaggcaaggauuau

SEQ ID NO: 1742496 - RNA, 19 nt, Artificial Sequence
  Description of Artificial Sequence: Synthetic oligonucleotide
  Antisense strand to SEQ ID NO: 1742495
auaauccuugccugacuuc

SEQ ID NO: 1742497 - RNA, 19 nt, Artificial Sequence
  Description of Artificial Sequence: Synthetic oligonucleotide
  Sense strand starting at position 3621 of SEQ ID NO: 1562378
caaggauuaugcuaaguac

SEQ ID NO: 1742498 - RNA, 19 nt, Artificial Sequence
  Description of Artificial Sequence: Synthetic oligonucleotide
  Antisense strand to SEQ ID NO: 1742497
guacuuagcauaauccuug

SEQ ID NO: 1742499 - RNA, 19 nt, Artificial Sequence
  Description of Artificial Sequence: Synthetic oligonucleotide
  Sense strand starting at position 3624 of SEQ ID NO: 1562378
ggauuaugcuaaguacacu

SEQ ID NO: 1742500 - RNA, 19 nt, Artificial Sequence
  Description of Artificial Sequence: Synthetic oligonucleotide
  Antisense strand to SEQ ID NO: 1742499
aguguacuuagcauaaucc

SEQ ID NO: 1742501 - RNA, 19 nt, Artificial Sequence
  Description of Artificial Sequence: Synthetic oligonucleotide
  Sense strand starting at position 3718 of SEQ ID NO: 1562378
auggcuggauucuuaauua

SEQ ID NO: 1742502 - RNA, 19 nt, Artificial Sequence
  Description of Artificial Sequence: Synthetic oligonucleotide
  Antisense strand to SEQ ID NO: 1742501
uaauuaagaauccagccau

SEQ ID NO: 1742503 - RNA, 19 nt, Artificial Sequence
  Description of Artificial Sequence: Synthetic oligonucleotide
  Sense strand starting at position 3842 of SEQ ID NO: 1562378
cgggcauacaguuagauaa

SEQ ID NO: 1742504 - RNA, 19 nt, Artificial Sequence
  Description of Artificial Sequence: Synthetic oligonucleotide
  Antisense strand to SEQ ID NO: 1742503
uuaucuaacuguaugcccg

SEQ ID NO: 1742505 - RNA, 19 nt, Artificial Sequence
  Description of Artificial Sequence: Synthetic oligonucleotide
  Sense strand starting at position 3844 of SEQ ID NO: 1562378
ggcauacaguuagauaaau

SEQ ID NO: 1742506 - RNA, 19 nt, Artificial Sequence
  Description of Artificial Sequence: Synthetic oligonucleotide
  Antisense strand to SEQ ID NO: 1742505
auuuaucuaacuguaugcc

SEQ ID NO: 1742507 - RNA, 19 nt, Artificial Sequence
  Description of Artificial Sequence: Synthetic oligonucleotide
  Sense strand starting at position 3856 of SEQ ID NO: 1562378
gauaaaugugaagggaguu

SEQ ID NO: 1742508 - RNA, 19 nt, Artificial Sequence
  Description of Artificial Sequence: Synthetic oligonucleotide
  Antisense strand to SEQ ID NO: 1742507
aacucccuucacauuuauc

SEQ ID NO: 1742509 - RNA, 19 nt, Artificial Sequence
  Description of Artificial Sequence: Synthetic oligonucleotide
  Sense strand starting at position 3857 of SEQ ID NO: 1562378
auaaaugugaagggaguuu

SEQ ID NO: 1742510 - RNA, 19 nt, Artificial Sequence
  Description of Artificial Sequence: Synthetic oligonucleotide
  Antisense strand to SEQ ID NO: 1742509
aaacucccuucacauuuau

SEQ ID NO: 1742511 - RNA, 19 nt, Artificial Sequence
  Description of Artificial Sequence: Synthetic oligonucleotide
  Sense strand starting at position 3868 of SEQ ID NO: 1562378
gggaguuuauacggugaag

SEQ ID NO: 1742512 - RNA, 19 nt, Artificial Sequence
  Description of Artificial Sequence: Synthetic oligonucleotide
  Antisense strand to SEQ ID NO: 1742511
cuucaccguauaaacuccc

SEQ ID NO: 1742513 - RNA, 19 nt, Artificial Sequence
  Description of Artificial Sequence: Synthetic oligonucleotide
  Sense strand starting at position 3870 of SEQ ID NO: 1562378
gaguuuauacggugaagaa

SEQ ID NO: 1742514 - RNA, 19 nt, Artificial Sequence
  Description of Artificial Sequence: Synthetic oligonucleotide
  Antisense strand to SEQ ID NO: 1742513
uucuucaccguauaaacuc

SEQ ID NO: 1742515 - RNA, 19 nt, Artificial Sequence
  Description of Artificial Sequence: Synthetic oligonucleotide
  Sense strand starting at position 3871 of SEQ ID NO: 1562378
aguuuauacggugaagaag

SEQ ID NO: 1742516 - RNA, 19 nt, Artificial Sequence
  Description of Artificial Sequence: Synthetic oligonucleotide
  Antisense strand to SEQ ID NO: 1742515
cuucuucaccguauaaacu

SEQ ID NO: 1742517 - RNA, 19 nt, Artificial Sequence
  Description of Artificial Sequence: Synthetic oligonucleotide
  Sense strand starting at position 95 of SEQ ID NO: 1562379
cccauacuguucucuggua

SEQ ID NO: 1742518 - RNA, 19 nt, Artificial Sequence
  Description of Artificial Sequence: Synthetic oligonucleotide
  Antisense strand to SEQ ID NO: 1742517
uaccagagaacaguauggg

SEQ ID NO: 1742519 - RNA, 19 nt, Artificial Sequence
  Description of Artificial Sequence: Synthetic oligonucleotide
  Sense strand starting at position 97 of SEQ ID NO: 1562379
cauacuguucucugguagu

SEQ ID NO: 1742520 - RNA, 19 nt, Artificial Sequence
  Description of Artificial Sequence: Synthetic oligonucleotide
  Antisense strand to SEQ ID NO: 1742519
acuaccagagaacaguaug

SEQ ID NO: 1742521 - RNA, 19 nt, Artificial Sequence
  Description of Artificial Sequence: Synthetic oligonucleotide
  Sense strand starting at position 295 of SEQ ID NO: 1562379
ugacuucagcagcgugaaa

SEQ ID NO: 1742522 - RNA, 19 nt, Artificial Sequence
  Description of Artificial Sequence: Synthetic oligonucleotide
  Antisense strand to SEQ ID NO: 1742521
uuucacgcugcugaaguca

SEQ ID NO: 1742523 - RNA, 19 nt, Artificial Sequence
  Description of Artificial Sequence: Synthetic oligonucleotide
  Sense strand starting at position 332 of SEQ ID NO: 1562379
uuaguuguguuauccacua

SEQ ID NO: 1742524 - RNA, 19 nt, Artificial Sequence
  Description of Artificial Sequence: Synthetic oligonucleotide
  Antisense strand to SEQ ID NO: 1742523
uaguggauaacacaacuaa

SEQ ID NO: 1742525 - RNA, 19 nt, Artificial Sequence
  Description of Artificial Sequence: Synthetic oligonucleotide
  Sense strand starting at position 513 of SEQ ID NO: 1562379
ccaggcaaguccugaggaa

SEQ ID NO: 1742526 - RNA, 19 nt, Artificial Sequence
  Description of Artificial Sequence: Synthetic oligonucleotide
  Antisense strand to SEQ ID NO: 1742525
uuccucaggacuugccugg

SEQ ID NO: 1742527 - RNA, 19 nt, Artificial Sequence
  Description of Artificial Sequence: Synthetic oligonucleotide
  Sense strand starting at position 517 of SEQ ID NO: 1562379
gcaaguccugaggaauguu

SEQ ID NO: 1742528 - RNA, 19 nt, Artificial Sequence
  Description of Artificial Sequence: Synthetic oligonucleotide
  Antisense strand to SEQ ID NO: 1742527
aacauuccucaggacuugc

SEQ ID NO: 1742529 - RNA, 19 nt, Artificial Sequence
  Description of Artificial Sequence: Synthetic oligonucleotide
  Sense strand starting at position 550 of SEQ ID NO: 1562379
ggcgaauagaggcauguua

SEQ ID NO: 1742530 - RNA, 19 nt, Artificial Sequence
  Description of Artificial Sequence: Synthetic oligonucleotide
  Antisense strand to SEQ ID NO: 1742529
uaacaugccucuauucgcc

SEQ ID NO: 1742531 - RNA, 19 nt, Artificial Sequence
  Description of Artificial Sequence: Synthetic oligonucleotide
  Sense strand starting at position 552 of SEQ ID NO: 1562379
cgaauagaggcauguuaga

SEQ ID NO: 1742532 - RNA, 19 nt, Artificial Sequence
  Description of Artificial Sequence: Synthetic oligonucleotide
  Antisense strand to SEQ ID NO: 1742531
ucuaacaugccucuauucg

SEQ ID NO: 1742533 - RNA, 19 nt, Artificial Sequence
  Description of Artificial Sequence: Synthetic oligonucleotide
  Sense strand starting at position 572 of SEQ ID NO: 1562379
auuguaauaguaggcaaua

SEQ ID NO: 1742534 - RNA, 19 nt, Artificial Sequence
  Description of Artificial Sequence: Synthetic oligonucleotide
  Antisense strand to SEQ ID NO: 1742533
uauugccuacuauuacaau

SEQ ID NO: 1742535 - RNA, 19 nt, Artificial Sequence
  Description of Artificial Sequence: Synthetic oligonucleotide
  Sense strand starting at position 573 of SEQ ID NO: 1562379
uuguaauaguaggcaauaa

SEQ ID NO: 1742536 - RNA, 19 nt, Artificial Sequence
  Description of Artificial Sequence: Synthetic oligonucleotide
  Antisense strand to SEQ ID NO: 1742535
uuauugccuacuauuacaa

SEQ ID NO: 1742537 - RNA, 19 nt, Artificial Sequence
  Description of Artificial Sequence: Synthetic oligonucleotide
  Sense strand starting at position 633 of SEQ ID NO: 1562379
cucugagagcccugacagu

SEQ ID NO: 1742538 - RNA, 19 nt, Artificial Sequence
  Description of Artificial Sequence: Synthetic oligonucleotide
  Antisense strand to SEQ ID NO: 1742537
acugucagggcucucagag

SEQ ID NO: 1742539 - RNA, 19 nt, Artificial Sequence
  Description of Artificial Sequence: Synthetic oligonucleotide
  Sense strand starting at position 666 of SEQ ID NO: 1562379
uuccgaaagugucuuauua

SEQ ID NO: 1742540 - RNA, 19 nt, Artificial Sequence
  Description of Artificial Sequence: Synthetic oligonucleotide
  Antisense strand to SEQ ID NO: 1742539
uaauaagacacuuucggaa

SEQ ID NO: 1742541 - RNA, 19 nt, Artificial Sequence
  Description of Artificial Sequence: Synthetic oligonucleotide
  Sense strand starting at position 709 of SEQ ID NO: 1562379
ucccgugagcuguguuaac

SEQ ID NO: 1742542 - RNA, 19 nt, Artificial Sequence
  Description of Artificial Sequence: Synthetic oligonucleotide
  Antisense strand to SEQ ID NO: 1742541
guuaacacagcucacggga

SEQ ID NO: 1742543 - RNA, 19 nt, Artificial Sequence
  Description of Artificial Sequence: Synthetic oligonucleotide
  Sense strand starting at position 726 of SEQ ID NO: 1562379
acuguuaacuguguuccau

SEQ ID NO: 1742544 - RNA, 19 nt, Artificial Sequence
  Description of Artificial Sequence: Synthetic oligonucleotide
  Antisense strand to SEQ ID NO: 1742543
auggaacacaguuaacagu

SEQ ID NO: 1742545 - RNA, 19 nt, Artificial Sequence
  Description of Artificial Sequence: Synthetic oligonucleotide
  Sense strand starting at position 728 of SEQ ID NO: 1562379
uguuaacuguguuccauca

SEQ ID NO: 1742546 - RNA, 19 nt, Artificial Sequence
  Description of Artificial Sequence: Synthetic oligonucleotide
  Antisense strand to SEQ ID NO: 1742545
ugauggaacacaguuaaca

SEQ ID NO: 1742547 - RNA, 19 nt, Artificial Sequence
  Description of Artificial Sequence: Synthetic oligonucleotide
  Sense strand starting at position 791 of SEQ ID NO: 1562379
ggaagacccuucugaguug

SEQ ID NO: 1742548 - RNA, 19 nt, Artificial Sequence
  Description of Artificial Sequence: Synthetic oligonucleotide
  Antisense strand to SEQ ID NO: 1742547
caacucagaagggucuucc

SEQ ID NO: 1742549 - RNA, 19 nt, Artificial Sequence
  Description of Artificial Sequence: Synthetic oligonucleotide
  Sense strand starting at position 794 of SEQ ID NO: 1562379
agacccuucugaguugaau

SEQ ID NO: 1742550 - RNA, 19 nt, Artificial Sequence
  Description of Artificial Sequence: Synthetic oligonucleotide
  Antisense strand to SEQ ID NO: 1742549
auucaacucagaagggucu

SEQ ID NO: 1742551 - RNA, 19 nt, Artificial Sequence
  Description of Artificial Sequence: Synthetic oligonucleotide
  Sense strand starting at position 797 of SEQ ID NO: 1562379
cccuucugaguugaauuau

SEQ ID NO: 1742552 - RNA, 19 nt, Artificial Sequence
  Description of Artificial Sequence: Synthetic oligonucleotide
  Antisense strand to SEQ ID NO: 1742551
auaauucaacucagaaggg

SEQ ID NO: 1742553 - RNA, 19 nt, Artificial Sequence
  Description of Artificial Sequence: Synthetic oligonucleotide
  Sense strand starting at position 803 of SEQ ID NO: 1562379
ugaguugaauuauuggguu

SEQ ID NO: 1742554 - RNA, 19 nt, Artificial Sequence
  Description of Artificial Sequence: Synthetic oligonucleotide
  Antisense strand to SEQ ID NO: 1742553
aacccaauaauucaacuca

SEQ ID NO: 1742555 - RNA, 19 nt, Artificial Sequence
  Description of Artificial Sequence: Synthetic oligonucleotide
  Sense strand starting at position 1521 of SEQ ID NO: 1562379
cauccaaagcagugaguaa

SEQ ID NO: 1742556 - RNA, 19 nt, Artificial Sequence
  Description of Artificial Sequence: Synthetic oligonucleotide
  Antisense strand to SEQ ID NO: 1742555
uuacucacugcuuuggaug

SEQ ID NO: 1742557 - RNA, 19 nt, Artificial Sequence
  Description of Artificial Sequence: Synthetic oligonucleotide
  Sense strand starting at position 1546 of SEQ ID NO: 1562379
accacuuucgcuugcuaua

SEQ ID NO: 1742558 - RNA, 19 nt, Artificial Sequence
  Description of Artificial Sequence: Synthetic oligonucleotide
  Antisense strand to SEQ ID NO: 1742557
uauagcaagcgaaaguggu

SEQ ID NO: 1742559 - RNA, 19 nt, Artificial Sequence
  Description of Artificial Sequence: Synthetic oligonucleotide
  Sense strand starting at position 1603 of SEQ ID NO: 1562379
acaccugucggccaguuaa

SEQ ID NO: 1742560 - RNA, 19 nt, Artificial Sequence
  Description of Artificial Sequence: Synthetic oligonucleotide
  Antisense strand to SEQ ID NO: 1742559
uuaacuggccgacaggugu

SEQ ID NO: 1742561 - RNA, 19 nt, Artificial Sequence
  Description of Artificial Sequence: Synthetic oligonucleotide
  Sense strand starting at position 1716 of SEQ ID NO: 1562379
ggacauuggucugccugga

SEQ ID NO: 1742562 - RNA, 19 nt, Artificial Sequence
  Description of Artificial Sequence: Synthetic oligonucleotide
  Antisense strand to SEQ ID NO: 1742561
uccaggcagaccaaugucc

SEQ ID NO: 1742563 - RNA, 19 nt, Artificial Sequence
  Description of Artificial Sequence: Synthetic oligonucleotide
  Sense strand starting at position 1810 of SEQ ID NO: 1562379
agcaguagcugauugagau

SEQ ID NO: 1742564 - RNA, 19 nt, Artificial Sequence
  Description of Artificial Sequence: Synthetic oligonucleotide
  Antisense strand to SEQ ID NO: 1742563
aucucaaucagcuacugcu

SEQ ID NO: 1742565 - RNA, 19 nt, Artificial Sequence
  Description of Artificial Sequence: Synthetic oligonucleotide
  Sense strand starting at position 1811 of SEQ ID NO: 1562379
gcaguagcugauugagauc

SEQ ID NO: 1742566 - RNA, 19 nt, Artificial Sequence
  Description of Artificial Sequence: Synthetic oligonucleotide
  Antisense strand to SEQ ID NO: 1742565
gaucucaaucagcuacugc

SEQ ID NO: 1742567 - RNA, 19 nt, Artificial Sequence
  Description of Artificial Sequence: Synthetic oligonucleotide
  Sense strand starting at position 1826 of SEQ ID NO: 1562379
gaucauggcucagccagaa

SEQ ID NO: 1742568 - RNA, 19 nt, Artificial Sequence
  Description of Artificial Sequence: Synthetic oligonucleotide
  Antisense strand to SEQ ID NO: 1742567
uucuggcugagccaugauc

SEQ ID NO: 1742569 - RNA, 19 nt, Artificial Sequence
  Description of Artificial Sequence: Synthetic oligonucleotide
  Sense strand starting at position 2094 of SEQ ID NO: 1562379
gagucuuaucccuggcguc

SEQ ID NO: 1742570 - RNA, 19 nt, Artificial Sequence
  Description of Artificial Sequence: Synthetic oligonucleotide
  Antisense strand to SEQ ID NO: 1742569
gacgccagggauaagacuc

SEQ ID NO: 1742571 - RNA, 19 nt, Artificial Sequence
  Description of Artificial Sequence: Synthetic oligonucleotide
  Sense strand starting at position 2106 of SEQ ID NO: 1562379
uggcgucccuccuaauuua

SEQ ID NO: 1742572 - RNA, 19 nt, Artificial Sequence
  Description of Artificial Sequence: Synthetic oligonucleotide
  Antisense strand to SEQ ID NO: 1742571
uaaauuaggagggacgcca

SEQ ID NO: 1742573 - RNA, 19 nt, Artificial Sequence
  Description of Artificial Sequence: Synthetic oligonucleotide
  Sense strand starting at position 2146 of SEQ ID NO: 1562379
gcaguuaugcaggacccau

SEQ ID NO: 1742574 - RNA, 19 nt, Artificial Sequence
  Description of Artificial Sequence: Synthetic oligonucleotide
  Antisense strand to SEQ ID NO: 1742573
auggguccugcauaacugc

SEQ ID NO: 1742575 - RNA, 19 nt, Artificial Sequence
  Description of Artificial Sequence: Synthetic oligonucleotide
  Sense strand starting at position 2607 of SEQ ID NO: 1562379
agaggaaacuucgcuguga

SEQ ID NO: 1742576 - RNA, 19 nt, Artificial Sequence
  Description of Artificial Sequence: Synthetic oligonucleotide
  Antisense strand to SEQ ID NO: 1742575
ucacagcgaaguuuccucu

SEQ ID NO: 1742577 - RNA, 19 nt, Artificial Sequence
  Description of Artificial Sequence: Synthetic oligonucleotide
  Sense strand starting at position 2608 of SEQ ID NO: 1562379
gaggaaacuucgcugugag

SEQ ID NO: 1742578 - RNA, 19 nt, Artificial Sequence
  Description of Artificial Sequence: Synthetic oligonucleotide
  Antisense strand to SEQ ID NO: 1742577
cucacagcgaaguuuccuc

SEQ ID NO: 1742579 - RNA, 19 nt, Artificial Sequence
  Description of Artificial Sequence: Synthetic oligonucleotide
  Sense strand starting at position 2611 of SEQ ID NO: 1562379
gaaacuucgcugugagcac

SEQ ID NO: 1742580 - RNA, 19 nt, Artificial Sequence
  Description of Artificial Sequence: Synthetic oligonucleotide
  Antisense strand to SEQ ID NO: 1742579
gugcucacagcgaaguuuc

SEQ ID NO: 1742581 - RNA, 19 nt, Artificial Sequence
  Description of Artificial Sequence: Synthetic oligonucleotide
  Sense strand starting at position 2641 of SEQ ID NO: 1562379
ucagaauuagucuaaguca

SEQ ID NO: 1742582 - RNA, 19 nt, Artificial Sequence
  Description of Artificial Sequence: Synthetic oligonucleotide
  Antisense strand to SEQ ID NO: 1742581
ugacuuagacuaauucuga

SEQ ID NO: 1742583 - RNA, 19 nt, Artificial Sequence
  Description of Artificial Sequence: Synthetic oligonucleotide
  Sense strand starting at position 2670 of SEQ ID NO: 1562379
gagguagcuuacuaacuca

SEQ ID NO: 1742584 - RNA, 19 nt, Artificial Sequence
  Description of Artificial Sequence: Synthetic oligonucleotide
  Antisense strand to SEQ ID NO: 1742583
ugaguuaguaagcuaccuc

SEQ ID NO: 1742585 - RNA, 19 nt, Artificial Sequence
  Description of Artificial Sequence: Synthetic oligonucleotide
  Sense strand starting at position 2734 of SEQ ID NO: 1562379
acuccaaccgcugauaauu

SEQ ID NO: 1742586 - RNA, 19 nt, Artificial Sequence
  Description of Artificial Sequence: Synthetic oligonucleotide
  Antisense strand to SEQ ID NO: 1742585
aauuaucagcgguuggagu

SEQ ID NO: 1742587 - RNA, 19 nt, Artificial Sequence
  Description of Artificial Sequence: Synthetic oligonucleotide
  Sense strand starting at position 2742 of SEQ ID NO: 1562379
cgcugauaauucccuuaac

SEQ ID NO: 1742588 - RNA, 19 nt, Artificial Sequence
  Description of Artificial Sequence: Synthetic oligonucleotide
  Antisense strand to SEQ ID NO: 1742587
guuaagggaauuaucagcg

SEQ ID NO: 1742589 - RNA, 19 nt, Artificial Sequence
  Description of Artificial Sequence: Synthetic oligonucleotide
  Sense strand starting at position 2899 of SEQ ID NO: 1562379
aguaauugauacggagacu

SEQ ID NO: 1742590 - RNA, 19 nt, Artificial Sequence
  Description of Artificial Sequence: Synthetic oligonucleotide
  Antisense strand to SEQ ID NO: 1742589
agucuccguaucaauuacu

SEQ ID NO: 1742591 - RNA, 19 nt, Artificial Sequence
  Description of Artificial Sequence: Synthetic oligonucleotide
  Sense strand starting at position 3542 of SEQ ID NO: 1562379
accgccuggccgugauauu

SEQ ID NO: 1742592 - RNA, 19 nt, Artificial Sequence
  Description of Artificial Sequence: Synthetic oligonucleotide
  Antisense strand to SEQ ID NO: 1742591
aauaucacggccaggcggu

SEQ ID NO: 1742593 - RNA, 19 nt, Artificial Sequence
  Description of Artificial Sequence: Synthetic oligonucleotide
  Sense strand starting at position 3692 of SEQ ID NO: 1562379
agagacaacucgcaguuau

SEQ ID NO: 1742594 - RNA, 19 nt, Artificial Sequence
  Description of Artificial Sequence: Synthetic oligonucleotide
  Antisense strand to SEQ ID NO: 1742593
auaacugcgaguugucucu

SEQ ID NO: 1742595 - RNA, 19 nt, Artificial Sequence
  Description of Artificial Sequence: Synthetic oligonucleotide
  Sense strand starting at position 3721 of SEQ ID NO: 1562379
ugacuuaugcccuacagga

SEQ ID NO: 1742596 - RNA, 19 nt, Artificial Sequence
  Description of Artificial Sequence: Synthetic oligonucleotide
  Antisense strand to SEQ ID NO: 1742595
uccuguagggcauaaguca

SEQ ID NO: 1742597 - RNA, 19 nt, Artificial Sequence
  Description of Artificial Sequence: Synthetic oligonucleotide
  Sense strand starting at position 40 of SEQ ID NO: 1562380
gcacuugguucuccucuau

SEQ ID NO: 1742598 - RNA, 19 nt, Artificial Sequence
  Description of Artificial Sequence: Synthetic oligonucleotide
  Antisense strand to SEQ ID NO: 1742597
auagaggagaaccaagugc

SEQ ID NO: 1742599 - RNA, 19 nt, Artificial Sequence
  Description of Artificial Sequence: Synthetic oligonucleotide
  Sense strand starting at position 108 of SEQ ID NO: 1562380
ggcugugcugaggagucua

SEQ ID NO: 1742600 - RNA, 19 nt, Artificial Sequence
  Description of Artificial Sequence: Synthetic oligonucleotide
  Antisense strand to SEQ ID NO: 1742599
uagacuccucagcacagcc

SEQ ID NO: 1742601 - RNA, 19 nt, Artificial Sequence
  Description of Artificial Sequence: Synthetic oligonucleotide
  Sense strand starting at position 201 of SEQ ID NO: 1562380
ggauuugucugguggcaga

SEQ ID NO: 1742602 - RNA, 19 nt, Artificial Sequence
  Description of Artificial Sequence: Synthetic oligonucleotide
  Antisense strand to SEQ ID NO: 1742601
ucugccaccagacaaaucc

SEQ ID NO: 1742603 - RNA, 19 nt, Artificial Sequence
  Description of Artificial Sequence: Synthetic oligonucleotide
  Sense strand starting at position 254 of SEQ ID NO: 1562380
cagauauauuuccagacgu

SEQ ID NO: 1742604 - RNA, 19 nt, Artificial Sequence
  Description of Artificial Sequence: Synthetic oligonucleotide
  Antisense strand to SEQ ID NO: 1742603
acgucuggaaauauaucug

SEQ ID NO: 1742605 - RNA, 19 nt, Artificial Sequence
  Description of Artificial Sequence: Synthetic oligonucleotide
  Sense strand starting at position 292 of SEQ ID NO: 1562380
ccugauacauuugaugcau

SEQ ID NO: 1742606 - RNA, 19 nt, Artificial Sequence
  Description of Artificial Sequence: Synthetic oligonucleotide
  Antisense strand to SEQ ID NO: 1742605
augcaucaaauguaucagg

SEQ ID NO: 1742607 - RNA, 19 nt, Artificial Sequence
  Description of Artificial Sequence: Synthetic oligonucleotide
  Sense strand starting at position 294 of SEQ ID NO: 1562380
ugauacauuugaugcauaa

SEQ ID NO: 1742608 - RNA, 19 nt, Artificial Sequence
  Description of Artificial Sequence: Synthetic oligonucleotide
  Antisense strand to SEQ ID NO: 1742607
uuaugcaucaaauguauca

SEQ ID NO: 1742609 - RNA, 19 nt, Artificial Sequence
  Description of Artificial Sequence: Synthetic oligonucleotide
  Sense strand starting at position 314 of SEQ ID NO: 1562380
agcugaggucaauguccau

SEQ ID NO: 1742610 - RNA, 19 nt, Artificial Sequence
  Description of Artificial Sequence: Synthetic oligonucleotide
  Antisense strand to SEQ ID NO: 1742609
auggacauugaccucagcu

SEQ ID NO: 1742611 - RNA, 19 nt, Artificial Sequence
  Description of Artificial Sequence: Synthetic oligonucleotide
  Sense strand starting at position 397 of SEQ ID NO: 1562380
gcugcauuagguuggagau

SEQ ID NO: 1742612 - RNA, 19 nt, Artificial Sequence
  Description of Artificial Sequence: Synthetic oligonucleotide
  Antisense strand to SEQ ID NO: 1742611
aucuccaaccuaaugcagc

SEQ ID NO: 1742613 - RNA, 19 nt, Artificial Sequence
  Description of Artificial Sequence: Synthetic oligonucleotide
  Sense strand starting at position 433 of SEQ ID NO: 1562380
guaggaaugucagggagac

SEQ ID NO: 1742614 - RNA, 19 nt, Artificial Sequence
  Description of Artificial Sequence: Synthetic oligonucleotide
  Antisense strand to SEQ ID NO: 1742613
gucucccugacauuccuac

SEQ ID NO: 1742615 - RNA, 19 nt, Artificial Sequence
  Description of Artificial Sequence: Synthetic oligonucleotide
  Sense strand starting at position 483 of SEQ ID NO: 1562380
agaagagaugugggcuaga

SEQ ID NO: 1742616 - RNA, 19 nt, Artificial Sequence
  Description of Artificial Sequence: Synthetic oligonucleotide
  Antisense strand to SEQ ID NO: 1742615
ucuagcccacaucucuucu

SEQ ID NO: 1742617 - RNA, 19 nt, Artificial Sequence
  Description of Artificial Sequence: Synthetic oligonucleotide
  Sense strand starting at position 977 of SEQ ID NO: 1562380
gagagauauaaaugugcga

SEQ ID NO: 1742618 - RNA, 19 nt, Artificial Sequence
  Description of Artificial Sequence: Synthetic oligonucleotide
  Antisense strand to SEQ ID NO: 1742617
ucgcacauuuauaucucuc

SEQ ID NO: 1742619 - RNA, 19 nt, Artificial Sequence
  Description of Artificial Sequence: Synthetic oligonucleotide
  Sense strand starting at position 979 of SEQ ID NO: 1562380
gagauauaaaugugcgagu

SEQ ID NO: 1742620 - RNA, 19 nt, Artificial Sequence
  Description of Artificial Sequence: Synthetic oligonucleotide
  Antisense strand to SEQ ID NO: 1742619
acucgcacauuuauaucuc

SEQ ID NO: 1742621 - RNA, 19 nt, Artificial Sequence
  Description of Artificial Sequence: Synthetic oligonucleotide
  Sense strand starting at position 981 of SEQ ID NO: 1562380
gauauaaaugugcgaguca

SEQ ID NO: 1742622 - RNA, 19 nt, Artificial Sequence
  Description of Artificial Sequence: Synthetic oligonucleotide
  Antisense strand to SEQ ID NO: 1742621
ugacucgcacauuuauauc

SEQ ID NO: 1742623 - RNA, 19 nt, Artificial Sequence
  Description of Artificial Sequence: Synthetic oligonucleotide
  Sense strand starting at position 990 of SEQ ID NO: 1562380
gugcgagucaugggccuau

SEQ ID NO: 1742624 - RNA, 19 nt, Artificial Sequence
  Description of Artificial Sequence: Synthetic oligonucleotide
  Antisense strand to SEQ ID NO: 1742623
auaggcccaugacucgcac

SEQ ID NO: 1742625 - RNA, 19 nt, Artificial Sequence
  Description of Artificial Sequence: Synthetic oligonucleotide
  Sense strand starting at position 1002 of SEQ ID NO: 1562380
ggccuauagcccguguuua

SEQ ID NO: 1742626 - RNA, 19 nt, Artificial Sequence
  Description of Artificial Sequence: Synthetic oligonucleotide
  Antisense strand to SEQ ID NO: 1742625
uaaacacgggcuauaggcc

SEQ ID NO: 1742627 - RNA, 19 nt, Artificial Sequence
  Description of Artificial Sequence: Synthetic oligonucleotide
  Sense strand starting at position 1077 of SEQ ID NO: 1562380
ggccuugggcaucacaauu

SEQ ID NO: 1742628 - RNA, 19 nt, Artificial Sequence
  Description of Artificial Sequence: Synthetic oligonucleotide
  Antisense strand to SEQ ID NO: 1742627
aauugugaugcccaaggcc

SEQ ID NO: 1742629 - RNA, 19 nt, Artificial Sequence
  Description of Artificial Sequence: Synthetic oligonucleotide
  Sense strand starting at position 1207 of SEQ ID NO: 1562380
ggaggugaccaugguguua

SEQ ID NO: 1742630 - RNA, 19 nt, Artificial Sequence
  Description of Artificial Sequence: Synthetic oligonucleotide
  Antisense strand to SEQ ID NO: 1742629
uaacaccauggucaccucc

SEQ ID NO: 1742631 - RNA, 19 nt, Artificial Sequence
  Description of Artificial Sequence: Synthetic oligonucleotide
  Sense strand starting at position 1237 of SEQ ID NO: 1562380
gcagucaauuuagaggaca

SEQ ID NO: 1742632 - RNA, 19 nt, Artificial Sequence
  Description of Artificial Sequence: Synthetic oligonucleotide
  Antisense strand to SEQ ID NO: 1742631
uguccucuaaauugacugc

SEQ ID NO: 1742633 - RNA, 19 nt, Artificial Sequence
  Description of Artificial Sequence: Synthetic oligonucleotide
  Sense strand starting at position 1471 of SEQ ID NO: 1562380
aacugauagucuccagaag

SEQ ID NO: 1742634 - RNA, 19 nt, Artificial Sequence
  Description of Artificial Sequence: Synthetic oligonucleotide
  Antisense strand to SEQ ID NO: 1742633
cuucuggagacuaucaguu

SEQ ID NO: 1742635 - RNA, 19 nt, Artificial Sequence
  Description of Artificial Sequence: Synthetic oligonucleotide
  Sense strand starting at position 1483 of SEQ ID NO: 1562380
ccagaagggucagaugaca

SEQ ID NO: 1742636 - RNA, 19 nt, Artificial Sequence
  Description of Artificial Sequence: Synthetic oligonucleotide
  Antisense strand to SEQ ID NO: 1742635
ugucaucugacccuucugg

SEQ ID NO: 1742637 - RNA, 19 nt, Artificial Sequence
  Description of Artificial Sequence: Synthetic oligonucleotide
  Sense strand starting at position 2144 of SEQ ID NO: 1562380
ggcgccgucaagucaaaua

SEQ ID NO: 1742638 - RNA, 19 nt, Artificial Sequence
  Description of Artificial Sequence: Synthetic oligonucleotide
  Antisense strand to SEQ ID NO: 1742637
uauuugacuugacggcgcc

SEQ ID NO: 1742639 - RNA, 19 nt, Artificial Sequence
  Description of Artificial Sequence: Synthetic oligonucleotide
  Sense strand starting at position 2192 of SEQ ID NO: 1562380
cugagaucugcaugcugga

SEQ ID NO: 1742640 - RNA, 19 nt, Artificial Sequence
  Description of Artificial Sequence: Synthetic oligonucleotide
  Antisense strand to SEQ ID NO: 1742639
uccagcaugcagaucucag

SEQ ID NO: 1742641 - RNA, 19 nt, Artificial Sequence
  Description of Artificial Sequence: Synthetic oligonucleotide
  Sense strand starting at position 2330 of SEQ ID NO: 1562380
guuugagggucuucuuuac

SEQ ID NO: 1742642 - RNA, 19 nt, Artificial Sequence
  Description of Artificial Sequence: Synthetic oligonucleotide
  Antisense strand to SEQ ID NO: 1742641
guaaagaagacccucaaac

SEQ ID NO: 1742643 - RNA, 19 nt, Artificial Sequence
  Description of Artificial Sequence: Synthetic oligonucleotide
  Sense strand starting at position 2378 of SEQ ID NO: 1562380
ccaagucaucuuuacgcaa

SEQ ID NO: 1742644 - RNA, 19 nt, Artificial Sequence
  Description of Artificial Sequence: Synthetic oligonucleotide
  Antisense strand to SEQ ID NO: 1742643
uugcguaaagaugacuugg

SEQ ID NO: 1742645 - RNA, 19 nt, Artificial Sequence
  Description of Artificial Sequence: Synthetic oligonucleotide
  Sense strand starting at position 2381 of SEQ ID NO: 1562380
agucaucuuuacgcaaaua

SEQ ID NO: 1742646 - RNA, 19 nt, Artificial Sequence
  Description of Artificial Sequence: Synthetic oligonucleotide
  Antisense strand to SEQ ID NO: 1742645
uauuugcguaaagaugacu

SEQ ID NO: 1742647 - RNA, 19 nt, Artificial Sequence
  Description of Artificial Sequence: Synthetic oligonucleotide
  Sense strand starting at position 2446 of SEQ ID NO: 1562380
uuaacuugauuagugguua

SEQ ID NO: 1742648 - RNA, 19 nt, Artificial Sequence
  Description of Artificial Sequence: Synthetic oligonucleotide
  Antisense strand to SEQ ID NO: 1742647
uaaccacuaaucaaguuaa

SEQ ID NO: 1742649 - RNA, 19 nt, Artificial Sequence
  Description of Artificial Sequence: Synthetic oligonucleotide
  Sense strand starting at position 2457 of SEQ ID NO: 1562380
agugguuagacgggaagau

SEQ ID NO: 1742650 - RNA, 19 nt, Artificial Sequence
  Description of Artificial Sequence: Synthetic oligonucleotide
  Antisense strand to SEQ ID NO: 1742649
aucuucccgucuaaccacu

SEQ ID NO: 1742651 - RNA, 19 nt, Artificial Sequence
  Description of Artificial Sequence: Synthetic oligonucleotide
  Sense strand starting at position 2487 of SEQ ID NO: 1562380
cagugucuuggguaaugca

SEQ ID NO: 1742652 - RNA, 19 nt, Artificial Sequence
  Description of Artificial Sequence: Synthetic oligonucleotide
  Antisense strand to SEQ ID NO: 1742651
ugcauuacccaagacacug

SEQ ID NO: 1742653 - RNA, 19 nt, Artificial Sequence
  Description of Artificial Sequence: Synthetic oligonucleotide
  Sense strand starting at position 2517 of SEQ ID NO: 1562380
gaugucugacgcuagaaca

SEQ ID NO: 1742654 - RNA, 19 nt, Artificial Sequence
  Description of Artificial Sequence: Synthetic oligonucleotide
  Antisense strand to SEQ ID NO: 1742653
uguucuagcgucagacauc

SEQ ID NO: 1742655 - RNA, 19 nt, Artificial Sequence
  Description of Artificial Sequence: Synthetic oligonucleotide
  Sense strand starting at position 2658 of SEQ ID NO: 1562380
uacgcucuccaauggaaga

SEQ ID NO: 1742656 - RNA, 19 nt, Artificial Sequence
  Description of Artificial Sequence: Synthetic oligonucleotide
  Antisense strand to SEQ ID NO: 1742655
ucuuccauuggagagcgua

SEQ ID NO: 1742657 - RNA, 19 nt, Artificial Sequence
  Description of Artificial Sequence: Synthetic oligonucleotide
  Sense strand starting at position 2885 of SEQ ID NO: 1562380
gccucuuuccuauggaauu

SEQ ID NO: 1742658 - RNA, 19 nt, Artificial Sequence
  Description of Artificial Sequence: Synthetic oligonucleotide
  Antisense strand to SEQ ID NO: 1742657
aauuccauaggaaagaggc

SEQ ID NO: 1742659 - RNA, 19 nt, Artificial Sequence
  Description of Artificial Sequence: Synthetic oligonucleotide
  Sense strand starting at position 3032 of SEQ ID NO: 1562380
agagaaagguuugagaaac

SEQ ID NO: 1742660 - RNA, 19 nt, Artificial Sequence
  Description of Artificial Sequence: Synthetic oligonucleotide
  Antisense strand to SEQ ID NO: 1742659
guuucucaaaccuuucucu

SEQ ID NO: 1742661 - RNA, 19 nt, Artificial Sequence
  Description of Artificial Sequence: Synthetic oligonucleotide
  Sense strand starting at position 3107 of SEQ ID NO: 1562380
cugggagcuucucaggauu

SEQ ID NO: 1742662 - RNA, 19 nt, Artificial Sequence
  Description of Artificial Sequence: Synthetic oligonucleotide
  Antisense strand to SEQ ID NO: 1742661
aauccugagaagcucccag

SEQ ID NO: 1742663 - RNA, 19 nt, Artificial Sequence
  Description of Artificial Sequence: Synthetic oligonucleotide
  Sense strand starting at position 3110 of SEQ ID NO: 1562380
ggagcuucucaggauugca

SEQ ID NO: 1742664 - RNA, 19 nt, Artificial Sequence
  Description of Artificial Sequence: Synthetic oligonucleotide
  Antisense strand to SEQ ID NO: 1742663
ugcaauccugagaagcucc

SEQ ID NO: 1742665 - RNA, 19 nt, Artificial Sequence
  Description of Artificial Sequence: Synthetic oligonucleotide
  Sense strand starting at position 3181 of SEQ ID NO: 1562380
uuccuaggaucuuggagau

SEQ ID NO: 1742666 - RNA, 19 nt, Artificial Sequence
  Description of Artificial Sequence: Synthetic oligonucleotide
  Antisense strand to SEQ ID NO: 1742665
aucuccaagauccuaggaa

SEQ ID NO: 1742667 - RNA, 19 nt, Artificial Sequence
  Description of Artificial Sequence: Synthetic oligonucleotide
  Sense strand starting at position 3290 of SEQ ID NO: 1562380
ggaguuggaucccugaguc

SEQ ID NO: 1742668 - RNA, 19 nt, Artificial Sequence
  Description of Artificial Sequence: Synthetic oligonucleotide
  Antisense strand to SEQ ID NO: 1742667
gacucagggauccaacucc

SEQ ID NO: 1742669 - RNA, 19 nt, Artificial Sequence
  Description of Artificial Sequence: Synthetic oligonucleotide
  Sense strand starting at position 3314 of SEQ ID NO: 1562380
ccuuaaacugguugcuaca

SEQ ID NO: 1742670 - RNA, 19 nt, Artificial Sequence
  Description of Artificial Sequence: Synthetic oligonucleotide
  Antisense strand to SEQ ID NO: 1742669
uguagcaaccaguuuaagg

SEQ ID NO: 1742671 - RNA, 19 nt, Artificial Sequence
  Description of Artificial Sequence: Synthetic oligonucleotide
  Sense strand starting at position 3589 of SEQ ID NO: 1562380
aagcgauacgccuguuuag

SEQ ID NO: 1742672 - RNA, 19 nt, Artificial Sequence
  Description of Artificial Sequence: Synthetic oligonucleotide
  Antisense strand to SEQ ID NO: 1742671
cuaaacaggcguaucgcuu

SEQ ID NO: 1742673 - RNA, 19 nt, Artificial Sequence
  Description of Artificial Sequence: Synthetic oligonucleotide
  Sense strand starting at position 3639 of SEQ ID NO: 1562380
gcaauugcuccgggccaga

SEQ ID NO: 1742674 - RNA, 19 nt, Artificial Sequence
  Description of Artificial Sequence: Synthetic oligonucleotide
  Antisense strand to SEQ ID NO: 1742673
ucuggcccggagcaauugc

SEQ ID NO: 1742675 - RNA, 19 nt, Artificial Sequence
  Description of Artificial Sequence: Synthetic oligonucleotide
  Sense strand starting at position 3813 of SEQ ID NO: 1562380
cuugaagcaucuuuguguu

SEQ ID NO: 1742676 - RNA, 19 nt, Artificial Sequence
  Description of Artificial Sequence: Synthetic oligonucleotide
  Antisense strand to SEQ ID NO: 1742675
aacacaaagaugcuucaag

SEQ ID NO: 1742677 - RNA, 19 nt, Artificial Sequence
  Description of Artificial Sequence: Synthetic oligonucleotide
  Sense strand starting at position 238 of SEQ ID NO: 1562381
gggaccucuucccagcaga

SEQ ID NO: 1742678 - RNA, 19 nt, Artificial Sequence
  Description of Artificial Sequence: Synthetic oligonucleotide
  Antisense strand to SEQ ID NO: 1742677
ucugcugggaagagguccc

SEQ ID NO: 1742679 - RNA, 19 nt, Artificial Sequence
  Description of Artificial Sequence: Synthetic oligonucleotide
  Sense strand starting at position 378 of SEQ ID NO: 1562381
ggaggccacucuugguaaa

SEQ ID NO: 1742680 - RNA, 19 nt, Artificial Sequence
  Description of Artificial Sequence: Synthetic oligonucleotide
  Antisense strand to SEQ ID NO: 1742679
uuuaccaagaguggccucc

SEQ ID NO: 1742681 - RNA, 19 nt, Artificial Sequence
  Description of Artificial Sequence: Synthetic oligonucleotide
  Sense strand starting at position 380 of SEQ ID NO: 1562381
aggccacucuugguaaagu

SEQ ID NO: 1742682 - RNA, 19 nt, Artificial Sequence
  Description of Artificial Sequence: Synthetic oligonucleotide
  Antisense strand to SEQ ID NO: 1742681
acuuuaccaagaguggccu

SEQ ID NO: 1742683 - RNA, 19 nt, Artificial Sequence
  Description of Artificial Sequence: Synthetic oligonucleotide
  Sense strand starting at position 451 of SEQ ID NO: 1562381
gggcuucacucauggugaa

SEQ ID NO: 1742684 - RNA, 19 nt, Artificial Sequence
  Description of Artificial Sequence: Synthetic oligonucleotide
  Antisense strand to SEQ ID NO: 1742683
uucaccaugagugaagccc

SEQ ID NO: 1742685 - RNA, 19 nt, Artificial Sequence
  Description of Artificial Sequence: Synthetic oligonucleotide
  Sense strand starting at position 505 of SEQ ID NO: 1562381
gcagcucauuucugugaag

SEQ ID NO: 1742686 - RNA, 19 nt, Artificial Sequence
  Description of Artificial Sequence: Synthetic oligonucleotide
  Antisense strand to SEQ ID NO: 1742685
cuucacagaaaugagcugc

SEQ ID NO: 1742687 - RNA, 19 nt, Artificial Sequence
  Description of Artificial Sequence: Synthetic oligonucleotide
  Sense strand starting at position 508 of SEQ ID NO: 1562381
gcucauuucugugaagccu

SEQ ID NO: 1742688 - RNA, 19 nt, Artificial Sequence
  Description of Artificial Sequence: Synthetic oligonucleotide
  Antisense strand to SEQ ID NO: 1742687
aggcuucacagaaaugagc

SEQ ID NO: 1742689 - RNA, 19 nt, Artificial Sequence
  Description of Artificial Sequence: Synthetic oligonucleotide
  Sense strand starting at position 516 of SEQ ID NO: 1562381
cugugaagccuccagaauc

SEQ ID NO: 1742690 - RNA, 19 nt, Artificial Sequence
  Description of Artificial Sequence: Synthetic oligonucleotide
  Antisense strand to SEQ ID NO: 1742689
gauucuggaggcuucacag

SEQ ID NO: 1742691 - RNA, 19 nt, Artificial Sequence
  Description of Artificial Sequence: Synthetic oligonucleotide
  Sense strand starting at position 1322 of SEQ ID NO: 1562381
uggagauggaaucgcugua

SEQ ID NO: 1742692 - RNA, 19 nt, Artificial Sequence
  Description of Artificial Sequence: Synthetic oligonucleotide
  Antisense strand to SEQ ID NO: 1742691
uacagcgauuccaucucca

SEQ ID NO: 1742693 - RNA, 19 nt, Artificial Sequence
  Description of Artificial Sequence: Synthetic oligonucleotide
  Sense strand starting at position 1715 of SEQ ID NO: 1562381
gagagugcuucccuccaaa

SEQ ID NO: 1742694 - RNA, 19 nt, Artificial Sequence
  Description of Artificial Sequence: Synthetic oligonucleotide
  Antisense strand to SEQ ID NO: 1742693
uuuggagggaagcacucuc

SEQ ID NO: 1742695 - RNA, 19 nt, Artificial Sequence
  Description of Artificial Sequence: Synthetic oligonucleotide
  Sense strand starting at position 1837 of SEQ ID NO: 1562381
cugggucacgucuagaaac

SEQ ID NO: 1742696 - RNA, 19 nt, Artificial Sequence
  Description of Artificial Sequence: Synthetic oligonucleotide
  Antisense strand to SEQ ID NO: 1742695
guuucuagacgugacccag

SEQ ID NO: 1742697 - RNA, 19 nt, Artificial Sequence
  Description of Artificial Sequence: Synthetic oligonucleotide
  Sense strand starting at position 1839 of SEQ ID NO: 1562381
gggucacgucuagaaaccu

SEQ ID NO: 1742698 - RNA, 19 nt, Artificial Sequence
  Description of Artificial Sequence: Synthetic oligonucleotide
  Antisense strand to SEQ ID NO: 1742697
agguuucuagacgugaccc

SEQ ID NO: 1742699 - RNA, 19 nt, Artificial Sequence
  Description of Artificial Sequence: Synthetic oligonucleotide
  Sense strand starting at position 1873 of SEQ ID NO: 1562381
gucguaaaguccugacacu

SEQ ID NO: 1742700 - RNA, 19 nt, Artificial Sequence
  Description of Artificial Sequence: Synthetic oligonucleotide
  Antisense strand to SEQ ID NO: 1742699
agugucaggacuuuacgac

SEQ ID NO: 1742701 - RNA, 19 nt, Artificial Sequence
  Description of Artificial Sequence: Synthetic oligonucleotide
  Sense strand starting at position 1874 of SEQ ID NO: 1562381
ucguaaaguccugacacuu

SEQ ID NO: 1742702 - RNA, 19 nt, Artificial Sequence
  Description of Artificial Sequence: Synthetic oligonucleotide
  Antisense strand to SEQ ID NO: 1742701
aagugucaggacuuuacga

SEQ ID NO: 1742703 - RNA, 19 nt, Artificial Sequence
  Description of Artificial Sequence: Synthetic oligonucleotide
  Sense strand starting at position 2461 of SEQ ID NO: 1562381
uccuguuaacuagggacau

SEQ ID NO: 1742704 - RNA, 19 nt, Artificial Sequence
  Description of Artificial Sequence: Synthetic oligonucleotide
  Antisense strand to SEQ ID NO: 1742703
augucccuaguuaacagga

SEQ ID NO: 1742705 - RNA, 19 nt, Artificial Sequence
  Description of Artificial Sequence: Synthetic oligonucleotide
  Sense strand starting at position 2462 of SEQ ID NO: 1562381
ccuguuaacuagggacauu

SEQ ID NO: 1742706 - RNA, 19 nt, Artificial Sequence
  Description of Artificial Sequence: Synthetic oligonucleotide
  Antisense strand to SEQ ID NO: 1742705
aaugucccuaguuaacagg

SEQ ID NO: 1742707 - RNA, 19 nt, Artificial Sequence
  Description of Artificial Sequence: Synthetic oligonucleotide
  Sense strand starting at position 2989 of SEQ ID NO: 1562381
aaagaugucuugcagaaau

SEQ ID NO: 1742708 - RNA, 19 nt, Artificial Sequence
  Description of Artificial Sequence: Synthetic oligonucleotide
  Antisense strand to SEQ ID NO: 1742707
auuucugcaagacaucuuu

SEQ ID NO: 1742709 - RNA, 19 nt, Artificial Sequence
  Description of Artificial Sequence: Synthetic oligonucleotide
  Sense strand starting at position 3016 of SEQ ID NO: 1562381
agaaauccaugagaaauac

SEQ ID NO: 1742710 - RNA, 19 nt, Artificial Sequence
  Description of Artificial Sequence: Synthetic oligonucleotide
  Antisense strand to SEQ ID NO: 1742709
guauuucucauggauuucu

SEQ ID NO: 1742711 - RNA, 19 nt, Artificial Sequence
  Description of Artificial Sequence: Synthetic oligonucleotide
  Sense strand starting at position 3084 of SEQ ID NO: 1562381
gucauaaccuguugauuua

SEQ ID NO: 1742712 - RNA, 19 nt, Artificial Sequence
  Description of Artificial Sequence: Synthetic oligonucleotide
  Antisense strand to SEQ ID NO: 1742711
uaaaucaacagguuaugac

SEQ ID NO: 1742713 - RNA, 19 nt, Artificial Sequence
  Description of Artificial Sequence: Synthetic oligonucleotide
  Sense strand starting at position 3117 of SEQ ID NO: 1562381
gaauauuaacgcugugaaa

SEQ ID NO: 1742714 - RNA, 19 nt, Artificial Sequence
  Description of Artificial Sequence: Synthetic oligonucleotide
  Antisense strand to SEQ ID NO: 1742713
uuucacagcguuaauauuc

SEQ ID NO: 1742715 - RNA, 19 nt, Artificial Sequence
  Description of Artificial Sequence: Synthetic oligonucleotide
  Sense strand starting at position 3119 of SEQ ID NO: 1562381
auauuaacgcugugaaaca

SEQ ID NO: 1742716 - RNA, 19 nt, Artificial Sequence
  Description of Artificial Sequence: Synthetic oligonucleotide
  Antisense strand to SEQ ID NO: 1742715
uguuucacagcguuaauau

SEQ ID NO: 1742717 - RNA, 19 nt, Artificial Sequence
  Description of Artificial Sequence: Synthetic oligonucleotide
  Sense strand starting at position 3205 of SEQ ID NO: 1562381
aauauagaugcuugucagu

SEQ ID NO: 1742718 - RNA, 19 nt, Artificial Sequence
  Description of Artificial Sequence: Synthetic oligonucleotide
  Antisense strand to SEQ ID NO: 1742717
acugacaagcaucuauauu

SEQ ID NO: 1742719 - RNA, 19 nt, Artificial Sequence
  Description of Artificial Sequence: Synthetic oligonucleotide
  Sense strand starting at position 3211 of SEQ ID NO: 1562381
gaugcuugucagugggcau

SEQ ID NO: 1742720 - RNA, 19 nt, Artificial Sequence
  Description of Artificial Sequence: Synthetic oligonucleotide
  Antisense strand to SEQ ID NO: 1742719
augcccacugacaagcauc

SEQ ID NO: 1742721 - RNA, 19 nt, Artificial Sequence
  Description of Artificial Sequence: Synthetic oligonucleotide
  Sense strand starting at position 3212 of SEQ ID NO: 1562381
augcuugucagugggcauu

SEQ ID NO: 1742722 - RNA, 19 nt, Artificial Sequence
  Description of Artificial Sequence: Synthetic oligonucleotide
  Antisense strand to SEQ ID NO: 1742721
aaugcccacugacaagcau

SEQ ID NO: 1742723 - RNA, 19 nt, Artificial Sequence
  Description of Artificial Sequence: Synthetic oligonucleotide
  Sense strand starting at position 3266 of SEQ ID NO: 1562381
ucaagagucuccuuaagaa

SEQ ID NO: 1742724 - RNA, 19 nt, Artificial Sequence
  Description of Artificial Sequence: Synthetic oligonucleotide
  Antisense strand to SEQ ID NO: 1742723
uucuuaaggagacucuuga

SEQ ID NO: 1742725 - RNA, 19 nt, Artificial Sequence
  Description of Artificial Sequence: Synthetic oligonucleotide
  Sense strand starting at position 3468 of SEQ ID NO: 1562381
cuaagaauucgccaggcau

SEQ ID NO: 1742726 - RNA, 19 nt, Artificial Sequence
  Description of Artificial Sequence: Synthetic oligonucleotide
  Antisense strand to SEQ ID NO: 1742725
augccuggcgaauucuuag

SEQ ID NO: 1742727 - RNA, 19 nt, Artificial Sequence
  Description of Artificial Sequence: Synthetic oligonucleotide
  Sense strand starting at position 3494 of SEQ ID NO: 1562381
cgcgauaugguccaggcua

SEQ ID NO: 1742728 - RNA, 19 nt, Artificial Sequence
  Description of Artificial Sequence: Synthetic oligonucleotide
  Antisense strand to SEQ ID NO: 1742727
uagccuggaccauaucgcg

SEQ ID NO: 1742729 - RNA, 19 nt, Artificial Sequence
  Description of Artificial Sequence: Synthetic oligonucleotide
  Sense strand starting at position 3496 of SEQ ID NO: 1562381
cgauaugguccaggcuacu

SEQ ID NO: 1742730 - RNA, 19 nt, Artificial Sequence
  Description of Artificial Sequence: Synthetic oligonucleotide
  Antisense strand to SEQ ID NO: 1742729
aguagccuggaccauaucg

SEQ ID NO: 1742731 - RNA, 19 nt, Artificial Sequence
  Description of Artificial Sequence: Synthetic oligonucleotide
  Sense strand starting at position 3740 of SEQ ID NO: 1562381
accugugaauggguuacau

SEQ ID NO: 1742732 - RNA, 19 nt, Artificial Sequence
  Description of Artificial Sequence: Synthetic oligonucleotide
  Antisense strand to SEQ ID NO: 1742731
auguaacccauucacaggu

SEQ ID NO: 1742733 - RNA, 19 nt, Artificial Sequence
  Description of Artificial Sequence: Synthetic oligonucleotide
  Sense strand starting at position 3825 of SEQ ID NO: 1562381
augaaauguucucugucaa

SEQ ID NO: 1742734 - RNA, 19 nt, Artificial Sequence
  Description of Artificial Sequence: Synthetic oligonucleotide
  Antisense strand to SEQ ID NO: 1742733
uugacagagaacauuucau

SEQ ID NO: 1742735 - RNA, 19 nt, Artificial Sequence
  Description of Artificial Sequence: Synthetic oligonucleotide
  Sense strand starting at position 3826 of SEQ ID NO: 1562381
ugaaauguucucugucaag

SEQ ID NO: 1742736 - RNA, 19 nt, Artificial Sequence
  Description of Artificial Sequence: Synthetic oligonucleotide
  Antisense strand to SEQ ID NO: 1742735
cuugacagagaacauuuca

SEQ ID NO: 1742737 - RNA, 19 nt, Artificial Sequence
  Description of Artificial Sequence: Synthetic oligonucleotide
  Sense strand starting at position 3843 of SEQ ID NO: 1562381
aggguaucuucucauuaca

SEQ ID NO: 1742738 - RNA, 19 nt, Artificial Sequence
  Description of Artificial Sequence: Synthetic oligonucleotide
  Antisense strand to SEQ ID NO: 1742737
uguaaugagaagauacccu

SEQ ID NO: 1742739 - RNA, 19 nt, Artificial Sequence
  Description of Artificial Sequence: Synthetic oligonucleotide
  Sense strand starting at position 3845 of SEQ ID NO: 1562381
gguaucuucucauuacaga

SEQ ID NO: 1742740 - RNA, 19 nt, Artificial Sequence
  Description of Artificial Sequence: Synthetic oligonucleotide
  Antisense strand to SEQ ID NO: 1742739
ucuguaaugagaagauacc

SEQ ID NO: 1742741 - RNA, 19 nt, Artificial Sequence
  Description of Artificial Sequence: Synthetic oligonucleotide
  Sense strand starting at position 3846 of SEQ ID NO: 1562381
guaucuucucauuacagac

SEQ ID NO: 1742742 - RNA, 19 nt, Artificial Sequence
  Description of Artificial Sequence: Synthetic oligonucleotide
  Antisense strand to SEQ ID NO: 1742741
gucuguaaugagaagauac

SEQ ID NO: 1742743 - RNA, 19 nt, Artificial Sequence
  Description of Artificial Sequence: Synthetic oligonucleotide
  Sense strand starting at position 304 of SEQ ID NO: 1562382
ggaggucucucugugacag

SEQ ID NO: 1742744 - RNA, 19 nt, Artificial Sequence
  Description of Artificial Sequence: Synthetic oligonucleotide
  Antisense strand to SEQ ID NO: 1742743
cugucacagagagaccucc

SEQ ID NO: 1742745 - RNA, 19 nt, Artificial Sequence
  Description of Artificial Sequence: Synthetic oligonucleotide
  Sense strand starting at position 312 of SEQ ID NO: 1562382
cucugugacaggugggauu

SEQ ID NO: 1742746 - RNA, 19 nt, Artificial Sequence
  Description of Artificial Sequence: Synthetic oligonucleotide
  Antisense strand to SEQ ID NO: 1742745
aaucccaccugucacagag

SEQ ID NO: 1742747 - RNA, 19 nt, Artificial Sequence
  Description of Artificial Sequence: Synthetic oligonucleotide
  Sense strand starting at position 333 of SEQ ID NO: 1562382
ggaaguuuccacggaggag

SEQ ID NO: 1742748 - RNA, 19 nt, Artificial Sequence
  Description of Artificial Sequence: Synthetic oligonucleotide
  Antisense strand to SEQ ID NO: 1742747
cuccuccguggaaacuucc

SEQ ID NO: 1742749 - RNA, 19 nt, Artificial Sequence
  Description of Artificial Sequence: Synthetic oligonucleotide
  Sense strand starting at position 378 of SEQ ID NO: 1562382
caagaaagaugcuaaggau

SEQ ID NO: 1742750 - RNA, 19 nt, Artificial Sequence
  Description of Artificial Sequence: Synthetic oligonucleotide
  Antisense strand to SEQ ID NO: 1742749
auccuuagcaucuuucuug

SEQ ID NO: 1742751 - RNA, 19 nt, Artificial Sequence
  Description of Artificial Sequence: Synthetic oligonucleotide
  Sense strand starting at position 381 of SEQ ID NO: 1562382
gaaagaugcuaaggaugga

SEQ ID NO: 1742752 - RNA, 19 nt, Artificial Sequence
  Description of Artificial Sequence: Synthetic oligonucleotide
  Antisense strand to SEQ ID NO: 1742751
uccauccuuagcaucuuuc

SEQ ID NO: 1742753 - RNA, 19 nt, Artificial Sequence
  Description of Artificial Sequence: Synthetic oligonucleotide
  Sense strand starting at position 478 of SEQ ID NO: 1562382
agggaagagucaggucagu

SEQ ID NO: 1742754 - RNA, 19 nt, Artificial Sequence
  Description of Artificial Sequence: Synthetic oligonucleotide
  Antisense strand to SEQ ID NO: 1742753
acugaccugacucuucccu

SEQ ID NO: 1742755 - RNA, 19 nt, Artificial Sequence
  Description of Artificial Sequence: Synthetic oligonucleotide
  Sense strand starting at position 484 of SEQ ID NO: 1562382
gagucaggucagugagguu

SEQ ID NO: 1742756 - RNA, 19 nt, Artificial Sequence
  Description of Artificial Sequence: Synthetic oligonucleotide
  Antisense strand to SEQ ID NO: 1742755
aaccucacugaccugacuc

SEQ ID NO: 1742757 - RNA, 19 nt, Artificial Sequence
  Description of Artificial Sequence: Synthetic oligonucleotide
  Sense strand starting at position 496 of SEQ ID NO: 1562382
ugagguucauaagggauga

SEQ ID NO: 1742758 - RNA, 19 nt, Artificial Sequence
  Description of Artificial Sequence: Synthetic oligonucleotide
  Antisense strand to SEQ ID NO: 1742757
ucaucccuuaugaaccuca

SEQ ID NO: 1742759 - RNA, 19 nt, Artificial Sequence
  Description of Artificial Sequence: Synthetic oligonucleotide
  Sense strand starting at position 987 of SEQ ID NO: 1562382
cgagcucuuucucauggga

SEQ ID NO: 1742760 - RNA, 19 nt, Artificial Sequence
  Description of Artificial Sequence: Synthetic oligonucleotide
  Antisense strand to SEQ ID NO: 1742759
ucccaugagaaagagcucg

SEQ ID NO: 1742761 - RNA, 19 nt, Artificial Sequence
  Description of Artificial Sequence: Synthetic oligonucleotide
  Sense strand starting at position 989 of SEQ ID NO: 1562382
agcucuuucucaugggauc

SEQ ID NO: 1742762 - RNA, 19 nt, Artificial Sequence
  Description of Artificial Sequence: Synthetic oligonucleotide
  Antisense strand to SEQ ID NO: 1742761
gaucccaugagaaagagcu

SEQ ID NO: 1742763 - RNA, 19 nt, Artificial Sequence
  Description of Artificial Sequence: Synthetic oligonucleotide
  Sense strand starting at position 2865 of SEQ ID NO: 1562382
ccaaguuuguaggucucua

SEQ ID NO: 1742764 - RNA, 19 nt, Artificial Sequence
  Description of Artificial Sequence: Synthetic oligonucleotide
  Antisense strand to SEQ ID NO: 1742763
uagagaccuacaaacuugg

SEQ ID NO: 1742765 - RNA, 19 nt, Artificial Sequence
  Description of Artificial Sequence: Synthetic oligonucleotide
  Sense strand starting at position 2869 of SEQ ID NO: 1562382
guuuguaggucucuauucu

SEQ ID NO: 1742766 - RNA, 19 nt, Artificial Sequence
  Description of Artificial Sequence: Synthetic oligonucleotide
  Antisense strand to SEQ ID NO: 1742765
agaauagagaccuacaaac

SEQ ID NO: 1742767 - RNA, 19 nt, Artificial Sequence
  Description of Artificial Sequence: Synthetic oligonucleotide
  Sense strand starting at position 2870 of SEQ ID NO: 1562382
uuuguaggucucuauucua

SEQ ID NO: 1742768 - RNA, 19 nt, Artificial Sequence
  Description of Artificial Sequence: Synthetic oligonucleotide
  Antisense strand to SEQ ID NO: 1742767
uagaauagagaccuacaaa

SEQ ID NO: 1742769 - RNA, 19 nt, Artificial Sequence
  Description of Artificial Sequence: Synthetic oligonucleotide
  Sense strand starting at position 2873 of SEQ ID NO: 1562382
guaggucucuauucuagac

SEQ ID NO: 1742770 - RNA, 19 nt, Artificial Sequence
  Description of Artificial Sequence: Synthetic oligonucleotide
  Antisense strand to SEQ ID NO: 1742769
gucuagaauagagaccuac

SEQ ID NO: 1742771 - RNA, 19 nt, Artificial Sequence
  Description of Artificial Sequence: Synthetic oligonucleotide
  Sense strand starting at position 2877 of SEQ ID NO: 1562382
gucucuauucuagaccagu

SEQ ID NO: 1742772 - RNA, 19 nt, Artificial Sequence
  Description of Artificial Sequence: Synthetic oligonucleotide
  Antisense strand to SEQ ID NO: 1742771
acuggucuagaauagagac

SEQ ID NO: 1742773 - RNA, 19 nt, Artificial Sequence
  Description of Artificial Sequence: Synthetic oligonucleotide
  Sense strand starting at position 2880 of SEQ ID NO: 1562382
ucuauucuagaccagugau

SEQ ID NO: 1742774 - RNA, 19 nt, Artificial Sequence
  Description of Artificial Sequence: Synthetic oligonucleotide
  Antisense strand to SEQ ID NO: 1742773
aucacuggucuagaauaga

SEQ ID NO: 1742775 - RNA, 19 nt, Artificial Sequence
  Description of Artificial Sequence: Synthetic oligonucleotide
  Sense strand starting at position 2883 of SEQ ID NO: 1562382
auucuagaccagugauucu

SEQ ID NO: 1742776 - RNA, 19 nt, Artificial Sequence
  Description of Artificial Sequence: Synthetic oligonucleotide
  Antisense strand to SEQ ID NO: 1742775
agaaucacuggucuagaau

SEQ ID NO: 1742777 - RNA, 19 nt, Artificial Sequence
  Description of Artificial Sequence: Synthetic oligonucleotide
  Sense strand starting at position 2890 of SEQ ID NO: 1562382
accagugauucucuggaga

SEQ ID NO: 1742778 - RNA, 19 nt, Artificial Sequence
  Description of Artificial Sequence: Synthetic oligonucleotide
  Antisense strand to SEQ ID NO: 1742777
ucuccagagaaucacuggu

SEQ ID NO: 1742779 - RNA, 19 nt, Artificial Sequence
  Description of Artificial Sequence: Synthetic oligonucleotide
  Sense strand starting at position 2892 of SEQ ID NO: 1562382
cagugauucucuggagagg

SEQ ID NO: 1742780 - RNA, 19 nt, Artificial Sequence
  Description of Artificial Sequence: Synthetic oligonucleotide
  Antisense strand to SEQ ID NO: 1742779
ccucuccagagaaucacug

SEQ ID NO: 1742781 - RNA, 19 nt, Artificial Sequence
  Description of Artificial Sequence: Synthetic oligonucleotide
  Sense strand starting at position 2966 of SEQ ID NO: 1562382
gugggaauggugcggacau

SEQ ID NO: 1742782 - RNA, 19 nt, Artificial Sequence
  Description of Artificial Sequence: Synthetic oligonucleotide
  Antisense strand to SEQ ID NO: 1742781
auguccgcaccauucccac

SEQ ID NO: 1742783 - RNA, 19 nt, Artificial Sequence
  Description of Artificial Sequence: Synthetic oligonucleotide
  Sense strand starting at position 3257 of SEQ ID NO: 1562382
ugaguccugucccggagau

SEQ ID NO: 1742784 - RNA, 19 nt, Artificial Sequence
  Description of Artificial Sequence: Synthetic oligonucleotide
  Antisense strand to SEQ ID NO: 1742783
aucuccgggacaggacuca

SEQ ID NO: 1742785 - RNA, 19 nt, Artificial Sequence
  Description of Artificial Sequence: Synthetic oligonucleotide
  Sense strand starting at position 3259 of SEQ ID NO: 1562382
aguccugucccggagauga

SEQ ID NO: 1742786 - RNA, 19 nt, Artificial Sequence
  Description of Artificial Sequence: Synthetic oligonucleotide
  Antisense strand to SEQ ID NO: 1742785
ucaucuccgggacaggacu

SEQ ID NO: 1742787 - RNA, 19 nt, Artificial Sequence
  Description of Artificial Sequence: Synthetic oligonucleotide
  Sense strand starting at position 3606 of SEQ ID NO: 1562382
cagugaagcuggugaauga

SEQ ID NO: 1742788 - RNA, 19 nt, Artificial Sequence
  Description of Artificial Sequence: Synthetic oligonucleotide
  Antisense strand to SEQ ID NO: 1742787
ucauucaccagcuucacug

SEQ ID NO: 1742789 - RNA, 19 nt, Artificial Sequence
  Description of Artificial Sequence: Synthetic oligonucleotide
  Sense strand starting at position 3759 of SEQ ID NO: 1562382
cccagugaggcuggugaau

SEQ ID NO: 1742790 - RNA, 19 nt, Artificial Sequence
  Description of Artificial Sequence: Synthetic oligonucleotide
  Antisense strand to SEQ ID NO: 1742789
auucaccagccucacuggg

SEQ ID NO: 1742791 - RNA, 19 nt, Artificial Sequence
  Description of Artificial Sequence: Synthetic oligonucleotide
  Sense strand starting at position 3856 of SEQ ID NO: 1562382
ggaugcaaugaugagcauu

SEQ ID NO: 1742792 - RNA, 19 nt, Artificial Sequence
  Description of Artificial Sequence: Synthetic oligonucleotide
  Antisense strand to SEQ ID NO: 1742791
aaugcucaucauugcaucc

SEQ ID NO: 1742793 - RNA, 19 nt, Artificial Sequence
  Description of Artificial Sequence: Synthetic oligonucleotide
  Sense strand starting at position 3903 of SEQ ID NO: 1562382
gaggcugaguggguauauu

SEQ ID NO: 1742794 - RNA, 19 nt, Artificial Sequence
  Description of Artificial Sequence: Synthetic oligonucleotide
  Antisense strand to SEQ ID NO: 1742793
aauauacccacucagccuc

SEQ ID NO: 1742795 - RNA, 19 nt, Artificial Sequence
  Description of Artificial Sequence: Synthetic oligonucleotide
  Sense strand starting at position 3911 of SEQ ID NO: 1562382
guggguauauuacuccgau

SEQ ID NO: 1742796 - RNA, 19 nt, Artificial Sequence
  Description of Artificial Sequence: Synthetic oligonucleotide
  Antisense strand to SEQ ID NO: 1742795
aucggaguaauauacccac

SEQ ID NO: 1742797 - RNA, 19 nt, Artificial Sequence
  Description of Artificial Sequence: Synthetic oligonucleotide
  Sense strand starting at position 3912 of SEQ ID NO: 1562382
uggguauauuacuccgauu

SEQ ID NO: 1742798 - RNA, 19 nt, Artificial Sequence
  Description of Artificial Sequence: Synthetic oligonucleotide
  Antisense strand to SEQ ID NO: 1742797
aaucggaguaauauaccca

SEQ ID NO: 1742799 - RNA, 19 nt, Artificial Sequence
  Description of Artificial Sequence: Synthetic oligonucleotide
  Sense strand starting at position 3969 of SEQ ID NO: 1562382
ggcugacagccuugcauga

SEQ ID NO: 1742800 - RNA, 19 nt, Artificial Sequence
  Description of Artificial Sequence: Synthetic oligonucleotide
  Antisense strand to SEQ ID NO: 1742799
ucaugcaaggcugucagcc

SEQ ID NO: 1742801 - RNA, 19 nt, Artificial Sequence
  Description of Artificial Sequence: Synthetic oligonucleotide
  Sense strand starting at position 13 of SEQ ID NO: 1562383
acagaagcauuccuagaua

SEQ ID NO: 1742802 - RNA, 19 nt, Artificial Sequence
  Description of Artificial Sequence: Synthetic oligonucleotide
  Antisense strand to SEQ ID NO: 1742801
uaucuaggaaugcuucugu

SEQ ID NO: 1742803 - RNA, 19 nt, Artificial Sequence
  Description of Artificial Sequence: Synthetic oligonucleotide
  Sense strand starting at position 90 of SEQ ID NO: 1562383
acuuaaaggugucugaaau

SEQ ID NO: 1742804 - RNA, 19 nt, Artificial Sequence
  Description of Artificial Sequence: Synthetic oligonucleotide
  Antisense strand to SEQ ID NO: 1742803
auuucagacaccuuuaagu

SEQ ID NO: 1742805 - RNA, 19 nt, Artificial Sequence
  Description of Artificial Sequence: Synthetic oligonucleotide
  Sense strand starting at position 91 of SEQ ID NO: 1562383
cuuaaaggugucugaaaua

SEQ ID NO: 1742806 - RNA, 19 nt, Artificial Sequence
  Description of Artificial Sequence: Synthetic oligonucleotide
  Antisense strand to SEQ ID NO: 1742805
uauuucagacaccuuuaag

SEQ ID NO: 1742807 - RNA, 19 nt, Artificial Sequence
  Description of Artificial Sequence: Synthetic oligonucleotide
  Sense strand starting at position 167 of SEQ ID NO: 1562383
gucccuggauucuuuacaa

SEQ ID NO: 1742808 - RNA, 19 nt, Artificial Sequence
  Description of Artificial Sequence: Synthetic oligonucleotide
  Antisense strand to SEQ ID NO: 1742807
uuguaaagaauccagggac

SEQ ID NO: 1742809 - RNA, 19 nt, Artificial Sequence
  Description of Artificial Sequence: Synthetic oligonucleotide
  Sense strand starting at position 186 of SEQ ID NO: 1562383
acccaucugcacuaaggau

SEQ ID NO: 1742810 - RNA, 19 nt, Artificial Sequence
  Description of Artificial Sequence: Synthetic oligonucleotide
  Antisense strand to SEQ ID NO: 1742809
auccuuagugcagaugggu

SEQ ID NO: 1742811 - RNA, 19 nt, Artificial Sequence
  Description of Artificial Sequence: Synthetic oligonucleotide
  Sense strand starting at position 584 of SEQ ID NO: 1562383
cgcugacagaacugagaau

SEQ ID NO: 1742812 - RNA, 19 nt, Artificial Sequence
  Description of Artificial Sequence: Synthetic oligonucleotide
  Antisense strand to SEQ ID NO: 1742811
auucucaguucugucagcg

SEQ ID NO: 1742813 - RNA, 19 nt, Artificial Sequence
  Description of Artificial Sequence: Synthetic oligonucleotide
  Sense strand starting at position 613 of SEQ ID NO: 1562383
auuuguuuguaugggauuu

SEQ ID NO: 1742814 - RNA, 19 nt, Artificial Sequence
  Description of Artificial Sequence: Synthetic oligonucleotide
  Antisense strand to SEQ ID NO: 1742813
aaaucccauacaaacaaau

SEQ ID NO: 1742815 - RNA, 19 nt, Artificial Sequence
  Description of Artificial Sequence: Synthetic oligonucleotide
  Sense strand starting at position 702 of SEQ ID NO: 1562383
agagaagaaugccaacaga

SEQ ID NO: 1742816 - RNA, 19 nt, Artificial Sequence
  Description of Artificial Sequence: Synthetic oligonucleotide
  Antisense strand to SEQ ID NO: 1742815
ucuguuggcauucuucucu

SEQ ID NO: 1742817 - RNA, 19 nt, Artificial Sequence
  Description of Artificial Sequence: Synthetic oligonucleotide
  Sense strand starting at position 746 of SEQ ID NO: 1562383
ggagccugcauguaucuaa

SEQ ID NO: 1742818 - RNA, 19 nt, Artificial Sequence
  Description of Artificial Sequence: Synthetic oligonucleotide
  Antisense strand to SEQ ID NO: 1742817
uuagauacaugcaggcucc

SEQ ID NO: 1742819 - RNA, 19 nt, Artificial Sequence
  Description of Artificial Sequence: Synthetic oligonucleotide
  Sense strand starting at position 760 of SEQ ID NO: 1562383
ucuaaauuuccagguugcu

SEQ ID NO: 1742820 - RNA, 19 nt, Artificial Sequence
  Description of Artificial Sequence: Synthetic oligonucleotide
  Antisense strand to SEQ ID NO: 1742819
agcaaccuggaaauuuaga

SEQ ID NO: 1742821 - RNA, 19 nt, Artificial Sequence
  Description of Artificial Sequence: Synthetic oligonucleotide
  Sense strand starting at position 786 of SEQ ID NO: 1562383
ucagaauagcacugaugau

SEQ ID NO: 1742822 - RNA, 19 nt, Artificial Sequence
  Description of Artificial Sequence: Synthetic oligonucleotide
  Antisense strand to SEQ ID NO: 1742821
aucaucagugcuauucuga

SEQ ID NO: 1742823 - RNA, 19 nt, Artificial Sequence
  Description of Artificial Sequence: Synthetic oligonucleotide
  Sense strand starting at position 871 of SEQ ID NO: 1562383
cagagaagccgcuaaucua

SEQ ID NO: 1742824 - RNA, 19 nt, Artificial Sequence
  Description of Artificial Sequence: Synthetic oligonucleotide
  Antisense strand to SEQ ID NO: 1742823
uagauuagcggcuucucug

SEQ ID NO: 1742825 - RNA, 19 nt, Artificial Sequence
  Description of Artificial Sequence: Synthetic oligonucleotide
  Sense strand starting at position 907 of SEQ ID NO: 1562383
ccuucuugagucugaauca

SEQ ID NO: 1742826 - RNA, 19 nt, Artificial Sequence
  Description of Artificial Sequence: Synthetic oligonucleotide
  Antisense strand to SEQ ID NO: 1742825
ugauucagacucaagaagg

SEQ ID NO: 1742827 - RNA, 19 nt, Artificial Sequence
  Description of Artificial Sequence: Synthetic oligonucleotide
  Sense strand starting at position 943 of SEQ ID NO: 1562383
uaggaaauguaaucuccga

SEQ ID NO: 1742828 - RNA, 19 nt, Artificial Sequence
  Description of Artificial Sequence: Synthetic oligonucleotide
  Antisense strand to SEQ ID NO: 1742827
ucggagauuacauuuccua

SEQ ID NO: 1742829 - RNA, 19 nt, Artificial Sequence
  Description of Artificial Sequence: Synthetic oligonucleotide
  Sense strand starting at position 947 of SEQ ID NO: 1562383
aaauguaaucuccgaaguu

SEQ ID NO: 1742830 - RNA, 19 nt, Artificial Sequence
  Description of Artificial Sequence: Synthetic oligonucleotide
  Antisense strand to SEQ ID NO: 1742829
aacuucggagauuacauuu

SEQ ID NO: 1742831 - RNA, 19 nt, Artificial Sequence
  Description of Artificial Sequence: Synthetic oligonucleotide
  Sense strand starting at position 1006 of SEQ ID NO: 1562383
ggccgauuccucgccgguu

SEQ ID NO: 1742832 - RNA, 19 nt, Artificial Sequence
  Description of Artificial Sequence: Synthetic oligonucleotide
  Antisense strand to SEQ ID NO: 1742831
aaccggcgaggaaucggcc

SEQ ID NO: 1742833 - RNA, 19 nt, Artificial Sequence
  Description of Artificial Sequence: Synthetic oligonucleotide
  Sense strand starting at position 1035 of SEQ ID NO: 1562383
gggaauucggauugcauuc

SEQ ID NO: 1742834 - RNA, 19 nt, Artificial Sequence
  Description of Artificial Sequence: Synthetic oligonucleotide
  Antisense strand to SEQ ID NO: 1742833
gaaugcaauccgaauuccc

SEQ ID NO: 1742835 - RNA, 19 nt, Artificial Sequence
  Description of Artificial Sequence: Synthetic oligonucleotide
  Sense strand starting at position 1044 of SEQ ID NO: 1562383
gauugcauucgugcaagca

SEQ ID NO: 1742836 - RNA, 19 nt, Artificial Sequence
  Description of Artificial Sequence: Synthetic oligonucleotide
  Antisense strand to SEQ ID NO: 1742835
ugcuugcacgaaugcaauc

SEQ ID NO: 1742837 - RNA, 19 nt, Artificial Sequence
  Description of Artificial Sequence: Synthetic oligonucleotide
  Sense strand starting at position 2172 of SEQ ID NO: 1562383
gggugagccaaagaaaugu

SEQ ID NO: 1742838 - RNA, 19 nt, Artificial Sequence
  Description of Artificial Sequence: Synthetic oligonucleotide
  Antisense strand to SEQ ID NO: 1742837
acauuucuuuggcucaccc

SEQ ID NO: 1742839 - RNA, 19 nt, Artificial Sequence
  Description of Artificial Sequence: Synthetic oligonucleotide
  Sense strand starting at position 2289 of SEQ ID NO: 1562383
gauuuauggucugagguug

SEQ ID NO: 1742840 - RNA, 19 nt, Artificial Sequence
  Description of Artificial Sequence: Synthetic oligonucleotide
  Antisense strand to SEQ ID NO: 1742839
caaccucagaccauaaauc

SEQ ID NO: 1742841 - RNA, 19 nt, Artificial Sequence
  Description of Artificial Sequence: Synthetic oligonucleotide
  Sense strand starting at position 2355 of SEQ ID NO: 1562383
cucguugccgugagagaca

SEQ ID NO: 1742842 - RNA, 19 nt, Artificial Sequence
  Description of Artificial Sequence: Synthetic oligonucleotide
  Antisense strand to SEQ ID NO: 1742841
ugucucucacggcaacgag

SEQ ID NO: 1742843 - RNA, 19 nt, Artificial Sequence
  Description of Artificial Sequence: Synthetic oligonucleotide
  Sense strand starting at position 2473 of SEQ ID NO: 1562383
gggccuaugguuggaauga

SEQ ID NO: 1742844 - RNA, 19 nt, Artificial Sequence
  Description of Artificial Sequence: Synthetic oligonucleotide
  Antisense strand to SEQ ID NO: 1742843
ucauuccaaccauaggccc

SEQ ID NO: 1742845 - RNA, 19 nt, Artificial Sequence
  Description of Artificial Sequence: Synthetic oligonucleotide
  Sense strand starting at position 2815 of SEQ ID NO: 1562383
gcguccugugucuugggaa

SEQ ID NO: 1742846 - RNA, 19 nt, Artificial Sequence
  Description of Artificial Sequence: Synthetic oligonucleotide
  Antisense strand to SEQ ID NO: 1742845
uucccaagacacaggacgc

SEQ ID NO: 1742847 - RNA, 19 nt, Artificial Sequence
  Description of Artificial Sequence: Synthetic oligonucleotide
  Sense strand starting at position 2836 of SEQ ID NO: 1562383
gggccuuuaagcgaaaggu

SEQ ID NO: 1742848 - RNA, 19 nt, Artificial Sequence
  Description of Artificial Sequence: Synthetic oligonucleotide
  Antisense strand to SEQ ID NO: 1742847
accuuucgcuuaaaggccc

SEQ ID NO: 1742849 - RNA, 19 nt, Artificial Sequence
  Description of Artificial Sequence: Synthetic oligonucleotide
  Sense strand starting at position 3126 of SEQ ID NO: 1562383
guuccuagaauuugagugu

SEQ ID NO: 1742850 - RNA, 19 nt, Artificial Sequence
  Description of Artificial Sequence: Synthetic oligonucleotide
  Antisense strand to SEQ ID NO: 1742849
acacucaaauucuaggaac

SEQ ID NO: 1742851 - RNA, 19 nt, Artificial Sequence
  Description of Artificial Sequence: Synthetic oligonucleotide
  Sense strand starting at position 3206 of SEQ ID NO: 1562383
ucggaaagcaguuaguagu

SEQ ID NO: 1742852 - RNA, 19 nt, Artificial Sequence
  Description of Artificial Sequence: Synthetic oligonucleotide
  Antisense strand to SEQ ID NO: 1742851
acuacuaacugcuuuccga

SEQ ID NO: 1742853 - RNA, 19 nt, Artificial Sequence
  Description of Artificial Sequence: Synthetic oligonucleotide
  Sense strand starting at position 3221 of SEQ ID NO: 1562383
uaguuauucgcuguaugug

SEQ ID NO: 1742854 - RNA, 19 nt, Artificial Sequence
  Description of Artificial Sequence: Synthetic oligonucleotide
  Antisense strand to SEQ ID NO: 1742853
cacauacagcgaauaacua

SEQ ID NO: 1742855 - RNA, 19 nt, Artificial Sequence
  Description of Artificial Sequence: Synthetic oligonucleotide
  Sense strand starting at position 3339 of SEQ ID NO: 1562383
acaucugcguuucuaagaa

SEQ ID NO: 1742856 - RNA, 19 nt, Artificial Sequence
  Description of Artificial Sequence: Synthetic oligonucleotide
  Antisense strand to SEQ ID NO: 1742855
uucuuagaaacgcagaugu

SEQ ID NO: 1742857 - RNA, 19 nt, Artificial Sequence
  Description of Artificial Sequence: Synthetic oligonucleotide
  Sense strand starting at position 3368 of SEQ ID NO: 1562383
gcugcuguccacguuauga

SEQ ID NO: 1742858 - RNA, 19 nt, Artificial Sequence
  Description of Artificial Sequence: Synthetic oligonucleotide
  Antisense strand to SEQ ID NO: 1742857
ucauaacguggacagcagc

SEQ ID NO: 1742859 - RNA, 19 nt, Artificial Sequence
  Description of Artificial Sequence: Synthetic oligonucleotide
  Sense strand starting at position 3376 of SEQ ID NO: 1562383
ccacguuaugaguagaaag

SEQ ID NO: 1742860 - RNA, 19 nt, Artificial Sequence
  Description of Artificial Sequence: Synthetic oligonucleotide
  Antisense strand to SEQ ID NO: 1742859
cuuucuacucauaacgugg

SEQ ID NO: 1742861 - RNA, 19 nt, Artificial Sequence
  Description of Artificial Sequence: Synthetic oligonucleotide
  Sense strand starting at position 3378 of SEQ ID NO: 1562383
acguuaugaguagaaaggu

SEQ ID NO: 1742862 - RNA, 19 nt, Artificial Sequence
  Description of Artificial Sequence: Synthetic oligonucleotide
  Antisense strand to SEQ ID NO: 1742861
accuuucuacucauaacgu

SEQ ID NO: 1742863 - RNA, 19 nt, Artificial Sequence
  Description of Artificial Sequence: Synthetic oligonucleotide
  Sense strand starting at position 3407 of SEQ ID NO: 1562383
cucuguccaguacaaauau

SEQ ID NO: 1742864 - RNA, 19 nt, Artificial Sequence
  Description of Artificial Sequence: Synthetic oligonucleotide
  Antisense strand to SEQ ID NO: 1742863
auauuuguacuggacagag

SEQ ID NO: 1742865 - RNA, 19 nt, Artificial Sequence
  Description of Artificial Sequence: Synthetic oligonucleotide
  Sense strand starting at position 3748 of SEQ ID NO: 1562383
aguagccuacugcagaaau

SEQ ID NO: 1742866 - RNA, 19 nt, Artificial Sequence
  Description of Artificial Sequence: Synthetic oligonucleotide
  Antisense strand to SEQ ID NO: 1742865
auuucugcaguaggcuacu

SEQ ID NO: 1742867 - RNA, 19 nt, Artificial Sequence
  Description of Artificial Sequence: Synthetic oligonucleotide
  Sense strand starting at position 3805 of SEQ ID NO: 1562383
uuugcaacucuaugagaug

SEQ ID NO: 1742868 - RNA, 19 nt, Artificial Sequence
  Description of Artificial Sequence: Synthetic oligonucleotide
  Antisense strand to SEQ ID NO: 1742867
caucucauagaguugcaaa

SEQ ID NO: 1742869 - RNA, 19 nt, Artificial Sequence
  Description of Artificial Sequence: Synthetic oligonucleotide
  Sense strand starting at position 3840 of SEQ ID NO: 1562383
uagagauucucuguaauug

SEQ ID NO: 1742870 - RNA, 19 nt, Artificial Sequence
  Description of Artificial Sequence: Synthetic oligonucleotide
  Antisense strand to SEQ ID NO: 1742869
caauuacagagaaucucua

SEQ ID NO: 1742871 - RNA, 19 nt, Artificial Sequence
  Description of Artificial Sequence: Synthetic oligonucleotide
  Sense strand starting at position 3844 of SEQ ID NO: 1562383
gauucucuguaauugagau

SEQ ID NO: 1742872 - RNA, 19 nt, Artificial Sequence
  Description of Artificial Sequence: Synthetic oligonucleotide
  Antisense strand to SEQ ID NO: 1742871
aucucaauuacagagaauc

SEQ ID NO: 1742873 - RNA, 19 nt, Artificial Sequence
  Description of Artificial Sequence: Synthetic oligonucleotide
  Sense strand starting at position 3852 of SEQ ID NO: 1562383
guaauugagaugugcccaa

SEQ ID NO: 1742874 - RNA, 19 nt, Artificial Sequence
  Description of Artificial Sequence: Synthetic oligonucleotide
  Antisense strand to SEQ ID NO: 1742873
uugggcacaucucaauuac

SEQ ID NO: 1742875 - RNA, 19 nt, Artificial Sequence
  Description of Artificial Sequence: Synthetic oligonucleotide
  Sense strand starting at position 3863 of SEQ ID NO: 1562383
gugcccaauuuacagaaau

SEQ ID NO: 1742876 - RNA, 19 nt, Artificial Sequence
  Description of Artificial Sequence: Synthetic oligonucleotide
  Antisense strand to SEQ ID NO: 1742875
auuucuguaaauugggcac

SEQ ID NO: 1742877 - RNA, 19 nt, Artificial Sequence
  Description of Artificial Sequence: Synthetic oligonucleotide
  Sense strand starting at position 3895 of SEQ ID NO: 1562383
gccaacauuucugaaagua

SEQ ID NO: 1742878 - RNA, 19 nt, Artificial Sequence
  Description of Artificial Sequence: Synthetic oligonucleotide
  Antisense strand to SEQ ID NO: 1742877
uacuuucagaaauguuggc

SEQ ID NO: 1742879 - RNA, 19 nt, Artificial Sequence
  Description of Artificial Sequence: Synthetic oligonucleotide
  Sense strand starting at position 3955 of SEQ ID NO: 1562383
auggcaacccucugagaua

SEQ ID NO: 1742880 - RNA, 19 nt, Artificial Sequence
  Description of Artificial Sequence: Synthetic oligonucleotide
  Antisense strand to SEQ ID NO: 1742879
uaucucagaggguugccau

SEQ ID NO: 1742881 - RNA, 19 nt, Artificial Sequence
  Description of Artificial Sequence: Synthetic oligonucleotide
  Sense strand starting at position 125 of SEQ ID NO: 1562384
cuguguguuccauaugaua

SEQ ID NO: 1742882 - RNA, 19 nt, Artificial Sequence
  Description of Artificial Sequence: Synthetic oligonucleotide
  Antisense strand to SEQ ID NO: 1742881
uaucauauggaacacacag

SEQ ID NO: 1742883 - RNA, 19 nt, Artificial Sequence
  Description of Artificial Sequence: Synthetic oligonucleotide
  Sense strand starting at position 196 of SEQ ID NO: 1562384
cugguuugacuuuauauaa

SEQ ID NO: 1742884 - RNA, 19 nt, Artificial Sequence
  Description of Artificial Sequence: Synthetic oligonucleotide
  Antisense strand to SEQ ID NO: 1742883
uuauauaaagucaaaccag

SEQ ID NO: 1742885 - RNA, 19 nt, Artificial Sequence
  Description of Artificial Sequence: Synthetic oligonucleotide
  Sense strand starting at position 209 of SEQ ID NO: 1562384
auauaauauuggucaguac

SEQ ID NO: 1742886 - RNA, 19 nt, Artificial Sequence
  Description of Artificial Sequence: Synthetic oligonucleotide
  Antisense strand to SEQ ID NO: 1742885
guacugaccaauauuauau

SEQ ID NO: 1742887 - RNA, 19 nt, Artificial Sequence
  Description of Artificial Sequence: Synthetic oligonucleotide
  Sense strand starting at position 212 of SEQ ID NO: 1562384
uaauauuggucaguacaug

SEQ ID NO: 1742888 - RNA, 19 nt, Artificial Sequence
  Description of Artificial Sequence: Synthetic oligonucleotide
  Antisense strand to SEQ ID NO: 1742887
cauguacugaccaauauua

SEQ ID NO: 1742889 - RNA, 19 nt, Artificial Sequence
  Description of Artificial Sequence: Synthetic oligonucleotide
  Sense strand starting at position 213 of SEQ ID NO: 1562384
aauauuggucaguacaugu

SEQ ID NO: 1742890 - RNA, 19 nt, Artificial Sequence
  Description of Artificial Sequence: Synthetic oligonucleotide
  Antisense strand to SEQ ID NO: 1742889
acauguacugaccaauauu

SEQ ID NO: 1742891 - RNA, 19 nt, Artificial Sequence
  Description of Artificial Sequence: Synthetic oligonucleotide
  Sense strand starting at position 229 of SEQ ID NO: 1562384
ugucccuugccugagacaa

SEQ ID NO: 1742892 - RNA, 19 nt, Artificial Sequence
  Description of Artificial Sequence: Synthetic oligonucleotide
  Antisense strand to SEQ ID NO: 1742891
uugucucaggcaagggaca

SEQ ID NO: 1742893 - RNA, 19 nt, Artificial Sequence
  Description of Artificial Sequence: Synthetic oligonucleotide
  Sense strand starting at position 384 of SEQ ID NO: 1562384
aguguuacuuuaccagaac

SEQ ID NO: 1742894 - RNA, 19 nt, Artificial Sequence
  Description of Artificial Sequence: Synthetic oligonucleotide
  Antisense strand to SEQ ID NO: 1742893
guucugguaaaguaacacu

SEQ ID NO: 1742895 - RNA, 19 nt, Artificial Sequence
  Description of Artificial Sequence: Synthetic oligonucleotide
  Sense strand starting at position 390 of SEQ ID NO: 1562384
acuuuaccagaacgugaau

SEQ ID NO: 1742896 - RNA, 19 nt, Artificial Sequence
  Description of Artificial Sequence: Synthetic oligonucleotide
  Antisense strand to SEQ ID NO: 1742895
auucacguucugguaaagu

SEQ ID NO: 1742897 - RNA, 19 nt, Artificial Sequence
  Description of Artificial Sequence: Synthetic oligonucleotide
  Sense strand starting at position 812 of SEQ ID NO: 1562384
agaccagacuucucuaagu

SEQ ID NO: 1742898 - RNA, 19 nt, Artificial Sequence
  Description of Artificial Sequence: Synthetic oligonucleotide
  Antisense strand to SEQ ID NO: 1742897
acuuagagaagucuggucu

SEQ ID NO: 1742899 - RNA, 19 nt, Artificial Sequence
  Description of Artificial Sequence: Synthetic oligonucleotide
  Sense strand starting at position 817 of SEQ ID NO: 1562384
agacuucucuaagugaaug

SEQ ID NO: 1742900 - RNA, 19 nt, Artificial Sequence
  Description of Artificial Sequence: Synthetic oligonucleotide
  Antisense strand to SEQ ID NO: 1742899
cauucacuuagagaagucu

SEQ ID NO: 1742901 - RNA, 19 nt, Artificial Sequence
  Description of Artificial Sequence: Synthetic oligonucleotide
  Sense strand starting at position 822 of SEQ ID NO: 1562384
ucucuaagugaauguagau

SEQ ID NO: 1742902 - RNA, 19 nt, Artificial Sequence
  Description of Artificial Sequence: Synthetic oligonucleotide
  Antisense strand to SEQ ID NO: 1742901
aucuacauucacuuagaga

SEQ ID NO: 1742903 - RNA, 19 nt, Artificial Sequence
  Description of Artificial Sequence: Synthetic oligonucleotide
  Sense strand starting at position 2238 of SEQ ID NO: 1562384
ggugcauuugucucgcguu

SEQ ID NO: 1742904 - RNA, 19 nt, Artificial Sequence
  Description of Artificial Sequence: Synthetic oligonucleotide
  Antisense strand to SEQ ID NO: 1742903
aacgcgagacaaaugcacc

SEQ ID NO: 1742905 - RNA, 19 nt, Artificial Sequence
  Description of Artificial Sequence: Synthetic oligonucleotide
  Sense strand starting at position 2297 of SEQ ID NO: 1562384
caucuaauggugugaaaua

SEQ ID NO: 1742906 - RNA, 19 nt, Artificial Sequence
  Description of Artificial Sequence: Synthetic oligonucleotide
  Antisense strand to SEQ ID NO: 1742905
uauuucacaccauuagaug

SEQ ID NO: 1742907 - RNA, 19 nt, Artificial Sequence
  Description of Artificial Sequence: Synthetic oligonucleotide
  Sense strand starting at position 2447 of SEQ ID NO: 1562384
cucuguugcgugcuuuaaa

SEQ ID NO: 1742908 - RNA, 19 nt, Artificial Sequence
  Description of Artificial Sequence: Synthetic oligonucleotide
  Antisense strand to SEQ ID NO: 1742907
uuuaaagcacgcaacagag

SEQ ID NO: 1742909 - RNA, 19 nt, Artificial Sequence
  Description of Artificial Sequence: Synthetic oligonucleotide
  Sense strand starting at position 2509 of SEQ ID NO: 1562384
uauauuuguuccuagggac

SEQ ID NO: 1742910 - RNA, 19 nt, Artificial Sequence
  Description of Artificial Sequence: Synthetic oligonucleotide
  Antisense strand to SEQ ID NO: 1742909
gucccuaggaacaaauaua

SEQ ID NO: 1742911 - RNA, 19 nt, Artificial Sequence
  Description of Artificial Sequence: Synthetic oligonucleotide
  Sense strand starting at position 2572 of SEQ ID NO: 1562384
aggccauucccaggagaag

SEQ ID NO: 1742912 - RNA, 19 nt, Artificial Sequence
  Description of Artificial Sequence: Synthetic oligonucleotide
  Antisense strand to SEQ ID NO: 1742911
cuucuccugggaauggccu

SEQ ID NO: 1742913 - RNA, 19 nt, Artificial Sequence
  Description of Artificial Sequence: Synthetic oligonucleotide
  Sense strand starting at position 2669 of SEQ ID NO: 1562384
gaugaaguucuguacagca

SEQ ID NO: 1742914 - RNA, 19 nt, Artificial Sequence
  Description of Artificial Sequence: Synthetic oligonucleotide
  Antisense strand to SEQ ID NO: 1742913
ugcuguacagaacuucauc

SEQ ID NO: 1742915 - RNA, 19 nt, Artificial Sequence
  Description of Artificial Sequence: Synthetic oligonucleotide
  Sense strand starting at position 2671 of SEQ ID NO: 1562384
ugaaguucuguacagcaga

SEQ ID NO: 1742916 - RNA, 19 nt, Artificial Sequence
  Description of Artificial Sequence: Synthetic oligonucleotide
  Antisense strand to SEQ ID NO: 1742915
ucugcuguacagaacuuca

SEQ ID NO: 1742917 - RNA, 19 nt, Artificial Sequence
  Description of Artificial Sequence: Synthetic oligonucleotide
  Sense strand starting at position 2759 of SEQ ID NO: 1562384
ugugcagaacugugaggaa

SEQ ID NO: 1742918 - RNA, 19 nt, Artificial Sequence
  Description of Artificial Sequence: Synthetic oligonucleotide
  Antisense strand to SEQ ID NO: 1742917
uuccucacaguucugcaca

SEQ ID NO: 1742919 - RNA, 19 nt, Artificial Sequence
  Description of Artificial Sequence: Synthetic oligonucleotide
  Sense strand starting at position 2798 of SEQ ID NO: 1562384
cguggugacagugaugaaa

SEQ ID NO: 1742920 - RNA, 19 nt, Artificial Sequence
  Description of Artificial Sequence: Synthetic oligonucleotide
  Antisense strand to SEQ ID NO: 1742919
uuucaucacugucaccacg

SEQ ID NO: 1742921 - RNA, 19 nt, Artificial Sequence
  Description of Artificial Sequence: Synthetic oligonucleotide
  Sense strand starting at position 2969 of SEQ ID NO: 1562384
ugagaaggauuugaugcuu

SEQ ID NO: 1742922 - RNA, 19 nt, Artificial Sequence
  Description of Artificial Sequence: Synthetic oligonucleotide
  Antisense strand to SEQ ID NO: 1742921
aagcaucaaauccuucuca

SEQ ID NO: 1742923 - RNA, 19 nt, Artificial Sequence
  Description of Artificial Sequence: Synthetic oligonucleotide
  Sense strand starting at position 3096 of SEQ ID NO: 1562384
augcaauccuaugugagua

SEQ ID NO: 1742924 - RNA, 19 nt, Artificial Sequence
  Description of Artificial Sequence: Synthetic oligonucleotide
  Antisense strand to SEQ ID NO: 1742923
uacucacauaggauugcau

SEQ ID NO: 1742925 - RNA, 19 nt, Artificial Sequence
  Description of Artificial Sequence: Synthetic oligonucleotide
  Sense strand starting at position 3101 of SEQ ID NO: 1562384
auccuaugugaguaacuga

SEQ ID NO: 1742926 - RNA, 19 nt, Artificial Sequence
  Description of Artificial Sequence: Synthetic oligonucleotide
  Antisense strand to SEQ ID NO: 1742925
ucaguuacucacauaggau

SEQ ID NO: 1742927 - RNA, 19 nt, Artificial Sequence
  Description of Artificial Sequence: Synthetic oligonucleotide
  Sense strand starting at position 3104 of SEQ ID NO: 1562384
cuaugugaguaacugacua

SEQ ID NO: 1742928 - RNA, 19 nt, Artificial Sequence
  Description of Artificial Sequence: Synthetic oligonucleotide
  Antisense strand to SEQ ID NO: 1742927
uagucaguuacucacauag

SEQ ID NO: 1742929 - RNA, 19 nt, Artificial Sequence
  Description of Artificial Sequence: Synthetic oligonucleotide
  Sense strand starting at position 3108 of SEQ ID NO: 1562384
gugaguaacugacuaaguu

SEQ ID NO: 1742930 - RNA, 19 nt, Artificial Sequence
  Description of Artificial Sequence: Synthetic oligonucleotide
  Antisense strand to SEQ ID NO: 1742929
aacuuagucaguuacucac

SEQ ID NO: 1742931 - RNA, 19 nt, Artificial Sequence
  Description of Artificial Sequence: Synthetic oligonucleotide
  Sense strand starting at position 3269 of SEQ ID NO: 1562384
cugauaccacaugguaaau

SEQ ID NO: 1742932 - RNA, 19 nt, Artificial Sequence
  Description of Artificial Sequence: Synthetic oligonucleotide
  Antisense strand to SEQ ID NO: 1742931
auuuaccaugugguaucag

SEQ ID NO: 1742933 - RNA, 19 nt, Artificial Sequence
  Description of Artificial Sequence: Synthetic oligonucleotide
  Sense strand starting at position 3329 of SEQ ID NO: 1562384
augcuuucucagugaugga

SEQ ID NO: 1742934 - RNA, 19 nt, Artificial Sequence
  Description of Artificial Sequence: Synthetic oligonucleotide
  Antisense strand to SEQ ID NO: 1742933
uccaucacugagaaagcau

SEQ ID NO: 1742935 - RNA, 19 nt, Artificial Sequence
  Description of Artificial Sequence: Synthetic oligonucleotide
  Sense strand starting at position 3330 of SEQ ID NO: 1562384
ugcuuucucagugauggag

SEQ ID NO: 1742936 - RNA, 19 nt, Artificial Sequence
  Description of Artificial Sequence: Synthetic oligonucleotide
  Antisense strand to SEQ ID NO: 1742935
cuccaucacugagaaagca

SEQ ID NO: 1742937 - RNA, 19 nt, Artificial Sequence
  Description of Artificial Sequence: Synthetic oligonucleotide
  Sense strand starting at position 3339 of SEQ ID NO: 1562384
agugauggagucugaauaa

SEQ ID NO: 1742938 - RNA, 19 nt, Artificial Sequence
  Description of Artificial Sequence: Synthetic oligonucleotide
  Antisense strand to SEQ ID NO: 1742937
uuauucagacuccaucacu

SEQ ID NO: 1742939 - RNA, 19 nt, Artificial Sequence
  Description of Artificial Sequence: Synthetic oligonucleotide
  Sense strand starting at position 3391 of SEQ ID NO: 1562384
gaggaaauguuaucauucc

SEQ ID NO: 1742940 - RNA, 19 nt, Artificial Sequence
  Description of Artificial Sequence: Synthetic oligonucleotide
  Antisense strand to SEQ ID NO: 1742939
ggaaugauaacauuuccuc

SEQ ID NO: 1742941 - RNA, 19 nt, Artificial Sequence
  Description of Artificial Sequence: Synthetic oligonucleotide
  Sense strand starting at position 3453 of SEQ ID NO: 1562384
uuguccaagguccaugaua

SEQ ID NO: 1742942 - RNA, 19 nt, Artificial Sequence
  Description of Artificial Sequence: Synthetic oligonucleotide
  Antisense strand to SEQ ID NO: 1742941
uaucauggaccuuggacaa

SEQ ID NO: 1742943 - RNA, 19 nt, Artificial Sequence
  Description of Artificial Sequence: Synthetic oligonucleotide
  Sense strand starting at position 3455 of SEQ ID NO: 1562384
guccaagguccaugauaag

SEQ ID NO: 1742944 - RNA, 19 nt, Artificial Sequence
  Description of Artificial Sequence: Synthetic oligonucleotide
  Antisense strand to SEQ ID NO: 1742943
cuuaucauggaccuuggac

SEQ ID NO: 1742945 - RNA, 19 nt, Artificial Sequence
  Description of Artificial Sequence: Synthetic oligonucleotide
  Sense strand starting at position 3504 of SEQ ID NO: 1562384
gggcuuucuuuauuaaacc

SEQ ID NO: 1742946 - RNA, 19 nt, Artificial Sequence
  Description of Artificial Sequence: Synthetic oligonucleotide
  Antisense strand to SEQ ID NO: 1742945
gguuuaauaaagaaagccc

SEQ ID NO: 1742947 - RNA, 19 nt, Artificial Sequence
  Description of Artificial Sequence: Synthetic oligonucleotide
  Sense strand starting at position 3592 of SEQ ID NO: 1562384
gauccagagcuaggagauu

SEQ ID NO: 1742948 - RNA, 19 nt, Artificial Sequence
  Description of Artificial Sequence: Synthetic oligonucleotide
  Antisense strand to SEQ ID NO: 1742947
aaucuccuagcucuggauc

SEQ ID NO: 1742949 - RNA, 19 nt, Artificial Sequence
  Description of Artificial Sequence: Synthetic oligonucleotide
  Sense strand starting at position 3652 of SEQ ID NO: 1562384
acuaaaguguaugugggau

SEQ ID NO: 1742950 - RNA, 19 nt, Artificial Sequence
  Description of Artificial Sequence: Synthetic oligonucleotide
  Antisense strand to SEQ ID NO: 1742949
aucccacauacacuuuagu

SEQ ID NO: 1742951 - RNA, 19 nt, Artificial Sequence
  Description of Artificial Sequence: Synthetic oligonucleotide
  Sense strand starting at position 3659 of SEQ ID NO: 1562384
uguaugugggaucgggaua

SEQ ID NO: 1742952 - RNA, 19 nt, Artificial Sequence
  Description of Artificial Sequence: Synthetic oligonucleotide
  Antisense strand to SEQ ID NO: 1742951
uaucccgaucccacauaca

SEQ ID NO: 1742953 - RNA, 19 nt, Artificial Sequence
  Description of Artificial Sequence: Synthetic oligonucleotide
  Sense strand starting at position 3744 of SEQ ID NO: 1562384
cugucuagaccucauccua

SEQ ID NO: 1742954 - RNA, 19 nt, Artificial Sequence
  Description of Artificial Sequence: Synthetic oligonucleotide
  Antisense strand to SEQ ID NO: 1742953
uaggaugaggucuagacag

SEQ ID NO: 1742955 - RNA, 19 nt, Artificial Sequence
  Description of Artificial Sequence: Synthetic oligonucleotide
  Sense strand starting at position 3830 of SEQ ID NO: 1562384
uaugguagccuauagaucu

SEQ ID NO: 1742956 - RNA, 19 nt, Artificial Sequence
  Description of Artificial Sequence: Synthetic oligonucleotide
  Antisense strand to SEQ ID NO: 1742955
agaucuauaggcuaccaua

SEQ ID NO: 1742957 - RNA, 19 nt, Artificial Sequence
  Description of Artificial Sequence: Synthetic oligonucleotide
  Sense strand starting at position 3843 of SEQ ID NO: 1562384
agaucuaaguggcuauaua

SEQ ID NO: 1742958 - RNA, 19 nt, Artificial Sequence
  Description of Artificial Sequence: Synthetic oligonucleotide
  Antisense strand to SEQ ID NO: 1742957
uauauagccacuuagaucu

SEQ ID NO: 1742959 - RNA, 19 nt, Artificial Sequence
  Description of Artificial Sequence: Synthetic oligonucleotide
  Sense strand starting at position 3844 of SEQ ID NO: 1562384
gaucuaaguggcuauauac

SEQ ID NO: 1742960 - RNA, 19 nt, Artificial Sequence
  Description of Artificial Sequence: Synthetic oligonucleotide
  Antisense strand to SEQ ID NO: 1742959
guauauagccacuuagauc

SEQ ID NO: 1742961 - RNA, 19 nt, Artificial Sequence
  Description of Artificial Sequence: Synthetic oligonucleotide
  Sense strand starting at position 506 of SEQ ID NO: 1562385
aggaucaccuuccuugauu

SEQ ID NO: 1742962 - RNA, 19 nt, Artificial Sequence
  Description of Artificial Sequence: Synthetic oligonucleotide
  Antisense strand to SEQ ID NO: 1742961
aaucaaggaaggugauccu

SEQ ID NO: 1742963 - RNA, 19 nt, Artificial Sequence
  Description of Artificial Sequence: Synthetic oligonucleotide
  Sense strand starting at position 712 of SEQ ID NO: 1562385
ggcaccugucaauggauga

SEQ ID NO: 1742964 - RNA, 19 nt, Artificial Sequence
  Description of Artificial Sequence: Synthetic oligonucleotide
  Antisense strand to SEQ ID NO: 1742963
ucauccauugacaggugcc

SEQ ID NO: 1742965 - RNA, 19 nt, Artificial Sequence
  Description of Artificial Sequence: Synthetic oligonucleotide
  Sense strand starting at position 737 of SEQ ID NO: 1562385
cucccuuagccugauguca

SEQ ID NO: 1742966 - RNA, 19 nt, Artificial Sequence
  Description of Artificial Sequence: Synthetic oligonucleotide
  Antisense strand to SEQ ID NO: 1742965
ugacaucaggcuaagggag

SEQ ID NO: 1742967 - RNA, 19 nt, Artificial Sequence
  Description of Artificial Sequence: Synthetic oligonucleotide
  Sense strand starting at position 793 of SEQ ID NO: 1562385
gaggaaagggucugugcaa

SEQ ID NO: 1742968 - RNA, 19 nt, Artificial Sequence
  Description of Artificial Sequence: Synthetic oligonucleotide
  Antisense strand to SEQ ID NO: 1742967
uugcacagacccuuuccuc

SEQ ID NO: 1742969 - RNA, 19 nt, Artificial Sequence
  Description of Artificial Sequence: Synthetic oligonucleotide
  Sense strand starting at position 1025 of SEQ ID NO: 1562385
gucuguuuggugguugcua

SEQ ID NO: 1742970 - RNA, 19 nt, Artificial Sequence
  Description of Artificial Sequence: Synthetic oligonucleotide
  Antisense strand to SEQ ID NO: 1742969
uagcaaccaccaaacagac

SEQ ID NO: 1742971 - RNA, 19 nt, Artificial Sequence
  Description of Artificial Sequence: Synthetic oligonucleotide
  Sense strand starting at position 1108 of SEQ ID NO: 1562385
augggagguguuuagucau

SEQ ID NO: 1742972 - RNA, 19 nt, Artificial Sequence
  Description of Artificial Sequence: Synthetic oligonucleotide
  Antisense strand to SEQ ID NO: 1742971
augacuaaacaccucccau

SEQ ID NO: 1742973 - RNA, 19 nt, Artificial Sequence
  Description of Artificial Sequence: Synthetic oligonucleotide
  Sense strand starting at position 1111 of SEQ ID NO: 1562385
ggagguguuuagucaugag

SEQ ID NO: 1742974 - RNA, 19 nt, Artificial Sequence
  Description of Artificial Sequence: Synthetic oligonucleotide
  Antisense strand to SEQ ID NO: 1742973
cucaugacuaaacaccucc

SEQ ID NO: 1742975 - RNA, 19 nt, Artificial Sequence
  Description of Artificial Sequence: Synthetic oligonucleotide
  Sense strand starting at position 1224 of SEQ ID NO: 1562385
ccaccaugucauggcaaga

SEQ ID NO: 1742976 - RNA, 19 nt, Artificial Sequence
  Description of Artificial Sequence: Synthetic oligonucleotide
  Antisense strand to SEQ ID NO: 1742975
ucuugccaugacauggugg

SEQ ID NO: 1742977 - RNA, 19 nt, Artificial Sequence
  Description of Artificial Sequence: Synthetic oligonucleotide
  Sense strand starting at position 1305 of SEQ ID NO: 1562385
ugcauuucugucuguuaca

SEQ ID NO: 1742978 - RNA, 19 nt, Artificial Sequence
  Description of Artificial Sequence: Synthetic oligonucleotide
  Antisense strand to SEQ ID NO: 1742977
uguaacagacagaaaugca

SEQ ID NO: 1742979 - RNA, 19 nt, Artificial Sequence
  Description of Artificial Sequence: Synthetic oligonucleotide
  Sense strand starting at position 1306 of SEQ ID NO: 1562385
gcauuucugucuguuacaa

SEQ ID NO: 1742980 - RNA, 19 nt, Artificial Sequence
  Description of Artificial Sequence: Synthetic oligonucleotide
  Antisense strand to SEQ ID NO: 1742979
uuguaacagacagaaaugc

SEQ ID NO: 1742981 - RNA, 19 nt, Artificial Sequence
  Description of Artificial Sequence: Synthetic oligonucleotide
  Sense strand starting at position 1837 of SEQ ID NO: 1562385
agccuuuaaggaggucuau

SEQ ID NO: 1742982 - RNA, 19 nt, Artificial Sequence
  Description of Artificial Sequence: Synthetic oligonucleotide
  Antisense strand to SEQ ID NO: 1742981
auagaccuccuuaaaggcu

SEQ ID NO: 1742983 - RNA, 19 nt, Artificial Sequence
  Description of Artificial Sequence: Synthetic oligonucleotide
  Sense strand starting at position 1847 of SEQ ID NO: 1562385
gaggucuauuggucaccau

SEQ ID NO: 1742984 - RNA, 19 nt, Artificial Sequence
  Description of Artificial Sequence: Synthetic oligonucleotide
  Antisense strand to SEQ ID NO: 1742983
auggugaccaauagaccuc

SEQ ID NO: 1742985 - RNA, 19 nt, Artificial Sequence
  Description of Artificial Sequence: Synthetic oligonucleotide
  Sense strand starting at position 1848 of SEQ ID NO: 1562385
aggucuauuggucaccauu

SEQ ID NO: 1742986 - RNA, 19 nt, Artificial Sequence
  Description of Artificial Sequence: Synthetic oligonucleotide
  Antisense strand to SEQ ID NO: 1742985
aauggugaccaauagaccu

SEQ ID NO: 1742987 - RNA, 19 nt, Artificial Sequence
  Description of Artificial Sequence: Synthetic oligonucleotide
  Sense strand starting at position 1935 of SEQ ID NO: 1562385
cguuguucccuggagagga

SEQ ID NO: 1742988 - RNA, 19 nt, Artificial Sequence
  Description of Artificial Sequence: Synthetic oligonucleotide
  Antisense strand to SEQ ID NO: 1742987
uccucuccagggaacaacg

SEQ ID NO: 1742989 - RNA, 19 nt, Artificial Sequence
  Description of Artificial Sequence: Synthetic oligonucleotide
  Sense strand starting at position 1965 of SEQ ID NO: 1562385
cagaaaguacucugacguu

SEQ ID NO: 1742990 - RNA, 19 nt, Artificial Sequence
  Description of Artificial Sequence: Synthetic oligonucleotide
  Antisense strand to SEQ ID NO: 1742989
aacgucagaguacuuucug

SEQ ID NO: 1742991 - RNA, 19 nt, Artificial Sequence
  Description of Artificial Sequence: Synthetic oligonucleotide
  Sense strand starting at position 1989 of SEQ ID NO: 1562385
auuugugauuucuaucacu

SEQ ID NO: 1742992 - RNA, 19 nt, Artificial Sequence
  Description of Artificial Sequence: Synthetic oligonucleotide
  Antisense strand to SEQ ID NO: 1742991
agugauagaaaucacaaau

SEQ ID NO: 1742993 - RNA, 19 nt, Artificial Sequence
  Description of Artificial Sequence: Synthetic oligonucleotide
  Sense strand starting at position 2096 of SEQ ID NO: 1562385
ugguuuauggcguaauuuc

SEQ ID NO: 1742994 - RNA, 19 nt, Artificial Sequence
  Description of Artificial Sequence: Synthetic oligonucleotide
  Antisense strand to SEQ ID NO: 1742993
gaaauuacgccauaaacca

SEQ ID NO: 1742995 - RNA, 19 nt, Artificial Sequence
  Description of Artificial Sequence: Synthetic oligonucleotide
  Sense strand starting at position 2104 of SEQ ID NO: 1562385
ggcguaauuuccuuccuga

SEQ ID NO: 1742996 - RNA, 19 nt, Artificial Sequence
  Description of Artificial Sequence: Synthetic oligonucleotide
  Antisense strand to SEQ ID NO: 1742995
ucaggaaggaaauuacgcc

SEQ ID NO: 1742997 - RNA, 19 nt, Artificial Sequence
  Description of Artificial Sequence: Synthetic oligonucleotide
  Sense strand starting at position 2288 of SEQ ID NO: 1562385
uauauaguggcauaguauu

SEQ ID NO: 1742998 - RNA, 19 nt, Artificial Sequence
  Description of Artificial Sequence: Synthetic oligonucleotide
  Antisense strand to SEQ ID NO: 1742997
aauacuaugccacuauaua

SEQ ID NO: 1742999 - RNA, 19 nt, Artificial Sequence
  Description of Artificial Sequence: Synthetic oligonucleotide
  Sense strand starting at position 2329 of SEQ ID NO: 1562385
gccaaucauagauggugau

SEQ ID NO: 1743000 - RNA, 19 nt, Artificial Sequence
  Description of Artificial Sequence: Synthetic oligonucleotide
  Antisense strand to SEQ ID NO: 1742999
aucaccaucuaugauuggc

SEQ ID NO: 1743001 - RNA, 19 nt, Artificial Sequence
  Description of Artificial Sequence: Synthetic oligonucleotide
  Sense strand starting at position 2330 of SEQ ID NO: 1562385
ccaaucauagauggugauu

SEQ ID NO: 1743002 - RNA, 19 nt, Artificial Sequence
  Description of Artificial Sequence: Synthetic oligonucleotide
  Antisense strand to SEQ ID NO: 1743001
aaucaccaucuaugauugg

SEQ ID NO: 1743003 - RNA, 19 nt, Artificial Sequence
  Description of Artificial Sequence: Synthetic oligonucleotide
  Sense strand starting at position 2588 of SEQ ID NO: 1562385
agaagaaauuagucgucua

SEQ ID NO: 1743004 - RNA, 19 nt, Artificial Sequence
  Description of Artificial Sequence: Synthetic oligonucleotide
  Antisense strand to SEQ ID NO: 1743003
uagacgacuaauuucuucu

SEQ ID NO: 1743005 - RNA, 19 nt, Artificial Sequence
  Description of Artificial Sequence: Synthetic oligonucleotide
  Sense strand starting at position 2591 of SEQ ID NO: 1562385
agaaauuagucgucuauua

SEQ ID NO: 1743006 - RNA, 19 nt, Artificial Sequence
  Description of Artificial Sequence: Synthetic oligonucleotide
  Antisense strand to SEQ ID NO: 1743005
uaauagacgacuaauuucu

SEQ ID NO: 1743007 - RNA, 19 nt, Artificial Sequence
  Description of Artificial Sequence: Synthetic oligonucleotide
  Sense strand starting at position 2593 of SEQ ID NO: 1562385
aaauuagucgucuauuaga

SEQ ID NO: 1743008 - RNA, 19 nt, Artificial Sequence
  Description of Artificial Sequence: Synthetic oligonucleotide
  Antisense strand to SEQ ID NO: 1743007
ucuaauagacgacuaauuu

SEQ ID NO: 1743009 - RNA, 19 nt, Artificial Sequence
  Description of Artificial Sequence: Synthetic oligonucleotide
  Sense strand starting at position 2622 of SEQ ID NO: 1562385
guaaauaugguccaaguug

SEQ ID NO: 1743010 - RNA, 19 nt, Artificial Sequence
  Description of Artificial Sequence: Synthetic oligonucleotide
  Antisense strand to SEQ ID NO: 1743009
caacuuggaccauauuuac

SEQ ID NO: 1743011 - RNA, 19 nt, Artificial Sequence
  Description of Artificial Sequence: Synthetic oligonucleotide
  Sense strand starting at position 2664 of SEQ ID NO: 1562385
auagacauaucagugucuu

SEQ ID NO: 1743012 - RNA, 19 nt, Artificial Sequence
  Description of Artificial Sequence: Synthetic oligonucleotide
  Antisense strand to SEQ ID NO: 1743011
aagacacugauaugucuau

SEQ ID NO: 1743013 - RNA, 19 nt, Artificial Sequence
  Description of Artificial Sequence: Synthetic oligonucleotide
  Sense strand starting at position 2746 of SEQ ID NO: 1562385
uuaagaaugucaucagagc

SEQ ID NO: 1743014 - RNA, 19 nt, Artificial Sequence
  Description of Artificial Sequence: Synthetic oligonucleotide
  Antisense strand to SEQ ID NO: 1743013
gcucugaugacauucuuaa

SEQ ID NO: 1743015 - RNA, 19 nt, Artificial Sequence
  Description of Artificial Sequence: Synthetic oligonucleotide
  Sense strand starting at position 2752 of SEQ ID NO: 1562385
augucaucagagcaucaca

SEQ ID NO: 1743016 - RNA, 19 nt, Artificial Sequence
  Description of Artificial Sequence: Synthetic oligonucleotide
  Antisense strand to SEQ ID NO: 1743015
ugugaugcucugaugacau

SEQ ID NO: 1743017 - RNA, 19 nt, Artificial Sequence
  Description of Artificial Sequence: Synthetic oligonucleotide
  Sense strand starting at position 3206 of SEQ ID NO: 1562385
gacaauuugugggauuaaa

SEQ ID NO: 1743018 - RNA, 19 nt, Artificial Sequence
  Description of Artificial Sequence: Synthetic oligonucleotide
  Antisense strand to SEQ ID NO: 1743017
uuuaaucccacaaauuguc

SEQ ID NO: 1743019 - RNA, 19 nt, Artificial Sequence
  Description of Artificial Sequence: Synthetic oligonucleotide
  Sense strand starting at position 3217 of SEQ ID NO: 1562385
ggauuaaagcucuaagcug

SEQ ID NO: 1743020 - RNA, 19 nt, Artificial Sequence
  Description of Artificial Sequence: Synthetic oligonucleotide
  Antisense strand to SEQ ID NO: 1743019
cagcuuagagcuuuaaucc

SEQ ID NO: 1743021 - RNA, 19 nt, Artificial Sequence
  Description of Artificial Sequence: Synthetic oligonucleotide
  Sense strand starting at position 3262 of SEQ ID NO: 1562385
gggagcaagccucauuauu

SEQ ID NO: 1743022 - RNA, 19 nt, Artificial Sequence
  Description of Artificial Sequence: Synthetic oligonucleotide
  Antisense strand to SEQ ID NO: 1743021
aauaaugaggcuugcuccc

SEQ ID NO: 1743023 - RNA, 19 nt, Artificial Sequence
  Description of Artificial Sequence: Synthetic oligonucleotide
  Sense strand starting at position 3422 of SEQ ID NO: 1562385
gcguguugaacgucuacua

SEQ ID NO: 1743024 - RNA, 19 nt, Artificial Sequence
  Description of Artificial Sequence: Synthetic oligonucleotide
  Antisense strand to SEQ ID NO: 1743023
uaguagacguucaacacgc

SEQ ID NO: 1743025 - RNA, 19 nt, Artificial Sequence
  Description of Artificial Sequence: Synthetic oligonucleotide
  Sense strand starting at position 3667 of SEQ ID NO: 1562385
gcuuauugugaccaauaau

SEQ ID NO: 1743026 - RNA, 19 nt, Artificial Sequence
  Description of Artificial Sequence: Synthetic oligonucleotide
  Antisense strand to SEQ ID NO: 1743025
auuauuggucacaauaagc

SEQ ID NO: 1743027 - RNA, 19 nt, Artificial Sequence
  Description of Artificial Sequence: Synthetic oligonucleotide
  Sense strand starting at position 3678 of SEQ ID NO: 1562385
ccaauaaugcaagaaguuu

SEQ ID NO: 1743028 - RNA, 19 nt, Artificial Sequence
  Description of Artificial Sequence: Synthetic oligonucleotide
  Antisense strand to SEQ ID NO: 1743027
aaacuucuugcauuauugg

SEQ ID NO: 1743029 - RNA, 19 nt, Artificial Sequence
  Description of Artificial Sequence: Synthetic oligonucleotide
  Sense strand starting at position 3689 of SEQ ID NO: 1562385
agaaguuucuggguuccca

SEQ ID NO: 1743030 - RNA, 19 nt, Artificial Sequence
  Description of Artificial Sequence: Synthetic oligonucleotide
  Antisense strand to SEQ ID NO: 1743029
ugggaacccagaaacuucu

SEQ ID NO: 1743031 - RNA, 19 nt, Artificial Sequence
  Description of Artificial Sequence: Synthetic oligonucleotide
  Sense strand starting at position 3718 of SEQ ID NO: 1562385
uuugaaagucacugcauca

SEQ ID NO: 1743032 - RNA, 19 nt, Artificial Sequence
  Description of Artificial Sequence: Synthetic oligonucleotide
  Antisense strand to SEQ ID NO: 1743031
ugaugcagugacuuucaaa

SEQ ID NO: 1743033 - RNA, 19 nt, Artificial Sequence
  Description of Artificial Sequence: Synthetic oligonucleotide
  Sense strand starting at position 3788 of SEQ ID NO: 1562385
augugaaaugaccgacauu

SEQ ID NO: 1743034 - RNA, 19 nt, Artificial Sequence
  Description of Artificial Sequence: Synthetic oligonucleotide
  Antisense strand to SEQ ID NO: 1743033
aaugucggucauuucacau

SEQ ID NO: 1743035 - RNA, 19 nt, Artificial Sequence
  Description of Artificial Sequence: Synthetic oligonucleotide
  Sense strand starting at position 3789 of SEQ ID NO: 1562385
ugugaaaugaccgacauuc

SEQ ID NO: 1743036 - RNA, 19 nt, Artificial Sequence
  Description of Artificial Sequence: Synthetic oligonucleotide
  Antisense strand to SEQ ID NO: 1743035
gaaugucggucauuucaca

SEQ ID NO: 1743037 - RNA, 19 nt, Artificial Sequence
  Description of Artificial Sequence: Synthetic oligonucleotide
  Sense strand starting at position 3836 of SEQ ID NO: 1562385
uuugccacugauugaaagu

SEQ ID NO: 1743038 - RNA, 19 nt, Artificial Sequence
  Description of Artificial Sequence: Synthetic oligonucleotide
  Antisense strand to SEQ ID NO: 1743037
acuuucaaucaguggcaaa

SEQ ID NO: 1743039 - RNA, 19 nt, Artificial Sequence
  Description of Artificial Sequence: Synthetic oligonucleotide
  Sense strand starting at position 3966 of SEQ ID NO: 1562385
gagguagcugcuggaauuu

SEQ ID NO: 1743040 - RNA, 19 nt, Artificial Sequence
  Description of Artificial Sequence: Synthetic oligonucleotide
  Antisense strand to SEQ ID NO: 1743039
aaauuccagcagcuaccuc

SEQ ID NO: 1743041 - RNA, 19 nt, Artificial Sequence
  Description of Artificial Sequence: Synthetic oligonucleotide
  Sense strand starting at position 656 of SEQ ID NO: 1562387
agagcuuaaguccagcuaa

SEQ ID NO: 1743042 - RNA, 19 nt, Artificial Sequence
  Description of Artificial Sequence: Synthetic oligonucleotide
  Antisense strand to SEQ ID NO: 1743041
uuagcuggacuuaagcucu

SEQ ID NO: 1743043 - RNA, 19 nt, Artificial Sequence
  Description of Artificial Sequence: Synthetic oligonucleotide
  Sense strand starting at position 81 of SEQ ID NO: 1562388
ggcccaucaggauaaucuu

SEQ ID NO: 1743044 - RNA, 19 nt, Artificial Sequence
  Description of Artificial Sequence: Synthetic oligonucleotide
  Antisense strand to SEQ ID NO: 1743043
aagauuauccugaugggcc

SEQ ID NO: 1743045 - RNA, 19 nt, Artificial Sequence
  Description of Artificial Sequence: Synthetic oligonucleotide
  Sense strand starting at position 1095 of SEQ ID NO: 1562388
ucucgaugugcccagacau

SEQ ID NO: 1743046 - RNA, 19 nt, Artificial Sequence
  Description of Artificial Sequence: Synthetic oligonucleotide
  Antisense strand to SEQ ID NO: 1743045
augucugggcacaucgaga

SEQ ID NO: 1743047 - RNA, 19 nt, Artificial Sequence
  Description of Artificial Sequence: Synthetic oligonucleotide
  Sense strand starting at position 1118 of SEQ ID NO: 1562388
ggugcacacuugucugaca

SEQ ID NO: 1743048 - RNA, 19 nt, Artificial Sequence
  Description of Artificial Sequence: Synthetic oligonucleotide
  Antisense strand to SEQ ID NO: 1743047
ugucagacaagugugcacc

SEQ ID NO: 1743049 - RNA, 19 nt, Artificial Sequence
  Description of Artificial Sequence: Synthetic oligonucleotide
  Sense strand starting at position 1442 of SEQ ID NO: 1562388
aggaucaccuuccuugauu

SEQ ID NO: 1743050 - RNA, 19 nt, Artificial Sequence
  Description of Artificial Sequence: Synthetic oligonucleotide
  Antisense strand to SEQ ID NO: 1743049
aaucaaggaaggugauccu

SEQ ID NO: 1743051 - RNA, 19 nt, Artificial Sequence
  Description of Artificial Sequence: Synthetic oligonucleotide
  Sense strand starting at position 1648 of SEQ ID NO: 1562388
ggcaccugucaauggauga

SEQ ID NO: 1743052 - RNA, 19 nt, Artificial Sequence
  Description of Artificial Sequence: Synthetic oligonucleotide
  Antisense strand to SEQ ID NO: 1743051
ucauccauugacaggugcc

SEQ ID NO: 1743053 - RNA, 19 nt, Artificial Sequence
  Description of Artificial Sequence: Synthetic oligonucleotide
  Sense strand starting at position 1673 of SEQ ID NO: 1562388
cucccuuagccugauguca

SEQ ID NO: 1743054 - RNA, 19 nt, Artificial Sequence
  Description of Artificial Sequence: Synthetic oligonucleotide
  Antisense strand to SEQ ID NO: 1743053
ugacaucaggcuaagggag

SEQ ID NO: 1743055 - RNA, 19 nt, Artificial Sequence
  Description of Artificial Sequence: Synthetic oligonucleotide
  Sense strand starting at position 1729 of SEQ ID NO: 1562388
gaggaaagggucugugcaa

SEQ ID NO: 1743056 - RNA, 19 nt, Artificial Sequence
  Description of Artificial Sequence: Synthetic oligonucleotide
  Antisense strand to SEQ ID NO: 1743055
uugcacagacccuuuccuc

SEQ ID NO: 1743057 - RNA, 19 nt, Artificial Sequence
  Description of Artificial Sequence: Synthetic oligonucleotide
  Sense strand starting at position 1773 of SEQ ID NO: 1562388
ucugaagucuccucaagca

SEQ ID NO: 1743058 - RNA, 19 nt, Artificial Sequence
  Description of Artificial Sequence: Synthetic oligonucleotide
  Antisense strand to SEQ ID NO: 1743057
ugcuugaggagacuucaga

SEQ ID NO: 1743059 - RNA, 19 nt, Artificial Sequence
  Description of Artificial Sequence: Synthetic oligonucleotide
  Sense strand starting at position 1961 of SEQ ID NO: 1562388
gucuguuuggugguugcua

SEQ ID NO: 1743060 - RNA, 19 nt, Artificial Sequence
  Description of Artificial Sequence: Synthetic oligonucleotide
  Antisense strand to SEQ ID NO: 1743059
uagcaaccaccaaacagac

SEQ ID NO: 1743061 - RNA, 19 nt, Artificial Sequence
  Description of Artificial Sequence: Synthetic oligonucleotide
  Sense strand starting at position 2044 of SEQ ID NO: 1562388
augggagguguuuagucau

SEQ ID NO: 1743062 - RNA, 19 nt, Artificial Sequence
  Description of Artificial Sequence: Synthetic oligonucleotide
  Antisense strand to SEQ ID NO: 1743061
augacuaaacaccucccau

SEQ ID NO: 1743063 - RNA, 19 nt, Artificial Sequence
  Description of Artificial Sequence: Synthetic oligonucleotide
  Sense strand starting at position 2047 of SEQ ID NO: 1562388
ggagguguuuagucaugag

SEQ ID NO: 1743064 - RNA, 19 nt, Artificial Sequence
  Description of Artificial Sequence: Synthetic oligonucleotide
  Antisense strand to SEQ ID NO: 1743063
cucaugacuaaacaccucc

SEQ ID NO: 1743065 - RNA, 19 nt, Artificial Sequence
  Description of Artificial Sequence: Synthetic oligonucleotide
  Sense strand starting at position 2051 of SEQ ID NO: 1562388
guguuuagucaugagggcu

SEQ ID NO: 1743066 - RNA, 19 nt, Artificial Sequence
  Description of Artificial Sequence: Synthetic oligonucleotide
  Antisense strand to SEQ ID NO: 1743065
agcccucaugacuaaacac

SEQ ID NO: 1743067 - RNA, 19 nt, Artificial Sequence
  Description of Artificial Sequence: Synthetic oligonucleotide
  Sense strand starting at position 2160 of SEQ ID NO: 1562388
ccaccaugucauggcaaga

SEQ ID NO: 1743068 - RNA, 19 nt, Artificial Sequence
  Description of Artificial Sequence: Synthetic oligonucleotide
  Antisense strand to SEQ ID NO: 1743067
ucuugccaugacauggugg

SEQ ID NO: 1743069 - RNA, 19 nt, Artificial Sequence
  Description of Artificial Sequence: Synthetic oligonucleotide
  Sense strand starting at position 2241 of SEQ ID NO: 1562388
ugcauuucugucuguuaca

SEQ ID NO: 1743070 - RNA, 19 nt, Artificial Sequence
  Description of Artificial Sequence: Synthetic oligonucleotide
  Antisense strand to SEQ ID NO: 1743069
uguaacagacagaaaugca

SEQ ID NO: 1743071 - RNA, 19 nt, Artificial Sequence
  Description of Artificial Sequence: Synthetic oligonucleotide
  Sense strand starting at position 2242 of SEQ ID NO: 1562388
gcauuucugucuguuacaa

SEQ ID NO: 1743072 - RNA, 19 nt, Artificial Sequence
  Description of Artificial Sequence: Synthetic oligonucleotide
  Antisense strand to SEQ ID NO: 1743071
uuguaacagacagaaaugc

SEQ ID NO: 1743073 - RNA, 19 nt, Artificial Sequence
  Description of Artificial Sequence: Synthetic oligonucleotide
  Sense strand starting at position 2508 of SEQ ID NO: 1562388
gcuucugcaguuggaagaa

SEQ ID NO: 1743074 - RNA, 19 nt, Artificial Sequence
  Description of Artificial Sequence: Synthetic oligonucleotide
  Antisense strand to SEQ ID NO: 1743073
uucuuccaacugcagaagc

SEQ ID NO: 1743075 - RNA, 19 nt, Artificial Sequence
  Description of Artificial Sequence: Synthetic oligonucleotide
  Sense strand starting at position 2713 of SEQ ID NO: 1562388
gggacucugcugcagucau

SEQ ID NO: 1743076 - RNA, 19 nt, Artificial Sequence
  Description of Artificial Sequence: Synthetic oligonucleotide
  Antisense strand to SEQ ID NO: 1743075
augacugcagcagaguccc

SEQ ID NO: 1743077 - RNA, 19 nt, Artificial Sequence
  Description of Artificial Sequence: Synthetic oligonucleotide
  Sense strand starting at position 2773 of SEQ ID NO: 1562388
agccuuuaaggaggucuau

SEQ ID NO: 1743078 - RNA, 19 nt, Artificial Sequence
  Description of Artificial Sequence: Synthetic oligonucleotide
  Antisense strand to SEQ ID NO: 1743077
auagaccuccuuaaaggcu

SEQ ID NO: 1743079 - RNA, 19 nt, Artificial Sequence
  Description of Artificial Sequence: Synthetic oligonucleotide
  Sense strand starting at position 2783 of SEQ ID NO: 1562388
gaggucuauuggucaccau

SEQ ID NO: 1743080 - RNA, 19 nt, Artificial Sequence
  Description of Artificial Sequence: Synthetic oligonucleotide
  Antisense strand to SEQ ID NO: 1743079
auggugaccaauagaccuc

SEQ ID NO: 1743081 - RNA, 19 nt, Artificial Sequence
  Description of Artificial Sequence: Synthetic oligonucleotide
  Sense strand starting at position 2784 of SEQ ID NO: 1562388
aggucuauuggucaccauu

SEQ ID NO: 1743082 - RNA, 19 nt, Artificial Sequence
  Description of Artificial Sequence: Synthetic oligonucleotide
  Antisense strand to SEQ ID NO: 1743081
aauggugaccaauagaccu

SEQ ID NO: 1743083 - RNA, 19 nt, Artificial Sequence
  Description of Artificial Sequence: Synthetic oligonucleotide
  Sense strand starting at position 2832 of SEQ ID NO: 1562388
cggaggauccgguagugua

SEQ ID NO: 1743084 - RNA, 19 nt, Artificial Sequence
  Description of Artificial Sequence: Synthetic oligonucleotide
  Antisense strand to SEQ ID NO: 1743083
uacacuaccggauccuccg

SEQ ID NO: 1743085 - RNA, 19 nt, Artificial Sequence
  Description of Artificial Sequence: Synthetic oligonucleotide
  Sense strand starting at position 2871 of SEQ ID NO: 1562388
cguuguucccuggagagga

SEQ ID NO: 1743086 - RNA, 19 nt, Artificial Sequence
  Description of Artificial Sequence: Synthetic oligonucleotide
  Antisense strand to SEQ ID NO: 1743085
uccucuccagggaacaacg

SEQ ID NO: 1743087 - RNA, 19 nt, Artificial Sequence
  Description of Artificial Sequence: Synthetic oligonucleotide
  Sense strand starting at position 2901 of SEQ ID NO: 1562388
cagaaaguacucugacguu

SEQ ID NO: 1743088 - RNA, 19 nt, Artificial Sequence
  Description of Artificial Sequence: Synthetic oligonucleotide
  Antisense strand to SEQ ID NO: 1743087
aacgucagaguacuuucug

SEQ ID NO: 1743089 - RNA, 19 nt, Artificial Sequence
  Description of Artificial Sequence: Synthetic oligonucleotide
  Sense strand starting at position 2925 of SEQ ID NO: 1562388
auuugugauuucuaucacu

SEQ ID NO: 1743090 - RNA, 19 nt, Artificial Sequence
  Description of Artificial Sequence: Synthetic oligonucleotide
  Antisense strand to SEQ ID NO: 1743089
agugauagaaaucacaaau

SEQ ID NO: 1743091 - RNA, 19 nt, Artificial Sequence
  Description of Artificial Sequence: Synthetic oligonucleotide
  Sense strand starting at position 3032 of SEQ ID NO: 1562388
ugguuuauggcguaauuuc

SEQ ID NO: 1743092 - RNA, 19 nt, Artificial Sequence
  Description of Artificial Sequence: Synthetic oligonucleotide
  Antisense strand to SEQ ID NO: 1743091
gaaauuacgccauaaacca

SEQ ID NO: 1743093 - RNA, 19 nt, Artificial Sequence
  Description of Artificial Sequence: Synthetic oligonucleotide
  Sense strand starting at position 3040 of SEQ ID NO: 1562388
ggcguaauuuccuuccuga

SEQ ID NO: 1743094 - RNA, 19 nt, Artificial Sequence
  Description of Artificial Sequence: Synthetic oligonucleotide
  Antisense strand to SEQ ID NO: 1743093
ucaggaaggaaauuacgcc

SEQ ID NO: 1743095 - RNA, 19 nt, Artificial Sequence
  Description of Artificial Sequence: Synthetic oligonucleotide
  Sense strand starting at position 3224 of SEQ ID NO: 1562388
uauauaguggcauaguauu

SEQ ID NO: 1743096 - RNA, 19 nt, Artificial Sequence
  Description of Artificial Sequence: Synthetic oligonucleotide
  Antisense strand to SEQ ID NO: 1743095
aauacuaugccacuauaua

SEQ ID NO: 1743097 - RNA, 19 nt, Artificial Sequence
  Description of Artificial Sequence: Synthetic oligonucleotide
  Sense strand starting at position 3265 of SEQ ID NO: 1562388
gccaaucauagauggugau

SEQ ID NO: 1743098 - RNA, 19 nt, Artificial Sequence
  Description of Artificial Sequence: Synthetic oligonucleotide
  Antisense strand to SEQ ID NO: 1743097
aucaccaucuaugauuggc

SEQ ID NO: 1743099 - RNA, 19 nt, Artificial Sequence
  Description of Artificial Sequence: Synthetic oligonucleotide
  Sense strand starting at position 3266 of SEQ ID NO: 1562388
ccaaucauagauggugauu

SEQ ID NO: 1743100 - RNA, 19 nt, Artificial Sequence
  Description of Artificial Sequence: Synthetic oligonucleotide
  Antisense strand to SEQ ID NO: 1743099
aaucaccaucuaugauugg

SEQ ID NO: 1743101 - RNA, 19 nt, Artificial Sequence
  Description of Artificial Sequence: Synthetic oligonucleotide
  Sense strand starting at position 3268 of SEQ ID NO: 1562388
aaucauagauggugauuua

SEQ ID NO: 1743102 - RNA, 19 nt, Artificial Sequence
  Description of Artificial Sequence: Synthetic oligonucleotide
  Antisense strand to SEQ ID NO: 1743101
uaaaucaccaucuaugauu

SEQ ID NO: 1743103 - RNA, 19 nt, Artificial Sequence
  Description of Artificial Sequence: Synthetic oligonucleotide
  Sense strand starting at position 3319 of SEQ ID NO: 1562388
cuauguaaaugcuuuguaa

SEQ ID NO: 1743104 - RNA, 19 nt, Artificial Sequence
  Description of Artificial Sequence: Synthetic oligonucleotide
  Antisense strand to SEQ ID NO: 1743103
uuacaaagcauuuacauag

SEQ ID NO: 1743105 - RNA, 19 nt, Artificial Sequence
  Description of Artificial Sequence: Synthetic oligonucleotide
  Sense strand starting at position 3419 of SEQ ID NO: 1562388
aguccauuguugguugaau

SEQ ID NO: 1743106 - RNA, 19 nt, Artificial Sequence
  Description of Artificial Sequence: Synthetic oligonucleotide
  Antisense strand to SEQ ID NO: 1743105
auucaaccaacaauggacu

SEQ ID NO: 1743107 - RNA, 19 nt, Artificial Sequence
  Description of Artificial Sequence: Synthetic oligonucleotide
  Sense strand starting at position 3524 of SEQ ID NO: 1562388
agaagaaauuagucgucua

SEQ ID NO: 1743108 - RNA, 19 nt, Artificial Sequence
  Description of Artificial Sequence: Synthetic oligonucleotide
  Antisense strand to SEQ ID NO: 1743107
uagacgacuaauuucuucu

SEQ ID NO: 1743109 - RNA, 19 nt, Artificial Sequence
  Description of Artificial Sequence: Synthetic oligonucleotide
  Sense strand starting at position 3527 of SEQ ID NO: 1562388
agaaauuagucgucuauua

SEQ ID NO: 1743110 - RNA, 19 nt, Artificial Sequence
  Description of Artificial Sequence: Synthetic oligonucleotide
  Antisense strand to SEQ ID NO: 1743109
uaauagacgacuaauuucu

SEQ ID NO: 1743111 - RNA, 19 nt, Artificial Sequence
  Description of Artificial Sequence: Synthetic oligonucleotide
  Sense strand starting at position 3529 of SEQ ID NO: 1562388
aaauuagucgucuauuaga

SEQ ID NO: 1743112 - RNA, 19 nt, Artificial Sequence
  Description of Artificial Sequence: Synthetic oligonucleotide
  Antisense strand to SEQ ID NO: 1743111
ucuaauagacgacuaauuu

SEQ ID NO: 1743113 - RNA, 19 nt, Artificial Sequence
  Description of Artificial Sequence: Synthetic oligonucleotide
  Sense strand starting at position 3558 of SEQ ID NO: 1562388
guaaauaugguccaaguug

SEQ ID NO: 1743114 - RNA, 19 nt, Artificial Sequence
  Description of Artificial Sequence: Synthetic oligonucleotide
  Antisense strand to SEQ ID NO: 1743113
caacuuggaccauauuuac

SEQ ID NO: 1743115 - RNA, 19 nt, Artificial Sequence
  Description of Artificial Sequence: Synthetic oligonucleotide
  Sense strand starting at position 3600 of SEQ ID NO: 1562388
auagacauaucagugucuu

SEQ ID NO: 1743116 - RNA, 19 nt, Artificial Sequence
  Description of Artificial Sequence: Synthetic oligonucleotide
  Antisense strand to SEQ ID NO: 1743115
aagacacugauaugucuau

SEQ ID NO: 1743117 - RNA, 19 nt, Artificial Sequence
  Description of Artificial Sequence: Synthetic oligonucleotide
  Sense strand starting at position 3677 of SEQ ID NO: 1562388
gugucuuaagaaugucauc

SEQ ID NO: 1743118 - RNA, 19 nt, Artificial Sequence
  Description of Artificial Sequence: Synthetic oligonucleotide
  Antisense strand to SEQ ID NO: 1743117
gaugacauucuuaagacac

SEQ ID NO: 1743119 - RNA, 19 nt, Artificial Sequence
  Description of Artificial Sequence: Synthetic oligonucleotide
  Sense strand starting at position 3682 of SEQ ID NO: 1562388
uuaagaaugucaucagagc

SEQ ID NO: 1743120 - RNA, 19 nt, Artificial Sequence
  Description of Artificial Sequence: Synthetic oligonucleotide
  Antisense strand to SEQ ID NO: 1743119
gcucugaugacauucuuaa

SEQ ID NO: 1743121 - RNA, 19 nt, Artificial Sequence
  Description of Artificial Sequence: Synthetic oligonucleotide
  Sense strand starting at position 3688 of SEQ ID NO: 1562388
augucaucagagcaucaca

SEQ ID NO: 1743122 - RNA, 19 nt, Artificial Sequence
  Description of Artificial Sequence: Synthetic oligonucleotide
  Antisense strand to SEQ ID NO: 1743121
ugugaugcucugaugacau

SEQ ID NO: 1743123 - RNA, 19 nt, Artificial Sequence
  Description of Artificial Sequence: Synthetic oligonucleotide
  Sense strand starting at position 105 of SEQ ID NO: 1562389
ggcccaucaggauaaucuu

SEQ ID NO: 1743124 - RNA, 19 nt, Artificial Sequence
  Description of Artificial Sequence: Synthetic oligonucleotide
  Antisense strand to SEQ ID NO: 1743123
aagauuauccugaugggcc

SEQ ID NO: 1743125 - RNA, 19 nt, Artificial Sequence
  Description of Artificial Sequence: Synthetic oligonucleotide
  Sense strand starting at position 1119 of SEQ ID NO: 1562389
ucucgaugugcccagacau

SEQ ID NO: 1743126 - RNA, 19 nt, Artificial Sequence
  Description of Artificial Sequence: Synthetic oligonucleotide
  Antisense strand to SEQ ID NO: 1743125
augucugggcacaucgaga

SEQ ID NO: 1743127 - RNA, 19 nt, Artificial Sequence
  Description of Artificial Sequence: Synthetic oligonucleotide
  Sense strand starting at position 1142 of SEQ ID NO: 1562389
ggugcacacuugucugaca

SEQ ID NO: 1743128 - RNA, 19 nt, Artificial Sequence
  Description of Artificial Sequence: Synthetic oligonucleotide
  Antisense strand to SEQ ID NO: 1743127
ugucagacaagugugcacc

SEQ ID NO: 1743129 - RNA, 19 nt, Artificial Sequence
  Description of Artificial Sequence: Synthetic oligonucleotide
  Sense strand starting at position 1466 of SEQ ID NO: 1562389
aggaucaccuuccuugauu

SEQ ID NO: 1743130 - RNA, 19 nt, Artificial Sequence
  Description of Artificial Sequence: Synthetic oligonucleotide
  Antisense strand to SEQ ID NO: 1743129
aaucaaggaaggugauccu

SEQ ID NO: 1743131 - RNA, 19 nt, Artificial Sequence
  Description of Artificial Sequence: Synthetic oligonucleotide
  Sense strand starting at position 1672 of SEQ ID NO: 1562389
ggcaccugucaauggauga

SEQ ID NO: 1743132 - RNA, 19 nt, Artificial Sequence
  Description of Artificial Sequence: Synthetic oligonucleotide
  Antisense strand to SEQ ID NO: 1743131
ucauccauugacaggugcc

SEQ ID NO: 1743133 - RNA, 19 nt, Artificial Sequence
  Description of Artificial Sequence: Synthetic oligonucleotide
  Sense strand starting at position 1697 of SEQ ID NO: 1562389
cucccuuagccugauguca

SEQ ID NO: 1743134 - RNA, 19 nt, Artificial Sequence
  Description of Artificial Sequence: Synthetic oligonucleotide
  Antisense strand to SEQ ID NO: 1743133
ugacaucaggcuaagggag

SEQ ID NO: 1743135 - RNA, 19 nt, Artificial Sequence
  Description of Artificial Sequence: Synthetic oligonucleotide
  Sense strand starting at position 1753 of SEQ ID NO: 1562389
gaggaaagggucugugcaa

SEQ ID NO: 1743136 - RNA, 19 nt, Artificial Sequence
  Description of Artificial Sequence: Synthetic oligonucleotide
  Antisense strand to SEQ ID NO: 1743135
uugcacagacccuuuccuc

SEQ ID NO: 1743137 - RNA, 19 nt, Artificial Sequence
  Description of Artificial Sequence: Synthetic oligonucleotide
  Sense strand starting at position 1797 of SEQ ID NO: 1562389
ucugaagucuccucaagca

SEQ ID NO: 1743138 - RNA, 19 nt, Artificial Sequence
  Description of Artificial Sequence: Synthetic oligonucleotide
  Antisense strand to SEQ ID NO: 1743137
ugcuugaggagacuucaga

SEQ ID NO: 1743139 - RNA, 19 nt, Artificial Sequence
  Description of Artificial Sequence: Synthetic oligonucleotide
  Sense strand starting at position 1985 of SEQ ID NO: 1562389
gucuguuuggugguugcua

SEQ ID NO: 1743140 - RNA, 19 nt, Artificial Sequence
  Description of Artificial Sequence: Synthetic oligonucleotide
  Antisense strand to SEQ ID NO: 1743139
uagcaaccaccaaacagac

SEQ ID NO: 1743141 - RNA, 19 nt, Artificial Sequence
  Description of Artificial Sequence: Synthetic oligonucleotide
  Sense strand starting at position 2068 of SEQ ID NO: 1562389
augggagguguuuagucau

SEQ ID NO: 1743142 - RNA, 19 nt, Artificial Sequence
  Description of Artificial Sequence: Synthetic oligonucleotide
  Antisense strand to SEQ ID NO: 1743141
augacuaaacaccucccau

SEQ ID NO: 1743143 - RNA, 19 nt, Artificial Sequence
  Description of Artificial Sequence: Synthetic oligonucleotide
  Sense strand starting at position 2071 of SEQ ID NO: 1562389
ggagguguuuagucaugag

SEQ ID NO: 1743144 - RNA, 19 nt, Artificial Sequence
  Description of Artificial Sequence: Synthetic oligonucleotide
  Antisense strand to SEQ ID NO: 1743143
cucaugacuaaacaccucc

SEQ ID NO: 1743145 - RNA, 19 nt, Artificial Sequence
  Description of Artificial Sequence: Synthetic oligonucleotide
  Sense strand starting at position 2075 of SEQ ID NO: 1562389
guguuuagucaugagggcu

SEQ ID NO: 1743146 - RNA, 19 nt, Artificial Sequence
  Description of Artificial Sequence: Synthetic oligonucleotide
  Antisense strand to SEQ ID NO: 1743145
agcccucaugacuaaacac

SEQ ID NO: 1743147 - RNA, 19 nt, Artificial Sequence
  Description of Artificial Sequence: Synthetic oligonucleotide
  Sense strand starting at position 2184 of SEQ ID NO: 1562389
ccaccaugucauggcaaga

SEQ ID NO: 1743148 - RNA, 19 nt, Artificial Sequence
  Description of Artificial Sequence: Synthetic oligonucleotide
  Antisense strand to SEQ ID NO: 1743147
ucuugccaugacauggugg

SEQ ID NO: 1743149 - RNA, 19 nt, Artificial Sequence
  Description of Artificial Sequence: Synthetic oligonucleotide
  Sense strand starting at position 2265 of SEQ ID NO: 1562389
ugcauuucugucuguuaca

SEQ ID NO: 1743150 - RNA, 19 nt, Artificial Sequence
  Description of Artificial Sequence: Synthetic oligonucleotide
  Antisense strand to SEQ ID NO: 1743149
uguaacagacagaaaugca

SEQ ID NO: 1743151 - RNA, 19 nt, Artificial Sequence
  Description of Artificial Sequence: Synthetic oligonucleotide
  Sense strand starting at position 2266 of SEQ ID NO: 1562389
gcauuucugucuguuacaa

SEQ ID NO: 1743152 - RNA, 19 nt, Artificial Sequence
  Description of Artificial Sequence: Synthetic oligonucleotide
  Antisense strand to SEQ ID NO: 1743151
uuguaacagacagaaaugc

SEQ ID NO: 1743153 - RNA, 19 nt, Artificial Sequence
  Description of Artificial Sequence: Synthetic oligonucleotide
  Sense strand starting at position 2532 of SEQ ID NO: 1562389
gcuucugcaguuggaagaa

SEQ ID NO: 1743154 - RNA, 19 nt, Artificial Sequence
  Description of Artificial Sequence: Synthetic oligonucleotide
  Antisense strand to SEQ ID NO: 1743153
uucuuccaacugcagaagc

SEQ ID NO: 1743155 - RNA, 19 nt, Artificial Sequence
  Description of Artificial Sequence: Synthetic oligonucleotide
  Sense strand starting at position 2737 of SEQ ID NO: 1562389
gggacucugcugcagucau

SEQ ID NO: 1743156 - RNA, 19 nt, Artificial Sequence
  Description of Artificial Sequence: Synthetic oligonucleotide
  Antisense strand to SEQ ID NO: 1743155
augacugcagcagaguccc

SEQ ID NO: 1743157 - RNA, 19 nt, Artificial Sequence
  Description of Artificial Sequence: Synthetic oligonucleotide
  Sense strand starting at position 2797 of SEQ ID NO: 1562389
agccuuuaaggaggucuau

SEQ ID NO: 1743158 - RNA, 19 nt, Artificial Sequence
  Description of Artificial Sequence: Synthetic oligonucleotide
  Antisense strand to SEQ ID NO: 1743157
auagaccuccuuaaaggcu

SEQ ID NO: 1743159 - RNA, 19 nt, Artificial Sequence
  Description of Artificial Sequence: Synthetic oligonucleotide
  Sense strand starting at position 2807 of SEQ ID NO: 1562389
gaggucuauuggucaccau

SEQ ID NO: 1743160 - RNA, 19 nt, Artificial Sequence
  Description of Artificial Sequence: Synthetic oligonucleotide
  Antisense strand to SEQ ID NO: 1743159
auggugaccaauagaccuc

SEQ ID NO: 1743161 - RNA, 19 nt, Artificial Sequence
  Description of Artificial Sequence: Synthetic oligonucleotide
  Sense strand starting at position 2808 of SEQ ID NO: 1562389
aggucuauuggucaccauu

SEQ ID NO: 1743162 - RNA, 19 nt, Artificial Sequence
  Description of Artificial Sequence: Synthetic oligonucleotide
  Antisense strand to SEQ ID NO: 1743161
aauggugaccaauagaccu

SEQ ID NO: 1743163 - RNA, 19 nt, Artificial Sequence
  Description of Artificial Sequence: Synthetic oligonucleotide
  Sense strand starting at position 2856 of SEQ ID NO: 1562389
cggaggauccgguagugua

SEQ ID NO: 1743164 - RNA, 19 nt, Artificial Sequence
  Description of Artificial Sequence: Synthetic oligonucleotide
  Antisense strand to SEQ ID NO: 1743163
uacacuaccggauccuccg

SEQ ID NO: 1743165 - RNA, 19 nt, Artificial Sequence
  Description of Artificial Sequence: Synthetic oligonucleotide
  Sense strand starting at position 2895 of SEQ ID NO: 1562389
cguuguucccuggagagga

SEQ ID NO: 1743166 - RNA, 19 nt, Artificial Sequence
  Description of Artificial Sequence: Synthetic oligonucleotide
  Antisense strand to SEQ ID NO: 1743165
uccucuccagggaacaacg

SEQ ID NO: 1743167 - RNA, 19 nt, Artificial Sequence
  Description of Artificial Sequence: Synthetic oligonucleotide
  Sense strand starting at position 2925 of SEQ ID NO: 1562389
cagaaaguacucugacguu

SEQ ID NO: 1743168 - RNA, 19 nt, Artificial Sequence
  Description of Artificial Sequence: Synthetic oligonucleotide
  Antisense strand to SEQ ID NO: 1743167
aacgucagaguacuuucug

SEQ ID NO: 1743169 - RNA, 19 nt, Artificial Sequence
  Description of Artificial Sequence: Synthetic oligonucleotide
  Sense strand starting at position 2949 of SEQ ID NO: 1562389
auuugugauuucuaucacu

SEQ ID NO: 1743170 - RNA, 19 nt, Artificial Sequence
  Description of Artificial Sequence: Synthetic oligonucleotide
  Antisense strand to SEQ ID NO: 1743169
agugauagaaaucacaaau

SEQ ID NO: 1743171 - RNA, 19 nt, Artificial Sequence
  Description of Artificial Sequence: Synthetic oligonucleotide
  Sense strand starting at position 3056 of SEQ ID NO: 1562389
ugguuuauggcguaauuuc

SEQ ID NO: 1743172 - RNA, 19 nt, Artificial Sequence
  Description of Artificial Sequence: Synthetic oligonucleotide
  Antisense strand to SEQ ID NO: 1743171
gaaauuacgccauaaacca

SEQ ID NO: 1743173 - RNA, 19 nt, Artificial Sequence
  Description of Artificial Sequence: Synthetic oligonucleotide
  Sense strand starting at position 3064 of SEQ ID NO: 1562389
ggcguaauuuccuuccuga

SEQ ID NO: 1743174 - RNA, 19 nt, Artificial Sequence
  Description of Artificial Sequence: Synthetic oligonucleotide
  Antisense strand to SEQ ID NO: 1743173
ucaggaaggaaauuacgcc

SEQ ID NO: 1743175 - RNA, 19 nt, Artificial Sequence
  Description of Artificial Sequence: Synthetic oligonucleotide
  Sense strand starting at position 3248 of SEQ ID NO: 1562389
uauauaguggcauaguauu

SEQ ID NO: 1743176 - RNA, 19 nt, Artificial Sequence
  Description of Artificial Sequence: Synthetic oligonucleotide
  Antisense strand to SEQ ID NO: 1743175
aauacuaugccacuauaua

SEQ ID NO: 1743177 - RNA, 19 nt, Artificial Sequence
  Description of Artificial Sequence: Synthetic oligonucleotide
  Sense strand starting at position 3289 of SEQ ID NO: 1562389
gccaaucauagauggugau

SEQ ID NO: 1743178 - RNA, 19 nt, Artificial Sequence
  Description of Artificial Sequence: Synthetic oligonucleotide
  Antisense strand to SEQ ID NO: 1743177
aucaccaucuaugauuggc

SEQ ID NO: 1743179 - RNA, 19 nt, Artificial Sequence
  Description of Artificial Sequence: Synthetic oligonucleotide
  Sense strand starting at position 3290 of SEQ ID NO: 1562389
ccaaucauagauggugauu

SEQ ID NO: 1743180 - RNA, 19 nt, Artificial Sequence
  Description of Artificial Sequence: Synthetic oligonucleotide
  Antisense strand to SEQ ID NO: 1743179
aaucaccaucuaugauugg

SEQ ID NO: 1743181 - RNA, 19 nt, Artificial Sequence
  Description of Artificial Sequence: Synthetic oligonucleotide
  Sense strand starting at position 3292 of SEQ ID NO: 1562389
aaucauagauggugauuua

SEQ ID NO: 1743182 - RNA, 19 nt, Artificial Sequence
  Description of Artificial Sequence: Synthetic oligonucleotide
  Antisense strand to SEQ ID NO: 1743181
uaaaucaccaucuaugauu

SEQ ID NO: 1743183 - RNA, 19 nt, Artificial Sequence
  Description of Artificial Sequence: Synthetic oligonucleotide
  Sense strand starting at position 3343 of SEQ ID NO: 1562389
cuauguaaaugcuuuguaa

SEQ ID NO: 1743184 - RNA, 19 nt, Artificial Sequence
  Description of Artificial Sequence: Synthetic oligonucleotide
  Antisense strand to SEQ ID NO: 1743183
uuacaaagcauuuacauag

SEQ ID NO: 1743185 - RNA, 19 nt, Artificial Sequence
  Description of Artificial Sequence: Synthetic oligonucleotide
  Sense strand starting at position 3443 of SEQ ID NO: 1562389
aguccauuguugguugaau

SEQ ID NO: 1743186 - RNA, 19 nt, Artificial Sequence
  Description of Artificial Sequence: Synthetic oligonucleotide
  Antisense strand to SEQ ID NO: 1743185
auucaaccaacaauggacu

SEQ ID NO: 1743187 - RNA, 19 nt, Artificial Sequence
  Description of Artificial Sequence: Synthetic oligonucleotide
  Sense strand starting at position 3548 of SEQ ID NO: 1562389
agaagaaauuagucgucua

SEQ ID NO: 1743188 - RNA, 19 nt, Artificial Sequence
  Description of Artificial Sequence: Synthetic oligonucleotide
  Antisense strand to SEQ ID NO: 1743187
uagacgacuaauuucuucu

SEQ ID NO: 1743189 - RNA, 19 nt, Artificial Sequence
  Description of Artificial Sequence: Synthetic oligonucleotide
  Sense strand starting at position 3551 of SEQ ID NO: 1562389
agaaauuagucgucuauua

SEQ ID NO: 1743190 - RNA, 19 nt, Artificial Sequence
  Description of Artificial Sequence: Synthetic oligonucleotide
  Antisense strand to SEQ ID NO: 1743189
uaauagacgacuaauuucu

SEQ ID NO: 1743191 - RNA, 19 nt, Artificial Sequence
  Description of Artificial Sequence: Synthetic oligonucleotide
  Sense strand starting at position 3553 of SEQ ID NO: 1562389
aaauuagucgucuauuaga

SEQ ID NO: 1743192 - RNA, 19 nt, Artificial Sequence
  Description of Artificial Sequence: Synthetic oligonucleotide
  Antisense strand to SEQ ID NO: 1743191
ucuaauagacgacuaauuu

SEQ ID NO: 1743193 - RNA, 19 nt, Artificial Sequence
  Description of Artificial Sequence: Synthetic oligonucleotide
  Sense strand starting at position 3582 of SEQ ID NO: 1562389
guaaauaugguccaaguug

SEQ ID NO: 1743194 - RNA, 19 nt, Artificial Sequence
  Description of Artificial Sequence: Synthetic oligonucleotide
  Antisense strand to SEQ ID NO: 1743193
caacuuggaccauauuuac

SEQ ID NO: 1743195 - RNA, 19 nt, Artificial Sequence
  Description of Artificial Sequence: Synthetic oligonucleotide
  Sense strand starting at position 3624 of SEQ ID NO: 1562389
auagacauaucagugucuu

SEQ ID NO: 1743196 - RNA, 19 nt, Artificial Sequence
  Description of Artificial Sequence: Synthetic oligonucleotide
  Antisense strand to SEQ ID NO: 1743195
aagacacugauaugucuau

SEQ ID NO: 1743197 - RNA, 19 nt, Artificial Sequence
  Description of Artificial Sequence: Synthetic oligonucleotide
  Sense strand starting at position 3701 of SEQ ID NO: 1562389
gugucuuaagaaugucauc

SEQ ID NO: 1743198 - RNA, 19 nt, Artificial Sequence
  Description of Artificial Sequence: Synthetic oligonucleotide
  Antisense strand to SEQ ID NO: 1743197
gaugacauucuuaagacac

SEQ ID NO: 1743199 - RNA, 19 nt, Artificial Sequence
  Description of Artificial Sequence: Synthetic oligonucleotide
  Sense strand starting at position 3706 of SEQ ID NO: 1562389
uuaagaaugucaucagagc

SEQ ID NO: 1743200 - RNA, 19 nt, Artificial Sequence
  Description of Artificial Sequence: Synthetic oligonucleotide
  Antisense strand to SEQ ID NO: 1743199
gcucugaugacauucuuaa

SEQ ID NO: 1743201 - RNA, 19 nt, Artificial Sequence
  Description of Artificial Sequence: Synthetic oligonucleotide
  Sense strand starting at position 3712 of SEQ ID NO: 1562389
augucaucagagcaucaca

SEQ ID NO: 1743202 - RNA, 19 nt, Artificial Sequence
  Description of Artificial Sequence: Synthetic oligonucleotide
  Antisense strand to SEQ ID NO: 1743201
ugugaugcucugaugacau

SEQ ID NO: 1743203 - RNA, 19 nt, Artificial Sequence
  Description of Artificial Sequence: Synthetic oligonucleotide
  Sense strand starting at position 27 of SEQ ID NO: 1562391
gccuauagggauuaaaugu

SEQ ID NO: 1743204 - RNA, 19 nt, Artificial Sequence
  Description of Artificial Sequence: Synthetic oligonucleotide
  Antisense strand to SEQ ID NO: 1743203
acauuuaaucccuauaggc

SEQ ID NO: 1743205 - RNA, 19 nt, Artificial Sequence
  Description of Artificial Sequence: Synthetic oligonucleotide
  Sense strand starting at position 34 of SEQ ID NO: 1562391
gggauuaaaugucuaagug

SEQ ID NO: 1743206 - RNA, 19 nt, Artificial Sequence
  Description of Artificial Sequence: Synthetic oligonucleotide
  Antisense strand to SEQ ID NO: 1743205
cacuuagacauuuaauccc

SEQ ID NO: 1743207 - RNA, 19 nt, Artificial Sequence
  Description of Artificial Sequence: Synthetic oligonucleotide
  Sense strand starting at position 101 of SEQ ID NO: 1562391
uuugaauacggaugcauga

SEQ ID NO: 1743208 - RNA, 19 nt, Artificial Sequence
  Description of Artificial Sequence: Synthetic oligonucleotide
  Antisense strand to SEQ ID NO: 1743207
ucaugcauccguauucaaa

SEQ ID NO: 1743209 - RNA, 19 nt, Artificial Sequence
  Description of Artificial Sequence: Synthetic oligonucleotide
  Sense strand starting at position 165 of SEQ ID NO: 1562391
aacaaaucacaguguguga

SEQ ID NO: 1743210 - RNA, 19 nt, Artificial Sequence
  Description of Artificial Sequence: Synthetic oligonucleotide
  Antisense strand to SEQ ID NO: 1743209
ucacacacugugauuuguu

SEQ ID NO: 1743211 - RNA, 19 nt, Artificial Sequence
  Description of Artificial Sequence: Synthetic oligonucleotide
  Sense strand starting at position 178 of SEQ ID NO: 1562391
gugugaaagcagcuucguu

SEQ ID NO: 1743212 - RNA, 19 nt, Artificial Sequence
  Description of Artificial Sequence: Synthetic oligonucleotide
  Antisense strand to SEQ ID NO: 1743211
aacgaagcugcuuucacac

SEQ ID NO: 1743213 - RNA, 19 nt, Artificial Sequence
  Description of Artificial Sequence: Synthetic oligonucleotide
  Sense strand starting at position 220 of SEQ ID NO: 1562391
ccaauuauaaguggguuga

SEQ ID NO: 1743214 - RNA, 19 nt, Artificial Sequence
  Description of Artificial Sequence: Synthetic oligonucleotide
  Antisense strand to SEQ ID NO: 1743213
ucaacccacuuauaauugg

SEQ ID NO: 1743215 - RNA, 19 nt, Artificial Sequence
  Description of Artificial Sequence: Synthetic oligonucleotide
  Sense strand starting at position 221 of SEQ ID NO: 1562391
caauuauaaguggguugau

SEQ ID NO: 1743216 - RNA, 19 nt, Artificial Sequence
  Description of Artificial Sequence: Synthetic oligonucleotide
  Antisense strand to SEQ ID NO: 1743215
aucaacccacuuauaauug

SEQ ID NO: 1743217 - RNA, 19 nt, Artificial Sequence
  Description of Artificial Sequence: Synthetic oligonucleotide
  Sense strand starting at position 222 of SEQ ID NO: 1562391
aauuauaaguggguugauu

SEQ ID NO: 1743218 - RNA, 19 nt, Artificial Sequence
  Description of Artificial Sequence: Synthetic oligonucleotide
  Antisense strand to SEQ ID NO: 1743217
aaucaacccacuuauaauu

SEQ ID NO: 1743219 - RNA, 19 nt, Artificial Sequence
  Description of Artificial Sequence: Synthetic oligonucleotide
  Sense strand starting at position 264 of SEQ ID NO: 1562391
cuguuuaacugacugauag

SEQ ID NO: 1743220 - RNA, 19 nt, Artificial Sequence
  Description of Artificial Sequence: Synthetic oligonucleotide
  Antisense strand to SEQ ID NO: 1743219
cuaucagucaguuaaacag

SEQ ID NO: 1743221 - RNA, 19 nt, Artificial Sequence
  Description of Artificial Sequence: Synthetic oligonucleotide
  Sense strand starting at position 265 of SEQ ID NO: 1562391
uguuuaacugacugauaga

SEQ ID NO: 1743222 - RNA, 19 nt, Artificial Sequence
  Description of Artificial Sequence: Synthetic oligonucleotide
  Antisense strand to SEQ ID NO: 1743221
ucuaucagucaguuaaaca

SEQ ID NO: 1743223 - RNA, 19 nt, Artificial Sequence
  Description of Artificial Sequence: Synthetic oligonucleotide
  Sense strand starting at position 681 of SEQ ID NO: 1562391
uuauguucucuggaauuau

SEQ ID NO: 1743224 - RNA, 19 nt, Artificial Sequence
  Description of Artificial Sequence: Synthetic oligonucleotide
  Antisense strand to SEQ ID NO: 1743223
auaauuccagagaacauaa

SEQ ID NO: 1743225 - RNA, 19 nt, Artificial Sequence
  Description of Artificial Sequence: Synthetic oligonucleotide
  Sense strand starting at position 717 of SEQ ID NO: 1562391
auagguuagaaauggucaa

SEQ ID NO: 1743226 - RNA, 19 nt, Artificial Sequence
  Description of Artificial Sequence: Synthetic oligonucleotide
  Antisense strand to SEQ ID NO: 1743225
uugaccauuucuaaccuau

SEQ ID NO: 1743227 - RNA, 19 nt, Artificial Sequence
  Description of Artificial Sequence: Synthetic oligonucleotide
  Sense strand starting at position 729 of SEQ ID NO: 1562391
uggucaaauaugggcaauu

SEQ ID NO: 1743228 - RNA, 19 nt, Artificial Sequence
  Description of Artificial Sequence: Synthetic oligonucleotide
  Antisense strand to SEQ ID NO: 1743227
aauugcccauauuugacca

SEQ ID NO: 1743229 - RNA, 19 nt, Artificial Sequence
  Description of Artificial Sequence: Synthetic oligonucleotide
  Sense strand starting at position 843 of SEQ ID NO: 1562391
ugcucucugauagguggaa

SEQ ID NO: 1743230 - RNA, 19 nt, Artificial Sequence
  Description of Artificial Sequence: Synthetic oligonucleotide
  Antisense strand to SEQ ID NO: 1743229
uuccaccuaucagagagca

SEQ ID NO: 1743231 - RNA, 19 nt, Artificial Sequence
  Description of Artificial Sequence: Synthetic oligonucleotide
  Sense strand starting at position 844 of SEQ ID NO: 1562391
gcucucugauagguggaau

SEQ ID NO: 1743232 - RNA, 19 nt, Artificial Sequence
  Description of Artificial Sequence: Synthetic oligonucleotide
  Antisense strand to SEQ ID NO: 1743231
auuccaccuaucagagagc

SEQ ID NO: 1743233 - RNA, 19 nt, Artificial Sequence
  Description of Artificial Sequence: Synthetic oligonucleotide
  Sense strand starting at position 845 of SEQ ID NO: 1562391
cucucugauagguggaaua

SEQ ID NO: 1743234 - RNA, 19 nt, Artificial Sequence
  Description of Artificial Sequence: Synthetic oligonucleotide
  Antisense strand to SEQ ID NO: 1743233
uauuccaccuaucagagag

SEQ ID NO: 1743235 - RNA, 19 nt, Artificial Sequence
  Description of Artificial Sequence: Synthetic oligonucleotide
  Sense strand starting at position 856 of SEQ ID NO: 1562391
guggaauaacuauagccua

SEQ ID NO: 1743236 - RNA, 19 nt, Artificial Sequence
  Description of Artificial Sequence: Synthetic oligonucleotide
  Antisense strand to SEQ ID NO: 1743235
uaggcuauaguuauuccac

SEQ ID NO: 1743237 - RNA, 19 nt, Artificial Sequence
  Description of Artificial Sequence: Synthetic oligonucleotide
  Sense strand starting at position 1060 of SEQ ID NO: 1562391
agaccaugauuugagcuua

SEQ ID NO: 1743238 - RNA, 19 nt, Artificial Sequence
  Description of Artificial Sequence: Synthetic oligonucleotide
  Antisense strand to SEQ ID NO: 1743237
uaagcucaaaucauggucu

SEQ ID NO: 1743239 - RNA, 19 nt, Artificial Sequence
  Description of Artificial Sequence: Synthetic oligonucleotide
  Sense strand starting at position 1077 of SEQ ID NO: 1562391
uacacaugucauuaguugu

SEQ ID NO: 1743240 - RNA, 19 nt, Artificial Sequence
  Description of Artificial Sequence: Synthetic oligonucleotide
  Antisense strand to SEQ ID NO: 1743239
acaacuaaugacaugugua

SEQ ID NO: 1743241 - RNA, 19 nt, Artificial Sequence
  Description of Artificial Sequence: Synthetic oligonucleotide
  Sense strand starting at position 1848 of SEQ ID NO: 1562391
aauaaagaaugugugcuaa

SEQ ID NO: 1743242 - RNA, 19 nt, Artificial Sequence
  Description of Artificial Sequence: Synthetic oligonucleotide
  Antisense strand to SEQ ID NO: 1743241
uuagcacacauucuuuauu

SEQ ID NO: 1743243 - RNA, 19 nt, Artificial Sequence
  Description of Artificial Sequence: Synthetic oligonucleotide
  Sense strand starting at position 1850 of SEQ ID NO: 1562391
uaaagaaugugugcuaaga

SEQ ID NO: 1743244 - RNA, 19 nt, Artificial Sequence
  Description of Artificial Sequence: Synthetic oligonucleotide
  Antisense strand to SEQ ID NO: 1743243
ucuuagcacacauucuuua

SEQ ID NO: 1743245 - RNA, 19 nt, Artificial Sequence
  Description of Artificial Sequence: Synthetic oligonucleotide
  Sense strand starting at position 2063 of SEQ ID NO: 1562391
aaucuaaucguauguggaa

SEQ ID NO: 1743246 - RNA, 19 nt, Artificial Sequence
  Description of Artificial Sequence: Synthetic oligonucleotide
  Antisense strand to SEQ ID NO: 1743245
uuccacauacgauuagauu

SEQ ID NO: 1743247 - RNA, 19 nt, Artificial Sequence
  Description of Artificial Sequence: Synthetic oligonucleotide
  Sense strand starting at position 2064 of SEQ ID NO: 1562391
aucuaaucguauguggaaa

SEQ ID NO: 1743248 - RNA, 19 nt, Artificial Sequence
  Description of Artificial Sequence: Synthetic oligonucleotide
  Antisense strand to SEQ ID NO: 1743247
uuuccacauacgauuagau

SEQ ID NO: 1743249 - RNA, 19 nt, Artificial Sequence
  Description of Artificial Sequence: Synthetic oligonucleotide
  Sense strand starting at position 2065 of SEQ ID NO: 1562391
ucuaaucguauguggaaag

SEQ ID NO: 1743250 - RNA, 19 nt, Artificial Sequence
  Description of Artificial Sequence: Synthetic oligonucleotide
  Antisense strand to SEQ ID NO: 1743249
cuuuccacauacgauuaga

SEQ ID NO: 1743251 - RNA, 19 nt, Artificial Sequence
  Description of Artificial Sequence: Synthetic oligonucleotide
  Sense strand starting at position 2091 of SEQ ID NO: 1562391
cuaacuggcaguuggaauu

SEQ ID NO: 1743252 - RNA, 19 nt, Artificial Sequence
  Description of Artificial Sequence: Synthetic oligonucleotide
  Antisense strand to SEQ ID NO: 1743251
aauuccaacugccaguuag

SEQ ID NO: 1743253 - RNA, 19 nt, Artificial Sequence
  Description of Artificial Sequence: Synthetic oligonucleotide
  Sense strand starting at position 2167 of SEQ ID NO: 1562391
acaaguuccugcucuggga

SEQ ID NO: 1743254 - RNA, 19 nt, Artificial Sequence
  Description of Artificial Sequence: Synthetic oligonucleotide
  Antisense strand to SEQ ID NO: 1743253
ucccagagcaggaacuugu

SEQ ID NO: 1743255 - RNA, 19 nt, Artificial Sequence
  Description of Artificial Sequence: Synthetic oligonucleotide
  Sense strand starting at position 2243 of SEQ ID NO: 1562391
gaagaagucuuccucuuag

SEQ ID NO: 1743256 - RNA, 19 nt, Artificial Sequence
  Description of Artificial Sequence: Synthetic oligonucleotide
  Antisense strand to SEQ ID NO: 1743255
cuaagaggaagacuucuuc

SEQ ID NO: 1743257 - RNA, 19 nt, Artificial Sequence
  Description of Artificial Sequence: Synthetic oligonucleotide
  Sense strand starting at position 2784 of SEQ ID NO: 1562391
aguauaauuccaggcaagu

SEQ ID NO: 1743258 - RNA, 19 nt, Artificial Sequence
  Description of Artificial Sequence: Synthetic oligonucleotide
  Antisense strand to SEQ ID NO: 1743257
acuugccuggaauuauacu

SEQ ID NO: 1743259 - RNA, 19 nt, Artificial Sequence
  Description of Artificial Sequence: Synthetic oligonucleotide
  Sense strand starting at position 2797 of SEQ ID NO: 1562391
gcaagugccguguucugaa

SEQ ID NO: 1743260 - RNA, 19 nt, Artificial Sequence
  Description of Artificial Sequence: Synthetic oligonucleotide
  Antisense strand to SEQ ID NO: 1743259
uucagaacacggcacuugc

SEQ ID NO: 1743261 - RNA, 19 nt, Artificial Sequence
  Description of Artificial Sequence: Synthetic oligonucleotide
  Sense strand starting at position 2809 of SEQ ID NO: 1562391
uucugaagacgcuaaauaa

SEQ ID NO: 1743262 - RNA, 19 nt, Artificial Sequence
  Description of Artificial Sequence: Synthetic oligonucleotide
  Antisense strand to SEQ ID NO: 1743261
uuauuuagcgucuucagaa

SEQ ID NO: 1743263 - RNA, 19 nt, Artificial Sequence
  Description of Artificial Sequence: Synthetic oligonucleotide
  Sense strand starting at position 3116 of SEQ ID NO: 1562391
gacuacaaguguguacaaa

SEQ ID NO: 1743264 - RNA, 19 nt, Artificial Sequence
  Description of Artificial Sequence: Synthetic oligonucleotide
  Antisense strand to SEQ ID NO: 1743263
uuuguacacacuuguaguc

SEQ ID NO: 1743265 - RNA, 19 nt, Artificial Sequence
  Description of Artificial Sequence: Synthetic oligonucleotide
  Sense strand starting at position 3428 of SEQ ID NO: 1562391
ucguauuaaccucagguaa

SEQ ID NO: 1743266 - RNA, 19 nt, Artificial Sequence
  Description of Artificial Sequence: Synthetic oligonucleotide
  Antisense strand to SEQ ID NO: 1743265
uuaccugagguuaauacga

SEQ ID NO: 1743267 - RNA, 19 nt, Artificial Sequence
  Description of Artificial Sequence: Synthetic oligonucleotide
  Sense strand starting at position 3439 of SEQ ID NO: 1562391
ucagguaaucauugccaca

SEQ ID NO: 1743268 - RNA, 19 nt, Artificial Sequence
  Description of Artificial Sequence: Synthetic oligonucleotide
  Antisense strand to SEQ ID NO: 1743267
uguggcaaugauuaccuga

SEQ ID NO: 1743269 - RNA, 19 nt, Artificial Sequence
  Description of Artificial Sequence: Synthetic oligonucleotide
  Sense strand starting at position 3441 of SEQ ID NO: 1562391
agguaaucauugccacaac

SEQ ID NO: 1743270 - RNA, 19 nt, Artificial Sequence
  Description of Artificial Sequence: Synthetic oligonucleotide
  Antisense strand to SEQ ID NO: 1743269
guuguggcaaugauuaccu

SEQ ID NO: 1743271 - RNA, 19 nt, Artificial Sequence
  Description of Artificial Sequence: Synthetic oligonucleotide
  Sense strand starting at position 3501 of SEQ ID NO: 1562391
gcacaagaggucugaugac

SEQ ID NO: 1743272 - RNA, 19 nt, Artificial Sequence
  Description of Artificial Sequence: Synthetic oligonucleotide
  Antisense strand to SEQ ID NO: 1743271
gucaucagaccucuugugc

SEQ ID NO: 1743273 - RNA, 19 nt, Artificial Sequence
  Description of Artificial Sequence: Synthetic oligonucleotide
  Sense strand starting at position 3615 of SEQ ID NO: 1562391
gucauuacucuguaacuug

SEQ ID NO: 1743274 - RNA, 19 nt, Artificial Sequence
  Description of Artificial Sequence: Synthetic oligonucleotide
  Antisense strand to SEQ ID NO: 1743273
caaguuacagaguaaugac

SEQ ID NO: 1743275 - RNA, 19 nt, Artificial Sequence
  Description of Artificial Sequence: Synthetic oligonucleotide
  Sense strand starting at position 3687 of SEQ ID NO: 1562391
auuaaauggugcucugaac

SEQ ID NO: 1743276 - RNA, 19 nt, Artificial Sequence
  Description of Artificial Sequence: Synthetic oligonucleotide
  Antisense strand to SEQ ID NO: 1743275
guucagagcaccauuuaau

SEQ ID NO: 1743277 - RNA, 19 nt, Artificial Sequence
  Description of Artificial Sequence: Synthetic oligonucleotide
  Sense strand starting at position 3776 of SEQ ID NO: 1562391
cagaguuaacguuauuagg

SEQ ID NO: 1743278 - RNA, 19 nt, Artificial Sequence
  Description of Artificial Sequence: Synthetic oligonucleotide
  Antisense strand to SEQ ID NO: 1743277
ccuaauaacguuaacucug

SEQ ID NO: 1743279 - RNA, 19 nt, Artificial Sequence
  Description of Artificial Sequence: Synthetic oligonucleotide
  Sense strand starting at position 3809 of SEQ ID NO: 1562391
auacgaggaucucuguaac

SEQ ID NO: 1743280 - RNA, 19 nt, Artificial Sequence
  Description of Artificial Sequence: Synthetic oligonucleotide
  Antisense strand to SEQ ID NO: 1743279
guuacagagauccucguau

SEQ ID NO: 1743281 - RNA, 19 nt, Artificial Sequence
  Description of Artificial Sequence: Synthetic oligonucleotide
  Sense strand starting at position 3907 of SEQ ID NO: 1562391
gaacacuuuggugguguaa

SEQ ID NO: 1743282 - RNA, 19 nt, Artificial Sequence
  Description of Artificial Sequence: Synthetic oligonucleotide
  Antisense strand to SEQ ID NO: 1743281
uuacaccaccaaaguguuc

SEQ ID NO: 1743283 - RNA, 19 nt, Artificial Sequence
  Description of Artificial Sequence: Synthetic oligonucleotide
  Sense strand starting at position 77 of SEQ ID NO: 1562392
aaggucuguuccguuauuu

SEQ ID NO: 1743284 - RNA, 19 nt, Artificial Sequence
  Description of Artificial Sequence: Synthetic oligonucleotide
  Antisense strand to SEQ ID NO: 1743283
aaauaacggaacagaccuu

SEQ ID NO: 1743285 - RNA, 19 nt, Artificial Sequence
  Description of Artificial Sequence: Synthetic oligonucleotide
  Sense strand starting at position 87 of SEQ ID NO: 1562392
ccguuauuugaugagcguu

SEQ ID NO: 1743286 - RNA, 19 nt, Artificial Sequence
  Description of Artificial Sequence: Synthetic oligonucleotide
  Antisense strand to SEQ ID NO: 1743285
aacgcucaucaaauaacgg

SEQ ID NO: 1743287 - RNA, 19 nt, Artificial Sequence
  Description of Artificial Sequence: Synthetic oligonucleotide
  Sense strand starting at position 193 of SEQ ID NO: 1562392
ccuggauggucacuuauua

SEQ ID NO: 1743288 - RNA, 19 nt, Artificial Sequence
  Description of Artificial Sequence: Synthetic oligonucleotide
  Antisense strand to SEQ ID NO: 1743287
uaauaagugaccauccagg

SEQ ID NO: 1743289 - RNA, 19 nt, Artificial Sequence
  Description of Artificial Sequence: Synthetic oligonucleotide
  Sense strand starting at position 298 of SEQ ID NO: 1562392
gagguaagugcuuacuuac

SEQ ID NO: 1743290 - RNA, 19 nt, Artificial Sequence
  Description of Artificial Sequence: Synthetic oligonucleotide
  Antisense strand to SEQ ID NO: 1743289
guaaguaagcacuuaccuc

SEQ ID NO: 1743291 - RNA, 19 nt, Artificial Sequence
  Description of Artificial Sequence: Synthetic oligonucleotide
  Sense strand starting at position 316 of SEQ ID NO: 1562392
ccuaauuaaucggcuggaa

SEQ ID NO: 1743292 - RNA, 19 nt, Artificial Sequence
  Description of Artificial Sequence: Synthetic oligonucleotide
  Antisense strand to SEQ ID NO: 1743291
uuccagccgauuaauuagg

SEQ ID NO: 1743293 - RNA, 19 nt, Artificial Sequence
  Description of Artificial Sequence: Synthetic oligonucleotide
  Sense strand starting at position 329 of SEQ ID NO: 1562392
cuggaagugucucugauac

SEQ ID NO: 1743294 - RNA, 19 nt, Artificial Sequence
  Description of Artificial Sequence: Synthetic oligonucleotide
  Antisense strand to SEQ ID NO: 1743293
guaucagagacacuuccag

SEQ ID NO: 1743295 - RNA, 19 nt, Artificial Sequence
  Description of Artificial Sequence: Synthetic oligonucleotide
  Sense strand starting at position 385 of SEQ ID NO: 1562392
guauuauagcuuuauggga

SEQ ID NO: 1743296 - RNA, 19 nt, Artificial Sequence
  Description of Artificial Sequence: Synthetic oligonucleotide
  Antisense strand to SEQ ID NO: 1743295
ucccauaaagcuauaauac

SEQ ID NO: 1743297 - RNA, 19 nt, Artificial Sequence
  Description of Artificial Sequence: Synthetic oligonucleotide
  Sense strand starting at position 440 of SEQ ID NO: 1562392
gagagaauuugucaccuaa

SEQ ID NO: 1743298 - RNA, 19 nt, Artificial Sequence
  Description of Artificial Sequence: Synthetic oligonucleotide
  Antisense strand to SEQ ID NO: 1743297
uuaggugacaaauucucuc

SEQ ID NO: 1743299 - RNA, 19 nt, Artificial Sequence
  Description of Artificial Sequence: Synthetic oligonucleotide
  Sense strand starting at position 554 of SEQ ID NO: 1562392
gagugugugcuugugaucu

SEQ ID NO: 1743300 - RNA, 19 nt, Artificial Sequence
  Description of Artificial Sequence: Synthetic oligonucleotide
  Antisense strand to SEQ ID NO: 1743299
agaucacaagcacacacuc

SEQ ID NO: 1743301 - RNA, 19 nt, Artificial Sequence
  Description of Artificial Sequence: Synthetic oligonucleotide
  Sense strand starting at position 735 of SEQ ID NO: 1562392
uucuaaccuguggguuaaa

SEQ ID NO: 1743302 - RNA, 19 nt, Artificial Sequence
  Description of Artificial Sequence: Synthetic oligonucleotide
  Antisense strand to SEQ ID NO: 1743301
uuuaacccacagguuagaa

SEQ ID NO: 1743303 - RNA, 19 nt, Artificial Sequence
  Description of Artificial Sequence: Synthetic oligonucleotide
  Sense strand starting at position 851 of SEQ ID NO: 1562392
acaggagcaauguggaaau

SEQ ID NO: 1743304 - RNA, 19 nt, Artificial Sequence
  Description of Artificial Sequence: Synthetic oligonucleotide
  Antisense strand to SEQ ID NO: 1743303
auuuccacauugcuccugu

SEQ ID NO: 1743305 - RNA, 19 nt, Artificial Sequence
  Description of Artificial Sequence: Synthetic oligonucleotide
  Sense strand starting at position 942 of SEQ ID NO: 1562392
uauuaaucaugggucauga

SEQ ID NO: 1743306 - RNA, 19 nt, Artificial Sequence
  Description of Artificial Sequence: Synthetic oligonucleotide
  Antisense strand to SEQ ID NO: 1743305
ucaugacccaugauuaaua

SEQ ID NO: 1743307 - RNA, 19 nt, Artificial Sequence
  Description of Artificial Sequence: Synthetic oligonucleotide
  Sense strand starting at position 982 of SEQ ID NO: 1562392
aacucaggaucguuuacau

SEQ ID NO: 1743308 - RNA, 19 nt, Artificial Sequence
  Description of Artificial Sequence: Synthetic oligonucleotide
  Antisense strand to SEQ ID NO: 1743307
auguaaacgauccugaguu

SEQ ID NO: 1743309 - RNA, 19 nt, Artificial Sequence
  Description of Artificial Sequence: Synthetic oligonucleotide
  Sense strand starting at position 1042 of SEQ ID NO: 1562392
aaggauagguaacagauuu

SEQ ID NO: 1743310 - RNA, 19 nt, Artificial Sequence
  Description of Artificial Sequence: Synthetic oligonucleotide
  Antisense strand to SEQ ID NO: 1743309
aaaucuguuaccuauccuu

SEQ ID NO: 1743311 - RNA, 19 nt, Artificial Sequence
  Description of Artificial Sequence: Synthetic oligonucleotide
  Sense strand starting at position 1144 of SEQ ID NO: 1562392
gccaaagaacuauguaauc

SEQ ID NO: 1743312 - RNA, 19 nt, Artificial Sequence
  Description of Artificial Sequence: Synthetic oligonucleotide
  Antisense strand to SEQ ID NO: 1743311
gauuacauaguucuuuggc

SEQ ID NO: 1743313 - RNA, 19 nt, Artificial Sequence
  Description of Artificial Sequence: Synthetic oligonucleotide
  Sense strand starting at position 1174 of SEQ ID NO: 1562392
acaaacuugcucugacaga

SEQ ID NO: 1743314 - RNA, 19 nt, Artificial Sequence
  Description of Artificial Sequence: Synthetic oligonucleotide
  Antisense strand to SEQ ID NO: 1743313
ucugucagagcaaguuugu

SEQ ID NO: 1743315 - RNA, 19 nt, Artificial Sequence
  Description of Artificial Sequence: Synthetic oligonucleotide
  Sense strand starting at position 1199 of SEQ ID NO: 1562392
caaagagaagucggaguaa

SEQ ID NO: 1743316 - RNA, 19 nt, Artificial Sequence
  Description of Artificial Sequence: Synthetic oligonucleotide
  Antisense strand to SEQ ID NO: 1743315
uuacuccgacuucucuuug

SEQ ID NO: 1743317 - RNA, 19 nt, Artificial Sequence
  Description of Artificial Sequence: Synthetic oligonucleotide
  Sense strand starting at position 1263 of SEQ ID NO: 1562392
acgacaucuggauauuguu

SEQ ID NO: 1743318 - RNA, 19 nt, Artificial Sequence
  Description of Artificial Sequence: Synthetic oligonucleotide
  Antisense strand to SEQ ID NO: 1743317
aacaauauccagaugucgu

SEQ ID NO: 1743319 - RNA, 19 nt, Artificial Sequence
  Description of Artificial Sequence: Synthetic oligonucleotide
  Sense strand starting at position 1309 of SEQ ID NO: 1562392
uugucccaucauuaaguaa

SEQ ID NO: 1743320 - RNA, 19 nt, Artificial Sequence
  Description of Artificial Sequence: Synthetic oligonucleotide
  Antisense strand to SEQ ID NO: 1743319
uuacuuaaugaugggacaa

SEQ ID NO: 1743321 - RNA, 19 nt, Artificial Sequence
  Description of Artificial Sequence: Synthetic oligonucleotide
  Sense strand starting at position 1992 of SEQ ID NO: 1562392
gccaguuaaucuuugaaga

SEQ ID NO: 1743322 - RNA, 19 nt, Artificial Sequence
  Description of Artificial Sequence: Synthetic oligonucleotide
  Antisense strand to SEQ ID NO: 1743321
ucuucaaagauuaacuggc

SEQ ID NO: 1743323 - RNA, 19 nt, Artificial Sequence
  Description of Artificial Sequence: Synthetic oligonucleotide
  Sense strand starting at position 1993 of SEQ ID NO: 1562392
ccaguuaaucuuugaagaa

SEQ ID NO: 1743324 - RNA, 19 nt, Artificial Sequence
  Description of Artificial Sequence: Synthetic oligonucleotide
  Antisense strand to SEQ ID NO: 1743323
uucuucaaagauuaacugg

SEQ ID NO: 1743325 - RNA, 19 nt, Artificial Sequence
  Description of Artificial Sequence: Synthetic oligonucleotide
  Sense strand starting at position 2042 of SEQ ID NO: 1562392
ggucccuuuggcuaaguaa

SEQ ID NO: 1743326 - RNA, 19 nt, Artificial Sequence
  Description of Artificial Sequence: Synthetic oligonucleotide
  Antisense strand to SEQ ID NO: 1743325
uuacuuagccaaagggacc

SEQ ID NO: 1743327 - RNA, 19 nt, Artificial Sequence
  Description of Artificial Sequence: Synthetic oligonucleotide
  Sense strand starting at position 2340 of SEQ ID NO: 1562392
gcugaauagacaugggcaa

SEQ ID NO: 1743328 - RNA, 19 nt, Artificial Sequence
  Description of Artificial Sequence: Synthetic oligonucleotide
  Antisense strand to SEQ ID NO: 1743327
uugcccaugucuauucagc

SEQ ID NO: 1743329 - RNA, 19 nt, Artificial Sequence
  Description of Artificial Sequence: Synthetic oligonucleotide
  Sense strand starting at position 2381 of SEQ ID NO: 1562392
gaaauugggcuucgggaua

SEQ ID NO: 1743330 - RNA, 19 nt, Artificial Sequence
  Description of Artificial Sequence: Synthetic oligonucleotide
  Antisense strand to SEQ ID NO: 1743329
uaucccgaagcccaauuuc

SEQ ID NO: 1743331 - RNA, 19 nt, Artificial Sequence
  Description of Artificial Sequence: Synthetic oligonucleotide
  Sense strand starting at position 2394 of SEQ ID NO: 1562392
gggauacauguuggaaucu

SEQ ID NO: 1743332 - RNA, 19 nt, Artificial Sequence
  Description of Artificial Sequence: Synthetic oligonucleotide
  Antisense strand to SEQ ID NO: 1743331
agauuccaacauguauccc

SEQ ID NO: 1743333 - RNA, 19 nt, Artificial Sequence
  Description of Artificial Sequence: Synthetic oligonucleotide
  Sense strand starting at position 2534 of SEQ ID NO: 1562392
ggguuauauguccauccua

SEQ ID NO: 1743334 - RNA, 19 nt, Artificial Sequence
  Description of Artificial Sequence: Synthetic oligonucleotide
  Antisense strand to SEQ ID NO: 1743333
uaggauggacauauaaccc

SEQ ID NO: 1743335 - RNA, 19 nt, Artificial Sequence
  Description of Artificial Sequence: Synthetic oligonucleotide
  Sense strand starting at position 2764 of SEQ ID NO: 1562392
cgaugauauacccacacgu

SEQ ID NO: 1743336 - RNA, 19 nt, Artificial Sequence
  Description of Artificial Sequence: Synthetic oligonucleotide
  Antisense strand to SEQ ID NO: 1743335
acguguggguauaucaucg

SEQ ID NO: 1743337 - RNA, 19 nt, Artificial Sequence
  Description of Artificial Sequence: Synthetic oligonucleotide
  Sense strand starting at position 2821 of SEQ ID NO: 1562392
ucugguuugacauagagca

SEQ ID NO: 1743338 - RNA, 19 nt, Artificial Sequence
  Description of Artificial Sequence: Synthetic oligonucleotide
  Antisense strand to SEQ ID NO: 1743337
ugcucuaugucaaaccaga

SEQ ID NO: 1743339 - RNA, 19 nt, Artificial Sequence
  Description of Artificial Sequence: Synthetic oligonucleotide
  Sense strand starting at position 2862 of SEQ ID NO: 1562392
uucuguuggaaaugaauga

SEQ ID NO: 1743340 - RNA, 19 nt, Artificial Sequence
  Description of Artificial Sequence: Synthetic oligonucleotide
  Antisense strand to SEQ ID NO: 1743339
ucauucauuuccaacagaa

SEQ ID NO: 1743341 - RNA, 19 nt, Artificial Sequence
  Description of Artificial Sequence: Synthetic oligonucleotide
  Sense strand starting at position 3056 of SEQ ID NO: 1562392
gggcauaaaucauuccauu

SEQ ID NO: 1743342 - RNA, 19 nt, Artificial Sequence
  Description of Artificial Sequence: Synthetic oligonucleotide
  Antisense strand to SEQ ID NO: 1743341
aauggaaugauuuaugccc

SEQ ID NO: 1743343 - RNA, 19 nt, Artificial Sequence
  Description of Artificial Sequence: Synthetic oligonucleotide
  Sense strand starting at position 3155 of SEQ ID NO: 1562392
ucagccugggaguauaaau

SEQ ID NO: 1743344 - RNA, 19 nt, Artificial Sequence
  Description of Artificial Sequence: Synthetic oligonucleotide
  Antisense strand to SEQ ID NO: 1743343
auuuauacucccaggcuga

SEQ ID NO: 1743345 - RNA, 19 nt, Artificial Sequence
  Description of Artificial Sequence: Synthetic oligonucleotide
  Sense strand starting at position 3171 of SEQ ID NO: 1562392
aaugguggcccuggaaaga

SEQ ID NO: 1743346 - RNA, 19 nt, Artificial Sequence
  Description of Artificial Sequence: Synthetic oligonucleotide
  Antisense strand to SEQ ID NO: 1743345
ucuuuccagggccaccauu

SEQ ID NO: 1743347 - RNA, 19 nt, Artificial Sequence
  Description of Artificial Sequence: Synthetic oligonucleotide
  Sense strand starting at position 3340 of SEQ ID NO: 1562392
ggugcagaacgaugaaaga

SEQ ID NO: 1743348 - RNA, 19 nt, Artificial Sequence
  Description of Artificial Sequence: Synthetic oligonucleotide
  Antisense strand to SEQ ID NO: 1743347
ucuuucaucguucugcacc

SEQ ID NO: 1743349 - RNA, 19 nt, Artificial Sequence
  Description of Artificial Sequence: Synthetic oligonucleotide
  Sense strand starting at position 3511 of SEQ ID NO: 1562392
cugggagguccuuaucuga

SEQ ID NO: 1743350 - RNA, 19 nt, Artificial Sequence
  Description of Artificial Sequence: Synthetic oligonucleotide
  Antisense strand to SEQ ID NO: 1743349
ucagauaaggaccucccag

SEQ ID NO: 1743351 - RNA, 19 nt, Artificial Sequence
  Description of Artificial Sequence: Synthetic oligonucleotide
  Sense strand starting at position 3527 of SEQ ID NO: 1562392
ugaucugguccugauccaa

SEQ ID NO: 1743352 - RNA, 19 nt, Artificial Sequence
  Description of Artificial Sequence: Synthetic oligonucleotide
  Antisense strand to SEQ ID NO: 1743351
uuggaucaggaccagauca

SEQ ID NO: 1743353 - RNA, 19 nt, Artificial Sequence
  Description of Artificial Sequence: Synthetic oligonucleotide
  Sense strand starting at position 3715 of SEQ ID NO: 1562392
uaugcauauuugucaagug

SEQ ID NO: 1743354 - RNA, 19 nt, Artificial Sequence
  Description of Artificial Sequence: Synthetic oligonucleotide
  Antisense strand to SEQ ID NO: 1743353
cacuugacaaauaugcaua

SEQ ID NO: 1743355 - RNA, 19 nt, Artificial Sequence
  Description of Artificial Sequence: Synthetic oligonucleotide
  Sense strand starting at position 3725 of SEQ ID NO: 1562392
ugucaaguggguugacaaa

SEQ ID NO: 1743356 - RNA, 19 nt, Artificial Sequence
  Description of Artificial Sequence: Synthetic oligonucleotide
  Antisense strand to SEQ ID NO: 1743355
uuugucaacccacuugaca

SEQ ID NO: 1743357 - RNA, 19 nt, Artificial Sequence
  Description of Artificial Sequence: Synthetic oligonucleotide
  Sense strand starting at position 3765 of SEQ ID NO: 1562392
auuuguuaccguggaacuu

SEQ ID NO: 1743358 - RNA, 19 nt, Artificial Sequence
  Description of Artificial Sequence: Synthetic oligonucleotide
  Antisense strand to SEQ ID NO: 1743357
aaguuccacgguaacaaau

SEQ ID NO: 1743359 - RNA, 19 nt, Artificial Sequence
  Description of Artificial Sequence: Synthetic oligonucleotide
  Sense strand starting at position 3808 of SEQ ID NO: 1562392
guauuuccagccuaagcuu

SEQ ID NO: 1743360 - RNA, 19 nt, Artificial Sequence
  Description of Artificial Sequence: Synthetic oligonucleotide
  Antisense strand to SEQ ID NO: 1743359
aagcuuaggcuggaaauac

SEQ ID NO: 1743361 - RNA, 19 nt, Artificial Sequence
  Description of Artificial Sequence: Synthetic oligonucleotide
  Sense strand starting at position 3910 of SEQ ID NO: 1562392
aaauguaggcaugauuagu

SEQ ID NO: 1743362 - RNA, 19 nt, Artificial Sequence
  Description of Artificial Sequence: Synthetic oligonucleotide
  Antisense strand to SEQ ID NO: 1743361
acuaaucaugccuacauuu

SEQ ID NO: 1743363 - RNA, 19 nt, Artificial Sequence
  Description of Artificial Sequence: Synthetic oligonucleotide
  Sense strand starting at position 102 of SEQ ID NO: 1562393
ggauauaucucagaaauau

SEQ ID NO: 1743364 - RNA, 19 nt, Artificial Sequence
  Description of Artificial Sequence: Synthetic oligonucleotide
  Antisense strand to SEQ ID NO: 1743363
auauuucugagauauaucc

SEQ ID NO: 1743365 - RNA, 19 nt, Artificial Sequence
  Description of Artificial Sequence: Synthetic oligonucleotide
  Sense strand starting at position 117 of SEQ ID NO: 1562393
auauaaugcuggucuaaca

SEQ ID NO: 1743366 - RNA, 19 nt, Artificial Sequence
  Description of Artificial Sequence: Synthetic oligonucleotide
  Antisense strand to SEQ ID NO: 1743365
uguuagaccagcauuauau

SEQ ID NO: 1743367 - RNA, 19 nt, Artificial Sequence
  Description of Artificial Sequence: Synthetic oligonucleotide
  Sense strand starting at position 440 of SEQ ID NO: 1562393
caauauauuggagguucua

SEQ ID NO: 1743368 - RNA, 19 nt, Artificial Sequence
  Description of Artificial Sequence: Synthetic oligonucleotide
  Antisense strand to SEQ ID NO: 1743367
uagaaccuccaauauauug

SEQ ID NO: 1743369 - RNA, 19 nt, Artificial Sequence
  Description of Artificial Sequence: Synthetic oligonucleotide
  Sense strand starting at position 450 of SEQ ID NO: 1562393
gagguucuagccugggaaa

SEQ ID NO: 1743370 - RNA, 19 nt, Artificial Sequence
  Description of Artificial Sequence: Synthetic oligonucleotide
  Antisense strand to SEQ ID NO: 1743369
uuucccaggcuagaaccuc

SEQ ID NO: 1743371 - RNA, 19 nt, Artificial Sequence
  Description of Artificial Sequence: Synthetic oligonucleotide
  Sense strand starting at position 540 of SEQ ID NO: 1562393
gacauaauuugguauguag

SEQ ID NO: 1743372 - RNA, 19 nt, Artificial Sequence
  Description of Artificial Sequence: Synthetic oligonucleotide
  Antisense strand to SEQ ID NO: 1743371
cuacauaccaaauuauguc

SEQ ID NO: 1743373 - RNA, 19 nt, Artificial Sequence
  Description of Artificial Sequence: Synthetic oligonucleotide
  Sense strand starting at position 647 of SEQ ID NO: 1562393
auuguuauaggcuagcaau

SEQ ID NO: 1743374 - RNA, 19 nt, Artificial Sequence
  Description of Artificial Sequence: Synthetic oligonucleotide
  Antisense strand to SEQ ID NO: 1743373
auugcuagccuauaacaau

SEQ ID NO: 1743375 - RNA, 19 nt, Artificial Sequence
  Description of Artificial Sequence: Synthetic oligonucleotide
  Sense strand starting at position 653 of SEQ ID NO: 1562393
auaggcuagcaaugaagaa

SEQ ID NO: 1743376 - RNA, 19 nt, Artificial Sequence
  Description of Artificial Sequence: Synthetic oligonucleotide
  Antisense strand to SEQ ID NO: 1743375
uucuucauugcuagccuau

SEQ ID NO: 1743377 - RNA, 19 nt, Artificial Sequence
  Description of Artificial Sequence: Synthetic oligonucleotide
  Sense strand starting at position 766 of SEQ ID NO: 1562393
cagugaauacuaugaugcu

SEQ ID NO: 1743378 - RNA, 19 nt, Artificial Sequence
  Description of Artificial Sequence: Synthetic oligonucleotide
  Antisense strand to SEQ ID NO: 1743377
agcaucauaguauucacug

SEQ ID NO: 1743379 - RNA, 19 nt, Artificial Sequence
  Description of Artificial Sequence: Synthetic oligonucleotide
  Sense strand starting at position 874 of SEQ ID NO: 1562393
uuggaagaguuguuauugu

SEQ ID NO: 1743380 - RNA, 19 nt, Artificial Sequence
  Description of Artificial Sequence: Synthetic oligonucleotide
  Antisense strand to SEQ ID NO: 1743379
acaauaacaacucuuccaa

SEQ ID NO: 1743381 - RNA, 19 nt, Artificial Sequence
  Description of Artificial Sequence: Synthetic oligonucleotide
  Sense strand starting at position 973 of SEQ ID NO: 1562393
cugacauggugauucuaga

SEQ ID NO: 1743382 - RNA, 19 nt, Artificial Sequence
  Description of Artificial Sequence: Synthetic oligonucleotide
  Antisense strand to SEQ ID NO: 1743381
ucuagaaucaccaugucag

SEQ ID NO: 1743383 - RNA, 19 nt, Artificial Sequence
  Description of Artificial Sequence: Synthetic oligonucleotide
  Sense strand starting at position 981 of SEQ ID NO: 1562393
gugauucuagaauguauau

SEQ ID NO: 1743384 - RNA, 19 nt, Artificial Sequence
  Description of Artificial Sequence: Synthetic oligonucleotide
  Antisense strand to SEQ ID NO: 1743383
auauacauucuagaaucac

SEQ ID NO: 1743385 - RNA, 19 nt, Artificial Sequence
  Description of Artificial Sequence: Synthetic oligonucleotide
  Sense strand starting at position 1222 of SEQ ID NO: 1562393
uaacuugagguaggucaua

SEQ ID NO: 1743386 - RNA, 19 nt, Artificial Sequence
  Description of Artificial Sequence: Synthetic oligonucleotide
  Antisense strand to SEQ ID NO: 1743385
uaugaccuaccucaaguua

SEQ ID NO: 1743387 - RNA, 19 nt, Artificial Sequence
  Description of Artificial Sequence: Synthetic oligonucleotide
  Sense strand starting at position 1266 of SEQ ID NO: 1562393
ugaaauucuugagaggaaa

SEQ ID NO: 1743388 - RNA, 19 nt, Artificial Sequence
  Description of Artificial Sequence: Synthetic oligonucleotide
  Antisense strand to SEQ ID NO: 1743387
uuuccucucaagaauuuca

SEQ ID NO: 1743389 - RNA, 19 nt, Artificial Sequence
  Description of Artificial Sequence: Synthetic oligonucleotide
  Sense strand starting at position 1305 of SEQ ID NO: 1562393
acugcuguuagagaugaca

SEQ ID NO: 1743390 - RNA, 19 nt, Artificial Sequence
  Description of Artificial Sequence: Synthetic oligonucleotide
  Antisense strand to SEQ ID NO: 1743389
ugucaucucuaacagcagu

SEQ ID NO: 1743391 - RNA, 19 nt, Artificial Sequence
  Description of Artificial Sequence: Synthetic oligonucleotide
  Sense strand starting at position 1307 of SEQ ID NO: 1562393
ugcuguuagagaugacaau

SEQ ID NO: 1743392 - RNA, 19 nt, Artificial Sequence
  Description of Artificial Sequence: Synthetic oligonucleotide
  Antisense strand to SEQ ID NO: 1743391
auugucaucucuaacagca

SEQ ID NO: 1743393 - RNA, 19 nt, Artificial Sequence
  Description of Artificial Sequence: Synthetic oligonucleotide
  Sense strand starting at position 1474 of SEQ ID NO: 1562393
aucugauaaugggcucaua

SEQ ID NO: 1743394 - RNA, 19 nt, Artificial Sequence
  Description of Artificial Sequence: Synthetic oligonucleotide
  Antisense strand to SEQ ID NO: 1743393
uaugagcccauuaucagau

SEQ ID NO: 1743395 - RNA, 19 nt, Artificial Sequence
  Description of Artificial Sequence: Synthetic oligonucleotide
  Sense strand starting at position 1485 of SEQ ID NO: 1562393
ggcucauauccagacugca

SEQ ID NO: 1743396 - RNA, 19 nt, Artificial Sequence
  Description of Artificial Sequence: Synthetic oligonucleotide
  Antisense strand to SEQ ID NO: 1743395
ugcagucuggauaugagcc

SEQ ID NO: 1743397 - RNA, 19 nt, Artificial Sequence
  Description of Artificial Sequence: Synthetic oligonucleotide
  Sense strand starting at position 1764 of SEQ ID NO: 1562393
aaacguuaugggugguaac

SEQ ID NO: 1743398 - RNA, 19 nt, Artificial Sequence
  Description of Artificial Sequence: Synthetic oligonucleotide
  Antisense strand to SEQ ID NO: 1743397
guuaccacccauaacguuu

SEQ ID NO: 1743399 - RNA, 19 nt, Artificial Sequence
  Description of Artificial Sequence: Synthetic oligonucleotide
  Sense strand starting at position 1765 of SEQ ID NO: 1562393
aacguuaugggugguaaca

SEQ ID NO: 1743400 - RNA, 19 nt, Artificial Sequence
  Description of Artificial Sequence: Synthetic oligonucleotide
  Antisense strand to SEQ ID NO: 1743399
uguuaccacccauaacguu

SEQ ID NO: 1743401 - RNA, 19 nt, Artificial Sequence
  Description of Artificial Sequence: Synthetic oligonucleotide
  Sense strand starting at position 2091 of SEQ ID NO: 1562393
uauuguauccugggaaguu

SEQ ID NO: 1743402 - RNA, 19 nt, Artificial Sequence
  Description of Artificial Sequence: Synthetic oligonucleotide
  Antisense strand to SEQ ID NO: 1743401
aacuucccaggauacaaua

SEQ ID NO: 1743403 - RNA, 19 nt, Artificial Sequence
  Description of Artificial Sequence: Synthetic oligonucleotide
  Sense strand starting at position 2162 of SEQ ID NO: 1562393
uuuccauccgggugacaca

SEQ ID NO: 1743404 - RNA, 19 nt, Artificial Sequence
  Description of Artificial Sequence: Synthetic oligonucleotide
  Antisense strand to SEQ ID NO: 1743403
ugugucacccggauggaaa

SEQ ID NO: 1743405 - RNA, 19 nt, Artificial Sequence
  Description of Artificial Sequence: Synthetic oligonucleotide
  Sense strand starting at position 2190 of SEQ ID NO: 1562393
acaagauaagcuugagcaa

SEQ ID NO: 1743406 - RNA, 19 nt, Artificial Sequence
  Description of Artificial Sequence: Synthetic oligonucleotide
  Antisense strand to SEQ ID NO: 1743405
uugcucaagcuuaucuugu

SEQ ID NO: 1743407 - RNA, 19 nt, Artificial Sequence
  Description of Artificial Sequence: Synthetic oligonucleotide
  Sense strand starting at position 2202 of SEQ ID NO: 1562393
ugagcaagccuagauuaca

SEQ ID NO: 1743408 - RNA, 19 nt, Artificial Sequence
  Description of Artificial Sequence: Synthetic oligonucleotide
  Antisense strand to SEQ ID NO: 1743407
uguaaucuaggcuugcuca

SEQ ID NO: 1743409 - RNA, 19 nt, Artificial Sequence
  Description of Artificial Sequence: Synthetic oligonucleotide
  Sense strand starting at position 2238 of SEQ ID NO: 1562393
gcaggagucacaugacaug

SEQ ID NO: 1743410 - RNA, 19 nt, Artificial Sequence
  Description of Artificial Sequence: Synthetic oligonucleotide
  Antisense strand to SEQ ID NO: 1743409
caugucaugugacuccugc

SEQ ID NO: 1743411 - RNA, 19 nt, Artificial Sequence
  Description of Artificial Sequence: Synthetic oligonucleotide
  Sense strand starting at position 2257 of SEQ ID NO: 1562393
cuuaaacaagccugaguua

SEQ ID NO: 1743412 - RNA, 19 nt, Artificial Sequence
  Description of Artificial Sequence: Synthetic oligonucleotide
  Antisense strand to SEQ ID NO: 1743411
uaacucaggcuuguuuaag

SEQ ID NO: 1743413 - RNA, 19 nt, Artificial Sequence
  Description of Artificial Sequence: Synthetic oligonucleotide
  Sense strand starting at position 2280 of SEQ ID NO: 1562393
ccugccacuguuugauaaa

SEQ ID NO: 1743414 - RNA, 19 nt, Artificial Sequence
  Description of Artificial Sequence: Synthetic oligonucleotide
  Antisense strand to SEQ ID NO: 1743413
uuuaucaaacaguggcagg

SEQ ID NO: 1743415 - RNA, 19 nt, Artificial Sequence
  Description of Artificial Sequence: Synthetic oligonucleotide
  Sense strand starting at position 2633 of SEQ ID NO: 1562393
agagaagggauugguucuu

SEQ ID NO: 1743416 - RNA, 19 nt, Artificial Sequence
  Description of Artificial Sequence: Synthetic oligonucleotide
  Antisense strand to SEQ ID NO: 1743415
aagaaccaaucccuucucu

SEQ ID NO: 1743417 - RNA, 19 nt, Artificial Sequence
  Description of Artificial Sequence: Synthetic oligonucleotide
  Sense strand starting at position 2810 of SEQ ID NO: 1562393
cacugaguagucugaccca

SEQ ID NO: 1743418 - RNA, 19 nt, Artificial Sequence
  Description of Artificial Sequence: Synthetic oligonucleotide
  Antisense strand to SEQ ID NO: 1743417
ugggucagacuacucagug

SEQ ID NO: 1743419 - RNA, 19 nt, Artificial Sequence
  Description of Artificial Sequence: Synthetic oligonucleotide
  Sense strand starting at position 2813 of SEQ ID NO: 1562393
ugaguagucugacccagga

SEQ ID NO: 1743420 - RNA, 19 nt, Artificial Sequence
  Description of Artificial Sequence: Synthetic oligonucleotide
  Antisense strand to SEQ ID NO: 1743419
uccugggucagacuacuca

SEQ ID NO: 1743421 - RNA, 19 nt, Artificial Sequence
  Description of Artificial Sequence: Synthetic oligonucleotide
  Sense strand starting at position 2973 of SEQ ID NO: 1562393
ggucucuuagcauagacca

SEQ ID NO: 1743422 - RNA, 19 nt, Artificial Sequence
  Description of Artificial Sequence: Synthetic oligonucleotide
  Antisense strand to SEQ ID NO: 1743421
uggucuaugcuaagagacc

SEQ ID NO: 1743423 - RNA, 19 nt, Artificial Sequence
  Description of Artificial Sequence: Synthetic oligonucleotide
  Sense strand starting at position 3166 of SEQ ID NO: 1562393
auggucuaaucagucugaa

SEQ ID NO: 1743424 - RNA, 19 nt, Artificial Sequence
  Description of Artificial Sequence: Synthetic oligonucleotide
  Antisense strand to SEQ ID NO: 1743423
uucagacugauuagaccau

SEQ ID NO: 1743425 - RNA, 19 nt, Artificial Sequence
  Description of Artificial Sequence: Synthetic oligonucleotide
  Sense strand starting at position 3169 of SEQ ID NO: 1562393
gucuaaucagucugaagag

SEQ ID NO: 1743426 - RNA, 19 nt, Artificial Sequence
  Description of Artificial Sequence: Synthetic oligonucleotide
  Antisense strand to SEQ ID NO: 1743425
cucuucagacugauuagac

SEQ ID NO: 1743427 - RNA, 19 nt, Artificial Sequence
  Description of Artificial Sequence: Synthetic oligonucleotide
  Sense strand starting at position 3197 of SEQ ID NO: 1562393
gagugaauaaguuguguca

SEQ ID NO: 1743428 - RNA, 19 nt, Artificial Sequence
  Description of Artificial Sequence: Synthetic oligonucleotide
  Antisense strand to SEQ ID NO: 1743427
ugacacaacuuauucacuc

SEQ ID NO: 1743429 - RNA, 19 nt, Artificial Sequence
  Description of Artificial Sequence: Synthetic oligonucleotide
  Sense strand starting at position 3200 of SEQ ID NO: 1562393
ugaauaaguugugucauaa

SEQ ID NO: 1743430 - RNA, 19 nt, Artificial Sequence
  Description of Artificial Sequence: Synthetic oligonucleotide
  Antisense strand to SEQ ID NO: 1743429
uuaugacacaacuuauuca

SEQ ID NO: 1743431 - RNA, 19 nt, Artificial Sequence
  Description of Artificial Sequence: Synthetic oligonucleotide
  Sense strand starting at position 3210 of SEQ ID NO: 1562393
gugucauaacugggaggaa

SEQ ID NO: 1743432 - RNA, 19 nt, Artificial Sequence
  Description of Artificial Sequence: Synthetic oligonucleotide
  Antisense strand to SEQ ID NO: 1743431
uuccucccaguuaugacac

SEQ ID NO: 1743433 - RNA, 19 nt, Artificial Sequence
  Description of Artificial Sequence: Synthetic oligonucleotide
  Sense strand starting at position 3230 of SEQ ID NO: 1562393
ugggaaggaagcugucaaa

SEQ ID NO: 1743434 - RNA, 19 nt, Artificial Sequence
  Description of Artificial Sequence: Synthetic oligonucleotide
  Antisense strand to SEQ ID NO: 1743433
uuugacagcuuccuuccca

SEQ ID NO: 1743435 - RNA, 19 nt, Artificial Sequence
  Description of Artificial Sequence: Synthetic oligonucleotide
  Sense strand starting at position 3296 of SEQ ID NO: 1562393
cagaguguugugggaucaa

SEQ ID NO: 1743436 - RNA, 19 nt, Artificial Sequence
  Description of Artificial Sequence: Synthetic oligonucleotide
  Antisense strand to SEQ ID NO: 1743435
uugaucccacaacacucug

SEQ ID NO: 1743437 - RNA, 19 nt, Artificial Sequence
  Description of Artificial Sequence: Synthetic oligonucleotide
  Sense strand starting at position 3478 of SEQ ID NO: 1562393
auugacucauggcuacaua

SEQ ID NO: 1743438 - RNA, 19 nt, Artificial Sequence
  Description of Artificial Sequence: Synthetic oligonucleotide
  Antisense strand to SEQ ID NO: 1743437
uauguagccaugagucaau

SEQ ID NO: 1743439 - RNA, 19 nt, Artificial Sequence
  Description of Artificial Sequence: Synthetic oligonucleotide
  Sense strand starting at position 3479 of SEQ ID NO: 1562393
uugacucauggcuacauau

SEQ ID NO: 1743440 - RNA, 19 nt, Artificial Sequence
  Description of Artificial Sequence: Synthetic oligonucleotide
  Antisense strand to SEQ ID NO: 1743439
auauguagccaugagucaa

SEQ ID NO: 1743441 - RNA, 19 nt, Artificial Sequence
  Description of Artificial Sequence: Synthetic oligonucleotide
  Sense strand starting at position 3636 of SEQ ID NO: 1562393
accaguucugcaggaauca

SEQ ID NO: 1743442 - RNA, 19 nt, Artificial Sequence
  Description of Artificial Sequence: Synthetic oligonucleotide
  Antisense strand to SEQ ID NO: 1743441
ugauuccugcagaacuggu

SEQ ID NO: 1743443 - RNA, 19 nt, Artificial Sequence
  Description of Artificial Sequence: Synthetic oligonucleotide
  Sense strand starting at position 183 of SEQ ID NO: 1562394
aaggucuguuccguuauuu

SEQ ID NO: 1743444 - RNA, 19 nt, Artificial Sequence
  Description of Artificial Sequence: Synthetic oligonucleotide
  Antisense strand to SEQ ID NO: 1743443
aaauaacggaacagaccuu

SEQ ID NO: 1743445 - RNA, 19 nt, Artificial Sequence
  Description of Artificial Sequence: Synthetic oligonucleotide
  Sense strand starting at position 193 of SEQ ID NO: 1562394
ccguuauuugaugagcguu

SEQ ID NO: 1743446 - RNA, 19 nt, Artificial Sequence
  Description of Artificial Sequence: Synthetic oligonucleotide
  Antisense strand to SEQ ID NO: 1743445
aacgcucaucaaauaacgg

SEQ ID NO: 1743447 - RNA, 19 nt, Artificial Sequence
  Description of Artificial Sequence: Synthetic oligonucleotide
  Sense strand starting at position 299 of SEQ ID NO: 1562394
ccuggauggucacuuauua

SEQ ID NO: 1743448 - RNA, 19 nt, Artificial Sequence
  Description of Artificial Sequence: Synthetic oligonucleotide
  Antisense strand to SEQ ID NO: 1743447
uaauaagugaccauccagg

SEQ ID NO: 1743449 - RNA, 19 nt, Artificial Sequence
  Description of Artificial Sequence: Synthetic oligonucleotide
  Sense strand starting at position 404 of SEQ ID NO: 1562394
gagguaagugcuuacuuac

SEQ ID NO: 1743450 - RNA, 19 nt, Artificial Sequence
  Description of Artificial Sequence: Synthetic oligonucleotide
  Antisense strand to SEQ ID NO: 1743449
guaaguaagcacuuaccuc

SEQ ID NO: 1743451 - RNA, 19 nt, Artificial Sequence
  Description of Artificial Sequence: Synthetic oligonucleotide
  Sense strand starting at position 422 of SEQ ID NO: 1562394
ccuaauuaaucggcuggaa

SEQ ID NO: 1743452 - RNA, 19 nt, Artificial Sequence
  Description of Artificial Sequence: Synthetic oligonucleotide
  Antisense strand to SEQ ID NO: 1743451
uuccagccgauuaauuagg

SEQ ID NO: 1743453 - RNA, 19 nt, Artificial Sequence
  Description of Artificial Sequence: Synthetic oligonucleotide
  Sense strand starting at position 435 of SEQ ID NO: 1562394
cuggaagugucucugauac

SEQ ID NO: 1743454 - RNA, 19 nt, Artificial Sequence
  Description of Artificial Sequence: Synthetic oligonucleotide
  Antisense strand to SEQ ID NO: 1743453
guaucagagacacuuccag

SEQ ID NO: 1743455 - RNA, 19 nt, Artificial Sequence
  Description of Artificial Sequence: Synthetic oligonucleotide
  Sense strand starting at position 491 of SEQ ID NO: 1562394
guauuauagcuuuauggga

SEQ ID NO: 1743456 - RNA, 19 nt, Artificial Sequence
  Description of Artificial Sequence: Synthetic oligonucleotide
  Antisense strand to SEQ ID NO: 1743455
ucccauaaagcuauaauac

SEQ ID NO: 1743457 - RNA, 19 nt, Artificial Sequence
  Description of Artificial Sequence: Synthetic oligonucleotide
  Sense strand starting at position 546 of SEQ ID NO: 1562394
gagagaauuugucaccuaa

SEQ ID NO: 1743458 - RNA, 19 nt, Artificial Sequence
  Description of Artificial Sequence: Synthetic oligonucleotide
  Antisense strand to SEQ ID NO: 1743457
uuaggugacaaauucucuc

SEQ ID NO: 1743459 - RNA, 19 nt, Artificial Sequence
  Description of Artificial Sequence: Synthetic oligonucleotide
  Sense strand starting at position 660 of SEQ ID NO: 1562394
gagugugugcuugugaucu

SEQ ID NO: 1743460 - RNA, 19 nt, Artificial Sequence
  Description of Artificial Sequence: Synthetic oligonucleotide
  Antisense strand to SEQ ID NO: 1743459
agaucacaagcacacacuc

SEQ ID NO: 1743461 - RNA, 19 nt, Artificial Sequence
  Description of Artificial Sequence: Synthetic oligonucleotide
  Sense strand starting at position 841 of SEQ ID NO: 1562394
uucuaaccuguggguuaaa

SEQ ID NO: 1743462 - RNA, 19 nt, Artificial Sequence
  Description of Artificial Sequence: Synthetic oligonucleotide
  Antisense strand to SEQ ID NO: 1743461
uuuaacccacagguuagaa

SEQ ID NO: 1743463 - RNA, 19 nt, Artificial Sequence
  Description of Artificial Sequence: Synthetic oligonucleotide
  Sense strand starting at position 957 of SEQ ID NO: 1562394
acaggagcaauguggaaau

SEQ ID NO: 1743464 - RNA, 19 nt, Artificial Sequence
  Description of Artificial Sequence: Synthetic oligonucleotide
  Antisense strand to SEQ ID NO: 1743463
auuuccacauugcuccugu

SEQ ID NO: 1743465 - RNA, 19 nt, Artificial Sequence
  Description of Artificial Sequence: Synthetic oligonucleotide
  Sense strand starting at position 1048 of SEQ ID NO: 1562394
uauuaaucaugggucauga

SEQ ID NO: 1743466 - RNA, 19 nt, Artificial Sequence
  Description of Artificial Sequence: Synthetic oligonucleotide
  Antisense strand to SEQ ID NO: 1743465
ucaugacccaugauuaaua

SEQ ID NO: 1743467 - RNA, 19 nt, Artificial Sequence
  Description of Artificial Sequence: Synthetic oligonucleotide
  Sense strand starting at position 1088 of SEQ ID NO: 1562394
aacucaggaucguuuacau

SEQ ID NO: 1743468 - RNA, 19 nt, Artificial Sequence
  Description of Artificial Sequence: Synthetic oligonucleotide
  Antisense strand to SEQ ID NO: 1743467
auguaaacgauccugaguu

SEQ ID NO: 1743469 - RNA, 19 nt, Artificial Sequence
  Description of Artificial Sequence: Synthetic oligonucleotide
  Sense strand starting at position 1148 of SEQ ID NO: 1562394
aaggauagguaacagauuu

SEQ ID NO: 1743470 - RNA, 19 nt, Artificial Sequence
  Description of Artificial Sequence: Synthetic oligonucleotide
  Antisense strand to SEQ ID NO: 1743469
aaaucuguuaccuauccuu

SEQ ID NO: 1743471 - RNA, 19 nt, Artificial Sequence
  Description of Artificial Sequence: Synthetic oligonucleotide
  Sense strand starting at position 1250 of SEQ ID NO: 1562394
gccaaagaacuauguaauc

SEQ ID NO: 1743472 - RNA, 19 nt, Artificial Sequence
  Description of Artificial Sequence: Synthetic oligonucleotide
  Antisense strand to SEQ ID NO: 1743471
gauuacauaguucuuuggc

SEQ ID NO: 1743473 - RNA, 19 nt, Artificial Sequence
  Description of Artificial Sequence: Synthetic oligonucleotide
  Sense strand starting at position 1280 of SEQ ID NO: 1562394
acaaacuugcucugacaga

SEQ ID NO: 1743474 - RNA, 19 nt, Artificial Sequence
  Description of Artificial Sequence: Synthetic oligonucleotide
  Antisense strand to SEQ ID NO: 1743473
ucugucagagcaaguuugu

SEQ ID NO: 1743475 - RNA, 19 nt, Artificial Sequence
  Description of Artificial Sequence: Synthetic oligonucleotide
  Sense strand starting at position 1305 of SEQ ID NO: 1562394
caaagagaagucggaguaa

SEQ ID NO: 1743476 - RNA, 19 nt, Artificial Sequence
  Description of Artificial Sequence: Synthetic oligonucleotide
  Antisense strand to SEQ ID NO: 1743475
uuacuccgacuucucuuug

SEQ ID NO: 1743477 - RNA, 19 nt, Artificial Sequence
  Description of Artificial Sequence: Synthetic oligonucleotide
  Sense strand starting at position 1369 of SEQ ID NO: 1562394
acgacaucuggauauuguu

SEQ ID NO: 1743478 - RNA, 19 nt, Artificial Sequence
  Description of Artificial Sequence: Synthetic oligonucleotide
  Antisense strand to SEQ ID NO: 1743477
aacaauauccagaugucgu

SEQ ID NO: 1743479 - RNA, 19 nt, Artificial Sequence
  Description of Artificial Sequence: Synthetic oligonucleotide
  Sense strand starting at position 1415 of SEQ ID NO: 1562394
uugucccaucauuaaguaa

SEQ ID NO: 1743480 - RNA, 19 nt, Artificial Sequence
  Description of Artificial Sequence: Synthetic oligonucleotide
  Antisense strand to SEQ ID NO: 1743479
uuacuuaaugaugggacaa

SEQ ID NO: 1743481 - RNA, 19 nt, Artificial Sequence
  Description of Artificial Sequence: Synthetic oligonucleotide
  Sense strand starting at position 2098 of SEQ ID NO: 1562394
gccaguuaaucuuugaaga

SEQ ID NO: 1743482 - RNA, 19 nt, Artificial Sequence
  Description of Artificial Sequence: Synthetic oligonucleotide
  Antisense strand to SEQ ID NO: 1743481
ucuucaaagauuaacuggc

SEQ ID NO: 1743483 - RNA, 19 nt, Artificial Sequence
  Description of Artificial Sequence: Synthetic oligonucleotide
  Sense strand starting at position 2099 of SEQ ID NO: 1562394
ccaguuaaucuuugaagaa

SEQ ID NO: 1743484 - RNA, 19 nt, Artificial Sequence
  Description of Artificial Sequence: Synthetic oligonucleotide
  Antisense strand to SEQ ID NO: 1743483
uucuucaaagauuaacugg

SEQ ID NO: 1743485 - RNA, 19 nt, Artificial Sequence
  Description of Artificial Sequence: Synthetic oligonucleotide
  Sense strand starting at position 2148 of SEQ ID NO: 1562394
ggucccuuuggcuaaguaa

SEQ ID NO: 1743486 - RNA, 19 nt, Artificial Sequence
  Description of Artificial Sequence: Synthetic oligonucleotide
  Antisense strand to SEQ ID NO: 1743485
uuacuuagccaaagggacc

SEQ ID NO: 1743487 - RNA, 19 nt, Artificial Sequence
  Description of Artificial Sequence: Synthetic oligonucleotide
  Sense strand starting at position 2446 of SEQ ID NO: 1562394
gcugaauagacaugggcaa

SEQ ID NO: 1743488 - RNA, 19 nt, Artificial Sequence
  Description of Artificial Sequence: Synthetic oligonucleotide
  Antisense strand to SEQ ID NO: 1743487
uugcccaugucuauucagc

SEQ ID NO: 1743489 - RNA, 19 nt, Artificial Sequence
  Description of Artificial Sequence: Synthetic oligonucleotide
  Sense strand starting at position 2487 of SEQ ID NO: 1562394
gaaauugggcuucgggaua

SEQ ID NO: 1743490 - RNA, 19 nt, Artificial Sequence
  Description of Artificial Sequence: Synthetic oligonucleotide
  Antisense strand to SEQ ID NO: 1743489
uaucccgaagcccaauuuc

SEQ ID NO: 1743491 - RNA, 19 nt, Artificial Sequence
  Description of Artificial Sequence: Synthetic oligonucleotide
  Sense strand starting at position 2500 of SEQ ID NO: 1562394
gggauacauguuggaaucu

SEQ ID NO: 1743492 - RNA, 19 nt, Artificial Sequence
  Description of Artificial Sequence: Synthetic oligonucleotide
  Antisense strand to SEQ ID NO: 1743491
agauuccaacauguauccc

SEQ ID NO: 1743493 - RNA, 19 nt, Artificial Sequence
  Description of Artificial Sequence: Synthetic oligonucleotide
  Sense strand starting at position 2640 of SEQ ID NO: 1562394
ggguuauauguccauccua

SEQ ID NO: 1743494 - RNA, 19 nt, Artificial Sequence
  Description of Artificial Sequence: Synthetic oligonucleotide
  Antisense strand to SEQ ID NO: 1743493
uaggauggacauauaaccc

SEQ ID NO: 1743495 - RNA, 19 nt, Artificial Sequence
  Description of Artificial Sequence: Synthetic oligonucleotide
  Sense strand starting at position 2870 of SEQ ID NO: 1562394
cgaugauauacccacacgu

SEQ ID NO: 1743496 - RNA, 19 nt, Artificial Sequence
  Description of Artificial Sequence: Synthetic oligonucleotide
  Antisense strand to SEQ ID NO: 1743495
acguguggguauaucaucg

SEQ ID NO: 1743497 - RNA, 19 nt, Artificial Sequence
  Description of Artificial Sequence: Synthetic oligonucleotide
  Sense strand starting at position 2927 of SEQ ID NO: 1562394
ucugguuugacauagagca

SEQ ID NO: 1743498 - RNA, 19 nt, Artificial Sequence
  Description of Artificial Sequence: Synthetic oligonucleotide
  Antisense strand to SEQ ID NO: 1743497
ugcucuaugucaaaccaga

SEQ ID NO: 1743499 - RNA, 19 nt, Artificial Sequence
  Description of Artificial Sequence: Synthetic oligonucleotide
  Sense strand starting at position 2968 of SEQ ID NO: 1562394
uucuguuggaaaugaauga

SEQ ID NO: 1743500 - RNA, 19 nt, Artificial Sequence
  Description of Artificial Sequence: Synthetic oligonucleotide
  Antisense strand to SEQ ID NO: 1743499
ucauucauuuccaacagaa

SEQ ID NO: 1743501 - RNA, 19 nt, Artificial Sequence
  Description of Artificial Sequence: Synthetic oligonucleotide
  Sense strand starting at position 3162 of SEQ ID NO: 1562394
gggcauaaaucauuccauu

SEQ ID NO: 1743502 - RNA, 19 nt, Artificial Sequence
  Description of Artificial Sequence: Synthetic oligonucleotide
  Antisense strand to SEQ ID NO: 1743501
aauggaaugauuuaugccc

SEQ ID NO: 1743503 - RNA, 19 nt, Artificial Sequence
  Description of Artificial Sequence: Synthetic oligonucleotide
  Sense strand starting at position 3261 of SEQ ID NO: 1562394
ucagccugggaguauaaau

SEQ ID NO: 1743504 - RNA, 19 nt, Artificial Sequence
  Description of Artificial Sequence: Synthetic oligonucleotide
  Antisense strand to SEQ ID NO: 1743503
auuuauacucccaggcuga

SEQ ID NO: 1743505 - RNA, 19 nt, Artificial Sequence
  Description of Artificial Sequence: Synthetic oligonucleotide
  Sense strand starting at position 3277 of SEQ ID NO: 1562394
aaugguggcccuggaaaga

SEQ ID NO: 1743506 - RNA, 19 nt, Artificial Sequence
  Description of Artificial Sequence: Synthetic oligonucleotide
  Antisense strand to SEQ ID NO: 1743505
ucuuuccagggccaccauu

SEQ ID NO: 1743507 - RNA, 19 nt, Artificial Sequence
  Description of Artificial Sequence: Synthetic oligonucleotide
  Sense strand starting at position 3446 of SEQ ID NO: 1562394
ggugcagaacgaugaaaga

SEQ ID NO: 1743508 - RNA, 19 nt, Artificial Sequence
  Description of Artificial Sequence: Synthetic oligonucleotide
  Antisense strand to SEQ ID NO: 1743507
ucuuucaucguucugcacc

SEQ ID NO: 1743509 - RNA, 19 nt, Artificial Sequence
  Description of Artificial Sequence: Synthetic oligonucleotide
  Sense strand starting at position 3617 of SEQ ID NO: 1562394
cugggagguccuuaucuga

SEQ ID NO: 1743510 - RNA, 19 nt, Artificial Sequence
  Description of Artificial Sequence: Synthetic oligonucleotide
  Antisense strand to SEQ ID NO: 1743509
ucagauaaggaccucccag

SEQ ID NO: 1743511 - RNA, 19 nt, Artificial Sequence
  Description of Artificial Sequence: Synthetic oligonucleotide
  Sense strand starting at position 3633 of SEQ ID NO: 1562394
ugaucugguccugauccaa

SEQ ID NO: 1743512 - RNA, 19 nt, Artificial Sequence
  Description of Artificial Sequence: Synthetic oligonucleotide
  Antisense strand to SEQ ID NO: 1743511
uuggaucaggaccagauca

SEQ ID NO: 1743513 - RNA, 19 nt, Artificial Sequence
  Description of Artificial Sequence: Synthetic oligonucleotide
  Sense strand starting at position 3684 of SEQ ID NO: 1562394
cucacuuaucacugucuga

SEQ ID NO: 1743514 - RNA, 19 nt, Artificial Sequence
  Description of Artificial Sequence: Synthetic oligonucleotide
  Antisense strand to SEQ ID NO: 1743513
ucagacagugauaagugag

SEQ ID NO: 1743515 - RNA, 19 nt, Artificial Sequence
  Description of Artificial Sequence: Synthetic oligonucleotide
  Sense strand starting at position 3821 of SEQ ID NO: 1562394
uaugcauauuugucaagug

SEQ ID NO: 1743516 - RNA, 19 nt, Artificial Sequence
  Description of Artificial Sequence: Synthetic oligonucleotide
  Antisense strand to SEQ ID NO: 1743515
cacuugacaaauaugcaua

SEQ ID NO: 1743517 - RNA, 19 nt, Artificial Sequence
  Description of Artificial Sequence: Synthetic oligonucleotide
  Sense strand starting at position 3831 of SEQ ID NO: 1562394
ugucaaguggguugacaaa

SEQ ID NO: 1743518 - RNA, 19 nt, Artificial Sequence
  Description of Artificial Sequence: Synthetic oligonucleotide
  Antisense strand to SEQ ID NO: 1743517
uuugucaacccacuugaca

SEQ ID NO: 1743519 - RNA, 19 nt, Artificial Sequence
  Description of Artificial Sequence: Synthetic oligonucleotide
  Sense strand starting at position 3871 of SEQ ID NO: 1562394
auuuguuaccguggaacuu

SEQ ID NO: 1743520 - RNA, 19 nt, Artificial Sequence
  Description of Artificial Sequence: Synthetic oligonucleotide
  Antisense strand to SEQ ID NO: 1743519
aaguuccacgguaacaaau

SEQ ID NO: 1743521 - RNA, 19 nt, Artificial Sequence
  Description of Artificial Sequence: Synthetic oligonucleotide
  Sense strand starting at position 3914 of SEQ ID NO: 1562394
guauuuccagccuaagcuu

SEQ ID NO: 1743522 - RNA, 19 nt, Artificial Sequence
  Description of Artificial Sequence: Synthetic oligonucleotide
  Antisense strand to SEQ ID NO: 1743521
aagcuuaggcuggaaauac

SEQ ID NO: 1743523 - RNA, 19 nt, Artificial Sequence
  Description of Artificial Sequence: Synthetic oligonucleotide
  Sense strand starting at position 15 of SEQ ID NO: 1562395
cuguuuauugaggaguaga

SEQ ID NO: 1743524 - RNA, 19 nt, Artificial Sequence
  Description of Artificial Sequence: Synthetic oligonucleotide
  Antisense strand to SEQ ID NO: 1743523
ucuacuccucaauaaacag

SEQ ID NO: 1743525 - RNA, 19 nt, Artificial Sequence
  Description of Artificial Sequence: Synthetic oligonucleotide
  Sense strand starting at position 48 of SEQ ID NO: 1562395
ggagaagugugaucuuacu

SEQ ID NO: 1743526 - RNA, 19 nt, Artificial Sequence
  Description of Artificial Sequence: Synthetic oligonucleotide
  Antisense strand to SEQ ID NO: 1743525
aguaagaucacacuucucc

SEQ ID NO: 1743527 - RNA, 19 nt, Artificial Sequence
  Description of Artificial Sequence: Synthetic oligonucleotide
  Sense strand starting at position 315 of SEQ ID NO: 1562395
cagaguugggauuggcaaa

SEQ ID NO: 1743528 - RNA, 19 nt, Artificial Sequence
  Description of Artificial Sequence: Synthetic oligonucleotide
  Antisense strand to SEQ ID NO: 1743527
uuugccaaucccaacucug

SEQ ID NO: 1743529 - RNA, 19 nt, Artificial Sequence
  Description of Artificial Sequence: Synthetic oligonucleotide
  Sense strand starting at position 617 of SEQ ID NO: 1562395
uggugaaugcuagagcaca

SEQ ID NO: 1743530 - RNA, 19 nt, Artificial Sequence
  Description of Artificial Sequence: Synthetic oligonucleotide
  Antisense strand to SEQ ID NO: 1743529
ugugcucuagcauucacca

SEQ ID NO: 1743531 - RNA, 19 nt, Artificial Sequence
  Description of Artificial Sequence: Synthetic oligonucleotide
  Sense strand starting at position 669 of SEQ ID NO: 1562395
cauuuauguugaucguuua

SEQ ID NO: 1743532 - RNA, 19 nt, Artificial Sequence
  Description of Artificial Sequence: Synthetic oligonucleotide
  Antisense strand to SEQ ID NO: 1743531
uaaacgaucaacauaaaug

SEQ ID NO: 1743533 - RNA, 19 nt, Artificial Sequence
  Description of Artificial Sequence: Synthetic oligonucleotide
  Sense strand starting at position 832 of SEQ ID NO: 1562395
ucucaagugacauggguaa

SEQ ID NO: 1743534 - RNA, 19 nt, Artificial Sequence
  Description of Artificial Sequence: Synthetic oligonucleotide
  Antisense strand to SEQ ID NO: 1743533
uuacccaugucacuugaga

SEQ ID NO: 1743535 - RNA, 19 nt, Artificial Sequence
  Description of Artificial Sequence: Synthetic oligonucleotide
  Sense strand starting at position 834 of SEQ ID NO: 1562395
ucaagugacauggguaauu

SEQ ID NO: 1743536 - RNA, 19 nt, Artificial Sequence
  Description of Artificial Sequence: Synthetic oligonucleotide
  Antisense strand to SEQ ID NO: 1743535
aauuacccaugucacuuga

SEQ ID NO: 1743537 - RNA, 19 nt, Artificial Sequence
  Description of Artificial Sequence: Synthetic oligonucleotide
  Sense strand starting at position 846 of SEQ ID NO: 1562395
gguaauugaauaggguaau

SEQ ID NO: 1743538 - RNA, 19 nt, Artificial Sequence
  Description of Artificial Sequence: Synthetic oligonucleotide
  Antisense strand to SEQ ID NO: 1743537
auuacccuauucaauuacc

SEQ ID NO: 1743539 - RNA, 19 nt, Artificial Sequence
  Description of Artificial Sequence: Synthetic oligonucleotide
  Sense strand starting at position 863 of SEQ ID NO: 1562395
auugauaggucauugacag

SEQ ID NO: 1743540 - RNA, 19 nt, Artificial Sequence
  Description of Artificial Sequence: Synthetic oligonucleotide
  Antisense strand to SEQ ID NO: 1743539
cugucaaugaccuaucaau

SEQ ID NO: 1743541 - RNA, 19 nt, Artificial Sequence
  Description of Artificial Sequence: Synthetic oligonucleotide
  Sense strand starting at position 1101 of SEQ ID NO: 1562395
aaacauugccaguaagagu

SEQ ID NO: 1743542 - RNA, 19 nt, Artificial Sequence
  Description of Artificial Sequence: Synthetic oligonucleotide
  Antisense strand to SEQ ID NO: 1743541
acucuuacuggcaauguuu

SEQ ID NO: 1743543 - RNA, 19 nt, Artificial Sequence
  Description of Artificial Sequence: Synthetic oligonucleotide
  Sense strand starting at position 1153 of SEQ ID NO: 1562395
gguauaaugugaccaacua

SEQ ID NO: 1743544 - RNA, 19 nt, Artificial Sequence
  Description of Artificial Sequence: Synthetic oligonucleotide
  Antisense strand to SEQ ID NO: 1743543
uaguuggucacauuauacc

SEQ ID NO: 1743545 - RNA, 19 nt, Artificial Sequence
  Description of Artificial Sequence: Synthetic oligonucleotide
  Sense strand starting at position 1286 of SEQ ID NO: 1562395
aaagaaaccucaguaugug

SEQ ID NO: 1743546 - RNA, 19 nt, Artificial Sequence
  Description of Artificial Sequence: Synthetic oligonucleotide
  Antisense strand to SEQ ID NO: 1743545
cacauacugagguuucuuu

SEQ ID NO: 1743547 - RNA, 19 nt, Artificial Sequence
  Description of Artificial Sequence: Synthetic oligonucleotide
  Sense strand starting at position 1287 of SEQ ID NO: 1562395
aagaaaccucaguaugugu

SEQ ID NO: 1743548 - RNA, 19 nt, Artificial Sequence
  Description of Artificial Sequence: Synthetic oligonucleotide
  Antisense strand to SEQ ID NO: 1743547
acacauacugagguuucuu

SEQ ID NO: 1743549 - RNA, 19 nt, Artificial Sequence
  Description of Artificial Sequence: Synthetic oligonucleotide
  Sense strand starting at position 1514 of SEQ ID NO: 1562395
ucuguuuaugcagauaaau

SEQ ID NO: 1743550 - RNA, 19 nt, Artificial Sequence
  Description of Artificial Sequence: Synthetic oligonucleotide
  Antisense strand to SEQ ID NO: 1743549
auuuaucugcauaaacaga

SEQ ID NO: 1743551 - RNA, 19 nt, Artificial Sequence
  Description of Artificial Sequence: Synthetic oligonucleotide
  Sense strand starting at position 1548 of SEQ ID NO: 1562395
uagaguguaggguauaagu

SEQ ID NO: 1743552 - RNA, 19 nt, Artificial Sequence
  Description of Artificial Sequence: Synthetic oligonucleotide
  Antisense strand to SEQ ID NO: 1743551
acuuauacccuacacucua

SEQ ID NO: 1743553 - RNA, 19 nt, Artificial Sequence
  Description of Artificial Sequence: Synthetic oligonucleotide
  Sense strand starting at position 1550 of SEQ ID NO: 1562395
gaguguaggguauaaguau

SEQ ID NO: 1743554 - RNA, 19 nt, Artificial Sequence
  Description of Artificial Sequence: Synthetic oligonucleotide
  Antisense strand to SEQ ID NO: 1743553
auacuuauacccuacacuc

SEQ ID NO: 1743555 - RNA, 19 nt, Artificial Sequence
  Description of Artificial Sequence: Synthetic oligonucleotide
  Sense strand starting at position 1572 of SEQ ID NO: 1562395
ucaguugauuuccugccaa

SEQ ID NO: 1743556 - RNA, 19 nt, Artificial Sequence
  Description of Artificial Sequence: Synthetic oligonucleotide
  Antisense strand to SEQ ID NO: 1743555
uuggcaggaaaucaacuga

SEQ ID NO: 1743557 - RNA, 19 nt, Artificial Sequence
  Description of Artificial Sequence: Synthetic oligonucleotide
  Sense strand starting at position 1582 of SEQ ID NO: 1562395
uccugccaagguuaauaua

SEQ ID NO: 1743558 - RNA, 19 nt, Artificial Sequence
  Description of Artificial Sequence: Synthetic oligonucleotide
  Antisense strand to SEQ ID NO: 1743557
uauauuaaccuuggcagga

SEQ ID NO: 1743559 - RNA, 19 nt, Artificial Sequence
  Description of Artificial Sequence: Synthetic oligonucleotide
  Sense strand starting at position 1619 of SEQ ID NO: 1562395
uagaguagggcucaaucau

SEQ ID NO: 1743560 - RNA, 19 nt, Artificial Sequence
  Description of Artificial Sequence: Synthetic oligonucleotide
  Antisense strand to SEQ ID NO: 1743559
augauugagcccuacucua

SEQ ID NO: 1743561 - RNA, 19 nt, Artificial Sequence
  Description of Artificial Sequence: Synthetic oligonucleotide
  Sense strand starting at position 1638 of SEQ ID NO: 1562395
uguuaagcgcugguaguuu

SEQ ID NO: 1743562 - RNA, 19 nt, Artificial Sequence
  Description of Artificial Sequence: Synthetic oligonucleotide
  Antisense strand to SEQ ID NO: 1743561
aaacuaccagcgcuuaaca

SEQ ID NO: 1743563 - RNA, 19 nt, Artificial Sequence
  Description of Artificial Sequence: Synthetic oligonucleotide
  Sense strand starting at position 1728 of SEQ ID NO: 1562395
aaagucaugccugagguua

SEQ ID NO: 1743564 - RNA, 19 nt, Artificial Sequence
  Description of Artificial Sequence: Synthetic oligonucleotide
  Antisense strand to SEQ ID NO: 1743563
uaaccucaggcaugacuuu

SEQ ID NO: 1743565 - RNA, 19 nt, Artificial Sequence
  Description of Artificial Sequence: Synthetic oligonucleotide
  Sense strand starting at position 1745 of SEQ ID NO: 1562395
uaaggugaaucacuuugau

SEQ ID NO: 1743566 - RNA, 19 nt, Artificial Sequence
  Description of Artificial Sequence: Synthetic oligonucleotide
  Antisense strand to SEQ ID NO: 1743565
aucaaagugauucaccuua

SEQ ID NO: 1743567 - RNA, 19 nt, Artificial Sequence
  Description of Artificial Sequence: Synthetic oligonucleotide
  Sense strand starting at position 1759 of SEQ ID NO: 1562395
uugauuggaucuuccagaa

SEQ ID NO: 1743568 - RNA, 19 nt, Artificial Sequence
  Description of Artificial Sequence: Synthetic oligonucleotide
  Antisense strand to SEQ ID NO: 1743567
uucuggaagauccaaucaa

SEQ ID NO: 1743569 - RNA, 19 nt, Artificial Sequence
  Description of Artificial Sequence: Synthetic oligonucleotide
  Sense strand starting at position 1817 of SEQ ID NO: 1562395
uugcacuacccugauugau

SEQ ID NO: 1743570 - RNA, 19 nt, Artificial Sequence
  Description of Artificial Sequence: Synthetic oligonucleotide
  Antisense strand to SEQ ID NO: 1743569
aucaaucaggguagugcaa

SEQ ID NO: 1743571 - RNA, 19 nt, Artificial Sequence
  Description of Artificial Sequence: Synthetic oligonucleotide
  Sense strand starting at position 1826 of SEQ ID NO: 1562395
ccugauugaucagcuacaa

SEQ ID NO: 1743572 - RNA, 19 nt, Artificial Sequence
  Description of Artificial Sequence: Synthetic oligonucleotide
  Antisense strand to SEQ ID NO: 1743571
uuguagcugaucaaucagg

SEQ ID NO: 1743573 - RNA, 19 nt, Artificial Sequence
  Description of Artificial Sequence: Synthetic oligonucleotide
  Sense strand starting at position 2312 of SEQ ID NO: 1562395
ggugguagaagucaccaga

SEQ ID NO: 1743574 - RNA, 19 nt, Artificial Sequence
  Description of Artificial Sequence: Synthetic oligonucleotide
  Antisense strand to SEQ ID NO: 1743573
ucuggugacuucuaccacc

SEQ ID NO: 1743575 - RNA, 19 nt, Artificial Sequence
  Description of Artificial Sequence: Synthetic oligonucleotide
  Sense strand starting at position 2341 of SEQ ID NO: 1562395
cuugaauucucucuaaagg

SEQ ID NO: 1743576 - RNA, 19 nt, Artificial Sequence
  Description of Artificial Sequence: Synthetic oligonucleotide
  Antisense strand to SEQ ID NO: 1743575
ccuuuagagagaauucaag

SEQ ID NO: 1743577 - RNA, 19 nt, Artificial Sequence
  Description of Artificial Sequence: Synthetic oligonucleotide
  Sense strand starting at position 2359 of SEQ ID NO: 1562395
ggcucuggauccuuggaaa

SEQ ID NO: 1743578 - RNA, 19 nt, Artificial Sequence
  Description of Artificial Sequence: Synthetic oligonucleotide
  Antisense strand to SEQ ID NO: 1743577
uuuccaaggauccagagcc

SEQ ID NO: 1743579 - RNA, 19 nt, Artificial Sequence
  Description of Artificial Sequence: Synthetic oligonucleotide
  Sense strand starting at position 2377 of SEQ ID NO: 1562395
aaaugaucuggucaagccu

SEQ ID NO: 1743580 - RNA, 19 nt, Artificial Sequence
  Description of Artificial Sequence: Synthetic oligonucleotide
  Antisense strand to SEQ ID NO: 1743579
aggcuugaccagaucauuu

SEQ ID NO: 1743581 - RNA, 19 nt, Artificial Sequence
  Description of Artificial Sequence: Synthetic oligonucleotide
  Sense strand starting at position 2581 of SEQ ID NO: 1562395
agacaagcaccaugugaau

SEQ ID NO: 1743582 - RNA, 19 nt, Artificial Sequence
  Description of Artificial Sequence: Synthetic oligonucleotide
  Antisense strand to SEQ ID NO: 1743581
auucacauggugcuugucu

SEQ ID NO: 1743583 - RNA, 19 nt, Artificial Sequence
  Description of Artificial Sequence: Synthetic oligonucleotide
  Sense strand starting at position 2595 of SEQ ID NO: 1562395
ugaauuucuaugggcguuu

SEQ ID NO: 1743584 - RNA, 19 nt, Artificial Sequence
  Description of Artificial Sequence: Synthetic oligonucleotide
  Antisense strand to SEQ ID NO: 1743583
aaacgcccauagaaauuca

SEQ ID NO: 1743585 - RNA, 19 nt, Artificial Sequence
  Description of Artificial Sequence: Synthetic oligonucleotide
  Sense strand starting at position 2659 of SEQ ID NO: 1562395
gggcaugaucugcauggaa

SEQ ID NO: 1743586 - RNA, 19 nt, Artificial Sequence
  Description of Artificial Sequence: Synthetic oligonucleotide
  Antisense strand to SEQ ID NO: 1743585
uuccaugcagaucaugccc

SEQ ID NO: 1743587 - RNA, 19 nt, Artificial Sequence
  Description of Artificial Sequence: Synthetic oligonucleotide
  Sense strand starting at position 2815 of SEQ ID NO: 1562395
ccacauuagcaaugagaga

SEQ ID NO: 1743588 - RNA, 19 nt, Artificial Sequence
  Description of Artificial Sequence: Synthetic oligonucleotide
  Antisense strand to SEQ ID NO: 1743587
ucucucauugcuaaugugg

SEQ ID NO: 1743589 - RNA, 19 nt, Artificial Sequence
  Description of Artificial Sequence: Synthetic oligonucleotide
  Sense strand starting at position 3053 of SEQ ID NO: 1562395
agaguucuaggccacauua

SEQ ID NO: 1743590 - RNA, 19 nt, Artificial Sequence
  Description of Artificial Sequence: Synthetic oligonucleotide
  Antisense strand to SEQ ID NO: 1743589
uaauguggccuagaacucu

SEQ ID NO: 1743591 - RNA, 19 nt, Artificial Sequence
  Description of Artificial Sequence: Synthetic oligonucleotide
  Sense strand starting at position 3166 of SEQ ID NO: 1562395
agacuagcuucucugaaac

SEQ ID NO: 1743592 - RNA, 19 nt, Artificial Sequence
  Description of Artificial Sequence: Synthetic oligonucleotide
  Antisense strand to SEQ ID NO: 1743591
guuucagagaagcuagucu

SEQ ID NO: 1743593 - RNA, 19 nt, Artificial Sequence
  Description of Artificial Sequence: Synthetic oligonucleotide
  Sense strand starting at position 3199 of SEQ ID NO: 1562395
gcuuucuaugaagggaaau

SEQ ID NO: 1743594 - RNA, 19 nt, Artificial Sequence
  Description of Artificial Sequence: Synthetic oligonucleotide
  Antisense strand to SEQ ID NO: 1743593
auuucccuucauagaaagc

SEQ ID NO: 1743595 - RNA, 19 nt, Artificial Sequence
  Description of Artificial Sequence: Synthetic oligonucleotide
  Sense strand starting at position 3516 of SEQ ID NO: 1562395
ggaauucuacauugaccca

SEQ ID NO: 1743596 - RNA, 19 nt, Artificial Sequence
  Description of Artificial Sequence: Synthetic oligonucleotide
  Antisense strand to SEQ ID NO: 1743595
ugggucaauguagaauucc

SEQ ID NO: 1743597 - RNA, 19 nt, Artificial Sequence
  Description of Artificial Sequence: Synthetic oligonucleotide
  Sense strand starting at position 3523 of SEQ ID NO: 1562395
uacauugacccagguagaa

SEQ ID NO: 1743598 - RNA, 19 nt, Artificial Sequence
  Description of Artificial Sequence: Synthetic oligonucleotide
  Antisense strand to SEQ ID NO: 1743597
uucuaccugggucaaugua

SEQ ID NO: 1743599 - RNA, 19 nt, Artificial Sequence
  Description of Artificial Sequence: Synthetic oligonucleotide
  Sense strand starting at position 3762 of SEQ ID NO: 1562395
uggugauagggaggcaaua

SEQ ID NO: 1743600 - RNA, 19 nt, Artificial Sequence
  Description of Artificial Sequence: Synthetic oligonucleotide
  Antisense strand to SEQ ID NO: 1743599
uauugccucccuaucacca

SEQ ID NO: 1743601 - RNA, 19 nt, Artificial Sequence
  Description of Artificial Sequence: Synthetic oligonucleotide
  Sense strand starting at position 3851 of SEQ ID NO: 1562395
gaccuucuaggaggaguua

SEQ ID NO: 1743602 - RNA, 19 nt, Artificial Sequence
  Description of Artificial Sequence: Synthetic oligonucleotide
  Antisense strand to SEQ ID NO: 1743601
uaacuccuccuagaagguc

SEQ ID NO: 1743603 - RNA, 19 nt, Artificial Sequence
  Description of Artificial Sequence: Synthetic oligonucleotide
  Sense strand starting at position 359 of SEQ ID NO: 1562396
uguggcauugcucccugua

SEQ ID NO: 1743604 - RNA, 19 nt, Artificial Sequence
  Description of Artificial Sequence: Synthetic oligonucleotide
  Antisense strand to SEQ ID NO: 1743603
uacagggagcaaugccaca

SEQ ID NO: 1743605 - RNA, 19 nt, Artificial Sequence
  Description of Artificial Sequence: Synthetic oligonucleotide
  Sense strand starting at position 395 of SEQ ID NO: 1562396
accgacagacuuuggauaa

SEQ ID NO: 1743606 - RNA, 19 nt, Artificial Sequence
  Description of Artificial Sequence: Synthetic oligonucleotide
  Antisense strand to SEQ ID NO: 1743605
uuauccaaagucugucggu

SEQ ID NO: 1743607 - RNA, 19 nt, Artificial Sequence
  Description of Artificial Sequence: Synthetic oligonucleotide
  Sense strand starting at position 846 of SEQ ID NO: 1562396
aguuuacuccuaggaagau

SEQ ID NO: 1743608 - RNA, 19 nt, Artificial Sequence
  Description of Artificial Sequence: Synthetic oligonucleotide
  Antisense strand to SEQ ID NO: 1743607
aucuuccuaggaguaaacu

SEQ ID NO: 1743609 - RNA, 19 nt, Artificial Sequence
  Description of Artificial Sequence: Synthetic oligonucleotide
  Sense strand starting at position 855 of SEQ ID NO: 1562396
cuaggaagaucuuccuauu

SEQ ID NO: 1743610 - RNA, 19 nt, Artificial Sequence
  Description of Artificial Sequence: Synthetic oligonucleotide
  Antisense strand to SEQ ID NO: 1743609
aauaggaagaucuuccuag

SEQ ID NO: 1743611 - RNA, 19 nt, Artificial Sequence
  Description of Artificial Sequence: Synthetic oligonucleotide
  Sense strand starting at position 921 of SEQ ID NO: 1562396
acaguuaggaguuacagua

SEQ ID NO: 1743612 - RNA, 19 nt, Artificial Sequence
  Description of Artificial Sequence: Synthetic oligonucleotide
  Antisense strand to SEQ ID NO: 1743611
uacuguaacuccuaacugu

SEQ ID NO: 1743613 - RNA, 19 nt, Artificial Sequence
  Description of Artificial Sequence: Synthetic oligonucleotide
  Sense strand starting at position 1101 of SEQ ID NO: 1562396
ucaguuaaucagugcauuu

SEQ ID NO: 1743614 - RNA, 19 nt, Artificial Sequence
  Description of Artificial Sequence: Synthetic oligonucleotide
  Antisense strand to SEQ ID NO: 1743613
aaaugcacugauuaacuga

SEQ ID NO: 1743615 - RNA, 19 nt, Artificial Sequence
  Description of Artificial Sequence: Synthetic oligonucleotide
  Sense strand starting at position 1114 of SEQ ID NO: 1562396
gcauuuaagucuuugccag

SEQ ID NO: 1743616 - RNA, 19 nt, Artificial Sequence
  Description of Artificial Sequence: Synthetic oligonucleotide
  Antisense strand to SEQ ID NO: 1743615
cuggcaaagacuuaaaugc

SEQ ID NO: 1743617 - RNA, 19 nt, Artificial Sequence
  Description of Artificial Sequence: Synthetic oligonucleotide
  Sense strand starting at position 1131 of SEQ ID NO: 1562396
agcggauguugaaaugaug

SEQ ID NO: 1743618 - RNA, 19 nt, Artificial Sequence
  Description of Artificial Sequence: Synthetic oligonucleotide
  Antisense strand to SEQ ID NO: 1743617
caucauuucaacauccgcu

SEQ ID NO: 1743619 - RNA, 19 nt, Artificial Sequence
  Description of Artificial Sequence: Synthetic oligonucleotide
  Sense strand starting at position 1139 of SEQ ID NO: 1562396
uugaaaugaugucugcaau

SEQ ID NO: 1743620 - RNA, 19 nt, Artificial Sequence
  Description of Artificial Sequence: Synthetic oligonucleotide
  Antisense strand to SEQ ID NO: 1743619
auugcagacaucauuucaa

SEQ ID NO: 1743621 - RNA, 19 nt, Artificial Sequence
  Description of Artificial Sequence: Synthetic oligonucleotide
  Sense strand starting at position 1140 of SEQ ID NO: 1562396
ugaaaugaugucugcaaua

SEQ ID NO: 1743622 - RNA, 19 nt, Artificial Sequence
  Description of Artificial Sequence: Synthetic oligonucleotide
  Antisense strand to SEQ ID NO: 1743621
uauugcagacaucauuuca

SEQ ID NO: 1743623 - RNA, 19 nt, Artificial Sequence
  Description of Artificial Sequence: Synthetic oligonucleotide
  Sense strand starting at position 1145 of SEQ ID NO: 1562396
ugaugucugcaauaacuga

SEQ ID NO: 1743624 - RNA, 19 nt, Artificial Sequence
  Description of Artificial Sequence: Synthetic oligonucleotide
  Antisense strand to SEQ ID NO: 1743623
ucaguuauugcagacauca

SEQ ID NO: 1743625 - RNA, 19 nt, Artificial Sequence
  Description of Artificial Sequence: Synthetic oligonucleotide
  Sense strand starting at position 1304 of SEQ ID NO: 1562396
ggcacaauguuucucauga

SEQ ID NO: 1743626 - RNA, 19 nt, Artificial Sequence
  Description of Artificial Sequence: Synthetic oligonucleotide
  Antisense strand to SEQ ID NO: 1743625
ucaugagaaacauugugcc

SEQ ID NO: 1743627 - RNA, 19 nt, Artificial Sequence
  Description of Artificial Sequence: Synthetic oligonucleotide
  Sense strand starting at position 1305 of SEQ ID NO: 1562396
gcacaauguuucucaugag

SEQ ID NO: 1743628 - RNA, 19 nt, Artificial Sequence
  Description of Artificial Sequence: Synthetic oligonucleotide
  Antisense strand to SEQ ID NO: 1743627
cucaugagaaacauugugc

SEQ ID NO: 1743629 - RNA, 19 nt, Artificial Sequence
  Description of Artificial Sequence: Synthetic oligonucleotide
  Sense strand starting at position 1309 of SEQ ID NO: 1562396
aauguuucucaugagagug

SEQ ID NO: 1743630 - RNA, 19 nt, Artificial Sequence
  Description of Artificial Sequence: Synthetic oligonucleotide
  Antisense strand to SEQ ID NO: 1743629
cacucucaugagaaacauu

SEQ ID NO: 1743631 - RNA, 19 nt, Artificial Sequence
  Description of Artificial Sequence: Synthetic oligonucleotide
  Sense strand starting at position 1314 of SEQ ID NO: 1562396
uucucaugagaguggagau

SEQ ID NO: 1743632 - RNA, 19 nt, Artificial Sequence
  Description of Artificial Sequence: Synthetic oligonucleotide
  Antisense strand to SEQ ID NO: 1743631
aucuccacucucaugagaa

SEQ ID NO: 1743633 - RNA, 19 nt, Artificial Sequence
  Description of Artificial Sequence: Synthetic oligonucleotide
  Sense strand starting at position 1922 of SEQ ID NO: 1562396
ucaugaaauccgcagauuc

SEQ ID NO: 1743634 - RNA, 19 nt, Artificial Sequence
  Description of Artificial Sequence: Synthetic oligonucleotide
  Antisense strand to SEQ ID NO: 1743633
gaaucugcggauuucauga

SEQ ID NO: 1743635 - RNA, 19 nt, Artificial Sequence
  Description of Artificial Sequence: Synthetic oligonucleotide
  Sense strand starting at position 2305 of SEQ ID NO: 1562396
uaaguuauucccggagaaa

SEQ ID NO: 1743636 - RNA, 19 nt, Artificial Sequence
  Description of Artificial Sequence: Synthetic oligonucleotide
  Antisense strand to SEQ ID NO: 1743635
uuucuccgggaauaacuua

SEQ ID NO: 1743637 - RNA, 19 nt, Artificial Sequence
  Description of Artificial Sequence: Synthetic oligonucleotide
  Sense strand starting at position 2445 of SEQ ID NO: 1562396
ggcugaaauccgugagagg

SEQ ID NO: 1743638 - RNA, 19 nt, Artificial Sequence
  Description of Artificial Sequence: Synthetic oligonucleotide
  Antisense strand to SEQ ID NO: 1743637
ccucucacggauuucagcc

SEQ ID NO: 1743639 - RNA, 19 nt, Artificial Sequence
  Description of Artificial Sequence: Synthetic oligonucleotide
  Sense strand starting at position 2729 of SEQ ID NO: 1562396
aguugaauuugucaggaua

SEQ ID NO: 1743640 - RNA, 19 nt, Artificial Sequence
  Description of Artificial Sequence: Synthetic oligonucleotide
  Antisense strand to SEQ ID NO: 1743639
uauccugacaaauucaacu

SEQ ID NO: 1743641 - RNA, 19 nt, Artificial Sequence
  Description of Artificial Sequence: Synthetic oligonucleotide
  Sense strand starting at position 2974 of SEQ ID NO: 1562396
aagaguagcgaauaccauu

SEQ ID NO: 1743642 - RNA, 19 nt, Artificial Sequence
  Description of Artificial Sequence: Synthetic oligonucleotide
  Antisense strand to SEQ ID NO: 1743641
aaugguauucgcuacucuu

SEQ ID NO: 1743643 - RNA, 19 nt, Artificial Sequence
  Description of Artificial Sequence: Synthetic oligonucleotide
  Sense strand starting at position 2983 of SEQ ID NO: 1562396
gaauaccauuggcuaguaa

SEQ ID NO: 1743644 - RNA, 19 nt, Artificial Sequence
  Description of Artificial Sequence: Synthetic oligonucleotide
  Antisense strand to SEQ ID NO: 1743643
uuacuagccaaugguauuc

SEQ ID NO: 1743645 - RNA, 19 nt, Artificial Sequence
  Description of Artificial Sequence: Synthetic oligonucleotide
  Sense strand starting at position 3226 of SEQ ID NO: 1562396
cuguaauauggagaggugu

SEQ ID NO: 1743646 - RNA, 19 nt, Artificial Sequence
  Description of Artificial Sequence: Synthetic oligonucleotide
  Antisense strand to SEQ ID NO: 1743645
acaccucuccauauuacag

SEQ ID NO: 1743647 - RNA, 19 nt, Artificial Sequence
  Description of Artificial Sequence: Synthetic oligonucleotide
  Sense strand starting at position 3228 of SEQ ID NO: 1562396
guaauauggagagguguuu

SEQ ID NO: 1743648 - RNA, 19 nt, Artificial Sequence
  Description of Artificial Sequence: Synthetic oligonucleotide
  Antisense strand to SEQ ID NO: 1743647
aaacaccucuccauauuac

SEQ ID NO: 1743649 - RNA, 19 nt, Artificial Sequence
  Description of Artificial Sequence: Synthetic oligonucleotide
  Sense strand starting at position 3291 of SEQ ID NO: 1562396
cggccugugagcuuguauu

SEQ ID NO: 1743650 - RNA, 19 nt, Artificial Sequence
  Description of Artificial Sequence: Synthetic oligonucleotide
  Antisense strand to SEQ ID NO: 1743649
aauacaagcucacaggccg

SEQ ID NO: 1743651 - RNA, 19 nt, Artificial Sequence
  Description of Artificial Sequence: Synthetic oligonucleotide
  Sense strand starting at position 3322 of SEQ ID NO: 1562396
ucccuaagagguuguaauc

SEQ ID NO: 1743652 - RNA, 19 nt, Artificial Sequence
  Description of Artificial Sequence: Synthetic oligonucleotide
  Antisense strand to SEQ ID NO: 1743651
gauuacaaccucuuaggga

SEQ ID NO: 1743653 - RNA, 19 nt, Artificial Sequence
  Description of Artificial Sequence: Synthetic oligonucleotide
  Sense strand starting at position 3329 of SEQ ID NO: 1562396
gagguuguaaucugacuug

SEQ ID NO: 1743654 - RNA, 19 nt, Artificial Sequence
  Description of Artificial Sequence: Synthetic oligonucleotide
  Antisense strand to SEQ ID NO: 1743653
caagucagauuacaaccuc

SEQ ID NO: 1743655 - RNA, 19 nt, Artificial Sequence
  Description of Artificial Sequence: Synthetic oligonucleotide
  Sense strand starting at position 3358 of SEQ ID NO: 1562396
ugagucauauaucccauau

SEQ ID NO: 1743656 - RNA, 19 nt, Artificial Sequence
  Description of Artificial Sequence: Synthetic oligonucleotide
  Antisense strand to SEQ ID NO: 1743655
auaugggauauaugacuca

SEQ ID NO: 1743657 - RNA, 19 nt, Artificial Sequence
  Description of Artificial Sequence: Synthetic oligonucleotide
  Sense strand starting at position 3379 of SEQ ID NO: 1562396
agaagauaugaguaugugu

SEQ ID NO: 1743658 - RNA, 19 nt, Artificial Sequence
  Description of Artificial Sequence: Synthetic oligonucleotide
  Antisense strand to SEQ ID NO: 1743657
acacauacucauaucuucu

SEQ ID NO: 1743659 - RNA, 19 nt, Artificial Sequence
  Description of Artificial Sequence: Synthetic oligonucleotide
  Sense strand starting at position 3381 of SEQ ID NO: 1562396
aagauaugaguauguguaa

SEQ ID NO: 1743660 - RNA, 19 nt, Artificial Sequence
  Description of Artificial Sequence: Synthetic oligonucleotide
  Antisense strand to SEQ ID NO: 1743659
uuacacauacucauaucuu

SEQ ID NO: 1743661 - RNA, 19 nt, Artificial Sequence
  Description of Artificial Sequence: Synthetic oligonucleotide
  Sense strand starting at position 3382 of SEQ ID NO: 1562396
agauaugaguauguguaau

SEQ ID NO: 1743662 - RNA, 19 nt, Artificial Sequence
  Description of Artificial Sequence: Synthetic oligonucleotide
  Antisense strand to SEQ ID NO: 1743661
auuacacauacucauaucu

SEQ ID NO: 1743663 - RNA, 19 nt, Artificial Sequence
  Description of Artificial Sequence: Synthetic oligonucleotide
  Sense strand starting at position 3394 of SEQ ID NO: 1562396
guguaauaucuguaguaug

SEQ ID NO: 1743664 - RNA, 19 nt, Artificial Sequence
  Description of Artificial Sequence: Synthetic oligonucleotide
  Antisense strand to SEQ ID NO: 1743663
cauacuacagauauuacac

SEQ ID NO: 1743665 - RNA, 19 nt, Artificial Sequence
  Description of Artificial Sequence: Synthetic oligonucleotide
  Sense strand starting at position 3437 of SEQ ID NO: 1562396
gcuggaucuagugauagug

SEQ ID NO: 1743666 - RNA, 19 nt, Artificial Sequence
  Description of Artificial Sequence: Synthetic oligonucleotide
  Antisense strand to SEQ ID NO: 1743665
cacuaucacuagauccagc

SEQ ID NO: 1743667 - RNA, 19 nt, Artificial Sequence
  Description of Artificial Sequence: Synthetic oligonucleotide
  Sense strand starting at position 3564 of SEQ ID NO: 1562396
acccauguugacuauaguu

SEQ ID NO: 1743668 - RNA, 19 nt, Artificial Sequence
  Description of Artificial Sequence: Synthetic oligonucleotide
  Antisense strand to SEQ ID NO: 1743667
aacuauagucaacaugggu

SEQ ID NO: 1743669 - RNA, 19 nt, Artificial Sequence
  Description of Artificial Sequence: Synthetic oligonucleotide
  Sense strand starting at position 3590 of SEQ ID NO: 1562396
gggcauucuguuuaaucug

SEQ ID NO: 1743670 - RNA, 19 nt, Artificial Sequence
  Description of Artificial Sequence: Synthetic oligonucleotide
  Antisense strand to SEQ ID NO: 1743669
cagauuaaacagaaugccc

SEQ ID NO: 1743671 - RNA, 19 nt, Artificial Sequence
  Description of Artificial Sequence: Synthetic oligonucleotide
  Sense strand starting at position 3711 of SEQ ID NO: 1562396
aaagucaagaguuggaagu

SEQ ID NO: 1743672 - RNA, 19 nt, Artificial Sequence
  Description of Artificial Sequence: Synthetic oligonucleotide
  Antisense strand to SEQ ID NO: 1743671
acuuccaacucuugacuuu

SEQ ID NO: 1743673 - RNA, 19 nt, Artificial Sequence
  Description of Artificial Sequence: Synthetic oligonucleotide
  Sense strand starting at position 3712 of SEQ ID NO: 1562396
aagucaagaguuggaagua

SEQ ID NO: 1743674 - RNA, 19 nt, Artificial Sequence
  Description of Artificial Sequence: Synthetic oligonucleotide
  Antisense strand to SEQ ID NO: 1743673
uacuuccaacucuugacuu

SEQ ID NO: 1743675 - RNA, 19 nt, Artificial Sequence
  Description of Artificial Sequence: Synthetic oligonucleotide
  Sense strand starting at position 3888 of SEQ ID NO: 1562396
gagcaauuggcuuaacuga

SEQ ID NO: 1743676 - RNA, 19 nt, Artificial Sequence
  Description of Artificial Sequence: Synthetic oligonucleotide
  Antisense strand to SEQ ID NO: 1743675
ucaguuaagccaauugcuc

SEQ ID NO: 1743677 - RNA, 19 nt, Artificial Sequence
  Description of Artificial Sequence: Synthetic oligonucleotide
  Sense strand starting at position 3932 of SEQ ID NO: 1562396
cugauaaagugaucugcau

SEQ ID NO: 1743678 - RNA, 19 nt, Artificial Sequence
  Description of Artificial Sequence: Synthetic oligonucleotide
  Antisense strand to SEQ ID NO: 1743677
augcagaucacuuuaucag

SEQ ID NO: 1743679 - RNA, 19 nt, Artificial Sequence
  Description of Artificial Sequence: Synthetic oligonucleotide
  Sense strand starting at position 3936 of SEQ ID NO: 1562396
uaaagugaucugcaugggu

SEQ ID NO: 1743680 - RNA, 19 nt, Artificial Sequence
  Description of Artificial Sequence: Synthetic oligonucleotide
  Antisense strand to SEQ ID NO: 1743679
acccaugcagaucacuuua

SEQ ID NO: 1743681 - RNA, 19 nt, Artificial Sequence
  Description of Artificial Sequence: Synthetic oligonucleotide
  Sense strand starting at position 3944 of SEQ ID NO: 1562396
ucugcauggguguaacuaa

SEQ ID NO: 1743682 - RNA, 19 nt, Artificial Sequence
  Description of Artificial Sequence: Synthetic oligonucleotide
  Antisense strand to SEQ ID NO: 1743681
uuaguuacacccaugcaga

SEQ ID NO: 1743683 - RNA, 19 nt, Artificial Sequence
  Description of Artificial Sequence: Synthetic oligonucleotide
  Sense strand starting at position 124 of SEQ ID NO: 1562397
gaccaagccuuagagagau

SEQ ID NO: 1743684 - RNA, 19 nt, Artificial Sequence
  Description of Artificial Sequence: Synthetic oligonucleotide
  Antisense strand to SEQ ID NO: 1743683
aucucucuaaggcuugguc

SEQ ID NO: 1743685 - RNA, 19 nt, Artificial Sequence
  Description of Artificial Sequence: Synthetic oligonucleotide
  Sense strand starting at position 130 of SEQ ID NO: 1562397
gccuuagagagaugagagu

SEQ ID NO: 1743686 - RNA, 19 nt, Artificial Sequence
  Description of Artificial Sequence: Synthetic oligonucleotide
  Antisense strand to SEQ ID NO: 1743685
acucucaucucucuaaggc

SEQ ID NO: 1743687 - RNA, 19 nt, Artificial Sequence
  Description of Artificial Sequence: Synthetic oligonucleotide
  Sense strand starting at position 170 of SEQ ID NO: 1562397
ccggcaucaucugugggaa

SEQ ID NO: 1743688 - RNA, 19 nt, Artificial Sequence
  Description of Artificial Sequence: Synthetic oligonucleotide
  Antisense strand to SEQ ID NO: 1743687
uucccacagaugaugccgg

SEQ ID NO: 1743689 - RNA, 19 nt, Artificial Sequence
  Description of Artificial Sequence: Synthetic oligonucleotide
  Sense strand starting at position 202 of SEQ ID NO: 1562397
ucccuacaccuguguggaa

SEQ ID NO: 1743690 - RNA, 19 nt, Artificial Sequence
  Description of Artificial Sequence: Synthetic oligonucleotide
  Antisense strand to SEQ ID NO: 1743689
uuccacacagguguaggga

SEQ ID NO: 1743691 - RNA, 19 nt, Artificial Sequence
  Description of Artificial Sequence: Synthetic oligonucleotide
  Sense strand starting at position 490 of SEQ ID NO: 1562397
ugggcucucccaggugaga

SEQ ID NO: 1743692 - RNA, 19 nt, Artificial Sequence
  Description of Artificial Sequence: Synthetic oligonucleotide
  Antisense strand to SEQ ID NO: 1743691
ucucaccugggagagccca

SEQ ID NO: 1743693 - RNA, 19 nt, Artificial Sequence
  Description of Artificial Sequence: Synthetic oligonucleotide
  Sense strand starting at position 612 of SEQ ID NO: 1562397
ugagccuuccugggaguga

SEQ ID NO: 1743694 - RNA, 19 nt, Artificial Sequence
  Description of Artificial Sequence: Synthetic oligonucleotide
  Antisense strand to SEQ ID NO: 1743693
ucacucccaggaaggcuca

SEQ ID NO: 1743695 - RNA, 19 nt, Artificial Sequence
  Description of Artificial Sequence: Synthetic oligonucleotide
  Sense strand starting at position 679 of SEQ ID NO: 1562397
cugugacuucuagguuaag

SEQ ID NO: 1743696 - RNA, 19 nt, Artificial Sequence
  Description of Artificial Sequence: Synthetic oligonucleotide
  Antisense strand to SEQ ID NO: 1743695
cuuaaccuagaagucacag

SEQ ID NO: 1743697 - RNA, 19 nt, Artificial Sequence
  Description of Artificial Sequence: Synthetic oligonucleotide
  Sense strand starting at position 680 of SEQ ID NO: 1562397
ugugacuucuagguuaagu

SEQ ID NO: 1743698 - RNA, 19 nt, Artificial Sequence
  Description of Artificial Sequence: Synthetic oligonucleotide
  Antisense strand to SEQ ID NO: 1743697
acuuaaccuagaagucaca

SEQ ID NO: 1743699 - RNA, 19 nt, Artificial Sequence
  Description of Artificial Sequence: Synthetic oligonucleotide
  Sense strand starting at position 731 of SEQ ID NO: 1562397
agaccaaugucagcucaaa

SEQ ID NO: 1743700 - RNA, 19 nt, Artificial Sequence
  Description of Artificial Sequence: Synthetic oligonucleotide
  Antisense strand to SEQ ID NO: 1743699
uuugagcugacauuggucu

SEQ ID NO: 1743701 - RNA, 19 nt, Artificial Sequence
  Description of Artificial Sequence: Synthetic oligonucleotide
  Sense strand starting at position 2139 of SEQ ID NO: 1562397
gugugucaugacuagggau

SEQ ID NO: 1743702 - RNA, 19 nt, Artificial Sequence
  Description of Artificial Sequence: Synthetic oligonucleotide
  Antisense strand to SEQ ID NO: 1743701
aucccuagucaugacacac

SEQ ID NO: 1743703 - RNA, 19 nt, Artificial Sequence
  Description of Artificial Sequence: Synthetic oligonucleotide
  Sense strand starting at position 2141 of SEQ ID NO: 1562397
gugucaugacuagggaugu

SEQ ID NO: 1743704 - RNA, 19 nt, Artificial Sequence
  Description of Artificial Sequence: Synthetic oligonucleotide
  Antisense strand to SEQ ID NO: 1743703
acaucccuagucaugacac

SEQ ID NO: 1743705 - RNA, 19 nt, Artificial Sequence
  Description of Artificial Sequence: Synthetic oligonucleotide
  Sense strand starting at position 2158 of SEQ ID NO: 1562397
guuuguuugccugugaugu

SEQ ID NO: 1743706 - RNA, 19 nt, Artificial Sequence
  Description of Artificial Sequence: Synthetic oligonucleotide
  Antisense strand to SEQ ID NO: 1743705
acaucacaggcaaacaaac

SEQ ID NO: 1743707 - RNA, 19 nt, Artificial Sequence
  Description of Artificial Sequence: Synthetic oligonucleotide
  Sense strand starting at position 2171 of SEQ ID NO: 1562397
ugauguggcccaggucaua

SEQ ID NO: 1743708 - RNA, 19 nt, Artificial Sequence
  Description of Artificial Sequence: Synthetic oligonucleotide
  Antisense strand to SEQ ID NO: 1743707
uaugaccugggccacauca

SEQ ID NO: 1743709 - RNA, 19 nt, Artificial Sequence
  Description of Artificial Sequence: Synthetic oligonucleotide
  Sense strand starting at position 2277 of SEQ ID NO: 1562397
agugcaguccggguuguaa

SEQ ID NO: 1743710 - RNA, 19 nt, Artificial Sequence
  Description of Artificial Sequence: Synthetic oligonucleotide
  Antisense strand to SEQ ID NO: 1743709
uuacaacccggacugcacu

SEQ ID NO: 1743711 - RNA, 19 nt, Artificial Sequence
  Description of Artificial Sequence: Synthetic oligonucleotide
  Sense strand starting at position 2279 of SEQ ID NO: 1562397
ugcaguccggguuguaaga

SEQ ID NO: 1743712 - RNA, 19 nt, Artificial Sequence
  Description of Artificial Sequence: Synthetic oligonucleotide
  Antisense strand to SEQ ID NO: 1743711
ucuuacaacccggacugca

SEQ ID NO: 1743713 - RNA, 19 nt, Artificial Sequence
  Description of Artificial Sequence: Synthetic oligonucleotide
  Sense strand starting at position 2656 of SEQ ID NO: 1562397
ggguuucggacaggaaaga

SEQ ID NO: 1743714 - RNA, 19 nt, Artificial Sequence
  Description of Artificial Sequence: Synthetic oligonucleotide
  Antisense strand to SEQ ID NO: 1743713
ucuuuccuguccgaaaccc

SEQ ID NO: 1743715 - RNA, 19 nt, Artificial Sequence
  Description of Artificial Sequence: Synthetic oligonucleotide
  Sense strand starting at position 2695 of SEQ ID NO: 1562397
ggauuugguucugcucuua

SEQ ID NO: 1743716 - RNA, 19 nt, Artificial Sequence
  Description of Artificial Sequence: Synthetic oligonucleotide
  Antisense strand to SEQ ID NO: 1743715
uaagagcagaaccaaaucc

SEQ ID NO: 1743717 - RNA, 19 nt, Artificial Sequence
  Description of Artificial Sequence: Synthetic oligonucleotide
  Sense strand starting at position 2715 of SEQ ID NO: 1562397
aggccauagcuuuaugaug

SEQ ID NO: 1743718 - RNA, 19 nt, Artificial Sequence
  Description of Artificial Sequence: Synthetic oligonucleotide
  Antisense strand to SEQ ID NO: 1743717
caucauaaagcuauggccu

SEQ ID NO: 1743719 - RNA, 19 nt, Artificial Sequence
  Description of Artificial Sequence: Synthetic oligonucleotide
  Sense strand starting at position 2972 of SEQ ID NO: 1562397
cagggaguguguuugucuu

SEQ ID NO: 1743720 - RNA, 19 nt, Artificial Sequence
  Description of Artificial Sequence: Synthetic oligonucleotide
  Antisense strand to SEQ ID NO: 1743719
aagacaaacacacucccug

SEQ ID NO: 1743721 - RNA, 19 nt, Artificial Sequence
  Description of Artificial Sequence: Synthetic oligonucleotide
  Sense strand starting at position 3078 of SEQ ID NO: 1562397
uggagaaauuauugaagag

SEQ ID NO: 1743722 - RNA, 19 nt, Artificial Sequence
  Description of Artificial Sequence: Synthetic oligonucleotide
  Antisense strand to SEQ ID NO: 1743721
cucuucaauaauuucucca

SEQ ID NO: 1743723 - RNA, 19 nt, Artificial Sequence
  Description of Artificial Sequence: Synthetic oligonucleotide
  Sense strand starting at position 3162 of SEQ ID NO: 1562397
ucaaguucuccuuucgugu

SEQ ID NO: 1743724 - RNA, 19 nt, Artificial Sequence
  Description of Artificial Sequence: Synthetic oligonucleotide
  Antisense strand to SEQ ID NO: 1743723
acacgaaaggagaacuuga

SEQ ID NO: 1743725 - RNA, 19 nt, Artificial Sequence
  Description of Artificial Sequence: Synthetic oligonucleotide
  Sense strand starting at position 3205 of SEQ ID NO: 1562397
uggccaucuagcugagaaa

SEQ ID NO: 1743726 - RNA, 19 nt, Artificial Sequence
  Description of Artificial Sequence: Synthetic oligonucleotide
  Antisense strand to SEQ ID NO: 1743725
uuucucagcuagauggcca

SEQ ID NO: 1743727 - RNA, 19 nt, Artificial Sequence
  Description of Artificial Sequence: Synthetic oligonucleotide
  Sense strand starting at position 3206 of SEQ ID NO: 1562397
ggccaucuagcugagaaau

SEQ ID NO: 1743728 - RNA, 19 nt, Artificial Sequence
  Description of Artificial Sequence: Synthetic oligonucleotide
  Antisense strand to SEQ ID NO: 1743727
auuucucagcuagauggcc

SEQ ID NO: 1743729 - RNA, 19 nt, Artificial Sequence
  Description of Artificial Sequence: Synthetic oligonucleotide
  Sense strand starting at position 3217 of SEQ ID NO: 1562397
ugagaaauauuaggaaauc

SEQ ID NO: 1743730 - RNA, 19 nt, Artificial Sequence
  Description of Artificial Sequence: Synthetic oligonucleotide
  Antisense strand to SEQ ID NO: 1743729
gauuuccuaauauuucuca

SEQ ID NO: 1743731 - RNA, 19 nt, Artificial Sequence
  Description of Artificial Sequence: Synthetic oligonucleotide
  Sense strand starting at position 3227 of SEQ ID NO: 1562397
uaggaaaucugguuuacaa

SEQ ID NO: 1743732 - RNA, 19 nt, Artificial Sequence
  Description of Artificial Sequence: Synthetic oligonucleotide
  Antisense strand to SEQ ID NO: 1743731
uuguaaaccagauuuccua

SEQ ID NO: 1743733 - RNA, 19 nt, Artificial Sequence
  Description of Artificial Sequence: Synthetic oligonucleotide
  Sense strand starting at position 3283 of SEQ ID NO: 1562397
acagcugagacuugaguga

SEQ ID NO: 1743734 - RNA, 19 nt, Artificial Sequence
  Description of Artificial Sequence: Synthetic oligonucleotide
  Antisense strand to SEQ ID NO: 1743733
ucacucaagucucagcugu

SEQ ID NO: 1743735 - RNA, 19 nt, Artificial Sequence
  Description of Artificial Sequence: Synthetic oligonucleotide
  Sense strand starting at position 3287 of SEQ ID NO: 1562397
cugagacuugagugaguga

SEQ ID NO: 1743736 - RNA, 19 nt, Artificial Sequence
  Description of Artificial Sequence: Synthetic oligonucleotide
  Antisense strand to SEQ ID NO: 1743735
ucacucacucaagucucag

SEQ ID NO: 1743737 - RNA, 19 nt, Artificial Sequence
  Description of Artificial Sequence: Synthetic oligonucleotide
  Sense strand starting at position 3290 of SEQ ID NO: 1562397
agacuugagugagugaauc

SEQ ID NO: 1743738 - RNA, 19 nt, Artificial Sequence
  Description of Artificial Sequence: Synthetic oligonucleotide
  Antisense strand to SEQ ID NO: 1743737
gauucacucacucaagucu

SEQ ID NO: 1743739 - RNA, 19 nt, Artificial Sequence
  Description of Artificial Sequence: Synthetic oligonucleotide
  Sense strand starting at position 3298 of SEQ ID NO: 1562397
gugagugaauccgcauuag

SEQ ID NO: 1743740 - RNA, 19 nt, Artificial Sequence
  Description of Artificial Sequence: Synthetic oligonucleotide
  Antisense strand to SEQ ID NO: 1743739
cuaaugcggauucacucac

SEQ ID NO: 1743741 - RNA, 19 nt, Artificial Sequence
  Description of Artificial Sequence: Synthetic oligonucleotide
  Sense strand starting at position 3302 of SEQ ID NO: 1562397
gugaauccgcauuagagag

SEQ ID NO: 1743742 - RNA, 19 nt, Artificial Sequence
  Description of Artificial Sequence: Synthetic oligonucleotide
  Antisense strand to SEQ ID NO: 1743741
cucucuaaugcggauucac

SEQ ID NO: 1743743 - RNA, 19 nt, Artificial Sequence
  Description of Artificial Sequence: Synthetic oligonucleotide
  Sense strand starting at position 3338 of SEQ ID NO: 1562397
guccaauauuccuugugga

SEQ ID NO: 1743744 - RNA, 19 nt, Artificial Sequence
  Description of Artificial Sequence: Synthetic oligonucleotide
  Antisense strand to SEQ ID NO: 1743743
uccacaaggaauauuggac

SEQ ID NO: 1743745 - RNA, 19 nt, Artificial Sequence
  Description of Artificial Sequence: Synthetic oligonucleotide
  Sense strand starting at position 3339 of SEQ ID NO: 1562397
uccaauauuccuuguggau

SEQ ID NO: 1743746 - RNA, 19 nt, Artificial Sequence
  Description of Artificial Sequence: Synthetic oligonucleotide
  Antisense strand to SEQ ID NO: 1743745
auccacaaggaauauugga

SEQ ID NO: 1743747 - RNA, 19 nt, Artificial Sequence
  Description of Artificial Sequence: Synthetic oligonucleotide
  Sense strand starting at position 3409 of SEQ ID NO: 1562397
gccugaucagcugagcaga

SEQ ID NO: 1743748 - RNA, 19 nt, Artificial Sequence
  Description of Artificial Sequence: Synthetic oligonucleotide
  Antisense strand to SEQ ID NO: 1743747
ucugcucagcugaucaggc

SEQ ID NO: 1743749 - RNA, 19 nt, Artificial Sequence
  Description of Artificial Sequence: Synthetic oligonucleotide
  Sense strand starting at position 3514 of SEQ ID NO: 1562397
aggcuuucaguuggaaaug

SEQ ID NO: 1743750 - RNA, 19 nt, Artificial Sequence
  Description of Artificial Sequence: Synthetic oligonucleotide
  Antisense strand to SEQ ID NO: 1743749
cauuuccaacugaaagccu

SEQ ID NO: 1743751 - RNA, 19 nt, Artificial Sequence
  Description of Artificial Sequence: Synthetic oligonucleotide
  Sense strand starting at position 3523 of SEQ ID NO: 1562397
guuggaaaugcugaaugua

SEQ ID NO: 1743752 - RNA, 19 nt, Artificial Sequence
  Description of Artificial Sequence: Synthetic oligonucleotide
  Antisense strand to SEQ ID NO: 1743751
uacauucagcauuuccaac

SEQ ID NO: 1743753 - RNA, 19 nt, Artificial Sequence
  Description of Artificial Sequence: Synthetic oligonucleotide
  Sense strand starting at position 3526 of SEQ ID NO: 1562397
ggaaaugcugaauguaagu

SEQ ID NO: 1743754 - RNA, 19 nt, Artificial Sequence
  Description of Artificial Sequence: Synthetic oligonucleotide
  Antisense strand to SEQ ID NO: 1743753
acuuacauucagcauuucc

SEQ ID NO: 1743755 - RNA, 19 nt, Artificial Sequence
  Description of Artificial Sequence: Synthetic oligonucleotide
  Sense strand starting at position 3617 of SEQ ID NO: 1562397
cucauaugaucugccugua

SEQ ID NO: 1743756 - RNA, 19 nt, Artificial Sequence
  Description of Artificial Sequence: Synthetic oligonucleotide
  Antisense strand to SEQ ID NO: 1743755
uacaggcagaucauaugag

SEQ ID NO: 1743757 - RNA, 19 nt, Artificial Sequence
  Description of Artificial Sequence: Synthetic oligonucleotide
  Sense strand starting at position 3853 of SEQ ID NO: 1562397
ggaauuuaaugcugauuaa

SEQ ID NO: 1743758 - RNA, 19 nt, Artificial Sequence
  Description of Artificial Sequence: Synthetic oligonucleotide
  Antisense strand to SEQ ID NO: 1743757
uuaaucagcauuaaauucc

SEQ ID NO: 1743759 - RNA, 19 nt, Artificial Sequence
  Description of Artificial Sequence: Synthetic oligonucleotide
  Sense strand starting at position 3864 of SEQ ID NO: 1562397
cugauuaacuugcucaaga

SEQ ID NO: 1743760 - RNA, 19 nt, Artificial Sequence
  Description of Artificial Sequence: Synthetic oligonucleotide
  Antisense strand to SEQ ID NO: 1743759
ucuugagcaaguuaaucag

SEQ ID NO: 1743761 - RNA, 19 nt, Artificial Sequence
  Description of Artificial Sequence: Synthetic oligonucleotide
  Sense strand starting at position 3865 of SEQ ID NO: 1562397
ugauuaacuugcucaagaa

SEQ ID NO: 1743762 - RNA, 19 nt, Artificial Sequence
  Description of Artificial Sequence: Synthetic oligonucleotide
  Antisense strand to SEQ ID NO: 1743761
uucuugagcaaguuaauca

SEQ ID NO: 1743763 - RNA, 19 nt, Artificial Sequence
  Description of Artificial Sequence: Synthetic oligonucleotide
  Sense strand starting at position 16 of SEQ ID NO: 1562398
ccggacgugcgcucucaaa

SEQ ID NO: 1743764 - RNA, 19 nt, Artificial Sequence
  Description of Artificial Sequence: Synthetic oligonucleotide
  Antisense strand to SEQ ID NO: 1743763
uuugagagcgcacguccgg

SEQ ID NO: 1743765 - RNA, 19 nt, Artificial Sequence
  Description of Artificial Sequence: Synthetic oligonucleotide
  Sense strand starting at position 122 of SEQ ID NO: 1562398
gagggcuauuugggagaga

SEQ ID NO: 1743766 - RNA, 19 nt, Artificial Sequence
  Description of Artificial Sequence: Synthetic oligonucleotide
  Antisense strand to SEQ ID NO: 1743765
ucucucccaaauagcccuc

SEQ ID NO: 1743767 - RNA, 19 nt, Artificial Sequence
  Description of Artificial Sequence: Synthetic oligonucleotide
  Sense strand starting at position 312 of SEQ ID NO: 1562398
augccugagcaauggguau

SEQ ID NO: 1743768 - RNA, 19 nt, Artificial Sequence
  Description of Artificial Sequence: Synthetic oligonucleotide
  Antisense strand to SEQ ID NO: 1743767
auacccauugcucaggcau

SEQ ID NO: 1743769 - RNA, 19 nt, Artificial Sequence
  Description of Artificial Sequence: Synthetic oligonucleotide
  Sense strand starting at position 319 of SEQ ID NO: 1562398
agcaauggguauuccagaa

SEQ ID NO: 1743770 - RNA, 19 nt, Artificial Sequence
  Description of Artificial Sequence: Synthetic oligonucleotide
  Antisense strand to SEQ ID NO: 1743769
uucuggaauacccauugcu

SEQ ID NO: 1743771 - RNA, 19 nt, Artificial Sequence
  Description of Artificial Sequence: Synthetic oligonucleotide
  Sense strand starting at position 378 of SEQ ID NO: 1562398
gggcguggucccaaugucu

SEQ ID NO: 1743772 - RNA, 19 nt, Artificial Sequence
  Description of Artificial Sequence: Synthetic oligonucleotide
  Antisense strand to SEQ ID NO: 1743771
agacauugggaccacgccc

SEQ ID NO: 1743773 - RNA, 19 nt, Artificial Sequence
  Description of Artificial Sequence: Synthetic oligonucleotide
  Sense strand starting at position 390 of SEQ ID NO: 1562398
aaugucuuacuguggagga

SEQ ID NO: 1743774 - RNA, 19 nt, Artificial Sequence
  Description of Artificial Sequence: Synthetic oligonucleotide
  Antisense strand to SEQ ID NO: 1743773
uccuccacaguaagacauu

SEQ ID NO: 1743775 - RNA, 19 nt, Artificial Sequence
  Description of Artificial Sequence: Synthetic oligonucleotide
  Sense strand starting at position 392 of SEQ ID NO: 1562398
ugucuuacuguggaggaga

SEQ ID NO: 1743776 - RNA, 19 nt, Artificial Sequence
  Description of Artificial Sequence: Synthetic oligonucleotide
  Antisense strand to SEQ ID NO: 1743775
ucuccuccacaguaagaca

SEQ ID NO: 1743777 - RNA, 19 nt, Artificial Sequence
  Description of Artificial Sequence: Synthetic oligonucleotide
  Sense strand starting at position 580 of SEQ ID NO: 1562398
gguccacuuugucccgaaa

SEQ ID NO: 1743778 - RNA, 19 nt, Artificial Sequence
  Description of Artificial Sequence: Synthetic oligonucleotide
  Antisense strand to SEQ ID NO: 1743777
uuucgggacaaaguggacc

SEQ ID NO: 1743779 - RNA, 19 nt, Artificial Sequence
  Description of Artificial Sequence: Synthetic oligonucleotide
  Sense strand starting at position 583 of SEQ ID NO: 1562398
ccacuuugucccgaaacuc

SEQ ID NO: 1743780 - RNA, 19 nt, Artificial Sequence
  Description of Artificial Sequence: Synthetic oligonucleotide
  Antisense strand to SEQ ID NO: 1743779
gaguuucgggacaaagugg

SEQ ID NO: 1743781 - RNA, 19 nt, Artificial Sequence
  Description of Artificial Sequence: Synthetic oligonucleotide
  Sense strand starting at position 616 of SEQ ID NO: 1562398
agaggcagcuuuccuaaga

SEQ ID NO: 1743782 - RNA, 19 nt, Artificial Sequence
  Description of Artificial Sequence: Synthetic oligonucleotide
  Antisense strand to SEQ ID NO: 1743781
ucuuaggaaagcugccucu

SEQ ID NO: 1743783 - RNA, 19 nt, Artificial Sequence
  Description of Artificial Sequence: Synthetic oligonucleotide
  Sense strand starting at position 617 of SEQ ID NO: 1562398
gaggcagcuuuccuaagau

SEQ ID NO: 1743784 - RNA, 19 nt, Artificial Sequence
  Description of Artificial Sequence: Synthetic oligonucleotide
  Antisense strand to SEQ ID NO: 1743783
aucuuaggaaagcugccuc

SEQ ID NO: 1743785 - RNA, 19 nt, Artificial Sequence
  Description of Artificial Sequence: Synthetic oligonucleotide
  Sense strand starting at position 2450 of SEQ ID NO: 1562398
uucugagauccugaugucu

SEQ ID NO: 1743786 - RNA, 19 nt, Artificial Sequence
  Description of Artificial Sequence: Synthetic oligonucleotide
  Antisense strand to SEQ ID NO: 1743785
agacaucaggaucucagaa

SEQ ID NO: 1743787 - RNA, 19 nt, Artificial Sequence
  Description of Artificial Sequence: Synthetic oligonucleotide
  Sense strand starting at position 2785 of SEQ ID NO: 1562398
gucuuacucuauguuugca

SEQ ID NO: 1743788 - RNA, 19 nt, Artificial Sequence
  Description of Artificial Sequence: Synthetic oligonucleotide
  Antisense strand to SEQ ID NO: 1743787
ugcaaacauagaguaagac

SEQ ID NO: 1743789 - RNA, 19 nt, Artificial Sequence
  Description of Artificial Sequence: Synthetic oligonucleotide
  Sense strand starting at position 2843 of SEQ ID NO: 1562398
gugaauuucuaguaucugu

SEQ ID NO: 1743790 - RNA, 19 nt, Artificial Sequence
  Description of Artificial Sequence: Synthetic oligonucleotide
  Antisense strand to SEQ ID NO: 1743789
acagauacuagaaauucac

SEQ ID NO: 1743791 - RNA, 19 nt, Artificial Sequence
  Description of Artificial Sequence: Synthetic oligonucleotide
  Sense strand starting at position 2851 of SEQ ID NO: 1562398
cuaguaucuguaggugaca

SEQ ID NO: 1743792 - RNA, 19 nt, Artificial Sequence
  Description of Artificial Sequence: Synthetic oligonucleotide
  Antisense strand to SEQ ID NO: 1743791
ugucaccuacagauacuag

SEQ ID NO: 1743793 - RNA, 19 nt, Artificial Sequence
  Description of Artificial Sequence: Synthetic oligonucleotide
  Sense strand starting at position 2852 of SEQ ID NO: 1562398
uaguaucuguaggugacau

SEQ ID NO: 1743794 - RNA, 19 nt, Artificial Sequence
  Description of Artificial Sequence: Synthetic oligonucleotide
  Antisense strand to SEQ ID NO: 1743793
augucaccuacagauacua

SEQ ID NO: 1743795 - RNA, 19 nt, Artificial Sequence
  Description of Artificial Sequence: Synthetic oligonucleotide
  Sense strand starting at position 2854 of SEQ ID NO: 1562398
guaucuguaggugacauca

SEQ ID NO: 1743796 - RNA, 19 nt, Artificial Sequence
  Description of Artificial Sequence: Synthetic oligonucleotide
  Antisense strand to SEQ ID NO: 1743795
ugaugucaccuacagauac

SEQ ID NO: 1743797 - RNA, 19 nt, Artificial Sequence
  Description of Artificial Sequence: Synthetic oligonucleotide
  Sense strand starting at position 2856 of SEQ ID NO: 1562398
aucuguaggugacaucauu

SEQ ID NO: 1743798 - RNA, 19 nt, Artificial Sequence
  Description of Artificial Sequence: Synthetic oligonucleotide
  Antisense strand to SEQ ID NO: 1743797
aaugaugucaccuacagau

SEQ ID NO: 1743799 - RNA, 19 nt, Artificial Sequence
  Description of Artificial Sequence: Synthetic oligonucleotide
  Sense strand starting at position 2865 of SEQ ID NO: 1562398
ugacaucauuguccaccua

SEQ ID NO: 1743800 - RNA, 19 nt, Artificial Sequence
  Description of Artificial Sequence: Synthetic oligonucleotide
  Antisense strand to SEQ ID NO: 1743799
uagguggacaaugauguca

SEQ ID NO: 1743801 - RNA, 19 nt, Artificial Sequence
  Description of Artificial Sequence: Synthetic oligonucleotide
  Sense strand starting at position 2971 of SEQ ID NO: 1562398
cugccaugacaguguggaa

SEQ ID NO: 1743802 - RNA, 19 nt, Artificial Sequence
  Description of Artificial Sequence: Synthetic oligonucleotide
  Antisense strand to SEQ ID NO: 1743801
uuccacacugucauggcag

SEQ ID NO: 1743803 - RNA, 19 nt, Artificial Sequence
  Description of Artificial Sequence: Synthetic oligonucleotide
  Sense strand starting at position 2974 of SEQ ID NO: 1562398
ccaugacaguguggaaaua

SEQ ID NO: 1743804 - RNA, 19 nt, Artificial Sequence
  Description of Artificial Sequence: Synthetic oligonucleotide
  Antisense strand to SEQ ID NO: 1743803
uauuuccacacugucaugg

SEQ ID NO: 1743805 - RNA, 19 nt, Artificial Sequence
  Description of Artificial Sequence: Synthetic oligonucleotide
  Sense strand starting at position 3054 of SEQ ID NO: 1562398
gagggucagaugugaacga

SEQ ID NO: 1743806 - RNA, 19 nt, Artificial Sequence
  Description of Artificial Sequence: Synthetic oligonucleotide
  Antisense strand to SEQ ID NO: 1743805
ucguucacaucugacccuc

SEQ ID NO: 1743807 - RNA, 19 nt, Artificial Sequence
  Description of Artificial Sequence: Synthetic oligonucleotide
  Sense strand starting at position 3236 of SEQ ID NO: 1562398
gccagaaaguacuuguaau

SEQ ID NO: 1743808 - RNA, 19 nt, Artificial Sequence
  Description of Artificial Sequence: Synthetic oligonucleotide
  Antisense strand to SEQ ID NO: 1743807
auuacaaguacuuucuggc

SEQ ID NO: 1743809 - RNA, 19 nt, Artificial Sequence
  Description of Artificial Sequence: Synthetic oligonucleotide
  Sense strand starting at position 3248 of SEQ ID NO: 1562398
uuguaaucuccaugacagg

SEQ ID NO: 1743810 - RNA, 19 nt, Artificial Sequence
  Description of Artificial Sequence: Synthetic oligonucleotide
  Antisense strand to SEQ ID NO: 1743809
ccugucauggagauuacaa

SEQ ID NO: 1743811 - RNA, 19 nt, Artificial Sequence
  Description of Artificial Sequence: Synthetic oligonucleotide
  Sense strand starting at position 3249 of SEQ ID NO: 1562398
uguaaucuccaugacaggu

SEQ ID NO: 1743812 - RNA, 19 nt, Artificial Sequence
  Description of Artificial Sequence: Synthetic oligonucleotide
  Antisense strand to SEQ ID NO: 1743811
accugucauggagauuaca

SEQ ID NO: 1743813 - RNA, 19 nt, Artificial Sequence
  Description of Artificial Sequence: Synthetic oligonucleotide
  Sense strand starting at position 3266 of SEQ ID NO: 1562398
guggaagauuaaugugaaa

SEQ ID NO: 1743814 - RNA, 19 nt, Artificial Sequence
  Description of Artificial Sequence: Synthetic oligonucleotide
  Antisense strand to SEQ ID NO: 1743813
uuucacauuaaucuuccac

SEQ ID NO: 1743815 - RNA, 19 nt, Artificial Sequence
  Description of Artificial Sequence: Synthetic oligonucleotide
  Sense strand starting at position 3356 of SEQ ID NO: 1562398
uuccaauaagcaugaauga

SEQ ID NO: 1743816 - RNA, 19 nt, Artificial Sequence
  Description of Artificial Sequence: Synthetic oligonucleotide
  Antisense strand to SEQ ID NO: 1743815
ucauucaugcuuauuggaa

SEQ ID NO: 1743817 - RNA, 19 nt, Artificial Sequence
  Description of Artificial Sequence: Synthetic oligonucleotide
  Sense strand starting at position 3380 of SEQ ID NO: 1562398
acagcuaguugaucucauu

SEQ ID NO: 1743818 - RNA, 19 nt, Artificial Sequence
  Description of Artificial Sequence: Synthetic oligonucleotide
  Antisense strand to SEQ ID NO: 1743817
aaugagaucaacuagcugu

SEQ ID NO: 1743819 - RNA, 19 nt, Artificial Sequence
  Description of Artificial Sequence: Synthetic oligonucleotide
  Sense strand starting at position 3464 of SEQ ID NO: 1562398
ugcugauaauauccagcau

SEQ ID NO: 1743820 - RNA, 19 nt, Artificial Sequence
  Description of Artificial Sequence: Synthetic oligonucleotide
  Antisense strand to SEQ ID NO: 1743819
augcuggauauuaucagca

SEQ ID NO: 1743821 - RNA, 19 nt, Artificial Sequence
  Description of Artificial Sequence: Synthetic oligonucleotide
  Sense strand starting at position 3511 of SEQ ID NO: 1562398
acccuuggcagguguaauu

SEQ ID NO: 1743822 - RNA, 19 nt, Artificial Sequence
  Description of Artificial Sequence: Synthetic oligonucleotide
  Antisense strand to SEQ ID NO: 1743821
aauuacaccugccaagggu

SEQ ID NO: 1743823 - RNA, 19 nt, Artificial Sequence
  Description of Artificial Sequence: Synthetic oligonucleotide
  Sense strand starting at position 3600 of SEQ ID NO: 1562398
acaguacagucauaauguu

SEQ ID NO: 1743824 - RNA, 19 nt, Artificial Sequence
  Description of Artificial Sequence: Synthetic oligonucleotide
  Antisense strand to SEQ ID NO: 1743823
aacauuaugacuguacugu

SEQ ID NO: 1743825 - RNA, 19 nt, Artificial Sequence
  Description of Artificial Sequence: Synthetic oligonucleotide
  Sense strand starting at position 3718 of SEQ ID NO: 1562398
cuauucugcuugucucuau

SEQ ID NO: 1743826 - RNA, 19 nt, Artificial Sequence
  Description of Artificial Sequence: Synthetic oligonucleotide
  Antisense strand to SEQ ID NO: 1743825
auagagacaagcagaauag

SEQ ID NO: 1743827 - RNA, 19 nt, Artificial Sequence
  Description of Artificial Sequence: Synthetic oligonucleotide
  Sense strand starting at position 3722 of SEQ ID NO: 1562398
ucugcuugucucuauggau

SEQ ID NO: 1743828 - RNA, 19 nt, Artificial Sequence
  Description of Artificial Sequence: Synthetic oligonucleotide
  Antisense strand to SEQ ID NO: 1743827
auccauagagacaagcaga

SEQ ID NO: 1743829 - RNA, 19 nt, Artificial Sequence
  Description of Artificial Sequence: Synthetic oligonucleotide
  Sense strand starting at position 3765 of SEQ ID NO: 1562398
agacgcagucauggaauau

SEQ ID NO: 1743830 - RNA, 19 nt, Artificial Sequence
  Description of Artificial Sequence: Synthetic oligonucleotide
  Antisense strand to SEQ ID NO: 1743829
auauuccaugacugcgucu

SEQ ID NO: 1743831 - RNA, 19 nt, Artificial Sequence
  Description of Artificial Sequence: Synthetic oligonucleotide
  Sense strand starting at position 3766 of SEQ ID NO: 1562398
gacgcagucauggaauaug

SEQ ID NO: 1743832 - RNA, 19 nt, Artificial Sequence
  Description of Artificial Sequence: Synthetic oligonucleotide
  Antisense strand to SEQ ID NO: 1743831
cauauuccaugacugcguc

SEQ ID NO: 1743833 - RNA, 19 nt, Artificial Sequence
  Description of Artificial Sequence: Synthetic oligonucleotide
  Sense strand starting at position 3786 of SEQ ID NO: 1562398
ggucuuugugucuagcuuu

SEQ ID NO: 1743834 - RNA, 19 nt, Artificial Sequence
  Description of Artificial Sequence: Synthetic oligonucleotide
  Antisense strand to SEQ ID NO: 1743833
aaagcuagacacaaagacc

SEQ ID NO: 1743835 - RNA, 19 nt, Artificial Sequence
  Description of Artificial Sequence: Synthetic oligonucleotide
  Sense strand starting at position 3789 of SEQ ID NO: 1562398
cuuugugucuagcuuuguu

SEQ ID NO: 1743836 - RNA, 19 nt, Artificial Sequence
  Description of Artificial Sequence: Synthetic oligonucleotide
  Antisense strand to SEQ ID NO: 1743835
aacaaagcuagacacaaag

SEQ ID NO: 1743837 - RNA, 19 nt, Artificial Sequence
  Description of Artificial Sequence: Synthetic oligonucleotide
  Sense strand starting at position 3831 of SEQ ID NO: 1562398
accuguguuuggguauguu

SEQ ID NO: 1743838 - RNA, 19 nt, Artificial Sequence
  Description of Artificial Sequence: Synthetic oligonucleotide
  Antisense strand to SEQ ID NO: 1743837
aacauacccaaacacaggu

SEQ ID NO: 1743839 - RNA, 19 nt, Artificial Sequence
  Description of Artificial Sequence: Synthetic oligonucleotide
  Sense strand starting at position 3834 of SEQ ID NO: 1562398
uguguuuggguauguuuca

SEQ ID NO: 1743840 - RNA, 19 nt, Artificial Sequence
  Description of Artificial Sequence: Synthetic oligonucleotide
  Antisense strand to SEQ ID NO: 1743839
ugaaacauacccaaacaca

SEQ ID NO: 1743841 - RNA, 19 nt, Artificial Sequence
  Description of Artificial Sequence: Synthetic oligonucleotide
  Sense strand starting at position 3965 of SEQ ID NO: 1562398
ugugaauagugcuucuaua

SEQ ID NO: 1743842 - RNA, 19 nt, Artificial Sequence
  Description of Artificial Sequence: Synthetic oligonucleotide
  Antisense strand to SEQ ID NO: 1743841
uauagaagcacuauucaca

SEQ ID NO: 1743843 - RNA, 19 nt, Artificial Sequence
  Description of Artificial Sequence: Synthetic oligonucleotide
  Sense strand starting at position 100 of SEQ ID NO: 1562399
ccugacuggucucacuagu

SEQ ID NO: 1743844 - RNA, 19 nt, Artificial Sequence
  Description of Artificial Sequence: Synthetic oligonucleotide
  Antisense strand to SEQ ID NO: 1743843
acuagugagaccagucagg

SEQ ID NO: 1743845 - RNA, 19 nt, Artificial Sequence
  Description of Artificial Sequence: Synthetic oligonucleotide
  Sense strand starting at position 179 of SEQ ID NO: 1562399
guccuaaggguucaucgau

SEQ ID NO: 1743846 - RNA, 19 nt, Artificial Sequence
  Description of Artificial Sequence: Synthetic oligonucleotide
  Antisense strand to SEQ ID NO: 1743845
aucgaugaacccuuaggac

SEQ ID NO: 1743847 - RNA, 19 nt, Artificial Sequence
  Description of Artificial Sequence: Synthetic oligonucleotide
  Sense strand starting at position 185 of SEQ ID NO: 1562399
aggguucaucgauaaggug

SEQ ID NO: 1743848 - RNA, 19 nt, Artificial Sequence
  Description of Artificial Sequence: Synthetic oligonucleotide
  Antisense strand to SEQ ID NO: 1743847
caccuuaucgaugaacccu

SEQ ID NO: 1743849 - RNA, 19 nt, Artificial Sequence
  Description of Artificial Sequence: Synthetic oligonucleotide
  Sense strand starting at position 231 of SEQ ID NO: 1562399
ggccuuaaacccugaguag

SEQ ID NO: 1743850 - RNA, 19 nt, Artificial Sequence
  Description of Artificial Sequence: Synthetic oligonucleotide
  Antisense strand to SEQ ID NO: 1743849
cuacucaggguuuaaggcc

SEQ ID NO: 1743851 - RNA, 19 nt, Artificial Sequence
  Description of Artificial Sequence: Synthetic oligonucleotide
  Sense strand starting at position 234 of SEQ ID NO: 1562399
cuuaaacccugaguaggau

SEQ ID NO: 1743852 - RNA, 19 nt, Artificial Sequence
  Description of Artificial Sequence: Synthetic oligonucleotide
  Antisense strand to SEQ ID NO: 1743851
auccuacucaggguuuaag

SEQ ID NO: 1743853 - RNA, 19 nt, Artificial Sequence
  Description of Artificial Sequence: Synthetic oligonucleotide
  Sense strand starting at position 251 of SEQ ID NO: 1562399
augagugacgucugaguaa

SEQ ID NO: 1743854 - RNA, 19 nt, Artificial Sequence
  Description of Artificial Sequence: Synthetic oligonucleotide
  Antisense strand to SEQ ID NO: 1743853
uuacucagacgucacucau

SEQ ID NO: 1743855 - RNA, 19 nt, Artificial Sequence
  Description of Artificial Sequence: Synthetic oligonucleotide
  Sense strand starting at position 288 of SEQ ID NO: 1562399
ggcccaugaaauugcuagu

SEQ ID NO: 1743856 - RNA, 19 nt, Artificial Sequence
  Description of Artificial Sequence: Synthetic oligonucleotide
  Antisense strand to SEQ ID NO: 1743855
acuagcaauuucaugggcc

SEQ ID NO: 1743857 - RNA, 19 nt, Artificial Sequence
  Description of Artificial Sequence: Synthetic oligonucleotide
  Sense strand starting at position 589 of SEQ ID NO: 1562399
ggaagaguguggagcugau

SEQ ID NO: 1743858 - RNA, 19 nt, Artificial Sequence
  Description of Artificial Sequence: Synthetic oligonucleotide
  Antisense strand to SEQ ID NO: 1743857
aucagcuccacacucuucc

SEQ ID NO: 1743859 - RNA, 19 nt, Artificial Sequence
  Description of Artificial Sequence: Synthetic oligonucleotide
  Sense strand starting at position 629 of SEQ ID NO: 1562399
cugucuuccaaguguuuga

SEQ ID NO: 1743860 - RNA, 19 nt, Artificial Sequence
  Description of Artificial Sequence: Synthetic oligonucleotide
  Antisense strand to SEQ ID NO: 1743859
ucaaacacuuggaagacag

SEQ ID NO: 1743861 - RNA, 19 nt, Artificial Sequence
  Description of Artificial Sequence: Synthetic oligonucleotide
  Sense strand starting at position 636 of SEQ ID NO: 1562399
ccaaguguuugaucucgga

SEQ ID NO: 1743862 - RNA, 19 nt, Artificial Sequence
  Description of Artificial Sequence: Synthetic oligonucleotide
  Antisense strand to SEQ ID NO: 1743861
uccgagaucaaacacuugg

SEQ ID NO: 1743863 - RNA, 19 nt, Artificial Sequence
  Description of Artificial Sequence: Synthetic oligonucleotide
  Sense strand starting at position 640 of SEQ ID NO: 1562399
guguuugaucucggaauga

SEQ ID NO: 1743864 - RNA, 19 nt, Artificial Sequence
  Description of Artificial Sequence: Synthetic oligonucleotide
  Antisense strand to SEQ ID NO: 1743863
ucauuccgagaucaaacac

SEQ ID NO: 1743865 - RNA, 19 nt, Artificial Sequence
  Description of Artificial Sequence: Synthetic oligonucleotide
  Sense strand starting at position 758 of SEQ ID NO: 1562399
gcccguauuuccugacuca

SEQ ID NO: 1743866 - RNA, 19 nt, Artificial Sequence
  Description of Artificial Sequence: Synthetic oligonucleotide
  Antisense strand to SEQ ID NO: 1743865
ugagucaggaaauacgggc

SEQ ID NO: 1743867 - RNA, 19 nt, Artificial Sequence
  Description of Artificial Sequence: Synthetic oligonucleotide
  Sense strand starting at position 2151 of SEQ ID NO: 1562399
gcugguuuaucucuuuguu

SEQ ID NO: 1743868 - RNA, 19 nt, Artificial Sequence
  Description of Artificial Sequence: Synthetic oligonucleotide
  Antisense strand to SEQ ID NO: 1743867
aacaaagagauaaaccagc

SEQ ID NO: 1743869 - RNA, 19 nt, Artificial Sequence
  Description of Artificial Sequence: Synthetic oligonucleotide
  Sense strand starting at position 2600 of SEQ ID NO: 1562399
agaugaacguuucuccaaa

SEQ ID NO: 1743870 - RNA, 19 nt, Artificial Sequence
  Description of Artificial Sequence: Synthetic oligonucleotide
  Antisense strand to SEQ ID NO: 1743869
uuuggagaaacguucaucu

SEQ ID NO: 1743871 - RNA, 19 nt, Artificial Sequence
  Description of Artificial Sequence: Synthetic oligonucleotide
  Sense strand starting at position 2601 of SEQ ID NO: 1562399
gaugaacguuucuccaaag

SEQ ID NO: 1743872 - RNA, 19 nt, Artificial Sequence
  Description of Artificial Sequence: Synthetic oligonucleotide
  Antisense strand to SEQ ID NO: 1743871
cuuuggagaaacguucauc

SEQ ID NO: 1743873 - RNA, 19 nt, Artificial Sequence
  Description of Artificial Sequence: Synthetic oligonucleotide
  Sense strand starting at position 2619 of SEQ ID NO: 1562399
ggaagcaauucuguuucca

SEQ ID NO: 1743874 - RNA, 19 nt, Artificial Sequence
  Description of Artificial Sequence: Synthetic oligonucleotide
  Antisense strand to SEQ ID NO: 1743873
uggaaacagaauugcuucc

SEQ ID NO: 1743875 - RNA, 19 nt, Artificial Sequence
  Description of Artificial Sequence: Synthetic oligonucleotide
  Sense strand starting at position 2640 of SEQ ID NO: 1562399
uauccuguuucuggacuga

SEQ ID NO: 1743876 - RNA, 19 nt, Artificial Sequence
  Description of Artificial Sequence: Synthetic oligonucleotide
  Antisense strand to SEQ ID NO: 1743875
ucaguccagaaacaggaua

SEQ ID NO: 1743877 - RNA, 19 nt, Artificial Sequence
  Description of Artificial Sequence: Synthetic oligonucleotide
  Sense strand starting at position 2644 of SEQ ID NO: 1562399
cuguuucuggacugauuag

SEQ ID NO: 1743878 - RNA, 19 nt, Artificial Sequence
  Description of Artificial Sequence: Synthetic oligonucleotide
  Antisense strand to SEQ ID NO: 1743877
cuaaucaguccagaaacag

SEQ ID NO: 1743879 - RNA, 19 nt, Artificial Sequence
  Description of Artificial Sequence: Synthetic oligonucleotide
  Sense strand starting at position 2650 of SEQ ID NO: 1562399
cuggacugauuagauauau

SEQ ID NO: 1743880 - RNA, 19 nt, Artificial Sequence
  Description of Artificial Sequence: Synthetic oligonucleotide
  Antisense strand to SEQ ID NO: 1743879
auauaucuaaucaguccag

SEQ ID NO: 1743881 - RNA, 19 nt, Artificial Sequence
  Description of Artificial Sequence: Synthetic oligonucleotide
  Sense strand starting at position 2735 of SEQ ID NO: 1562399
cggcacagacgauaagaua

SEQ ID NO: 1743882 - RNA, 19 nt, Artificial Sequence
  Description of Artificial Sequence: Synthetic oligonucleotide
  Antisense strand to SEQ ID NO: 1743881
uaucuuaucgucugugccg

SEQ ID NO: 1743883 - RNA, 19 nt, Artificial Sequence
  Description of Artificial Sequence: Synthetic oligonucleotide
  Sense strand starting at position 3083 of SEQ ID NO: 1562399
cacaccuuguaaggagaau

SEQ ID NO: 1743884 - RNA, 19 nt, Artificial Sequence
  Description of Artificial Sequence: Synthetic oligonucleotide
  Antisense strand to SEQ ID NO: 1743883
auucuccuuacaaggugug

SEQ ID NO: 1743885 - RNA, 19 nt, Artificial Sequence
  Description of Artificial Sequence: Synthetic oligonucleotide
  Sense strand starting at position 3095 of SEQ ID NO: 1562399
ggagaaugcucagagauuc

SEQ ID NO: 1743886 - RNA, 19 nt, Artificial Sequence
  Description of Artificial Sequence: Synthetic oligonucleotide
  Antisense strand to SEQ ID NO: 1743885
gaaucucugagcauucucc

SEQ ID NO: 1743887 - RNA, 19 nt, Artificial Sequence
  Description of Artificial Sequence: Synthetic oligonucleotide
  Sense strand starting at position 3191 of SEQ ID NO: 1562399
gaagcugcacucuggauua

SEQ ID NO: 1743888 - RNA, 19 nt, Artificial Sequence
  Description of Artificial Sequence: Synthetic oligonucleotide
  Antisense strand to SEQ ID NO: 1743887
uaauccagagugcagcuuc

SEQ ID NO: 1743889 - RNA, 19 nt, Artificial Sequence
  Description of Artificial Sequence: Synthetic oligonucleotide
  Sense strand starting at position 3193 of SEQ ID NO: 1562399
agcugcacucuggauuauu

SEQ ID NO: 1743890 - RNA, 19 nt, Artificial Sequence
  Description of Artificial Sequence: Synthetic oligonucleotide
  Antisense strand to SEQ ID NO: 1743889
aauaauccagagugcagcu

SEQ ID NO: 1743891 - RNA, 19 nt, Artificial Sequence
  Description of Artificial Sequence: Synthetic oligonucleotide
  Sense strand starting at position 3286 of SEQ ID NO: 1562399
auuccuugcuugucugaaa

SEQ ID NO: 1743892 - RNA, 19 nt, Artificial Sequence
  Description of Artificial Sequence: Synthetic oligonucleotide
  Antisense strand to SEQ ID NO: 1743891
uuucagacaagcaaggaau

SEQ ID NO: 1743893 - RNA, 19 nt, Artificial Sequence
  Description of Artificial Sequence: Synthetic oligonucleotide
  Sense strand starting at position 3418 of SEQ ID NO: 1562399
uccaguguugccgaugaca

SEQ ID NO: 1743894 - RNA, 19 nt, Artificial Sequence
  Description of Artificial Sequence: Synthetic oligonucleotide
  Antisense strand to SEQ ID NO: 1743893
ugucaucggcaacacugga

SEQ ID NO: 1743895 - RNA, 19 nt, Artificial Sequence
  Description of Artificial Sequence: Synthetic oligonucleotide
  Sense strand starting at position 3420 of SEQ ID NO: 1562399
caguguugccgaugacagu

SEQ ID NO: 1743896 - RNA, 19 nt, Artificial Sequence
  Description of Artificial Sequence: Synthetic oligonucleotide
  Antisense strand to SEQ ID NO: 1743895
acugucaucggcaacacug

SEQ ID NO: 1743897 - RNA, 19 nt, Artificial Sequence
  Description of Artificial Sequence: Synthetic oligonucleotide
  Sense strand starting at position 3479 of SEQ ID NO: 1562399
cuuaacucucugggagcau

SEQ ID NO: 1743898 - RNA, 19 nt, Artificial Sequence
  Description of Artificial Sequence: Synthetic oligonucleotide
  Antisense strand to SEQ ID NO: 1743897
augcucccagagaguuaag

SEQ ID NO: 1743899 - RNA, 19 nt, Artificial Sequence
  Description of Artificial Sequence: Synthetic oligonucleotide
  Sense strand starting at position 3480 of SEQ ID NO: 1562399
uuaacucucugggagcauu

SEQ ID NO: 1743900 - RNA, 19 nt, Artificial Sequence
  Description of Artificial Sequence: Synthetic oligonucleotide
  Antisense strand to SEQ ID NO: 1743899
aaugcucccagagaguuaa

SEQ ID NO: 1743901 - RNA, 19 nt, Artificial Sequence
  Description of Artificial Sequence: Synthetic oligonucleotide
  Sense strand starting at position 3567 of SEQ ID NO: 1562399
gugguuagaacuuauugag

SEQ ID NO: 1743902 - RNA, 19 nt, Artificial Sequence
  Description of Artificial Sequence: Synthetic oligonucleotide
  Antisense strand to SEQ ID NO: 1743901
cucaauaaguucuaaccac

SEQ ID NO: 1743903 - RNA, 19 nt, Artificial Sequence
  Description of Artificial Sequence: Synthetic oligonucleotide
  Sense strand starting at position 3570 of SEQ ID NO: 1562399
guuagaacuuauugagccu

SEQ ID NO: 1743904 - RNA, 19 nt, Artificial Sequence
  Description of Artificial Sequence: Synthetic oligonucleotide
  Antisense strand to SEQ ID NO: 1743903
aggcucaauaaguucuaac

SEQ ID NO: 1743905 - RNA, 19 nt, Artificial Sequence
  Description of Artificial Sequence: Synthetic oligonucleotide
  Sense strand starting at position 3597 of SEQ ID NO: 1562399
aaagacuuaucuccgaagu

SEQ ID NO: 1743906 - RNA, 19 nt, Artificial Sequence
  Description of Artificial Sequence: Synthetic oligonucleotide
  Antisense strand to SEQ ID NO: 1743905
acuucggagauaagucuuu

SEQ ID NO: 1743907 - RNA, 19 nt, Artificial Sequence
  Description of Artificial Sequence: Synthetic oligonucleotide
  Sense strand starting at position 3598 of SEQ ID NO: 1562399
aagacuuaucuccgaagug

SEQ ID NO: 1743908 - RNA, 19 nt, Artificial Sequence
  Description of Artificial Sequence: Synthetic oligonucleotide
  Antisense strand to SEQ ID NO: 1743907
cacuucggagauaagucuu

SEQ ID NO: 1743909 - RNA, 19 nt, Artificial Sequence
  Description of Artificial Sequence: Synthetic oligonucleotide
  Sense strand starting at position 3599 of SEQ ID NO: 1562399
agacuuaucuccgaagugu

SEQ ID NO: 1743910 - RNA, 19 nt, Artificial Sequence
  Description of Artificial Sequence: Synthetic oligonucleotide
  Antisense strand to SEQ ID NO: 1743909
acacuucggagauaagucu

SEQ ID NO: 1743911 - RNA, 19 nt, Artificial Sequence
  Description of Artificial Sequence: Synthetic oligonucleotide
  Sense strand starting at position 3715 of SEQ ID NO: 1562399
ugaugauguuacuuugagu

SEQ ID NO: 1743912 - RNA, 19 nt, Artificial Sequence
  Description of Artificial Sequence: Synthetic oligonucleotide
  Antisense strand to SEQ ID NO: 1743911
acucaaaguaacaucauca

SEQ ID NO: 1743913 - RNA, 19 nt, Artificial Sequence
  Description of Artificial Sequence: Synthetic oligonucleotide
  Sense strand starting at position 3747 of SEQ ID NO: 1562399
uuucuuguuuccuuggaca

SEQ ID NO: 1743914 - RNA, 19 nt, Artificial Sequence
  Description of Artificial Sequence: Synthetic oligonucleotide
  Antisense strand to SEQ ID NO: 1743913
uguccaaggaaacaagaaa

SEQ ID NO: 1743915 - RNA, 19 nt, Artificial Sequence
  Description of Artificial Sequence: Synthetic oligonucleotide
  Sense strand starting at position 3749 of SEQ ID NO: 1562399
ucuuguuuccuuggacauc

SEQ ID NO: 1743916 - RNA, 19 nt, Artificial Sequence
  Description of Artificial Sequence: Synthetic oligonucleotide
  Antisense strand to SEQ ID NO: 1743915
gauguccaaggaaacaaga

SEQ ID NO: 1743917 - RNA, 19 nt, Artificial Sequence
  Description of Artificial Sequence: Synthetic oligonucleotide
  Sense strand starting at position 3750 of SEQ ID NO: 1562399
cuuguuuccuuggacauca

SEQ ID NO: 1743918 - RNA, 19 nt, Artificial Sequence
  Description of Artificial Sequence: Synthetic oligonucleotide
  Antisense strand to SEQ ID NO: 1743917
ugauguccaaggaaacaag

SEQ ID NO: 1743919 - RNA, 19 nt, Artificial Sequence
  Description of Artificial Sequence: Synthetic oligonucleotide
  Sense strand starting at position 3765 of SEQ ID NO: 1562399
aucagauagucugcucauu

SEQ ID NO: 1743920 - RNA, 19 nt, Artificial Sequence
  Description of Artificial Sequence: Synthetic oligonucleotide
  Antisense strand to SEQ ID NO: 1743919
aaugagcagacuaucugau

SEQ ID NO: 1743921 - RNA, 19 nt, Artificial Sequence
  Description of Artificial Sequence: Synthetic oligonucleotide
  Sense strand starting at position 3976 of SEQ ID NO: 1562399
agugauuauuaguacaggu

SEQ ID NO: 1743922 - RNA, 19 nt, Artificial Sequence
  Description of Artificial Sequence: Synthetic oligonucleotide
  Antisense strand to SEQ ID NO: 1743921
accuguacuaauaaucacu

SEQ ID NO: 1743923 - RNA, 19 nt, Artificial Sequence
  Description of Artificial Sequence: Synthetic oligonucleotide
  Sense strand starting at position 296 of SEQ ID NO: 1562400
gcuggagcuuuaucuauuu

SEQ ID NO: 1743924 - RNA, 19 nt, Artificial Sequence
  Description of Artificial Sequence: Synthetic oligonucleotide
  Antisense strand to SEQ ID NO: 1743923
aaauagauaaagcuccagc

SEQ ID NO: 1743925 - RNA, 19 nt, Artificial Sequence
  Description of Artificial Sequence: Synthetic oligonucleotide
  Sense strand starting at position 748 of SEQ ID NO: 1562400
gcaccagugccagacuaau

SEQ ID NO: 1743926 - RNA, 19 nt, Artificial Sequence
  Description of Artificial Sequence: Synthetic oligonucleotide
  Antisense strand to SEQ ID NO: 1743925
auuagucuggcacuggugc

SEQ ID NO: 1743927 - RNA, 19 nt, Artificial Sequence
  Description of Artificial Sequence: Synthetic oligonucleotide
  Sense strand starting at position 1004 of SEQ ID NO: 1562400
ugggaaguggucuggaaga

SEQ ID NO: 1743928 - RNA, 19 nt, Artificial Sequence
  Description of Artificial Sequence: Synthetic oligonucleotide
  Antisense strand to SEQ ID NO: 1743927
ucuuccagaccacuuccca

SEQ ID NO: 1743929 - RNA, 19 nt, Artificial Sequence
  Description of Artificial Sequence: Synthetic oligonucleotide
  Sense strand starting at position 1043 of SEQ ID NO: 1562400
cagggucaucuggagcuua

SEQ ID NO: 1743930 - RNA, 19 nt, Artificial Sequence
  Description of Artificial Sequence: Synthetic oligonucleotide
  Antisense strand to SEQ ID NO: 1743929
uaagcuccagaugacccug

SEQ ID NO: 1743931 - RNA, 19 nt, Artificial Sequence
  Description of Artificial Sequence: Synthetic oligonucleotide
  Sense strand starting at position 2191 of SEQ ID NO: 1562400
gugcuaggagcuuauauau

SEQ ID NO: 1743932 - RNA, 19 nt, Artificial Sequence
  Description of Artificial Sequence: Synthetic oligonucleotide
  Antisense strand to SEQ ID NO: 1743931
auauauaagcuccuagcac

SEQ ID NO: 1743933 - RNA, 19 nt, Artificial Sequence
  Description of Artificial Sequence: Synthetic oligonucleotide
  Sense strand starting at position 2273 of SEQ ID NO: 1562400
gggugguuucuugaggaug

SEQ ID NO: 1743934 - RNA, 19 nt, Artificial Sequence
  Description of Artificial Sequence: Synthetic oligonucleotide
  Antisense strand to SEQ ID NO: 1743933
cauccucaagaaaccaccc

SEQ ID NO: 1743935 - RNA, 19 nt, Artificial Sequence
  Description of Artificial Sequence: Synthetic oligonucleotide
  Sense strand starting at position 2284 of SEQ ID NO: 1562400
ugaggaugcucaccaugaa

SEQ ID NO: 1743936 - RNA, 19 nt, Artificial Sequence
  Description of Artificial Sequence: Synthetic oligonucleotide
  Antisense strand to SEQ ID NO: 1743935
uucauggugagcauccuca

SEQ ID NO: 1743937 - RNA, 19 nt, Artificial Sequence
  Description of Artificial Sequence: Synthetic oligonucleotide
  Sense strand starting at position 2444 of SEQ ID NO: 1562400
cugugauugucauuuggua

SEQ ID NO: 1743938 - RNA, 19 nt, Artificial Sequence
  Description of Artificial Sequence: Synthetic oligonucleotide
  Antisense strand to SEQ ID NO: 1743937
uaccaaaugacaaucacag

SEQ ID NO: 1743939 - RNA, 19 nt, Artificial Sequence
  Description of Artificial Sequence: Synthetic oligonucleotide
  Sense strand starting at position 2446 of SEQ ID NO: 1562400
gugauugucauuugguauu

SEQ ID NO: 1743940 - RNA, 19 nt, Artificial Sequence
  Description of Artificial Sequence: Synthetic oligonucleotide
  Antisense strand to SEQ ID NO: 1743939
aauaccaaaugacaaucac

SEQ ID NO: 1743941 - RNA, 19 nt, Artificial Sequence
  Description of Artificial Sequence: Synthetic oligonucleotide
  Sense strand starting at position 2456 of SEQ ID NO: 1562400
uuugguauugcuuacuauu

SEQ ID NO: 1743942 - RNA, 19 nt, Artificial Sequence
  Description of Artificial Sequence: Synthetic oligonucleotide
  Antisense strand to SEQ ID NO: 1743941
aauaguaagcaauaccaaa

SEQ ID NO: 1743943 - RNA, 19 nt, Artificial Sequence
  Description of Artificial Sequence: Synthetic oligonucleotide
  Sense strand starting at position 2458 of SEQ ID NO: 1562400
ugguauugcuuacuauuau

SEQ ID NO: 1743944 - RNA, 19 nt, Artificial Sequence
  Description of Artificial Sequence: Synthetic oligonucleotide
  Antisense strand to SEQ ID NO: 1743943
auaauaguaagcaauacca

SEQ ID NO: 1743945 - RNA, 19 nt, Artificial Sequence
  Description of Artificial Sequence: Synthetic oligonucleotide
  Sense strand starting at position 2500 of SEQ ID NO: 1562400
aguugagucaaggauguuu

SEQ ID NO: 1743946 - RNA, 19 nt, Artificial Sequence
  Description of Artificial Sequence: Synthetic oligonucleotide
  Antisense strand to SEQ ID NO: 1743945
aaacauccuugacucaacu

SEQ ID NO: 1743947 - RNA, 19 nt, Artificial Sequence
  Description of Artificial Sequence: Synthetic oligonucleotide
  Sense strand starting at position 2545 of SEQ ID NO: 1562400
cuugaauccguagaccaau

SEQ ID NO: 1743948 - RNA, 19 nt, Artificial Sequence
  Description of Artificial Sequence: Synthetic oligonucleotide
  Antisense strand to SEQ ID NO: 1743947
auuggucuacggauucaag

SEQ ID NO: 1743949 - RNA, 19 nt, Artificial Sequence
  Description of Artificial Sequence: Synthetic oligonucleotide
  Sense strand starting at position 2599 of SEQ ID NO: 1562400
ucggcaaacagucauguga

SEQ ID NO: 1743950 - RNA, 19 nt, Artificial Sequence
  Description of Artificial Sequence: Synthetic oligonucleotide
  Antisense strand to SEQ ID NO: 1743949
ucacaugacuguuugccga

SEQ ID NO: 1743951 - RNA, 19 nt, Artificial Sequence
  Description of Artificial Sequence: Synthetic oligonucleotide
  Sense strand starting at position 2614 of SEQ ID NO: 1562400
gugauaggucuugcugugu

SEQ ID NO: 1743952 - RNA, 19 nt, Artificial Sequence
  Description of Artificial Sequence: Synthetic oligonucleotide
  Antisense strand to SEQ ID NO: 1743951
acacagcaagaccuaucac

SEQ ID NO: 1743953 - RNA, 19 nt, Artificial Sequence
  Description of Artificial Sequence: Synthetic oligonucleotide
  Sense strand starting at position 2638 of SEQ ID NO: 1562400
gaaguauucugagcaaguu

SEQ ID NO: 1743954 - RNA, 19 nt, Artificial Sequence
  Description of Artificial Sequence: Synthetic oligonucleotide
  Antisense strand to SEQ ID NO: 1743953
aacuugcucagaauacuuc

SEQ ID NO: 1743955 - RNA, 19 nt, Artificial Sequence
  Description of Artificial Sequence: Synthetic oligonucleotide
  Sense strand starting at position 2646 of SEQ ID NO: 1562400
cugagcaaguuuguaaaua

SEQ ID NO: 1743956 - RNA, 19 nt, Artificial Sequence
  Description of Artificial Sequence: Synthetic oligonucleotide
  Antisense strand to SEQ ID NO: 1743955
uauuuacaaacuugcucag

SEQ ID NO: 1743957 - RNA, 19 nt, Artificial Sequence
  Description of Artificial Sequence: Synthetic oligonucleotide
  Sense strand starting at position 2884 of SEQ ID NO: 1562400
aacccagauugugugagaa

SEQ ID NO: 1743958 - RNA, 19 nt, Artificial Sequence
  Description of Artificial Sequence: Synthetic oligonucleotide
  Antisense strand to SEQ ID NO: 1743957
uucucacacaaucuggguu

SEQ ID NO: 1743959 - RNA, 19 nt, Artificial Sequence
  Description of Artificial Sequence: Synthetic oligonucleotide
  Sense strand starting at position 2911 of SEQ ID NO: 1562400
cggagcaugguuuagacau

SEQ ID NO: 1743960 - RNA, 19 nt, Artificial Sequence
  Description of Artificial Sequence: Synthetic oligonucleotide
  Antisense strand to SEQ ID NO: 1743959
augucuaaaccaugcuccg

SEQ ID NO: 1743961 - RNA, 19 nt, Artificial Sequence
  Description of Artificial Sequence: Synthetic oligonucleotide
  Sense strand starting at position 2932 of SEQ ID NO: 1562400
cggugugggauugauguga

SEQ ID NO: 1743962 - RNA, 19 nt, Artificial Sequence
  Description of Artificial Sequence: Synthetic oligonucleotide
  Antisense strand to SEQ ID NO: 1743961
ucacaucaaucccacaccg

SEQ ID NO: 1743963 - RNA, 19 nt, Artificial Sequence
  Description of Artificial Sequence: Synthetic oligonucleotide
  Sense strand starting at position 2971 of SEQ ID NO: 1562400
gacgguugggucuagcuau

SEQ ID NO: 1743964 - RNA, 19 nt, Artificial Sequence
  Description of Artificial Sequence: Synthetic oligonucleotide
  Antisense strand to SEQ ID NO: 1743963
auagcuagacccaaccguc

SEQ ID NO: 1743965 - RNA, 19 nt, Artificial Sequence
  Description of Artificial Sequence: Synthetic oligonucleotide
  Sense strand starting at position 3015 of SEQ ID NO: 1562400
gagagaggauuuggguuua

SEQ ID NO: 1743966 - RNA, 19 nt, Artificial Sequence
  Description of Artificial Sequence: Synthetic oligonucleotide
  Antisense strand to SEQ ID NO: 1743965
uaaacccaaauccucucuc

SEQ ID NO: 1743967 - RNA, 19 nt, Artificial Sequence
  Description of Artificial Sequence: Synthetic oligonucleotide
  Sense strand starting at position 3098 of SEQ ID NO: 1562400
guuguucuaggagguugaa

SEQ ID NO: 1743968 - RNA, 19 nt, Artificial Sequence
  Description of Artificial Sequence: Synthetic oligonucleotide
  Antisense strand to SEQ ID NO: 1743967
uucaaccuccuagaacaac

SEQ ID NO: 1743969 - RNA, 19 nt, Artificial Sequence
  Description of Artificial Sequence: Synthetic oligonucleotide
  Sense strand starting at position 3101 of SEQ ID NO: 1562400
guucuaggagguugaaaga

SEQ ID NO: 1743970 - RNA, 19 nt, Artificial Sequence
  Description of Artificial Sequence: Synthetic oligonucleotide
  Antisense strand to SEQ ID NO: 1743969
ucuuucaaccuccuagaac

SEQ ID NO: 1743971 - RNA, 19 nt, Artificial Sequence
  Description of Artificial Sequence: Synthetic oligonucleotide
  Sense strand starting at position 3116 of SEQ ID NO: 1562400
aagauuucuuuaugggaag

SEQ ID NO: 1743972 - RNA, 19 nt, Artificial Sequence
  Description of Artificial Sequence: Synthetic oligonucleotide
  Antisense strand to SEQ ID NO: 1743971
cuucccauaaagaaaucuu

SEQ ID NO: 1743973 - RNA, 19 nt, Artificial Sequence
  Description of Artificial Sequence: Synthetic oligonucleotide
  Sense strand starting at position 3117 of SEQ ID NO: 1562400
agauuucuuuaugggaagu

SEQ ID NO: 1743974 - RNA, 19 nt, Artificial Sequence
  Description of Artificial Sequence: Synthetic oligonucleotide
  Antisense strand to SEQ ID NO: 1743973
acuucccauaaagaaaucu

SEQ ID NO: 1743975 - RNA, 19 nt, Artificial Sequence
  Description of Artificial Sequence: Synthetic oligonucleotide
  Sense strand starting at position 3119 of SEQ ID NO: 1562400
auuucuuuaugggaaguga

SEQ ID NO: 1743976 - RNA, 19 nt, Artificial Sequence
  Description of Artificial Sequence: Synthetic oligonucleotide
  Antisense strand to SEQ ID NO: 1743975
ucacuucccauaaagaaau

SEQ ID NO: 1743977 - RNA, 19 nt, Artificial Sequence
  Description of Artificial Sequence: Synthetic oligonucleotide
  Sense strand starting at position 3170 of SEQ ID NO: 1562400
cagccuuugugguugagga

SEQ ID NO: 1743978 - RNA, 19 nt, Artificial Sequence
  Description of Artificial Sequence: Synthetic oligonucleotide
  Antisense strand to SEQ ID NO: 1743977
uccucaaccacaaaggcug

SEQ ID NO: 1743979 - RNA, 19 nt, Artificial Sequence
  Description of Artificial Sequence: Synthetic oligonucleotide
  Sense strand starting at position 3205 of SEQ ID NO: 1562400
cucaucuagccuggaggau

SEQ ID NO: 1743980 - RNA, 19 nt, Artificial Sequence
  Description of Artificial Sequence: Synthetic oligonucleotide
  Antisense strand to SEQ ID NO: 1743979
auccuccaggcuagaugag

SEQ ID NO: 1743981 - RNA, 19 nt, Artificial Sequence
  Description of Artificial Sequence: Synthetic oligonucleotide
  Sense strand starting at position 3217 of SEQ ID NO: 1562400
ggaggauccugagauuaag

SEQ ID NO: 1743982 - RNA, 19 nt, Artificial Sequence
  Description of Artificial Sequence: Synthetic oligonucleotide
  Antisense strand to SEQ ID NO: 1743981
cuuaaucucaggauccucc

SEQ ID NO: 1743983 - RNA, 19 nt, Artificial Sequence
  Description of Artificial Sequence: Synthetic oligonucleotide
  Sense strand starting at position 3247 of SEQ ID NO: 1562400
uggcucugccuggaaaguu

SEQ ID NO: 1743984 - RNA, 19 nt, Artificial Sequence
  Description of Artificial Sequence: Synthetic oligonucleotide
  Antisense strand to SEQ ID NO: 1743983
aacuuuccaggcagagcca

SEQ ID NO: 1743985 - RNA, 19 nt, Artificial Sequence
  Description of Artificial Sequence: Synthetic oligonucleotide
  Sense strand starting at position 3365 of SEQ ID NO: 1562400
cuggucucugcguuguaaa

SEQ ID NO: 1743986 - RNA, 19 nt, Artificial Sequence
  Description of Artificial Sequence: Synthetic oligonucleotide
  Antisense strand to SEQ ID NO: 1743985
uuuacaacgcagagaccag

SEQ ID NO: 1743987 - RNA, 19 nt, Artificial Sequence
  Description of Artificial Sequence: Synthetic oligonucleotide
  Sense strand starting at position 3382 of SEQ ID NO: 1562400
aacauuacccugugaugag

SEQ ID NO: 1743988 - RNA, 19 nt, Artificial Sequence
  Description of Artificial Sequence: Synthetic oligonucleotide
  Antisense strand to SEQ ID NO: 1743987
cucaucacaggguaauguu

SEQ ID NO: 1743989 - RNA, 19 nt, Artificial Sequence
  Description of Artificial Sequence: Synthetic oligonucleotide
  Sense strand starting at position 3399 of SEQ ID NO: 1562400
agaugaaacccuggugugu

SEQ ID NO: 1743990 - RNA, 19 nt, Artificial Sequence
  Description of Artificial Sequence: Synthetic oligonucleotide
  Antisense strand to SEQ ID NO: 1743989
acacaccaggguuucaucu

SEQ ID NO: 1743991 - RNA, 19 nt, Artificial Sequence
  Description of Artificial Sequence: Synthetic oligonucleotide
  Sense strand starting at position 3476 of SEQ ID NO: 1562400
ucauccgugguguaaauau

SEQ ID NO: 1743992 - RNA, 19 nt, Artificial Sequence
  Description of Artificial Sequence: Synthetic oligonucleotide
  Antisense strand to SEQ ID NO: 1743991
auauuuacaccacggauga

SEQ ID NO: 1743993 - RNA, 19 nt, Artificial Sequence
  Description of Artificial Sequence: Synthetic oligonucleotide
  Sense strand starting at position 3512 of SEQ ID NO: 1562400
ucaagcuaugagcaguuua

SEQ ID NO: 1743994 - RNA, 19 nt, Artificial Sequence
  Description of Artificial Sequence: Synthetic oligonucleotide
  Antisense strand to SEQ ID NO: 1743993
uaaacugcucauagcuuga

SEQ ID NO: 1743995 - RNA, 19 nt, Artificial Sequence
  Description of Artificial Sequence: Synthetic oligonucleotide
  Sense strand starting at position 3517 of SEQ ID NO: 1562400
cuaugagcaguuuaacaac

SEQ ID NO: 1743996 - RNA, 19 nt, Artificial Sequence
  Description of Artificial Sequence: Synthetic oligonucleotide
  Antisense strand to SEQ ID NO: 1743995
guuguuaaacugcucauag

SEQ ID NO: 1743997 - RNA, 19 nt, Artificial Sequence
  Description of Artificial Sequence: Synthetic oligonucleotide
  Sense strand starting at position 3528 of SEQ ID NO: 1562400
uuaacaaccugcuugagaa

SEQ ID NO: 1743998 - RNA, 19 nt, Artificial Sequence
  Description of Artificial Sequence: Synthetic oligonucleotide
  Antisense strand to SEQ ID NO: 1743997
uucucaagcagguuguuaa

SEQ ID NO: 1743999 - RNA, 19 nt, Artificial Sequence
  Description of Artificial Sequence: Synthetic oligonucleotide
  Sense strand starting at position 3844 of SEQ ID NO: 1562400
gggccuguucuguacauau

SEQ ID NO: 1744000 - RNA, 19 nt, Artificial Sequence
  Description of Artificial Sequence: Synthetic oligonucleotide
  Antisense strand to SEQ ID NO: 1743999
auauguacagaacaggccc

SEQ ID NO: 1744001 - RNA, 19 nt, Artificial Sequence
  Description of Artificial Sequence: Synthetic oligonucleotide
  Sense strand starting at position 3938 of SEQ ID NO: 1562400
ggaccaggagagugugaau

SEQ ID NO: 1744002 - RNA, 19 nt, Artificial Sequence
  Description of Artificial Sequence: Synthetic oligonucleotide
  Antisense strand to SEQ ID NO: 1744001
auucacacucuccuggucc

SEQ ID NO: 1744003 - RNA, 19 nt, Artificial Sequence
  Description of Artificial Sequence: Synthetic oligonucleotide
  Sense strand starting at position 33 of SEQ ID NO: 1562401
cccgcauugugauuguaua

SEQ ID NO: 1744004 - RNA, 19 nt, Artificial Sequence
  Description of Artificial Sequence: Synthetic oligonucleotide
  Antisense strand to SEQ ID NO: 1744003
uauacaaucacaaugcggg

SEQ ID NO: 1744005 - RNA, 19 nt, Artificial Sequence
  Description of Artificial Sequence: Synthetic oligonucleotide
  Sense strand starting at position 34 of SEQ ID NO: 1562401
ccgcauugugauuguauag

SEQ ID NO: 1744006 - RNA, 19 nt, Artificial Sequence
  Description of Artificial Sequence: Synthetic oligonucleotide
  Antisense strand to SEQ ID NO: 1744005
cuauacaaucacaaugcgg

SEQ ID NO: 1744007 - RNA, 19 nt, Artificial Sequence
  Description of Artificial Sequence: Synthetic oligonucleotide
  Sense strand starting at position 44 of SEQ ID NO: 1562401
auuguauagcuguggagaa

SEQ ID NO: 1744008 - RNA, 19 nt, Artificial Sequence
  Description of Artificial Sequence: Synthetic oligonucleotide
  Antisense strand to SEQ ID NO: 1744007
uucuccacagcuauacaau

SEQ ID NO: 1744009 - RNA, 19 nt, Artificial Sequence
  Description of Artificial Sequence: Synthetic oligonucleotide
  Sense strand starting at position 48 of SEQ ID NO: 1562401
uauagcuguggagaaguaa

SEQ ID NO: 1744010 - RNA, 19 nt, Artificial Sequence
  Description of Artificial Sequence: Synthetic oligonucleotide
  Antisense strand to SEQ ID NO: 1744009
uuacuucuccacagcuaua

SEQ ID NO: 1744011 - RNA, 19 nt, Artificial Sequence
  Description of Artificial Sequence: Synthetic oligonucleotide
  Sense strand starting at position 100 of SEQ ID NO: 1562401
ggucauaccucgccagcau

SEQ ID NO: 1744012 - RNA, 19 nt, Artificial Sequence
  Description of Artificial Sequence: Synthetic oligonucleotide
  Antisense strand to SEQ ID NO: 1744011
augcuggcgagguaugacc

SEQ ID NO: 1744013 - RNA, 19 nt, Artificial Sequence
  Description of Artificial Sequence: Synthetic oligonucleotide
  Sense strand starting at position 131 of SEQ ID NO: 1562401
uuugcauuucuaggagucu

SEQ ID NO: 1744014 - RNA, 19 nt, Artificial Sequence
  Description of Artificial Sequence: Synthetic oligonucleotide
  Antisense strand to SEQ ID NO: 1744013
agacuccuagaaaugcaaa

SEQ ID NO: 1744015 - RNA, 19 nt, Artificial Sequence
  Description of Artificial Sequence: Synthetic oligonucleotide
  Sense strand starting at position 132 of SEQ ID NO: 1562401
uugcauuucuaggagucua

SEQ ID NO: 1744016 - RNA, 19 nt, Artificial Sequence
  Description of Artificial Sequence: Synthetic oligonucleotide
  Antisense strand to SEQ ID NO: 1744015
uagacuccuagaaaugcaa

SEQ ID NO: 1744017 - RNA, 19 nt, Artificial Sequence
  Description of Artificial Sequence: Synthetic oligonucleotide
  Sense strand starting at position 140 of SEQ ID NO: 1562401
cuaggagucuauucucaga

SEQ ID NO: 1744018 - RNA, 19 nt, Artificial Sequence
  Description of Artificial Sequence: Synthetic oligonucleotide
  Antisense strand to SEQ ID NO: 1744017
ucugagaauagacuccuag

SEQ ID NO: 1744019 - RNA, 19 nt, Artificial Sequence
  Description of Artificial Sequence: Synthetic oligonucleotide
  Sense strand starting at position 142 of SEQ ID NO: 1562401
aggagucuauucucagauu

SEQ ID NO: 1744020 - RNA, 19 nt, Artificial Sequence
  Description of Artificial Sequence: Synthetic oligonucleotide
  Antisense strand to SEQ ID NO: 1744019
aaucugagaauagacuccu

SEQ ID NO: 1744021 - RNA, 19 nt, Artificial Sequence
  Description of Artificial Sequence: Synthetic oligonucleotide
  Sense strand starting at position 143 of SEQ ID NO: 1562401
ggagucuauucucagauuu

SEQ ID NO: 1744022 - RNA, 19 nt, Artificial Sequence
  Description of Artificial Sequence: Synthetic oligonucleotide
  Antisense strand to SEQ ID NO: 1744021
aaaucugagaauagacucc

SEQ ID NO: 1744023 - RNA, 19 nt, Artificial Sequence
  Description of Artificial Sequence: Synthetic oligonucleotide
  Sense strand starting at position 162 of SEQ ID NO: 1562401
gcucaauccuguuugaaac

SEQ ID NO: 1744024 - RNA, 19 nt, Artificial Sequence
  Description of Artificial Sequence: Synthetic oligonucleotide
  Antisense strand to SEQ ID NO: 1744023
guuucaaacaggauugagc

SEQ ID NO: 1744025 - RNA, 19 nt, Artificial Sequence
  Description of Artificial Sequence: Synthetic oligonucleotide
  Sense strand starting at position 593 of SEQ ID NO: 1562401
gggcguuggccugagucau

SEQ ID NO: 1744026 - RNA, 19 nt, Artificial Sequence
  Description of Artificial Sequence: Synthetic oligonucleotide
  Antisense strand to SEQ ID NO: 1744025
augacucaggccaacgccc

SEQ ID NO: 1744027 - RNA, 19 nt, Artificial Sequence
  Description of Artificial Sequence: Synthetic oligonucleotide
  Sense strand starting at position 594 of SEQ ID NO: 1562401
ggcguuggccugagucaug

SEQ ID NO: 1744028 - RNA, 19 nt, Artificial Sequence
  Description of Artificial Sequence: Synthetic oligonucleotide
  Antisense strand to SEQ ID NO: 1744027
caugacucaggccaacgcc

SEQ ID NO: 1744029 - RNA, 19 nt, Artificial Sequence
  Description of Artificial Sequence: Synthetic oligonucleotide
  Sense strand starting at position 601 of SEQ ID NO: 1562401
gccugagucaugugguguc

SEQ ID NO: 1744030 - RNA, 19 nt, Artificial Sequence
  Description of Artificial Sequence: Synthetic oligonucleotide
  Antisense strand to SEQ ID NO: 1744029
gacaccacaugacucaggc

SEQ ID NO: 1744031 - RNA, 19 nt, Artificial Sequence
  Description of Artificial Sequence: Synthetic oligonucleotide
  Sense strand starting at position 608 of SEQ ID NO: 1562401
ucauguggugucuguggga

SEQ ID NO: 1744032 - RNA, 19 nt, Artificial Sequence
  Description of Artificial Sequence: Synthetic oligonucleotide
  Antisense strand to SEQ ID NO: 1744031
ucccacagacaccacauga

SEQ ID NO: 1744033 - RNA, 19 nt, Artificial Sequence
  Description of Artificial Sequence: Synthetic oligonucleotide
  Sense strand starting at position 624 of SEQ ID NO: 1562401
ggacucagccaaugaacaa

SEQ ID NO: 1744034 - RNA, 19 nt, Artificial Sequence
  Description of Artificial Sequence: Synthetic oligonucleotide
  Antisense strand to SEQ ID NO: 1744033
uuguucauuggcugagucc

SEQ ID NO: 1744035 - RNA, 19 nt, Artificial Sequence
  Description of Artificial Sequence: Synthetic oligonucleotide
  Sense strand starting at position 707 of SEQ ID NO: 1562401
ggagcuuccaggugucaca

SEQ ID NO: 1744036 - RNA, 19 nt, Artificial Sequence
  Description of Artificial Sequence: Synthetic oligonucleotide
  Antisense strand to SEQ ID NO: 1744035
ugugacaccuggaagcucc

SEQ ID NO: 1744037 - RNA, 19 nt, Artificial Sequence
  Description of Artificial Sequence: Synthetic oligonucleotide
  Sense strand starting at position 2388 of SEQ ID NO: 1562401
cguggcugugauugggaga

SEQ ID NO: 1744038 - RNA, 19 nt, Artificial Sequence
  Description of Artificial Sequence: Synthetic oligonucleotide
  Antisense strand to SEQ ID NO: 1744037
ucucccaaucacagccacg

SEQ ID NO: 1744039 - RNA, 19 nt, Artificial Sequence
  Description of Artificial Sequence: Synthetic oligonucleotide
  Sense strand starting at position 2476 of SEQ ID NO: 1562401
uucugagauccugaugucu

SEQ ID NO: 1744040 - RNA, 19 nt, Artificial Sequence
  Description of Artificial Sequence: Synthetic oligonucleotide
  Antisense strand to SEQ ID NO: 1744039
agacaucaggaucucagaa

SEQ ID NO: 1744041 - RNA, 19 nt, Artificial Sequence
  Description of Artificial Sequence: Synthetic oligonucleotide
  Sense strand starting at position 2653 of SEQ ID NO: 1562401
gagaguggugggugcagau

SEQ ID NO: 1744042 - RNA, 19 nt, Artificial Sequence
  Description of Artificial Sequence: Synthetic oligonucleotide
  Antisense strand to SEQ ID NO: 1744041
aucugcacccaccacucuc

SEQ ID NO: 1744043 - RNA, 19 nt, Artificial Sequence
  Description of Artificial Sequence: Synthetic oligonucleotide
  Sense strand starting at position 3110 of SEQ ID NO: 1562401
agaaaugagacgugaaccu

SEQ ID NO: 1744044 - RNA, 19 nt, Artificial Sequence
  Description of Artificial Sequence: Synthetic oligonucleotide
  Antisense strand to SEQ ID NO: 1744043
agguucacgucucauuucu

SEQ ID NO: 1744045 - RNA, 19 nt, Artificial Sequence
  Description of Artificial Sequence: Synthetic oligonucleotide
  Sense strand starting at position 3119 of SEQ ID NO: 1562401
acgugaaccucuguuauuc

SEQ ID NO: 1744046 - RNA, 19 nt, Artificial Sequence
  Description of Artificial Sequence: Synthetic oligonucleotide
  Antisense strand to SEQ ID NO: 1744045
gaauaacagagguucacgu

SEQ ID NO: 1744047 - RNA, 19 nt, Artificial Sequence
  Description of Artificial Sequence: Synthetic oligonucleotide
  Sense strand starting at position 3129 of SEQ ID NO: 1562401
cuguuauucgcaggugaca

SEQ ID NO: 1744048 - RNA, 19 nt, Artificial Sequence
  Description of Artificial Sequence: Synthetic oligonucleotide
  Antisense strand to SEQ ID NO: 1744047
ugucaccugcgaauaacag

SEQ ID NO: 1744049 - RNA, 19 nt, Artificial Sequence
  Description of Artificial Sequence: Synthetic oligonucleotide
  Sense strand starting at position 3131 of SEQ ID NO: 1562401
guuauucgcaggugacaca

SEQ ID NO: 1744050 - RNA, 19 nt, Artificial Sequence
  Description of Artificial Sequence: Synthetic oligonucleotide
  Antisense strand to SEQ ID NO: 1744049
ugugucaccugcgaauaac

SEQ ID NO: 1744051 - RNA, 19 nt, Artificial Sequence
  Description of Artificial Sequence: Synthetic oligonucleotide
  Sense strand starting at position 3264 of SEQ ID NO: 1562401
cgccauugugauggaaauu

SEQ ID NO: 1744052 - RNA, 19 nt, Artificial Sequence
  Description of Artificial Sequence: Synthetic oligonucleotide
  Antisense strand to SEQ ID NO: 1744051
aauuuccaucacaauggcg

SEQ ID NO: 1744053 - RNA, 19 nt, Artificial Sequence
  Description of Artificial Sequence: Synthetic oligonucleotide
  Sense strand starting at position 3265 of SEQ ID NO: 1562401
gccauugugauggaaauuc

SEQ ID NO: 1744054 - RNA, 19 nt, Artificial Sequence
  Description of Artificial Sequence: Synthetic oligonucleotide
  Antisense strand to SEQ ID NO: 1744053
gaauuuccaucacaauggc

SEQ ID NO: 1744055 - RNA, 19 nt, Artificial Sequence
  Description of Artificial Sequence: Synthetic oligonucleotide
  Sense strand starting at position 3366 of SEQ ID NO: 1562401
gggugaugucugugaagac

SEQ ID NO: 1744056 - RNA, 19 nt, Artificial Sequence
  Description of Artificial Sequence: Synthetic oligonucleotide
  Antisense strand to SEQ ID NO: 1744055
gucuucacagacaucaccc

SEQ ID NO: 1744057 - RNA, 19 nt, Artificial Sequence
  Description of Artificial Sequence: Synthetic oligonucleotide
  Sense strand starting at position 3367 of SEQ ID NO: 1562401
ggugaugucugugaagacu

SEQ ID NO: 1744058 - RNA, 19 nt, Artificial Sequence
  Description of Artificial Sequence: Synthetic oligonucleotide
  Antisense strand to SEQ ID NO: 1744057
agucuucacagacaucacc

SEQ ID NO: 1744059 - RNA, 19 nt, Artificial Sequence
  Description of Artificial Sequence: Synthetic oligonucleotide
  Sense strand starting at position 3382 of SEQ ID NO: 1562401
gacucagcucccgacaaga

SEQ ID NO: 1744060 - RNA, 19 nt, Artificial Sequence
  Description of Artificial Sequence: Synthetic oligonucleotide
  Antisense strand to SEQ ID NO: 1744059
ucuugucgggagcugaguc

SEQ ID NO: 1744061 - RNA, 19 nt, Artificial Sequence
  Description of Artificial Sequence: Synthetic oligonucleotide
  Sense strand starting at position 3543 of SEQ ID NO: 1562401
uagugacagcuucggugau

SEQ ID NO: 1744062 - RNA, 19 nt, Artificial Sequence
  Description of Artificial Sequence: Synthetic oligonucleotide
  Antisense strand to SEQ ID NO: 1744061
aucaccgaagcugucacua

SEQ ID NO: 1744063 - RNA, 19 nt, Artificial Sequence
  Description of Artificial Sequence: Synthetic oligonucleotide
  Sense strand starting at position 3547 of SEQ ID NO: 1562401
gacagcuucggugaucuua

SEQ ID NO: 1744064 - RNA, 19 nt, Artificial Sequence
  Description of Artificial Sequence: Synthetic oligonucleotide
  Antisense strand to SEQ ID NO: 1744063
uaagaucaccgaagcuguc

SEQ ID NO: 1744065 - RNA, 19 nt, Artificial Sequence
  Description of Artificial Sequence: Synthetic oligonucleotide
  Sense strand starting at position 3549 of SEQ ID NO: 1562401
cagcuucggugaucuuaga

SEQ ID NO: 1744066 - RNA, 19 nt, Artificial Sequence
  Description of Artificial Sequence: Synthetic oligonucleotide
  Antisense strand to SEQ ID NO: 1744065
ucuaagaucaccgaagcug

SEQ ID NO: 1744067 - RNA, 19 nt, Artificial Sequence
  Description of Artificial Sequence: Synthetic oligonucleotide
  Sense strand starting at position 3673 of SEQ ID NO: 1562401
ggcauuaacuucuugucga

SEQ ID NO: 1744068 - RNA, 19 nt, Artificial Sequence
  Description of Artificial Sequence: Synthetic oligonucleotide
  Antisense strand to SEQ ID NO: 1744067
ucgacaagaaguuaaugcc

SEQ ID NO: 1744069 - RNA, 19 nt, Artificial Sequence
  Description of Artificial Sequence: Synthetic oligonucleotide
  Sense strand starting at position 3676 of SEQ ID NO: 1562401
auuaacuucuugucgaagu

SEQ ID NO: 1744070 - RNA, 19 nt, Artificial Sequence
  Description of Artificial Sequence: Synthetic oligonucleotide
  Antisense strand to SEQ ID NO: 1744069
acuucgacaagaaguuaau

SEQ ID NO: 1744071 - RNA, 19 nt, Artificial Sequence
  Description of Artificial Sequence: Synthetic oligonucleotide
  Sense strand starting at position 3678 of SEQ ID NO: 1562401
uaacuucuugucgaaguua

SEQ ID NO: 1744072 - RNA, 19 nt, Artificial Sequence
  Description of Artificial Sequence: Synthetic oligonucleotide
  Antisense strand to SEQ ID NO: 1744071
uaacuucgacaagaaguua

SEQ ID NO: 1744073 - RNA, 19 nt, Artificial Sequence
  Description of Artificial Sequence: Synthetic oligonucleotide
  Sense strand starting at position 3689 of SEQ ID NO: 1562401
cgaaguuacuauggacaga

SEQ ID NO: 1744074 - RNA, 19 nt, Artificial Sequence
  Description of Artificial Sequence: Synthetic oligonucleotide
  Antisense strand to SEQ ID NO: 1744073
ucuguccauaguaacuucg

SEQ ID NO: 1744075 - RNA, 19 nt, Artificial Sequence
  Description of Artificial Sequence: Synthetic oligonucleotide
  Sense strand starting at position 3709 of SEQ ID NO: 1562401
gcggaagcuucagcagaga

SEQ ID NO: 1744076 - RNA, 19 nt, Artificial Sequence
  Description of Artificial Sequence: Synthetic oligonucleotide
  Antisense strand to SEQ ID NO: 1744075
ucucugcugaagcuuccgc

SEQ ID NO: 1744077 - RNA, 19 nt, Artificial Sequence
  Description of Artificial Sequence: Synthetic oligonucleotide
  Sense strand starting at position 3720 of SEQ ID NO: 1562401
agcagagagguugagcaau

SEQ ID NO: 1744078 - RNA, 19 nt, Artificial Sequence
  Description of Artificial Sequence: Synthetic oligonucleotide
  Antisense strand to SEQ ID NO: 1744077
auugcucaaccucucugcu

SEQ ID NO: 1744079 - RNA, 19 nt, Artificial Sequence
  Description of Artificial Sequence: Synthetic oligonucleotide
  Sense strand starting at position 3728 of SEQ ID NO: 1562401
gguugagcaaucugcucaa

SEQ ID NO: 1744080 - RNA, 19 nt, Artificial Sequence
  Description of Artificial Sequence: Synthetic oligonucleotide
  Antisense strand to SEQ ID NO: 1744079
uugagcagauugcucaacc

SEQ ID NO: 1744081 - RNA, 19 nt, Artificial Sequence
  Description of Artificial Sequence: Synthetic oligonucleotide
  Sense strand starting at position 3731 of SEQ ID NO: 1562401
ugagcaaucugcucaaagc

SEQ ID NO: 1744082 - RNA, 19 nt, Artificial Sequence
  Description of Artificial Sequence: Synthetic oligonucleotide
  Antisense strand to SEQ ID NO: 1744081
gcuuugagcagauugcuca

SEQ ID NO: 1744083 - RNA, 19 nt, Artificial Sequence
  Description of Artificial Sequence: Synthetic oligonucleotide
  Sense strand starting at position 26 of SEQ ID NO: 1562402
uaggaagaaucuuccuagu

SEQ ID NO: 1744084 - RNA, 19 nt, Artificial Sequence
  Description of Artificial Sequence: Synthetic oligonucleotide
  Antisense strand to SEQ ID NO: 1744083
acuaggaagauucuuccua

SEQ ID NO: 1744085 - RNA, 19 nt, Artificial Sequence
  Description of Artificial Sequence: Synthetic oligonucleotide
  Sense strand starting at position 28 of SEQ ID NO: 1562402
ggaagaaucuuccuaguug

SEQ ID NO: 1744086 - RNA, 19 nt, Artificial Sequence
  Description of Artificial Sequence: Synthetic oligonucleotide
  Antisense strand to SEQ ID NO: 1744085
caacuaggaagauucuucc

SEQ ID NO: 1744087 - RNA, 19 nt, Artificial Sequence
  Description of Artificial Sequence: Synthetic oligonucleotide
  Sense strand starting at position 242 of SEQ ID NO: 1562402
gcauguacuucccuaggga

SEQ ID NO: 1744088 - RNA, 19 nt, Artificial Sequence
  Description of Artificial Sequence: Synthetic oligonucleotide
  Antisense strand to SEQ ID NO: 1744087
ucccuagggaaguacaugc

SEQ ID NO: 1744089 - RNA, 19 nt, Artificial Sequence
  Description of Artificial Sequence: Synthetic oligonucleotide
  Sense strand starting at position 295 of SEQ ID NO: 1562402
gcgcuaccauaauuaugaa

SEQ ID NO: 1744090 - RNA, 19 nt, Artificial Sequence
  Description of Artificial Sequence: Synthetic oligonucleotide
  Antisense strand to SEQ ID NO: 1744089
uucauaauuaugguagcgc

SEQ ID NO: 1744091 - RNA, 19 nt, Artificial Sequence
  Description of Artificial Sequence: Synthetic oligonucleotide
  Sense strand starting at position 375 of SEQ ID NO: 1562402
cucauuccuguuggugaca

SEQ ID NO: 1744092 - RNA, 19 nt, Artificial Sequence
  Description of Artificial Sequence: Synthetic oligonucleotide
  Antisense strand to SEQ ID NO: 1744091
ugucaccaacaggaaugag

SEQ ID NO: 1744093 - RNA, 19 nt, Artificial Sequence
  Description of Artificial Sequence: Synthetic oligonucleotide
  Sense strand starting at position 429 of SEQ ID NO: 1562402
augagaggguuccucacau

SEQ ID NO: 1744094 - RNA, 19 nt, Artificial Sequence
  Description of Artificial Sequence: Synthetic oligonucleotide
  Antisense strand to SEQ ID NO: 1744093
augugaggaacccucucau

SEQ ID NO: 1744095 - RNA, 19 nt, Artificial Sequence
  Description of Artificial Sequence: Synthetic oligonucleotide
  Sense strand starting at position 508 of SEQ ID NO: 1562402
ggacaaaggugguuacuca

SEQ ID NO: 1744096 - RNA, 19 nt, Artificial Sequence
  Description of Artificial Sequence: Synthetic oligonucleotide
  Antisense strand to SEQ ID NO: 1744095
ugaguaaccaccuuugucc

SEQ ID NO: 1744097 - RNA, 19 nt, Artificial Sequence
  Description of Artificial Sequence: Synthetic oligonucleotide
  Sense strand starting at position 566 of SEQ ID NO: 1562402
gcgagaacugguggaaaug

SEQ ID NO: 1744098 - RNA, 19 nt, Artificial Sequence
  Description of Artificial Sequence: Synthetic oligonucleotide
  Antisense strand to SEQ ID NO: 1744097
cauuuccaccaguucucgc

SEQ ID NO: 1744099 - RNA, 19 nt, Artificial Sequence
  Description of Artificial Sequence: Synthetic oligonucleotide
  Sense strand starting at position 667 of SEQ ID NO: 1562402
aaaugucuuccaggaauga

SEQ ID NO: 1744100 - RNA, 19 nt, Artificial Sequence
  Description of Artificial Sequence: Synthetic oligonucleotide
  Antisense strand to SEQ ID NO: 1744099
ucauuccuggaagacauuu

SEQ ID NO: 1744101 - RNA, 19 nt, Artificial Sequence
  Description of Artificial Sequence: Synthetic oligonucleotide
  Sense strand starting at position 979 of SEQ ID NO: 1562402
cguugaaguucuucccaca

SEQ ID NO: 1744102 - RNA, 19 nt, Artificial Sequence
  Description of Artificial Sequence: Synthetic oligonucleotide
  Antisense strand to SEQ ID NO: 1744101
ugugggaagaacuucaacg

SEQ ID NO: 1744103 - RNA, 19 nt, Artificial Sequence
  Description of Artificial Sequence: Synthetic oligonucleotide
  Sense strand starting at position 998 of SEQ ID NO: 1562402
ggguuugccagauaugcaa

SEQ ID NO: 1744104 - RNA, 19 nt, Artificial Sequence
  Description of Artificial Sequence: Synthetic oligonucleotide
  Antisense strand to SEQ ID NO: 1744103
uugcauaucuggcaaaccc

SEQ ID NO: 1744105 - RNA, 19 nt, Artificial Sequence
  Description of Artificial Sequence: Synthetic oligonucleotide
  Sense strand starting at position 1032 of SEQ ID NO: 1562402
gggcacauuggugacuuua

SEQ ID NO: 1744106 - RNA, 19 nt, Artificial Sequence
  Description of Artificial Sequence: Synthetic oligonucleotide
  Antisense strand to SEQ ID NO: 1744105
uaaagucaccaaugugccc

SEQ ID NO: 1744107 - RNA, 19 nt, Artificial Sequence
  Description of Artificial Sequence: Synthetic oligonucleotide
  Sense strand starting at position 1034 of SEQ ID NO: 1562402
gcacauuggugacuuuauu

SEQ ID NO: 1744108 - RNA, 19 nt, Artificial Sequence
  Description of Artificial Sequence: Synthetic oligonucleotide
  Antisense strand to SEQ ID NO: 1744107
aauaaagucaccaaugugc

SEQ ID NO: 1744109 - RNA, 19 nt, Artificial Sequence
  Description of Artificial Sequence: Synthetic oligonucleotide
  Sense strand starting at position 1044 of SEQ ID NO: 1562402
gacuuuauuuguugacaga

SEQ ID NO: 1744110 - RNA, 19 nt, Artificial Sequence
  Description of Artificial Sequence: Synthetic oligonucleotide
  Antisense strand to SEQ ID NO: 1744109
ucugucaacaaauaaaguc

SEQ ID NO: 1744111 - RNA, 19 nt, Artificial Sequence
  Description of Artificial Sequence: Synthetic oligonucleotide
  Sense strand starting at position 1246 of SEQ ID NO: 1562402
cagagauggcccuggaaca

SEQ ID NO: 1744112 - RNA, 19 nt, Artificial Sequence
  Description of Artificial Sequence: Synthetic oligonucleotide
  Antisense strand to SEQ ID NO: 1744111
uguuccagggccaucucug

SEQ ID NO: 1744113 - RNA, 19 nt, Artificial Sequence
  Description of Artificial Sequence: Synthetic oligonucleotide
  Sense strand starting at position 1299 of SEQ ID NO: 1562402
ggacuucuggccugaggag

SEQ ID NO: 1744114 - RNA, 19 nt, Artificial Sequence
  Description of Artificial Sequence: Synthetic oligonucleotide
  Antisense strand to SEQ ID NO: 1744113
cuccucaggccagaagucc

SEQ ID NO: 1744115 - RNA, 19 nt, Artificial Sequence
  Description of Artificial Sequence: Synthetic oligonucleotide
  Sense strand starting at position 2159 of SEQ ID NO: 1562402
ugguucauuguuuguggau

SEQ ID NO: 1744116 - RNA, 19 nt, Artificial Sequence
  Description of Artificial Sequence: Synthetic oligonucleotide
  Antisense strand to SEQ ID NO: 1744115
auccacaaacaaugaacca

SEQ ID NO: 1744117 - RNA, 19 nt, Artificial Sequence
  Description of Artificial Sequence: Synthetic oligonucleotide
  Sense strand starting at position 2160 of SEQ ID NO: 1562402
gguucauuguuuguggaug

SEQ ID NO: 1744118 - RNA, 19 nt, Artificial Sequence
  Description of Artificial Sequence: Synthetic oligonucleotide
  Antisense strand to SEQ ID NO: 1744117
cauccacaaacaaugaacc

SEQ ID NO: 1744119 - RNA, 19 nt, Artificial Sequence
  Description of Artificial Sequence: Synthetic oligonucleotide
  Sense strand starting at position 2224 of SEQ ID NO: 1562402
ugggcuuguccacagagau

SEQ ID NO: 1744120 - RNA, 19 nt, Artificial Sequence
  Description of Artificial Sequence: Synthetic oligonucleotide
  Antisense strand to SEQ ID NO: 1744119
aucucuguggacaagccca

SEQ ID NO: 1744121 - RNA, 19 nt, Artificial Sequence
  Description of Artificial Sequence: Synthetic oligonucleotide
  Sense strand starting at position 2238 of SEQ ID NO: 1562402
gagauaaacuaguagaaau

SEQ ID NO: 1744122 - RNA, 19 nt, Artificial Sequence
  Description of Artificial Sequence: Synthetic oligonucleotide
  Antisense strand to SEQ ID NO: 1744121
auuucuacuaguuuaucuc

SEQ ID NO: 1744123 - RNA, 19 nt, Artificial Sequence
  Description of Artificial Sequence: Synthetic oligonucleotide
  Sense strand starting at position 2299 of SEQ ID NO: 1562402
gcaguuaggagauauucug

SEQ ID NO: 1744124 - RNA, 19 nt, Artificial Sequence
  Description of Artificial Sequence: Synthetic oligonucleotide
  Antisense strand to SEQ ID NO: 1744123
cagaauaucuccuaacugc

SEQ ID NO: 1744125 - RNA, 19 nt, Artificial Sequence
  Description of Artificial Sequence: Synthetic oligonucleotide
  Sense strand starting at position 2334 of SEQ ID NO: 1562402
gcuccaucccaggaggagu

SEQ ID NO: 1744126 - RNA, 19 nt, Artificial Sequence
  Description of Artificial Sequence: Synthetic oligonucleotide
  Antisense strand to SEQ ID NO: 1744125
acuccuccugggauggagc

SEQ ID NO: 1744127 - RNA, 19 nt, Artificial Sequence
  Description of Artificial Sequence: Synthetic oligonucleotide
  Sense strand starting at position 2409 of SEQ ID NO: 1562402
guuucugggccuugaggaa

SEQ ID NO: 1744128 - RNA, 19 nt, Artificial Sequence
  Description of Artificial Sequence: Synthetic oligonucleotide
  Antisense strand to SEQ ID NO: 1744127
uuccucaaggcccagaaac

SEQ ID NO: 1744129 - RNA, 19 nt, Artificial Sequence
  Description of Artificial Sequence: Synthetic oligonucleotide
  Sense strand starting at position 2447 of SEQ ID NO: 1562402
uguggacaaguuugaagau

SEQ ID NO: 1744130 - RNA, 19 nt, Artificial Sequence
  Description of Artificial Sequence: Synthetic oligonucleotide
  Antisense strand to SEQ ID NO: 1744129
aucuucaaacuuguccaca

SEQ ID NO: 1744131 - RNA, 19 nt, Artificial Sequence
  Description of Artificial Sequence: Synthetic oligonucleotide
  Sense strand starting at position 2569 of SEQ ID NO: 1562402
gcaggugugagggaauagu

SEQ ID NO: 1744132 - RNA, 19 nt, Artificial Sequence
  Description of Artificial Sequence: Synthetic oligonucleotide
  Antisense strand to SEQ ID NO: 1744131
acuauucccucacaccugc

SEQ ID NO: 1744133 - RNA, 19 nt, Artificial Sequence
  Description of Artificial Sequence: Synthetic oligonucleotide
  Sense strand starting at position 2584 of SEQ ID NO: 1562402
uagugucuuccugggcaga

SEQ ID NO: 1744134 - RNA, 19 nt, Artificial Sequence
  Description of Artificial Sequence: Synthetic oligonucleotide
  Antisense strand to SEQ ID NO: 1744133
ucugcccaggaagacacua

SEQ ID NO: 1744135 - RNA, 19 nt, Artificial Sequence
  Description of Artificial Sequence: Synthetic oligonucleotide
  Sense strand starting at position 2586 of SEQ ID NO: 1562402
gugucuuccugggcagaga

SEQ ID NO: 1744136 - RNA, 19 nt, Artificial Sequence
  Description of Artificial Sequence: Synthetic oligonucleotide
  Antisense strand to SEQ ID NO: 1744135
ucucugcccaggaagacac

SEQ ID NO: 1744137 - RNA, 19 nt, Artificial Sequence
  Description of Artificial Sequence: Synthetic oligonucleotide
  Sense strand starting at position 2587 of SEQ ID NO: 1562402
ugucuuccugggcagagau

SEQ ID NO: 1744138 - RNA, 19 nt, Artificial Sequence
  Description of Artificial Sequence: Synthetic oligonucleotide
  Antisense strand to SEQ ID NO: 1744137
aucucugcccaggaagaca

SEQ ID NO: 1744139 - RNA, 19 nt, Artificial Sequence
  Description of Artificial Sequence: Synthetic oligonucleotide
  Sense strand starting at position 2599 of SEQ ID NO: 1562402
cagagauuggcucgcagag

SEQ ID NO: 1744140 - RNA, 19 nt, Artificial Sequence
  Description of Artificial Sequence: Synthetic oligonucleotide
  Antisense strand to SEQ ID NO: 1744139
cucugcgagccaaucucug

SEQ ID NO: 1744141 - RNA, 19 nt, Artificial Sequence
  Description of Artificial Sequence: Synthetic oligonucleotide
  Sense strand starting at position 2819 of SEQ ID NO: 1562402
gccagaaagucaucagaau

SEQ ID NO: 1744142 - RNA, 19 nt, Artificial Sequence
  Description of Artificial Sequence: Synthetic oligonucleotide
  Antisense strand to SEQ ID NO: 1744141
auucugaugacuuucuggc

SEQ ID NO: 1744143 - RNA, 19 nt, Artificial Sequence
  Description of Artificial Sequence: Synthetic oligonucleotide
  Sense strand starting at position 2827 of SEQ ID NO: 1562402
gucaucagaauguauuagu

SEQ ID NO: 1744144 - RNA, 19 nt, Artificial Sequence
  Description of Artificial Sequence: Synthetic oligonucleotide
  Antisense strand to SEQ ID NO: 1744143
acuaauacauucugaugac

SEQ ID NO: 1744145 - RNA, 19 nt, Artificial Sequence
  Description of Artificial Sequence: Synthetic oligonucleotide
  Sense strand starting at position 2856 of SEQ ID NO: 1562402
gcuccuggacauugucaua

SEQ ID NO: 1744146 - RNA, 19 nt, Artificial Sequence
  Description of Artificial Sequence: Synthetic oligonucleotide
  Antisense strand to SEQ ID NO: 1744145
uaugacaauguccaggagc

SEQ ID NO: 1744147 - RNA, 19 nt, Artificial Sequence
  Description of Artificial Sequence: Synthetic oligonucleotide
  Sense strand starting at position 2925 of SEQ ID NO: 1562402
ccuauacaccuguguguau

SEQ ID NO: 1744148 - RNA, 19 nt, Artificial Sequence
  Description of Artificial Sequence: Synthetic oligonucleotide
  Antisense strand to SEQ ID NO: 1744147
auacacacagguguauagg

SEQ ID NO: 1744149 - RNA, 19 nt, Artificial Sequence
  Description of Artificial Sequence: Synthetic oligonucleotide
  Sense strand starting at position 2967 of SEQ ID NO: 1562402
cauaccugugcgcuaguaa

SEQ ID NO: 1744150 - RNA, 19 nt, Artificial Sequence
  Description of Artificial Sequence: Synthetic oligonucleotide
  Antisense strand to SEQ ID NO: 1744149
uuacuagcgcacagguaug

SEQ ID NO: 1744151 - RNA, 19 nt, Artificial Sequence
  Description of Artificial Sequence: Synthetic oligonucleotide
  Sense strand starting at position 3021 of SEQ ID NO: 1562402
ucacucuaugaucgcuauu

SEQ ID NO: 1744152 - RNA, 19 nt, Artificial Sequence
  Description of Artificial Sequence: Synthetic oligonucleotide
  Antisense strand to SEQ ID NO: 1744151
aauagcgaucauagaguga

SEQ ID NO: 1744153 - RNA, 19 nt, Artificial Sequence
  Description of Artificial Sequence: Synthetic oligonucleotide
  Sense strand starting at position 3159 of SEQ ID NO: 1562402
guuugaagccucugaccuu

SEQ ID NO: 1744154 - RNA, 19 nt, Artificial Sequence
  Description of Artificial Sequence: Synthetic oligonucleotide
  Antisense strand to SEQ ID NO: 1744153
aaggucagaggcuucaaac

SEQ ID NO: 1744155 - RNA, 19 nt, Artificial Sequence
  Description of Artificial Sequence: Synthetic oligonucleotide
  Sense strand starting at position 3166 of SEQ ID NO: 1562402
gccucugaccuuugaugag

SEQ ID NO: 1744156 - RNA, 19 nt, Artificial Sequence
  Description of Artificial Sequence: Synthetic oligonucleotide
  Antisense strand to SEQ ID NO: 1744155
cucaucaaaggucagaggc

SEQ ID NO: 1744157 - RNA, 19 nt, Artificial Sequence
  Description of Artificial Sequence: Synthetic oligonucleotide
  Sense strand starting at position 3175 of SEQ ID NO: 1562402
cuuugaugaguauggcuaa

SEQ ID NO: 1744158 - RNA, 19 nt, Artificial Sequence
  Description of Artificial Sequence: Synthetic oligonucleotide
  Antisense strand to SEQ ID NO: 1744157
uuagccauacucaucaaag

SEQ ID NO: 1744159 - RNA, 19 nt, Artificial Sequence
  Description of Artificial Sequence: Synthetic oligonucleotide
  Sense strand starting at position 3194 of SEQ ID NO: 1562402
gggcucuguuggaggacua

SEQ ID NO: 1744160 - RNA, 19 nt, Artificial Sequence
  Description of Artificial Sequence: Synthetic oligonucleotide
  Antisense strand to SEQ ID NO: 1744159
uaguccuccaacagagccc

SEQ ID NO: 1744161 - RNA, 19 nt, Artificial Sequence
  Description of Artificial Sequence: Synthetic oligonucleotide
  Sense strand starting at position 3291 of SEQ ID NO: 1562402
agagucaugacccgucagu

SEQ ID NO: 1744162 - RNA, 19 nt, Artificial Sequence
  Description of Artificial Sequence: Synthetic oligonucleotide
  Antisense strand to SEQ ID NO: 1744161
acugacgggucaugacucu

SEQ ID NO: 1744163 - RNA, 19 nt, Artificial Sequence
  Description of Artificial Sequence: Synthetic oligonucleotide
  Sense strand starting at position 40 of SEQ ID NO: 1562403
caagcauggcgcuagaaga

SEQ ID NO: 1744164 - RNA, 19 nt, Artificial Sequence
  Description of Artificial Sequence: Synthetic oligonucleotide
  Antisense strand to SEQ ID NO: 1744163
ucuucuagcgccaugcuug

SEQ ID NO: 1744165 - RNA, 19 nt, Artificial Sequence
  Description of Artificial Sequence: Synthetic oligonucleotide
  Sense strand starting at position 50 of SEQ ID NO: 1562403
gcuagaagacaccauucuu

SEQ ID NO: 1744166 - RNA, 19 nt, Artificial Sequence
  Description of Artificial Sequence: Synthetic oligonucleotide
  Antisense strand to SEQ ID NO: 1744165
aagaauggugucuucuagc

SEQ ID NO: 1744167 - RNA, 19 nt, Artificial Sequence
  Description of Artificial Sequence: Synthetic oligonucleotide
  Sense strand starting at position 74 of SEQ ID NO: 1562403
acaaguauugugcagcaga

SEQ ID NO: 1744168 - RNA, 19 nt, Artificial Sequence
  Description of Artificial Sequence: Synthetic oligonucleotide
  Antisense strand to SEQ ID NO: 1744167
ucugcugcacaauacuugu

SEQ ID NO: 1744169 - RNA, 19 nt, Artificial Sequence
  Description of Artificial Sequence: Synthetic oligonucleotide
  Sense strand starting at position 288 of SEQ ID NO: 1562403
gaggguugugcacaaagga

SEQ ID NO: 1744170 - RNA, 19 nt, Artificial Sequence
  Description of Artificial Sequence: Synthetic oligonucleotide
  Antisense strand to SEQ ID NO: 1744169
uccuuugugcacaacccuc

SEQ ID NO: 1744171 - RNA, 19 nt, Artificial Sequence
  Description of Artificial Sequence: Synthetic oligonucleotide
  Sense strand starting at position 2033 of SEQ ID NO: 1562403
gagugaggugcucggguuu

SEQ ID NO: 1744172 - RNA, 19 nt, Artificial Sequence
  Description of Artificial Sequence: Synthetic oligonucleotide
  Antisense strand to SEQ ID NO: 1744171
aaacccgagcaccucacuc

SEQ ID NO: 1744173 - RNA, 19 nt, Artificial Sequence
  Description of Artificial Sequence: Synthetic oligonucleotide
  Sense strand starting at position 2075 of SEQ ID NO: 1562403
ggugcauguuguccagaca

SEQ ID NO: 1744174 - RNA, 19 nt, Artificial Sequence
  Description of Artificial Sequence: Synthetic oligonucleotide
  Antisense strand to SEQ ID NO: 1744173
ugucuggacaacaugcacc

SEQ ID NO: 1744175 - RNA, 19 nt, Artificial Sequence
  Description of Artificial Sequence: Synthetic oligonucleotide
  Sense strand starting at position 2078 of SEQ ID NO: 1562403
gcauguuguccagacagga

SEQ ID NO: 1744176 - RNA, 19 nt, Artificial Sequence
  Description of Artificial Sequence: Synthetic oligonucleotide
  Antisense strand to SEQ ID NO: 1744175
uccugucuggacaacaugc

SEQ ID NO: 1744177 - RNA, 19 nt, Artificial Sequence
  Description of Artificial Sequence: Synthetic oligonucleotide
  Sense strand starting at position 2132 of SEQ ID NO: 1562403
cagccagcuccaggagaau

SEQ ID NO: 1744178 - RNA, 19 nt, Artificial Sequence
  Description of Artificial Sequence: Synthetic oligonucleotide
  Antisense strand to SEQ ID NO: 1744177
auucuccuggagcuggcug

SEQ ID NO: 1744179 - RNA, 19 nt, Artificial Sequence
  Description of Artificial Sequence: Synthetic oligonucleotide
  Sense strand starting at position 2167 of SEQ ID NO: 1562403
uuuguuucccaagagcugu

SEQ ID NO: 1744180 - RNA, 19 nt, Artificial Sequence
  Description of Artificial Sequence: Synthetic oligonucleotide
  Antisense strand to SEQ ID NO: 1744179
acagcucuugggaaacaaa

SEQ ID NO: 1744181 - RNA, 19 nt, Artificial Sequence
  Description of Artificial Sequence: Synthetic oligonucleotide
  Sense strand starting at position 2177 of SEQ ID NO: 1562403
aagagcuguugcucaguuu

SEQ ID NO: 1744182 - RNA, 19 nt, Artificial Sequence
  Description of Artificial Sequence: Synthetic oligonucleotide
  Antisense strand to SEQ ID NO: 1744181
aaacugagcaacagcucuu

SEQ ID NO: 1744183 - RNA, 19 nt, Artificial Sequence
  Description of Artificial Sequence: Synthetic oligonucleotide
  Sense strand starting at position 2178 of SEQ ID NO: 1562403
agagcuguugcucaguuua

SEQ ID NO: 1744184 - RNA, 19 nt, Artificial Sequence
  Description of Artificial Sequence: Synthetic oligonucleotide
  Antisense strand to SEQ ID NO: 1744183
uaaacugagcaacagcucu

SEQ ID NO: 1744185 - RNA, 19 nt, Artificial Sequence
  Description of Artificial Sequence: Synthetic oligonucleotide
  Sense strand starting at position 2180 of SEQ ID NO: 1562403
agcuguugcucaguuuaca

SEQ ID NO: 1744186 - RNA, 19 nt, Artificial Sequence
  Description of Artificial Sequence: Synthetic oligonucleotide
  Antisense strand to SEQ ID NO: 1744185
uguaaacugagcaacagcu

SEQ ID NO: 1744187 - RNA, 19 nt, Artificial Sequence
  Description of Artificial Sequence: Synthetic oligonucleotide
  Sense strand starting at position 2497 of SEQ ID NO: 1562403
gugccucugugauugaaag

SEQ ID NO: 1744188 - RNA, 19 nt, Artificial Sequence
  Description of Artificial Sequence: Synthetic oligonucleotide
  Antisense strand to SEQ ID NO: 1744187
cuuucaaucacagaggcac

SEQ ID NO: 1744189 - RNA, 19 nt, Artificial Sequence
  Description of Artificial Sequence: Synthetic oligonucleotide
  Sense strand starting at position 2499 of SEQ ID NO: 1562403
gccucugugauugaaagcu

SEQ ID NO: 1744190 - RNA, 19 nt, Artificial Sequence
  Description of Artificial Sequence: Synthetic oligonucleotide
  Antisense strand to SEQ ID NO: 1744189
agcuuucaaucacagaggc

SEQ ID NO: 1744191 - RNA, 19 nt, Artificial Sequence
  Description of Artificial Sequence: Synthetic oligonucleotide
  Sense strand starting at position 2522 of SEQ ID NO: 1562403
gagagagguuuguuugggu

SEQ ID NO: 1744192 - RNA, 19 nt, Artificial Sequence
  Description of Artificial Sequence: Synthetic oligonucleotide
  Antisense strand to SEQ ID NO: 1744191
acccaaacaaaccucucuc

SEQ ID NO: 1744193 - RNA, 19 nt, Artificial Sequence
  Description of Artificial Sequence: Synthetic oligonucleotide
  Sense strand starting at position 2527 of SEQ ID NO: 1562403
agguuuguuuggguucuaa

SEQ ID NO: 1744194 - RNA, 19 nt, Artificial Sequence
  Description of Artificial Sequence: Synthetic oligonucleotide
  Antisense strand to SEQ ID NO: 1744193
uuagaacccaaacaaaccu

SEQ ID NO: 1744195 - RNA, 19 nt, Artificial Sequence
  Description of Artificial Sequence: Synthetic oligonucleotide
  Sense strand starting at position 2547 of SEQ ID NO: 1562403
uaaagauaaugugagucau

SEQ ID NO: 1744196 - RNA, 19 nt, Artificial Sequence
  Description of Artificial Sequence: Synthetic oligonucleotide
  Antisense strand to SEQ ID NO: 1744195
augacucacauuaucuuua

SEQ ID NO: 1744197 - RNA, 19 nt, Artificial Sequence
  Description of Artificial Sequence: Synthetic oligonucleotide
  Sense strand starting at position 2551 of SEQ ID NO: 1562403
gauaaugugagucaugguu

SEQ ID NO: 1744198 - RNA, 19 nt, Artificial Sequence
  Description of Artificial Sequence: Synthetic oligonucleotide
  Antisense strand to SEQ ID NO: 1744197
aaccaugacucacauuauc

SEQ ID NO: 1744199 - RNA, 19 nt, Artificial Sequence
  Description of Artificial Sequence: Synthetic oligonucleotide
  Sense strand starting at position 2559 of SEQ ID NO: 1562403
gagucaugguuuguaugcu

SEQ ID NO: 1744200 - RNA, 19 nt, Artificial Sequence
  Description of Artificial Sequence: Synthetic oligonucleotide
  Antisense strand to SEQ ID NO: 1744199
agcauacaaaccaugacuc

SEQ ID NO: 1744201 - RNA, 19 nt, Artificial Sequence
  Description of Artificial Sequence: Synthetic oligonucleotide
  Sense strand starting at position 2563 of SEQ ID NO: 1562403
caugguuuguaugcuguaa

SEQ ID NO: 1744202 - RNA, 19 nt, Artificial Sequence
  Description of Artificial Sequence: Synthetic oligonucleotide
  Antisense strand to SEQ ID NO: 1744201
uuacagcauacaaaccaug

SEQ ID NO: 1744203 - RNA, 19 nt, Artificial Sequence
  Description of Artificial Sequence: Synthetic oligonucleotide
  Sense strand starting at position 2567 of SEQ ID NO: 1562403
guuuguaugcuguaaugua

SEQ ID NO: 1744204 - RNA, 19 nt, Artificial Sequence
  Description of Artificial Sequence: Synthetic oligonucleotide
  Antisense strand to SEQ ID NO: 1744203
uacauuacagcauacaaac

SEQ ID NO: 1744205 - RNA, 19 nt, Artificial Sequence
  Description of Artificial Sequence: Synthetic oligonucleotide
  Sense strand starting at position 2640 of SEQ ID NO: 1562403
acagaaauuccgugucuca

SEQ ID NO: 1744206 - RNA, 19 nt, Artificial Sequence
  Description of Artificial Sequence: Synthetic oligonucleotide
  Antisense strand to SEQ ID NO: 1744205
ugagacacggaauuucugu

SEQ ID NO: 1744207 - RNA, 19 nt, Artificial Sequence
  Description of Artificial Sequence: Synthetic oligonucleotide
  Sense strand starting at position 3261 of SEQ ID NO: 1562403
guggcuugaccucguggaa

SEQ ID NO: 1744208 - RNA, 19 nt, Artificial Sequence
  Description of Artificial Sequence: Synthetic oligonucleotide
  Antisense strand to SEQ ID NO: 1744207
uuccacgaggucaagccac

SEQ ID NO: 1744209 - RNA, 19 nt, Artificial Sequence
  Description of Artificial Sequence: Synthetic oligonucleotide
  Sense strand starting at position 3354 of SEQ ID NO: 1562403
gguucccagcucugagaaa

SEQ ID NO: 1744210 - RNA, 19 nt, Artificial Sequence
  Description of Artificial Sequence: Synthetic oligonucleotide
  Antisense strand to SEQ ID NO: 1744209
uuucucagagcugggaacc

SEQ ID NO: 1744211 - RNA, 19 nt, Artificial Sequence
  Description of Artificial Sequence: Synthetic oligonucleotide
  Sense strand starting at position 3382 of SEQ ID NO: 1562403
cucuguuucuucucagcca

SEQ ID NO: 1744212 - RNA, 19 nt, Artificial Sequence
  Description of Artificial Sequence: Synthetic oligonucleotide
  Antisense strand to SEQ ID NO: 1744211
uggcugagaagaaacagag

SEQ ID NO: 1744213 - RNA, 19 nt, Artificial Sequence
  Description of Artificial Sequence: Synthetic oligonucleotide
  Sense strand starting at position 3465 of SEQ ID NO: 1562403
gcugaaaggucuccucgac

SEQ ID NO: 1744214 - RNA, 19 nt, Artificial Sequence
  Description of Artificial Sequence: Synthetic oligonucleotide
  Antisense strand to SEQ ID NO: 1744213
gucgaggagaccuuucagc

SEQ ID NO: 1744215 - RNA, 19 nt, Artificial Sequence
  Description of Artificial Sequence: Synthetic oligonucleotide
  Sense strand starting at position 3480 of SEQ ID NO: 1562403
cgacuucucugguuuguga

SEQ ID NO: 1744216 - RNA, 19 nt, Artificial Sequence
  Description of Artificial Sequence: Synthetic oligonucleotide
  Antisense strand to SEQ ID NO: 1744215
ucacaaaccagagaagucg

SEQ ID NO: 1744217 - RNA, 19 nt, Artificial Sequence
  Description of Artificial Sequence: Synthetic oligonucleotide
  Sense strand starting at position 3567 of SEQ ID NO: 1562403
cguggacuugcuugagguu

SEQ ID NO: 1744218 - RNA, 19 nt, Artificial Sequence
  Description of Artificial Sequence: Synthetic oligonucleotide
  Antisense strand to SEQ ID NO: 1744217
aaccucaagcaaguccacg

SEQ ID NO: 1744219 - RNA, 19 nt, Artificial Sequence
  Description of Artificial Sequence: Synthetic oligonucleotide
  Sense strand starting at position 3581 of SEQ ID NO: 1562403
agguuuccucguggucaga

SEQ ID NO: 1744220 - RNA, 19 nt, Artificial Sequence
  Description of Artificial Sequence: Synthetic oligonucleotide
  Antisense strand to SEQ ID NO: 1744219
ucugaccacgaggaaaccu

SEQ ID NO: 1744221 - RNA, 19 nt, Artificial Sequence
  Description of Artificial Sequence: Synthetic oligonucleotide
  Sense strand starting at position 3688 of SEQ ID NO: 1562403
cgccguuucccucuguaau

SEQ ID NO: 1744222 - RNA, 19 nt, Artificial Sequence
  Description of Artificial Sequence: Synthetic oligonucleotide
  Antisense strand to SEQ ID NO: 1744221
auuacagagggaaacggcg

SEQ ID NO: 1744223 - RNA, 19 nt, Artificial Sequence
  Description of Artificial Sequence: Synthetic oligonucleotide
  Sense strand starting at position 3690 of SEQ ID NO: 1562403
ccguuucccucuguaauug

SEQ ID NO: 1744224 - RNA, 19 nt, Artificial Sequence
  Description of Artificial Sequence: Synthetic oligonucleotide
  Antisense strand to SEQ ID NO: 1744223
caauuacagagggaaacgg

SEQ ID NO: 1744225 - RNA, 19 nt, Artificial Sequence
  Description of Artificial Sequence: Synthetic oligonucleotide
  Sense strand starting at position 3699 of SEQ ID NO: 1562403
ucuguaauuggucaugucu

SEQ ID NO: 1744226 - RNA, 19 nt, Artificial Sequence
  Description of Artificial Sequence: Synthetic oligonucleotide
  Antisense strand to SEQ ID NO: 1744225
agacaugaccaauuacaga

SEQ ID NO: 1744227 - RNA, 19 nt, Artificial Sequence
  Description of Artificial Sequence: Synthetic oligonucleotide
  Sense strand starting at position 3705 of SEQ ID NO: 1562403
auuggucaugucugagacu

SEQ ID NO: 1744228 - RNA, 19 nt, Artificial Sequence
  Description of Artificial Sequence: Synthetic oligonucleotide
  Antisense strand to SEQ ID NO: 1744227
agucucagacaugaccaau

SEQ ID NO: 1744229 - RNA, 19 nt, Artificial Sequence
  Description of Artificial Sequence: Synthetic oligonucleotide
  Sense strand starting at position 3830 of SEQ ID NO: 1562403
cugccuuguuccuuccaca

SEQ ID NO: 1744230 - RNA, 19 nt, Artificial Sequence
  Description of Artificial Sequence: Synthetic oligonucleotide
  Antisense strand to SEQ ID NO: 1744229
uguggaaggaacaaggcag

SEQ ID NO: 1744231 - RNA, 19 nt, Artificial Sequence
  Description of Artificial Sequence: Synthetic oligonucleotide
  Sense strand starting at position 3855 of SEQ ID NO: 1562403
aauugaaauucucccggga

SEQ ID NO: 1744232 - RNA, 19 nt, Artificial Sequence
  Description of Artificial Sequence: Synthetic oligonucleotide
  Antisense strand to SEQ ID NO: 1744231
ucccgggagaauuucaauu

SEQ ID NO: 1744233 - RNA, 19 nt, Artificial Sequence
  Description of Artificial Sequence: Synthetic oligonucleotide
  Sense strand starting at position 3859 of SEQ ID NO: 1562403
gaaauucucccgggaggag

SEQ ID NO: 1744234 - RNA, 19 nt, Artificial Sequence
  Description of Artificial Sequence: Synthetic oligonucleotide
  Antisense strand to SEQ ID NO: 1744233
cuccucccgggagaauuuc

SEQ ID NO: 1744235 - RNA, 19 nt, Artificial Sequence
  Description of Artificial Sequence: Synthetic oligonucleotide
  Sense strand starting at position 3898 of SEQ ID NO: 1562403
gugucuauuugcuuccuua

SEQ ID NO: 1744236 - RNA, 19 nt, Artificial Sequence
  Description of Artificial Sequence: Synthetic oligonucleotide
  Antisense strand to SEQ ID NO: 1744235
uaaggaagcaaauagacac

SEQ ID NO: 1744237 - RNA, 19 nt, Artificial Sequence
  Description of Artificial Sequence: Synthetic oligonucleotide
  Sense strand starting at position 3921 of SEQ ID NO: 1562403
uuuaucuauguguggacua

SEQ ID NO: 1744238 - RNA, 19 nt, Artificial Sequence
  Description of Artificial Sequence: Synthetic oligonucleotide
  Antisense strand to SEQ ID NO: 1744237
uaguccacacauagauaaa

SEQ ID NO: 1744239 - RNA, 19 nt, Artificial Sequence
  Description of Artificial Sequence: Synthetic oligonucleotide
  Sense strand starting at position 3923 of SEQ ID NO: 1562403
uaucuauguguggacuaaa

SEQ ID NO: 1744240 - RNA, 19 nt, Artificial Sequence
  Description of Artificial Sequence: Synthetic oligonucleotide
  Antisense strand to SEQ ID NO: 1744239
uuuaguccacacauagaua

SEQ ID NO: 1744241 - RNA, 19 nt, Artificial Sequence
  Description of Artificial Sequence: Synthetic oligonucleotide
  Sense strand starting at position 3933 of SEQ ID NO: 1562403
uggacuaaagaauguuuau

SEQ ID NO: 1744242 - RNA, 19 nt, Artificial Sequence
  Description of Artificial Sequence: Synthetic oligonucleotide
  Antisense strand to SEQ ID NO: 1744241
auaaacauucuuuagucca

SEQ ID NO: 1744243 - RNA, 19 nt, Artificial Sequence
  Description of Artificial Sequence: Synthetic oligonucleotide
  Sense strand starting at position 46 of SEQ ID NO: 1562404
acgccuugacccugagaug

SEQ ID NO: 1744244 - RNA, 19 nt, Artificial Sequence
  Description of Artificial Sequence: Synthetic oligonucleotide
  Antisense strand to SEQ ID NO: 1744243
caucucagggucaaggcgu

SEQ ID NO: 1744245 - RNA, 19 nt, Artificial Sequence
  Description of Artificial Sequence: Synthetic oligonucleotide
  Sense strand starting at position 101 of SEQ ID NO: 1562404
gggacaguugccuacuuac

SEQ ID NO: 1744246 - RNA, 19 nt, Artificial Sequence
  Description of Artificial Sequence: Synthetic oligonucleotide
  Antisense strand to SEQ ID NO: 1744245
guaaguaggcaacuguccc

SEQ ID NO: 1744247 - RNA, 19 nt, Artificial Sequence
  Description of Artificial Sequence: Synthetic oligonucleotide
  Sense strand starting at position 747 of SEQ ID NO: 1562404
ccgugacuucuagguuaag

SEQ ID NO: 1744248 - RNA, 19 nt, Artificial Sequence
  Description of Artificial Sequence: Synthetic oligonucleotide
  Antisense strand to SEQ ID NO: 1744247
cuuaaccuagaagucacgg

SEQ ID NO: 1744249 - RNA, 19 nt, Artificial Sequence
  Description of Artificial Sequence: Synthetic oligonucleotide
  Sense strand starting at position 778 of SEQ ID NO: 1562404
agaaacagucauggcuaga

SEQ ID NO: 1744250 - RNA, 19 nt, Artificial Sequence
  Description of Artificial Sequence: Synthetic oligonucleotide
  Antisense strand to SEQ ID NO: 1744249
ucuagccaugacuguuucu

SEQ ID NO: 1744251 - RNA, 19 nt, Artificial Sequence
  Description of Artificial Sequence: Synthetic oligonucleotide
  Sense strand starting at position 796 of SEQ ID NO: 1562404
agaccaaucugagcucaaa

SEQ ID NO: 1744252 - RNA, 19 nt, Artificial Sequence
  Description of Artificial Sequence: Synthetic oligonucleotide
  Antisense strand to SEQ ID NO: 1744251
uuugagcucagauuggucu

SEQ ID NO: 1744253 - RNA, 19 nt, Artificial Sequence
  Description of Artificial Sequence: Synthetic oligonucleotide
  Sense strand starting at position 1010 of SEQ ID NO: 1562404
uggagauuccugggaguau

SEQ ID NO: 1744254 - RNA, 19 nt, Artificial Sequence
  Description of Artificial Sequence: Synthetic oligonucleotide
  Antisense strand to SEQ ID NO: 1744253
auacucccaggaaucucca

SEQ ID NO: 1744255 - RNA, 19 nt, Artificial Sequence
  Description of Artificial Sequence: Synthetic oligonucleotide
  Sense strand starting at position 1526 of SEQ ID NO: 1562404
gaggaauccucagaacagg

SEQ ID NO: 1744256 - RNA, 19 nt, Artificial Sequence
  Description of Artificial Sequence: Synthetic oligonucleotide
  Antisense strand to SEQ ID NO: 1744255
ccuguucugaggauuccuc

SEQ ID NO: 1744257 - RNA, 19 nt, Artificial Sequence
  Description of Artificial Sequence: Synthetic oligonucleotide
  Sense strand starting at position 2102 of SEQ ID NO: 1562404
guguguugucccgacagga

SEQ ID NO: 1744258 - RNA, 19 nt, Artificial Sequence
  Description of Artificial Sequence: Synthetic oligonucleotide
  Antisense strand to SEQ ID NO: 1744257
uccugucgggacaacacac

SEQ ID NO: 1744259 - RNA, 19 nt, Artificial Sequence
  Description of Artificial Sequence: Synthetic oligonucleotide
  Sense strand starting at position 2210 of SEQ ID NO: 1562404
cauuaaacuuguguguaug

SEQ ID NO: 1744260 - RNA, 19 nt, Artificial Sequence
  Description of Artificial Sequence: Synthetic oligonucleotide
  Antisense strand to SEQ ID NO: 1744259
cauacacacaaguuuaaug

SEQ ID NO: 1744261 - RNA, 19 nt, Artificial Sequence
  Description of Artificial Sequence: Synthetic oligonucleotide
  Sense strand starting at position 2359 of SEQ ID NO: 1562404
caccuauccuguguuugga

SEQ ID NO: 1744262 - RNA, 19 nt, Artificial Sequence
  Description of Artificial Sequence: Synthetic oligonucleotide
  Antisense strand to SEQ ID NO: 1744261
uccaaacacaggauaggug

SEQ ID NO: 1744263 - RNA, 19 nt, Artificial Sequence
  Description of Artificial Sequence: Synthetic oligonucleotide
  Sense strand starting at position 2368 of SEQ ID NO: 1562404
uguguuuggacugauugga

SEQ ID NO: 1744264 - RNA, 19 nt, Artificial Sequence
  Description of Artificial Sequence: Synthetic oligonucleotide
  Antisense strand to SEQ ID NO: 1744263
uccaaucaguccaaacaca

SEQ ID NO: 1744265 - RNA, 19 nt, Artificial Sequence
  Description of Artificial Sequence: Synthetic oligonucleotide
  Sense strand starting at position 2546 of SEQ ID NO: 1562404
ggaucugugcuuuauccuu

SEQ ID NO: 1744266 - RNA, 19 nt, Artificial Sequence
  Description of Artificial Sequence: Synthetic oligonucleotide
  Antisense strand to SEQ ID NO: 1744265
aaggauaaagcacagaucc

SEQ ID NO: 1744267 - RNA, 19 nt, Artificial Sequence
  Description of Artificial Sequence: Synthetic oligonucleotide
  Sense strand starting at position 2646 of SEQ ID NO: 1562404
auuuccucauggugacaga

SEQ ID NO: 1744268 - RNA, 19 nt, Artificial Sequence
  Description of Artificial Sequence: Synthetic oligonucleotide
  Antisense strand to SEQ ID NO: 1744267
ucugucaccaugaggaaau

SEQ ID NO: 1744269 - RNA, 19 nt, Artificial Sequence
  Description of Artificial Sequence: Synthetic oligonucleotide
  Sense strand starting at position 2647 of SEQ ID NO: 1562404
uuuccucauggugacagau

SEQ ID NO: 1744270 - RNA, 19 nt, Artificial Sequence
  Description of Artificial Sequence: Synthetic oligonucleotide
  Antisense strand to SEQ ID NO: 1744269
aucugucaccaugaggaaa

SEQ ID NO: 1744271 - RNA, 19 nt, Artificial Sequence
  Description of Artificial Sequence: Synthetic oligonucleotide
  Sense strand starting at position 2753 of SEQ ID NO: 1562404
cuuauaugauaguuuagcu

SEQ ID NO: 1744272 - RNA, 19 nt, Artificial Sequence
  Description of Artificial Sequence: Synthetic oligonucleotide
  Antisense strand to SEQ ID NO: 1744271
agcuaaacuaucauauaag

SEQ ID NO: 1744273 - RNA, 19 nt, Artificial Sequence
  Description of Artificial Sequence: Synthetic oligonucleotide
  Sense strand starting at position 2761 of SEQ ID NO: 1562404
auaguuuagcuggguauau

SEQ ID NO: 1744274 - RNA, 19 nt, Artificial Sequence
  Description of Artificial Sequence: Synthetic oligonucleotide
  Antisense strand to SEQ ID NO: 1744273
auauacccagcuaaacuau

SEQ ID NO: 1744275 - RNA, 19 nt, Artificial Sequence
  Description of Artificial Sequence: Synthetic oligonucleotide
  Sense strand starting at position 2762 of SEQ ID NO: 1562404
uaguuuagcuggguauaua

SEQ ID NO: 1744276 - RNA, 19 nt, Artificial Sequence
  Description of Artificial Sequence: Synthetic oligonucleotide
  Antisense strand to SEQ ID NO: 1744275
uauauacccagcuaaacua

SEQ ID NO: 1744277 - RNA, 19 nt, Artificial Sequence
  Description of Artificial Sequence: Synthetic oligonucleotide
  Sense strand starting at position 2763 of SEQ ID NO: 1562404
aguuuagcuggguauauaa

SEQ ID NO: 1744278 - RNA, 19 nt, Artificial Sequence
  Description of Artificial Sequence: Synthetic oligonucleotide
  Antisense strand to SEQ ID NO: 1744277
uuauauacccagcuaaacu

SEQ ID NO: 1744279 - RNA, 19 nt, Artificial Sequence
  Description of Artificial Sequence: Synthetic oligonucleotide
  Sense strand starting at position 2765 of SEQ ID NO: 1562404
uuuagcuggguauauaauu

SEQ ID NO: 1744280 - RNA, 19 nt, Artificial Sequence
  Description of Artificial Sequence: Synthetic oligonucleotide
  Antisense strand to SEQ ID NO: 1744279
aauuauauacccagcuaaa

SEQ ID NO: 1744281 - RNA, 19 nt, Artificial Sequence
  Description of Artificial Sequence: Synthetic oligonucleotide
  Sense strand starting at position 2874 of SEQ ID NO: 1562404
uccagcguugcugaugaga

SEQ ID NO: 1744282 - RNA, 19 nt, Artificial Sequence
  Description of Artificial Sequence: Synthetic oligonucleotide
  Antisense strand to SEQ ID NO: 1744281
ucucaucagcaacgcugga

SEQ ID NO: 1744283 - RNA, 19 nt, Artificial Sequence
  Description of Artificial Sequence: Synthetic oligonucleotide
  Sense strand starting at position 2891 of SEQ ID NO: 1562404
gagacugagguuggucauu

SEQ ID NO: 1744284 - RNA, 19 nt, Artificial Sequence
  Description of Artificial Sequence: Synthetic oligonucleotide
  Antisense strand to SEQ ID NO: 1744283
aaugaccaaccucagucuc

SEQ ID NO: 1744285 - RNA, 19 nt, Artificial Sequence
  Description of Artificial Sequence: Synthetic oligonucleotide
  Sense strand starting at position 2896 of SEQ ID NO: 1562404
ugagguuggucauuuguca

SEQ ID NO: 1744286 - RNA, 19 nt, Artificial Sequence
  Description of Artificial Sequence: Synthetic oligonucleotide
  Antisense strand to SEQ ID NO: 1744285
ugacaaaugaccaaccuca

SEQ ID NO: 1744287 - RNA, 19 nt, Artificial Sequence
  Description of Artificial Sequence: Synthetic oligonucleotide
  Sense strand starting at position 2940 of SEQ ID NO: 1562404
ccguuuaacucucugggaa

SEQ ID NO: 1744288 - RNA, 19 nt, Artificial Sequence
  Description of Artificial Sequence: Synthetic oligonucleotide
  Antisense strand to SEQ ID NO: 1744287
uucccagagaguuaaacgg

SEQ ID NO: 1744289 - RNA, 19 nt, Artificial Sequence
  Description of Artificial Sequence: Synthetic oligonucleotide
  Sense strand starting at position 2941 of SEQ ID NO: 1562404
cguuuaacucucugggaac

SEQ ID NO: 1744290 - RNA, 19 nt, Artificial Sequence
  Description of Artificial Sequence: Synthetic oligonucleotide
  Antisense strand to SEQ ID NO: 1744289
guucccagagaguuaaacg

SEQ ID NO: 1744291 - RNA, 19 nt, Artificial Sequence
  Description of Artificial Sequence: Synthetic oligonucleotide
  Sense strand starting at position 2943 of SEQ ID NO: 1562404
uuuaacucucugggaacau

SEQ ID NO: 1744292 - RNA, 19 nt, Artificial Sequence
  Description of Artificial Sequence: Synthetic oligonucleotide
  Antisense strand to SEQ ID NO: 1744291
auguucccagagaguuaaa

SEQ ID NO: 1744293 - RNA, 19 nt, Artificial Sequence
  Description of Artificial Sequence: Synthetic oligonucleotide
  Sense strand starting at position 2987 of SEQ ID NO: 1562404
guuucuaugcgugugcauu

SEQ ID NO: 1744294 - RNA, 19 nt, Artificial Sequence
  Description of Artificial Sequence: Synthetic oligonucleotide
  Antisense strand to SEQ ID NO: 1744293
aaugcacacgcauagaaac

SEQ ID NO: 1744295 - RNA, 19 nt, Artificial Sequence
  Description of Artificial Sequence: Synthetic oligonucleotide
  Sense strand starting at position 3010 of SEQ ID NO: 1562404
uacuuucugugguuagaau

SEQ ID NO: 1744296 - RNA, 19 nt, Artificial Sequence
  Description of Artificial Sequence: Synthetic oligonucleotide
  Antisense strand to SEQ ID NO: 1744295
auucuaaccacagaaagua

SEQ ID NO: 1744297 - RNA, 19 nt, Artificial Sequence
  Description of Artificial Sequence: Synthetic oligonucleotide
  Sense strand starting at position 3011 of SEQ ID NO: 1562404
acuuucugugguuagaauu

SEQ ID NO: 1744298 - RNA, 19 nt, Artificial Sequence
  Description of Artificial Sequence: Synthetic oligonucleotide
  Antisense strand to SEQ ID NO: 1744297
aauucuaaccacagaaagu

SEQ ID NO: 1744299 - RNA, 19 nt, Artificial Sequence
  Description of Artificial Sequence: Synthetic oligonucleotide
  Sense strand starting at position 3120 of SEQ ID NO: 1562404
uuugucucacgaugaauga

SEQ ID NO: 1744300 - RNA, 19 nt, Artificial Sequence
  Description of Artificial Sequence: Synthetic oligonucleotide
  Antisense strand to SEQ ID NO: 1744299
ucauucaucgugagacaaa

SEQ ID NO: 1744301 - RNA, 19 nt, Artificial Sequence
  Description of Artificial Sequence: Synthetic oligonucleotide
  Sense strand starting at position 3121 of SEQ ID NO: 1562404
uugucucacgaugaaugaa

SEQ ID NO: 1744302 - RNA, 19 nt, Artificial Sequence
  Description of Artificial Sequence: Synthetic oligonucleotide
  Antisense strand to SEQ ID NO: 1744301
uucauucaucgugagacaa

SEQ ID NO: 1744303 - RNA, 19 nt, Artificial Sequence
  Description of Artificial Sequence: Synthetic oligonucleotide
  Sense strand starting at position 3147 of SEQ ID NO: 1562404
uuuggcucacuguaaugau

SEQ ID NO: 1744304 - RNA, 19 nt, Artificial Sequence
  Description of Artificial Sequence: Synthetic oligonucleotide
  Antisense strand to SEQ ID NO: 1744303
aucauuacagugagccaaa

SEQ ID NO: 1744305 - RNA, 19 nt, Artificial Sequence
  Description of Artificial Sequence: Synthetic oligonucleotide
  Sense strand starting at position 3162 of SEQ ID NO: 1562404
ugauguuauguugagcauu

SEQ ID NO: 1744306 - RNA, 19 nt, Artificial Sequence
  Description of Artificial Sequence: Synthetic oligonucleotide
  Antisense strand to SEQ ID NO: 1744305
aaugcucaacauaacauca

SEQ ID NO: 1744307 - RNA, 19 nt, Artificial Sequence
  Description of Artificial Sequence: Synthetic oligonucleotide
  Sense strand starting at position 3164 of SEQ ID NO: 1562404
auguuauguugagcauuua

SEQ ID NO: 1744308 - RNA, 19 nt, Artificial Sequence
  Description of Artificial Sequence: Synthetic oligonucleotide
  Antisense strand to SEQ ID NO: 1744307
uaaaugcucaacauaacau

SEQ ID NO: 1744309 - RNA, 19 nt, Artificial Sequence
  Description of Artificial Sequence: Synthetic oligonucleotide
  Sense strand starting at position 3231 of SEQ ID NO: 1562404
gguggcaguucauuugauu

SEQ ID NO: 1744310 - RNA, 19 nt, Artificial Sequence
  Description of Artificial Sequence: Synthetic oligonucleotide
  Antisense strand to SEQ ID NO: 1744309
aaucaaaugaacugccacc

SEQ ID NO: 1744311 - RNA, 19 nt, Artificial Sequence
  Description of Artificial Sequence: Synthetic oligonucleotide
  Sense strand starting at position 3432 of SEQ ID NO: 1562404
aguagagguugugcgagaa

SEQ ID NO: 1744312 - RNA, 19 nt, Artificial Sequence
  Description of Artificial Sequence: Synthetic oligonucleotide
  Antisense strand to SEQ ID NO: 1744311
uucucgcacaaccucuacu

SEQ ID NO: 1744313 - RNA, 19 nt, Artificial Sequence
  Description of Artificial Sequence: Synthetic oligonucleotide
  Sense strand starting at position 3436 of SEQ ID NO: 1562404
gagguugugcgagaacugu

SEQ ID NO: 1744314 - RNA, 19 nt, Artificial Sequence
  Description of Artificial Sequence: Synthetic oligonucleotide
  Antisense strand to SEQ ID NO: 1744313
acaguucucgcacaaccuc

SEQ ID NO: 1744315 - RNA, 19 nt, Artificial Sequence
  Description of Artificial Sequence: Synthetic oligonucleotide
  Sense strand starting at position 3526 of SEQ ID NO: 1562404
cuaggaugacgucauauca

SEQ ID NO: 1744316 - RNA, 19 nt, Artificial Sequence
  Description of Artificial Sequence: Synthetic oligonucleotide
  Antisense strand to SEQ ID NO: 1744315
ugauaugacgucauccuag

SEQ ID NO: 1744317 - RNA, 19 nt, Artificial Sequence
  Description of Artificial Sequence: Synthetic oligonucleotide
  Sense strand starting at position 3862 of SEQ ID NO: 1562404
ccuguaugauaauuugcuu

SEQ ID NO: 1744318 - RNA, 19 nt, Artificial Sequence
  Description of Artificial Sequence: Synthetic oligonucleotide
  Antisense strand to SEQ ID NO: 1744317
aagcaaauuaucauacagg

SEQ ID NO: 1744319 - RNA, 19 nt, Artificial Sequence
  Description of Artificial Sequence: Synthetic oligonucleotide
  Sense strand starting at position 3910 of SEQ ID NO: 1562404
uccuuaaucgaaugggugu

SEQ ID NO: 1744320 - RNA, 19 nt, Artificial Sequence
  Description of Artificial Sequence: Synthetic oligonucleotide
  Antisense strand to SEQ ID NO: 1744319
acacccauucgauuaagga

SEQ ID NO: 1744321 - RNA, 19 nt, Artificial Sequence
  Description of Artificial Sequence: Synthetic oligonucleotide
  Sense strand starting at position 3916 of SEQ ID NO: 1562404
aucgaauggguguggugau

SEQ ID NO: 1744322 - RNA, 19 nt, Artificial Sequence
  Description of Artificial Sequence: Synthetic oligonucleotide
  Antisense strand to SEQ ID NO: 1744321
aucaccacacccauucgau

SEQ ID NO: 1744323 - RNA, 19 nt, Artificial Sequence
  Description of Artificial Sequence: Synthetic oligonucleotide
  Sense strand starting at position 12 of SEQ ID NO: 1562405
augccugagcaauggguau

SEQ ID NO: 1744324 - RNA, 19 nt, Artificial Sequence
  Description of Artificial Sequence: Synthetic oligonucleotide
  Antisense strand to SEQ ID NO: 1744323
auacccauugcucaggcau

SEQ ID NO: 1744325 - RNA, 19 nt, Artificial Sequence
  Description of Artificial Sequence: Synthetic oligonucleotide
  Sense strand starting at position 19 of SEQ ID NO: 1562405
agcaauggguauuccagaa

SEQ ID NO: 1744326 - RNA, 19 nt, Artificial Sequence
  Description of Artificial Sequence: Synthetic oligonucleotide
  Antisense strand to SEQ ID NO: 1744325
uucuggaauacccauugcu

SEQ ID NO: 1744327 - RNA, 19 nt, Artificial Sequence
  Description of Artificial Sequence: Synthetic oligonucleotide
  Sense strand starting at position 90 of SEQ ID NO: 1562405
caugucuuacuguggagga

SEQ ID NO: 1744328 - RNA, 19 nt, Artificial Sequence
  Description of Artificial Sequence: Synthetic oligonucleotide
  Antisense strand to SEQ ID NO: 1744327
uccuccacaguaagacaug

SEQ ID NO: 1744329 - RNA, 19 nt, Artificial Sequence
  Description of Artificial Sequence: Synthetic oligonucleotide
  Sense strand starting at position 92 of SEQ ID NO: 1562405
ugucuuacuguggaggaga

SEQ ID NO: 1744330 - RNA, 19 nt, Artificial Sequence
  Description of Artificial Sequence: Synthetic oligonucleotide
  Antisense strand to SEQ ID NO: 1744329
ucuccuccacaguaagaca

SEQ ID NO: 1744331 - RNA, 19 nt, Artificial Sequence
  Description of Artificial Sequence: Synthetic oligonucleotide
  Sense strand starting at position 281 of SEQ ID NO: 1562405
uccacuuugucccgaaacu

SEQ ID NO: 1744332 - RNA, 19 nt, Artificial Sequence
  Description of Artificial Sequence: Synthetic oligonucleotide
  Antisense strand to SEQ ID NO: 1744331
aguuucgggacaaagugga

SEQ ID NO: 1744333 - RNA, 19 nt, Artificial Sequence
  Description of Artificial Sequence: Synthetic oligonucleotide
  Sense strand starting at position 282 of SEQ ID NO: 1562405
ccacuuugucccgaaacuc

SEQ ID NO: 1744334 - RNA, 19 nt, Artificial Sequence
  Description of Artificial Sequence: Synthetic oligonucleotide
  Antisense strand to SEQ ID NO: 1744333
gaguuucgggacaaagugg

SEQ ID NO: 1744335 - RNA, 19 nt, Artificial Sequence
  Description of Artificial Sequence: Synthetic oligonucleotide
  Sense strand starting at position 315 of SEQ ID NO: 1562405
agaggcagcuuuccuaaga

SEQ ID NO: 1744336 - RNA, 19 nt, Artificial Sequence
  Description of Artificial Sequence: Synthetic oligonucleotide
  Antisense strand to SEQ ID NO: 1744335
ucuuaggaaagcugccucu

SEQ ID NO: 1744337 - RNA, 19 nt, Artificial Sequence
  Description of Artificial Sequence: Synthetic oligonucleotide
  Sense strand starting at position 316 of SEQ ID NO: 1562405
gaggcagcuuuccuaagau

SEQ ID NO: 1744338 - RNA, 19 nt, Artificial Sequence
  Description of Artificial Sequence: Synthetic oligonucleotide
  Antisense strand to SEQ ID NO: 1744337
aucuuaggaaagcugccuc

SEQ ID NO: 1744339 - RNA, 19 nt, Artificial Sequence
  Description of Artificial Sequence: Synthetic oligonucleotide
  Sense strand starting at position 592 of SEQ ID NO: 1562405
gacagagguuggugugaga

SEQ ID NO: 1744340 - RNA, 19 nt, Artificial Sequence
  Description of Artificial Sequence: Synthetic oligonucleotide
  Antisense strand to SEQ ID NO: 1744339
ucucacaccaaccucuguc

SEQ ID NO: 1744341 - RNA, 19 nt, Artificial Sequence
  Description of Artificial Sequence: Synthetic oligonucleotide
  Sense strand starting at position 671 of SEQ ID NO: 1562405
ggguuaguucugcagaacu

SEQ ID NO: 1744342 - RNA, 19 nt, Artificial Sequence
  Description of Artificial Sequence: Synthetic oligonucleotide
  Antisense strand to SEQ ID NO: 1744341
aguucugcagaacuaaccc

SEQ ID NO: 1744343 - RNA, 19 nt, Artificial Sequence
  Description of Artificial Sequence: Synthetic oligonucleotide
  Sense strand starting at position 673 of SEQ ID NO: 1562405
guuaguucugcagaacuug

SEQ ID NO: 1744344 - RNA, 19 nt, Artificial Sequence
  Description of Artificial Sequence: Synthetic oligonucleotide
  Antisense strand to SEQ ID NO: 1744343
caaguucugcagaacuaac

SEQ ID NO: 1744345 - RNA, 19 nt, Artificial Sequence
  Description of Artificial Sequence: Synthetic oligonucleotide
  Sense strand starting at position 747 of SEQ ID NO: 1562405
ggagcauccuggucccuaa

SEQ ID NO: 1744346 - RNA, 19 nt, Artificial Sequence
  Description of Artificial Sequence: Synthetic oligonucleotide
  Antisense strand to SEQ ID NO: 1744345
uuagggaccaggaugcucc

SEQ ID NO: 1744347 - RNA, 19 nt, Artificial Sequence
  Description of Artificial Sequence: Synthetic oligonucleotide
  Sense strand starting at position 783 of SEQ ID NO: 1562405
aucuucugagggugucaaa

SEQ ID NO: 1744348 - RNA, 19 nt, Artificial Sequence
  Description of Artificial Sequence: Synthetic oligonucleotide
  Antisense strand to SEQ ID NO: 1744347
uuugacacccucagaagau

SEQ ID NO: 1744349 - RNA, 19 nt, Artificial Sequence
  Description of Artificial Sequence: Synthetic oligonucleotide
  Sense strand starting at position 890 of SEQ ID NO: 1562405
uggacuucuggccagagca

SEQ ID NO: 1744350 - RNA, 19 nt, Artificial Sequence
  Description of Artificial Sequence: Synthetic oligonucleotide
  Antisense strand to SEQ ID NO: 1744349
ugcucuggccagaagucca

SEQ ID NO: 1744351 - RNA, 19 nt, Artificial Sequence
  Description of Artificial Sequence: Synthetic oligonucleotide
  Sense strand starting at position 2102 of SEQ ID NO: 1562405
gcuggagucugccgggauu

SEQ ID NO: 1744352 - RNA, 19 nt, Artificial Sequence
  Description of Artificial Sequence: Synthetic oligonucleotide
  Antisense strand to SEQ ID NO: 1744351
aaucccggcagacuccagc

SEQ ID NO: 1744353 - RNA, 19 nt, Artificial Sequence
  Description of Artificial Sequence: Synthetic oligonucleotide
  Sense strand starting at position 2124 of SEQ ID NO: 1562405
gguguuuguucgcccguga

SEQ ID NO: 1744354 - RNA, 19 nt, Artificial Sequence
  Description of Artificial Sequence: Synthetic oligonucleotide
  Antisense strand to SEQ ID NO: 1744353
ucacgggcgaacaaacacc

SEQ ID NO: 1744355 - RNA, 19 nt, Artificial Sequence
  Description of Artificial Sequence: Synthetic oligonucleotide
  Sense strand starting at position 2125 of SEQ ID NO: 1562405
guguuuguucgcccgugau

SEQ ID NO: 1744356 - RNA, 19 nt, Artificial Sequence
  Description of Artificial Sequence: Synthetic oligonucleotide
  Antisense strand to SEQ ID NO: 1744355
aucacgggcgaacaaacac

SEQ ID NO: 1744357 - RNA, 19 nt, Artificial Sequence
  Description of Artificial Sequence: Synthetic oligonucleotide
  Sense strand starting at position 2127 of SEQ ID NO: 1562405
guuuguucgcccgugaugu

SEQ ID NO: 1744358 - RNA, 19 nt, Artificial Sequence
  Description of Artificial Sequence: Synthetic oligonucleotide
  Antisense strand to SEQ ID NO: 1744357
acaucacgggcgaacaaac

SEQ ID NO: 1744359 - RNA, 19 nt, Artificial Sequence
  Description of Artificial Sequence: Synthetic oligonucleotide
  Sense strand starting at position 2335 of SEQ ID NO: 1562405
caggaaguguccuuguggu

SEQ ID NO: 1744360 - RNA, 19 nt, Artificial Sequence
  Description of Artificial Sequence: Synthetic oligonucleotide
  Antisense strand to SEQ ID NO: 1744359
accacaaggacacuuccug

SEQ ID NO: 1744361 - RNA, 19 nt, Artificial Sequence
  Description of Artificial Sequence: Synthetic oligonucleotide
  Sense strand starting at position 2339 of SEQ ID NO: 1562405
aaguguccuuguggugaaa

SEQ ID NO: 1744362 - RNA, 19 nt, Artificial Sequence
  Description of Artificial Sequence: Synthetic oligonucleotide
  Antisense strand to SEQ ID NO: 1744361
uuucaccacaaggacacuu

SEQ ID NO: 1744363 - RNA, 19 nt, Artificial Sequence
  Description of Artificial Sequence: Synthetic oligonucleotide
  Sense strand starting at position 2404 of SEQ ID NO: 1562405
guggccaucuucugaggga

SEQ ID NO: 1744364 - RNA, 19 nt, Artificial Sequence
  Description of Artificial Sequence: Synthetic oligonucleotide
  Antisense strand to SEQ ID NO: 1744363
ucccucagaagauggccac

SEQ ID NO: 1744365 - RNA, 19 nt, Artificial Sequence
  Description of Artificial Sequence: Synthetic oligonucleotide
  Sense strand starting at position 2407 of SEQ ID NO: 1562405
gccaucuucugagggacaa

SEQ ID NO: 1744366 - RNA, 19 nt, Artificial Sequence
  Description of Artificial Sequence: Synthetic oligonucleotide
  Antisense strand to SEQ ID NO: 1744365
uugucccucagaagauggc

SEQ ID NO: 1744367 - RNA, 19 nt, Artificial Sequence
  Description of Artificial Sequence: Synthetic oligonucleotide
  Sense strand starting at position 2512 of SEQ ID NO: 1562405
ggcuuugagcucuggacga

SEQ ID NO: 1744368 - RNA, 19 nt, Artificial Sequence
  Description of Artificial Sequence: Synthetic oligonucleotide
  Antisense strand to SEQ ID NO: 1744367
ucguccagagcucaaagcc

SEQ ID NO: 1744369 - RNA, 19 nt, Artificial Sequence
  Description of Artificial Sequence: Synthetic oligonucleotide
  Sense strand starting at position 2514 of SEQ ID NO: 1562405
cuuugagcucuggacgacu

SEQ ID NO: 1744370 - RNA, 19 nt, Artificial Sequence
  Description of Artificial Sequence: Synthetic oligonucleotide
  Antisense strand to SEQ ID NO: 1744369
agucguccagagcucaaag

SEQ ID NO: 1744371 - RNA, 19 nt, Artificial Sequence
  Description of Artificial Sequence: Synthetic oligonucleotide
  Sense strand starting at position 2609 of SEQ ID NO: 1562405
cuguguguuccagggcaag

SEQ ID NO: 1744372 - RNA, 19 nt, Artificial Sequence
  Description of Artificial Sequence: Synthetic oligonucleotide
  Antisense strand to SEQ ID NO: 1744371
cuugcccuggaacacacag

SEQ ID NO: 1744373 - RNA, 19 nt, Artificial Sequence
  Description of Artificial Sequence: Synthetic oligonucleotide
  Sense strand starting at position 2936 of SEQ ID NO: 1562405
agaaguugaucucacugca

SEQ ID NO: 1744374 - RNA, 19 nt, Artificial Sequence
  Description of Artificial Sequence: Synthetic oligonucleotide
  Antisense strand to SEQ ID NO: 1744373
ugcagugagaucaacuucu

SEQ ID NO: 1744375 - RNA, 19 nt, Artificial Sequence
  Description of Artificial Sequence: Synthetic oligonucleotide
  Sense strand starting at position 2939 of SEQ ID NO: 1562405
aguugaucucacugcaaac

SEQ ID NO: 1744376 - RNA, 19 nt, Artificial Sequence
  Description of Artificial Sequence: Synthetic oligonucleotide
  Antisense strand to SEQ ID NO: 1744375
guuugcagugagaucaacu

SEQ ID NO: 1744377 - RNA, 19 nt, Artificial Sequence
  Description of Artificial Sequence: Synthetic oligonucleotide
  Sense strand starting at position 2956 of SEQ ID NO: 1562405
acccauugccaguguaaac

SEQ ID NO: 1744378 - RNA, 19 nt, Artificial Sequence
  Description of Artificial Sequence: Synthetic oligonucleotide
  Antisense strand to SEQ ID NO: 1744377
guuuacacuggcaaugggu

SEQ ID NO: 1744379 - RNA, 19 nt, Artificial Sequence
  Description of Artificial Sequence: Synthetic oligonucleotide
  Sense strand starting at position 2963 of SEQ ID NO: 1562405
gccaguguaaacgaaacau

SEQ ID NO: 1744380 - RNA, 19 nt, Artificial Sequence
  Description of Artificial Sequence: Synthetic oligonucleotide
  Antisense strand to SEQ ID NO: 1744379
auguuucguuuacacuggc

SEQ ID NO: 1744381 - RNA, 19 nt, Artificial Sequence
  Description of Artificial Sequence: Synthetic oligonucleotide
  Sense strand starting at position 3101 of SEQ ID NO: 1562405
ccuuuaggguuucgacaca

SEQ ID NO: 1744382 - RNA, 19 nt, Artificial Sequence
  Description of Artificial Sequence: Synthetic oligonucleotide
  Antisense strand to SEQ ID NO: 1744381
ugugucgaaacccuaaagg

SEQ ID NO: 1744383 - RNA, 19 nt, Artificial Sequence
  Description of Artificial Sequence: Synthetic oligonucleotide
  Sense strand starting at position 3165 of SEQ ID NO: 1562405
agagcagacucuggcaaua

SEQ ID NO: 1744384 - RNA, 19 nt, Artificial Sequence
  Description of Artificial Sequence: Synthetic oligonucleotide
  Antisense strand to SEQ ID NO: 1744383
uauugccagagucugcucu

SEQ ID NO: 1744385 - RNA, 19 nt, Artificial Sequence
  Description of Artificial Sequence: Synthetic oligonucleotide
  Sense strand starting at position 3503 of SEQ ID NO: 1562405
gugccuuuguguccugaga

SEQ ID NO: 1744386 - RNA, 19 nt, Artificial Sequence
  Description of Artificial Sequence: Synthetic oligonucleotide
  Antisense strand to SEQ ID NO: 1744385
ucucaggacacaaaggcac

SEQ ID NO: 1744387 - RNA, 19 nt, Artificial Sequence
  Description of Artificial Sequence: Synthetic oligonucleotide
  Sense strand starting at position 3505 of SEQ ID NO: 1562405
gccuuuguguccugagaag

SEQ ID NO: 1744388 - RNA, 19 nt, Artificial Sequence
  Description of Artificial Sequence: Synthetic oligonucleotide
  Antisense strand to SEQ ID NO: 1744387
cuucucaggacacaaaggc

SEQ ID NO: 1744389 - RNA, 19 nt, Artificial Sequence
  Description of Artificial Sequence: Synthetic oligonucleotide
  Sense strand starting at position 3517 of SEQ ID NO: 1562405
ugagaagacuucugagguu

SEQ ID NO: 1744390 - RNA, 19 nt, Artificial Sequence
  Description of Artificial Sequence: Synthetic oligonucleotide
  Antisense strand to SEQ ID NO: 1744389
aaccucagaagucuucuca

SEQ ID NO: 1744391 - RNA, 19 nt, Artificial Sequence
  Description of Artificial Sequence: Synthetic oligonucleotide
  Sense strand starting at position 3520 of SEQ ID NO: 1562405
gaagacuucugagguuuag

SEQ ID NO: 1744392 - RNA, 19 nt, Artificial Sequence
  Description of Artificial Sequence: Synthetic oligonucleotide
  Antisense strand to SEQ ID NO: 1744391
cuaaaccucagaagucuuc

SEQ ID NO: 1744393 - RNA, 19 nt, Artificial Sequence
  Description of Artificial Sequence: Synthetic oligonucleotide
  Sense strand starting at position 3548 of SEQ ID NO: 1562405
gcgacccauugacaugaua

SEQ ID NO: 1744394 - RNA, 19 nt, Artificial Sequence
  Description of Artificial Sequence: Synthetic oligonucleotide
  Antisense strand to SEQ ID NO: 1744393
uaucaugucaaugggucgc

SEQ ID NO: 1744395 - RNA, 19 nt, Artificial Sequence
  Description of Artificial Sequence: Synthetic oligonucleotide
  Sense strand starting at position 3593 of SEQ ID NO: 1562405
ucaagugguccguauucag

SEQ ID NO: 1744396 - RNA, 19 nt, Artificial Sequence
  Description of Artificial Sequence: Synthetic oligonucleotide
  Antisense strand to SEQ ID NO: 1744395
cugaauacggaccacuuga

SEQ ID NO: 1744397 - RNA, 19 nt, Artificial Sequence
  Description of Artificial Sequence: Synthetic oligonucleotide
  Sense strand starting at position 3596 of SEQ ID NO: 1562405
agugguccguauucagaaa

SEQ ID NO: 1744398 - RNA, 19 nt, Artificial Sequence
  Description of Artificial Sequence: Synthetic oligonucleotide
  Antisense strand to SEQ ID NO: 1744397
uuucugaauacggaccacu

SEQ ID NO: 1744399 - RNA, 19 nt, Artificial Sequence
  Description of Artificial Sequence: Synthetic oligonucleotide
  Sense strand starting at position 3687 of SEQ ID NO: 1562405
ugauaagacucacagaagu

SEQ ID NO: 1744400 - RNA, 19 nt, Artificial Sequence
  Description of Artificial Sequence: Synthetic oligonucleotide
  Antisense strand to SEQ ID NO: 1744399
acuucugugagucuuauca

SEQ ID NO: 1744401 - RNA, 19 nt, Artificial Sequence
  Description of Artificial Sequence: Synthetic oligonucleotide
  Sense strand starting at position 3964 of SEQ ID NO: 1562405
uugcaagaccgacauuaaa

SEQ ID NO: 1744402 - RNA, 19 nt, Artificial Sequence
  Description of Artificial Sequence: Synthetic oligonucleotide
  Antisense strand to SEQ ID NO: 1744401
uuuaaugucggucuugcaa

SEQ ID NO: 1744403 - RNA, 19 nt, Artificial Sequence
  Description of Artificial Sequence: Synthetic oligonucleotide
  Sense strand starting at position 2029 of SEQ ID NO: 1562406
gugagugaguccguguguu

SEQ ID NO: 1744404 - RNA, 19 nt, Artificial Sequence
  Description of Artificial Sequence: Synthetic oligonucleotide
  Antisense strand to SEQ ID NO: 1744403
aacacacggacucacucac

SEQ ID NO: 1744405 - RNA, 19 nt, Artificial Sequence
  Description of Artificial Sequence: Synthetic oligonucleotide
  Sense strand starting at position 2030 of SEQ ID NO: 1562406
ugagugaguccguguguua

SEQ ID NO: 1744406 - RNA, 19 nt, Artificial Sequence
  Description of Artificial Sequence: Synthetic oligonucleotide
  Antisense strand to SEQ ID NO: 1744405
uaacacacggacucacuca

SEQ ID NO: 1744407 - RNA, 19 nt, Artificial Sequence
  Description of Artificial Sequence: Synthetic oligonucleotide
  Sense strand starting at position 2043 of SEQ ID NO: 1562406
guguuaggugcucagggau

SEQ ID NO: 1744408 - RNA, 19 nt, Artificial Sequence
  Description of Artificial Sequence: Synthetic oligonucleotide
  Antisense strand to SEQ ID NO: 1744407
aucccugagcaccuaacac

SEQ ID NO: 1744409 - RNA, 19 nt, Artificial Sequence
  Description of Artificial Sequence: Synthetic oligonucleotide
  Sense strand starting at position 2046 of SEQ ID NO: 1562406
uuaggugcucagggauguu

SEQ ID NO: 1744410 - RNA, 19 nt, Artificial Sequence
  Description of Artificial Sequence: Synthetic oligonucleotide
  Antisense strand to SEQ ID NO: 1744409
aacaucccugagcaccuaa

SEQ ID NO: 1744411 - RNA, 19 nt, Artificial Sequence
  Description of Artificial Sequence: Synthetic oligonucleotide
  Sense strand starting at position 2124 of SEQ ID NO: 1562406
uuccuuguuuguguuuaaa

SEQ ID NO: 1744412 - RNA, 19 nt, Artificial Sequence
  Description of Artificial Sequence: Synthetic oligonucleotide
  Antisense strand to SEQ ID NO: 1744411
uuuaaacacaaacaaggaa

SEQ ID NO: 1744413 - RNA, 19 nt, Artificial Sequence
  Description of Artificial Sequence: Synthetic oligonucleotide
  Sense strand starting at position 2152 of SEQ ID NO: 1562406
acgcuuauuagugcgaguu

SEQ ID NO: 1744414 - RNA, 19 nt, Artificial Sequence
  Description of Artificial Sequence: Synthetic oligonucleotide
  Antisense strand to SEQ ID NO: 1744413
aacucgcacuaauaagcgu

SEQ ID NO: 1744415 - RNA, 19 nt, Artificial Sequence
  Description of Artificial Sequence: Synthetic oligonucleotide
  Sense strand starting at position 2172 of SEQ ID NO: 1562406
cauguuuaguccuaugaga

SEQ ID NO: 1744416 - RNA, 19 nt, Artificial Sequence
  Description of Artificial Sequence: Synthetic oligonucleotide
  Antisense strand to SEQ ID NO: 1744415
ucucauaggacuaaacaug

SEQ ID NO: 1744417 - RNA, 19 nt, Artificial Sequence
  Description of Artificial Sequence: Synthetic oligonucleotide
  Sense strand starting at position 2174 of SEQ ID NO: 1562406
uguuuaguccuaugagaug

SEQ ID NO: 1744418 - RNA, 19 nt, Artificial Sequence
  Description of Artificial Sequence: Synthetic oligonucleotide
  Antisense strand to SEQ ID NO: 1744417
caucucauaggacuaaaca

SEQ ID NO: 1744419 - RNA, 19 nt, Artificial Sequence
  Description of Artificial Sequence: Synthetic oligonucleotide
  Sense strand starting at position 2191 of SEQ ID NO: 1562406
ugccguucaguuuguaaag

SEQ ID NO: 1744420 - RNA, 19 nt, Artificial Sequence
  Description of Artificial Sequence: Synthetic oligonucleotide
  Antisense strand to SEQ ID NO: 1744419
cuuuacaaacugaacggca

SEQ ID NO: 1744421 - RNA, 19 nt, Artificial Sequence
  Description of Artificial Sequence: Synthetic oligonucleotide
  Sense strand starting at position 2192 of SEQ ID NO: 1562406
gccguucaguuuguaaagu

SEQ ID NO: 1744422 - RNA, 19 nt, Artificial Sequence
  Description of Artificial Sequence: Synthetic oligonucleotide
  Antisense strand to SEQ ID NO: 1744421
acuuuacaaacugaacggc

SEQ ID NO: 1744423 - RNA, 19 nt, Artificial Sequence
  Description of Artificial Sequence: Synthetic oligonucleotide
  Sense strand starting at position 2202 of SEQ ID NO: 1562406
uuguaaaguccugagucua

SEQ ID NO: 1744424 - RNA, 19 nt, Artificial Sequence
  Description of Artificial Sequence: Synthetic oligonucleotide
  Antisense strand to SEQ ID NO: 1744423
uagacucaggacuuuacaa

SEQ ID NO: 1744425 - RNA, 19 nt, Artificial Sequence
  Description of Artificial Sequence: Synthetic oligonucleotide
  Sense strand starting at position 2256 of SEQ ID NO: 1562406
ggcuccagagcauaauauu

SEQ ID NO: 1744426 - RNA, 19 nt, Artificial Sequence
  Description of Artificial Sequence: Synthetic oligonucleotide
  Antisense strand to SEQ ID NO: 1744425
aauauuaugcucuggagcc

SEQ ID NO: 1744427 - RNA, 19 nt, Artificial Sequence
  Description of Artificial Sequence: Synthetic oligonucleotide
  Sense strand starting at position 2259 of SEQ ID NO: 1562406
uccagagcauaauauugaa

SEQ ID NO: 1744428 - RNA, 19 nt, Artificial Sequence
  Description of Artificial Sequence: Synthetic oligonucleotide
  Antisense strand to SEQ ID NO: 1744427
uucaauauuaugcucugga

SEQ ID NO: 1744429 - RNA, 19 nt, Artificial Sequence
  Description of Artificial Sequence: Synthetic oligonucleotide
  Sense strand starting at position 2262 of SEQ ID NO: 1562406
agagcauaauauugaagua

SEQ ID NO: 1744430 - RNA, 19 nt, Artificial Sequence
  Description of Artificial Sequence: Synthetic oligonucleotide
  Antisense strand to SEQ ID NO: 1744429
uacuucaauauuaugcucu

SEQ ID NO: 1744431 - RNA, 19 nt, Artificial Sequence
  Description of Artificial Sequence: Synthetic oligonucleotide
  Sense strand starting at position 2285 of SEQ ID NO: 1562406
ggguguaaugucugcaaau

SEQ ID NO: 1744432 - RNA, 19 nt, Artificial Sequence
  Description of Artificial Sequence: Synthetic oligonucleotide
  Antisense strand to SEQ ID NO: 1744431
auuugcagacauuacaccc

SEQ ID NO: 1744433 - RNA, 19 nt, Artificial Sequence
  Description of Artificial Sequence: Synthetic oligonucleotide
  Sense strand starting at position 2286 of SEQ ID NO: 1562406
gguguaaugucugcaaaua

SEQ ID NO: 1744434 - RNA, 19 nt, Artificial Sequence
  Description of Artificial Sequence: Synthetic oligonucleotide
  Antisense strand to SEQ ID NO: 1744433
uauuugcagacauuacacc

SEQ ID NO: 1744435 - RNA, 19 nt, Artificial Sequence
  Description of Artificial Sequence: Synthetic oligonucleotide
  Sense strand starting at position 2287 of SEQ ID NO: 1562406
guguaaugucugcaaauag

SEQ ID NO: 1744436 - RNA, 19 nt, Artificial Sequence
  Description of Artificial Sequence: Synthetic oligonucleotide
  Antisense strand to SEQ ID NO: 1744435
cuauuugcagacauuacac

SEQ ID NO: 1744437 - RNA, 19 nt, Artificial Sequence
  Description of Artificial Sequence: Synthetic oligonucleotide
  Sense strand starting at position 2457 of SEQ ID NO: 1562406
guggaacauuccuagaagu

SEQ ID NO: 1744438 - RNA, 19 nt, Artificial Sequence
  Description of Artificial Sequence: Synthetic oligonucleotide
  Antisense strand to SEQ ID NO: 1744437
acuucuaggaauguuccac

SEQ ID NO: 1744439 - RNA, 19 nt, Artificial Sequence
  Description of Artificial Sequence: Synthetic oligonucleotide
  Sense strand starting at position 2686 of SEQ ID NO: 1562406
acugcaaaccuguaagucu

SEQ ID NO: 1744440 - RNA, 19 nt, Artificial Sequence
  Description of Artificial Sequence: Synthetic oligonucleotide
  Antisense strand to SEQ ID NO: 1744439
agacuuacagguuugcagu

SEQ ID NO: 1744441 - RNA, 19 nt, Artificial Sequence
  Description of Artificial Sequence: Synthetic oligonucleotide
  Sense strand starting at position 2695 of SEQ ID NO: 1562406
cuguaagucuaacccagaa

SEQ ID NO: 1744442 - RNA, 19 nt, Artificial Sequence
  Description of Artificial Sequence: Synthetic oligonucleotide
  Antisense strand to SEQ ID NO: 1744441
uucuggguuagacuuacag

SEQ ID NO: 1744443 - RNA, 19 nt, Artificial Sequence
  Description of Artificial Sequence: Synthetic oligonucleotide
  Sense strand starting at position 2746 of SEQ ID NO: 1562406
acagcacugccgugugaaa

SEQ ID NO: 1744444 - RNA, 19 nt, Artificial Sequence
  Description of Artificial Sequence: Synthetic oligonucleotide
  Antisense strand to SEQ ID NO: 1744443
uuucacacggcagugcugu

SEQ ID NO: 1744445 - RNA, 19 nt, Artificial Sequence
  Description of Artificial Sequence: Synthetic oligonucleotide
  Sense strand starting at position 2808 of SEQ ID NO: 1562406
ccagcuaaguccuugguca

SEQ ID NO: 1744446 - RNA, 19 nt, Artificial Sequence
  Description of Artificial Sequence: Synthetic oligonucleotide
  Antisense strand to SEQ ID NO: 1744445
ugaccaaggacuuagcugg

SEQ ID NO: 1744447 - RNA, 19 nt, Artificial Sequence
  Description of Artificial Sequence: Synthetic oligonucleotide
  Sense strand starting at position 2833 of SEQ ID NO: 1562406
cuagacaucugaucuaagu

SEQ ID NO: 1744448 - RNA, 19 nt, Artificial Sequence
  Description of Artificial Sequence: Synthetic oligonucleotide
  Antisense strand to SEQ ID NO: 1744447
acuuagaucagaugucuag

SEQ ID NO: 1744449 - RNA, 19 nt, Artificial Sequence
  Description of Artificial Sequence: Synthetic oligonucleotide
  Sense strand starting at position 2897 of SEQ ID NO: 1562406
uugguuguuucugcuaaau

SEQ ID NO: 1744450 - RNA, 19 nt, Artificial Sequence
  Description of Artificial Sequence: Synthetic oligonucleotide
  Antisense strand to SEQ ID NO: 1744449
auuuagcagaaacaaccaa

SEQ ID NO: 1744451 - RNA, 19 nt, Artificial Sequence
  Description of Artificial Sequence: Synthetic oligonucleotide
  Sense strand starting at position 2908 of SEQ ID NO: 1562406
ugcuaaauguuuccaauug

SEQ ID NO: 1744452 - RNA, 19 nt, Artificial Sequence
  Description of Artificial Sequence: Synthetic oligonucleotide
  Antisense strand to SEQ ID NO: 1744451
caauuggaaacauuuagca

SEQ ID NO: 1744453 - RNA, 19 nt, Artificial Sequence
  Description of Artificial Sequence: Synthetic oligonucleotide
  Sense strand starting at position 2968 of SEQ ID NO: 1562406
ugcagugaguccucccaca

SEQ ID NO: 1744454 - RNA, 19 nt, Artificial Sequence
  Description of Artificial Sequence: Synthetic oligonucleotide
  Antisense strand to SEQ ID NO: 1744453
ugugggaggacucacugca

SEQ ID NO: 1744455 - RNA, 19 nt, Artificial Sequence
  Description of Artificial Sequence: Synthetic oligonucleotide
  Sense strand starting at position 2979 of SEQ ID NO: 1562406
cucccacaugcuggaaauu

SEQ ID NO: 1744456 - RNA, 19 nt, Artificial Sequence
  Description of Artificial Sequence: Synthetic oligonucleotide
  Antisense strand to SEQ ID NO: 1744455
aauuuccagcaugugggag

SEQ ID NO: 1744457 - RNA, 19 nt, Artificial Sequence
  Description of Artificial Sequence: Synthetic oligonucleotide
  Sense strand starting at position 3003 of SEQ ID NO: 1562406
aggugcugagaaugugaaa

SEQ ID NO: 1744458 - RNA, 19 nt, Artificial Sequence
  Description of Artificial Sequence: Synthetic oligonucleotide
  Antisense strand to SEQ ID NO: 1744457
uuucacauucucagcaccu

SEQ ID NO: 1744459 - RNA, 19 nt, Artificial Sequence
  Description of Artificial Sequence: Synthetic oligonucleotide
  Sense strand starting at position 3084 of SEQ ID NO: 1562406
uggugaugucagugaugac

SEQ ID NO: 1744460 - RNA, 19 nt, Artificial Sequence
  Description of Artificial Sequence: Synthetic oligonucleotide
  Antisense strand to SEQ ID NO: 1744459
gucaucacugacaucacca

SEQ ID NO: 1744461 - RNA, 19 nt, Artificial Sequence
  Description of Artificial Sequence: Synthetic oligonucleotide
  Sense strand starting at position 3181 of SEQ ID NO: 1562406
ggguuugaugcccaggcaa

SEQ ID NO: 1744462 - RNA, 19 nt, Artificial Sequence
  Description of Artificial Sequence: Synthetic oligonucleotide
  Antisense strand to SEQ ID NO: 1744461
uugccugggcaucaaaccc

SEQ ID NO: 1744463 - RNA, 19 nt, Artificial Sequence
  Description of Artificial Sequence: Synthetic oligonucleotide
  Sense strand starting at position 3183 of SEQ ID NO: 1562406
guuugaugcccaggcaagu

SEQ ID NO: 1744464 - RNA, 19 nt, Artificial Sequence
  Description of Artificial Sequence: Synthetic oligonucleotide
  Antisense strand to SEQ ID NO: 1744463
acuugccugggcaucaaac

SEQ ID NO: 1744465 - RNA, 19 nt, Artificial Sequence
  Description of Artificial Sequence: Synthetic oligonucleotide
  Sense strand starting at position 3290 of SEQ ID NO: 1562406
gccucagagggcuagaaau

SEQ ID NO: 1744466 - RNA, 19 nt, Artificial Sequence
  Description of Artificial Sequence: Synthetic oligonucleotide
  Antisense strand to SEQ ID NO: 1744465
auuucuagcccucugaggc

SEQ ID NO: 1744467 - RNA, 19 nt, Artificial Sequence
  Description of Artificial Sequence: Synthetic oligonucleotide
  Sense strand starting at position 3321 of SEQ ID NO: 1562406
ugggaugaauugucuuucu

SEQ ID NO: 1744468 - RNA, 19 nt, Artificial Sequence
  Description of Artificial Sequence: Synthetic oligonucleotide
  Antisense strand to SEQ ID NO: 1744467
agaaagacaauucauccca

SEQ ID NO: 1744469 - RNA, 19 nt, Artificial Sequence
  Description of Artificial Sequence: Synthetic oligonucleotide
  Sense strand starting at position 3324 of SEQ ID NO: 1562406
gaugaauugucuuucugua

SEQ ID NO: 1744470 - RNA, 19 nt, Artificial Sequence
  Description of Artificial Sequence: Synthetic oligonucleotide
  Antisense strand to SEQ ID NO: 1744469
uacagaaagacaauucauc

SEQ ID NO: 1744471 - RNA, 19 nt, Artificial Sequence
  Description of Artificial Sequence: Synthetic oligonucleotide
  Sense strand starting at position 3326 of SEQ ID NO: 1562406
ugaauugucuuucuguaua

SEQ ID NO: 1744472 - RNA, 19 nt, Artificial Sequence
  Description of Artificial Sequence: Synthetic oligonucleotide
  Antisense strand to SEQ ID NO: 1744471
uauacagaaagacaauuca

SEQ ID NO: 1744473 - RNA, 19 nt, Artificial Sequence
  Description of Artificial Sequence: Synthetic oligonucleotide
  Sense strand starting at position 3489 of SEQ ID NO: 1562406
ggacaaaguagcuauguca

SEQ ID NO: 1744474 - RNA, 19 nt, Artificial Sequence
  Description of Artificial Sequence: Synthetic oligonucleotide
  Antisense strand to SEQ ID NO: 1744473
ugacauagcuacuuugucc

SEQ ID NO: 1744475 - RNA, 19 nt, Artificial Sequence
  Description of Artificial Sequence: Synthetic oligonucleotide
  Sense strand starting at position 3608 of SEQ ID NO: 1562406
guaauagaaugacaucuuu

SEQ ID NO: 1744476 - RNA, 19 nt, Artificial Sequence
  Description of Artificial Sequence: Synthetic oligonucleotide
  Antisense strand to SEQ ID NO: 1744475
aaagaugucauucuauuac

SEQ ID NO: 1744477 - RNA, 19 nt, Artificial Sequence
  Description of Artificial Sequence: Synthetic oligonucleotide
  Sense strand starting at position 3743 of SEQ ID NO: 1562406
gcagaccuacucuacagua

SEQ ID NO: 1744478 - RNA, 19 nt, Artificial Sequence
  Description of Artificial Sequence: Synthetic oligonucleotide
  Antisense strand to SEQ ID NO: 1744477
uacuguagaguaggucugc

SEQ ID NO: 1744479 - RNA, 19 nt, Artificial Sequence
  Description of Artificial Sequence: Synthetic oligonucleotide
  Sense strand starting at position 3830 of SEQ ID NO: 1562406
cugaaaggguaauauuauu

SEQ ID NO: 1744480 - RNA, 19 nt, Artificial Sequence
  Description of Artificial Sequence: Synthetic oligonucleotide
  Antisense strand to SEQ ID NO: 1744479
aauaauauuacccuuucag

SEQ ID NO: 1744481 - RNA, 19 nt, Artificial Sequence
  Description of Artificial Sequence: Synthetic oligonucleotide
  Sense strand starting at position 3976 of SEQ ID NO: 1562406
ggcggaagugcugacauau

SEQ ID NO: 1744482 - RNA, 19 nt, Artificial Sequence
  Description of Artificial Sequence: Synthetic oligonucleotide
  Antisense strand to SEQ ID NO: 1744481
auaugucagcacuuccgcc

SEQ ID NO: 1744483 - RNA, 19 nt, Artificial Sequence
  Description of Artificial Sequence: Synthetic oligonucleotide
  Sense strand starting at position 214 of SEQ ID NO: 1562407
ucauaagucgcgcaccuaa

SEQ ID NO: 1744484 - RNA, 19 nt, Artificial Sequence
  Description of Artificial Sequence: Synthetic oligonucleotide
  Antisense strand to SEQ ID NO: 1744483
uuaggugcgcgacuuauga

SEQ ID NO: 1744485 - RNA, 19 nt, Artificial Sequence
  Description of Artificial Sequence: Synthetic oligonucleotide
  Sense strand starting at position 460 of SEQ ID NO: 1562407
ucgcauugcugcuaagcga

SEQ ID NO: 1744486 - RNA, 19 nt, Artificial Sequence
  Description of Artificial Sequence: Synthetic oligonucleotide
  Antisense strand to SEQ ID NO: 1744485
ucgcuuagcagcaaugcga

SEQ ID NO: 1744487 - RNA, 19 nt, Artificial Sequence
  Description of Artificial Sequence: Synthetic oligonucleotide
  Sense strand starting at position 701 of SEQ ID NO: 1562407
ugagccuuccugggaguga

SEQ ID NO: 1744488 - RNA, 19 nt, Artificial Sequence
  Description of Artificial Sequence: Synthetic oligonucleotide
  Antisense strand to SEQ ID NO: 1744487
ucacucccaggaaggcuca

SEQ ID NO: 1744489 - RNA, 19 nt, Artificial Sequence
  Description of Artificial Sequence: Synthetic oligonucleotide
  Sense strand starting at position 757 of SEQ ID NO: 1562407
gccacugucccuugugacu

SEQ ID NO: 1744490 - RNA, 19 nt, Artificial Sequence
  Description of Artificial Sequence: Synthetic oligonucleotide
  Antisense strand to SEQ ID NO: 1744489
agucacaagggacaguggc

SEQ ID NO: 1744491 - RNA, 19 nt, Artificial Sequence
  Description of Artificial Sequence: Synthetic oligonucleotide
  Sense strand starting at position 766 of SEQ ID NO: 1562407
ccuugugacuucuagguua

SEQ ID NO: 1744492 - RNA, 19 nt, Artificial Sequence
  Description of Artificial Sequence: Synthetic oligonucleotide
  Antisense strand to SEQ ID NO: 1744491
uaaccuagaagucacaagg

SEQ ID NO: 1744493 - RNA, 19 nt, Artificial Sequence
  Description of Artificial Sequence: Synthetic oligonucleotide
  Sense strand starting at position 768 of SEQ ID NO: 1562407
uugugacuucuagguuaag

SEQ ID NO: 1744494 - RNA, 19 nt, Artificial Sequence
  Description of Artificial Sequence: Synthetic oligonucleotide
  Antisense strand to SEQ ID NO: 1744493
cuuaaccuagaagucacaa

SEQ ID NO: 1744495 - RNA, 19 nt, Artificial Sequence
  Description of Artificial Sequence: Synthetic oligonucleotide
  Sense strand starting at position 769 of SEQ ID NO: 1562407
ugugacuucuagguuaagu

SEQ ID NO: 1744496 - RNA, 19 nt, Artificial Sequence
  Description of Artificial Sequence: Synthetic oligonucleotide
  Antisense strand to SEQ ID NO: 1744495
acuuaaccuagaagucaca

SEQ ID NO: 1744497 - RNA, 19 nt, Artificial Sequence
  Description of Artificial Sequence: Synthetic oligonucleotide
  Sense strand starting at position 771 of SEQ ID NO: 1562407
ugacuucuagguuaaguaa

SEQ ID NO: 1744498 - RNA, 19 nt, Artificial Sequence
  Description of Artificial Sequence: Synthetic oligonucleotide
  Antisense strand to SEQ ID NO: 1744497
uuacuuaaccuagaaguca

SEQ ID NO: 1744499 - RNA, 19 nt, Artificial Sequence
  Description of Artificial Sequence: Synthetic oligonucleotide
  Sense strand starting at position 804 of SEQ ID NO: 1562407
cggucauggcuggaggaga

SEQ ID NO: 1744500 - RNA, 19 nt, Artificial Sequence
  Description of Artificial Sequence: Synthetic oligonucleotide
  Antisense strand to SEQ ID NO: 1744499
ucuccuccagccaugaccg

SEQ ID NO: 1744501 - RNA, 19 nt, Artificial Sequence
  Description of Artificial Sequence: Synthetic oligonucleotide
  Sense strand starting at position 820 of SEQ ID NO: 1562407
agaccaaugucagcucaaa

SEQ ID NO: 1744502 - RNA, 19 nt, Artificial Sequence
  Description of Artificial Sequence: Synthetic oligonucleotide
  Antisense strand to SEQ ID NO: 1744501
uuugagcugacauuggucu

SEQ ID NO: 1744503 - RNA, 19 nt, Artificial Sequence
  Description of Artificial Sequence: Synthetic oligonucleotide
  Sense strand starting at position 844 of SEQ ID NO: 1562407
guguccucccaggagaaca

SEQ ID NO: 1744504 - RNA, 19 nt, Artificial Sequence
  Description of Artificial Sequence: Synthetic oligonucleotide
  Antisense strand to SEQ ID NO: 1744503
uguucuccugggaggacac

SEQ ID NO: 1744505 - RNA, 19 nt, Artificial Sequence
  Description of Artificial Sequence: Synthetic oligonucleotide
  Sense strand starting at position 1999 of SEQ ID NO: 1562407
ggugugagugcugguguga

SEQ ID NO: 1744506 - RNA, 19 nt, Artificial Sequence
  Description of Artificial Sequence: Synthetic oligonucleotide
  Antisense strand to SEQ ID NO: 1744505
ucacaccagcacucacacc

SEQ ID NO: 1744507 - RNA, 19 nt, Artificial Sequence
  Description of Artificial Sequence: Synthetic oligonucleotide
  Sense strand starting at position 2012 of SEQ ID NO: 1562407
gugugagguguguggguuu

SEQ ID NO: 1744508 - RNA, 19 nt, Artificial Sequence
  Description of Artificial Sequence: Synthetic oligonucleotide
  Antisense strand to SEQ ID NO: 1744507
aaacccacacaccucacac

SEQ ID NO: 1744509 - RNA, 19 nt, Artificial Sequence
  Description of Artificial Sequence: Synthetic oligonucleotide
  Sense strand starting at position 2105 of SEQ ID NO: 1562407
ccuuguuguggcugagacu

SEQ ID NO: 1744510 - RNA, 19 nt, Artificial Sequence
  Description of Artificial Sequence: Synthetic oligonucleotide
  Antisense strand to SEQ ID NO: 1744509
agucucagccacaacaagg

SEQ ID NO: 1744511 - RNA, 19 nt, Artificial Sequence
  Description of Artificial Sequence: Synthetic oligonucleotide
  Sense strand starting at position 2106 of SEQ ID NO: 1562407
cuuguuguggcugagacuu

SEQ ID NO: 1744512 - RNA, 19 nt, Artificial Sequence
  Description of Artificial Sequence: Synthetic oligonucleotide
  Antisense strand to SEQ ID NO: 1744511
aagucucagccacaacaag

SEQ ID NO: 1744513 - RNA, 19 nt, Artificial Sequence
  Description of Artificial Sequence: Synthetic oligonucleotide
  Sense strand starting at position 2145 of SEQ ID NO: 1562407
uaguuuacuugcuguggga

SEQ ID NO: 1744514 - RNA, 19 nt, Artificial Sequence
  Description of Artificial Sequence: Synthetic oligonucleotide
  Antisense strand to SEQ ID NO: 1744513
ucccacagcaaguaaacua

SEQ ID NO: 1744515 - RNA, 19 nt, Artificial Sequence
  Description of Artificial Sequence: Synthetic oligonucleotide
  Sense strand starting at position 2161 of SEQ ID NO: 1562407
ggauguuacugugguccca

SEQ ID NO: 1744516 - RNA, 19 nt, Artificial Sequence
  Description of Artificial Sequence: Synthetic oligonucleotide
  Antisense strand to SEQ ID NO: 1744515
ugggaccacaguaacaucc

SEQ ID NO: 1744517 - RNA, 19 nt, Artificial Sequence
  Description of Artificial Sequence: Synthetic oligonucleotide
  Sense strand starting at position 2277 of SEQ ID NO: 1562407
aguugaacagaucgugagu

SEQ ID NO: 1744518 - RNA, 19 nt, Artificial Sequence
  Description of Artificial Sequence: Synthetic oligonucleotide
  Antisense strand to SEQ ID NO: 1744517
acucacgaucuguucaacu

SEQ ID NO: 1744519 - RNA, 19 nt, Artificial Sequence
  Description of Artificial Sequence: Synthetic oligonucleotide
  Sense strand starting at position 2338 of SEQ ID NO: 1562407
gccuguaugucuuugcuau

SEQ ID NO: 1744520 - RNA, 19 nt, Artificial Sequence
  Description of Artificial Sequence: Synthetic oligonucleotide
  Antisense strand to SEQ ID NO: 1744519
auagcaaagacauacaggc

SEQ ID NO: 1744521 - RNA, 19 nt, Artificial Sequence
  Description of Artificial Sequence: Synthetic oligonucleotide
  Sense strand starting at position 2339 of SEQ ID NO: 1562407
ccuguaugucuuugcuauu

SEQ ID NO: 1744522 - RNA, 19 nt, Artificial Sequence
  Description of Artificial Sequence: Synthetic oligonucleotide
  Antisense strand to SEQ ID NO: 1744521
aauagcaaagacauacagg

SEQ ID NO: 1744523 - RNA, 19 nt, Artificial Sequence
  Description of Artificial Sequence: Synthetic oligonucleotide
  Sense strand starting at position 2418 of SEQ ID NO: 1562407
agaguucugcuccauugaa

SEQ ID NO: 1744524 - RNA, 19 nt, Artificial Sequence
  Description of Artificial Sequence: Synthetic oligonucleotide
  Antisense strand to SEQ ID NO: 1744523
uucaauggagcagaacucu

SEQ ID NO: 1744525 - RNA, 19 nt, Artificial Sequence
  Description of Artificial Sequence: Synthetic oligonucleotide
  Sense strand starting at position 2441 of SEQ ID NO: 1562407
gggugucucggcuaggaau

SEQ ID NO: 1744526 - RNA, 19 nt, Artificial Sequence
  Description of Artificial Sequence: Synthetic oligonucleotide
  Antisense strand to SEQ ID NO: 1744525
auuccuagccgagacaccc

SEQ ID NO: 1744527 - RNA, 19 nt, Artificial Sequence
  Description of Artificial Sequence: Synthetic oligonucleotide
  Sense strand starting at position 2442 of SEQ ID NO: 1562407
ggugucucggcuaggaaug

SEQ ID NO: 1744528 - RNA, 19 nt, Artificial Sequence
  Description of Artificial Sequence: Synthetic oligonucleotide
  Antisense strand to SEQ ID NO: 1744527
cauuccuagccgagacacc

SEQ ID NO: 1744529 - RNA, 19 nt, Artificial Sequence
  Description of Artificial Sequence: Synthetic oligonucleotide
  Sense strand starting at position 2560 of SEQ ID NO: 1562407
acccaagacugagaggaaa

SEQ ID NO: 1744530 - RNA, 19 nt, Artificial Sequence
  Description of Artificial Sequence: Synthetic oligonucleotide
  Antisense strand to SEQ ID NO: 1744529
uuuccucucagucuugggu

SEQ ID NO: 1744531 - RNA, 19 nt, Artificial Sequence
  Description of Artificial Sequence: Synthetic oligonucleotide
  Sense strand starting at position 2815 of SEQ ID NO: 1562407
guaggaaugcugggagaug

SEQ ID NO: 1744532 - RNA, 19 nt, Artificial Sequence
  Description of Artificial Sequence: Synthetic oligonucleotide
  Antisense strand to SEQ ID NO: 1744531
caucucccagcauuccuac

SEQ ID NO: 1744533 - RNA, 19 nt, Artificial Sequence
  Description of Artificial Sequence: Synthetic oligonucleotide
  Sense strand starting at position 2816 of SEQ ID NO: 1562407
uaggaaugcugggagauga

SEQ ID NO: 1744534 - RNA, 19 nt, Artificial Sequence
  Description of Artificial Sequence: Synthetic oligonucleotide
  Antisense strand to SEQ ID NO: 1744533
ucaucucccagcauuccua

SEQ ID NO: 1744535 - RNA, 19 nt, Artificial Sequence
  Description of Artificial Sequence: Synthetic oligonucleotide
  Sense strand starting at position 3336 of SEQ ID NO: 1562407
uguugagugucagcagcuu

SEQ ID NO: 1744536 - RNA, 19 nt, Artificial Sequence
  Description of Artificial Sequence: Synthetic oligonucleotide
  Antisense strand to SEQ ID NO: 1744535
aagcugcugacacucaaca

SEQ ID NO: 1744537 - RNA, 19 nt, Artificial Sequence
  Description of Artificial Sequence: Synthetic oligonucleotide
  Sense strand starting at position 3367 of SEQ ID NO: 1562407
ggugcaaggugucaauaga

SEQ ID NO: 1744538 - RNA, 19 nt, Artificial Sequence
  Description of Artificial Sequence: Synthetic oligonucleotide
  Antisense strand to SEQ ID NO: 1744537
ucuauugacaccuugcacc

SEQ ID NO: 1744539 - RNA, 19 nt, Artificial Sequence
  Description of Artificial Sequence: Synthetic oligonucleotide
  Sense strand starting at position 96 of SEQ ID NO: 1562408
cugucuggucuggacacau

SEQ ID NO: 1744540 - RNA, 19 nt, Artificial Sequence
  Description of Artificial Sequence: Synthetic oligonucleotide
  Antisense strand to SEQ ID NO: 1744539
auguguccagaccagacag

SEQ ID NO: 1744541 - RNA, 19 nt, Artificial Sequence
  Description of Artificial Sequence: Synthetic oligonucleotide
  Sense strand starting at position 127 of SEQ ID NO: 1562408
cugggacuccucugucauc

SEQ ID NO: 1744542 - RNA, 19 nt, Artificial Sequence
  Description of Artificial Sequence: Synthetic oligonucleotide
  Antisense strand to SEQ ID NO: 1744541
gaugacagaggagucccag

SEQ ID NO: 1744543 - RNA, 19 nt, Artificial Sequence
  Description of Artificial Sequence: Synthetic oligonucleotide
  Sense strand starting at position 319 of SEQ ID NO: 1562408
gcucucuccgaguggaacu

SEQ ID NO: 1744544 - RNA, 19 nt, Artificial Sequence
  Description of Artificial Sequence: Synthetic oligonucleotide
  Antisense strand to SEQ ID NO: 1744543
aguuccacucggagagagc

SEQ ID NO: 1744545 - RNA, 19 nt, Artificial Sequence
  Description of Artificial Sequence: Synthetic oligonucleotide
  Sense strand starting at position 514 of SEQ ID NO: 1562408
gugggacucagccagugaa

SEQ ID NO: 1744546 - RNA, 19 nt, Artificial Sequence
  Description of Artificial Sequence: Synthetic oligonucleotide
  Antisense strand to SEQ ID NO: 1744545
uucacuggcugagucccac

SEQ ID NO: 1744547 - RNA, 19 nt, Artificial Sequence
  Description of Artificial Sequence: Synthetic oligonucleotide
  Sense strand starting at position 517 of SEQ ID NO: 1562408
ggacucagccagugaacaa

SEQ ID NO: 1744548 - RNA, 19 nt, Artificial Sequence
  Description of Artificial Sequence: Synthetic oligonucleotide
  Antisense strand to SEQ ID NO: 1744547
uuguucacuggcugagucc

SEQ ID NO: 1744549 - RNA, 19 nt, Artificial Sequence
  Description of Artificial Sequence: Synthetic oligonucleotide
  Sense strand starting at position 600 of SEQ ID NO: 1562408
ggagcuuccaggugucaca

SEQ ID NO: 1744550 - RNA, 19 nt, Artificial Sequence
  Description of Artificial Sequence: Synthetic oligonucleotide
  Antisense strand to SEQ ID NO: 1744549
ugugacaccuggaagcucc

SEQ ID NO: 1744551 - RNA, 19 nt, Artificial Sequence
  Description of Artificial Sequence: Synthetic oligonucleotide
  Sense strand starting at position 1999 of SEQ ID NO: 1562408
ugagugugucagugaguga

SEQ ID NO: 1744552 - RNA, 19 nt, Artificial Sequence
  Description of Artificial Sequence: Synthetic oligonucleotide
  Antisense strand to SEQ ID NO: 1744551
ucacucacugacacacuca

SEQ ID NO: 1744553 - RNA, 19 nt, Artificial Sequence
  Description of Artificial Sequence: Synthetic oligonucleotide
  Sense strand starting at position 2002 of SEQ ID NO: 1562408
gugugucagugagugaguu

SEQ ID NO: 1744554 - RNA, 19 nt, Artificial Sequence
  Description of Artificial Sequence: Synthetic oligonucleotide
  Antisense strand to SEQ ID NO: 1744553
aacucacucacugacacac

SEQ ID NO: 1744555 - RNA, 19 nt, Artificial Sequence
  Description of Artificial Sequence: Synthetic oligonucleotide
  Sense strand starting at position 2003 of SEQ ID NO: 1562408
ugugucagugagugaguuu

SEQ ID NO: 1744556 - RNA, 19 nt, Artificial Sequence
  Description of Artificial Sequence: Synthetic oligonucleotide
  Antisense strand to SEQ ID NO: 1744555
aaacucacucacugacaca

SEQ ID NO: 1744557 - RNA, 19 nt, Artificial Sequence
  Description of Artificial Sequence: Synthetic oligonucleotide
  Sense strand starting at position 2015 of SEQ ID NO: 1562408
ugaguuugugaguguguga

SEQ ID NO: 1744558 - RNA, 19 nt, Artificial Sequence
  Description of Artificial Sequence: Synthetic oligonucleotide
  Antisense strand to SEQ ID NO: 1744557
ucacacacucacaaacuca

SEQ ID NO: 1744559 - RNA, 19 nt, Artificial Sequence
  Description of Artificial Sequence: Synthetic oligonucleotide
  Sense strand starting at position 2139 of SEQ ID NO: 1562408
gauguuuguuugcugguga

SEQ ID NO: 1744560 - RNA, 19 nt, Artificial Sequence
  Description of Artificial Sequence: Synthetic oligonucleotide
  Antisense strand to SEQ ID NO: 1744559
ucaccagcaaacaaacauc

SEQ ID NO: 1744561 - RNA, 19 nt, Artificial Sequence
  Description of Artificial Sequence: Synthetic oligonucleotide
  Sense strand starting at position 2180 of SEQ ID NO: 1562408
cugucacaccugggcuaua

SEQ ID NO: 1744562 - RNA, 19 nt, Artificial Sequence
  Description of Artificial Sequence: Synthetic oligonucleotide
  Antisense strand to SEQ ID NO: 1744561
uauagcccaggugugacag

SEQ ID NO: 1744563 - RNA, 19 nt, Artificial Sequence
  Description of Artificial Sequence: Synthetic oligonucleotide
  Sense strand starting at position 2191 of SEQ ID NO: 1562408
gggcuauagucuguugcau

SEQ ID NO: 1744564 - RNA, 19 nt, Artificial Sequence
  Description of Artificial Sequence: Synthetic oligonucleotide
  Antisense strand to SEQ ID NO: 1744563
augcaacagacuauagccc

SEQ ID NO: 1744565 - RNA, 19 nt, Artificial Sequence
  Description of Artificial Sequence: Synthetic oligonucleotide
  Sense strand starting at position 2197 of SEQ ID NO: 1562408
uagucuguugcauguggaa

SEQ ID NO: 1744566 - RNA, 19 nt, Artificial Sequence
  Description of Artificial Sequence: Synthetic oligonucleotide
  Antisense strand to SEQ ID NO: 1744565
uuccacaugcaacagacua

SEQ ID NO: 1744567 - RNA, 19 nt, Artificial Sequence
  Description of Artificial Sequence: Synthetic oligonucleotide
  Sense strand starting at position 2407 of SEQ ID NO: 1562408
aauuauuuccuguggugca

SEQ ID NO: 1744568 - RNA, 19 nt, Artificial Sequence
  Description of Artificial Sequence: Synthetic oligonucleotide
  Antisense strand to SEQ ID NO: 1744567
ugcaccacaggaaauaauu

SEQ ID NO: 1744569 - RNA, 19 nt, Artificial Sequence
  Description of Artificial Sequence: Synthetic oligonucleotide
  Sense strand starting at position 2420 of SEQ ID NO: 1562408
ggugcaaacuccuccucua

SEQ ID NO: 1744570 - RNA, 19 nt, Artificial Sequence
  Description of Artificial Sequence: Synthetic oligonucleotide
  Antisense strand to SEQ ID NO: 1744569
uagaggaggaguuugcacc

SEQ ID NO: 1744571 - RNA, 19 nt, Artificial Sequence
  Description of Artificial Sequence: Synthetic oligonucleotide
  Sense strand starting at position 2804 of SEQ ID NO: 1562408
gcugcaugaucuuugauga

SEQ ID NO: 1744572 - RNA, 19 nt, Artificial Sequence
  Description of Artificial Sequence: Synthetic oligonucleotide
  Antisense strand to SEQ ID NO: 1744571
ucaucaaagaucaugcagc

SEQ ID NO: 1744573 - RNA, 19 nt, Artificial Sequence
  Description of Artificial Sequence: Synthetic oligonucleotide
  Sense strand starting at position 2805 of SEQ ID NO: 1562408
cugcaugaucuuugaugau

SEQ ID NO: 1744574 - RNA, 19 nt, Artificial Sequence
  Description of Artificial Sequence: Synthetic oligonucleotide
  Antisense strand to SEQ ID NO: 1744573
aucaucaaagaucaugcag

SEQ ID NO: 1744575 - RNA, 19 nt, Artificial Sequence
  Description of Artificial Sequence: Synthetic oligonucleotide
  Sense strand starting at position 2818 of SEQ ID NO: 1562408
gaugaugaauuguuaucac

SEQ ID NO: 1744576 - RNA, 19 nt, Artificial Sequence
  Description of Artificial Sequence: Synthetic oligonucleotide
  Antisense strand to SEQ ID NO: 1744575
gugauaacaauucaucauc

SEQ ID NO: 1744577 - RNA, 19 nt, Artificial Sequence
  Description of Artificial Sequence: Synthetic oligonucleotide
  Sense strand starting at position 2856 of SEQ ID NO: 1562408
ccgagcuucuugccuuaua

SEQ ID NO: 1744578 - RNA, 19 nt, Artificial Sequence
  Description of Artificial Sequence: Synthetic oligonucleotide
  Antisense strand to SEQ ID NO: 1744577
uauaaggcaagaagcucgg

SEQ ID NO: 1744579 - RNA, 19 nt, Artificial Sequence
  Description of Artificial Sequence: Synthetic oligonucleotide
  Sense strand starting at position 2857 of SEQ ID NO: 1562408
cgagcuucuugccuuauaa

SEQ ID NO: 1744580 - RNA, 19 nt, Artificial Sequence
  Description of Artificial Sequence: Synthetic oligonucleotide
  Antisense strand to SEQ ID NO: 1744579
uuauaaggcaagaagcucg

SEQ ID NO: 1744581 - RNA, 19 nt, Artificial Sequence
  Description of Artificial Sequence: Synthetic oligonucleotide
  Sense strand starting at position 2882 of SEQ ID NO: 1562408
ccugaucacuuuccaggaa

SEQ ID NO: 1744582 - RNA, 19 nt, Artificial Sequence
  Description of Artificial Sequence: Synthetic oligonucleotide
  Antisense strand to SEQ ID NO: 1744581
uuccuggaaagugaucagg

SEQ ID NO: 1744583 - RNA, 19 nt, Artificial Sequence
  Description of Artificial Sequence: Synthetic oligonucleotide
  Sense strand starting at position 2995 of SEQ ID NO: 1562408
agacguauuacacgauguu

SEQ ID NO: 1744584 - RNA, 19 nt, Artificial Sequence
  Description of Artificial Sequence: Synthetic oligonucleotide
  Antisense strand to SEQ ID NO: 1744583
aacaucguguaauacgucu

SEQ ID NO: 1744585 - RNA, 19 nt, Artificial Sequence
  Description of Artificial Sequence: Synthetic oligonucleotide
  Sense strand starting at position 3004 of SEQ ID NO: 1562408
acacgauguugaguagaac

SEQ ID NO: 1744586 - RNA, 19 nt, Artificial Sequence
  Description of Artificial Sequence: Synthetic oligonucleotide
  Antisense strand to SEQ ID NO: 1744585
guucuacucaacaucgugu

SEQ ID NO: 1744587 - RNA, 19 nt, Artificial Sequence
  Description of Artificial Sequence: Synthetic oligonucleotide
  Sense strand starting at position 3010 of SEQ ID NO: 1562408
uguugaguagaacgucuuu

SEQ ID NO: 1744588 - RNA, 19 nt, Artificial Sequence
  Description of Artificial Sequence: Synthetic oligonucleotide
  Antisense strand to SEQ ID NO: 1744587
aaagacguucuacucaaca

SEQ ID NO: 1744589 - RNA, 19 nt, Artificial Sequence
  Description of Artificial Sequence: Synthetic oligonucleotide
  Sense strand starting at position 3080 of SEQ ID NO: 1562408
gcuaacauucugggucaga

SEQ ID NO: 1744590 - RNA, 19 nt, Artificial Sequence
  Description of Artificial Sequence: Synthetic oligonucleotide
  Antisense strand to SEQ ID NO: 1744589
ucugacccagaauguuagc

SEQ ID NO: 1744591 - RNA, 19 nt, Artificial Sequence
  Description of Artificial Sequence: Synthetic oligonucleotide
  Sense strand starting at position 3081 of SEQ ID NO: 1562408
cuaacauucugggucagac

SEQ ID NO: 1744592 - RNA, 19 nt, Artificial Sequence
  Description of Artificial Sequence: Synthetic oligonucleotide
  Antisense strand to SEQ ID NO: 1744591
gucugacccagaauguuag

SEQ ID NO: 1744593 - RNA, 19 nt, Artificial Sequence
  Description of Artificial Sequence: Synthetic oligonucleotide
  Sense strand starting at position 3126 of SEQ ID NO: 1562408
gacagaaguugaccagcua

SEQ ID NO: 1744594 - RNA, 19 nt, Artificial Sequence
  Description of Artificial Sequence: Synthetic oligonucleotide
  Antisense strand to SEQ ID NO: 1744593
uagcuggucaacuucuguc

SEQ ID NO: 1744595 - RNA, 19 nt, Artificial Sequence
  Description of Artificial Sequence: Synthetic oligonucleotide
  Sense strand starting at position 3127 of SEQ ID NO: 1562408
acagaaguugaccagcuau

SEQ ID NO: 1744596 - RNA, 19 nt, Artificial Sequence
  Description of Artificial Sequence: Synthetic oligonucleotide
  Antisense strand to SEQ ID NO: 1744595
auagcuggucaacuucugu

SEQ ID NO: 1744597 - RNA, 19 nt, Artificial Sequence
  Description of Artificial Sequence: Synthetic oligonucleotide
  Sense strand starting at position 3233 of SEQ ID NO: 1562408
guggugucccagggagaga

SEQ ID NO: 1744598 - RNA, 19 nt, Artificial Sequence
  Description of Artificial Sequence: Synthetic oligonucleotide
  Antisense strand to SEQ ID NO: 1744597
ucucucccugggacaccac

SEQ ID NO: 1744599 - RNA, 19 nt, Artificial Sequence
  Description of Artificial Sequence: Synthetic oligonucleotide
  Sense strand starting at position 3244 of SEQ ID NO: 1562408
gggagagaguccuccagcu

SEQ ID NO: 1744600 - RNA, 19 nt, Artificial Sequence
  Description of Artificial Sequence: Synthetic oligonucleotide
  Antisense strand to SEQ ID NO: 1744599
agcuggaggacucucuccc

SEQ ID NO: 1744601 - RNA, 19 nt, Artificial Sequence
  Description of Artificial Sequence: Synthetic oligonucleotide
  Sense strand starting at position 3246 of SEQ ID NO: 1562408
gagagaguccuccagcuac

SEQ ID NO: 1744602 - RNA, 19 nt, Artificial Sequence
  Description of Artificial Sequence: Synthetic oligonucleotide
  Antisense strand to SEQ ID NO: 1744601
guagcuggaggacucucuc

SEQ ID NO: 1744603 - RNA, 19 nt, Artificial Sequence
  Description of Artificial Sequence: Synthetic oligonucleotide
  Sense strand starting at position 3283 of SEQ ID NO: 1562408
uaaaguggguccucacuga

SEQ ID NO: 1744604 - RNA, 19 nt, Artificial Sequence
  Description of Artificial Sequence: Synthetic oligonucleotide
  Antisense strand to SEQ ID NO: 1744603
ucagugaggacccacuuua

SEQ ID NO: 1744605 - RNA, 19 nt, Artificial Sequence
  Description of Artificial Sequence: Synthetic oligonucleotide
  Sense strand starting at position 3610 of SEQ ID NO: 1562408
aggccauagcuuuaugaua

SEQ ID NO: 1744606 - RNA, 19 nt, Artificial Sequence
  Description of Artificial Sequence: Synthetic oligonucleotide
  Antisense strand to SEQ ID NO: 1744605
uaucauaaagcuauggccu

SEQ ID NO: 1744607 - RNA, 19 nt, Artificial Sequence
  Description of Artificial Sequence: Synthetic oligonucleotide
  Sense strand starting at position 3701 of SEQ ID NO: 1562408
accagagucuugcuauguu

SEQ ID NO: 1744608 - RNA, 19 nt, Artificial Sequence
  Description of Artificial Sequence: Synthetic oligonucleotide
  Antisense strand to SEQ ID NO: 1744607
aacauagcaagacucuggu

SEQ ID NO: 1744609 - RNA, 19 nt, Artificial Sequence
  Description of Artificial Sequence: Synthetic oligonucleotide
  Sense strand starting at position 3818 of SEQ ID NO: 1562408
aucaguauuucugugccaa

SEQ ID NO: 1744610 - RNA, 19 nt, Artificial Sequence
  Description of Artificial Sequence: Synthetic oligonucleotide
  Antisense strand to SEQ ID NO: 1744609
uuggcacagaaauacugau

SEQ ID NO: 1744611 - RNA, 19 nt, Artificial Sequence
  Description of Artificial Sequence: Synthetic oligonucleotide
  Sense strand starting at position 3819 of SEQ ID NO: 1562408
ucaguauuucugugccaag

SEQ ID NO: 1744612 - RNA, 19 nt, Artificial Sequence
  Description of Artificial Sequence: Synthetic oligonucleotide
  Antisense strand to SEQ ID NO: 1744611
cuuggcacagaaauacuga

SEQ ID NO: 1744613 - RNA, 19 nt, Artificial Sequence
  Description of Artificial Sequence: Synthetic oligonucleotide
  Sense strand starting at position 3820 of SEQ ID NO: 1562408
caguauuucugugccaagu

SEQ ID NO: 1744614 - RNA, 19 nt, Artificial Sequence
  Description of Artificial Sequence: Synthetic oligonucleotide
  Antisense strand to SEQ ID NO: 1744613
acuuggcacagaaauacug

SEQ ID NO: 1744615 - RNA, 19 nt, Artificial Sequence
  Description of Artificial Sequence: Synthetic oligonucleotide
  Sense strand starting at position 3910 of SEQ ID NO: 1562408
caggaagugugguugucuu

SEQ ID NO: 1744616 - RNA, 19 nt, Artificial Sequence
  Description of Artificial Sequence: Synthetic oligonucleotide
  Antisense strand to SEQ ID NO: 1744615
aagacaaccacacuuccug

SEQ ID NO: 1744617 - RNA, 19 nt, Artificial Sequence
  Description of Artificial Sequence: Synthetic oligonucleotide
  Sense strand starting at position 3918 of SEQ ID NO: 1562408
gugguugucuuguucacca

SEQ ID NO: 1744618 - RNA, 19 nt, Artificial Sequence
  Description of Artificial Sequence: Synthetic oligonucleotide
  Antisense strand to SEQ ID NO: 1744617
uggugaacaagacaaccac

SEQ ID NO: 1744619 - RNA, 19 nt, Artificial Sequence
  Description of Artificial Sequence: Synthetic oligonucleotide
  Sense strand starting at position 73 of SEQ ID NO: 1562409
uccuuccaucccgauugau

SEQ ID NO: 1744620 - RNA, 19 nt, Artificial Sequence
  Description of Artificial Sequence: Synthetic oligonucleotide
  Antisense strand to SEQ ID NO: 1744619
aucaaucgggauggaagga

SEQ ID NO: 1744621 - RNA, 19 nt, Artificial Sequence
  Description of Artificial Sequence: Synthetic oligonucleotide
  Sense strand starting at position 76 of SEQ ID NO: 1562409
uuccaucccgauugaucau

SEQ ID NO: 1744622 - RNA, 19 nt, Artificial Sequence
  Description of Artificial Sequence: Synthetic oligonucleotide
  Antisense strand to SEQ ID NO: 1744621
augaucaaucgggauggaa

SEQ ID NO: 1744623 - RNA, 19 nt, Artificial Sequence
  Description of Artificial Sequence: Synthetic oligonucleotide
  Sense strand starting at position 677 of SEQ ID NO: 1562409
auaagauaauccuugguuu

SEQ ID NO: 1744624 - RNA, 19 nt, Artificial Sequence
  Description of Artificial Sequence: Synthetic oligonucleotide
  Antisense strand to SEQ ID NO: 1744623
aaaccaaggauuaucuuau

SEQ ID NO: 1744625 - RNA, 19 nt, Artificial Sequence
  Description of Artificial Sequence: Synthetic oligonucleotide
  Sense strand starting at position 678 of SEQ ID NO: 1562409
uaagauaauccuugguuug

SEQ ID NO: 1744626 - RNA, 19 nt, Artificial Sequence
  Description of Artificial Sequence: Synthetic oligonucleotide
  Antisense strand to SEQ ID NO: 1744625
caaaccaaggauuaucuua

SEQ ID NO: 1744627 - RNA, 19 nt, Artificial Sequence
  Description of Artificial Sequence: Synthetic oligonucleotide
  Sense strand starting at position 680 of SEQ ID NO: 1562409
agauaauccuugguuuggu

SEQ ID NO: 1744628 - RNA, 19 nt, Artificial Sequence
  Description of Artificial Sequence: Synthetic oligonucleotide
  Antisense strand to SEQ ID NO: 1744627
accaaaccaaggauuaucu

SEQ ID NO: 1744629 - RNA, 19 nt, Artificial Sequence
  Description of Artificial Sequence: Synthetic oligonucleotide
  Sense strand starting at position 1098 of SEQ ID NO: 1562409
ccaacuaaugcagguuuau

SEQ ID NO: 1744630 - RNA, 19 nt, Artificial Sequence
  Description of Artificial Sequence: Synthetic oligonucleotide
  Antisense strand to SEQ ID NO: 1744629
auaaaccugcauuaguugg

SEQ ID NO: 1744631 - RNA, 19 nt, Artificial Sequence
  Description of Artificial Sequence: Synthetic oligonucleotide
  Sense strand starting at position 1104 of SEQ ID NO: 1562409
aaugcagguuuauugagaa

SEQ ID NO: 1744632 - RNA, 19 nt, Artificial Sequence
  Description of Artificial Sequence: Synthetic oligonucleotide
  Antisense strand to SEQ ID NO: 1744631
uucucaauaaaccugcauu

SEQ ID NO: 1744633 - RNA, 19 nt, Artificial Sequence
  Description of Artificial Sequence: Synthetic oligonucleotide
  Sense strand starting at position 1368 of SEQ ID NO: 1562409
caagaagggucagcuauga

SEQ ID NO: 1744634 - RNA, 19 nt, Artificial Sequence
  Description of Artificial Sequence: Synthetic oligonucleotide
  Antisense strand to SEQ ID NO: 1744633
ucauagcugacccuucuug

SEQ ID NO: 1744635 - RNA, 19 nt, Artificial Sequence
  Description of Artificial Sequence: Synthetic oligonucleotide
  Sense strand starting at position 1442 of SEQ ID NO: 1562409
cguggagucuugauucgcu

SEQ ID NO: 1744636 - RNA, 19 nt, Artificial Sequence
  Description of Artificial Sequence: Synthetic oligonucleotide
  Antisense strand to SEQ ID NO: 1744635
agcgaaucaagacuccacg

SEQ ID NO: 1744637 - RNA, 19 nt, Artificial Sequence
  Description of Artificial Sequence: Synthetic oligonucleotide
  Sense strand starting at position 1553 of SEQ ID NO: 1562409
aguagagacuccucccacu

SEQ ID NO: 1744638 - RNA, 19 nt, Artificial Sequence
  Description of Artificial Sequence: Synthetic oligonucleotide
  Antisense strand to SEQ ID NO: 1744637
agugggaggagucucuacu

SEQ ID NO: 1744639 - RNA, 19 nt, Artificial Sequence
  Description of Artificial Sequence: Synthetic oligonucleotide
  Sense strand starting at position 1688 of SEQ ID NO: 1562409
guuggaaauacagguaguu

SEQ ID NO: 1744640 - RNA, 19 nt, Artificial Sequence
  Description of Artificial Sequence: Synthetic oligonucleotide
  Antisense strand to SEQ ID NO: 1744639
aacuaccuguauuuccaac

SEQ ID NO: 1744641 - RNA, 19 nt, Artificial Sequence
  Description of Artificial Sequence: Synthetic oligonucleotide
  Sense strand starting at position 1733 of SEQ ID NO: 1562409
guuggagacacaugaaguu

SEQ ID NO: 1744642 - RNA, 19 nt, Artificial Sequence
  Description of Artificial Sequence: Synthetic oligonucleotide
  Antisense strand to SEQ ID NO: 1744641
aacuucaugugucuccaac

SEQ ID NO: 1744643 - RNA, 19 nt, Artificial Sequence
  Description of Artificial Sequence: Synthetic oligonucleotide
  Sense strand starting at position 1921 of SEQ ID NO: 1562409
cuccaaugggccuggaaga

SEQ ID NO: 1744644 - RNA, 19 nt, Artificial Sequence
  Description of Artificial Sequence: Synthetic oligonucleotide
  Antisense strand to SEQ ID NO: 1744643
ucuuccaggcccauuggag

SEQ ID NO: 1744645 - RNA, 19 nt, Artificial Sequence
  Description of Artificial Sequence: Synthetic oligonucleotide
  Sense strand starting at position 2003 of SEQ ID NO: 1562409
aaguuaccuccugaguugu

SEQ ID NO: 1744646 - RNA, 19 nt, Artificial Sequence
  Description of Artificial Sequence: Synthetic oligonucleotide
  Antisense strand to SEQ ID NO: 1744645
acaacucaggagguaacuu

SEQ ID NO: 1744647 - RNA, 19 nt, Artificial Sequence
  Description of Artificial Sequence: Synthetic oligonucleotide
  Sense strand starting at position 2018 of SEQ ID NO: 1562409
uugugaaugucacuccaga

SEQ ID NO: 1744648 - RNA, 19 nt, Artificial Sequence
  Description of Artificial Sequence: Synthetic oligonucleotide
  Antisense strand to SEQ ID NO: 1744647
ucuggagugacauucacaa

SEQ ID NO: 1744649 - RNA, 19 nt, Artificial Sequence
  Description of Artificial Sequence: Synthetic oligonucleotide
  Sense strand starting at position 2107 of SEQ ID NO: 1562409
agaccaguuugccuuagaa

SEQ ID NO: 1744650 - RNA, 19 nt, Artificial Sequence
  Description of Artificial Sequence: Synthetic oligonucleotide
  Antisense strand to SEQ ID NO: 1744649
uucuaaggcaaacuggucu

SEQ ID NO: 1744651 - RNA, 19 nt, Artificial Sequence
  Description of Artificial Sequence: Synthetic oligonucleotide
  Sense strand starting at position 2109 of SEQ ID NO: 1562409
accaguuugccuuagaaca

SEQ ID NO: 1744652 - RNA, 19 nt, Artificial Sequence
  Description of Artificial Sequence: Synthetic oligonucleotide
  Antisense strand to SEQ ID NO: 1744651
uguucuaaggcaaacuggu

SEQ ID NO: 1744653 - RNA, 19 nt, Artificial Sequence
  Description of Artificial Sequence: Synthetic oligonucleotide
  Sense strand starting at position 2208 of SEQ ID NO: 1562409
acaagucuucuguacugua

SEQ ID NO: 1744654 - RNA, 19 nt, Artificial Sequence
  Description of Artificial Sequence: Synthetic oligonucleotide
  Antisense strand to SEQ ID NO: 1744653
uacaguacagaagacuugu

SEQ ID NO: 1744655 - RNA, 19 nt, Artificial Sequence
  Description of Artificial Sequence: Synthetic oligonucleotide
  Sense strand starting at position 2316 of SEQ ID NO: 1562409
gaguguugaccugacacuc

SEQ ID NO: 1744656 - RNA, 19 nt, Artificial Sequence
  Description of Artificial Sequence: Synthetic oligonucleotide
  Antisense strand to SEQ ID NO: 1744655
gagugucaggucaacacuc

SEQ ID NO: 1744657 - RNA, 19 nt, Artificial Sequence
  Description of Artificial Sequence: Synthetic oligonucleotide
  Sense strand starting at position 2479 of SEQ ID NO: 1562409
cggagcuccucauugggaa

SEQ ID NO: 1744658 - RNA, 19 nt, Artificial Sequence
  Description of Artificial Sequence: Synthetic oligonucleotide
  Antisense strand to SEQ ID NO: 1744657
uucccaaugaggagcuccg

SEQ ID NO: 1744659 - RNA, 19 nt, Artificial Sequence
  Description of Artificial Sequence: Synthetic oligonucleotide
  Sense strand starting at position 2495 of SEQ ID NO: 1562409
gaaggugccuccuugaaua

SEQ ID NO: 1744660 - RNA, 19 nt, Artificial Sequence
  Description of Artificial Sequence: Synthetic oligonucleotide
  Antisense strand to SEQ ID NO: 1744659
uauucaaggaggcaccuuc

SEQ ID NO: 1744661 - RNA, 19 nt, Artificial Sequence
  Description of Artificial Sequence: Synthetic oligonucleotide
  Sense strand starting at position 2559 of SEQ ID NO: 1562409
agagacuuguauccaaagu

SEQ ID NO: 1744662 - RNA, 19 nt, Artificial Sequence
  Description of Artificial Sequence: Synthetic oligonucleotide
  Antisense strand to SEQ ID NO: 1744661
acuuuggauacaagucucu

SEQ ID NO: 1744663 - RNA, 19 nt, Artificial Sequence
  Description of Artificial Sequence: Synthetic oligonucleotide
  Sense strand starting at position 2701 of SEQ ID NO: 1562409
cuguauuuguagccaagac

SEQ ID NO: 1744664 - RNA, 19 nt, Artificial Sequence
  Description of Artificial Sequence: Synthetic oligonucleotide
  Antisense strand to SEQ ID NO: 1744663
gucuuggcuacaaauacag

SEQ ID NO: 1744665 - RNA, 19 nt, Artificial Sequence
  Description of Artificial Sequence: Synthetic oligonucleotide
  Sense strand starting at position 2736 of SEQ ID NO: 1562409
ggaugagcuuuauuccuaa

SEQ ID NO: 1744666 - RNA, 19 nt, Artificial Sequence
  Description of Artificial Sequence: Synthetic oligonucleotide
  Antisense strand to SEQ ID NO: 1744665
uuaggaauaaagcucaucc

SEQ ID NO: 1744667 - RNA, 19 nt, Artificial Sequence
  Description of Artificial Sequence: Synthetic oligonucleotide
  Sense strand starting at position 2972 of SEQ ID NO: 1562409
cauugucuccaucagggau

SEQ ID NO: 1744668 - RNA, 19 nt, Artificial Sequence
  Description of Artificial Sequence: Synthetic oligonucleotide
  Antisense strand to SEQ ID NO: 1744667
aucccugauggagacaaug

SEQ ID NO: 1744669 - RNA, 19 nt, Artificial Sequence
  Description of Artificial Sequence: Synthetic oligonucleotide
  Sense strand starting at position 3022 of SEQ ID NO: 1562409
cuuaaucaauguuugguaa

SEQ ID NO: 1744670 - RNA, 19 nt, Artificial Sequence
  Description of Artificial Sequence: Synthetic oligonucleotide
  Antisense strand to SEQ ID NO: 1744669
uuaccaaacauugauuaag

SEQ ID NO: 1744671 - RNA, 19 nt, Artificial Sequence
  Description of Artificial Sequence: Synthetic oligonucleotide
  Sense strand starting at position 3025 of SEQ ID NO: 1562409
aaucaauguuugguaauga

SEQ ID NO: 1744672 - RNA, 19 nt, Artificial Sequence
  Description of Artificial Sequence: Synthetic oligonucleotide
  Antisense strand to SEQ ID NO: 1744671
ucauuaccaaacauugauu

SEQ ID NO: 1744673 - RNA, 19 nt, Artificial Sequence
  Description of Artificial Sequence: Synthetic oligonucleotide
  Sense strand starting at position 3035 of SEQ ID NO: 1562409
ugguaaugaagagaugugu

SEQ ID NO: 1744674 - RNA, 19 nt, Artificial Sequence
  Description of Artificial Sequence: Synthetic oligonucleotide
  Antisense strand to SEQ ID NO: 1744673
acacaucucuucauuacca

SEQ ID NO: 1744675 - RNA, 19 nt, Artificial Sequence
  Description of Artificial Sequence: Synthetic oligonucleotide
  Sense strand starting at position 3252 of SEQ ID NO: 1562409
agugguauuucugucccaa

SEQ ID NO: 1744676 - RNA, 19 nt, Artificial Sequence
  Description of Artificial Sequence: Synthetic oligonucleotide
  Antisense strand to SEQ ID NO: 1744675
uugggacagaaauaccacu

SEQ ID NO: 1744677 - RNA, 19 nt, Artificial Sequence
  Description of Artificial Sequence: Synthetic oligonucleotide
  Sense strand starting at position 3277 of SEQ ID NO: 1562409
uguagcaucugacucauuu

SEQ ID NO: 1744678 - RNA, 19 nt, Artificial Sequence
  Description of Artificial Sequence: Synthetic oligonucleotide
  Antisense strand to SEQ ID NO: 1744677
aaaugagucagaugcuaca

SEQ ID NO: 1744679 - RNA, 19 nt, Artificial Sequence
  Description of Artificial Sequence: Synthetic oligonucleotide
  Sense strand starting at position 3471 of SEQ ID NO: 1562409
auagcaugauucccagaua

SEQ ID NO: 1744680 - RNA, 19 nt, Artificial Sequence
  Description of Artificial Sequence: Synthetic oligonucleotide
  Antisense strand to SEQ ID NO: 1744679
uaucugggaaucaugcuau

SEQ ID NO: 1744681 - RNA, 19 nt, Artificial Sequence
  Description of Artificial Sequence: Synthetic oligonucleotide
  Sense strand starting at position 3474 of SEQ ID NO: 1562409
gcaugauucccagauauca

SEQ ID NO: 1744682 - RNA, 19 nt, Artificial Sequence
  Description of Artificial Sequence: Synthetic oligonucleotide
  Antisense strand to SEQ ID NO: 1744681
ugauaucugggaaucaugc

SEQ ID NO: 1744683 - RNA, 19 nt, Artificial Sequence
  Description of Artificial Sequence: Synthetic oligonucleotide
  Sense strand starting at position 3525 of SEQ ID NO: 1562409
caccauguguucccaggaa

SEQ ID NO: 1744684 - RNA, 19 nt, Artificial Sequence
  Description of Artificial Sequence: Synthetic oligonucleotide
  Antisense strand to SEQ ID NO: 1744683
uuccugggaacacauggug

SEQ ID NO: 1744685 - RNA, 19 nt, Artificial Sequence
  Description of Artificial Sequence: Synthetic oligonucleotide
  Sense strand starting at position 3602 of SEQ ID NO: 1562409
cacagaggguaucuuaguu

SEQ ID NO: 1744686 - RNA, 19 nt, Artificial Sequence
  Description of Artificial Sequence: Synthetic oligonucleotide
  Antisense strand to SEQ ID NO: 1744685
aacuaagauacccucugug

SEQ ID NO: 1744687 - RNA, 19 nt, Artificial Sequence
  Description of Artificial Sequence: Synthetic oligonucleotide
  Sense strand starting at position 3674 of SEQ ID NO: 1562409
auggauuacuaguuuacag

SEQ ID NO: 1744688 - RNA, 19 nt, Artificial Sequence
  Description of Artificial Sequence: Synthetic oligonucleotide
  Antisense strand to SEQ ID NO: 1744687
cuguaaacuaguaauccau

SEQ ID NO: 1744689 - RNA, 19 nt, Artificial Sequence
  Description of Artificial Sequence: Synthetic oligonucleotide
  Sense strand starting at position 3757 of SEQ ID NO: 1562409
aucugaagugaguaguaga

SEQ ID NO: 1744690 - RNA, 19 nt, Artificial Sequence
  Description of Artificial Sequence: Synthetic oligonucleotide
  Antisense strand to SEQ ID NO: 1744689
ucuacuacucacuucagau

SEQ ID NO: 1744691 - RNA, 19 nt, Artificial Sequence
  Description of Artificial Sequence: Synthetic oligonucleotide
  Sense strand starting at position 3805 of SEQ ID NO: 1562409
ugccacauuccuggaauga

SEQ ID NO: 1744692 - RNA, 19 nt, Artificial Sequence
  Description of Artificial Sequence: Synthetic oligonucleotide
  Antisense strand to SEQ ID NO: 1744691
ucauuccaggaauguggca

SEQ ID NO: 1744693 - RNA, 19 nt, Artificial Sequence
  Description of Artificial Sequence: Synthetic oligonucleotide
  Sense strand starting at position 3806 of SEQ ID NO: 1562409
gccacauuccuggaaugac

SEQ ID NO: 1744694 - RNA, 19 nt, Artificial Sequence
  Description of Artificial Sequence: Synthetic oligonucleotide
  Antisense strand to SEQ ID NO: 1744693
gucauuccaggaauguggc

SEQ ID NO: 1744695 - RNA, 19 nt, Artificial Sequence
  Description of Artificial Sequence: Synthetic oligonucleotide
  Sense strand starting at position 3969 of SEQ ID NO: 1562409
caggcauugaguuaaaggu

SEQ ID NO: 1744696 - RNA, 19 nt, Artificial Sequence
  Description of Artificial Sequence: Synthetic oligonucleotide
  Antisense strand to SEQ ID NO: 1744695
accuuuaacucaaugccug

SEQ ID NO: 1744697 - RNA, 19 nt, Artificial Sequence
  Description of Artificial Sequence: Synthetic oligonucleotide
  Sense strand starting at position 3977 of SEQ ID NO: 1562409
gaguuaaagguuuguacaa

SEQ ID NO: 1744698 - RNA, 19 nt, Artificial Sequence
  Description of Artificial Sequence: Synthetic oligonucleotide
  Antisense strand to SEQ ID NO: 1744697
uuguacaaaccuuuaacuc

SEQ ID NO: 1744699 - RNA, 19 nt, Artificial Sequence
  Description of Artificial Sequence: Synthetic oligonucleotide
  Sense strand starting at position 818 of SEQ ID NO: 1562410
ugucucaaaucagcuagaa

SEQ ID NO: 1744700 - RNA, 19 nt, Artificial Sequence
  Description of Artificial Sequence: Synthetic oligonucleotide
  Antisense strand to SEQ ID NO: 1744699
uucuagcugauuugagaca

SEQ ID NO: 1744701 - RNA, 19 nt, Artificial Sequence
  Description of Artificial Sequence: Synthetic oligonucleotide
  Sense strand starting at position 882 of SEQ ID NO: 1562410
ugaugaauauccugauuuc

SEQ ID NO: 1744702 - RNA, 19 nt, Artificial Sequence
  Description of Artificial Sequence: Synthetic oligonucleotide
  Antisense strand to SEQ ID NO: 1744701
gaaaucaggauauucauca

SEQ ID NO: 1744703 - RNA, 19 nt, Artificial Sequence
  Description of Artificial Sequence: Synthetic oligonucleotide
  Sense strand starting at position 911 of SEQ ID NO: 1562410
auccucuguguguaaagua

SEQ ID NO: 1744704 - RNA, 19 nt, Artificial Sequence
  Description of Artificial Sequence: Synthetic oligonucleotide
  Antisense strand to SEQ ID NO: 1744703
uacuuuacacacagaggau

SEQ ID NO: 1744705 - RNA, 19 nt, Artificial Sequence
  Description of Artificial Sequence: Synthetic oligonucleotide
  Sense strand starting at position 981 of SEQ ID NO: 1562410
gugccauauguagaucagu

SEQ ID NO: 1744706 - RNA, 19 nt, Artificial Sequence
  Description of Artificial Sequence: Synthetic oligonucleotide
  Antisense strand to SEQ ID NO: 1744705
acugaucuacauauggcac

SEQ ID NO: 1744707 - RNA, 19 nt, Artificial Sequence
  Description of Artificial Sequence: Synthetic oligonucleotide
  Sense strand starting at position 984 of SEQ ID NO: 1562410
ccauauguagaucagugau

SEQ ID NO: 1744708 - RNA, 19 nt, Artificial Sequence
  Description of Artificial Sequence: Synthetic oligonucleotide
  Antisense strand to SEQ ID NO: 1744707
aucacugaucuacauaugg

SEQ ID NO: 1744709 - RNA, 19 nt, Artificial Sequence
  Description of Artificial Sequence: Synthetic oligonucleotide
  Sense strand starting at position 1111 of SEQ ID NO: 1562410
ugaggcuuuggccaucaau

SEQ ID NO: 1744710 - RNA, 19 nt, Artificial Sequence
  Description of Artificial Sequence: Synthetic oligonucleotide
  Antisense strand to SEQ ID NO: 1744709
auugauggccaaagccuca

SEQ ID NO: 1744711 - RNA, 19 nt, Artificial Sequence
  Description of Artificial Sequence: Synthetic oligonucleotide
  Sense strand starting at position 1508 of SEQ ID NO: 1562410
ggcuccagaucauucuauu

SEQ ID NO: 1744712 - RNA, 19 nt, Artificial Sequence
  Description of Artificial Sequence: Synthetic oligonucleotide
  Antisense strand to SEQ ID NO: 1744711
aauagaaugaucuggagcc

SEQ ID NO: 1744713 - RNA, 19 nt, Artificial Sequence
  Description of Artificial Sequence: Synthetic oligonucleotide
  Sense strand starting at position 2027 of SEQ ID NO: 1562410
gccuuuauaccuggaccca

SEQ ID NO: 1744714 - RNA, 19 nt, Artificial Sequence
  Description of Artificial Sequence: Synthetic oligonucleotide
  Antisense strand to SEQ ID NO: 1744713
uggguccagguauaaaggc

SEQ ID NO: 1744715 - RNA, 19 nt, Artificial Sequence
  Description of Artificial Sequence: Synthetic oligonucleotide
  Sense strand starting at position 2201 of SEQ ID NO: 1562410
uuggaaaccugcccaaauu

SEQ ID NO: 1744716 - RNA, 19 nt, Artificial Sequence
  Description of Artificial Sequence: Synthetic oligonucleotide
  Antisense strand to SEQ ID NO: 1744715
aauuugggcagguuuccaa

SEQ ID NO: 1744717 - RNA, 19 nt, Artificial Sequence
  Description of Artificial Sequence: Synthetic oligonucleotide
  Sense strand starting at position 2285 of SEQ ID NO: 1562410
cgcugaagcagacaugagu

SEQ ID NO: 1744718 - RNA, 19 nt, Artificial Sequence
  Description of Artificial Sequence: Synthetic oligonucleotide
  Antisense strand to SEQ ID NO: 1744717
acucaugucugcuucagcg

SEQ ID NO: 1744719 - RNA, 19 nt, Artificial Sequence
  Description of Artificial Sequence: Synthetic oligonucleotide
  Sense strand starting at position 2410 of SEQ ID NO: 1562410
gcuggagugagugaugcaa

SEQ ID NO: 1744720 - RNA, 19 nt, Artificial Sequence
  Description of Artificial Sequence: Synthetic oligonucleotide
  Antisense strand to SEQ ID NO: 1744719
uugcaucacucacuccagc

SEQ ID NO: 1744721 - RNA, 19 nt, Artificial Sequence
  Description of Artificial Sequence: Synthetic oligonucleotide
  Sense strand starting at position 2414 of SEQ ID NO: 1562410
gagugagugaugcaaagcu

SEQ ID NO: 1744722 - RNA, 19 nt, Artificial Sequence
  Description of Artificial Sequence: Synthetic oligonucleotide
  Antisense strand to SEQ ID NO: 1744721
agcuuugcaucacucacuc

SEQ ID NO: 1744723 - RNA, 19 nt, Artificial Sequence
  Description of Artificial Sequence: Synthetic oligonucleotide
  Sense strand starting at position 2453 of SEQ ID NO: 1562410
aguugagauuuaggagaug

SEQ ID NO: 1744724 - RNA, 19 nt, Artificial Sequence
  Description of Artificial Sequence: Synthetic oligonucleotide
  Antisense strand to SEQ ID NO: 1744723
caucuccuaaaucucaacu

SEQ ID NO: 1744725 - RNA, 19 nt, Artificial Sequence
  Description of Artificial Sequence: Synthetic oligonucleotide
  Sense strand starting at position 2523 of SEQ ID NO: 1562410
agaagaaacuuaggagaua

SEQ ID NO: 1744726 - RNA, 19 nt, Artificial Sequence
  Description of Artificial Sequence: Synthetic oligonucleotide
  Antisense strand to SEQ ID NO: 1744725
uaucuccuaaguuucuucu

SEQ ID NO: 1744727 - RNA, 19 nt, Artificial Sequence
  Description of Artificial Sequence: Synthetic oligonucleotide
  Sense strand starting at position 2524 of SEQ ID NO: 1562410
gaagaaacuuaggagauaa

SEQ ID NO: 1744728 - RNA, 19 nt, Artificial Sequence
  Description of Artificial Sequence: Synthetic oligonucleotide
  Antisense strand to SEQ ID NO: 1744727
uuaucuccuaaguuucuuc

SEQ ID NO: 1744729 - RNA, 19 nt, Artificial Sequence
  Description of Artificial Sequence: Synthetic oligonucleotide
  Sense strand starting at position 2720 of SEQ ID NO: 1562410
gaaggauccguguggagag

SEQ ID NO: 1744730 - RNA, 19 nt, Artificial Sequence
  Description of Artificial Sequence: Synthetic oligonucleotide
  Antisense strand to SEQ ID NO: 1744729
cucuccacacggauccuuc

SEQ ID NO: 1744731 - RNA, 19 nt, Artificial Sequence
  Description of Artificial Sequence: Synthetic oligonucleotide
  Sense strand starting at position 2752 of SEQ ID NO: 1562410
guggaagcugacugugaau

SEQ ID NO: 1744732 - RNA, 19 nt, Artificial Sequence
  Description of Artificial Sequence: Synthetic oligonucleotide
  Antisense strand to SEQ ID NO: 1744731
auucacagucagcuuccac

SEQ ID NO: 1744733 - RNA, 19 nt, Artificial Sequence
  Description of Artificial Sequence: Synthetic oligonucleotide
  Sense strand starting at position 2754 of SEQ ID NO: 1562410
ggaagcugacugugaaucu

SEQ ID NO: 1744734 - RNA, 19 nt, Artificial Sequence
  Description of Artificial Sequence: Synthetic oligonucleotide
  Antisense strand to SEQ ID NO: 1744733
agauucacagucagcuucc

SEQ ID NO: 1744735 - RNA, 19 nt, Artificial Sequence
  Description of Artificial Sequence: Synthetic oligonucleotide
  Sense strand starting at position 2835 of SEQ ID NO: 1562410
cugcuagaggauugagagu

SEQ ID NO: 1744736 - RNA, 19 nt, Artificial Sequence
  Description of Artificial Sequence: Synthetic oligonucleotide
  Antisense strand to SEQ ID NO: 1744735
acucucaauccucuagcag

SEQ ID NO: 1744737 - RNA, 19 nt, Artificial Sequence
  Description of Artificial Sequence: Synthetic oligonucleotide
  Sense strand starting at position 3002 of SEQ ID NO: 1562410
gacaguuuggaaugugagu

SEQ ID NO: 1744738 - RNA, 19 nt, Artificial Sequence
  Description of Artificial Sequence: Synthetic oligonucleotide
  Antisense strand to SEQ ID NO: 1744737
acucacauuccaaacuguc

SEQ ID NO: 1744739 - RNA, 19 nt, Artificial Sequence
  Description of Artificial Sequence: Synthetic oligonucleotide
  Sense strand starting at position 3029 of SEQ ID NO: 1562410
gauacagaguguuccaagu

SEQ ID NO: 1744740 - RNA, 19 nt, Artificial Sequence
  Description of Artificial Sequence: Synthetic oligonucleotide
  Antisense strand to SEQ ID NO: 1744739
acuuggaacacucuguauc

SEQ ID NO: 1744741 - RNA, 19 nt, Artificial Sequence
  Description of Artificial Sequence: Synthetic oligonucleotide
  Sense strand starting at position 3048 of SEQ ID NO: 1562410
uguagaugcuucccagaga

SEQ ID NO: 1744742 - RNA, 19 nt, Artificial Sequence
  Description of Artificial Sequence: Synthetic oligonucleotide
  Antisense strand to SEQ ID NO: 1744741
ucucugggaagcaucuaca

SEQ ID NO: 1744743 - RNA, 19 nt, Artificial Sequence
  Description of Artificial Sequence: Synthetic oligonucleotide
  Sense strand starting at position 3074 of SEQ ID NO: 1562410
uagcaaaguguugaacaaa

SEQ ID NO: 1744744 - RNA, 19 nt, Artificial Sequence
  Description of Artificial Sequence: Synthetic oligonucleotide
  Antisense strand to SEQ ID NO: 1744743
uuuguucaacacuuugcua

SEQ ID NO: 1744745 - RNA, 19 nt, Artificial Sequence
  Description of Artificial Sequence: Synthetic oligonucleotide
  Sense strand starting at position 3102 of SEQ ID NO: 1562410
agauuaaggucauucucca

SEQ ID NO: 1744746 - RNA, 19 nt, Artificial Sequence
  Description of Artificial Sequence: Synthetic oligonucleotide
  Antisense strand to SEQ ID NO: 1744745
uggagaaugaccuuaaucu

SEQ ID NO: 1744747 - RNA, 19 nt, Artificial Sequence
  Description of Artificial Sequence: Synthetic oligonucleotide
  Sense strand starting at position 3110 of SEQ ID NO: 1562410
gucauucuccaguaacuga

SEQ ID NO: 1744748 - RNA, 19 nt, Artificial Sequence
  Description of Artificial Sequence: Synthetic oligonucleotide
  Antisense strand to SEQ ID NO: 1744747
ucaguuacuggagaaugac

SEQ ID NO: 1744749 - RNA, 19 nt, Artificial Sequence
  Description of Artificial Sequence: Synthetic oligonucleotide
  Sense strand starting at position 3121 of SEQ ID NO: 1562410
guaacugacggcuagaaca

SEQ ID NO: 1744750 - RNA, 19 nt, Artificial Sequence
  Description of Artificial Sequence: Synthetic oligonucleotide
  Antisense strand to SEQ ID NO: 1744749
uguucuagccgucaguuac

SEQ ID NO: 1744751 - RNA, 19 nt, Artificial Sequence
  Description of Artificial Sequence: Synthetic oligonucleotide
  Sense strand starting at position 3158 of SEQ ID NO: 1562410
cagcucagagucuguaaau

SEQ ID NO: 1744752 - RNA, 19 nt, Artificial Sequence
  Description of Artificial Sequence: Synthetic oligonucleotide
  Antisense strand to SEQ ID NO: 1744751
auuuacagacucugagcug

SEQ ID NO: 1744753 - RNA, 19 nt, Artificial Sequence
  Description of Artificial Sequence: Synthetic oligonucleotide
  Sense strand starting at position 3159 of SEQ ID NO: 1562410
agcucagagucuguaaaug

SEQ ID NO: 1744754 - RNA, 19 nt, Artificial Sequence
  Description of Artificial Sequence: Synthetic oligonucleotide
  Antisense strand to SEQ ID NO: 1744753
cauuuacagacucugagcu

SEQ ID NO: 1744755 - RNA, 19 nt, Artificial Sequence
  Description of Artificial Sequence: Synthetic oligonucleotide
  Sense strand starting at position 3169 of SEQ ID NO: 1562410
cuguaaaugcauuauuaug

SEQ ID NO: 1744756 - RNA, 19 nt, Artificial Sequence
  Description of Artificial Sequence: Synthetic oligonucleotide
  Antisense strand to SEQ ID NO: 1744755
cauaauaaugcauuuacag

SEQ ID NO: 1744757 - RNA, 19 nt, Artificial Sequence
  Description of Artificial Sequence: Synthetic oligonucleotide
  Sense strand starting at position 3211 of SEQ ID NO: 1562410
aucagauauugaccaggca

SEQ ID NO: 1744758 - RNA, 19 nt, Artificial Sequence
  Description of Artificial Sequence: Synthetic oligonucleotide
  Antisense strand to SEQ ID NO: 1744757
ugccuggucaauaucugau

SEQ ID NO: 1744759 - RNA, 19 nt, Artificial Sequence
  Description of Artificial Sequence: Synthetic oligonucleotide
  Sense strand starting at position 3438 of SEQ ID NO: 1562410
ugaggaugccaugaguuau

SEQ ID NO: 1744760 - RNA, 19 nt, Artificial Sequence
  Description of Artificial Sequence: Synthetic oligonucleotide
  Antisense strand to SEQ ID NO: 1744759
auaacucauggcauccuca

SEQ ID NO: 1744761 - RNA, 19 nt, Artificial Sequence
  Description of Artificial Sequence: Synthetic oligonucleotide
  Sense strand starting at position 3578 of SEQ ID NO: 1562410
ggucuagauauuggacaug

SEQ ID NO: 1744762 - RNA, 19 nt, Artificial Sequence
  Description of Artificial Sequence: Synthetic oligonucleotide
  Antisense strand to SEQ ID NO: 1744761
cauguccaauaucuagacc

SEQ ID NO: 1744763 - RNA, 19 nt, Artificial Sequence
  Description of Artificial Sequence: Synthetic oligonucleotide
  Sense strand starting at position 3584 of SEQ ID NO: 1562410
gauauuggacauggcaaau

SEQ ID NO: 1744764 - RNA, 19 nt, Artificial Sequence
  Description of Artificial Sequence: Synthetic oligonucleotide
  Antisense strand to SEQ ID NO: 1744763
auuugccauguccaauauc

SEQ ID NO: 1744765 - RNA, 19 nt, Artificial Sequence
  Description of Artificial Sequence: Synthetic oligonucleotide
  Sense strand starting at position 3596 of SEQ ID NO: 1562410
ggcaaaugaugacuguaag

SEQ ID NO: 1744766 - RNA, 19 nt, Artificial Sequence
  Description of Artificial Sequence: Synthetic oligonucleotide
  Antisense strand to SEQ ID NO: 1744765
cuuacagucaucauuugcc

SEQ ID NO: 1744767 - RNA, 19 nt, Artificial Sequence
  Description of Artificial Sequence: Synthetic oligonucleotide
  Sense strand starting at position 3698 of SEQ ID NO: 1562410
uagggaaucucaguagagu

SEQ ID NO: 1744768 - RNA, 19 nt, Artificial Sequence
  Description of Artificial Sequence: Synthetic oligonucleotide
  Antisense strand to SEQ ID NO: 1744767
acucuacugagauucccua

SEQ ID NO: 1744769 - RNA, 19 nt, Artificial Sequence
  Description of Artificial Sequence: Synthetic oligonucleotide
  Sense strand starting at position 3709 of SEQ ID NO: 1562410
aguagaguaauugaagcua

SEQ ID NO: 1744770 - RNA, 19 nt, Artificial Sequence
  Description of Artificial Sequence: Synthetic oligonucleotide
  Antisense strand to SEQ ID NO: 1744769
uagcuucaauuacucuacu

SEQ ID NO: 1744771 - RNA, 19 nt, Artificial Sequence
  Description of Artificial Sequence: Synthetic oligonucleotide
  Sense strand starting at position 3756 of SEQ ID NO: 1562410
aaaguacaguaguuagaaa

SEQ ID NO: 1744772 - RNA, 19 nt, Artificial Sequence
  Description of Artificial Sequence: Synthetic oligonucleotide
  Antisense strand to SEQ ID NO: 1744771
uuucuaacuacuguacuuu

SEQ ID NO: 1744773 - RNA, 19 nt, Artificial Sequence
  Description of Artificial Sequence: Synthetic oligonucleotide
  Sense strand starting at position 3812 of SEQ ID NO: 1562410
cguccaaauccaggaaucu

SEQ ID NO: 1744774 - RNA, 19 nt, Artificial Sequence
  Description of Artificial Sequence: Synthetic oligonucleotide
  Antisense strand to SEQ ID NO: 1744773
agauuccuggauuuggacg

SEQ ID NO: 1744775 - RNA, 19 nt, Artificial Sequence
  Description of Artificial Sequence: Synthetic oligonucleotide
  Sense strand starting at position 3845 of SEQ ID NO: 1562410
uaggauaaauaggaagaaa

SEQ ID NO: 1744776 - RNA, 19 nt, Artificial Sequence
  Description of Artificial Sequence: Synthetic oligonucleotide
  Antisense strand to SEQ ID NO: 1744775
uuucuuccuauuuauccua

SEQ ID NO: 1744777 - RNA, 19 nt, Artificial Sequence
  Description of Artificial Sequence: Synthetic oligonucleotide
  Sense strand starting at position 3976 of SEQ ID NO: 1562410
cuggcuucucaugagaaac

SEQ ID NO: 1744778 - RNA, 19 nt, Artificial Sequence
  Description of Artificial Sequence: Synthetic oligonucleotide
  Antisense strand to SEQ ID NO: 1744777
guuucucaugagaagccag

SEQ ID NO: 1744779 - RNA, 19 nt, Artificial Sequence
  Description of Artificial Sequence: Synthetic oligonucleotide
  Sense strand starting at position 107 of SEQ ID NO: 1562411
aagugugugcacguuguau

SEQ ID NO: 1744780 - RNA, 19 nt, Artificial Sequence
  Description of Artificial Sequence: Synthetic oligonucleotide
  Antisense strand to SEQ ID NO: 1744779
auacaacgugcacacacuu

SEQ ID NO: 1744781 - RNA, 19 nt, Artificial Sequence
  Description of Artificial Sequence: Synthetic oligonucleotide
  Sense strand starting at position 158 of SEQ ID NO: 1562411
auguguucggcugcaagca

SEQ ID NO: 1744782 - RNA, 19 nt, Artificial Sequence
  Description of Artificial Sequence: Synthetic oligonucleotide
  Antisense strand to SEQ ID NO: 1744781
ugcuugcagccgaacacau

SEQ ID NO: 1744783 - RNA, 19 nt, Artificial Sequence
  Description of Artificial Sequence: Synthetic oligonucleotide
  Sense strand starting at position 174 of SEQ ID NO: 1562411
gcauuuauaugucuggguu

SEQ ID NO: 1744784 - RNA, 19 nt, Artificial Sequence
  Description of Artificial Sequence: Synthetic oligonucleotide
  Antisense strand to SEQ ID NO: 1744783
aacccagacauauaaaugc

SEQ ID NO: 1744785 - RNA, 19 nt, Artificial Sequence
  Description of Artificial Sequence: Synthetic oligonucleotide
  Sense strand starting at position 376 of SEQ ID NO: 1562411
gggacaguucugggcuaug

SEQ ID NO: 1744786 - RNA, 19 nt, Artificial Sequence
  Description of Artificial Sequence: Synthetic oligonucleotide
  Antisense strand to SEQ ID NO: 1744785
cauagcccagaacuguccc

SEQ ID NO: 1744787 - RNA, 19 nt, Artificial Sequence
  Description of Artificial Sequence: Synthetic oligonucleotide
  Sense strand starting at position 388 of SEQ ID NO: 1562411
ggcuaugcuaucuggaaua

SEQ ID NO: 1744788 - RNA, 19 nt, Artificial Sequence
  Description of Artificial Sequence: Synthetic oligonucleotide
  Antisense strand to SEQ ID NO: 1744787
uauuccagauagcauagcc

SEQ ID NO: 1744789 - RNA, 19 nt, Artificial Sequence
  Description of Artificial Sequence: Synthetic oligonucleotide
  Sense strand starting at position 393 of SEQ ID NO: 1562411
ugcuaucuggaauagcaga

SEQ ID NO: 1744790 - RNA, 19 nt, Artificial Sequence
  Description of Artificial Sequence: Synthetic oligonucleotide
  Antisense strand to SEQ ID NO: 1744789
ucugcuauuccagauagca

SEQ ID NO: 1744791 - RNA, 19 nt, Artificial Sequence
  Description of Artificial Sequence: Synthetic oligonucleotide
  Sense strand starting at position 444 of SEQ ID NO: 1562411
gggaacguuuaaccugaga

SEQ ID NO: 1744792 - RNA, 19 nt, Artificial Sequence
  Description of Artificial Sequence: Synthetic oligonucleotide
  Antisense strand to SEQ ID NO: 1744791
ucucagguuaaacguuccc

SEQ ID NO: 1744793 - RNA, 19 nt, Artificial Sequence
  Description of Artificial Sequence: Synthetic oligonucleotide
  Sense strand starting at position 712 of SEQ ID NO: 1562411
caagaaguucuugguaaau

SEQ ID NO: 1744794 - RNA, 19 nt, Artificial Sequence
  Description of Artificial Sequence: Synthetic oligonucleotide
  Antisense strand to SEQ ID NO: 1744793
auuuaccaagaacuucuug

SEQ ID NO: 1744795 - RNA, 19 nt, Artificial Sequence
  Description of Artificial Sequence: Synthetic oligonucleotide
  Sense strand starting at position 721 of SEQ ID NO: 1562411
cuugguaaauuauugauga

SEQ ID NO: 1744796 - RNA, 19 nt, Artificial Sequence
  Description of Artificial Sequence: Synthetic oligonucleotide
  Antisense strand to SEQ ID NO: 1744795
ucaucaauaauuuaccaag

SEQ ID NO: 1744797 - RNA, 19 nt, Artificial Sequence
  Description of Artificial Sequence: Synthetic oligonucleotide
  Sense strand starting at position 784 of SEQ ID NO: 1562411
auauuaggauccucaguaa

SEQ ID NO: 1744798 - RNA, 19 nt, Artificial Sequence
  Description of Artificial Sequence: Synthetic oligonucleotide
  Antisense strand to SEQ ID NO: 1744797
uuacugaggauccuaauau

SEQ ID NO: 1744799 - RNA, 19 nt, Artificial Sequence
  Description of Artificial Sequence: Synthetic oligonucleotide
  Sense strand starting at position 787 of SEQ ID NO: 1562411
uuaggauccucaguaauug

SEQ ID NO: 1744800 - RNA, 19 nt, Artificial Sequence
  Description of Artificial Sequence: Synthetic oligonucleotide
  Antisense strand to SEQ ID NO: 1744799
caauuacugaggauccuaa

SEQ ID NO: 1744801 - RNA, 19 nt, Artificial Sequence
  Description of Artificial Sequence: Synthetic oligonucleotide
  Sense strand starting at position 796 of SEQ ID NO: 1562411
ucaguaauugaucaucagu

SEQ ID NO: 1744802 - RNA, 19 nt, Artificial Sequence
  Description of Artificial Sequence: Synthetic oligonucleotide
  Antisense strand to SEQ ID NO: 1744801
acugaugaucaauuacuga

SEQ ID NO: 1744803 - RNA, 19 nt, Artificial Sequence
  Description of Artificial Sequence: Synthetic oligonucleotide
  Sense strand starting at position 798 of SEQ ID NO: 1562411
aguaauugaucaucaguca

SEQ ID NO: 1744804 - RNA, 19 nt, Artificial Sequence
  Description of Artificial Sequence: Synthetic oligonucleotide
  Antisense strand to SEQ ID NO: 1744803
ugacugaugaucaauuacu

SEQ ID NO: 1744805 - RNA, 19 nt, Artificial Sequence
  Description of Artificial Sequence: Synthetic oligonucleotide
  Sense strand starting at position 799 of SEQ ID NO: 1562411
guaauugaucaucagucaa

SEQ ID NO: 1744806 - RNA, 19 nt, Artificial Sequence
  Description of Artificial Sequence: Synthetic oligonucleotide
  Antisense strand to SEQ ID NO: 1744805
uugacugaugaucaauuac

SEQ ID NO: 1744807 - RNA, 19 nt, Artificial Sequence
  Description of Artificial Sequence: Synthetic oligonucleotide
  Sense strand starting at position 832 of SEQ ID NO: 1562411
gccuuuguggaccagugau

SEQ ID NO: 1744808 - RNA, 19 nt, Artificial Sequence
  Description of Artificial Sequence: Synthetic oligonucleotide
  Antisense strand to SEQ ID NO: 1744807
aucacugguccacaaaggc

SEQ ID NO: 1744809 - RNA, 19 nt, Artificial Sequence
  Description of Artificial Sequence: Synthetic oligonucleotide
  Sense strand starting at position 1210 of SEQ ID NO: 1562411
aauagauagcagggaguau

SEQ ID NO: 1744810 - RNA, 19 nt, Artificial Sequence
  Description of Artificial Sequence: Synthetic oligonucleotide
  Antisense strand to SEQ ID NO: 1744809
auacucccugcuaucuauu

SEQ ID NO: 1744811 - RNA, 19 nt, Artificial Sequence
  Description of Artificial Sequence: Synthetic oligonucleotide
  Sense strand starting at position 1275 of SEQ ID NO: 1562411
cugguuuauuuggcucuca

SEQ ID NO: 1744812 - RNA, 19 nt, Artificial Sequence
  Description of Artificial Sequence: Synthetic oligonucleotide
  Antisense strand to SEQ ID NO: 1744811
ugagagccaaauaaaccag

SEQ ID NO: 1744813 - RNA, 19 nt, Artificial Sequence
  Description of Artificial Sequence: Synthetic oligonucleotide
  Sense strand starting at position 1276 of SEQ ID NO: 1562411
ugguuuauuuggcucucau

SEQ ID NO: 1744814 - RNA, 19 nt, Artificial Sequence
  Description of Artificial Sequence: Synthetic oligonucleotide
  Antisense strand to SEQ ID NO: 1744813
augagagccaaauaaacca

SEQ ID NO: 1744815 - RNA, 19 nt, Artificial Sequence
  Description of Artificial Sequence: Synthetic oligonucleotide
  Sense strand starting at position 1360 of SEQ ID NO: 1562411
ccagaucauucugucacau

SEQ ID NO: 1744816 - RNA, 19 nt, Artificial Sequence
  Description of Artificial Sequence: Synthetic oligonucleotide
  Antisense strand to SEQ ID NO: 1744815
augugacagaaugaucugg

SEQ ID NO: 1744817 - RNA, 19 nt, Artificial Sequence
  Description of Artificial Sequence: Synthetic oligonucleotide
  Sense strand starting at position 2200 of SEQ ID NO: 1562411
ggaaaccugccagaguguu

SEQ ID NO: 1744818 - RNA, 19 nt, Artificial Sequence
  Description of Artificial Sequence: Synthetic oligonucleotide
  Antisense strand to SEQ ID NO: 1744817
aacacucuggcagguuucc

SEQ ID NO: 1744819 - RNA, 19 nt, Artificial Sequence
  Description of Artificial Sequence: Synthetic oligonucleotide
  Sense strand starting at position 2330 of SEQ ID NO: 1562411
guccuuaaaccacagaagu

SEQ ID NO: 1744820 - RNA, 19 nt, Artificial Sequence
  Description of Artificial Sequence: Synthetic oligonucleotide
  Antisense strand to SEQ ID NO: 1744819
acuucugugguuuaaggac

SEQ ID NO: 1744821 - RNA, 19 nt, Artificial Sequence
  Description of Artificial Sequence: Synthetic oligonucleotide
  Sense strand starting at position 2383 of SEQ ID NO: 1562411
gucaaugugagguagaaca

SEQ ID NO: 1744822 - RNA, 19 nt, Artificial Sequence
  Description of Artificial Sequence: Synthetic oligonucleotide
  Antisense strand to SEQ ID NO: 1744821
uguucuaccucacauugac

SEQ ID NO: 1744823 - RNA, 19 nt, Artificial Sequence
  Description of Artificial Sequence: Synthetic oligonucleotide
  Sense strand starting at position 2421 of SEQ ID NO: 1562411
guggguguccugagagcuu

SEQ ID NO: 1744824 - RNA, 19 nt, Artificial Sequence
  Description of Artificial Sequence: Synthetic oligonucleotide
  Antisense strand to SEQ ID NO: 1744823
aagcucucaggacacccac

SEQ ID NO: 1744825 - RNA, 19 nt, Artificial Sequence
  Description of Artificial Sequence: Synthetic oligonucleotide
  Sense strand starting at position 2433 of SEQ ID NO: 1562411
agagcuuagagcuggauga

SEQ ID NO: 1744826 - RNA, 19 nt, Artificial Sequence
  Description of Artificial Sequence: Synthetic oligonucleotide
  Antisense strand to SEQ ID NO: 1744825
ucauccagcucuaagcucu

SEQ ID NO: 1744827 - RNA, 19 nt, Artificial Sequence
  Description of Artificial Sequence: Synthetic oligonucleotide
  Sense strand starting at position 2435 of SEQ ID NO: 1562411
agcuuagagcuggaugaga

SEQ ID NO: 1744828 - RNA, 19 nt, Artificial Sequence
  Description of Artificial Sequence: Synthetic oligonucleotide
  Antisense strand to SEQ ID NO: 1744827
ucucauccagcucuaagcu

SEQ ID NO: 1744829 - RNA, 19 nt, Artificial Sequence
  Description of Artificial Sequence: Synthetic oligonucleotide
  Sense strand starting at position 2477 of SEQ ID NO: 1562411
ggaaaucacuuguccauag

SEQ ID NO: 1744830 - RNA, 19 nt, Artificial Sequence
  Description of Artificial Sequence: Synthetic oligonucleotide
  Antisense strand to SEQ ID NO: 1744829
cuauggacaagugauuucc

SEQ ID NO: 1744831 - RNA, 19 nt, Artificial Sequence
  Description of Artificial Sequence: Synthetic oligonucleotide
  Sense strand starting at position 2537 of SEQ ID NO: 1562411
gugaguggugaccauggau

SEQ ID NO: 1744832 - RNA, 19 nt, Artificial Sequence
  Description of Artificial Sequence: Synthetic oligonucleotide
  Antisense strand to SEQ ID NO: 1744831
auccauggucaccacucac

SEQ ID NO: 1744833 - RNA, 19 nt, Artificial Sequence
  Description of Artificial Sequence: Synthetic oligonucleotide
  Sense strand starting at position 2540 of SEQ ID NO: 1562411
aguggugaccauggaucuu

SEQ ID NO: 1744834 - RNA, 19 nt, Artificial Sequence
  Description of Artificial Sequence: Synthetic oligonucleotide
  Antisense strand to SEQ ID NO: 1744833
aagauccauggucaccacu

SEQ ID NO: 1744835 - RNA, 19 nt, Artificial Sequence
  Description of Artificial Sequence: Synthetic oligonucleotide
  Sense strand starting at position 2549 of SEQ ID NO: 1562411
cauggaucuuugucuugag

SEQ ID NO: 1744836 - RNA, 19 nt, Artificial Sequence
  Description of Artificial Sequence: Synthetic oligonucleotide
  Antisense strand to SEQ ID NO: 1744835
cucaagacaaagauccaug

SEQ ID NO: 1744837 - RNA, 19 nt, Artificial Sequence
  Description of Artificial Sequence: Synthetic oligonucleotide
  Sense strand starting at position 2550 of SEQ ID NO: 1562411
auggaucuuugucuugaga

SEQ ID NO: 1744838 - RNA, 19 nt, Artificial Sequence
  Description of Artificial Sequence: Synthetic oligonucleotide
  Antisense strand to SEQ ID NO: 1744837
ucucaagacaaagauccau

SEQ ID NO: 1744839 - RNA, 19 nt, Artificial Sequence
  Description of Artificial Sequence: Synthetic oligonucleotide
  Sense strand starting at position 2637 of SEQ ID NO: 1562411
ggaaaucaagcugguccaa

SEQ ID NO: 1744840 - RNA, 19 nt, Artificial Sequence
  Description of Artificial Sequence: Synthetic oligonucleotide
  Antisense strand to SEQ ID NO: 1744839
uuggaccagcuugauuucc

SEQ ID NO: 1744841 - RNA, 19 nt, Artificial Sequence
  Description of Artificial Sequence: Synthetic oligonucleotide
  Sense strand starting at position 2719 of SEQ ID NO: 1562411
gugugagcugaauauagaa

SEQ ID NO: 1744842 - RNA, 19 nt, Artificial Sequence
  Description of Artificial Sequence: Synthetic oligonucleotide
  Antisense strand to SEQ ID NO: 1744841
uucuauauucagcucacac

SEQ ID NO: 1744843 - RNA, 19 nt, Artificial Sequence
  Description of Artificial Sequence: Synthetic oligonucleotide
  Sense strand starting at position 2752 of SEQ ID NO: 1562411
gaaugacuucuggguaugu

SEQ ID NO: 1744844 - RNA, 19 nt, Artificial Sequence
  Description of Artificial Sequence: Synthetic oligonucleotide
  Antisense strand to SEQ ID NO: 1744843
acauacccagaagucauuc

SEQ ID NO: 1744845 - RNA, 19 nt, Artificial Sequence
  Description of Artificial Sequence: Synthetic oligonucleotide
  Sense strand starting at position 2753 of SEQ ID NO: 1562411
aaugacuucuggguauguu

SEQ ID NO: 1744846 - RNA, 19 nt, Artificial Sequence
  Description of Artificial Sequence: Synthetic oligonucleotide
  Antisense strand to SEQ ID NO: 1744845
aacauacccagaagucauu

SEQ ID NO: 1744847 - RNA, 19 nt, Artificial Sequence
  Description of Artificial Sequence: Synthetic oligonucleotide
  Sense strand starting at position 2762 of SEQ ID NO: 1562411
uggguauguucagcagaaa

SEQ ID NO: 1744848 - RNA, 19 nt, Artificial Sequence
  Description of Artificial Sequence: Synthetic oligonucleotide
  Antisense strand to SEQ ID NO: 1744847
uuucugcugaacauaccca

SEQ ID NO: 1744849 - RNA, 19 nt, Artificial Sequence
  Description of Artificial Sequence: Synthetic oligonucleotide
  Sense strand starting at position 2763 of SEQ ID NO: 1562411
ggguauguucagcagaaag

SEQ ID NO: 1744850 - RNA, 19 nt, Artificial Sequence
  Description of Artificial Sequence: Synthetic oligonucleotide
  Antisense strand to SEQ ID NO: 1744849
cuuucugcugaacauaccc

SEQ ID NO: 1744851 - RNA, 19 nt, Artificial Sequence
  Description of Artificial Sequence: Synthetic oligonucleotide
  Sense strand starting at position 2838 of SEQ ID NO: 1562411
accagaucacuuggaacuu

SEQ ID NO: 1744852 - RNA, 19 nt, Artificial Sequence
  Description of Artificial Sequence: Synthetic oligonucleotide
  Antisense strand to SEQ ID NO: 1744851
aaguuccaagugaucuggu

SEQ ID NO: 1744853 - RNA, 19 nt, Artificial Sequence
  Description of Artificial Sequence: Synthetic oligonucleotide
  Sense strand starting at position 3028 of SEQ ID NO: 1562411
ccucauacccacuggugaa

SEQ ID NO: 1744854 - RNA, 19 nt, Artificial Sequence
  Description of Artificial Sequence: Synthetic oligonucleotide
  Antisense strand to SEQ ID NO: 1744853
uucaccaguggguaugagg

SEQ ID NO: 1744855 - RNA, 19 nt, Artificial Sequence
  Description of Artificial Sequence: Synthetic oligonucleotide
  Sense strand starting at position 3585 of SEQ ID NO: 1562411
ggacauuucuugcagaaau

SEQ ID NO: 1744856 - RNA, 19 nt, Artificial Sequence
  Description of Artificial Sequence: Synthetic oligonucleotide
  Antisense strand to SEQ ID NO: 1744855
auuucugcaagaaaugucc

SEQ ID NO: 1744857 - RNA, 19 nt, Artificial Sequence
  Description of Artificial Sequence: Synthetic oligonucleotide
  Sense strand starting at position 3616 of SEQ ID NO: 1562411
ccuaaaguuuauguggagu

SEQ ID NO: 1744858 - RNA, 19 nt, Artificial Sequence
  Description of Artificial Sequence: Synthetic oligonucleotide
  Antisense strand to SEQ ID NO: 1744857
acuccacauaaacuuuagg

SEQ ID NO: 1744859 - RNA, 19 nt, Artificial Sequence
  Description of Artificial Sequence: Synthetic oligonucleotide
  Sense strand starting at position 106 of SEQ ID NO: 1562412
cucuaacaccugugugauu

SEQ ID NO: 1744860 - RNA, 19 nt, Artificial Sequence
  Description of Artificial Sequence: Synthetic oligonucleotide
  Antisense strand to SEQ ID NO: 1744859
aaucacacagguguuagag

SEQ ID NO: 1744861 - RNA, 19 nt, Artificial Sequence
  Description of Artificial Sequence: Synthetic oligonucleotide
  Sense strand starting at position 472 of SEQ ID NO: 1562412
gagucaaucuggucagaca

SEQ ID NO: 1744862 - RNA, 19 nt, Artificial Sequence
  Description of Artificial Sequence: Synthetic oligonucleotide
  Antisense strand to SEQ ID NO: 1744861
ugucugaccagauugacuc

SEQ ID NO: 1744863 - RNA, 19 nt, Artificial Sequence
  Description of Artificial Sequence: Synthetic oligonucleotide
  Sense strand starting at position 605 of SEQ ID NO: 1562412
guaucagugcuugugcuua

SEQ ID NO: 1744864 - RNA, 19 nt, Artificial Sequence
  Description of Artificial Sequence: Synthetic oligonucleotide
  Antisense strand to SEQ ID NO: 1744863
uaagcacaagcacugauac

SEQ ID NO: 1744865 - RNA, 19 nt, Artificial Sequence
  Description of Artificial Sequence: Synthetic oligonucleotide
  Sense strand starting at position 631 of SEQ ID NO: 1562412
ucaucagugcuugugcuua

SEQ ID NO: 1744866 - RNA, 19 nt, Artificial Sequence
  Description of Artificial Sequence: Synthetic oligonucleotide
  Antisense strand to SEQ ID NO: 1744865
uaagcacaagcacugauga

SEQ ID NO: 1744867 - RNA, 19 nt, Artificial Sequence
  Description of Artificial Sequence: Synthetic oligonucleotide
  Sense strand starting at position 860 of SEQ ID NO: 1562412
gcaugugggacuuggagaa

SEQ ID NO: 1744868 - RNA, 19 nt, Artificial Sequence
  Description of Artificial Sequence: Synthetic oligonucleotide
  Antisense strand to SEQ ID NO: 1744867
uucuccaagucccacaugc

SEQ ID NO: 1744869 - RNA, 19 nt, Artificial Sequence
  Description of Artificial Sequence: Synthetic oligonucleotide
  Sense strand starting at position 876 of SEQ ID NO: 1562412
gaaugagacuuucuucgac

SEQ ID NO: 1744870 - RNA, 19 nt, Artificial Sequence
  Description of Artificial Sequence: Synthetic oligonucleotide
  Antisense strand to SEQ ID NO: 1744869
gucgaagaaagucucauuc

SEQ ID NO: 1744871 - RNA, 19 nt, Artificial Sequence
  Description of Artificial Sequence: Synthetic oligonucleotide
  Sense strand starting at position 878 of SEQ ID NO: 1562412
augagacuuucuucgacuu

SEQ ID NO: 1744872 - RNA, 19 nt, Artificial Sequence
  Description of Artificial Sequence: Synthetic oligonucleotide
  Antisense strand to SEQ ID NO: 1744871
aagucgaagaaagucucau

SEQ ID NO: 1744873 - RNA, 19 nt, Artificial Sequence
  Description of Artificial Sequence: Synthetic oligonucleotide
  Sense strand starting at position 920 of SEQ ID NO: 1562412
cgaacucugcucuguauuu

SEQ ID NO: 1744874 - RNA, 19 nt, Artificial Sequence
  Description of Artificial Sequence: Synthetic oligonucleotide
  Antisense strand to SEQ ID NO: 1744873
aaauacagagcagaguucg

SEQ ID NO: 1744875 - RNA, 19 nt, Artificial Sequence
  Description of Artificial Sequence: Synthetic oligonucleotide
  Sense strand starting at position 992 of SEQ ID NO: 1562412
ugagguauugcaugggauc

SEQ ID NO: 1744876 - RNA, 19 nt, Artificial Sequence
  Description of Artificial Sequence: Synthetic oligonucleotide
  Antisense strand to SEQ ID NO: 1744875
gaucccaugcaauaccuca

SEQ ID NO: 1744877 - RNA, 19 nt, Artificial Sequence
  Description of Artificial Sequence: Synthetic oligonucleotide
  Sense strand starting at position 993 of SEQ ID NO: 1562412
gagguauugcaugggaucu

SEQ ID NO: 1744878 - RNA, 19 nt, Artificial Sequence
  Description of Artificial Sequence: Synthetic oligonucleotide
  Antisense strand to SEQ ID NO: 1744877
agaucccaugcaauaccuc

SEQ ID NO: 1744879 - RNA, 19 nt, Artificial Sequence
  Description of Artificial Sequence: Synthetic oligonucleotide
  Sense strand starting at position 1126 of SEQ ID NO: 1562412
ccaggcaucuggguaacau

SEQ ID NO: 1744880 - RNA, 19 nt, Artificial Sequence
  Description of Artificial Sequence: Synthetic oligonucleotide
  Antisense strand to SEQ ID NO: 1744879
auguuacccagaugccugg

SEQ ID NO: 1744881 - RNA, 19 nt, Artificial Sequence
  Description of Artificial Sequence: Synthetic oligonucleotide
  Sense strand starting at position 1127 of SEQ ID NO: 1562412
caggcaucuggguaacaua

SEQ ID NO: 1744882 - RNA, 19 nt, Artificial Sequence
  Description of Artificial Sequence: Synthetic oligonucleotide
  Antisense strand to SEQ ID NO: 1744881
uauguuacccagaugccug

SEQ ID NO: 1744883 - RNA, 19 nt, Artificial Sequence
  Description of Artificial Sequence: Synthetic oligonucleotide
  Sense strand starting at position 1298 of SEQ ID NO: 1562412
gaagguggcucucugaaga

SEQ ID NO: 1744884 - RNA, 19 nt, Artificial Sequence
  Description of Artificial Sequence: Synthetic oligonucleotide
  Antisense strand to SEQ ID NO: 1744883
ucuucagagagccaccuuc

SEQ ID NO: 1744885 - RNA, 19 nt, Artificial Sequence
  Description of Artificial Sequence: Synthetic oligonucleotide
  Sense strand starting at position 1548 of SEQ ID NO: 1562412
agagguuuccuugggcaug

SEQ ID NO: 1744886 - RNA, 19 nt, Artificial Sequence
  Description of Artificial Sequence: Synthetic oligonucleotide
  Antisense strand to SEQ ID NO: 1744885
caugcccaaggaaaccucu

SEQ ID NO: 1744887 - RNA, 19 nt, Artificial Sequence
  Description of Artificial Sequence: Synthetic oligonucleotide
  Sense strand starting at position 1990 of SEQ ID NO: 1562412
uggugaugucuggaagcug

SEQ ID NO: 1744888 - RNA, 19 nt, Artificial Sequence
  Description of Artificial Sequence: Synthetic oligonucleotide
  Antisense strand to SEQ ID NO: 1744887
cagcuuccagacaucacca

SEQ ID NO: 1744889 - RNA, 19 nt, Artificial Sequence
  Description of Artificial Sequence: Synthetic oligonucleotide
  Sense strand starting at position 2035 of SEQ ID NO: 1562412
uccugucaucuggguaaca

SEQ ID NO: 1744890 - RNA, 19 nt, Artificial Sequence
  Description of Artificial Sequence: Synthetic oligonucleotide
  Antisense strand to SEQ ID NO: 1744889
uguuacccagaugacagga

SEQ ID NO: 1744891 - RNA, 19 nt, Artificial Sequence
  Description of Artificial Sequence: Synthetic oligonucleotide
  Sense strand starting at position 2093 of SEQ ID NO: 1562412
uguguuucccaacaucuua

SEQ ID NO: 1744892 - RNA, 19 nt, Artificial Sequence
  Description of Artificial Sequence: Synthetic oligonucleotide
  Antisense strand to SEQ ID NO: 1744891
uaagauguugggaaacaca

SEQ ID NO: 1744893 - RNA, 19 nt, Artificial Sequence
  Description of Artificial Sequence: Synthetic oligonucleotide
  Sense strand starting at position 2121 of SEQ ID NO: 1562412
guguacuuucccgcgucau

SEQ ID NO: 1744894 - RNA, 19 nt, Artificial Sequence
  Description of Artificial Sequence: Synthetic oligonucleotide
  Antisense strand to SEQ ID NO: 1744893
augacgcgggaaaguacac

SEQ ID NO: 1744895 - RNA, 19 nt, Artificial Sequence
  Description of Artificial Sequence: Synthetic oligonucleotide
  Sense strand starting at position 2260 of SEQ ID NO: 1562412
acuggcucgacucaaagua

SEQ ID NO: 1744896 - RNA, 19 nt, Artificial Sequence
  Description of Artificial Sequence: Synthetic oligonucleotide
  Antisense strand to SEQ ID NO: 1744895
uacuuugagucgagccagu

SEQ ID NO: 1744897 - RNA, 19 nt, Artificial Sequence
  Description of Artificial Sequence: Synthetic oligonucleotide
  Sense strand starting at position 2305 of SEQ ID NO: 1562412
ucaugcuaucaaggaagau

SEQ ID NO: 1744898 - RNA, 19 nt, Artificial Sequence
  Description of Artificial Sequence: Synthetic oligonucleotide
  Antisense strand to SEQ ID NO: 1744897
aucuuccuugauagcauga

SEQ ID NO: 1744899 - RNA, 19 nt, Artificial Sequence
  Description of Artificial Sequence: Synthetic oligonucleotide
  Sense strand starting at position 2394 of SEQ ID NO: 1562412
ucgucugugagccacauuu

SEQ ID NO: 1744900 - RNA, 19 nt, Artificial Sequence
  Description of Artificial Sequence: Synthetic oligonucleotide
  Antisense strand to SEQ ID NO: 1744899
aaauguggcucacagacga

SEQ ID NO: 1744901 - RNA, 19 nt, Artificial Sequence
  Description of Artificial Sequence: Synthetic oligonucleotide
  Sense strand starting at position 2446 of SEQ ID NO: 1562412
uggaucacagcaugucauu

SEQ ID NO: 1744902 - RNA, 19 nt, Artificial Sequence
  Description of Artificial Sequence: Synthetic oligonucleotide
  Antisense strand to SEQ ID NO: 1744901
aaugacaugcugugaucca

SEQ ID NO: 1744903 - RNA, 19 nt, Artificial Sequence
  Description of Artificial Sequence: Synthetic oligonucleotide
  Sense strand starting at position 2452 of SEQ ID NO: 1562412
acagcaugucauuaguuua

SEQ ID NO: 1744904 - RNA, 19 nt, Artificial Sequence
  Description of Artificial Sequence: Synthetic oligonucleotide
  Antisense strand to SEQ ID NO: 1744903
uaaacuaaugacaugcugu

SEQ ID NO: 1744905 - RNA, 19 nt, Artificial Sequence
  Description of Artificial Sequence: Synthetic oligonucleotide
  Sense strand starting at position 2503 of SEQ ID NO: 1562412
ggcacaacugaauaguuau

SEQ ID NO: 1744906 - RNA, 19 nt, Artificial Sequence
  Description of Artificial Sequence: Synthetic oligonucleotide
  Antisense strand to SEQ ID NO: 1744905
auaacuauucaguugugcc

SEQ ID NO: 1744907 - RNA, 19 nt, Artificial Sequence
  Description of Artificial Sequence: Synthetic oligonucleotide
  Sense strand starting at position 2558 of SEQ ID NO: 1562412
cugucugcccuuuacagaa

SEQ ID NO: 1744908 - RNA, 19 nt, Artificial Sequence
  Description of Artificial Sequence: Synthetic oligonucleotide
  Antisense strand to SEQ ID NO: 1744907
uucuguaaagggcagacag

SEQ ID NO: 1744909 - RNA, 19 nt, Artificial Sequence
  Description of Artificial Sequence: Synthetic oligonucleotide
  Sense strand starting at position 2588 of SEQ ID NO: 1562412
ccugccauagaguaaucua

SEQ ID NO: 1744910 - RNA, 19 nt, Artificial Sequence
  Description of Artificial Sequence: Synthetic oligonucleotide
  Antisense strand to SEQ ID NO: 1744909
uagauuacucuauggcagg

SEQ ID NO: 1744911 - RNA, 19 nt, Artificial Sequence
  Description of Artificial Sequence: Synthetic oligonucleotide
  Sense strand starting at position 2591 of SEQ ID NO: 1562412
gccauagaguaaucuauac

SEQ ID NO: 1744912 - RNA, 19 nt, Artificial Sequence
  Description of Artificial Sequence: Synthetic oligonucleotide
  Antisense strand to SEQ ID NO: 1744911
guauagauuacucuauggc

SEQ ID NO: 1744913 - RNA, 19 nt, Artificial Sequence
  Description of Artificial Sequence: Synthetic oligonucleotide
  Sense strand starting at position 2685 of SEQ ID NO: 1562412
agcagugggcaaugaauaa

SEQ ID NO: 1744914 - RNA, 19 nt, Artificial Sequence
  Description of Artificial Sequence: Synthetic oligonucleotide
  Antisense strand to SEQ ID NO: 1744913
uuauucauugcccacugcu

SEQ ID NO: 1744915 - RNA, 19 nt, Artificial Sequence
  Description of Artificial Sequence: Synthetic oligonucleotide
  Sense strand starting at position 2827 of SEQ ID NO: 1562412
caauguggccauggagaga

SEQ ID NO: 1744916 - RNA, 19 nt, Artificial Sequence
  Description of Artificial Sequence: Synthetic oligonucleotide
  Antisense strand to SEQ ID NO: 1744915
ucucuccauggccacauug

SEQ ID NO: 1744917 - RNA, 19 nt, Artificial Sequence
  Description of Artificial Sequence: Synthetic oligonucleotide
  Sense strand starting at position 2885 of SEQ ID NO: 1562412
gcaggaauccuguacucug

SEQ ID NO: 1744918 - RNA, 19 nt, Artificial Sequence
  Description of Artificial Sequence: Synthetic oligonucleotide
  Antisense strand to SEQ ID NO: 1744917
cagaguacaggauuccugc

SEQ ID NO: 1744919 - RNA, 19 nt, Artificial Sequence
  Description of Artificial Sequence: Synthetic oligonucleotide
  Sense strand starting at position 3044 of SEQ ID NO: 1562412
aguagaaauuaucuugucu

SEQ ID NO: 1744920 - RNA, 19 nt, Artificial Sequence
  Description of Artificial Sequence: Synthetic oligonucleotide
  Antisense strand to SEQ ID NO: 1744919
agacaagauaauuucuacu

SEQ ID NO: 1744921 - RNA, 19 nt, Artificial Sequence
  Description of Artificial Sequence: Synthetic oligonucleotide
  Sense strand starting at position 3134 of SEQ ID NO: 1562412
uaguuugaaccuuggaaag

SEQ ID NO: 1744922 - RNA, 19 nt, Artificial Sequence
  Description of Artificial Sequence: Synthetic oligonucleotide
  Antisense strand to SEQ ID NO: 1744921
cuuuccaagguucaaacua

SEQ ID NO: 1744923 - RNA, 19 nt, Artificial Sequence
  Description of Artificial Sequence: Synthetic oligonucleotide
  Sense strand starting at position 3205 of SEQ ID NO: 1562412
ggcaccaaauaugauuuaa

SEQ ID NO: 1744924 - RNA, 19 nt, Artificial Sequence
  Description of Artificial Sequence: Synthetic oligonucleotide
  Antisense strand to SEQ ID NO: 1744923
uuaaaucauauuuggugcc

SEQ ID NO: 1744925 - RNA, 19 nt, Artificial Sequence
  Description of Artificial Sequence: Synthetic oligonucleotide
  Sense strand starting at position 3369 of SEQ ID NO: 1562412
gguauaagguucuugcaag

SEQ ID NO: 1744926 - RNA, 19 nt, Artificial Sequence
  Description of Artificial Sequence: Synthetic oligonucleotide
  Antisense strand to SEQ ID NO: 1744925
cuugcaagaaccuuauacc

SEQ ID NO: 1744927 - RNA, 19 nt, Artificial Sequence
  Description of Artificial Sequence: Synthetic oligonucleotide
  Sense strand starting at position 3376 of SEQ ID NO: 1562412
gguucuugcaaggaugaga

SEQ ID NO: 1744928 - RNA, 19 nt, Artificial Sequence
  Description of Artificial Sequence: Synthetic oligonucleotide
  Antisense strand to SEQ ID NO: 1744927
ucucauccuugcaagaacc

SEQ ID NO: 1744929 - RNA, 19 nt, Artificial Sequence
  Description of Artificial Sequence: Synthetic oligonucleotide
  Sense strand starting at position 3749 of SEQ ID NO: 1562412
aauggauuacuuggugacu

SEQ ID NO: 1744930 - RNA, 19 nt, Artificial Sequence
  Description of Artificial Sequence: Synthetic oligonucleotide
  Antisense strand to SEQ ID NO: 1744929
agucaccaaguaauccauu

SEQ ID NO: 1744931 - RNA, 19 nt, Artificial Sequence
  Description of Artificial Sequence: Synthetic oligonucleotide
  Sense strand starting at position 3750 of SEQ ID NO: 1562412
auggauuacuuggugacua

SEQ ID NO: 1744932 - RNA, 19 nt, Artificial Sequence
  Description of Artificial Sequence: Synthetic oligonucleotide
  Antisense strand to SEQ ID NO: 1744931
uagucaccaaguaauccau

SEQ ID NO: 1744933 - RNA, 19 nt, Artificial Sequence
  Description of Artificial Sequence: Synthetic oligonucleotide
  Sense strand starting at position 3815 of SEQ ID NO: 1562412
gauucugaacuauagcagu

SEQ ID NO: 1744934 - RNA, 19 nt, Artificial Sequence
  Description of Artificial Sequence: Synthetic oligonucleotide
  Antisense strand to SEQ ID NO: 1744933
acugcuauaguucagaauc

SEQ ID NO: 1744935 - RNA, 19 nt, Artificial Sequence
  Description of Artificial Sequence: Synthetic oligonucleotide
  Sense strand starting at position 3821 of SEQ ID NO: 1562412
gaacuauagcagugaaagg

SEQ ID NO: 1744936 - RNA, 19 nt, Artificial Sequence
  Description of Artificial Sequence: Synthetic oligonucleotide
  Antisense strand to SEQ ID NO: 1744935
ccuuucacugcuauaguuc

SEQ ID NO: 1744937 - RNA, 19 nt, Artificial Sequence
  Description of Artificial Sequence: Synthetic oligonucleotide
  Sense strand starting at position 3835 of SEQ ID NO: 1562412
aaaggaguugccugugaac

SEQ ID NO: 1744938 - RNA, 19 nt, Artificial Sequence
  Description of Artificial Sequence: Synthetic oligonucleotide
  Antisense strand to SEQ ID NO: 1744937
guucacaggcaacuccuuu

SEQ ID NO: 1744939 - RNA, 19 nt, Artificial Sequence
  Description of Artificial Sequence: Synthetic oligonucleotide
  Sense strand starting at position 11 of SEQ ID NO: 1562413
ggguuagcuaaaggagauu

SEQ ID NO: 1744940 - RNA, 19 nt, Artificial Sequence
  Description of Artificial Sequence: Synthetic oligonucleotide
  Antisense strand to SEQ ID NO: 1744939
aaucuccuuuagcuaaccc

SEQ ID NO: 1744941 - RNA, 19 nt, Artificial Sequence
  Description of Artificial Sequence: Synthetic oligonucleotide
  Sense strand starting at position 553 of SEQ ID NO: 1562413
gucuuauagggcgagugau

SEQ ID NO: 1744942 - RNA, 19 nt, Artificial Sequence
  Description of Artificial Sequence: Synthetic oligonucleotide
  Antisense strand to SEQ ID NO: 1744941
aucacucgcccuauaagac

SEQ ID NO: 1744943 - RNA, 19 nt, Artificial Sequence
  Description of Artificial Sequence: Synthetic oligonucleotide
  Sense strand starting at position 609 of SEQ ID NO: 1562413
cccaaacccggaugugauu

SEQ ID NO: 1744944 - RNA, 19 nt, Artificial Sequence
  Description of Artificial Sequence: Synthetic oligonucleotide
  Antisense strand to SEQ ID NO: 1744943
aaucacauccggguuuggg

SEQ ID NO: 1744945 - RNA, 19 nt, Artificial Sequence
  Description of Artificial Sequence: Synthetic oligonucleotide
  Sense strand starting at position 618 of SEQ ID NO: 1562413
ggaugugauucugcuuuga

SEQ ID NO: 1744946 - RNA, 19 nt, Artificial Sequence
  Description of Artificial Sequence: Synthetic oligonucleotide
  Antisense strand to SEQ ID NO: 1744945
ucaaagcagaaucacaucc

SEQ ID NO: 1744947 - RNA, 19 nt, Artificial Sequence
  Description of Artificial Sequence: Synthetic oligonucleotide
  Sense strand starting at position 620 of SEQ ID NO: 1562413
augugauucugcuuugaug

SEQ ID NO: 1744948 - RNA, 19 nt, Artificial Sequence
  Description of Artificial Sequence: Synthetic oligonucleotide
  Antisense strand to SEQ ID NO: 1744947
caucaaagcagaaucacau

SEQ ID NO: 1744949 - RNA, 19 nt, Artificial Sequence
  Description of Artificial Sequence: Synthetic oligonucleotide
  Sense strand starting at position 694 of SEQ ID NO: 1562413
uaugaacugugagcugaaa

SEQ ID NO: 1744950 - RNA, 19 nt, Artificial Sequence
  Description of Artificial Sequence: Synthetic oligonucleotide
  Antisense strand to SEQ ID NO: 1744949
uuucagcucacaguucaua

SEQ ID NO: 1744951 - RNA, 19 nt, Artificial Sequence
  Description of Artificial Sequence: Synthetic oligonucleotide
  Sense strand starting at position 747 of SEQ ID NO: 1562413
gcuggugugagcugaaaca

SEQ ID NO: 1744952 - RNA, 19 nt, Artificial Sequence
  Description of Artificial Sequence: Synthetic oligonucleotide
  Antisense strand to SEQ ID NO: 1744951
uguuucagcucacaccagc

SEQ ID NO: 1744953 - RNA, 19 nt, Artificial Sequence
  Description of Artificial Sequence: Synthetic oligonucleotide
  Sense strand starting at position 813 of SEQ ID NO: 1562413
cuucuauaguccucgguaa

SEQ ID NO: 1744954 - RNA, 19 nt, Artificial Sequence
  Description of Artificial Sequence: Synthetic oligonucleotide
  Antisense strand to SEQ ID NO: 1744953
uuaccgaggacuauagaag

SEQ ID NO: 1744955 - RNA, 19 nt, Artificial Sequence
  Description of Artificial Sequence: Synthetic oligonucleotide
  Sense strand starting at position 814 of SEQ ID NO: 1562413
uucuauaguccucgguaaa

SEQ ID NO: 1744956 - RNA, 19 nt, Artificial Sequence
  Description of Artificial Sequence: Synthetic oligonucleotide
  Antisense strand to SEQ ID NO: 1744955
uuuaccgaggacuauagaa

SEQ ID NO: 1744957 - RNA, 19 nt, Artificial Sequence
  Description of Artificial Sequence: Synthetic oligonucleotide
  Sense strand starting at position 837 of SEQ ID NO: 1562413
cugaguaaagcucacuuua

SEQ ID NO: 1744958 - RNA, 19 nt, Artificial Sequence
  Description of Artificial Sequence: Synthetic oligonucleotide
  Antisense strand to SEQ ID NO: 1744957
uaaagugagcuuuacucag

SEQ ID NO: 1744959 - RNA, 19 nt, Artificial Sequence
  Description of Artificial Sequence: Synthetic oligonucleotide
  Sense strand starting at position 949 of SEQ ID NO: 1562413
uuaauuucuugacaagagu

SEQ ID NO: 1744960 - RNA, 19 nt, Artificial Sequence
  Description of Artificial Sequence: Synthetic oligonucleotide
  Antisense strand to SEQ ID NO: 1744959
acucuugucaagaaauuaa

SEQ ID NO: 1744961 - RNA, 19 nt, Artificial Sequence
  Description of Artificial Sequence: Synthetic oligonucleotide
  Sense strand starting at position 960 of SEQ ID NO: 1562413
acaagaguggguugcacau

SEQ ID NO: 1744962 - RNA, 19 nt, Artificial Sequence
  Description of Artificial Sequence: Synthetic oligonucleotide
  Antisense strand to SEQ ID NO: 1744961
augugcaacccacucuugu

SEQ ID NO: 1744963 - RNA, 19 nt, Artificial Sequence
  Description of Artificial Sequence: Synthetic oligonucleotide
  Sense strand starting at position 1248 of SEQ ID NO: 1562413
aggagcuuuccagaauccu

SEQ ID NO: 1744964 - RNA, 19 nt, Artificial Sequence
  Description of Artificial Sequence: Synthetic oligonucleotide
  Antisense strand to SEQ ID NO: 1744963
aggauucuggaaagcuccu

SEQ ID NO: 1744965 - RNA, 19 nt, Artificial Sequence
  Description of Artificial Sequence: Synthetic oligonucleotide
  Sense strand starting at position 1500 of SEQ ID NO: 1562413
ggucuagucaggugacgac

SEQ ID NO: 1744966 - RNA, 19 nt, Artificial Sequence
  Description of Artificial Sequence: Synthetic oligonucleotide
  Antisense strand to SEQ ID NO: 1744965
gucgucaccugacuagacc

SEQ ID NO: 1744967 - RNA, 19 nt, Artificial Sequence
  Description of Artificial Sequence: Synthetic oligonucleotide
  Sense strand starting at position 1518 of SEQ ID NO: 1562413
caguuugcugugggaggau

SEQ ID NO: 1744968 - RNA, 19 nt, Artificial Sequence
  Description of Artificial Sequence: Synthetic oligonucleotide
  Antisense strand to SEQ ID NO: 1744967
auccucccacagcaaacug

SEQ ID NO: 1744969 - RNA, 19 nt, Artificial Sequence
  Description of Artificial Sequence: Synthetic oligonucleotide
  Sense strand starting at position 2190 of SEQ ID NO: 1562413
guguguuuccuggaaacag

SEQ ID NO: 1744970 - RNA, 19 nt, Artificial Sequence
  Description of Artificial Sequence: Synthetic oligonucleotide
  Antisense strand to SEQ ID NO: 1744969
cuguuuccaggaaacacac

SEQ ID NO: 1744971 - RNA, 19 nt, Artificial Sequence
  Description of Artificial Sequence: Synthetic oligonucleotide
  Sense strand starting at position 2344 of SEQ ID NO: 1562413
gacugagaagcucagucau

SEQ ID NO: 1744972 - RNA, 19 nt, Artificial Sequence
  Description of Artificial Sequence: Synthetic oligonucleotide
  Antisense strand to SEQ ID NO: 1744971
augacugagcuucucaguc

SEQ ID NO: 1744973 - RNA, 19 nt, Artificial Sequence
  Description of Artificial Sequence: Synthetic oligonucleotide
  Sense strand starting at position 2346 of SEQ ID NO: 1562413
cugagaagcucagucauca

SEQ ID NO: 1744974 - RNA, 19 nt, Artificial Sequence
  Description of Artificial Sequence: Synthetic oligonucleotide
  Antisense strand to SEQ ID NO: 1744973
ugaugacugagcuucucag

SEQ ID NO: 1744975 - RNA, 19 nt, Artificial Sequence
  Description of Artificial Sequence: Synthetic oligonucleotide
  Sense strand starting at position 2421 of SEQ ID NO: 1562413
uaaugaugauuauugaggu

SEQ ID NO: 1744976 - RNA, 19 nt, Artificial Sequence
  Description of Artificial Sequence: Synthetic oligonucleotide
  Antisense strand to SEQ ID NO: 1744975
accucaauaaucaucauua

SEQ ID NO: 1744977 - RNA, 19 nt, Artificial Sequence
  Description of Artificial Sequence: Synthetic oligonucleotide
  Sense strand starting at position 2470 of SEQ ID NO: 1562413
ccaggcugugauuaucuca

SEQ ID NO: 1744978 - RNA, 19 nt, Artificial Sequence
  Description of Artificial Sequence: Synthetic oligonucleotide
  Antisense strand to SEQ ID NO: 1744977
ugagauaaucacagccugg

SEQ ID NO: 1744979 - RNA, 19 nt, Artificial Sequence
  Description of Artificial Sequence: Synthetic oligonucleotide
  Sense strand starting at position 2473 of SEQ ID NO: 1562413
ggcugugauuaucucauuc

SEQ ID NO: 1744980 - RNA, 19 nt, Artificial Sequence
  Description of Artificial Sequence: Synthetic oligonucleotide
  Antisense strand to SEQ ID NO: 1744979
gaaugagauaaucacagcc

SEQ ID NO: 1744981 - RNA, 19 nt, Artificial Sequence
  Description of Artificial Sequence: Synthetic oligonucleotide
  Sense strand starting at position 2532 of SEQ ID NO: 1562413
agaugugcaauuuguaagu

SEQ ID NO: 1744982 - RNA, 19 nt, Artificial Sequence
  Description of Artificial Sequence: Synthetic oligonucleotide
  Antisense strand to SEQ ID NO: 1744981
acuuacaaauugcacaucu

SEQ ID NO: 1744983 - RNA, 19 nt, Artificial Sequence
  Description of Artificial Sequence: Synthetic oligonucleotide
  Sense strand starting at position 2543 of SEQ ID NO: 1562413
uuguaagucauagaggguu

SEQ ID NO: 1744984 - RNA, 19 nt, Artificial Sequence
  Description of Artificial Sequence: Synthetic oligonucleotide
  Antisense strand to SEQ ID NO: 1744983
aacccucuaugacuuacaa

SEQ ID NO: 1744985 - RNA, 19 nt, Artificial Sequence
  Description of Artificial Sequence: Synthetic oligonucleotide
  Sense strand starting at position 2551 of SEQ ID NO: 1562413
cauagaggguuugcacaau

SEQ ID NO: 1744986 - RNA, 19 nt, Artificial Sequence
  Description of Artificial Sequence: Synthetic oligonucleotide
  Antisense strand to SEQ ID NO: 1744985
auugugcaaacccucuaug

SEQ ID NO: 1744987 - RNA, 19 nt, Artificial Sequence
  Description of Artificial Sequence: Synthetic oligonucleotide
  Sense strand starting at position 2681 of SEQ ID NO: 1562413
auaagugacucauccugaa

SEQ ID NO: 1744988 - RNA, 19 nt, Artificial Sequence
  Description of Artificial Sequence: Synthetic oligonucleotide
  Antisense strand to SEQ ID NO: 1744987
uucaggaugagucacuuau

SEQ ID NO: 1744989 - RNA, 19 nt, Artificial Sequence
  Description of Artificial Sequence: Synthetic oligonucleotide
  Sense strand starting at position 3065 of SEQ ID NO: 1562413
ccagcucuguucucuugau

SEQ ID NO: 1744990 - RNA, 19 nt, Artificial Sequence
  Description of Artificial Sequence: Synthetic oligonucleotide
  Antisense strand to SEQ ID NO: 1744989
aucaagagaacagagcugg

SEQ ID NO: 1744991 - RNA, 19 nt, Artificial Sequence
  Description of Artificial Sequence: Synthetic oligonucleotide
  Sense strand starting at position 3069 of SEQ ID NO: 1562413
cucuguucucuugauggau

SEQ ID NO: 1744992 - RNA, 19 nt, Artificial Sequence
  Description of Artificial Sequence: Synthetic oligonucleotide
  Antisense strand to SEQ ID NO: 1744991
auccaucaagagaacagag

SEQ ID NO: 1744993 - RNA, 19 nt, Artificial Sequence
  Description of Artificial Sequence: Synthetic oligonucleotide
  Sense strand starting at position 3492 of SEQ ID NO: 1562413
cagugauugugagcuaguc

SEQ ID NO: 1744994 - RNA, 19 nt, Artificial Sequence
  Description of Artificial Sequence: Synthetic oligonucleotide
  Antisense strand to SEQ ID NO: 1744993
gacuagcucacaaucacug

SEQ ID NO: 1744995 - RNA, 19 nt, Artificial Sequence
  Description of Artificial Sequence: Synthetic oligonucleotide
  Sense strand starting at position 3500 of SEQ ID NO: 1562413
gugagcuagucaccaagua

SEQ ID NO: 1744996 - RNA, 19 nt, Artificial Sequence
  Description of Artificial Sequence: Synthetic oligonucleotide
  Antisense strand to SEQ ID NO: 1744995
uacuuggugacuagcucac

SEQ ID NO: 1744997 - RNA, 19 nt, Artificial Sequence
  Description of Artificial Sequence: Synthetic oligonucleotide
  Sense strand starting at position 3501 of SEQ ID NO: 1562413
ugagcuagucaccaaguaa

SEQ ID NO: 1744998 - RNA, 19 nt, Artificial Sequence
  Description of Artificial Sequence: Synthetic oligonucleotide
  Antisense strand to SEQ ID NO: 1744997
uuacuuggugacuagcuca

SEQ ID NO: 1744999 - RNA, 19 nt, Artificial Sequence
  Description of Artificial Sequence: Synthetic oligonucleotide
  Sense strand starting at position 3529 of SEQ ID NO: 1562413
aaaguugguugucuuacga

SEQ ID NO: 1745000 - RNA, 19 nt, Artificial Sequence
  Description of Artificial Sequence: Synthetic oligonucleotide
  Antisense strand to SEQ ID NO: 1744999
ucguaagacaaccaacuuu

SEQ ID NO: 1745001 - RNA, 19 nt, Artificial Sequence
  Description of Artificial Sequence: Synthetic oligonucleotide
  Sense strand starting at position 3539 of SEQ ID NO: 1562413
gucuuacgagucgauuaca

SEQ ID NO: 1745002 - RNA, 19 nt, Artificial Sequence
  Description of Artificial Sequence: Synthetic oligonucleotide
  Antisense strand to SEQ ID NO: 1745001
uguaaucgacucguaagac

SEQ ID NO: 1745003 - RNA, 19 nt, Artificial Sequence
  Description of Artificial Sequence: Synthetic oligonucleotide
  Sense strand starting at position 3542 of SEQ ID NO: 1562413
uuacgagucgauuacagaa

SEQ ID NO: 1745004 - RNA, 19 nt, Artificial Sequence
  Description of Artificial Sequence: Synthetic oligonucleotide
  Antisense strand to SEQ ID NO: 1745003
uucuguaaucgacucguaa

SEQ ID NO: 1745005 - RNA, 19 nt, Artificial Sequence
  Description of Artificial Sequence: Synthetic oligonucleotide
  Sense strand starting at position 3565 of SEQ ID NO: 1562413
aaggaugcgucuuugauau

SEQ ID NO: 1745006 - RNA, 19 nt, Artificial Sequence
  Description of Artificial Sequence: Synthetic oligonucleotide
  Antisense strand to SEQ ID NO: 1745005
auaucaaagacgcauccuu

SEQ ID NO: 1745007 - RNA, 19 nt, Artificial Sequence
  Description of Artificial Sequence: Synthetic oligonucleotide
  Sense strand starting at position 3708 of SEQ ID NO: 1562413
gaggauuucucccagcuuu

SEQ ID NO: 1745008 - RNA, 19 nt, Artificial Sequence
  Description of Artificial Sequence: Synthetic oligonucleotide
  Antisense strand to SEQ ID NO: 1745007
aaagcugggagaaauccuc

SEQ ID NO: 1745009 - RNA, 19 nt, Artificial Sequence
  Description of Artificial Sequence: Synthetic oligonucleotide
  Sense strand starting at position 3785 of SEQ ID NO: 1562413
agaauucuggguuggcaaa

SEQ ID NO: 1745010 - RNA, 19 nt, Artificial Sequence
  Description of Artificial Sequence: Synthetic oligonucleotide
  Antisense strand to SEQ ID NO: 1745009
uuugccaacccagaauucu

SEQ ID NO: 1745011 - RNA, 19 nt, Artificial Sequence
  Description of Artificial Sequence: Synthetic oligonucleotide
  Sense strand starting at position 3786 of SEQ ID NO: 1562413
gaauucuggguuggcaaau

SEQ ID NO: 1745012 - RNA, 19 nt, Artificial Sequence
  Description of Artificial Sequence: Synthetic oligonucleotide
  Antisense strand to SEQ ID NO: 1745011
auuugccaacccagaauuc

SEQ ID NO: 1745013 - RNA, 19 nt, Artificial Sequence
  Description of Artificial Sequence: Synthetic oligonucleotide
  Sense strand starting at position 3787 of SEQ ID NO: 1562413
aauucuggguuggcaaauu

SEQ ID NO: 1745014 - RNA, 19 nt, Artificial Sequence
  Description of Artificial Sequence: Synthetic oligonucleotide
  Antisense strand to SEQ ID NO: 1745013
aauuugccaacccagaauu

SEQ ID NO: 1745015 - RNA, 19 nt, Artificial Sequence
  Description of Artificial Sequence: Synthetic oligonucleotide
  Sense strand starting at position 3820 of SEQ ID NO: 1562413
uaaagaaguuguuccauug

SEQ ID NO: 1745016 - RNA, 19 nt, Artificial Sequence
  Description of Artificial Sequence: Synthetic oligonucleotide
  Antisense strand to SEQ ID NO: 1745015
caauggaacaacuucuuua

SEQ ID NO: 1745017 - RNA, 19 nt, Artificial Sequence
  Description of Artificial Sequence: Synthetic oligonucleotide
  Sense strand starting at position 3906 of SEQ ID NO: 1562413
uuguaugagaagugucuuu

SEQ ID NO: 1745018 - RNA, 19 nt, Artificial Sequence
  Description of Artificial Sequence: Synthetic oligonucleotide
  Antisense strand to SEQ ID NO: 1745017
aaagacacuucucauacaa

SEQ ID NO: 1745019 - RNA, 19 nt, Artificial Sequence
  Description of Artificial Sequence: Synthetic oligonucleotide
  Sense strand starting at position 21 of SEQ ID NO: 1562414
cuaucucaagacuguguua

SEQ ID NO: 1745020 - RNA, 19 nt, Artificial Sequence
  Description of Artificial Sequence: Synthetic oligonucleotide
  Antisense strand to SEQ ID NO: 1745019
uaacacagucuugagauag

SEQ ID NO: 1745021 - RNA, 19 nt, Artificial Sequence
  Description of Artificial Sequence: Synthetic oligonucleotide
  Sense strand starting at position 47 of SEQ ID NO: 1562414
gaaugaacauguuugucau

SEQ ID NO: 1745022 - RNA, 19 nt, Artificial Sequence
  Description of Artificial Sequence: Synthetic oligonucleotide
  Antisense strand to SEQ ID NO: 1745021
augacaaacauguucauuc

SEQ ID NO: 1745023 - RNA, 19 nt, Artificial Sequence
  Description of Artificial Sequence: Synthetic oligonucleotide
  Sense strand starting at position 49 of SEQ ID NO: 1562414
augaacauguuugucauua

SEQ ID NO: 1745024 - RNA, 19 nt, Artificial Sequence
  Description of Artificial Sequence: Synthetic oligonucleotide
  Antisense strand to SEQ ID NO: 1745023
uaaugacaaacauguucau

SEQ ID NO: 1745025 - RNA, 19 nt, Artificial Sequence
  Description of Artificial Sequence: Synthetic oligonucleotide
  Sense strand starting at position 50 of SEQ ID NO: 1562414
ugaacauguuugucauuac

SEQ ID NO: 1745026 - RNA, 19 nt, Artificial Sequence
  Description of Artificial Sequence: Synthetic oligonucleotide
  Antisense strand to SEQ ID NO: 1745025
guaaugacaaacauguuca

SEQ ID NO: 1745027 - RNA, 19 nt, Artificial Sequence
  Description of Artificial Sequence: Synthetic oligonucleotide
  Sense strand starting at position 53 of SEQ ID NO: 1562414
acauguuugucauuaccac

SEQ ID NO: 1745028 - RNA, 19 nt, Artificial Sequence
  Description of Artificial Sequence: Synthetic oligonucleotide
  Antisense strand to SEQ ID NO: 1745027
gugguaaugacaaacaugu

SEQ ID NO: 1745029 - RNA, 19 nt, Artificial Sequence
  Description of Artificial Sequence: Synthetic oligonucleotide
  Sense strand starting at position 157 of SEQ ID NO: 1562414
ugcuuauugcguguaaucu

SEQ ID NO: 1745030 - RNA, 19 nt, Artificial Sequence
  Description of Artificial Sequence: Synthetic oligonucleotide
  Antisense strand to SEQ ID NO: 1745029
agauuacacgcaauaagca

SEQ ID NO: 1745031 - RNA, 19 nt, Artificial Sequence
  Description of Artificial Sequence: Synthetic oligonucleotide
  Sense strand starting at position 196 of SEQ ID NO: 1562414
auauuucugucuuugcaag

SEQ ID NO: 1745032 - RNA, 19 nt, Artificial Sequence
  Description of Artificial Sequence: Synthetic oligonucleotide
  Antisense strand to SEQ ID NO: 1745031
cuugcaaagacagaaauau

SEQ ID NO: 1745033 - RNA, 19 nt, Artificial Sequence
  Description of Artificial Sequence: Synthetic oligonucleotide
  Sense strand starting at position 238 of SEQ ID NO: 1562414
gauaucguacaauaaguuu

SEQ ID NO: 1745034 - RNA, 19 nt, Artificial Sequence
  Description of Artificial Sequence: Synthetic oligonucleotide
  Antisense strand to SEQ ID NO: 1745033
aaacuuauuguacgauauc

SEQ ID NO: 1745035 - RNA, 19 nt, Artificial Sequence
  Description of Artificial Sequence: Synthetic oligonucleotide
  Sense strand starting at position 324 of SEQ ID NO: 1562414
ggaucucuuucucuaacag

SEQ ID NO: 1745036 - RNA, 19 nt, Artificial Sequence
  Description of Artificial Sequence: Synthetic oligonucleotide
  Antisense strand to SEQ ID NO: 1745035
cuguuagagaaagagaucc

SEQ ID NO: 1745037 - RNA, 19 nt, Artificial Sequence
  Description of Artificial Sequence: Synthetic oligonucleotide
  Sense strand starting at position 339 of SEQ ID NO: 1562414
acagcuguugucuaaagga

SEQ ID NO: 1745038 - RNA, 19 nt, Artificial Sequence
  Description of Artificial Sequence: Synthetic oligonucleotide
  Antisense strand to SEQ ID NO: 1745037
uccuuuagacaacagcugu

SEQ ID NO: 1745039 - RNA, 19 nt, Artificial Sequence
  Description of Artificial Sequence: Synthetic oligonucleotide
  Sense strand starting at position 368 of SEQ ID NO: 1562414
ggaauaguuauugaacguu

SEQ ID NO: 1745040 - RNA, 19 nt, Artificial Sequence
  Description of Artificial Sequence: Synthetic oligonucleotide
  Antisense strand to SEQ ID NO: 1745039
aacguucaauaacuauucc

SEQ ID NO: 1745041 - RNA, 19 nt, Artificial Sequence
  Description of Artificial Sequence: Synthetic oligonucleotide
  Sense strand starting at position 411 of SEQ ID NO: 1562414
acuuuagguuccuuauuga

SEQ ID NO: 1745042 - RNA, 19 nt, Artificial Sequence
  Description of Artificial Sequence: Synthetic oligonucleotide
  Antisense strand to SEQ ID NO: 1745041
ucaauaaggaaccuaaagu

SEQ ID NO: 1745043 - RNA, 19 nt, Artificial Sequence
  Description of Artificial Sequence: Synthetic oligonucleotide
  Sense strand starting at position 414 of SEQ ID NO: 1562414
uuagguuccuuauugaaau

SEQ ID NO: 1745044 - RNA, 19 nt, Artificial Sequence
  Description of Artificial Sequence: Synthetic oligonucleotide
  Antisense strand to SEQ ID NO: 1745043
auuucaauaaggaaccuaa

SEQ ID NO: 1745045 - RNA, 19 nt, Artificial Sequence
  Description of Artificial Sequence: Synthetic oligonucleotide
  Sense strand starting at position 457 of SEQ ID NO: 1562414
ggaacugcuuugccugaga

SEQ ID NO: 1745046 - RNA, 19 nt, Artificial Sequence
  Description of Artificial Sequence: Synthetic oligonucleotide
  Antisense strand to SEQ ID NO: 1745045
ucucaggcaaagcaguucc

SEQ ID NO: 1745047 - RNA, 19 nt, Artificial Sequence
  Description of Artificial Sequence: Synthetic oligonucleotide
  Sense strand starting at position 584 of SEQ ID NO: 1562414
cuuuacuuagugugaaaca

SEQ ID NO: 1745048 - RNA, 19 nt, Artificial Sequence
  Description of Artificial Sequence: Synthetic oligonucleotide
  Antisense strand to SEQ ID NO: 1745047
uguuucacacuaaguaaag

SEQ ID NO: 1745049 - RNA, 19 nt, Artificial Sequence
  Description of Artificial Sequence: Synthetic oligonucleotide
  Sense strand starting at position 648 of SEQ ID NO: 1562414
ugguaucccuuauuacaca

SEQ ID NO: 1745050 - RNA, 19 nt, Artificial Sequence
  Description of Artificial Sequence: Synthetic oligonucleotide
  Antisense strand to SEQ ID NO: 1745049
uguguaauaagggauacca

SEQ ID NO: 1745051 - RNA, 19 nt, Artificial Sequence
  Description of Artificial Sequence: Synthetic oligonucleotide
  Sense strand starting at position 732 of SEQ ID NO: 1562414
aacaaauauugggugacuu

SEQ ID NO: 1745052 - RNA, 19 nt, Artificial Sequence
  Description of Artificial Sequence: Synthetic oligonucleotide
  Antisense strand to SEQ ID NO: 1745051
aagucacccaauauuuguu

SEQ ID NO: 1745053 - RNA, 19 nt, Artificial Sequence
  Description of Artificial Sequence: Synthetic oligonucleotide
  Sense strand starting at position 733 of SEQ ID NO: 1562414
acaaauauugggugacuuc

SEQ ID NO: 1745054 - RNA, 19 nt, Artificial Sequence
  Description of Artificial Sequence: Synthetic oligonucleotide
  Antisense strand to SEQ ID NO: 1745053
gaagucacccaauauuugu

SEQ ID NO: 1745055 - RNA, 19 nt, Artificial Sequence
  Description of Artificial Sequence: Synthetic oligonucleotide
  Sense strand starting at position 843 of SEQ ID NO: 1562414
cucugcagauuccugauau

SEQ ID NO: 1745056 - RNA, 19 nt, Artificial Sequence
  Description of Artificial Sequence: Synthetic oligonucleotide
  Antisense strand to SEQ ID NO: 1745055
auaucaggaaucugcagag

SEQ ID NO: 1745057 - RNA, 19 nt, Artificial Sequence
  Description of Artificial Sequence: Synthetic oligonucleotide
  Sense strand starting at position 927 of SEQ ID NO: 1562414
ggaucaagcuaauuccuga

SEQ ID NO: 1745058 - RNA, 19 nt, Artificial Sequence
  Description of Artificial Sequence: Synthetic oligonucleotide
  Antisense strand to SEQ ID NO: 1745057
ucaggaauuagcuugaucc

SEQ ID NO: 1745059 - RNA, 19 nt, Artificial Sequence
  Description of Artificial Sequence: Synthetic oligonucleotide
  Sense strand starting at position 934 of SEQ ID NO: 1562414
gcuaauuccugauucugau

SEQ ID NO: 1745060 - RNA, 19 nt, Artificial Sequence
  Description of Artificial Sequence: Synthetic oligonucleotide
  Antisense strand to SEQ ID NO: 1745059
aucagaaucaggaauuagc

SEQ ID NO: 1745061 - RNA, 19 nt, Artificial Sequence
  Description of Artificial Sequence: Synthetic oligonucleotide
  Sense strand starting at position 993 of SEQ ID NO: 1562414
cuaccuguaguuugaauaa

SEQ ID NO: 1745062 - RNA, 19 nt, Artificial Sequence
  Description of Artificial Sequence: Synthetic oligonucleotide
  Antisense strand to SEQ ID NO: 1745061
uuauucaaacuacagguag

SEQ ID NO: 1745063 - RNA, 19 nt, Artificial Sequence
  Description of Artificial Sequence: Synthetic oligonucleotide
  Sense strand starting at position 2025 of SEQ ID NO: 1562414
agaagauucugaguuugca

SEQ ID NO: 1745064 - RNA, 19 nt, Artificial Sequence
  Description of Artificial Sequence: Synthetic oligonucleotide
  Antisense strand to SEQ ID NO: 1745063
ugcaaacucagaaucuucu

SEQ ID NO: 1745065 - RNA, 19 nt, Artificial Sequence
  Description of Artificial Sequence: Synthetic oligonucleotide
  Sense strand starting at position 2230 of SEQ ID NO: 1562414
gcgucaaugaaaugcauuu

SEQ ID NO: 1745066 - RNA, 19 nt, Artificial Sequence
  Description of Artificial Sequence: Synthetic oligonucleotide
  Antisense strand to SEQ ID NO: 1745065
aaaugcauuucauugacgc

SEQ ID NO: 1745067 - RNA, 19 nt, Artificial Sequence
  Description of Artificial Sequence: Synthetic oligonucleotide
  Sense strand starting at position 2258 of SEQ ID NO: 1562414
augcuaugacaguauguga

SEQ ID NO: 1745068 - RNA, 19 nt, Artificial Sequence
  Description of Artificial Sequence: Synthetic oligonucleotide
  Antisense strand to SEQ ID NO: 1745067
ucacauacugucauagcau

SEQ ID NO: 1745069 - RNA, 19 nt, Artificial Sequence
  Description of Artificial Sequence: Synthetic oligonucleotide
  Sense strand starting at position 2261 of SEQ ID NO: 1562414
cuaugacaguaugugauua

SEQ ID NO: 1745070 - RNA, 19 nt, Artificial Sequence
  Description of Artificial Sequence: Synthetic oligonucleotide
  Antisense strand to SEQ ID NO: 1745069
uaaucacauacugucauag

SEQ ID NO: 1745071 - RNA, 19 nt, Artificial Sequence
  Description of Artificial Sequence: Synthetic oligonucleotide
  Sense strand starting at position 2273 of SEQ ID NO: 1562414
gugauuagucccuacucca

SEQ ID NO: 1745072 - RNA, 19 nt, Artificial Sequence
  Description of Artificial Sequence: Synthetic oligonucleotide
  Antisense strand to SEQ ID NO: 1745071
uggaguagggacuaaucac

SEQ ID NO: 1745073 - RNA, 19 nt, Artificial Sequence
  Description of Artificial Sequence: Synthetic oligonucleotide
  Sense strand starting at position 2286 of SEQ ID NO: 1562414
acuccauuauguccaggaa

SEQ ID NO: 1745074 - RNA, 19 nt, Artificial Sequence
  Description of Artificial Sequence: Synthetic oligonucleotide
  Antisense strand to SEQ ID NO: 1745073
uuccuggacauaauggagu

SEQ ID NO: 1745075 - RNA, 19 nt, Artificial Sequence
  Description of Artificial Sequence: Synthetic oligonucleotide
  Sense strand starting at position 2356 of SEQ ID NO: 1562414
cugggaaauucuuucuguc

SEQ ID NO: 1745076 - RNA, 19 nt, Artificial Sequence
  Description of Artificial Sequence: Synthetic oligonucleotide
  Antisense strand to SEQ ID NO: 1745075
gacagaaagaauuucccag

SEQ ID NO: 1745077 - RNA, 19 nt, Artificial Sequence
  Description of Artificial Sequence: Synthetic oligonucleotide
  Sense strand starting at position 2358 of SEQ ID NO: 1562414
gggaaauucuuucugucuu

SEQ ID NO: 1745078 - RNA, 19 nt, Artificial Sequence
  Description of Artificial Sequence: Synthetic oligonucleotide
  Antisense strand to SEQ ID NO: 1745077
aagacagaaagaauuuccc

SEQ ID NO: 1745079 - RNA, 19 nt, Artificial Sequence
  Description of Artificial Sequence: Synthetic oligonucleotide
  Sense strand starting at position 2413 of SEQ ID NO: 1562414
guggccuagaggcagaaau

SEQ ID NO: 1745080 - RNA, 19 nt, Artificial Sequence
  Description of Artificial Sequence: Synthetic oligonucleotide
  Antisense strand to SEQ ID NO: 1745079
auuucugccucuaggccac

SEQ ID NO: 1745081 - RNA, 19 nt, Artificial Sequence
  Description of Artificial Sequence: Synthetic oligonucleotide
  Sense strand starting at position 2460 of SEQ ID NO: 1562414
ugccaucuguuauuuacua

SEQ ID NO: 1745082 - RNA, 19 nt, Artificial Sequence
  Description of Artificial Sequence: Synthetic oligonucleotide
  Antisense strand to SEQ ID NO: 1745081
uaguaaauaacagauggca

SEQ ID NO: 1745083 - RNA, 19 nt, Artificial Sequence
  Description of Artificial Sequence: Synthetic oligonucleotide
  Sense strand starting at position 2461 of SEQ ID NO: 1562414
gccaucuguuauuuacuau

SEQ ID NO: 1745084 - RNA, 19 nt, Artificial Sequence
  Description of Artificial Sequence: Synthetic oligonucleotide
  Antisense strand to SEQ ID NO: 1745083
auaguaaauaacagauggc

SEQ ID NO: 1745085 - RNA, 19 nt, Artificial Sequence
  Description of Artificial Sequence: Synthetic oligonucleotide
  Sense strand starting at position 2477 of SEQ ID NO: 1562414
uauaaucagugcuuguaag

SEQ ID NO: 1745086 - RNA, 19 nt, Artificial Sequence
  Description of Artificial Sequence: Synthetic oligonucleotide
  Antisense strand to SEQ ID NO: 1745085
cuuacaagcacugauuaua

SEQ ID NO: 1745087 - RNA, 19 nt, Artificial Sequence
  Description of Artificial Sequence: Synthetic oligonucleotide
  Sense strand starting at position 2706 of SEQ ID NO: 1562414
aagucagaguagucacaau

SEQ ID NO: 1745088 - RNA, 19 nt, Artificial Sequence
  Description of Artificial Sequence: Synthetic oligonucleotide
  Antisense strand to SEQ ID NO: 1745087
auugugacuacucugacuu

SEQ ID NO: 1745089 - RNA, 19 nt, Artificial Sequence
  Description of Artificial Sequence: Synthetic oligonucleotide
  Sense strand starting at position 2810 of SEQ ID NO: 1562414
ucauauuuguaaguguucu

SEQ ID NO: 1745090 - RNA, 19 nt, Artificial Sequence
  Description of Artificial Sequence: Synthetic oligonucleotide
  Antisense strand to SEQ ID NO: 1745089
agaacacuuacaaauauga

SEQ ID NO: 1745091 - RNA, 19 nt, Artificial Sequence
  Description of Artificial Sequence: Synthetic oligonucleotide
  Sense strand starting at position 2940 of SEQ ID NO: 1562414
ccucuuuaaagagguggau

SEQ ID NO: 1745092 - RNA, 19 nt, Artificial Sequence
  Description of Artificial Sequence: Synthetic oligonucleotide
  Antisense strand to SEQ ID NO: 1745091
auccaccucuuuaaagagg

SEQ ID NO: 1745093 - RNA, 19 nt, Artificial Sequence
  Description of Artificial Sequence: Synthetic oligonucleotide
  Sense strand starting at position 2978 of SEQ ID NO: 1562414
aaaguauaauuuggagauc

SEQ ID NO: 1745094 - RNA, 19 nt, Artificial Sequence
  Description of Artificial Sequence: Synthetic oligonucleotide
  Antisense strand to SEQ ID NO: 1745093
gaucuccaaauuauacuuu

SEQ ID NO: 1745095 - RNA, 19 nt, Artificial Sequence
  Description of Artificial Sequence: Synthetic oligonucleotide
  Sense strand starting at position 3171 of SEQ ID NO: 1562414
ggucuuugaucaucucuac

SEQ ID NO: 1745096 - RNA, 19 nt, Artificial Sequence
  Description of Artificial Sequence: Synthetic oligonucleotide
  Antisense strand to SEQ ID NO: 1745095
guagagaugaucaaagacc

SEQ ID NO: 1745097 - RNA, 19 nt, Artificial Sequence
  Description of Artificial Sequence: Synthetic oligonucleotide
  Sense strand starting at position 3441 of SEQ ID NO: 1562414
cuguaucuguuggcaauuu

SEQ ID NO: 1745098 - RNA, 19 nt, Artificial Sequence
  Description of Artificial Sequence: Synthetic oligonucleotide
  Antisense strand to SEQ ID NO: 1745097
aaauugccaacagauacag

SEQ ID NO: 1745099 - RNA, 19 nt, Artificial Sequence
  Description of Artificial Sequence: Synthetic oligonucleotide
  Sense strand starting at position 128 of SEQ ID NO: 1562415
auuaaagcucgugacauau

SEQ ID NO: 1745100 - RNA, 19 nt, Artificial Sequence
  Description of Artificial Sequence: Synthetic oligonucleotide
  Antisense strand to SEQ ID NO: 1745099
auaugucacgagcuuuaau

SEQ ID NO: 1745101 - RNA, 19 nt, Artificial Sequence
  Description of Artificial Sequence: Synthetic oligonucleotide
  Sense strand starting at position 188 of SEQ ID NO: 1562415
cauggagaguuguuauuga

SEQ ID NO: 1745102 - RNA, 19 nt, Artificial Sequence
  Description of Artificial Sequence: Synthetic oligonucleotide
  Antisense strand to SEQ ID NO: 1745101
ucaauaacaacucuccaug

SEQ ID NO: 1745103 - RNA, 19 nt, Artificial Sequence
  Description of Artificial Sequence: Synthetic oligonucleotide
  Sense strand starting at position 244 of SEQ ID NO: 1562415
accuuuagccucugaaaga

SEQ ID NO: 1745104 - RNA, 19 nt, Artificial Sequence
  Description of Artificial Sequence: Synthetic oligonucleotide
  Antisense strand to SEQ ID NO: 1745103
ucuuucagaggcuaaaggu

SEQ ID NO: 1745105 - RNA, 19 nt, Artificial Sequence
  Description of Artificial Sequence: Synthetic oligonucleotide
  Sense strand starting at position 364 of SEQ ID NO: 1562415
aguggauuccaaggauacu

SEQ ID NO: 1745106 - RNA, 19 nt, Artificial Sequence
  Description of Artificial Sequence: Synthetic oligonucleotide
  Antisense strand to SEQ ID NO: 1745105
aguauccuuggaauccacu

SEQ ID NO: 1745107 - RNA, 19 nt, Artificial Sequence
  Description of Artificial Sequence: Synthetic oligonucleotide
  Sense strand starting at position 508 of SEQ ID NO: 1562415
aggucauaauaguucuaua

SEQ ID NO: 1745108 - RNA, 19 nt, Artificial Sequence
  Description of Artificial Sequence: Synthetic oligonucleotide
  Antisense strand to SEQ ID NO: 1745107
uauagaacuauuaugaccu

SEQ ID NO: 1745109 - RNA, 19 nt, Artificial Sequence
  Description of Artificial Sequence: Synthetic oligonucleotide
  Sense strand starting at position 599 of SEQ ID NO: 1562415
aguuguaaaccuuaagucu

SEQ ID NO: 1745110 - RNA, 19 nt, Artificial Sequence
  Description of Artificial Sequence: Synthetic oligonucleotide
  Antisense strand to SEQ ID NO: 1745109
agacuuaagguuuacaacu

SEQ ID NO: 1745111 - RNA, 19 nt, Artificial Sequence
  Description of Artificial Sequence: Synthetic oligonucleotide
  Sense strand starting at position 1033 of SEQ ID NO: 1562415
gccugaugacauuaccgau

SEQ ID NO: 1745112 - RNA, 19 nt, Artificial Sequence
  Description of Artificial Sequence: Synthetic oligonucleotide
  Antisense strand to SEQ ID NO: 1745111
aucgguaaugucaucaggc

SEQ ID NO: 1745113 - RNA, 19 nt, Artificial Sequence
  Description of Artificial Sequence: Synthetic oligonucleotide
  Sense strand starting at position 1039 of SEQ ID NO: 1562415
ugacauuaccgauggaaau

SEQ ID NO: 1745114 - RNA, 19 nt, Artificial Sequence
  Description of Artificial Sequence: Synthetic oligonucleotide
  Antisense strand to SEQ ID NO: 1745113
auuuccaucgguaauguca

SEQ ID NO: 1745115 - RNA, 19 nt, Artificial Sequence
  Description of Artificial Sequence: Synthetic oligonucleotide
  Sense strand starting at position 1213 of SEQ ID NO: 1562415
agaugaacuuacgugauaa

SEQ ID NO: 1745116 - RNA, 19 nt, Artificial Sequence
  Description of Artificial Sequence: Synthetic oligonucleotide
  Antisense strand to SEQ ID NO: 1745115
uuaucacguaaguucaucu

SEQ ID NO: 1745117 - RNA, 19 nt, Artificial Sequence
  Description of Artificial Sequence: Synthetic oligonucleotide
  Sense strand starting at position 1225 of SEQ ID NO: 1562415
gugauaacgaaucacuugu

SEQ ID NO: 1745118 - RNA, 19 nt, Artificial Sequence
  Description of Artificial Sequence: Synthetic oligonucleotide
  Antisense strand to SEQ ID NO: 1745117
acaagugauucguuaucac

SEQ ID NO: 1745119 - RNA, 19 nt, Artificial Sequence
  Description of Artificial Sequence: Synthetic oligonucleotide
  Sense strand starting at position 1380 of SEQ ID NO: 1562415
gcuggaaaugccuaugaua

SEQ ID NO: 1745120 - RNA, 19 nt, Artificial Sequence
  Description of Artificial Sequence: Synthetic oligonucleotide
  Antisense strand to SEQ ID NO: 1745119
uaucauaggcauuuccagc

SEQ ID NO: 1745121 - RNA, 19 nt, Artificial Sequence
  Description of Artificial Sequence: Synthetic oligonucleotide
  Sense strand starting at position 1382 of SEQ ID NO: 1562415
uggaaaugccuaugauaac

SEQ ID NO: 1745122 - RNA, 19 nt, Artificial Sequence
  Description of Artificial Sequence: Synthetic oligonucleotide
  Antisense strand to SEQ ID NO: 1745121
guuaucauaggcauuucca

SEQ ID NO: 1745123 - RNA, 19 nt, Artificial Sequence
  Description of Artificial Sequence: Synthetic oligonucleotide
  Sense strand starting at position 1416 of SEQ ID NO: 1562415
cugagacacuuugcuuaaa

SEQ ID NO: 1745124 - RNA, 19 nt, Artificial Sequence
  Description of Artificial Sequence: Synthetic oligonucleotide
  Antisense strand to SEQ ID NO: 1745123
uuuaagcaaagugucucag

SEQ ID NO: 1745125 - RNA, 19 nt, Artificial Sequence
  Description of Artificial Sequence: Synthetic oligonucleotide
  Sense strand starting at position 1453 of SEQ ID NO: 1562415
aguugaucugcagaagguu

SEQ ID NO: 1745126 - RNA, 19 nt, Artificial Sequence
  Description of Artificial Sequence: Synthetic oligonucleotide
  Antisense strand to SEQ ID NO: 1745125
aaccuucugcagaucaacu

SEQ ID NO: 1745127 - RNA, 19 nt, Artificial Sequence
  Description of Artificial Sequence: Synthetic oligonucleotide
  Sense strand starting at position 1462 of SEQ ID NO: 1562415
gcagaagguugauccauag

SEQ ID NO: 1745128 - RNA, 19 nt, Artificial Sequence
  Description of Artificial Sequence: Synthetic oligonucleotide
  Antisense strand to SEQ ID NO: 1745127
cuauggaucaaccuucugc

SEQ ID NO: 1745129 - RNA, 19 nt, Artificial Sequence
  Description of Artificial Sequence: Synthetic oligonucleotide
  Sense strand starting at position 1969 of SEQ ID NO: 1562415
ggacauguugacgggagau

SEQ ID NO: 1745130 - RNA, 19 nt, Artificial Sequence
  Description of Artificial Sequence: Synthetic oligonucleotide
  Antisense strand to SEQ ID NO: 1745129
aucucccgucaacaugucc

SEQ ID NO: 1745131 - RNA, 19 nt, Artificial Sequence
  Description of Artificial Sequence: Synthetic oligonucleotide
  Sense strand starting at position 1998 of SEQ ID NO: 1562415
cugaguuauaguggaaaga

SEQ ID NO: 1745132 - RNA, 19 nt, Artificial Sequence
  Description of Artificial Sequence: Synthetic oligonucleotide
  Antisense strand to SEQ ID NO: 1745131
ucuuuccacuauaacucag

SEQ ID NO: 1745133 - RNA, 19 nt, Artificial Sequence
  Description of Artificial Sequence: Synthetic oligonucleotide
  Sense strand starting at position 2008 of SEQ ID NO: 1562415
guggaaagauucucugagu

SEQ ID NO: 1745134 - RNA, 19 nt, Artificial Sequence
  Description of Artificial Sequence: Synthetic oligonucleotide
  Antisense strand to SEQ ID NO: 1745133
acucagagaaucuuuccac

SEQ ID NO: 1745135 - RNA, 19 nt, Artificial Sequence
  Description of Artificial Sequence: Synthetic oligonucleotide
  Sense strand starting at position 2009 of SEQ ID NO: 1562415
uggaaagauucucugaguu

SEQ ID NO: 1745136 - RNA, 19 nt, Artificial Sequence
  Description of Artificial Sequence: Synthetic oligonucleotide
  Antisense strand to SEQ ID NO: 1745135
aacucagagaaucuuucca

SEQ ID NO: 1745137 - RNA, 19 nt, Artificial Sequence
  Description of Artificial Sequence: Synthetic oligonucleotide
  Sense strand starting at position 2013 of SEQ ID NO: 1562415
aagauucucugaguuugaa

SEQ ID NO: 1745138 - RNA, 19 nt, Artificial Sequence
  Description of Artificial Sequence: Synthetic oligonucleotide
  Antisense strand to SEQ ID NO: 1745137
uucaaacucagagaaucuu

SEQ ID NO: 1745139 - RNA, 19 nt, Artificial Sequence
  Description of Artificial Sequence: Synthetic oligonucleotide
  Sense strand starting at position 2037 of SEQ ID NO: 1562415
uagucuggacuccaaguua

SEQ ID NO: 1745140 - RNA, 19 nt, Artificial Sequence
  Description of Artificial Sequence: Synthetic oligonucleotide
  Antisense strand to SEQ ID NO: 1745139
uaacuuggaguccagacua

SEQ ID NO: 1745141 - RNA, 19 nt, Artificial Sequence
  Description of Artificial Sequence: Synthetic oligonucleotide
  Sense strand starting at position 2290 of SEQ ID NO: 1562415
ugccucuuauuauuugagu

SEQ ID NO: 1745142 - RNA, 19 nt, Artificial Sequence
  Description of Artificial Sequence: Synthetic oligonucleotide
  Antisense strand to SEQ ID NO: 1745141
acucaaauaauaagaggca

SEQ ID NO: 1745143 - RNA, 19 nt, Artificial Sequence
  Description of Artificial Sequence: Synthetic oligonucleotide
  Sense strand starting at position 2291 of SEQ ID NO: 1562415
gccucuuauuauuugagua

SEQ ID NO: 1745144 - RNA, 19 nt, Artificial Sequence
  Description of Artificial Sequence: Synthetic oligonucleotide
  Antisense strand to SEQ ID NO: 1745143
uacucaaauaauaagaggc

SEQ ID NO: 1745145 - RNA, 19 nt, Artificial Sequence
  Description of Artificial Sequence: Synthetic oligonucleotide
  Sense strand starting at position 2365 of SEQ ID NO: 1562415
uuaaguuaucaggagcauc

SEQ ID NO: 1745146 - RNA, 19 nt, Artificial Sequence
  Description of Artificial Sequence: Synthetic oligonucleotide
  Antisense strand to SEQ ID NO: 1745145
gaugcuccugauaacuuaa

SEQ ID NO: 1745147 - RNA, 19 nt, Artificial Sequence
  Description of Artificial Sequence: Synthetic oligonucleotide
  Sense strand starting at position 2577 of SEQ ID NO: 1562415
aggcaucuuccuuaacaag

SEQ ID NO: 1745148 - RNA, 19 nt, Artificial Sequence
  Description of Artificial Sequence: Synthetic oligonucleotide
  Antisense strand to SEQ ID NO: 1745147
cuuguuaaggaagaugccu

SEQ ID NO: 1745149 - RNA, 19 nt, Artificial Sequence
  Description of Artificial Sequence: Synthetic oligonucleotide
  Sense strand starting at position 2682 of SEQ ID NO: 1562415
ugaugaaccuaucuuguag

SEQ ID NO: 1745150 - RNA, 19 nt, Artificial Sequence
  Description of Artificial Sequence: Synthetic oligonucleotide
  Antisense strand to SEQ ID NO: 1745149
cuacaagauagguucauca

SEQ ID NO: 1745151 - RNA, 19 nt, Artificial Sequence
  Description of Artificial Sequence: Synthetic oligonucleotide
  Sense strand starting at position 2714 of SEQ ID NO: 1562415
augguuaugcucuaaauca

SEQ ID NO: 1745152 - RNA, 19 nt, Artificial Sequence
  Description of Artificial Sequence: Synthetic oligonucleotide
  Antisense strand to SEQ ID NO: 1745151
ugauuuagagcauaaccau

SEQ ID NO: 1745153 - RNA, 19 nt, Artificial Sequence
  Description of Artificial Sequence: Synthetic oligonucleotide
  Sense strand starting at position 2871 of SEQ ID NO: 1562415
agaguuauaugggucuuua

SEQ ID NO: 1745154 - RNA, 19 nt, Artificial Sequence
  Description of Artificial Sequence: Synthetic oligonucleotide
  Antisense strand to SEQ ID NO: 1745153
uaaagacccauauaacucu

SEQ ID NO: 1745155 - RNA, 19 nt, Artificial Sequence
  Description of Artificial Sequence: Synthetic oligonucleotide
  Sense strand starting at position 2875 of SEQ ID NO: 1562415
uuauaugggucuuuaaaca

SEQ ID NO: 1745156 - RNA, 19 nt, Artificial Sequence
  Description of Artificial Sequence: Synthetic oligonucleotide
  Antisense strand to SEQ ID NO: 1745155
uguuuaaagacccauauaa

SEQ ID NO: 1745157 - RNA, 19 nt, Artificial Sequence
  Description of Artificial Sequence: Synthetic oligonucleotide
  Sense strand starting at position 2953 of SEQ ID NO: 1562415
auuucucaguaagauagaa

SEQ ID NO: 1745158 - RNA, 19 nt, Artificial Sequence
  Description of Artificial Sequence: Synthetic oligonucleotide
  Antisense strand to SEQ ID NO: 1745157
uucuaucuuacugagaaau

SEQ ID NO: 1745159 - RNA, 19 nt, Artificial Sequence
  Description of Artificial Sequence: Synthetic oligonucleotide
  Sense strand starting at position 3235 of SEQ ID NO: 1562415
gaauauugguaauccaugu

SEQ ID NO: 1745160 - RNA, 19 nt, Artificial Sequence
  Description of Artificial Sequence: Synthetic oligonucleotide
  Antisense strand to SEQ ID NO: 1745159
acauggauuaccaauauuc

SEQ ID NO: 1745161 - RNA, 19 nt, Artificial Sequence
  Description of Artificial Sequence: Synthetic oligonucleotide
  Sense strand starting at position 3243 of SEQ ID NO: 1562415
guaauccauguuuagauua

SEQ ID NO: 1745162 - RNA, 19 nt, Artificial Sequence
  Description of Artificial Sequence: Synthetic oligonucleotide
  Antisense strand to SEQ ID NO: 1745161
uaaucuaaacauggauuac

SEQ ID NO: 1745163 - RNA, 19 nt, Artificial Sequence
  Description of Artificial Sequence: Synthetic oligonucleotide
  Sense strand starting at position 3268 of SEQ ID NO: 1562415
ggaagaggcuucuuaucug

SEQ ID NO: 1745164 - RNA, 19 nt, Artificial Sequence
  Description of Artificial Sequence: Synthetic oligonucleotide
  Antisense strand to SEQ ID NO: 1745163
cagauaagaagccucuucc

SEQ ID NO: 1745165 - RNA, 19 nt, Artificial Sequence
  Description of Artificial Sequence: Synthetic oligonucleotide
  Sense strand starting at position 3749 of SEQ ID NO: 1562415
ucccuaugucugggaauaa

SEQ ID NO: 1745166 - RNA, 19 nt, Artificial Sequence
  Description of Artificial Sequence: Synthetic oligonucleotide
  Antisense strand to SEQ ID NO: 1745165
uuauucccagacauaggga

SEQ ID NO: 1745167 - RNA, 19 nt, Artificial Sequence
  Description of Artificial Sequence: Synthetic oligonucleotide
  Sense strand starting at position 3783 of SEQ ID NO: 1562415
gggaguaagucaguuccaa

SEQ ID NO: 1745168 - RNA, 19 nt, Artificial Sequence
  Description of Artificial Sequence: Synthetic oligonucleotide
  Antisense strand to SEQ ID NO: 1745167
uuggaacugacuuacuccc

SEQ ID NO: 1745169 - RNA, 19 nt, Artificial Sequence
  Description of Artificial Sequence: Synthetic oligonucleotide
  Sense strand starting at position 3820 of SEQ ID NO: 1562415
auuccuaauuggguuaaca

SEQ ID NO: 1745170 - RNA, 19 nt, Artificial Sequence
  Description of Artificial Sequence: Synthetic oligonucleotide
  Antisense strand to SEQ ID NO: 1745169
uguuaacccaauuaggaau

SEQ ID NO: 1745171 - RNA, 19 nt, Artificial Sequence
  Description of Artificial Sequence: Synthetic oligonucleotide
  Sense strand starting at position 3822 of SEQ ID NO: 1562415
uccuaauuggguuaacacu

SEQ ID NO: 1745172 - RNA, 19 nt, Artificial Sequence
  Description of Artificial Sequence: Synthetic oligonucleotide
  Antisense strand to SEQ ID NO: 1745171
aguguuaacccaauuagga

SEQ ID NO: 1745173 - RNA, 19 nt, Artificial Sequence
  Description of Artificial Sequence: Synthetic oligonucleotide
  Sense strand starting at position 3846 of SEQ ID NO: 1562415
uuaggaguuauuugugcac

SEQ ID NO: 1745174 - RNA, 19 nt, Artificial Sequence
  Description of Artificial Sequence: Synthetic oligonucleotide
  Antisense strand to SEQ ID NO: 1745173
gugcacaaauaacuccuaa

SEQ ID NO: 1745175 - RNA, 19 nt, Artificial Sequence
  Description of Artificial Sequence: Synthetic oligonucleotide
  Sense strand starting at position 3849 of SEQ ID NO: 1562415
ggaguuauuugugcacuuu

SEQ ID NO: 1745176 - RNA, 19 nt, Artificial Sequence
  Description of Artificial Sequence: Synthetic oligonucleotide
  Antisense strand to SEQ ID NO: 1745175
aaagugcacaaauaacucc

SEQ ID NO: 1745177 - RNA, 19 nt, Artificial Sequence
  Description of Artificial Sequence: Synthetic oligonucleotide
  Sense strand starting at position 3855 of SEQ ID NO: 1562415
auuugugcacuuuguacaa

SEQ ID NO: 1745178 - RNA, 19 nt, Artificial Sequence
  Description of Artificial Sequence: Synthetic oligonucleotide
  Antisense strand to SEQ ID NO: 1745177
uuguacaaagugcacaaau

SEQ ID NO: 1745179 - RNA, 19 nt, Artificial Sequence
  Description of Artificial Sequence: Synthetic oligonucleotide
  Sense strand starting at position 35 of SEQ ID NO: 1562416
ugaugagaugacuguuaug

SEQ ID NO: 1745180 - RNA, 19 nt, Artificial Sequence
  Description of Artificial Sequence: Synthetic oligonucleotide
  Antisense strand to SEQ ID NO: 1745179
cauaacagucaucucauca

SEQ ID NO: 1745181 - RNA, 19 nt, Artificial Sequence
  Description of Artificial Sequence: Synthetic oligonucleotide
  Sense strand starting at position 41 of SEQ ID NO: 1562416
gaugacuguuauguacuua

SEQ ID NO: 1745182 - RNA, 19 nt, Artificial Sequence
  Description of Artificial Sequence: Synthetic oligonucleotide
  Antisense strand to SEQ ID NO: 1745181
uaaguacauaacagucauc

SEQ ID NO: 1745183 - RNA, 19 nt, Artificial Sequence
  Description of Artificial Sequence: Synthetic oligonucleotide
  Sense strand starting at position 45 of SEQ ID NO: 1562416
acuguuauguacuuauaag

SEQ ID NO: 1745184 - RNA, 19 nt, Artificial Sequence
  Description of Artificial Sequence: Synthetic oligonucleotide
  Antisense strand to SEQ ID NO: 1745183
cuuauaaguacauaacagu

SEQ ID NO: 1745185 - RNA, 19 nt, Artificial Sequence
  Description of Artificial Sequence: Synthetic oligonucleotide
  Sense strand starting at position 74 of SEQ ID NO: 1562416
uugugaagugucuaauaau

SEQ ID NO: 1745186 - RNA, 19 nt, Artificial Sequence
  Description of Artificial Sequence: Synthetic oligonucleotide
  Antisense strand to SEQ ID NO: 1745185
auuauuagacacuucacaa

SEQ ID NO: 1745187 - RNA, 19 nt, Artificial Sequence
  Description of Artificial Sequence: Synthetic oligonucleotide
  Sense strand starting at position 227 of SEQ ID NO: 1562416
uuuauaacacuuggaugua

SEQ ID NO: 1745188 - RNA, 19 nt, Artificial Sequence
  Description of Artificial Sequence: Synthetic oligonucleotide
  Antisense strand to SEQ ID NO: 1745187
uacauccaaguguuauaaa

SEQ ID NO: 1745189 - RNA, 19 nt, Artificial Sequence
  Description of Artificial Sequence: Synthetic oligonucleotide
  Sense strand starting at position 446 of SEQ ID NO: 1562416
uggagaucauuugagcaga

SEQ ID NO: 1745190 - RNA, 19 nt, Artificial Sequence
  Description of Artificial Sequence: Synthetic oligonucleotide
  Antisense strand to SEQ ID NO: 1745189
ucugcucaaaugaucucca

SEQ ID NO: 1745191 - RNA, 19 nt, Artificial Sequence
  Description of Artificial Sequence: Synthetic oligonucleotide
  Sense strand starting at position 511 of SEQ ID NO: 1562416
gugauacuccugcacuaug

SEQ ID NO: 1745192 - RNA, 19 nt, Artificial Sequence
  Description of Artificial Sequence: Synthetic oligonucleotide
  Antisense strand to SEQ ID NO: 1745191
cauagugcaggaguaucac

SEQ ID NO: 1745193 - RNA, 19 nt, Artificial Sequence
  Description of Artificial Sequence: Synthetic oligonucleotide
  Sense strand starting at position 573 of SEQ ID NO: 1562416
auguguuagucuuccauuu

SEQ ID NO: 1745194 - RNA, 19 nt, Artificial Sequence
  Description of Artificial Sequence: Synthetic oligonucleotide
  Antisense strand to SEQ ID NO: 1745193
aaauggaagacuaacacau

SEQ ID NO: 1745195 - RNA, 19 nt, Artificial Sequence
  Description of Artificial Sequence: Synthetic oligonucleotide
  Sense strand starting at position 664 of SEQ ID NO: 1562416
acauucuguccuuagagau

SEQ ID NO: 1745196 - RNA, 19 nt, Artificial Sequence
  Description of Artificial Sequence: Synthetic oligonucleotide
  Antisense strand to SEQ ID NO: 1745195
aucucuaaggacagaaugu

SEQ ID NO: 1745197 - RNA, 19 nt, Artificial Sequence
  Description of Artificial Sequence: Synthetic oligonucleotide
  Sense strand starting at position 674 of SEQ ID NO: 1562416
cuuagagaugcauggcaua

SEQ ID NO: 1745198 - RNA, 19 nt, Artificial Sequence
  Description of Artificial Sequence: Synthetic oligonucleotide
  Antisense strand to SEQ ID NO: 1745197
uaugccaugcaucucuaag

SEQ ID NO: 1745199 - RNA, 19 nt, Artificial Sequence
  Description of Artificial Sequence: Synthetic oligonucleotide
  Sense strand starting at position 707 of SEQ ID NO: 1562416
aaggauagucaaugcucuu

SEQ ID NO: 1745200 - RNA, 19 nt, Artificial Sequence
  Description of Artificial Sequence: Synthetic oligonucleotide
  Antisense strand to SEQ ID NO: 1745199
aagagcauugacuauccuu

SEQ ID NO: 1745201 - RNA, 19 nt, Artificial Sequence
  Description of Artificial Sequence: Synthetic oligonucleotide
  Sense strand starting at position 870 of SEQ ID NO: 1562416
agcaaaggcuaucuuaacu

SEQ ID NO: 1745202 - RNA, 19 nt, Artificial Sequence
  Description of Artificial Sequence: Synthetic oligonucleotide
  Antisense strand to SEQ ID NO: 1745201
aguuaagauagccuuugcu

SEQ ID NO: 1745203 - RNA, 19 nt, Artificial Sequence
  Description of Artificial Sequence: Synthetic oligonucleotide
  Sense strand starting at position 897 of SEQ ID NO: 1562416
gaggauacuuaagagaaag

SEQ ID NO: 1745204 - RNA, 19 nt, Artificial Sequence
  Description of Artificial Sequence: Synthetic oligonucleotide
  Antisense strand to SEQ ID NO: 1745203
cuuucucuuaaguauccuc

SEQ ID NO: 1745205 - RNA, 19 nt, Artificial Sequence
  Description of Artificial Sequence: Synthetic oligonucleotide
  Sense strand starting at position 909 of SEQ ID NO: 1562416
gagaaaggcuauccuugga

SEQ ID NO: 1745206 - RNA, 19 nt, Artificial Sequence
  Description of Artificial Sequence: Synthetic oligonucleotide
  Antisense strand to SEQ ID NO: 1745205
uccaaggauagccuuucuc

SEQ ID NO: 1745207 - RNA, 19 nt, Artificial Sequence
  Description of Artificial Sequence: Synthetic oligonucleotide
  Sense strand starting at position 943 of SEQ ID NO: 1562416
agaaacuccugcuuaaaga

SEQ ID NO: 1745208 - RNA, 19 nt, Artificial Sequence
  Description of Artificial Sequence: Synthetic oligonucleotide
  Antisense strand to SEQ ID NO: 1745207
ucuuuaagcaggaguuucu

SEQ ID NO: 1745209 - RNA, 19 nt, Artificial Sequence
  Description of Artificial Sequence: Synthetic oligonucleotide
  Sense strand starting at position 1025 of SEQ ID NO: 1562416
agcccauuaccagaagcaa

SEQ ID NO: 1745210 - RNA, 19 nt, Artificial Sequence
  Description of Artificial Sequence: Synthetic oligonucleotide
  Antisense strand to SEQ ID NO: 1745209
uugcuucugguaaugggcu

SEQ ID NO: 1745211 - RNA, 19 nt, Artificial Sequence
  Description of Artificial Sequence: Synthetic oligonucleotide
  Sense strand starting at position 1196 of SEQ ID NO: 1562416
ugcaguuuggaucacucau

SEQ ID NO: 1745212 - RNA, 19 nt, Artificial Sequence
  Description of Artificial Sequence: Synthetic oligonucleotide
  Antisense strand to SEQ ID NO: 1745211
augagugauccaaacugca

SEQ ID NO: 1745213 - RNA, 19 nt, Artificial Sequence
  Description of Artificial Sequence: Synthetic oligonucleotide
  Sense strand starting at position 1203 of SEQ ID NO: 1562416
uggaucacucauugaucca

SEQ ID NO: 1745214 - RNA, 19 nt, Artificial Sequence
  Description of Artificial Sequence: Synthetic oligonucleotide
  Antisense strand to SEQ ID NO: 1745213
uggaucaaugagugaucca

SEQ ID NO: 1745215 - RNA, 19 nt, Artificial Sequence
  Description of Artificial Sequence: Synthetic oligonucleotide
  Sense strand starting at position 1276 of SEQ ID NO: 1562416
gauccagauugauccaguu

SEQ ID NO: 1745216 - RNA, 19 nt, Artificial Sequence
  Description of Artificial Sequence: Synthetic oligonucleotide
  Antisense strand to SEQ ID NO: 1745215
aacuggaucaaucuggauc

SEQ ID NO: 1745217 - RNA, 19 nt, Artificial Sequence
  Description of Artificial Sequence: Synthetic oligonucleotide
  Sense strand starting at position 1473 of SEQ ID NO: 1562416
ccacauuagucaguagaaa

SEQ ID NO: 1745218 - RNA, 19 nt, Artificial Sequence
  Description of Artificial Sequence: Synthetic oligonucleotide
  Antisense strand to SEQ ID NO: 1745217
uuucuacugacuaaugugg

SEQ ID NO: 1745219 - RNA, 19 nt, Artificial Sequence
  Description of Artificial Sequence: Synthetic oligonucleotide
  Sense strand starting at position 1714 of SEQ ID NO: 1562416
ugcauagucaggcaagaau

SEQ ID NO: 1745220 - RNA, 19 nt, Artificial Sequence
  Description of Artificial Sequence: Synthetic oligonucleotide
  Antisense strand to SEQ ID NO: 1745219
auucuugccugacuaugca

SEQ ID NO: 1745221 - RNA, 19 nt, Artificial Sequence
  Description of Artificial Sequence: Synthetic oligonucleotide
  Sense strand starting at position 1725 of SEQ ID NO: 1562416
gcaagaauugcagagcaug

SEQ ID NO: 1745222 - RNA, 19 nt, Artificial Sequence
  Description of Artificial Sequence: Synthetic oligonucleotide
  Antisense strand to SEQ ID NO: 1745221
caugcucugcaauucuugc

SEQ ID NO: 1745223 - RNA, 19 nt, Artificial Sequence
  Description of Artificial Sequence: Synthetic oligonucleotide
  Sense strand starting at position 1995 of SEQ ID NO: 1562416
ggacauguugacgggaaga

SEQ ID NO: 1745224 - RNA, 19 nt, Artificial Sequence
  Description of Artificial Sequence: Synthetic oligonucleotide
  Antisense strand to SEQ ID NO: 1745223
ucuucccgucaacaugucc

SEQ ID NO: 1745225 - RNA, 19 nt, Artificial Sequence
  Description of Artificial Sequence: Synthetic oligonucleotide
  Sense strand starting at position 2025 of SEQ ID NO: 1562416
cugaguguaccugggaaga

SEQ ID NO: 1745226 - RNA, 19 nt, Artificial Sequence
  Description of Artificial Sequence: Synthetic oligonucleotide
  Antisense strand to SEQ ID NO: 1745225
ucuucccagguacacucag

SEQ ID NO: 1745227 - RNA, 19 nt, Artificial Sequence
  Description of Artificial Sequence: Synthetic oligonucleotide
  Sense strand starting at position 2134 of SEQ ID NO: 1562416
ugugcucccucauuuacau

SEQ ID NO: 1745228 - RNA, 19 nt, Artificial Sequence
  Description of Artificial Sequence: Synthetic oligonucleotide
  Antisense strand to SEQ ID NO: 1745227
auguaaaugagggagcaca

SEQ ID NO: 1745229 - RNA, 19 nt, Artificial Sequence
  Description of Artificial Sequence: Synthetic oligonucleotide
  Sense strand starting at position 2304 of SEQ ID NO: 1562416
uuauuaugucuaggaaagc

SEQ ID NO: 1745230 - RNA, 19 nt, Artificial Sequence
  Description of Artificial Sequence: Synthetic oligonucleotide
  Antisense strand to SEQ ID NO: 1745229
gcuuuccuagacauaauaa

SEQ ID NO: 1745231 - RNA, 19 nt, Artificial Sequence
  Description of Artificial Sequence: Synthetic oligonucleotide
  Sense strand starting at position 2366 of SEQ ID NO: 1562416
ggcuguuaugggcaauaau

SEQ ID NO: 1745232 - RNA, 19 nt, Artificial Sequence
  Description of Artificial Sequence: Synthetic oligonucleotide
  Antisense strand to SEQ ID NO: 1745231
auuauugcccauaacagcc

SEQ ID NO: 1745233 - RNA, 19 nt, Artificial Sequence
  Description of Artificial Sequence: Synthetic oligonucleotide
  Sense strand starting at position 2606 of SEQ ID NO: 1562416
cauugaugccuaugaccag

SEQ ID NO: 1745234 - RNA, 19 nt, Artificial Sequence
  Description of Artificial Sequence: Synthetic oligonucleotide
  Antisense strand to SEQ ID NO: 1745233
cuggucauaggcaucaaug

SEQ ID NO: 1745235 - RNA, 19 nt, Artificial Sequence
  Description of Artificial Sequence: Synthetic oligonucleotide
  Sense strand starting at position 2635 of SEQ ID NO: 1562416
ggacaauuauuuggagaca

SEQ ID NO: 1745236 - RNA, 19 nt, Artificial Sequence
  Description of Artificial Sequence: Synthetic oligonucleotide
  Antisense strand to SEQ ID NO: 1745235
ugucuccaaauaauugucc

SEQ ID NO: 1745237 - RNA, 19 nt, Artificial Sequence
  Description of Artificial Sequence: Synthetic oligonucleotide
  Sense strand starting at position 2835 of SEQ ID NO: 1562416
uguggcagccuggagaauu

SEQ ID NO: 1745238 - RNA, 19 nt, Artificial Sequence
  Description of Artificial Sequence: Synthetic oligonucleotide
  Antisense strand to SEQ ID NO: 1745237
aauucuccaggcugccaca

SEQ ID NO: 1745239 - RNA, 19 nt, Artificial Sequence
  Description of Artificial Sequence: Synthetic oligonucleotide
  Sense strand starting at position 2846 of SEQ ID NO: 1562416
ggagaauucucaucucgga

SEQ ID NO: 1745240 - RNA, 19 nt, Artificial Sequence
  Description of Artificial Sequence: Synthetic oligonucleotide
  Antisense strand to SEQ ID NO: 1745239
uccgagaugagaauucucc

SEQ ID NO: 1745241 - RNA, 19 nt, Artificial Sequence
  Description of Artificial Sequence: Synthetic oligonucleotide
  Sense strand starting at position 2975 of SEQ ID NO: 1562416
gacugagcacagugggaua

SEQ ID NO: 1745242 - RNA, 19 nt, Artificial Sequence
  Description of Artificial Sequence: Synthetic oligonucleotide
  Antisense strand to SEQ ID NO: 1745241
uaucccacugugcucaguc

SEQ ID NO: 1745243 - RNA, 19 nt, Artificial Sequence
  Description of Artificial Sequence: Synthetic oligonucleotide
  Sense strand starting at position 3021 of SEQ ID NO: 1562416
ccagcuuugacucaggguu

SEQ ID NO: 1745244 - RNA, 19 nt, Artificial Sequence
  Description of Artificial Sequence: Synthetic oligonucleotide
  Antisense strand to SEQ ID NO: 1745243
aacccugagucaaagcugg

SEQ ID NO: 1745245 - RNA, 19 nt, Artificial Sequence
  Description of Artificial Sequence: Synthetic oligonucleotide
  Sense strand starting at position 3041 of SEQ ID NO: 1562416
ccucaacggccuuaaagaa

SEQ ID NO: 1745246 - RNA, 19 nt, Artificial Sequence
  Description of Artificial Sequence: Synthetic oligonucleotide
  Antisense strand to SEQ ID NO: 1745245
uucuuuaaggccguugagg

SEQ ID NO: 1745247 - RNA, 19 nt, Artificial Sequence
  Description of Artificial Sequence: Synthetic oligonucleotide
  Sense strand starting at position 3112 of SEQ ID NO: 1562416
gggccagaccuauguccaa

SEQ ID NO: 1745248 - RNA, 19 nt, Artificial Sequence
  Description of Artificial Sequence: Synthetic oligonucleotide
  Antisense strand to SEQ ID NO: 1745247
uuggacauaggucuggccc

SEQ ID NO: 1745249 - RNA, 19 nt, Artificial Sequence
  Description of Artificial Sequence: Synthetic oligonucleotide
  Sense strand starting at position 3227 of SEQ ID NO: 1562416
aagugauacuguuuggauu

SEQ ID NO: 1745250 - RNA, 19 nt, Artificial Sequence
  Description of Artificial Sequence: Synthetic oligonucleotide
  Antisense strand to SEQ ID NO: 1745249
aauccaaacaguaucacuu

SEQ ID NO: 1745251 - RNA, 19 nt, Artificial Sequence
  Description of Artificial Sequence: Synthetic oligonucleotide
  Sense strand starting at position 3664 of SEQ ID NO: 1562416
gaguaugccaaucagggua

SEQ ID NO: 1745252 - RNA, 19 nt, Artificial Sequence
  Description of Artificial Sequence: Synthetic oligonucleotide
  Antisense strand to SEQ ID NO: 1745251
uacccugauuggcauacuc

SEQ ID NO: 1745253 - RNA, 19 nt, Artificial Sequence
  Description of Artificial Sequence: Synthetic oligonucleotide
  Sense strand starting at position 3765 of SEQ ID NO: 1562416
ucagacugucuccagguaa

SEQ ID NO: 1745254 - RNA, 19 nt, Artificial Sequence
  Description of Artificial Sequence: Synthetic oligonucleotide
  Antisense strand to SEQ ID NO: 1745253
uuaccuggagacagucuga

SEQ ID NO: 1745255 - RNA, 19 nt, Artificial Sequence
  Description of Artificial Sequence: Synthetic oligonucleotide
  Sense strand starting at position 3851 of SEQ ID NO: 1562416
uuauuucacgugugaguug

SEQ ID NO: 1745256 - RNA, 19 nt, Artificial Sequence
  Description of Artificial Sequence: Synthetic oligonucleotide
  Antisense strand to SEQ ID NO: 1745255
caacucacacgugaaauaa

SEQ ID NO: 1745257 - RNA, 19 nt, Artificial Sequence
  Description of Artificial Sequence: Synthetic oligonucleotide
  Sense strand starting at position 3858 of SEQ ID NO: 1562416
acgugugaguugaugucuu

SEQ ID NO: 1745258 - RNA, 19 nt, Artificial Sequence
  Description of Artificial Sequence: Synthetic oligonucleotide
  Antisense strand to SEQ ID NO: 1745257
aagacaucaacucacacgu

SEQ ID NO: 1745259 - RNA, 19 nt, Artificial Sequence
  Description of Artificial Sequence: Synthetic oligonucleotide
  Sense strand starting at position 6 of SEQ ID NO: 1562417
guauuugucuuucucacag

SEQ ID NO: 1745260 - RNA, 19 nt, Artificial Sequence
  Description of Artificial Sequence: Synthetic oligonucleotide
  Antisense strand to SEQ ID NO: 1745259
cugugagaaagacaaauac

SEQ ID NO: 1745261 - RNA, 19 nt, Artificial Sequence
  Description of Artificial Sequence: Synthetic oligonucleotide
  Sense strand starting at position 13 of SEQ ID NO: 1562417
ucuuucucacagggauguu

SEQ ID NO: 1745262 - RNA, 19 nt, Artificial Sequence
  Description of Artificial Sequence: Synthetic oligonucleotide
  Antisense strand to SEQ ID NO: 1745261
aacaucccugugagaaaga

SEQ ID NO: 1745263 - RNA, 19 nt, Artificial Sequence
  Description of Artificial Sequence: Synthetic oligonucleotide
  Sense strand starting at position 22 of SEQ ID NO: 1562417
cagggauguuaaguauuaa

SEQ ID NO: 1745264 - RNA, 19 nt, Artificial Sequence
  Description of Artificial Sequence: Synthetic oligonucleotide
  Antisense strand to SEQ ID NO: 1745263
uuaauacuuaacaucccug

SEQ ID NO: 1745265 - RNA, 19 nt, Artificial Sequence
  Description of Artificial Sequence: Synthetic oligonucleotide
  Sense strand starting at position 82 of SEQ ID NO: 1562417
gguauacacucaccuauga

SEQ ID NO: 1745266 - RNA, 19 nt, Artificial Sequence
  Description of Artificial Sequence: Synthetic oligonucleotide
  Antisense strand to SEQ ID NO: 1745265
ucauaggugaguguauacc

SEQ ID NO: 1745267 - RNA, 19 nt, Artificial Sequence
  Description of Artificial Sequence: Synthetic oligonucleotide
  Sense strand starting at position 143 of SEQ ID NO: 1562417
caccuuuguguggacaaca

SEQ ID NO: 1745268 - RNA, 19 nt, Artificial Sequence
  Description of Artificial Sequence: Synthetic oligonucleotide
  Antisense strand to SEQ ID NO: 1745267
uguuguccacacaaaggug

SEQ ID NO: 1745269 - RNA, 19 nt, Artificial Sequence
  Description of Artificial Sequence: Synthetic oligonucleotide
  Sense strand starting at position 286 of SEQ ID NO: 1562417
acacaucuuggauauuguu

SEQ ID NO: 1745270 - RNA, 19 nt, Artificial Sequence
  Description of Artificial Sequence: Synthetic oligonucleotide
  Antisense strand to SEQ ID NO: 1745269
aacaauauccaagaugugu

SEQ ID NO: 1745271 - RNA, 19 nt, Artificial Sequence
  Description of Artificial Sequence: Synthetic oligonucleotide
  Sense strand starting at position 643 of SEQ ID NO: 1562417
uguugcugucagcuugauu

SEQ ID NO: 1745272 - RNA, 19 nt, Artificial Sequence
  Description of Artificial Sequence: Synthetic oligonucleotide
  Antisense strand to SEQ ID NO: 1745271
aaucaagcugacagcaaca

SEQ ID NO: 1745273 - RNA, 19 nt, Artificial Sequence
  Description of Artificial Sequence: Synthetic oligonucleotide
  Sense strand starting at position 662 of SEQ ID NO: 1562417
aagguugagccuugaagaa

SEQ ID NO: 1745274 - RNA, 19 nt, Artificial Sequence
  Description of Artificial Sequence: Synthetic oligonucleotide
  Antisense strand to SEQ ID NO: 1745273
uucuucaaggcucaaccuu

SEQ ID NO: 1745275 - RNA, 19 nt, Artificial Sequence
  Description of Artificial Sequence: Synthetic oligonucleotide
  Sense strand starting at position 722 of SEQ ID NO: 1562417
cacuuaagaucauugguga

SEQ ID NO: 1745276 - RNA, 19 nt, Artificial Sequence
  Description of Artificial Sequence: Synthetic oligonucleotide
  Antisense strand to SEQ ID NO: 1745275
ucaccaaugaucuuaagug

SEQ ID NO: 1745277 - RNA, 19 nt, Artificial Sequence
  Description of Artificial Sequence: Synthetic oligonucleotide
  Sense strand starting at position 723 of SEQ ID NO: 1562417
acuuaagaucauuggugaa

SEQ ID NO: 1745278 - RNA, 19 nt, Artificial Sequence
  Description of Artificial Sequence: Synthetic oligonucleotide
  Antisense strand to SEQ ID NO: 1745277
uucaccaaugaucuuaagu

SEQ ID NO: 1745279 - RNA, 19 nt, Artificial Sequence
  Description of Artificial Sequence: Synthetic oligonucleotide
  Sense strand starting at position 725 of SEQ ID NO: 1562417
uuaagaucauuggugaaug

SEQ ID NO: 1745280 - RNA, 19 nt, Artificial Sequence
  Description of Artificial Sequence: Synthetic oligonucleotide
  Antisense strand to SEQ ID NO: 1745279
cauucaccaaugaucuuaa

SEQ ID NO: 1745281 - RNA, 19 nt, Artificial Sequence
  Description of Artificial Sequence: Synthetic oligonucleotide
  Sense strand starting at position 737 of SEQ ID NO: 1562417
gugaaugauccugacucuc

SEQ ID NO: 1745282 - RNA, 19 nt, Artificial Sequence
  Description of Artificial Sequence: Synthetic oligonucleotide
  Antisense strand to SEQ ID NO: 1745281
gagagucaggaucauucac

SEQ ID NO: 1745283 - RNA, 19 nt, Artificial Sequence
  Description of Artificial Sequence: Synthetic oligonucleotide
  Sense strand starting at position 879 of SEQ ID NO: 1562417
uuaaguaaccuuuagugca

SEQ ID NO: 1745284 - RNA, 19 nt, Artificial Sequence
  Description of Artificial Sequence: Synthetic oligonucleotide
  Antisense strand to SEQ ID NO: 1745283
ugcacuaaagguuacuuaa

SEQ ID NO: 1745285 - RNA, 19 nt, Artificial Sequence
  Description of Artificial Sequence: Synthetic oligonucleotide
  Sense strand starting at position 942 of SEQ ID NO: 1562417
gcauuucuaguuuaugcau

SEQ ID NO: 1745286 - RNA, 19 nt, Artificial Sequence
  Description of Artificial Sequence: Synthetic oligonucleotide
  Antisense strand to SEQ ID NO: 1745285
augcauaaacuagaaaugc

SEQ ID NO: 1745287 - RNA, 19 nt, Artificial Sequence
  Description of Artificial Sequence: Synthetic oligonucleotide
  Sense strand starting at position 1018 of SEQ ID NO: 1562417
cucacugcuguugagacaa

SEQ ID NO: 1745288 - RNA, 19 nt, Artificial Sequence
  Description of Artificial Sequence: Synthetic oligonucleotide
  Antisense strand to SEQ ID NO: 1745287
uugucucaacagcagugag

SEQ ID NO: 1745289 - RNA, 19 nt, Artificial Sequence
  Description of Artificial Sequence: Synthetic oligonucleotide
  Sense strand starting at position 1028 of SEQ ID NO: 1562417
uugagacaagucugcagau

SEQ ID NO: 1745290 - RNA, 19 nt, Artificial Sequence
  Description of Artificial Sequence: Synthetic oligonucleotide
  Antisense strand to SEQ ID NO: 1745289
aucugcagacuugucucaa

SEQ ID NO: 1745291 - RNA, 19 nt, Artificial Sequence
  Description of Artificial Sequence: Synthetic oligonucleotide
  Sense strand starting at position 1103 of SEQ ID NO: 1562417
agagaaauguucucagauc

SEQ ID NO: 1745292 - RNA, 19 nt, Artificial Sequence
  Description of Artificial Sequence: Synthetic oligonucleotide
  Antisense strand to SEQ ID NO: 1745291
gaucugagaacauuucucu

SEQ ID NO: 1745293 - RNA, 19 nt, Artificial Sequence
  Description of Artificial Sequence: Synthetic oligonucleotide
  Sense strand starting at position 1248 of SEQ ID NO: 1562417
auauuuggguaccagauua

SEQ ID NO: 1745294 - RNA, 19 nt, Artificial Sequence
  Description of Artificial Sequence: Synthetic oligonucleotide
  Antisense strand to SEQ ID NO: 1745293
uaaucugguacccaaauau

SEQ ID NO: 1745295 - RNA, 19 nt, Artificial Sequence
  Description of Artificial Sequence: Synthetic oligonucleotide
  Sense strand starting at position 1321 of SEQ ID NO: 1562417
gauagcauauauucgauca

SEQ ID NO: 1745296 - RNA, 19 nt, Artificial Sequence
  Description of Artificial Sequence: Synthetic oligonucleotide
  Antisense strand to SEQ ID NO: 1745295
ugaucgaauauaugcuauc

SEQ ID NO: 1745297 - RNA, 19 nt, Artificial Sequence
  Description of Artificial Sequence: Synthetic oligonucleotide
  Sense strand starting at position 1326 of SEQ ID NO: 1562417
cauauauucgaucaauggu

SEQ ID NO: 1745298 - RNA, 19 nt, Artificial Sequence
  Description of Artificial Sequence: Synthetic oligonucleotide
  Antisense strand to SEQ ID NO: 1745297
accauugaucgaauauaug

SEQ ID NO: 1745299 - RNA, 19 nt, Artificial Sequence
  Description of Artificial Sequence: Synthetic oligonucleotide
  Sense strand starting at position 1329 of SEQ ID NO: 1562417
auauucgaucaaugguaaa

SEQ ID NO: 1745300 - RNA, 19 nt, Artificial Sequence
  Description of Artificial Sequence: Synthetic oligonucleotide
  Antisense strand to SEQ ID NO: 1745299
uuuaccauugaucgaauau

SEQ ID NO: 1745301 - RNA, 19 nt, Artificial Sequence
  Description of Artificial Sequence: Synthetic oligonucleotide
  Sense strand starting at position 1393 of SEQ ID NO: 1562417
ccagaaguuggucaugcaa

SEQ ID NO: 1745302 - RNA, 19 nt, Artificial Sequence
  Description of Artificial Sequence: Synthetic oligonucleotide
  Antisense strand to SEQ ID NO: 1745301
uugcaugaccaacuucugg

SEQ ID NO: 1745303 - RNA, 19 nt, Artificial Sequence
  Description of Artificial Sequence: Synthetic oligonucleotide
  Sense strand starting at position 2023 of SEQ ID NO: 1562417
agcugaguguaccuaagaa

SEQ ID NO: 1745304 - RNA, 19 nt, Artificial Sequence
  Description of Artificial Sequence: Synthetic oligonucleotide
  Antisense strand to SEQ ID NO: 1745303
uucuuagguacacucagcu

SEQ ID NO: 1745305 - RNA, 19 nt, Artificial Sequence
  Description of Artificial Sequence: Synthetic oligonucleotide
  Sense strand starting at position 2109 of SEQ ID NO: 1562417
ccaacagggucauccuuua

SEQ ID NO: 1745306 - RNA, 19 nt, Artificial Sequence
  Description of Artificial Sequence: Synthetic oligonucleotide
  Antisense strand to SEQ ID NO: 1745305
uaaaggaugacccuguugg

SEQ ID NO: 1745307 - RNA, 19 nt, Artificial Sequence
  Description of Artificial Sequence: Synthetic oligonucleotide
  Sense strand starting at position 2114 of SEQ ID NO: 1562417
agggucauccuuuacauau

SEQ ID NO: 1745308 - RNA, 19 nt, Artificial Sequence
  Description of Artificial Sequence: Synthetic oligonucleotide
  Antisense strand to SEQ ID NO: 1745307
auauguaaaggaugacccu

SEQ ID NO: 1745309 - RNA, 19 nt, Artificial Sequence
  Description of Artificial Sequence: Synthetic oligonucleotide
  Sense strand starting at position 2161 of SEQ ID NO: 1562417
cugcguaaucuugucugua

SEQ ID NO: 1745310 - RNA, 19 nt, Artificial Sequence
  Description of Artificial Sequence: Synthetic oligonucleotide
  Antisense strand to SEQ ID NO: 1745309
uacagacaagauuacgcag

SEQ ID NO: 1745311 - RNA, 19 nt, Artificial Sequence
  Description of Artificial Sequence: Synthetic oligonucleotide
  Sense strand starting at position 2205 of SEQ ID NO: 1562417
auuguauuuaugggugcua

SEQ ID NO: 1745312 - RNA, 19 nt, Artificial Sequence
  Description of Artificial Sequence: Synthetic oligonucleotide
  Antisense strand to SEQ ID NO: 1745311
uagcacccauaaauacaau

SEQ ID NO: 1745313 - RNA, 19 nt, Artificial Sequence
  Description of Artificial Sequence: Synthetic oligonucleotide
  Sense strand starting at position 2206 of SEQ ID NO: 1562417
uuguauuuaugggugcuau

SEQ ID NO: 1745314 - RNA, 19 nt, Artificial Sequence
  Description of Artificial Sequence: Synthetic oligonucleotide
  Antisense strand to SEQ ID NO: 1745313
auagcacccauaaauacaa

SEQ ID NO: 1745315 - RNA, 19 nt, Artificial Sequence
  Description of Artificial Sequence: Synthetic oligonucleotide
  Sense strand starting at position 2207 of SEQ ID NO: 1562417
uguauuuaugggugcuaua

SEQ ID NO: 1745316 - RNA, 19 nt, Artificial Sequence
  Description of Artificial Sequence: Synthetic oligonucleotide
  Antisense strand to SEQ ID NO: 1745315
uauagcacccauaaauaca

SEQ ID NO: 1745317 - RNA, 19 nt, Artificial Sequence
  Description of Artificial Sequence: Synthetic oligonucleotide
  Sense strand starting at position 2247 of SEQ ID NO: 1562417
gccaaugaacuguacuuau

SEQ ID NO: 1745318 - RNA, 19 nt, Artificial Sequence
  Description of Artificial Sequence: Synthetic oligonucleotide
  Antisense strand to SEQ ID NO: 1745317
auaaguacaguucauuggc

SEQ ID NO: 1745319 - RNA, 19 nt, Artificial Sequence
  Description of Artificial Sequence: Synthetic oligonucleotide
  Sense strand starting at position 2267 of SEQ ID NO: 1562417
ucagaaaugcuaugacugu

SEQ ID NO: 1745320 - RNA, 19 nt, Artificial Sequence
  Description of Artificial Sequence: Synthetic oligonucleotide
  Antisense strand to SEQ ID NO: 1745319
acagucauagcauuucuga

SEQ ID NO: 1745321 - RNA, 19 nt, Artificial Sequence
  Description of Artificial Sequence: Synthetic oligonucleotide
  Sense strand starting at position 2296 of SEQ ID NO: 1562417
ugucuagcucaucaugaca

SEQ ID NO: 1745322 - RNA, 19 nt, Artificial Sequence
  Description of Artificial Sequence: Synthetic oligonucleotide
  Antisense strand to SEQ ID NO: 1745321
ugucaugaugagcuagaca

SEQ ID NO: 1745323 - RNA, 19 nt, Artificial Sequence
  Description of Artificial Sequence: Synthetic oligonucleotide
  Sense strand starting at position 2416 of SEQ ID NO: 1562417
augagauaacguuaguuuc

SEQ ID NO: 1745324 - RNA, 19 nt, Artificial Sequence
  Description of Artificial Sequence: Synthetic oligonucleotide
  Antisense strand to SEQ ID NO: 1745323
gaaacuaacguuaucucau

SEQ ID NO: 1745325 - RNA, 19 nt, Artificial Sequence
  Description of Artificial Sequence: Synthetic oligonucleotide
  Sense strand starting at position 2481 of SEQ ID NO: 1562417
ccaucuugucaccauugau

SEQ ID NO: 1745326 - RNA, 19 nt, Artificial Sequence
  Description of Artificial Sequence: Synthetic oligonucleotide
  Antisense strand to SEQ ID NO: 1745325
aucaauggugacaagaugg

SEQ ID NO: 1745327 - RNA, 19 nt, Artificial Sequence
  Description of Artificial Sequence: Synthetic oligonucleotide
  Sense strand starting at position 2585 of SEQ ID NO: 1562417
ucucauauccagugaagaa

SEQ ID NO: 1745328 - RNA, 19 nt, Artificial Sequence
  Description of Artificial Sequence: Synthetic oligonucleotide
  Antisense strand to SEQ ID NO: 1745327
uucuucacuggauaugaga

SEQ ID NO: 1745329 - RNA, 19 nt, Artificial Sequence
  Description of Artificial Sequence: Synthetic oligonucleotide
  Sense strand starting at position 2971 of SEQ ID NO: 1562417
uuagaauggcucuagcuuu

SEQ ID NO: 1745330 - RNA, 19 nt, Artificial Sequence
  Description of Artificial Sequence: Synthetic oligonucleotide
  Antisense strand to SEQ ID NO: 1745329
aaagcuagagccauucuaa

SEQ ID NO: 1745331 - RNA, 19 nt, Artificial Sequence
  Description of Artificial Sequence: Synthetic oligonucleotide
  Sense strand starting at position 3095 of SEQ ID NO: 1562417
cucugcaugguauaugaau

SEQ ID NO: 1745332 - RNA, 19 nt, Artificial Sequence
  Description of Artificial Sequence: Synthetic oligonucleotide
  Antisense strand to SEQ ID NO: 1745331
auucauauaccaugcagag

SEQ ID NO: 1745333 - RNA, 19 nt, Artificial Sequence
  Description of Artificial Sequence: Synthetic oligonucleotide
  Sense strand starting at position 3101 of SEQ ID NO: 1562417
augguauaugaauguuucu

SEQ ID NO: 1745334 - RNA, 19 nt, Artificial Sequence
  Description of Artificial Sequence: Synthetic oligonucleotide
  Antisense strand to SEQ ID NO: 1745333
agaaacauucauauaccau

SEQ ID NO: 1745335 - RNA, 19 nt, Artificial Sequence
  Description of Artificial Sequence: Synthetic oligonucleotide
  Sense strand starting at position 3246 of SEQ ID NO: 1562417
guuuguuugccucugcuga

SEQ ID NO: 1745336 - RNA, 19 nt, Artificial Sequence
  Description of Artificial Sequence: Synthetic oligonucleotide
  Antisense strand to SEQ ID NO: 1745335
ucagcagaggcaaacaaac

SEQ ID NO: 1745337 - RNA, 19 nt, Artificial Sequence
  Description of Artificial Sequence: Synthetic oligonucleotide
  Sense strand starting at position 3405 of SEQ ID NO: 1562417
acugucaugguugaugaca

SEQ ID NO: 1745338 - RNA, 19 nt, Artificial Sequence
  Description of Artificial Sequence: Synthetic oligonucleotide
  Antisense strand to SEQ ID NO: 1745337
ugucaucaaccaugacagu

SEQ ID NO: 1745339 - RNA, 19 nt, Artificial Sequence
  Description of Artificial Sequence: Synthetic oligonucleotide
  Sense strand starting at position 249 of SEQ ID NO: 1562418
agacauacuccacaguagu

SEQ ID NO: 1745340 - RNA, 19 nt, Artificial Sequence
  Description of Artificial Sequence: Synthetic oligonucleotide
  Antisense strand to SEQ ID NO: 1745339
acuacuguggaguaugucu

SEQ ID NO: 1745341 - RNA, 19 nt, Artificial Sequence
  Description of Artificial Sequence: Synthetic oligonucleotide
  Sense strand starting at position 580 of SEQ ID NO: 1562418
gagaauuugugucuuuguu

SEQ ID NO: 1745342 - RNA, 19 nt, Artificial Sequence
  Description of Artificial Sequence: Synthetic oligonucleotide
  Antisense strand to SEQ ID NO: 1745341
aacaaagacacaaauucuc

SEQ ID NO: 1745343 - RNA, 19 nt, Artificial Sequence
  Description of Artificial Sequence: Synthetic oligonucleotide
  Sense strand starting at position 1252 of SEQ ID NO: 1562418
ugaaauauauuugagugga

SEQ ID NO: 1745344 - RNA, 19 nt, Artificial Sequence
  Description of Artificial Sequence: Synthetic oligonucleotide
  Antisense strand to SEQ ID NO: 1745343
uccacucaaauauauuuca

SEQ ID NO: 1745345 - RNA, 19 nt, Artificial Sequence
  Description of Artificial Sequence: Synthetic oligonucleotide
  Sense strand starting at position 1302 of SEQ ID NO: 1562418
uuagaaagaugauaacaga

SEQ ID NO: 1745346 - RNA, 19 nt, Artificial Sequence
  Description of Artificial Sequence: Synthetic oligonucleotide
  Antisense strand to SEQ ID NO: 1745345
ucuguuaucaucuuucuaa

SEQ ID NO: 1745347 - RNA, 19 nt, Artificial Sequence
  Description of Artificial Sequence: Synthetic oligonucleotide
  Sense strand starting at position 1326 of SEQ ID NO: 1562418
uccugagcauuggcacaaa

SEQ ID NO: 1745348 - RNA, 19 nt, Artificial Sequence
  Description of Artificial Sequence: Synthetic oligonucleotide
  Antisense strand to SEQ ID NO: 1745347
uuugugccaaugcucagga

SEQ ID NO: 1745349 - RNA, 19 nt, Artificial Sequence
  Description of Artificial Sequence: Synthetic oligonucleotide
  Sense strand starting at position 1383 of SEQ ID NO: 1562418
aggguccuaggucaagauu

SEQ ID NO: 1745350 - RNA, 19 nt, Artificial Sequence
  Description of Artificial Sequence: Synthetic oligonucleotide
  Antisense strand to SEQ ID NO: 1745349
aaucuugaccuaggacccu

SEQ ID NO: 1745351 - RNA, 19 nt, Artificial Sequence
  Description of Artificial Sequence: Synthetic oligonucleotide
  Sense strand starting at position 1386 of SEQ ID NO: 1562418
guccuaggucaagauuaau

SEQ ID NO: 1745352 - RNA, 19 nt, Artificial Sequence
  Description of Artificial Sequence: Synthetic oligonucleotide
  Antisense strand to SEQ ID NO: 1745351
auuaaucuugaccuaggac

SEQ ID NO: 1745353 - RNA, 19 nt, Artificial Sequence
  Description of Artificial Sequence: Synthetic oligonucleotide
  Sense strand starting at position 1396 of SEQ ID NO: 1562418
aagauuaauuuguccgugu

SEQ ID NO: 1745354 - RNA, 19 nt, Artificial Sequence
  Description of Artificial Sequence: Synthetic oligonucleotide
  Antisense strand to SEQ ID NO: 1745353
acacggacaaauuaaucuu

SEQ ID NO: 1745355 - RNA, 19 nt, Artificial Sequence
  Description of Artificial Sequence: Synthetic oligonucleotide
  Sense strand starting at position 1397 of SEQ ID NO: 1562418
agauuaauuuguccguguu

SEQ ID NO: 1745356 - RNA, 19 nt, Artificial Sequence
  Description of Artificial Sequence: Synthetic oligonucleotide
  Antisense strand to SEQ ID NO: 1745355
aacacggacaaauuaaucu

SEQ ID NO: 1745357 - RNA, 19 nt, Artificial Sequence
  Description of Artificial Sequence: Synthetic oligonucleotide
  Sense strand starting at position 1398 of SEQ ID NO: 1562418
gauuaauuuguccguguuc

SEQ ID NO: 1745358 - RNA, 19 nt, Artificial Sequence
  Description of Artificial Sequence: Synthetic oligonucleotide
  Antisense strand to SEQ ID NO: 1745357
gaacacggacaaauuaauc

SEQ ID NO: 1745359 - RNA, 19 nt, Artificial Sequence
  Description of Artificial Sequence: Synthetic oligonucleotide
  Sense strand starting at position 1457 of SEQ ID NO: 1562418
ugauguagauggucaacaa

SEQ ID NO: 1745360 - RNA, 19 nt, Artificial Sequence
  Description of Artificial Sequence: Synthetic oligonucleotide
  Antisense strand to SEQ ID NO: 1745359
uuguugaccaucuacauca

SEQ ID NO: 1745361 - RNA, 19 nt, Artificial Sequence
  Description of Artificial Sequence: Synthetic oligonucleotide
  Sense strand starting at position 1500 of SEQ ID NO: 1562418
guugcaguuccauagagua

SEQ ID NO: 1745362 - RNA, 19 nt, Artificial Sequence
  Description of Artificial Sequence: Synthetic oligonucleotide
  Antisense strand to SEQ ID NO: 1745361
uacucuauggaacugcaac

SEQ ID NO: 1745363 - RNA, 19 nt, Artificial Sequence
  Description of Artificial Sequence: Synthetic oligonucleotide
  Sense strand starting at position 1987 of SEQ ID NO: 1562418
gcaguuguaagacauguua

SEQ ID NO: 1745364 - RNA, 19 nt, Artificial Sequence
  Description of Artificial Sequence: Synthetic oligonucleotide
  Antisense strand to SEQ ID NO: 1745363
uaacaugucuuacaacugc

SEQ ID NO: 1745365 - RNA, 19 nt, Artificial Sequence
  Description of Artificial Sequence: Synthetic oligonucleotide
  Sense strand starting at position 1998 of SEQ ID NO: 1562418
acauguuaacaggaguucu

SEQ ID NO: 1745366 - RNA, 19 nt, Artificial Sequence
  Description of Artificial Sequence: Synthetic oligonucleotide
  Antisense strand to SEQ ID NO: 1745365
agaacuccuguuaacaugu

SEQ ID NO: 1745367 - RNA, 19 nt, Artificial Sequence
  Description of Artificial Sequence: Synthetic oligonucleotide
  Sense strand starting at position 2103 of SEQ ID NO: 1562418
gucacaagugcccauucua

SEQ ID NO: 1745368 - RNA, 19 nt, Artificial Sequence
  Description of Artificial Sequence: Synthetic oligonucleotide
  Antisense strand to SEQ ID NO: 1745367
uagaaugggcacuugugac

SEQ ID NO: 1745369 - RNA, 19 nt, Artificial Sequence
  Description of Artificial Sequence: Synthetic oligonucleotide
  Sense strand starting at position 2132 of SEQ ID NO: 1562418
uuaauuaggcugcagucaa

SEQ ID NO: 1745370 - RNA, 19 nt, Artificial Sequence
  Description of Artificial Sequence: Synthetic oligonucleotide
  Antisense strand to SEQ ID NO: 1745369
uugacugcagccuaauuaa

SEQ ID NO: 1745371 - RNA, 19 nt, Artificial Sequence
  Description of Artificial Sequence: Synthetic oligonucleotide
  Sense strand starting at position 2190 of SEQ ID NO: 1562418
cguagacuucuacaugaaa

SEQ ID NO: 1745372 - RNA, 19 nt, Artificial Sequence
  Description of Artificial Sequence: Synthetic oligonucleotide
  Antisense strand to SEQ ID NO: 1745371
uuucauguagaagucuacg

SEQ ID NO: 1745373 - RNA, 19 nt, Artificial Sequence
  Description of Artificial Sequence: Synthetic oligonucleotide
  Sense strand starting at position 2266 of SEQ ID NO: 1562418
caucuugcuuagguagaau

SEQ ID NO: 1745374 - RNA, 19 nt, Artificial Sequence
  Description of Artificial Sequence: Synthetic oligonucleotide
  Antisense strand to SEQ ID NO: 1745373
auucuaccuaagcaagaug

SEQ ID NO: 1745375 - RNA, 19 nt, Artificial Sequence
  Description of Artificial Sequence: Synthetic oligonucleotide
  Sense strand starting at position 2269 of SEQ ID NO: 1562418
cuugcuuagguagaaugaa

SEQ ID NO: 1745376 - RNA, 19 nt, Artificial Sequence
  Description of Artificial Sequence: Synthetic oligonucleotide
  Antisense strand to SEQ ID NO: 1745375
uucauucuaccuaagcaag

SEQ ID NO: 1745377 - RNA, 19 nt, Artificial Sequence
  Description of Artificial Sequence: Synthetic oligonucleotide
  Sense strand starting at position 2669 of SEQ ID NO: 1562418
ccuguccuucuagaaauug

SEQ ID NO: 1745378 - RNA, 19 nt, Artificial Sequence
  Description of Artificial Sequence: Synthetic oligonucleotide
  Antisense strand to SEQ ID NO: 1745377
caauuucuagaaggacagg

SEQ ID NO: 1745379 - RNA, 19 nt, Artificial Sequence
  Description of Artificial Sequence: Synthetic oligonucleotide
  Sense strand starting at position 2695 of SEQ ID NO: 1562418
cggcuaagacacugagagu

SEQ ID NO: 1745380 - RNA, 19 nt, Artificial Sequence
  Description of Artificial Sequence: Synthetic oligonucleotide
  Antisense strand to SEQ ID NO: 1745379
acucucagugucuuagccg

SEQ ID NO: 1745381 - RNA, 19 nt, Artificial Sequence
  Description of Artificial Sequence: Synthetic oligonucleotide
  Sense strand starting at position 2870 of SEQ ID NO: 1562418
auccuuauuugguagacau

SEQ ID NO: 1745382 - RNA, 19 nt, Artificial Sequence
  Description of Artificial Sequence: Synthetic oligonucleotide
  Antisense strand to SEQ ID NO: 1745381
augucuaccaaauaaggau

SEQ ID NO: 1745383 - RNA, 19 nt, Artificial Sequence
  Description of Artificial Sequence: Synthetic oligonucleotide
  Sense strand starting at position 2890 of SEQ ID NO: 1562418
cuaaaugagugccuaacau

SEQ ID NO: 1745384 - RNA, 19 nt, Artificial Sequence
  Description of Artificial Sequence: Synthetic oligonucleotide
  Antisense strand to SEQ ID NO: 1745383
auguuaggcacucauuuag

SEQ ID NO: 1745385 - RNA, 19 nt, Artificial Sequence
  Description of Artificial Sequence: Synthetic oligonucleotide
  Sense strand starting at position 2950 of SEQ ID NO: 1562418
ucuugugcacaugaagagu

SEQ ID NO: 1745386 - RNA, 19 nt, Artificial Sequence
  Description of Artificial Sequence: Synthetic oligonucleotide
  Antisense strand to SEQ ID NO: 1745385
acucuucaugugcacaaga

SEQ ID NO: 1745387 - RNA, 19 nt, Artificial Sequence
  Description of Artificial Sequence: Synthetic oligonucleotide
  Sense strand starting at position 2992 of SEQ ID NO: 1562418
gaacaagugcuuugaaguu

SEQ ID NO: 1745388 - RNA, 19 nt, Artificial Sequence
  Description of Artificial Sequence: Synthetic oligonucleotide
  Antisense strand to SEQ ID NO: 1745387
aacuucaaagcacuuguuc

SEQ ID NO: 1745389 - RNA, 19 nt, Artificial Sequence
  Description of Artificial Sequence: Synthetic oligonucleotide
  Sense strand starting at position 3127 of SEQ ID NO: 1562418
uuuggucauguugauguua

SEQ ID NO: 1745390 - RNA, 19 nt, Artificial Sequence
  Description of Artificial Sequence: Synthetic oligonucleotide
  Antisense strand to SEQ ID NO: 1745389
uaacaucaacaugaccaaa

SEQ ID NO: 1745391 - RNA, 19 nt, Artificial Sequence
  Description of Artificial Sequence: Synthetic oligonucleotide
  Sense strand starting at position 3261 of SEQ ID NO: 1562418
ggaaaugucuaucccaugu

SEQ ID NO: 1745392 - RNA, 19 nt, Artificial Sequence
  Description of Artificial Sequence: Synthetic oligonucleotide
  Antisense strand to SEQ ID NO: 1745391
acaugggauagacauuucc

SEQ ID NO: 1745393 - RNA, 19 nt, Artificial Sequence
  Description of Artificial Sequence: Synthetic oligonucleotide
  Sense strand starting at position 3365 of SEQ ID NO: 1562418
ugaugauaauguguaauug

SEQ ID NO: 1745394 - RNA, 19 nt, Artificial Sequence
  Description of Artificial Sequence: Synthetic oligonucleotide
  Antisense strand to SEQ ID NO: 1745393
caauuacacauuaucauca

SEQ ID NO: 1745395 - RNA, 19 nt, Artificial Sequence
  Description of Artificial Sequence: Synthetic oligonucleotide
  Sense strand starting at position 3369 of SEQ ID NO: 1562418
gauaauguguaauugagag

SEQ ID NO: 1745396 - RNA, 19 nt, Artificial Sequence
  Description of Artificial Sequence: Synthetic oligonucleotide
  Antisense strand to SEQ ID NO: 1745395
cucucaauuacacauuauc

SEQ ID NO: 1745397 - RNA, 19 nt, Artificial Sequence
  Description of Artificial Sequence: Synthetic oligonucleotide
  Sense strand starting at position 3408 of SEQ ID NO: 1562418
gauguaucagcugacauau

SEQ ID NO: 1745398 - RNA, 19 nt, Artificial Sequence
  Description of Artificial Sequence: Synthetic oligonucleotide
  Antisense strand to SEQ ID NO: 1745397
auaugucagcugauacauc

SEQ ID NO: 1745399 - RNA, 19 nt, Artificial Sequence
  Description of Artificial Sequence: Synthetic oligonucleotide
  Sense strand starting at position 3425 of SEQ ID NO: 1562418
auauauucugccuagagua

SEQ ID NO: 1745400 - RNA, 19 nt, Artificial Sequence
  Description of Artificial Sequence: Synthetic oligonucleotide
  Antisense strand to SEQ ID NO: 1745399
uacucuaggcagaauauau

SEQ ID NO: 1745401 - RNA, 19 nt, Artificial Sequence
  Description of Artificial Sequence: Synthetic oligonucleotide
  Sense strand starting at position 3427 of SEQ ID NO: 1562418
auauucugccuagaguacu

SEQ ID NO: 1745402 - RNA, 19 nt, Artificial Sequence
  Description of Artificial Sequence: Synthetic oligonucleotide
  Antisense strand to SEQ ID NO: 1745401
aguacucuaggcagaauau

SEQ ID NO: 1745403 - RNA, 19 nt, Artificial Sequence
  Description of Artificial Sequence: Synthetic oligonucleotide
  Sense strand starting at position 3463 of SEQ ID NO: 1562418
ucuggauucgcucagaaag

SEQ ID NO: 1745404 - RNA, 19 nt, Artificial Sequence
  Description of Artificial Sequence: Synthetic oligonucleotide
  Antisense strand to SEQ ID NO: 1745403
cuuucugagcgaauccaga

SEQ ID NO: 1745405 - RNA, 19 nt, Artificial Sequence
  Description of Artificial Sequence: Synthetic oligonucleotide
  Sense strand starting at position 3529 of SEQ ID NO: 1562418
ugccuuaaccugugggaau

SEQ ID NO: 1745406 - RNA, 19 nt, Artificial Sequence
  Description of Artificial Sequence: Synthetic oligonucleotide
  Antisense strand to SEQ ID NO: 1745405
auucccacagguuaaggca

SEQ ID NO: 1745407 - RNA, 19 nt, Artificial Sequence
  Description of Artificial Sequence: Synthetic oligonucleotide
  Sense strand starting at position 3584 of SEQ ID NO: 1562418
uguauucuacaauggaagu

SEQ ID NO: 1745408 - RNA, 19 nt, Artificial Sequence
  Description of Artificial Sequence: Synthetic oligonucleotide
  Antisense strand to SEQ ID NO: 1745407
acuuccauuguagaauaca

SEQ ID NO: 1745409 - RNA, 19 nt, Artificial Sequence
  Description of Artificial Sequence: Synthetic oligonucleotide
  Sense strand starting at position 3731 of SEQ ID NO: 1562418
aucuaauuaggauguugua

SEQ ID NO: 1745410 - RNA, 19 nt, Artificial Sequence
  Description of Artificial Sequence: Synthetic oligonucleotide
  Antisense strand to SEQ ID NO: 1745409
uacaacauccuaauuagau

SEQ ID NO: 1745411 - RNA, 19 nt, Artificial Sequence
  Description of Artificial Sequence: Synthetic oligonucleotide
  Sense strand starting at position 3740 of SEQ ID NO: 1562418
ggauguuguaaguggaauu

SEQ ID NO: 1745412 - RNA, 19 nt, Artificial Sequence
  Description of Artificial Sequence: Synthetic oligonucleotide
  Antisense strand to SEQ ID NO: 1745411
aauuccacuuacaacaucc

SEQ ID NO: 1745413 - RNA, 19 nt, Artificial Sequence
  Description of Artificial Sequence: Synthetic oligonucleotide
  Sense strand starting at position 3776 of SEQ ID NO: 1562418
uggagauaauugcucaacu

SEQ ID NO: 1745414 - RNA, 19 nt, Artificial Sequence
  Description of Artificial Sequence: Synthetic oligonucleotide
  Antisense strand to SEQ ID NO: 1745413
aguugagcaauuaucucca

SEQ ID NO: 1745415 - RNA, 19 nt, Artificial Sequence
  Description of Artificial Sequence: Synthetic oligonucleotide
  Sense strand starting at position 3777 of SEQ ID NO: 1562418
ggagauaauugcucaacuu

SEQ ID NO: 1745416 - RNA, 19 nt, Artificial Sequence
  Description of Artificial Sequence: Synthetic oligonucleotide
  Antisense strand to SEQ ID NO: 1745415
aaguugagcaauuaucucc

SEQ ID NO: 1745417 - RNA, 19 nt, Artificial Sequence
  Description of Artificial Sequence: Synthetic oligonucleotide
  Sense strand starting at position 3969 of SEQ ID NO: 1562418
cuuccuguuguguuuguca

SEQ ID NO: 1745418 - RNA, 19 nt, Artificial Sequence
  Description of Artificial Sequence: Synthetic oligonucleotide
  Antisense strand to SEQ ID NO: 1745417
ugacaaacacaacaggaag

SEQ ID NO: 1745419 - RNA, 19 nt, Artificial Sequence
  Description of Artificial Sequence: Synthetic oligonucleotide
  Sense strand starting at position 25 of SEQ ID NO: 1562419
gaacuugacugagaaauga

SEQ ID NO: 1745420 - RNA, 19 nt, Artificial Sequence
  Description of Artificial Sequence: Synthetic oligonucleotide
  Antisense strand to SEQ ID NO: 1745419
ucauuucucagucaaguuc

SEQ ID NO: 1745421 - RNA, 19 nt, Artificial Sequence
  Description of Artificial Sequence: Synthetic oligonucleotide
  Sense strand starting at position 59 of SEQ ID NO: 1562419
cccagaagguuucuuauca

SEQ ID NO: 1745422 - RNA, 19 nt, Artificial Sequence
  Description of Artificial Sequence: Synthetic oligonucleotide
  Antisense strand to SEQ ID NO: 1745421
ugauaagaaaccuucuggg

SEQ ID NO: 1745423 - RNA, 19 nt, Artificial Sequence
  Description of Artificial Sequence: Synthetic oligonucleotide
  Sense strand starting at position 60 of SEQ ID NO: 1562419
ccagaagguuucuuaucag

SEQ ID NO: 1745424 - RNA, 19 nt, Artificial Sequence
  Description of Artificial Sequence: Synthetic oligonucleotide
  Antisense strand to SEQ ID NO: 1745423
cugauaagaaaccuucugg

SEQ ID NO: 1745425 - RNA, 19 nt, Artificial Sequence
  Description of Artificial Sequence: Synthetic oligonucleotide
  Sense strand starting at position 63 of SEQ ID NO: 1562419
gaagguuucuuaucaguaa

SEQ ID NO: 1745426 - RNA, 19 nt, Artificial Sequence
  Description of Artificial Sequence: Synthetic oligonucleotide
  Antisense strand to SEQ ID NO: 1745425
uuacugauaagaaaccuuc

SEQ ID NO: 1745427 - RNA, 19 nt, Artificial Sequence
  Description of Artificial Sequence: Synthetic oligonucleotide
  Sense strand starting at position 135 of SEQ ID NO: 1562419
agccauauagacuguuaag

SEQ ID NO: 1745428 - RNA, 19 nt, Artificial Sequence
  Description of Artificial Sequence: Synthetic oligonucleotide
  Antisense strand to SEQ ID NO: 1745427
cuuaacagucuauauggcu

SEQ ID NO: 1745429 - RNA, 19 nt, Artificial Sequence
  Description of Artificial Sequence: Synthetic oligonucleotide
  Sense strand starting at position 666 of SEQ ID NO: 1562419
aagaaucucccaggauguu

SEQ ID NO: 1745430 - RNA, 19 nt, Artificial Sequence
  Description of Artificial Sequence: Synthetic oligonucleotide
  Antisense strand to SEQ ID NO: 1745429
aacauccugggagauucuu

SEQ ID NO: 1745431 - RNA, 19 nt, Artificial Sequence
  Description of Artificial Sequence: Synthetic oligonucleotide
  Sense strand starting at position 890 of SEQ ID NO: 1562419
gccgcauuucagugggagu

SEQ ID NO: 1745432 - RNA, 19 nt, Artificial Sequence
  Description of Artificial Sequence: Synthetic oligonucleotide
  Antisense strand to SEQ ID NO: 1745431
acucccacugaaaugcggc

SEQ ID NO: 1745433 - RNA, 19 nt, Artificial Sequence
  Description of Artificial Sequence: Synthetic oligonucleotide
  Sense strand starting at position 968 of SEQ ID NO: 1562419
cugaguaggaaaugaguga

SEQ ID NO: 1745434 - RNA, 19 nt, Artificial Sequence
  Description of Artificial Sequence: Synthetic oligonucleotide
  Antisense strand to SEQ ID NO: 1745433
ucacucauuuccuacucag

SEQ ID NO: 1745435 - RNA, 19 nt, Artificial Sequence
  Description of Artificial Sequence: Synthetic oligonucleotide
  Sense strand starting at position 1117 of SEQ ID NO: 1562419
augacacuauccuuaguga

SEQ ID NO: 1745436 - RNA, 19 nt, Artificial Sequence
  Description of Artificial Sequence: Synthetic oligonucleotide
  Antisense strand to SEQ ID NO: 1745435
ucacuaaggauagugucau

SEQ ID NO: 1745437 - RNA, 19 nt, Artificial Sequence
  Description of Artificial Sequence: Synthetic oligonucleotide
  Sense strand starting at position 1118 of SEQ ID NO: 1562419
ugacacuauccuuagugau

SEQ ID NO: 1745438 - RNA, 19 nt, Artificial Sequence
  Description of Artificial Sequence: Synthetic oligonucleotide
  Antisense strand to SEQ ID NO: 1745437
aucacuaaggauaguguca

SEQ ID NO: 1745439 - RNA, 19 nt, Artificial Sequence
  Description of Artificial Sequence: Synthetic oligonucleotide
  Sense strand starting at position 1120 of SEQ ID NO: 1562419
acacuauccuuagugauuc

SEQ ID NO: 1745440 - RNA, 19 nt, Artificial Sequence
  Description of Artificial Sequence: Synthetic oligonucleotide
  Antisense strand to SEQ ID NO: 1745439
gaaucacuaaggauagugu

SEQ ID NO: 1745441 - RNA, 19 nt, Artificial Sequence
  Description of Artificial Sequence: Synthetic oligonucleotide
  Sense strand starting at position 1237 of SEQ ID NO: 1562419
ucaagcuuccguuaacaca

SEQ ID NO: 1745442 - RNA, 19 nt, Artificial Sequence
  Description of Artificial Sequence: Synthetic oligonucleotide
  Antisense strand to SEQ ID NO: 1745441
uguguuaacggaagcuuga

SEQ ID NO: 1745443 - RNA, 19 nt, Artificial Sequence
  Description of Artificial Sequence: Synthetic oligonucleotide
  Sense strand starting at position 1245 of SEQ ID NO: 1562419
ccguuaacacaguaaacua

SEQ ID NO: 1745444 - RNA, 19 nt, Artificial Sequence
  Description of Artificial Sequence: Synthetic oligonucleotide
  Antisense strand to SEQ ID NO: 1745443
uaguuuacuguguuaacgg

SEQ ID NO: 1745445 - RNA, 19 nt, Artificial Sequence
  Description of Artificial Sequence: Synthetic oligonucleotide
  Sense strand starting at position 1459 of SEQ ID NO: 1562419
caagguaauggugguaaga

SEQ ID NO: 1745446 - RNA, 19 nt, Artificial Sequence
  Description of Artificial Sequence: Synthetic oligonucleotide
  Antisense strand to SEQ ID NO: 1745445
ucuuaccaccauuaccuug

SEQ ID NO: 1745447 - RNA, 19 nt, Artificial Sequence
  Description of Artificial Sequence: Synthetic oligonucleotide
  Sense strand starting at position 1741 of SEQ ID NO: 1562419
gagaauccguauccuccau

SEQ ID NO: 1745448 - RNA, 19 nt, Artificial Sequence
  Description of Artificial Sequence: Synthetic oligonucleotide
  Antisense strand to SEQ ID NO: 1745447
auggaggauacggauucuc

SEQ ID NO: 1745449 - RNA, 19 nt, Artificial Sequence
  Description of Artificial Sequence: Synthetic oligonucleotide
  Sense strand starting at position 2036 of SEQ ID NO: 1562419
caagauccugagugugaau

SEQ ID NO: 1745450 - RNA, 19 nt, Artificial Sequence
  Description of Artificial Sequence: Synthetic oligonucleotide
  Antisense strand to SEQ ID NO: 1745449
auucacacucaggaucuug

SEQ ID NO: 1745451 - RNA, 19 nt, Artificial Sequence
  Description of Artificial Sequence: Synthetic oligonucleotide
  Sense strand starting at position 2073 of SEQ ID NO: 1562419
uuuauauacccuggucaga

SEQ ID NO: 1745452 - RNA, 19 nt, Artificial Sequence
  Description of Artificial Sequence: Synthetic oligonucleotide
  Antisense strand to SEQ ID NO: 1745451
ucugaccaggguauauaaa

SEQ ID NO: 1745453 - RNA, 19 nt, Artificial Sequence
  Description of Artificial Sequence: Synthetic oligonucleotide
  Sense strand starting at position 2120 of SEQ ID NO: 1562419
ugugucauuccaugaauua

SEQ ID NO: 1745454 - RNA, 19 nt, Artificial Sequence
  Description of Artificial Sequence: Synthetic oligonucleotide
  Antisense strand to SEQ ID NO: 1745453
uaauucauggaaugacaca

SEQ ID NO: 1745455 - RNA, 19 nt, Artificial Sequence
  Description of Artificial Sequence: Synthetic oligonucleotide
  Sense strand starting at position 2121 of SEQ ID NO: 1562419
gugucauuccaugaauuau

SEQ ID NO: 1745456 - RNA, 19 nt, Artificial Sequence
  Description of Artificial Sequence: Synthetic oligonucleotide
  Antisense strand to SEQ ID NO: 1745455
auaauucauggaaugacac

SEQ ID NO: 1745457 - RNA, 19 nt, Artificial Sequence
  Description of Artificial Sequence: Synthetic oligonucleotide
  Sense strand starting at position 2133 of SEQ ID NO: 1562419
gaauuauacuugccugagg

SEQ ID NO: 1745458 - RNA, 19 nt, Artificial Sequence
  Description of Artificial Sequence: Synthetic oligonucleotide
  Antisense strand to SEQ ID NO: 1745457
ccucaggcaaguauaauuc

SEQ ID NO: 1745459 - RNA, 19 nt, Artificial Sequence
  Description of Artificial Sequence: Synthetic oligonucleotide
  Sense strand starting at position 2144 of SEQ ID NO: 1562419
gccugaggcagcucguuaa

SEQ ID NO: 1745460 - RNA, 19 nt, Artificial Sequence
  Description of Artificial Sequence: Synthetic oligonucleotide
  Antisense strand to SEQ ID NO: 1745459
uuaacgagcugccucaggc

SEQ ID NO: 1745461 - RNA, 19 nt, Artificial Sequence
  Description of Artificial Sequence: Synthetic oligonucleotide
  Sense strand starting at position 2187 of SEQ ID NO: 1562419
guaagauugccugagcuug

SEQ ID NO: 1745462 - RNA, 19 nt, Artificial Sequence
  Description of Artificial Sequence: Synthetic oligonucleotide
  Antisense strand to SEQ ID NO: 1745461
caagcucaggcaaucuuac

SEQ ID NO: 1745463 - RNA, 19 nt, Artificial Sequence
  Description of Artificial Sequence: Synthetic oligonucleotide
  Sense strand starting at position 2396 of SEQ ID NO: 1562419
gugguuauaguugauucca

SEQ ID NO: 1745464 - RNA, 19 nt, Artificial Sequence
  Description of Artificial Sequence: Synthetic oligonucleotide
  Antisense strand to SEQ ID NO: 1745463
uggaaucaacuauaaccac

SEQ ID NO: 1745465 - RNA, 19 nt, Artificial Sequence
  Description of Artificial Sequence: Synthetic oligonucleotide
  Sense strand starting at position 2398 of SEQ ID NO: 1562419
gguuauaguugauuccaca

SEQ ID NO: 1745466 - RNA, 19 nt, Artificial Sequence
  Description of Artificial Sequence: Synthetic oligonucleotide
  Antisense strand to SEQ ID NO: 1745465
uguggaaucaacuauaacc

SEQ ID NO: 1745467 - RNA, 19 nt, Artificial Sequence
  Description of Artificial Sequence: Synthetic oligonucleotide
  Sense strand starting at position 2518 of SEQ ID NO: 1562419
cuguguauguaccugaaag

SEQ ID NO: 1745468 - RNA, 19 nt, Artificial Sequence
  Description of Artificial Sequence: Synthetic oligonucleotide
  Antisense strand to SEQ ID NO: 1745467
cuuucagguacauacacag

SEQ ID NO: 1745469 - RNA, 19 nt, Artificial Sequence
  Description of Artificial Sequence: Synthetic oligonucleotide
  Sense strand starting at position 2519 of SEQ ID NO: 1562419
uguguauguaccugaaaga

SEQ ID NO: 1745470 - RNA, 19 nt, Artificial Sequence
  Description of Artificial Sequence: Synthetic oligonucleotide
  Antisense strand to SEQ ID NO: 1745469
ucuuucagguacauacaca

SEQ ID NO: 1745471 - RNA, 19 nt, Artificial Sequence
  Description of Artificial Sequence: Synthetic oligonucleotide
  Sense strand starting at position 2520 of SEQ ID NO: 1562419
guguauguaccugaaagaa

SEQ ID NO: 1745472 - RNA, 19 nt, Artificial Sequence
  Description of Artificial Sequence: Synthetic oligonucleotide
  Antisense strand to SEQ ID NO: 1745471
uucuuucagguacauacac

SEQ ID NO: 1745473 - RNA, 19 nt, Artificial Sequence
  Description of Artificial Sequence: Synthetic oligonucleotide
  Sense strand starting at position 2652 of SEQ ID NO: 1562419
gcacaauuguagucauaag

SEQ ID NO: 1745474 - RNA, 19 nt, Artificial Sequence
  Description of Artificial Sequence: Synthetic oligonucleotide
  Antisense strand to SEQ ID NO: 1745473
cuuaugacuacaauugugc

SEQ ID NO: 1745475 - RNA, 19 nt, Artificial Sequence
  Description of Artificial Sequence: Synthetic oligonucleotide
  Sense strand starting at position 2660 of SEQ ID NO: 1562419
guagucauaaguggagaga

SEQ ID NO: 1745476 - RNA, 19 nt, Artificial Sequence
  Description of Artificial Sequence: Synthetic oligonucleotide
  Antisense strand to SEQ ID NO: 1745475
ucucuccacuuaugacuac

SEQ ID NO: 1745477 - RNA, 19 nt, Artificial Sequence
  Description of Artificial Sequence: Synthetic oligonucleotide
  Sense strand starting at position 2703 of SEQ ID NO: 1562419
cucaucuggucuuuccaga

SEQ ID NO: 1745478 - RNA, 19 nt, Artificial Sequence
  Description of Artificial Sequence: Synthetic oligonucleotide
  Antisense strand to SEQ ID NO: 1745477
ucuggaaagaccagaugag

SEQ ID NO: 1745479 - RNA, 19 nt, Artificial Sequence
  Description of Artificial Sequence: Synthetic oligonucleotide
  Sense strand starting at position 3117 of SEQ ID NO: 1562419
cuaagauauugauuauggu

SEQ ID NO: 1745480 - RNA, 19 nt, Artificial Sequence
  Description of Artificial Sequence: Synthetic oligonucleotide
  Antisense strand to SEQ ID NO: 1745479
accauaaucaauaucuuag

SEQ ID NO: 1745481 - RNA, 19 nt, Artificial Sequence
  Description of Artificial Sequence: Synthetic oligonucleotide
  Sense strand starting at position 3210 of SEQ ID NO: 1562419
acacgaaauucucuaaaug

SEQ ID NO: 1745482 - RNA, 19 nt, Artificial Sequence
  Description of Artificial Sequence: Synthetic oligonucleotide
  Antisense strand to SEQ ID NO: 1745481
cauuuagagaauuucgugu

SEQ ID NO: 1745483 - RNA, 19 nt, Artificial Sequence
  Description of Artificial Sequence: Synthetic oligonucleotide
  Sense strand starting at position 3260 of SEQ ID NO: 1562419
aggaguagcucuguaggga

SEQ ID NO: 1745484 - RNA, 19 nt, Artificial Sequence
  Description of Artificial Sequence: Synthetic oligonucleotide
  Antisense strand to SEQ ID NO: 1745483
ucccuacagagcuacuccu

SEQ ID NO: 1745485 - RNA, 19 nt, Artificial Sequence
  Description of Artificial Sequence: Synthetic oligonucleotide
  Sense strand starting at position 3315 of SEQ ID NO: 1562419
guuagaaaugcccaaggcu

SEQ ID NO: 1745486 - RNA, 19 nt, Artificial Sequence
  Description of Artificial Sequence: Synthetic oligonucleotide
  Antisense strand to SEQ ID NO: 1745485
agccuugggcauuucuaac

SEQ ID NO: 1745487 - RNA, 19 nt, Artificial Sequence
  Description of Artificial Sequence: Synthetic oligonucleotide
  Sense strand starting at position 3451 of SEQ ID NO: 1562419
ugaguaaccgaaugacaca

SEQ ID NO: 1745488 - RNA, 19 nt, Artificial Sequence
  Description of Artificial Sequence: Synthetic oligonucleotide
  Antisense strand to SEQ ID NO: 1745487
ugugucauucgguuacuca

SEQ ID NO: 1745489 - RNA, 19 nt, Artificial Sequence
  Description of Artificial Sequence: Synthetic oligonucleotide
  Sense strand starting at position 3688 of SEQ ID NO: 1562419
auagucacucugcaauaga

SEQ ID NO: 1745490 - RNA, 19 nt, Artificial Sequence
  Description of Artificial Sequence: Synthetic oligonucleotide
  Antisense strand to SEQ ID NO: 1745489
ucuauugcagagugacuau

SEQ ID NO: 1745491 - RNA, 19 nt, Artificial Sequence
  Description of Artificial Sequence: Synthetic oligonucleotide
  Sense strand starting at position 3691 of SEQ ID NO: 1562419
gucacucugcaauagaacu

SEQ ID NO: 1745492 - RNA, 19 nt, Artificial Sequence
  Description of Artificial Sequence: Synthetic oligonucleotide
  Antisense strand to SEQ ID NO: 1745491
aguucuauugcagagugac

SEQ ID NO: 1745493 - RNA, 19 nt, Artificial Sequence
  Description of Artificial Sequence: Synthetic oligonucleotide
  Sense strand starting at position 3847 of SEQ ID NO: 1562419
cuuugugugccuguuuauu

SEQ ID NO: 1745494 - RNA, 19 nt, Artificial Sequence
  Description of Artificial Sequence: Synthetic oligonucleotide
  Antisense strand to SEQ ID NO: 1745493
aauaaacaggcacacaaag

SEQ ID NO: 1745495 - RNA, 19 nt, Artificial Sequence
  Description of Artificial Sequence: Synthetic oligonucleotide
  Sense strand starting at position 3955 of SEQ ID NO: 1562419
gucucauauuuaguuggca

SEQ ID NO: 1745496 - RNA, 19 nt, Artificial Sequence
  Description of Artificial Sequence: Synthetic oligonucleotide
  Antisense strand to SEQ ID NO: 1745495
ugccaacuaaauaugagac

SEQ ID NO: 1745497 - RNA, 19 nt, Artificial Sequence
  Description of Artificial Sequence: Synthetic oligonucleotide
  Sense strand starting at position 3956 of SEQ ID NO: 1562419
ucucauauuuaguuggcau

SEQ ID NO: 1745498 - RNA, 19 nt, Artificial Sequence
  Description of Artificial Sequence: Synthetic oligonucleotide
  Antisense strand to SEQ ID NO: 1745497
augccaacuaaauaugaga

SEQ ID NO: 1745499 - RNA, 19 nt, Artificial Sequence
  Description of Artificial Sequence: Synthetic oligonucleotide
  Sense strand starting at position 20 of SEQ ID NO: 1562420
gguagaaggugauugggua

SEQ ID NO: 1745500 - RNA, 19 nt, Artificial Sequence
  Description of Artificial Sequence: Synthetic oligonucleotide
  Antisense strand to SEQ ID NO: 1745499
uacccaaucaccuucuacc

SEQ ID NO: 1745501 - RNA, 19 nt, Artificial Sequence
  Description of Artificial Sequence: Synthetic oligonucleotide
  Sense strand starting at position 21 of SEQ ID NO: 1562420
guagaaggugauuggguau

SEQ ID NO: 1745502 - RNA, 19 nt, Artificial Sequence
  Description of Artificial Sequence: Synthetic oligonucleotide
  Antisense strand to SEQ ID NO: 1745501
auacccaaucaccuucuac

SEQ ID NO: 1745503 - RNA, 19 nt, Artificial Sequence
  Description of Artificial Sequence: Synthetic oligonucleotide
  Sense strand starting at position 112 of SEQ ID NO: 1562420
uauuuaacaguguguagca

SEQ ID NO: 1745504 - RNA, 19 nt, Artificial Sequence
  Description of Artificial Sequence: Synthetic oligonucleotide
  Antisense strand to SEQ ID NO: 1745503
ugcuacacacuguuaaaua

SEQ ID NO: 1745505 - RNA, 19 nt, Artificial Sequence
  Description of Artificial Sequence: Synthetic oligonucleotide
  Sense strand starting at position 486 of SEQ ID NO: 1562420
guuaaauuguugucaccaa

SEQ ID NO: 1745506 - RNA, 19 nt, Artificial Sequence
  Description of Artificial Sequence: Synthetic oligonucleotide
  Antisense strand to SEQ ID NO: 1745505
uuggugacaacaauuuaac

SEQ ID NO: 1745507 - RNA, 19 nt, Artificial Sequence
  Description of Artificial Sequence: Synthetic oligonucleotide
  Sense strand starting at position 487 of SEQ ID NO: 1562420
uuaaauuguugucaccaaa

SEQ ID NO: 1745508 - RNA, 19 nt, Artificial Sequence
  Description of Artificial Sequence: Synthetic oligonucleotide
  Antisense strand to SEQ ID NO: 1745507
uuuggugacaacaauuuaa

SEQ ID NO: 1745509 - RNA, 19 nt, Artificial Sequence
  Description of Artificial Sequence: Synthetic oligonucleotide
  Sense strand starting at position 629 of SEQ ID NO: 1562420
gugccugugcucuagggau

SEQ ID NO: 1745510 - RNA, 19 nt, Artificial Sequence
  Description of Artificial Sequence: Synthetic oligonucleotide
  Antisense strand to SEQ ID NO: 1745509
aucccuagagcacaggcac

SEQ ID NO: 1745511 - RNA, 19 nt, Artificial Sequence
  Description of Artificial Sequence: Synthetic oligonucleotide
  Sense strand starting at position 641 of SEQ ID NO: 1562420
uagggauccguugagcuuu

SEQ ID NO: 1745512 - RNA, 19 nt, Artificial Sequence
  Description of Artificial Sequence: Synthetic oligonucleotide
  Antisense strand to SEQ ID NO: 1745511
aaagcucaacggaucccua

SEQ ID NO: 1745513 - RNA, 19 nt, Artificial Sequence
  Description of Artificial Sequence: Synthetic oligonucleotide
  Sense strand starting at position 647 of SEQ ID NO: 1562420
uccguugagcuuugaacuu

SEQ ID NO: 1745514 - RNA, 19 nt, Artificial Sequence
  Description of Artificial Sequence: Synthetic oligonucleotide
  Antisense strand to SEQ ID NO: 1745513
aaguucaaagcucaacgga

SEQ ID NO: 1745515 - RNA, 19 nt, Artificial Sequence
  Description of Artificial Sequence: Synthetic oligonucleotide
  Sense strand starting at position 845 of SEQ ID NO: 1562420
gcagcccagccaugucaua

SEQ ID NO: 1745516 - RNA, 19 nt, Artificial Sequence
  Description of Artificial Sequence: Synthetic oligonucleotide
  Antisense strand to SEQ ID NO: 1745515
uaugacauggcugggcugc

SEQ ID NO: 1745517 - RNA, 19 nt, Artificial Sequence
  Description of Artificial Sequence: Synthetic oligonucleotide
  Sense strand starting at position 1082 of SEQ ID NO: 1562420
gggacauguugcccugagu

SEQ ID NO: 1745518 - RNA, 19 nt, Artificial Sequence
  Description of Artificial Sequence: Synthetic oligonucleotide
  Antisense strand to SEQ ID NO: 1745517
acucagggcaacauguccc

SEQ ID NO: 1745519 - RNA, 19 nt, Artificial Sequence
  Description of Artificial Sequence: Synthetic oligonucleotide
  Sense strand starting at position 1140 of SEQ ID NO: 1562420
agauacaucucaggcugau

SEQ ID NO: 1745520 - RNA, 19 nt, Artificial Sequence
  Description of Artificial Sequence: Synthetic oligonucleotide
  Antisense strand to SEQ ID NO: 1745519
aucagccugagauguaucu

SEQ ID NO: 1745521 - RNA, 19 nt, Artificial Sequence
  Description of Artificial Sequence: Synthetic oligonucleotide
  Sense strand starting at position 1244 of SEQ ID NO: 1562420
gggagcuccugccuagauu

SEQ ID NO: 1745522 - RNA, 19 nt, Artificial Sequence
  Description of Artificial Sequence: Synthetic oligonucleotide
  Antisense strand to SEQ ID NO: 1745521
aaucuaggcaggagcuccc

SEQ ID NO: 1745523 - RNA, 19 nt, Artificial Sequence
  Description of Artificial Sequence: Synthetic oligonucleotide
  Sense strand starting at position 1298 of SEQ ID NO: 1562420
agaagucugcuacaagugu

SEQ ID NO: 1745524 - RNA, 19 nt, Artificial Sequence
  Description of Artificial Sequence: Synthetic oligonucleotide
  Antisense strand to SEQ ID NO: 1745523
acacuuguagcagacuucu

SEQ ID NO: 1745525 - RNA, 19 nt, Artificial Sequence
  Description of Artificial Sequence: Synthetic oligonucleotide
  Sense strand starting at position 1608 of SEQ ID NO: 1562420
gggugugagacaugcagua

SEQ ID NO: 1745526 - RNA, 19 nt, Artificial Sequence
  Description of Artificial Sequence: Synthetic oligonucleotide
  Antisense strand to SEQ ID NO: 1745525
uacugcaugucucacaccc

SEQ ID NO: 1745527 - RNA, 19 nt, Artificial Sequence
  Description of Artificial Sequence: Synthetic oligonucleotide
  Sense strand starting at position 1610 of SEQ ID NO: 1562420
gugugagacaugcaguaaa

SEQ ID NO: 1745528 - RNA, 19 nt, Artificial Sequence
  Description of Artificial Sequence: Synthetic oligonucleotide
  Antisense strand to SEQ ID NO: 1745527
uuuacugcaugucucacac

SEQ ID NO: 1745529 - RNA, 19 nt, Artificial Sequence
  Description of Artificial Sequence: Synthetic oligonucleotide
  Sense strand starting at position 1777 of SEQ ID NO: 1562420
agaaguaaguaacuuguuu

SEQ ID NO: 1745530 - RNA, 19 nt, Artificial Sequence
  Description of Artificial Sequence: Synthetic oligonucleotide
  Antisense strand to SEQ ID NO: 1745529
aaacaaguuacuuacuucu

SEQ ID NO: 1745531 - RNA, 19 nt, Artificial Sequence
  Description of Artificial Sequence: Synthetic oligonucleotide
  Sense strand starting at position 1844 of SEQ ID NO: 1562420
aguagaagccagugaaucu

SEQ ID NO: 1745532 - RNA, 19 nt, Artificial Sequence
  Description of Artificial Sequence: Synthetic oligonucleotide
  Antisense strand to SEQ ID NO: 1745531
agauucacuggcuucuacu

SEQ ID NO: 1745533 - RNA, 19 nt, Artificial Sequence
  Description of Artificial Sequence: Synthetic oligonucleotide
  Sense strand starting at position 1845 of SEQ ID NO: 1562420
guagaagccagugaaucua

SEQ ID NO: 1745534 - RNA, 19 nt, Artificial Sequence
  Description of Artificial Sequence: Synthetic oligonucleotide
  Antisense strand to SEQ ID NO: 1745533
uagauucacuggcuucuac

SEQ ID NO: 1745535 - RNA, 19 nt, Artificial Sequence
  Description of Artificial Sequence: Synthetic oligonucleotide
  Sense strand starting at position 1860 of SEQ ID NO: 1562420
ucuauaucuucuguagcau

SEQ ID NO: 1745536 - RNA, 19 nt, Artificial Sequence
  Description of Artificial Sequence: Synthetic oligonucleotide
  Antisense strand to SEQ ID NO: 1745535
augcuacagaagauauaga

SEQ ID NO: 1745537 - RNA, 19 nt, Artificial Sequence
  Description of Artificial Sequence: Synthetic oligonucleotide
  Sense strand starting at position 2058 of SEQ ID NO: 1562420
cacggugucagagauagug

SEQ ID NO: 1745538 - RNA, 19 nt, Artificial Sequence
  Description of Artificial Sequence: Synthetic oligonucleotide
  Antisense strand to SEQ ID NO: 1745537
cacuaucucugacaccgug

SEQ ID NO: 1745539 - RNA, 19 nt, Artificial Sequence
  Description of Artificial Sequence: Synthetic oligonucleotide
  Sense strand starting at position 2068 of SEQ ID NO: 1562420
gagauagugaguuggguuu

SEQ ID NO: 1745540 - RNA, 19 nt, Artificial Sequence
  Description of Artificial Sequence: Synthetic oligonucleotide
  Antisense strand to SEQ ID NO: 1745539
aaacccaacucacuaucuc

SEQ ID NO: 1745541 - RNA, 19 nt, Artificial Sequence
  Description of Artificial Sequence: Synthetic oligonucleotide
  Sense strand starting at position 2100 of SEQ ID NO: 1562420
agguccugagugugaauau

SEQ ID NO: 1745542 - RNA, 19 nt, Artificial Sequence
  Description of Artificial Sequence: Synthetic oligonucleotide
  Antisense strand to SEQ ID NO: 1745541
auauucacacucaggaccu

SEQ ID NO: 1745543 - RNA, 19 nt, Artificial Sequence
  Description of Artificial Sequence: Synthetic oligonucleotide
  Sense strand starting at position 2101 of SEQ ID NO: 1562420
gguccugagugugaauaua

SEQ ID NO: 1745544 - RNA, 19 nt, Artificial Sequence
  Description of Artificial Sequence: Synthetic oligonucleotide
  Antisense strand to SEQ ID NO: 1745543
uauauucacacucaggacc

SEQ ID NO: 1745545 - RNA, 19 nt, Artificial Sequence
  Description of Artificial Sequence: Synthetic oligonucleotide
  Sense strand starting at position 2111 of SEQ ID NO: 1562420
gugaauauagcauguuuag

SEQ ID NO: 1745546 - RNA, 19 nt, Artificial Sequence
  Description of Artificial Sequence: Synthetic oligonucleotide
  Antisense strand to SEQ ID NO: 1745545
cuaaacaugcuauauucac

SEQ ID NO: 1745547 - RNA, 19 nt, Artificial Sequence
  Description of Artificial Sequence: Synthetic oligonucleotide
  Sense strand starting at position 2135 of SEQ ID NO: 1562420
gcuuauauacccugagcag

SEQ ID NO: 1745548 - RNA, 19 nt, Artificial Sequence
  Description of Artificial Sequence: Synthetic oligonucleotide
  Antisense strand to SEQ ID NO: 1745547
cugcucaggguauauaagc

SEQ ID NO: 1745549 - RNA, 19 nt, Artificial Sequence
  Description of Artificial Sequence: Synthetic oligonucleotide
  Sense strand starting at position 2136 of SEQ ID NO: 1562420
cuuauauacccugagcaga

SEQ ID NO: 1745550 - RNA, 19 nt, Artificial Sequence
  Description of Artificial Sequence: Synthetic oligonucleotide
  Antisense strand to SEQ ID NO: 1745549
ucugcucaggguauauaag

SEQ ID NO: 1745551 - RNA, 19 nt, Artificial Sequence
  Description of Artificial Sequence: Synthetic oligonucleotide
  Sense strand starting at position 2146 of SEQ ID NO: 1562420
cugagcagaacaugugaua

SEQ ID NO: 1745552 - RNA, 19 nt, Artificial Sequence
  Description of Artificial Sequence: Synthetic oligonucleotide
  Antisense strand to SEQ ID NO: 1745551
uaucacauguucugcucag

SEQ ID NO: 1745553 - RNA, 19 nt, Artificial Sequence
  Description of Artificial Sequence: Synthetic oligonucleotide
  Sense strand starting at position 2149 of SEQ ID NO: 1562420
agcagaacaugugauaaac

SEQ ID NO: 1745554 - RNA, 19 nt, Artificial Sequence
  Description of Artificial Sequence: Synthetic oligonucleotide
  Antisense strand to SEQ ID NO: 1745553
guuuaucacauguucugcu

SEQ ID NO: 1745555 - RNA, 19 nt, Artificial Sequence
  Description of Artificial Sequence: Synthetic oligonucleotide
  Sense strand starting at position 2159 of SEQ ID NO: 1562420
gugauaaacauguggccau

SEQ ID NO: 1745556 - RNA, 19 nt, Artificial Sequence
  Description of Artificial Sequence: Synthetic oligonucleotide
  Antisense strand to SEQ ID NO: 1745555
auggccacauguuuaucac

SEQ ID NO: 1745557 - RNA, 19 nt, Artificial Sequence
  Description of Artificial Sequence: Synthetic oligonucleotide
  Sense strand starting at position 2279 of SEQ ID NO: 1562420
uuagcugcaugguuagaau

SEQ ID NO: 1745558 - RNA, 19 nt, Artificial Sequence
  Description of Artificial Sequence: Synthetic oligonucleotide
  Antisense strand to SEQ ID NO: 1745557
auucuaaccaugcagcuaa

SEQ ID NO: 1745559 - RNA, 19 nt, Artificial Sequence
  Description of Artificial Sequence: Synthetic oligonucleotide
  Sense strand starting at position 2288 of SEQ ID NO: 1562420
ugguuagaaugcccuugaa

SEQ ID NO: 1745560 - RNA, 19 nt, Artificial Sequence
  Description of Artificial Sequence: Synthetic oligonucleotide
  Antisense strand to SEQ ID NO: 1745559
uucaagggcauucuaacca

SEQ ID NO: 1745561 - RNA, 19 nt, Artificial Sequence
  Description of Artificial Sequence: Synthetic oligonucleotide
  Sense strand starting at position 2291 of SEQ ID NO: 1562420
uuagaaugcccuugaacuu

SEQ ID NO: 1745562 - RNA, 19 nt, Artificial Sequence
  Description of Artificial Sequence: Synthetic oligonucleotide
  Antisense strand to SEQ ID NO: 1745561
aaguucaagggcauucuaa

SEQ ID NO: 1745563 - RNA, 19 nt, Artificial Sequence
  Description of Artificial Sequence: Synthetic oligonucleotide
  Sense strand starting at position 2706 of SEQ ID NO: 1562420
uguauuugacacuguguuu

SEQ ID NO: 1745564 - RNA, 19 nt, Artificial Sequence
  Description of Artificial Sequence: Synthetic oligonucleotide
  Antisense strand to SEQ ID NO: 1745563
aaacacagugucaaauaca

SEQ ID NO: 1745565 - RNA, 19 nt, Artificial Sequence
  Description of Artificial Sequence: Synthetic oligonucleotide
  Sense strand starting at position 2761 of SEQ ID NO: 1562420
uuccuuagauuguucuauu

SEQ ID NO: 1745566 - RNA, 19 nt, Artificial Sequence
  Description of Artificial Sequence: Synthetic oligonucleotide
  Antisense strand to SEQ ID NO: 1745565
aauagaacaaucuaaggaa

SEQ ID NO: 1745567 - RNA, 19 nt, Artificial Sequence
  Description of Artificial Sequence: Synthetic oligonucleotide
  Sense strand starting at position 2927 of SEQ ID NO: 1562420
ucuuaucagcugugguaaa

SEQ ID NO: 1745568 - RNA, 19 nt, Artificial Sequence
  Description of Artificial Sequence: Synthetic oligonucleotide
  Antisense strand to SEQ ID NO: 1745567
uuuaccacagcugauaaga

SEQ ID NO: 1745569 - RNA, 19 nt, Artificial Sequence
  Description of Artificial Sequence: Synthetic oligonucleotide
  Sense strand starting at position 3025 of SEQ ID NO: 1562420
uuggcuuaucaauguaaca

SEQ ID NO: 1745570 - RNA, 19 nt, Artificial Sequence
  Description of Artificial Sequence: Synthetic oligonucleotide
  Antisense strand to SEQ ID NO: 1745569
uguuacauugauaagccaa

SEQ ID NO: 1745571 - RNA, 19 nt, Artificial Sequence
  Description of Artificial Sequence: Synthetic oligonucleotide
  Sense strand starting at position 3153 of SEQ ID NO: 1562420
ccuguaauucuggaggcca

SEQ ID NO: 1745572 - RNA, 19 nt, Artificial Sequence
  Description of Artificial Sequence: Synthetic oligonucleotide
  Antisense strand to SEQ ID NO: 1745571
uggccuccagaauuacagg

SEQ ID NO: 1745573 - RNA, 19 nt, Artificial Sequence
  Description of Artificial Sequence: Synthetic oligonucleotide
  Sense strand starting at position 3194 of SEQ ID NO: 1562420
cagguauauuaguuuguuu

SEQ ID NO: 1745574 - RNA, 19 nt, Artificial Sequence
  Description of Artificial Sequence: Synthetic oligonucleotide
  Antisense strand to SEQ ID NO: 1745573
aaacaaacuaauauaccug

SEQ ID NO: 1745575 - RNA, 19 nt, Artificial Sequence
  Description of Artificial Sequence: Synthetic oligonucleotide
  Sense strand starting at position 3543 of SEQ ID NO: 1562420
acuauaucaccaggaguuu

SEQ ID NO: 1745576 - RNA, 19 nt, Artificial Sequence
  Description of Artificial Sequence: Synthetic oligonucleotide
  Antisense strand to SEQ ID NO: 1745575
aaacuccuggugauauagu

SEQ ID NO: 1745577 - RNA, 19 nt, Artificial Sequence
  Description of Artificial Sequence: Synthetic oligonucleotide
  Sense strand starting at position 3549 of SEQ ID NO: 1562420
ucaccaggaguuugagagu

SEQ ID NO: 1745578 - RNA, 19 nt, Artificial Sequence
  Description of Artificial Sequence: Synthetic oligonucleotide
  Antisense strand to SEQ ID NO: 1745577
acucucaaacuccugguga

SEQ ID NO: 1745579 - RNA, 19 nt, Artificial Sequence
  Description of Artificial Sequence: Synthetic oligonucleotide
  Sense strand starting at position 16 of SEQ ID NO: 1562421
acauguagugcauaucuaa

SEQ ID NO: 1745580 - RNA, 19 nt, Artificial Sequence
  Description of Artificial Sequence: Synthetic oligonucleotide
  Antisense strand to SEQ ID NO: 1745579
uuagauaugcacuacaugu

SEQ ID NO: 1745581 - RNA, 19 nt, Artificial Sequence
  Description of Artificial Sequence: Synthetic oligonucleotide
  Sense strand starting at position 25 of SEQ ID NO: 1562421
gcauaucuaagguggaaua

SEQ ID NO: 1745582 - RNA, 19 nt, Artificial Sequence
  Description of Artificial Sequence: Synthetic oligonucleotide
  Antisense strand to SEQ ID NO: 1745581
uauuccaccuuagauaugc

SEQ ID NO: 1745583 - RNA, 19 nt, Artificial Sequence
  Description of Artificial Sequence: Synthetic oligonucleotide
  Sense strand starting at position 26 of SEQ ID NO: 1562421
cauaucuaagguggaauau

SEQ ID NO: 1745584 - RNA, 19 nt, Artificial Sequence
  Description of Artificial Sequence: Synthetic oligonucleotide
  Antisense strand to SEQ ID NO: 1745583
auauuccaccuuagauaug

SEQ ID NO: 1745585 - RNA, 19 nt, Artificial Sequence
  Description of Artificial Sequence: Synthetic oligonucleotide
  Sense strand starting at position 86 of SEQ ID NO: 1562421
caauauuugccaugguugu

SEQ ID NO: 1745586 - RNA, 19 nt, Artificial Sequence
  Description of Artificial Sequence: Synthetic oligonucleotide
  Antisense strand to SEQ ID NO: 1745585
acaaccauggcaaauauug

SEQ ID NO: 1745587 - RNA, 19 nt, Artificial Sequence
  Description of Artificial Sequence: Synthetic oligonucleotide
  Sense strand starting at position 169 of SEQ ID NO: 1562421
uuaaauucucaaugaguag

SEQ ID NO: 1745588 - RNA, 19 nt, Artificial Sequence
  Description of Artificial Sequence: Synthetic oligonucleotide
  Antisense strand to SEQ ID NO: 1745587
cuacucauugagaauuuaa

SEQ ID NO: 1745589 - RNA, 19 nt, Artificial Sequence
  Description of Artificial Sequence: Synthetic oligonucleotide
  Sense strand starting at position 181 of SEQ ID NO: 1562421
ugaguaguuguugaagaca

SEQ ID NO: 1745590 - RNA, 19 nt, Artificial Sequence
  Description of Artificial Sequence: Synthetic oligonucleotide
  Antisense strand to SEQ ID NO: 1745589
ugucuucaacaacuacuca

SEQ ID NO: 1745591 - RNA, 19 nt, Artificial Sequence
  Description of Artificial Sequence: Synthetic oligonucleotide
  Sense strand starting at position 184 of SEQ ID NO: 1562421
guaguuguugaagacaaac

SEQ ID NO: 1745592 - RNA, 19 nt, Artificial Sequence
  Description of Artificial Sequence: Synthetic oligonucleotide
  Antisense strand to SEQ ID NO: 1745591
guuugucuucaacaacuac

SEQ ID NO: 1745593 - RNA, 19 nt, Artificial Sequence
  Description of Artificial Sequence: Synthetic oligonucleotide
  Sense strand starting at position 233 of SEQ ID NO: 1562421
ucucaugaauuauugggua

SEQ ID NO: 1745594 - RNA, 19 nt, Artificial Sequence
  Description of Artificial Sequence: Synthetic oligonucleotide
  Antisense strand to SEQ ID NO: 1745593
uacccaauaauucaugaga

SEQ ID NO: 1745595 - RNA, 19 nt, Artificial Sequence
  Description of Artificial Sequence: Synthetic oligonucleotide
  Sense strand starting at position 246 of SEQ ID NO: 1562421
uggguaaaccugcaagauu

SEQ ID NO: 1745596 - RNA, 19 nt, Artificial Sequence
  Description of Artificial Sequence: Synthetic oligonucleotide
  Antisense strand to SEQ ID NO: 1745595
aaucuugcagguuuaccca

SEQ ID NO: 1745597 - RNA, 19 nt, Artificial Sequence
  Description of Artificial Sequence: Synthetic oligonucleotide
  Sense strand starting at position 289 of SEQ ID NO: 1562421
guacauugcuauuuccgau

SEQ ID NO: 1745598 - RNA, 19 nt, Artificial Sequence
  Description of Artificial Sequence: Synthetic oligonucleotide
  Antisense strand to SEQ ID NO: 1745597
aucggaaauagcaauguac

SEQ ID NO: 1745599 - RNA, 19 nt, Artificial Sequence
  Description of Artificial Sequence: Synthetic oligonucleotide
  Sense strand starting at position 295 of SEQ ID NO: 1562421
ugcuauuuccgaugcauau

SEQ ID NO: 1745600 - RNA, 19 nt, Artificial Sequence
  Description of Artificial Sequence: Synthetic oligonucleotide
  Antisense strand to SEQ ID NO: 1745599
auaugcaucggaaauagca

SEQ ID NO: 1745601 - RNA, 19 nt, Artificial Sequence
  Description of Artificial Sequence: Synthetic oligonucleotide
  Sense strand starting at position 505 of SEQ ID NO: 1562421
cauauaaugcugugaaaga

SEQ ID NO: 1745602 - RNA, 19 nt, Artificial Sequence
  Description of Artificial Sequence: Synthetic oligonucleotide
  Antisense strand to SEQ ID NO: 1745601
ucuuucacagcauuauaug

SEQ ID NO: 1745603 - RNA, 19 nt, Artificial Sequence
  Description of Artificial Sequence: Synthetic oligonucleotide
  Sense strand starting at position 593 of SEQ ID NO: 1562421
uuggauagcgauuaacuuu

SEQ ID NO: 1745604 - RNA, 19 nt, Artificial Sequence
  Description of Artificial Sequence: Synthetic oligonucleotide
  Antisense strand to SEQ ID NO: 1745603
aaaguuaaucgcuauccaa

SEQ ID NO: 1745605 - RNA, 19 nt, Artificial Sequence
  Description of Artificial Sequence: Synthetic oligonucleotide
  Sense strand starting at position 599 of SEQ ID NO: 1562421
agcgauuaacuuuggaaac

SEQ ID NO: 1745606 - RNA, 19 nt, Artificial Sequence
  Description of Artificial Sequence: Synthetic oligonucleotide
  Antisense strand to SEQ ID NO: 1745605
guuuccaaaguuaaucgcu

SEQ ID NO: 1745607 - RNA, 19 nt, Artificial Sequence
  Description of Artificial Sequence: Synthetic oligonucleotide
  Sense strand starting at position 756 of SEQ ID NO: 1562421
uggugugugaaauaaugaa

SEQ ID NO: 1745608 - RNA, 19 nt, Artificial Sequence
  Description of Artificial Sequence: Synthetic oligonucleotide
  Antisense strand to SEQ ID NO: 1745607
uucauuauuucacacacca

SEQ ID NO: 1745609 - RNA, 19 nt, Artificial Sequence
  Description of Artificial Sequence: Synthetic oligonucleotide
  Sense strand starting at position 1004 of SEQ ID NO: 1562421
guaugauagggugagguua

SEQ ID NO: 1745610 - RNA, 19 nt, Artificial Sequence
  Description of Artificial Sequence: Synthetic oligonucleotide
  Antisense strand to SEQ ID NO: 1745609
uaaccucacccuaucauac

SEQ ID NO: 1745611 - RNA, 19 nt, Artificial Sequence
  Description of Artificial Sequence: Synthetic oligonucleotide
  Sense strand starting at position 1166 of SEQ ID NO: 1562421
ugaguugacaaaugugauc

SEQ ID NO: 1745612 - RNA, 19 nt, Artificial Sequence
  Description of Artificial Sequence: Synthetic oligonucleotide
  Antisense strand to SEQ ID NO: 1745611
gaucacauuugucaacuca

SEQ ID NO: 1745613 - RNA, 19 nt, Artificial Sequence
  Description of Artificial Sequence: Synthetic oligonucleotide
  Sense strand starting at position 1171 of SEQ ID NO: 1562421
ugacaaaugugaucugaau

SEQ ID NO: 1745614 - RNA, 19 nt, Artificial Sequence
  Description of Artificial Sequence: Synthetic oligonucleotide
  Antisense strand to SEQ ID NO: 1745613
auucagaucacauuuguca

SEQ ID NO: 1745615 - RNA, 19 nt, Artificial Sequence
  Description of Artificial Sequence: Synthetic oligonucleotide
  Sense strand starting at position 1224 of SEQ ID NO: 1562421
aagacauguuuaguaggua

SEQ ID NO: 1745616 - RNA, 19 nt, Artificial Sequence
  Description of Artificial Sequence: Synthetic oligonucleotide
  Antisense strand to SEQ ID NO: 1745615
uaccuacuaaacaugucuu

SEQ ID NO: 1745617 - RNA, 19 nt, Artificial Sequence
  Description of Artificial Sequence: Synthetic oligonucleotide
  Sense strand starting at position 1362 of SEQ ID NO: 1562421
uggagcuaucgauguauuu

SEQ ID NO: 1745618 - RNA, 19 nt, Artificial Sequence
  Description of Artificial Sequence: Synthetic oligonucleotide
  Antisense strand to SEQ ID NO: 1745617
aaauacaucgauagcucca

SEQ ID NO: 1745619 - RNA, 19 nt, Artificial Sequence
  Description of Artificial Sequence: Synthetic oligonucleotide
  Sense strand starting at position 1375 of SEQ ID NO: 1562421
guauuuaucuaucugcaug

SEQ ID NO: 1745620 - RNA, 19 nt, Artificial Sequence
  Description of Artificial Sequence: Synthetic oligonucleotide
  Antisense strand to SEQ ID NO: 1745619
caugcagauagauaaauac

SEQ ID NO: 1745621 - RNA, 19 nt, Artificial Sequence
  Description of Artificial Sequence: Synthetic oligonucleotide
  Sense strand starting at position 1461 of SEQ ID NO: 1562421
aucacuuacguauaauuga

SEQ ID NO: 1745622 - RNA, 19 nt, Artificial Sequence
  Description of Artificial Sequence: Synthetic oligonucleotide
  Antisense strand to SEQ ID NO: 1745621
ucaauuauacguaagugau

SEQ ID NO: 1745623 - RNA, 19 nt, Artificial Sequence
  Description of Artificial Sequence: Synthetic oligonucleotide
  Sense strand starting at position 1497 of SEQ ID NO: 1562421
gaaccauauuguguuugaa

SEQ ID NO: 1745624 - RNA, 19 nt, Artificial Sequence
  Description of Artificial Sequence: Synthetic oligonucleotide
  Antisense strand to SEQ ID NO: 1745623
uucaaacacaauaugguuc

SEQ ID NO: 1745625 - RNA, 19 nt, Artificial Sequence
  Description of Artificial Sequence: Synthetic oligonucleotide
  Sense strand starting at position 1588 of SEQ ID NO: 1562421
uuauuauagagaugugggu

SEQ ID NO: 1745626 - RNA, 19 nt, Artificial Sequence
  Description of Artificial Sequence: Synthetic oligonucleotide
  Antisense strand to SEQ ID NO: 1745625
acccacaucucuauaauaa

SEQ ID NO: 1745627 - RNA, 19 nt, Artificial Sequence
  Description of Artificial Sequence: Synthetic oligonucleotide
  Sense strand starting at position 1590 of SEQ ID NO: 1562421
auuauagagauguggguau

SEQ ID NO: 1745628 - RNA, 19 nt, Artificial Sequence
  Description of Artificial Sequence: Synthetic oligonucleotide
  Antisense strand to SEQ ID NO: 1745627
auacccacaucucuauaau

SEQ ID NO: 1745629 - RNA, 19 nt, Artificial Sequence
  Description of Artificial Sequence: Synthetic oligonucleotide
  Sense strand starting at position 1675 of SEQ ID NO: 1562421
aucuuuguuguccaaugau

SEQ ID NO: 1745630 - RNA, 19 nt, Artificial Sequence
  Description of Artificial Sequence: Synthetic oligonucleotide
  Antisense strand to SEQ ID NO: 1745629
aucauuggacaacaaagau

SEQ ID NO: 1745631 - RNA, 19 nt, Artificial Sequence
  Description of Artificial Sequence: Synthetic oligonucleotide
  Sense strand starting at position 1694 of SEQ ID NO: 1562421
ugaagucagcucugggaaa

SEQ ID NO: 1745632 - RNA, 19 nt, Artificial Sequence
  Description of Artificial Sequence: Synthetic oligonucleotide
  Antisense strand to SEQ ID NO: 1745631
uuucccagagcugacuuca

SEQ ID NO: 1745633 - RNA, 19 nt, Artificial Sequence
  Description of Artificial Sequence: Synthetic oligonucleotide
  Sense strand starting at position 1705 of SEQ ID NO: 1562421
cugggaaaguccucuuaua

SEQ ID NO: 1745634 - RNA, 19 nt, Artificial Sequence
  Description of Artificial Sequence: Synthetic oligonucleotide
  Antisense strand to SEQ ID NO: 1745633
uauaagaggacuuucccag

SEQ ID NO: 1745635 - RNA, 19 nt, Artificial Sequence
  Description of Artificial Sequence: Synthetic oligonucleotide
  Sense strand starting at position 1774 of SEQ ID NO: 1562421
ccauauccuccauaguaug

SEQ ID NO: 1745636 - RNA, 19 nt, Artificial Sequence
  Description of Artificial Sequence: Synthetic oligonucleotide
  Antisense strand to SEQ ID NO: 1745635
cauacuauggaggauaugg

SEQ ID NO: 1745637 - RNA, 19 nt, Artificial Sequence
  Description of Artificial Sequence: Synthetic oligonucleotide
  Sense strand starting at position 2280 of SEQ ID NO: 1562421
aaagucugugcauaccaga

SEQ ID NO: 1745638 - RNA, 19 nt, Artificial Sequence
  Description of Artificial Sequence: Synthetic oligonucleotide
  Antisense strand to SEQ ID NO: 1745637
ucugguaugcacagacuuu

SEQ ID NO: 1745639 - RNA, 19 nt, Artificial Sequence
  Description of Artificial Sequence: Synthetic oligonucleotide
  Sense strand starting at position 2320 of SEQ ID NO: 1562421
ggcauauugcauuacauag

SEQ ID NO: 1745640 - RNA, 19 nt, Artificial Sequence
  Description of Artificial Sequence: Synthetic oligonucleotide
  Antisense strand to SEQ ID NO: 1745639
cuauguaaugcaauaugcc

SEQ ID NO: 1745641 - RNA, 19 nt, Artificial Sequence
  Description of Artificial Sequence: Synthetic oligonucleotide
  Sense strand starting at position 2616 of SEQ ID NO: 1562421
cuagaacauuggccaucau

SEQ ID NO: 1745642 - RNA, 19 nt, Artificial Sequence
  Description of Artificial Sequence: Synthetic oligonucleotide
  Antisense strand to SEQ ID NO: 1745641
augauggccaauguucuag

SEQ ID NO: 1745643 - RNA, 19 nt, Artificial Sequence
  Description of Artificial Sequence: Synthetic oligonucleotide
  Sense strand starting at position 2802 of SEQ ID NO: 1562421
cccuuacuggcauauuaga

SEQ ID NO: 1745644 - RNA, 19 nt, Artificial Sequence
  Description of Artificial Sequence: Synthetic oligonucleotide
  Antisense strand to SEQ ID NO: 1745643
ucuaauaugccaguaaggg

SEQ ID NO: 1745645 - RNA, 19 nt, Artificial Sequence
  Description of Artificial Sequence: Synthetic oligonucleotide
  Sense strand starting at position 3268 of SEQ ID NO: 1562421
ggugaaauauaugcaauuc

SEQ ID NO: 1745646 - RNA, 19 nt, Artificial Sequence
  Description of Artificial Sequence: Synthetic oligonucleotide
  Antisense strand to SEQ ID NO: 1745645
gaauugcauauauuucacc

SEQ ID NO: 1745647 - RNA, 19 nt, Artificial Sequence
  Description of Artificial Sequence: Synthetic oligonucleotide
  Sense strand starting at position 3606 of SEQ ID NO: 1562421
caaagaguaccucagcuga

SEQ ID NO: 1745648 - RNA, 19 nt, Artificial Sequence
  Description of Artificial Sequence: Synthetic oligonucleotide
  Antisense strand to SEQ ID NO: 1745647
ucagcugagguacucuuug

SEQ ID NO: 1745649 - RNA, 19 nt, Artificial Sequence
  Description of Artificial Sequence: Synthetic oligonucleotide
  Sense strand starting at position 3616 of SEQ ID NO: 1562421
cucagcugacucuaagaau

SEQ ID NO: 1745650 - RNA, 19 nt, Artificial Sequence
  Description of Artificial Sequence: Synthetic oligonucleotide
  Antisense strand to SEQ ID NO: 1745649
auucuuagagucagcugag

SEQ ID NO: 1745651 - RNA, 19 nt, Artificial Sequence
  Description of Artificial Sequence: Synthetic oligonucleotide
  Sense strand starting at position 3778 of SEQ ID NO: 1562421
uugugcauuucuccagaua

SEQ ID NO: 1745652 - RNA, 19 nt, Artificial Sequence
  Description of Artificial Sequence: Synthetic oligonucleotide
  Antisense strand to SEQ ID NO: 1745651
uaucuggagaaaugcacaa

SEQ ID NO: 1745653 - RNA, 19 nt, Artificial Sequence
  Description of Artificial Sequence: Synthetic oligonucleotide
  Sense strand starting at position 3793 of SEQ ID NO: 1562421
gauagauuugcuggcugca

SEQ ID NO: 1745654 - RNA, 19 nt, Artificial Sequence
  Description of Artificial Sequence: Synthetic oligonucleotide
  Antisense strand to SEQ ID NO: 1745653
ugcagccagcaaaucuauc

SEQ ID NO: 1745655 - RNA, 19 nt, Artificial Sequence
  Description of Artificial Sequence: Synthetic oligonucleotide
  Sense strand starting at position 3910 of SEQ ID NO: 1562421
ugaacaauacuacgaaugu

SEQ ID NO: 1745656 - RNA, 19 nt, Artificial Sequence
  Description of Artificial Sequence: Synthetic oligonucleotide
  Antisense strand to SEQ ID NO: 1745655
acauucguaguauuguuca

SEQ ID NO: 1745657 - RNA, 19 nt, Artificial Sequence
  Description of Artificial Sequence: Synthetic oligonucleotide
  Sense strand starting at position 3919 of SEQ ID NO: 1562421
cuacgaauguauccaacaa

SEQ ID NO: 1745658 - RNA, 19 nt, Artificial Sequence
  Description of Artificial Sequence: Synthetic oligonucleotide
  Antisense strand to SEQ ID NO: 1745657
uuguuggauacauucguag

SEQ ID NO: 1745659 - RNA, 19 nt, Artificial Sequence
  Description of Artificial Sequence: Synthetic oligonucleotide
  Sense strand starting at position 36 of SEQ ID NO: 1562422
ugggauaggaauugcuaau

SEQ ID NO: 1745660 - RNA, 19 nt, Artificial Sequence
  Description of Artificial Sequence: Synthetic oligonucleotide
  Antisense strand to SEQ ID NO: 1745659
auuagcaauuccuauccca

SEQ ID NO: 1745661 - RNA, 19 nt, Artificial Sequence
  Description of Artificial Sequence: Synthetic oligonucleotide
  Sense strand starting at position 293 of SEQ ID NO: 1562422
augauaccugauuauuguu

SEQ ID NO: 1745662 - RNA, 19 nt, Artificial Sequence
  Description of Artificial Sequence: Synthetic oligonucleotide
  Antisense strand to SEQ ID NO: 1745661
aacaauaaucagguaucau

SEQ ID NO: 1745663 - RNA, 19 nt, Artificial Sequence
  Description of Artificial Sequence: Synthetic oligonucleotide
  Sense strand starting at position 387 of SEQ ID NO: 1562422
gaaguaacuguugaaguau

SEQ ID NO: 1745664 - RNA, 19 nt, Artificial Sequence
  Description of Artificial Sequence: Synthetic oligonucleotide
  Antisense strand to SEQ ID NO: 1745663
auacuucaacaguuacuuc

SEQ ID NO: 1745665 - RNA, 19 nt, Artificial Sequence
  Description of Artificial Sequence: Synthetic oligonucleotide
  Sense strand starting at position 444 of SEQ ID NO: 1562422
ugauucucaggugaucuuu

SEQ ID NO: 1745666 - RNA, 19 nt, Artificial Sequence
  Description of Artificial Sequence: Synthetic oligonucleotide
  Antisense strand to SEQ ID NO: 1745665
aaagaucaccugagaauca

SEQ ID NO: 1745667 - RNA, 19 nt, Artificial Sequence
  Description of Artificial Sequence: Synthetic oligonucleotide
  Sense strand starting at position 450 of SEQ ID NO: 1562422
ucaggugaucuuuacauau

SEQ ID NO: 1745668 - RNA, 19 nt, Artificial Sequence
  Description of Artificial Sequence: Synthetic oligonucleotide
  Antisense strand to SEQ ID NO: 1745667
auauguaaagaucaccuga

SEQ ID NO: 1745669 - RNA, 19 nt, Artificial Sequence
  Description of Artificial Sequence: Synthetic oligonucleotide
  Sense strand starting at position 716 of SEQ ID NO: 1562422
uuuaaaggcaguugaugau

SEQ ID NO: 1745670 - RNA, 19 nt, Artificial Sequence
  Description of Artificial Sequence: Synthetic oligonucleotide
  Antisense strand to SEQ ID NO: 1745669
aucaucaacugccuuuaaa

SEQ ID NO: 1745671 - RNA, 19 nt, Artificial Sequence
  Description of Artificial Sequence: Synthetic oligonucleotide
  Sense strand starting at position 971 of SEQ ID NO: 1562422
uugaucauaccacagugua

SEQ ID NO: 1745672 - RNA, 19 nt, Artificial Sequence
  Description of Artificial Sequence: Synthetic oligonucleotide
  Antisense strand to SEQ ID NO: 1745671
uacacugugguaugaucaa

SEQ ID NO: 1745673 - RNA, 19 nt, Artificial Sequence
  Description of Artificial Sequence: Synthetic oligonucleotide
  Sense strand starting at position 981 of SEQ ID NO: 1562422
cacaguguacuagaaguau

SEQ ID NO: 1745674 - RNA, 19 nt, Artificial Sequence
  Description of Artificial Sequence: Synthetic oligonucleotide
  Antisense strand to SEQ ID NO: 1745673
auacuucuaguacacugug

SEQ ID NO: 1745675 - RNA, 19 nt, Artificial Sequence
  Description of Artificial Sequence: Synthetic oligonucleotide
  Sense strand starting at position 1124 of SEQ ID NO: 1562422
ugucaaacuaaguagugua

SEQ ID NO: 1745676 - RNA, 19 nt, Artificial Sequence
  Description of Artificial Sequence: Synthetic oligonucleotide
  Antisense strand to SEQ ID NO: 1745675
uacacuacuuaguuugaca

SEQ ID NO: 1745677 - RNA, 19 nt, Artificial Sequence
  Description of Artificial Sequence: Synthetic oligonucleotide
  Sense strand starting at position 1193 of SEQ ID NO: 1562422
ucacuagucucacugaaag

SEQ ID NO: 1745678 - RNA, 19 nt, Artificial Sequence
  Description of Artificial Sequence: Synthetic oligonucleotide
  Antisense strand to SEQ ID NO: 1745677
cuuucagugagacuaguga

SEQ ID NO: 1745679 - RNA, 19 nt, Artificial Sequence
  Description of Artificial Sequence: Synthetic oligonucleotide
  Sense strand starting at position 1715 of SEQ ID NO: 1562422
cuuggauugaucuagugug

SEQ ID NO: 1745680 - RNA, 19 nt, Artificial Sequence
  Description of Artificial Sequence: Synthetic oligonucleotide
  Antisense strand to SEQ ID NO: 1745679
cacacuagaucaauccaag

SEQ ID NO: 1745681 - RNA, 19 nt, Artificial Sequence
  Description of Artificial Sequence: Synthetic oligonucleotide
  Sense strand starting at position 1755 of SEQ ID NO: 1562422
gguuaaauugaaugaucuu

SEQ ID NO: 1745682 - RNA, 19 nt, Artificial Sequence
  Description of Artificial Sequence: Synthetic oligonucleotide
  Antisense strand to SEQ ID NO: 1745681
aagaucauucaauuuaacc

SEQ ID NO: 1745683 - RNA, 19 nt, Artificial Sequence
  Description of Artificial Sequence: Synthetic oligonucleotide
  Sense strand starting at position 1761 of SEQ ID NO: 1562422
auugaaugaucuucuuaug

SEQ ID NO: 1745684 - RNA, 19 nt, Artificial Sequence
  Description of Artificial Sequence: Synthetic oligonucleotide
  Antisense strand to SEQ ID NO: 1745683
cauaagaagaucauucaau

SEQ ID NO: 1745685 - RNA, 19 nt, Artificial Sequence
  Description of Artificial Sequence: Synthetic oligonucleotide
  Sense strand starting at position 1792 of SEQ ID NO: 1562422
guguccucaggguaggauu

SEQ ID NO: 1745686 - RNA, 19 nt, Artificial Sequence
  Description of Artificial Sequence: Synthetic oligonucleotide
  Antisense strand to SEQ ID NO: 1745685
aauccuacccugaggacac

SEQ ID NO: 1745687 - RNA, 19 nt, Artificial Sequence
  Description of Artificial Sequence: Synthetic oligonucleotide
  Sense strand starting at position 1800 of SEQ ID NO: 1562422
aggguaggauuucaguaga

SEQ ID NO: 1745688 - RNA, 19 nt, Artificial Sequence
  Description of Artificial Sequence: Synthetic oligonucleotide
  Antisense strand to SEQ ID NO: 1745687
ucuacugaaauccuacccu

SEQ ID NO: 1745689 - RNA, 19 nt, Artificial Sequence
  Description of Artificial Sequence: Synthetic oligonucleotide
  Sense strand starting at position 2074 of SEQ ID NO: 1562422
aggcuuauauacccugaua

SEQ ID NO: 1745690 - RNA, 19 nt, Artificial Sequence
  Description of Artificial Sequence: Synthetic oligonucleotide
  Antisense strand to SEQ ID NO: 1745689
uaucaggguauauaagccu

SEQ ID NO: 1745691 - RNA, 19 nt, Artificial Sequence
  Description of Artificial Sequence: Synthetic oligonucleotide
  Sense strand starting at position 2076 of SEQ ID NO: 1562422
gcuuauauacccugauaag

SEQ ID NO: 1745692 - RNA, 19 nt, Artificial Sequence
  Description of Artificial Sequence: Synthetic oligonucleotide
  Antisense strand to SEQ ID NO: 1745691
cuuaucaggguauauaagc

SEQ ID NO: 1745693 - RNA, 19 nt, Artificial Sequence
  Description of Artificial Sequence: Synthetic oligonucleotide
  Sense strand starting at position 2087 of SEQ ID NO: 1562422
cugauaagaguaugugaug

SEQ ID NO: 1745694 - RNA, 19 nt, Artificial Sequence
  Description of Artificial Sequence: Synthetic oligonucleotide
  Antisense strand to SEQ ID NO: 1745693
caucacauacucuuaucag

SEQ ID NO: 1745695 - RNA, 19 nt, Artificial Sequence
  Description of Artificial Sequence: Synthetic oligonucleotide
  Sense strand starting at position 2088 of SEQ ID NO: 1562422
ugauaagaguaugugauga

SEQ ID NO: 1745696 - RNA, 19 nt, Artificial Sequence
  Description of Artificial Sequence: Synthetic oligonucleotide
  Antisense strand to SEQ ID NO: 1745695
ucaucacauacucuuauca

SEQ ID NO: 1745697 - RNA, 19 nt, Artificial Sequence
  Description of Artificial Sequence: Synthetic oligonucleotide
  Sense strand starting at position 2227 of SEQ ID NO: 1562422
ccucacaaucguuaaauug

SEQ ID NO: 1745698 - RNA, 19 nt, Artificial Sequence
  Description of Artificial Sequence: Synthetic oligonucleotide
  Antisense strand to SEQ ID NO: 1745697
caauuuaacgauugugagg

SEQ ID NO: 1745699 - RNA, 19 nt, Artificial Sequence
  Description of Artificial Sequence: Synthetic oligonucleotide
  Sense strand starting at position 2251 of SEQ ID NO: 1562422
guuugcuuuguugcugaau

SEQ ID NO: 1745700 - RNA, 19 nt, Artificial Sequence
  Description of Artificial Sequence: Synthetic oligonucleotide
  Antisense strand to SEQ ID NO: 1745699
auucagcaacaaagcaaac

SEQ ID NO: 1745701 - RNA, 19 nt, Artificial Sequence
  Description of Artificial Sequence: Synthetic oligonucleotide
  Sense strand starting at position 2325 of SEQ ID NO: 1562422
aaagucuuggcauaccaga

SEQ ID NO: 1745702 - RNA, 19 nt, Artificial Sequence
  Description of Artificial Sequence: Synthetic oligonucleotide
  Antisense strand to SEQ ID NO: 1745701
ucugguaugccaagacuuu

SEQ ID NO: 1745703 - RNA, 19 nt, Artificial Sequence
  Description of Artificial Sequence: Synthetic oligonucleotide
  Sense strand starting at position 2611 of SEQ ID NO: 1562422
gccuuugagaggcauagac

SEQ ID NO: 1745704 - RNA, 19 nt, Artificial Sequence
  Description of Artificial Sequence: Synthetic oligonucleotide
  Antisense strand to SEQ ID NO: 1745703
gucuaugccucucaaaggc

SEQ ID NO: 1745705 - RNA, 19 nt, Artificial Sequence
  Description of Artificial Sequence: Synthetic oligonucleotide
  Sense strand starting at position 2721 of SEQ ID NO: 1562422
gcacaacauuuggaaauua

SEQ ID NO: 1745706 - RNA, 19 nt, Artificial Sequence
  Description of Artificial Sequence: Synthetic oligonucleotide
  Antisense strand to SEQ ID NO: 1745705
uaauuuccaaauguugugc

SEQ ID NO: 1745707 - RNA, 19 nt, Artificial Sequence
  Description of Artificial Sequence: Synthetic oligonucleotide
  Sense strand starting at position 2868 of SEQ ID NO: 1562422
gugacuaaauucuuggagu

SEQ ID NO: 1745708 - RNA, 19 nt, Artificial Sequence
  Description of Artificial Sequence: Synthetic oligonucleotide
  Antisense strand to SEQ ID NO: 1745707
acuccaagaauuuagucac

SEQ ID NO: 1745709 - RNA, 19 nt, Artificial Sequence
  Description of Artificial Sequence: Synthetic oligonucleotide
  Sense strand starting at position 2870 of SEQ ID NO: 1562422
gacuaaauucuuggaguca

SEQ ID NO: 1745710 - RNA, 19 nt, Artificial Sequence
  Description of Artificial Sequence: Synthetic oligonucleotide
  Antisense strand to SEQ ID NO: 1745709
ugacuccaagaauuuaguc

SEQ ID NO: 1745711 - RNA, 19 nt, Artificial Sequence
  Description of Artificial Sequence: Synthetic oligonucleotide
  Sense strand starting at position 2897 of SEQ ID NO: 1562422
cuugcacccucaguuauuu

SEQ ID NO: 1745712 - RNA, 19 nt, Artificial Sequence
  Description of Artificial Sequence: Synthetic oligonucleotide
  Antisense strand to SEQ ID NO: 1745711
aaauaacugagggugcaag

SEQ ID NO: 1745713 - RNA, 19 nt, Artificial Sequence
  Description of Artificial Sequence: Synthetic oligonucleotide
  Sense strand starting at position 2906 of SEQ ID NO: 1562422
ucaguuauuucuucugccu

SEQ ID NO: 1745714 - RNA, 19 nt, Artificial Sequence
  Description of Artificial Sequence: Synthetic oligonucleotide
  Antisense strand to SEQ ID NO: 1745713
aggcagaagaaauaacuga

SEQ ID NO: 1745715 - RNA, 19 nt, Artificial Sequence
  Description of Artificial Sequence: Synthetic oligonucleotide
  Sense strand starting at position 2912 of SEQ ID NO: 1562422
auuucuucugccuguuauc

SEQ ID NO: 1745716 - RNA, 19 nt, Artificial Sequence
  Description of Artificial Sequence: Synthetic oligonucleotide
  Antisense strand to SEQ ID NO: 1745715
gauaacaggcagaagaaau

SEQ ID NO: 1745717 - RNA, 19 nt, Artificial Sequence
  Description of Artificial Sequence: Synthetic oligonucleotide
  Sense strand starting at position 3080 of SEQ ID NO: 1562422
gguauuuccugagaagaaa

SEQ ID NO: 1745718 - RNA, 19 nt, Artificial Sequence
  Description of Artificial Sequence: Synthetic oligonucleotide
  Antisense strand to SEQ ID NO: 1745717
uuucuucucaggaaauacc

SEQ ID NO: 1745719 - RNA, 19 nt, Artificial Sequence
  Description of Artificial Sequence: Synthetic oligonucleotide
  Sense strand starting at position 3151 of SEQ ID NO: 1562422
ugugaugaauuugaugaau

SEQ ID NO: 1745720 - RNA, 19 nt, Artificial Sequence
  Description of Artificial Sequence: Synthetic oligonucleotide
  Antisense strand to SEQ ID NO: 1745719
auucaucaaauucaucaca

SEQ ID NO: 1745721 - RNA, 19 nt, Artificial Sequence
  Description of Artificial Sequence: Synthetic oligonucleotide
  Sense strand starting at position 3299 of SEQ ID NO: 1562422
agaucuugucaauaguauu

SEQ ID NO: 1745722 - RNA, 19 nt, Artificial Sequence
  Description of Artificial Sequence: Synthetic oligonucleotide
  Antisense strand to SEQ ID NO: 1745721
aauacuauugacaagaucu

SEQ ID NO: 1745723 - RNA, 19 nt, Artificial Sequence
  Description of Artificial Sequence: Synthetic oligonucleotide
  Sense strand starting at position 3345 of SEQ ID NO: 1562422
agaaauguauagucucaug

SEQ ID NO: 1745724 - RNA, 19 nt, Artificial Sequence
  Description of Artificial Sequence: Synthetic oligonucleotide
  Antisense strand to SEQ ID NO: 1745723
caugagacuauacauuucu

SEQ ID NO: 1745725 - RNA, 19 nt, Artificial Sequence
  Description of Artificial Sequence: Synthetic oligonucleotide
  Sense strand starting at position 3354 of SEQ ID NO: 1562422
uagucucaugagcaaugua

SEQ ID NO: 1745726 - RNA, 19 nt, Artificial Sequence
  Description of Artificial Sequence: Synthetic oligonucleotide
  Antisense strand to SEQ ID NO: 1745725
uacauugcucaugagacua

SEQ ID NO: 1745727 - RNA, 19 nt, Artificial Sequence
  Description of Artificial Sequence: Synthetic oligonucleotide
  Sense strand starting at position 3357 of SEQ ID NO: 1562422
ucucaugagcaauguaaga

SEQ ID NO: 1745728 - RNA, 19 nt, Artificial Sequence
  Description of Artificial Sequence: Synthetic oligonucleotide
  Antisense strand to SEQ ID NO: 1745727
ucuuacauugcucaugaga

SEQ ID NO: 1745729 - RNA, 19 nt, Artificial Sequence
  Description of Artificial Sequence: Synthetic oligonucleotide
  Sense strand starting at position 3436 of SEQ ID NO: 1562422
cuauucuugugggcauuua

SEQ ID NO: 1745730 - RNA, 19 nt, Artificial Sequence
  Description of Artificial Sequence: Synthetic oligonucleotide
  Antisense strand to SEQ ID NO: 1745729
uaaaugcccacaagaauag

SEQ ID NO: 1745731 - RNA, 19 nt, Artificial Sequence
  Description of Artificial Sequence: Synthetic oligonucleotide
  Sense strand starting at position 3486 of SEQ ID NO: 1562422
uugccugaugaguaaugau

SEQ ID NO: 1745732 - RNA, 19 nt, Artificial Sequence
  Description of Artificial Sequence: Synthetic oligonucleotide
  Antisense strand to SEQ ID NO: 1745731
aucauuacucaucaggcaa

SEQ ID NO: 1745733 - RNA, 19 nt, Artificial Sequence
  Description of Artificial Sequence: Synthetic oligonucleotide
  Sense strand starting at position 3897 of SEQ ID NO: 1562422
gacaguggcuaacuugaau

SEQ ID NO: 1745734 - RNA, 19 nt, Artificial Sequence
  Description of Artificial Sequence: Synthetic oligonucleotide
  Antisense strand to SEQ ID NO: 1745733
auucaaguuagccacuguc

SEQ ID NO: 1745735 - RNA, 19 nt, Artificial Sequence
  Description of Artificial Sequence: Synthetic oligonucleotide
  Sense strand starting at position 3900 of SEQ ID NO: 1562422
aguggcuaacuugaauauu

SEQ ID NO: 1745736 - RNA, 19 nt, Artificial Sequence
  Description of Artificial Sequence: Synthetic oligonucleotide
  Antisense strand to SEQ ID NO: 1745735
aauauucaaguuagccacu

SEQ ID NO: 1745737 - RNA, 19 nt, Artificial Sequence
  Description of Artificial Sequence: Synthetic oligonucleotide
  Sense strand starting at position 3972 of SEQ ID NO: 1562422
uguuaucacgcugccuauu

SEQ ID NO: 1745738 - RNA, 19 nt, Artificial Sequence
  Description of Artificial Sequence: Synthetic oligonucleotide
  Antisense strand to SEQ ID NO: 1745737
aauaggcagcgugauaaca

SEQ ID NO: 1745739 - RNA, 19 nt, Artificial Sequence
  Description of Artificial Sequence: Synthetic oligonucleotide
  Sense strand starting at position 49 of SEQ ID NO: 1562423
gcaagauacuuaucugaaa

SEQ ID NO: 1745740 - RNA, 19 nt, Artificial Sequence
  Description of Artificial Sequence: Synthetic oligonucleotide
  Antisense strand to SEQ ID NO: 1745739
uuucagauaaguaucuugc

SEQ ID NO: 1745741 - RNA, 19 nt, Artificial Sequence
  Description of Artificial Sequence: Synthetic oligonucleotide
  Sense strand starting at position 82 of SEQ ID NO: 1562423
ggcccacauuugcuuguua

SEQ ID NO: 1745742 - RNA, 19 nt, Artificial Sequence
  Description of Artificial Sequence: Synthetic oligonucleotide
  Antisense strand to SEQ ID NO: 1745741
uaacaagcaaaugugggcc

SEQ ID NO: 1745743 - RNA, 19 nt, Artificial Sequence
  Description of Artificial Sequence: Synthetic oligonucleotide
  Sense strand starting at position 83 of SEQ ID NO: 1562423
gcccacauuugcuuguuaa

SEQ ID NO: 1745744 - RNA, 19 nt, Artificial Sequence
  Description of Artificial Sequence: Synthetic oligonucleotide
  Antisense strand to SEQ ID NO: 1745743
uuaacaagcaaaugugggc

SEQ ID NO: 1745745 - RNA, 19 nt, Artificial Sequence
  Description of Artificial Sequence: Synthetic oligonucleotide
  Sense strand starting at position 111 of SEQ ID NO: 1562423
gagacuuggcuagagugua

SEQ ID NO: 1745746 - RNA, 19 nt, Artificial Sequence
  Description of Artificial Sequence: Synthetic oligonucleotide
  Antisense strand to SEQ ID NO: 1745745
uacacucuagccaagucuc

SEQ ID NO: 1745747 - RNA, 19 nt, Artificial Sequence
  Description of Artificial Sequence: Synthetic oligonucleotide
  Sense strand starting at position 191 of SEQ ID NO: 1562423
cuauauuuccuaggugugu

SEQ ID NO: 1745748 - RNA, 19 nt, Artificial Sequence
  Description of Artificial Sequence: Synthetic oligonucleotide
  Antisense strand to SEQ ID NO: 1745747
acacaccuaggaaauauag

SEQ ID NO: 1745749 - RNA, 19 nt, Artificial Sequence
  Description of Artificial Sequence: Synthetic oligonucleotide
  Sense strand starting at position 723 of SEQ ID NO: 1562423
cauguuggucuccaguuaa

SEQ ID NO: 1745750 - RNA, 19 nt, Artificial Sequence
  Description of Artificial Sequence: Synthetic oligonucleotide
  Antisense strand to SEQ ID NO: 1745749
uuaacuggagaccaacaug

SEQ ID NO: 1745751 - RNA, 19 nt, Artificial Sequence
  Description of Artificial Sequence: Synthetic oligonucleotide
  Sense strand starting at position 727 of SEQ ID NO: 1562423
uuggucuccaguuaaaugu

SEQ ID NO: 1745752 - RNA, 19 nt, Artificial Sequence
  Description of Artificial Sequence: Synthetic oligonucleotide
  Antisense strand to SEQ ID NO: 1745751
acauuuaacuggagaccaa

SEQ ID NO: 1745753 - RNA, 19 nt, Artificial Sequence
  Description of Artificial Sequence: Synthetic oligonucleotide
  Sense strand starting at position 749 of SEQ ID NO: 1562423
aguuuaugaaguugguauu

SEQ ID NO: 1745754 - RNA, 19 nt, Artificial Sequence
  Description of Artificial Sequence: Synthetic oligonucleotide
  Antisense strand to SEQ ID NO: 1745753
aauaccaacuucauaaacu

SEQ ID NO: 1745755 - RNA, 19 nt, Artificial Sequence
  Description of Artificial Sequence: Synthetic oligonucleotide
  Sense strand starting at position 750 of SEQ ID NO: 1562423
guuuaugaaguugguauuu

SEQ ID NO: 1745756 - RNA, 19 nt, Artificial Sequence
  Description of Artificial Sequence: Synthetic oligonucleotide
  Antisense strand to SEQ ID NO: 1745755
aaauaccaacuucauaaac

SEQ ID NO: 1745757 - RNA, 19 nt, Artificial Sequence
  Description of Artificial Sequence: Synthetic oligonucleotide
  Sense strand starting at position 790 of SEQ ID NO: 1562423
acaugaucucacugaaagc

SEQ ID NO: 1745758 - RNA, 19 nt, Artificial Sequence
  Description of Artificial Sequence: Synthetic oligonucleotide
  Antisense strand to SEQ ID NO: 1745757
gcuuucagugagaucaugu

SEQ ID NO: 1745759 - RNA, 19 nt, Artificial Sequence
  Description of Artificial Sequence: Synthetic oligonucleotide
  Sense strand starting at position 923 of SEQ ID NO: 1562423
ugggcuuggacugagugaa

SEQ ID NO: 1745760 - RNA, 19 nt, Artificial Sequence
  Description of Artificial Sequence: Synthetic oligonucleotide
  Antisense strand to SEQ ID NO: 1745759
uucacucaguccaagccca

SEQ ID NO: 1745761 - RNA, 19 nt, Artificial Sequence
  Description of Artificial Sequence: Synthetic oligonucleotide
  Sense strand starting at position 1247 of SEQ ID NO: 1562423
guaguuagguuucuggaga

SEQ ID NO: 1745762 - RNA, 19 nt, Artificial Sequence
  Description of Artificial Sequence: Synthetic oligonucleotide
  Antisense strand to SEQ ID NO: 1745761
ucuccagaaaccuaacuac

SEQ ID NO: 1745763 - RNA, 19 nt, Artificial Sequence
  Description of Artificial Sequence: Synthetic oligonucleotide
  Sense strand starting at position 1252 of SEQ ID NO: 1562423
uagguuucuggagagucaa

SEQ ID NO: 1745764 - RNA, 19 nt, Artificial Sequence
  Description of Artificial Sequence: Synthetic oligonucleotide
  Antisense strand to SEQ ID NO: 1745763
uugacucuccagaaaccua

SEQ ID NO: 1745765 - RNA, 19 nt, Artificial Sequence
  Description of Artificial Sequence: Synthetic oligonucleotide
  Sense strand starting at position 1339 of SEQ ID NO: 1562423
aacugugaccuuugaaugu

SEQ ID NO: 1745766 - RNA, 19 nt, Artificial Sequence
  Description of Artificial Sequence: Synthetic oligonucleotide
  Antisense strand to SEQ ID NO: 1745765
acauucaaaggucacaguu

SEQ ID NO: 1745767 - RNA, 19 nt, Artificial Sequence
  Description of Artificial Sequence: Synthetic oligonucleotide
  Sense strand starting at position 1343 of SEQ ID NO: 1562423
gugaccuuugaaugugaau

SEQ ID NO: 1745768 - RNA, 19 nt, Artificial Sequence
  Description of Artificial Sequence: Synthetic oligonucleotide
  Antisense strand to SEQ ID NO: 1745767
auucacauucaaaggucac

SEQ ID NO: 1745769 - RNA, 19 nt, Artificial Sequence
  Description of Artificial Sequence: Synthetic oligonucleotide
  Sense strand starting at position 1391 of SEQ ID NO: 1562423
uauagauaggugcauguau

SEQ ID NO: 1745770 - RNA, 19 nt, Artificial Sequence
  Description of Artificial Sequence: Synthetic oligonucleotide
  Antisense strand to SEQ ID NO: 1745769
auacaugcaccuaucuaua

SEQ ID NO: 1745771 - RNA, 19 nt, Artificial Sequence
  Description of Artificial Sequence: Synthetic oligonucleotide
  Sense strand starting at position 1393 of SEQ ID NO: 1562423
uagauaggugcauguauau

SEQ ID NO: 1745772 - RNA, 19 nt, Artificial Sequence
  Description of Artificial Sequence: Synthetic oligonucleotide
  Antisense strand to SEQ ID NO: 1745771
auauacaugcaccuaucua

SEQ ID NO: 1745773 - RNA, 19 nt, Artificial Sequence
  Description of Artificial Sequence: Synthetic oligonucleotide
  Sense strand starting at position 1440 of SEQ ID NO: 1562423
cuucuauauguauaguagu

SEQ ID NO: 1745774 - RNA, 19 nt, Artificial Sequence
  Description of Artificial Sequence: Synthetic oligonucleotide
  Antisense strand to SEQ ID NO: 1745773
acuacuauacauauagaag

SEQ ID NO: 1745775 - RNA, 19 nt, Artificial Sequence
  Description of Artificial Sequence: Synthetic oligonucleotide
  Sense strand starting at position 1757 of SEQ ID NO: 1562423
cauguuagguugucaggga

SEQ ID NO: 1745776 - RNA, 19 nt, Artificial Sequence
  Description of Artificial Sequence: Synthetic oligonucleotide
  Antisense strand to SEQ ID NO: 1745775
ucccugacaaccuaacaug

SEQ ID NO: 1745777 - RNA, 19 nt, Artificial Sequence
  Description of Artificial Sequence: Synthetic oligonucleotide
  Sense strand starting at position 1761 of SEQ ID NO: 1562423
uuagguugucagggaagga

SEQ ID NO: 1745778 - RNA, 19 nt, Artificial Sequence
  Description of Artificial Sequence: Synthetic oligonucleotide
  Antisense strand to SEQ ID NO: 1745777
uccuucccugacaaccuaa

SEQ ID NO: 1745779 - RNA, 19 nt, Artificial Sequence
  Description of Artificial Sequence: Synthetic oligonucleotide
  Sense strand starting at position 2074 of SEQ ID NO: 1562423
cuuauauacccuggucaga

SEQ ID NO: 1745780 - RNA, 19 nt, Artificial Sequence
  Description of Artificial Sequence: Synthetic oligonucleotide
  Antisense strand to SEQ ID NO: 1745779
ucugaccaggguauauaag

SEQ ID NO: 1745781 - RNA, 19 nt, Artificial Sequence
  Description of Artificial Sequence: Synthetic oligonucleotide
  Sense strand starting at position 2174 of SEQ ID NO: 1562423
ucuucugauguagggagau

SEQ ID NO: 1745782 - RNA, 19 nt, Artificial Sequence
  Description of Artificial Sequence: Synthetic oligonucleotide
  Antisense strand to SEQ ID NO: 1745781
aucucccuacaucagaaga

SEQ ID NO: 1745783 - RNA, 19 nt, Artificial Sequence
  Description of Artificial Sequence: Synthetic oligonucleotide
  Sense strand starting at position 2186 of SEQ ID NO: 1562423
gggagaugcccucauucuc

SEQ ID NO: 1745784 - RNA, 19 nt, Artificial Sequence
  Description of Artificial Sequence: Synthetic oligonucleotide
  Antisense strand to SEQ ID NO: 1745783
gagaaugagggcaucuccc

SEQ ID NO: 1745785 - RNA, 19 nt, Artificial Sequence
  Description of Artificial Sequence: Synthetic oligonucleotide
  Sense strand starting at position 2237 of SEQ ID NO: 1562423
ucaggacacgauugaacuu

SEQ ID NO: 1745786 - RNA, 19 nt, Artificial Sequence
  Description of Artificial Sequence: Synthetic oligonucleotide
  Antisense strand to SEQ ID NO: 1745785
aaguucaaucguguccuga

SEQ ID NO: 1745787 - RNA, 19 nt, Artificial Sequence
  Description of Artificial Sequence: Synthetic oligonucleotide
  Sense strand starting at position 2338 of SEQ ID NO: 1562423
gguguauuacaucaucuac

SEQ ID NO: 1745788 - RNA, 19 nt, Artificial Sequence
  Description of Artificial Sequence: Synthetic oligonucleotide
  Antisense strand to SEQ ID NO: 1745787
guagaugauguaauacacc

SEQ ID NO: 1745789 - RNA, 19 nt, Artificial Sequence
  Description of Artificial Sequence: Synthetic oligonucleotide
  Sense strand starting at position 2349 of SEQ ID NO: 1562423
ucaucuacacuuuauggua

SEQ ID NO: 1745790 - RNA, 19 nt, Artificial Sequence
  Description of Artificial Sequence: Synthetic oligonucleotide
  Antisense strand to SEQ ID NO: 1745789
uaccauaaaguguagauga

SEQ ID NO: 1745791 - RNA, 19 nt, Artificial Sequence
  Description of Artificial Sequence: Synthetic oligonucleotide
  Sense strand starting at position 2579 of SEQ ID NO: 1562423
guguacaaucgccaaagga

SEQ ID NO: 1745792 - RNA, 19 nt, Artificial Sequence
  Description of Artificial Sequence: Synthetic oligonucleotide
  Antisense strand to SEQ ID NO: 1745791
uccuuuggcgauuguacac

SEQ ID NO: 1745793 - RNA, 19 nt, Artificial Sequence
  Description of Artificial Sequence: Synthetic oligonucleotide
  Sense strand starting at position 2606 of SEQ ID NO: 1562423
aagagaguguaugcugauu

SEQ ID NO: 1745794 - RNA, 19 nt, Artificial Sequence
  Description of Artificial Sequence: Synthetic oligonucleotide
  Antisense strand to SEQ ID NO: 1745793
aaucagcauacacucucuu

SEQ ID NO: 1745795 - RNA, 19 nt, Artificial Sequence
  Description of Artificial Sequence: Synthetic oligonucleotide
  Sense strand starting at position 2754 of SEQ ID NO: 1562423
gacuuaucagaguagcacu

SEQ ID NO: 1745796 - RNA, 19 nt, Artificial Sequence
  Description of Artificial Sequence: Synthetic oligonucleotide
  Antisense strand to SEQ ID NO: 1745795
agugcuacucugauaaguc

SEQ ID NO: 1745797 - RNA, 19 nt, Artificial Sequence
  Description of Artificial Sequence: Synthetic oligonucleotide
  Sense strand starting at position 2908 of SEQ ID NO: 1562423
guguauauaugaccucuau

SEQ ID NO: 1745798 - RNA, 19 nt, Artificial Sequence
  Description of Artificial Sequence: Synthetic oligonucleotide
  Antisense strand to SEQ ID NO: 1745797
auagaggucauauauacac

SEQ ID NO: 1745799 - RNA, 19 nt, Artificial Sequence
  Description of Artificial Sequence: Synthetic oligonucleotide
  Sense strand starting at position 2989 of SEQ ID NO: 1562423
gguagaaguuuauugcaua

SEQ ID NO: 1745800 - RNA, 19 nt, Artificial Sequence
  Description of Artificial Sequence: Synthetic oligonucleotide
  Antisense strand to SEQ ID NO: 1745799
uaugcaauaaacuucuacc

SEQ ID NO: 1745801 - RNA, 19 nt, Artificial Sequence
  Description of Artificial Sequence: Synthetic oligonucleotide
  Sense strand starting at position 3376 of SEQ ID NO: 1562423
ugauucugauguucuucua

SEQ ID NO: 1745802 - RNA, 19 nt, Artificial Sequence
  Description of Artificial Sequence: Synthetic oligonucleotide
  Antisense strand to SEQ ID NO: 1745801
uagaagaacaucagaauca

SEQ ID NO: 1745803 - RNA, 19 nt, Artificial Sequence
  Description of Artificial Sequence: Synthetic oligonucleotide
  Sense strand starting at position 3394 of SEQ ID NO: 1562423
augucuauccuguacucau

SEQ ID NO: 1745804 - RNA, 19 nt, Artificial Sequence
  Description of Artificial Sequence: Synthetic oligonucleotide
  Antisense strand to SEQ ID NO: 1745803
augaguacaggauagacau

SEQ ID NO: 1745805 - RNA, 19 nt, Artificial Sequence
  Description of Artificial Sequence: Synthetic oligonucleotide
  Sense strand starting at position 3408 of SEQ ID NO: 1562423
cucauuuauucugagguaa

SEQ ID NO: 1745806 - RNA, 19 nt, Artificial Sequence
  Description of Artificial Sequence: Synthetic oligonucleotide
  Antisense strand to SEQ ID NO: 1745805
uuaccucagaauaaaugag

SEQ ID NO: 1745807 - RNA, 19 nt, Artificial Sequence
  Description of Artificial Sequence: Synthetic oligonucleotide
  Sense strand starting at position 3419 of SEQ ID NO: 1562423
ugagguaauuucuaaccac

SEQ ID NO: 1745808 - RNA, 19 nt, Artificial Sequence
  Description of Artificial Sequence: Synthetic oligonucleotide
  Antisense strand to SEQ ID NO: 1745807
gugguuagaaauuaccuca

SEQ ID NO: 1745809 - RNA, 19 nt, Artificial Sequence
  Description of Artificial Sequence: Synthetic oligonucleotide
  Sense strand starting at position 3439 of SEQ ID NO: 1562423
gccuacugaucuguuaaua

SEQ ID NO: 1745810 - RNA, 19 nt, Artificial Sequence
  Description of Artificial Sequence: Synthetic oligonucleotide
  Antisense strand to SEQ ID NO: 1745809
uauuaacagaucaguaggc

SEQ ID NO: 1745811 - RNA, 19 nt, Artificial Sequence
  Description of Artificial Sequence: Synthetic oligonucleotide
  Sense strand starting at position 3635 of SEQ ID NO: 1562423
auuagacuguuuguuaacu

SEQ ID NO: 1745812 - RNA, 19 nt, Artificial Sequence
  Description of Artificial Sequence: Synthetic oligonucleotide
  Antisense strand to SEQ ID NO: 1745811
aguuaacaaacagucuaau

SEQ ID NO: 1745813 - RNA, 19 nt, Artificial Sequence
  Description of Artificial Sequence: Synthetic oligonucleotide
  Sense strand starting at position 3640 of SEQ ID NO: 1562423
acuguuuguuaacucaaca

SEQ ID NO: 1745814 - RNA, 19 nt, Artificial Sequence
  Description of Artificial Sequence: Synthetic oligonucleotide
  Antisense strand to SEQ ID NO: 1745813
uguugaguuaacaaacagu

SEQ ID NO: 1745815 - RNA, 19 nt, Artificial Sequence
  Description of Artificial Sequence: Synthetic oligonucleotide
  Sense strand starting at position 3702 of SEQ ID NO: 1562423
uccuauggcuuucugaaau

SEQ ID NO: 1745816 - RNA, 19 nt, Artificial Sequence
  Description of Artificial Sequence: Synthetic oligonucleotide
  Antisense strand to SEQ ID NO: 1745815
auuucagaaagccauagga

SEQ ID NO: 1745817 - RNA, 19 nt, Artificial Sequence
  Description of Artificial Sequence: Synthetic oligonucleotide
  Sense strand starting at position 3831 of SEQ ID NO: 1562423
cauagaguuccucagcuga

SEQ ID NO: 1745818 - RNA, 19 nt, Artificial Sequence
  Description of Artificial Sequence: Synthetic oligonucleotide
  Antisense strand to SEQ ID NO: 1745817
ucagcugaggaacucuaug

SEQ ID NO: 1745819 - RNA, 19 nt, Artificial Sequence
  Description of Artificial Sequence: Synthetic oligonucleotide
  Sense strand starting at position 303 of SEQ ID NO: 1562424
ggaguagaaauguauguca

SEQ ID NO: 1745820 - RNA, 19 nt, Artificial Sequence
  Description of Artificial Sequence: Synthetic oligonucleotide
  Antisense strand to SEQ ID NO: 1745819
ugacauacauuucuacucc

SEQ ID NO: 1745821 - RNA, 19 nt, Artificial Sequence
  Description of Artificial Sequence: Synthetic oligonucleotide
  Sense strand starting at position 305 of SEQ ID NO: 1562424
aguagaaauguaugucaag

SEQ ID NO: 1745822 - RNA, 19 nt, Artificial Sequence
  Description of Artificial Sequence: Synthetic oligonucleotide
  Antisense strand to SEQ ID NO: 1745821
cuugacauacauuucuacu

SEQ ID NO: 1745823 - RNA, 19 nt, Artificial Sequence
  Description of Artificial Sequence: Synthetic oligonucleotide
  Sense strand starting at position 306 of SEQ ID NO: 1562424
guagaaauguaugucaaga

SEQ ID NO: 1745824 - RNA, 19 nt, Artificial Sequence
  Description of Artificial Sequence: Synthetic oligonucleotide
  Antisense strand to SEQ ID NO: 1745823
ucuugacauacauuucuac

SEQ ID NO: 1745825 - RNA, 19 nt, Artificial Sequence
  Description of Artificial Sequence: Synthetic oligonucleotide
  Sense strand starting at position 395 of SEQ ID NO: 1562424
acgaguagucagcagacca

SEQ ID NO: 1745826 - RNA, 19 nt, Artificial Sequence
  Description of Artificial Sequence: Synthetic oligonucleotide
  Antisense strand to SEQ ID NO: 1745825
uggucugcugacuacucgu

SEQ ID NO: 1745827 - RNA, 19 nt, Artificial Sequence
  Description of Artificial Sequence: Synthetic oligonucleotide
  Sense strand starting at position 577 of SEQ ID NO: 1562424
aguguagugacauaaucuc

SEQ ID NO: 1745828 - RNA, 19 nt, Artificial Sequence
  Description of Artificial Sequence: Synthetic oligonucleotide
  Antisense strand to SEQ ID NO: 1745827
gagauuaugucacuacacu

SEQ ID NO: 1745829 - RNA, 19 nt, Artificial Sequence
  Description of Artificial Sequence: Synthetic oligonucleotide
  Sense strand starting at position 845 of SEQ ID NO: 1562424
ucagacaucccucagguuu

SEQ ID NO: 1745830 - RNA, 19 nt, Artificial Sequence
  Description of Artificial Sequence: Synthetic oligonucleotide
  Antisense strand to SEQ ID NO: 1745829
aaaccugagggaugucuga

SEQ ID NO: 1745831 - RNA, 19 nt, Artificial Sequence
  Description of Artificial Sequence: Synthetic oligonucleotide
  Sense strand starting at position 937 of SEQ ID NO: 1562424
uuaacuugucaaggaggua

SEQ ID NO: 1745832 - RNA, 19 nt, Artificial Sequence
  Description of Artificial Sequence: Synthetic oligonucleotide
  Antisense strand to SEQ ID NO: 1745831
uaccuccuugacaaguuaa

SEQ ID NO: 1745833 - RNA, 19 nt, Artificial Sequence
  Description of Artificial Sequence: Synthetic oligonucleotide
  Sense strand starting at position 954 of SEQ ID NO: 1562424
uagaguagauucucauaug

SEQ ID NO: 1745834 - RNA, 19 nt, Artificial Sequence
  Description of Artificial Sequence: Synthetic oligonucleotide
  Antisense strand to SEQ ID NO: 1745833
cauaugagaaucuacucua

SEQ ID NO: 1745835 - RNA, 19 nt, Artificial Sequence
  Description of Artificial Sequence: Synthetic oligonucleotide
  Sense strand starting at position 1047 of SEQ ID NO: 1562424
uugauagcauucuuuagac

SEQ ID NO: 1745836 - RNA, 19 nt, Artificial Sequence
  Description of Artificial Sequence: Synthetic oligonucleotide
  Antisense strand to SEQ ID NO: 1745835
gucuaaagaaugcuaucaa

SEQ ID NO: 1745837 - RNA, 19 nt, Artificial Sequence
  Description of Artificial Sequence: Synthetic oligonucleotide
  Sense strand starting at position 1056 of SEQ ID NO: 1562424
uucuuuagaccuuacguau

SEQ ID NO: 1745838 - RNA, 19 nt, Artificial Sequence
  Description of Artificial Sequence: Synthetic oligonucleotide
  Antisense strand to SEQ ID NO: 1745837
auacguaaggucuaaagaa

SEQ ID NO: 1745839 - RNA, 19 nt, Artificial Sequence
  Description of Artificial Sequence: Synthetic oligonucleotide
  Sense strand starting at position 1059 of SEQ ID NO: 1562424
uuuagaccuuacguauuau

SEQ ID NO: 1745840 - RNA, 19 nt, Artificial Sequence
  Description of Artificial Sequence: Synthetic oligonucleotide
  Antisense strand to SEQ ID NO: 1745839
auaauacguaaggucuaaa

SEQ ID NO: 1745841 - RNA, 19 nt, Artificial Sequence
  Description of Artificial Sequence: Synthetic oligonucleotide
  Sense strand starting at position 1137 of SEQ ID NO: 1562424
auagaauuacugugcuuug

SEQ ID NO: 1745842 - RNA, 19 nt, Artificial Sequence
  Description of Artificial Sequence: Synthetic oligonucleotide
  Antisense strand to SEQ ID NO: 1745841
caaagcacaguaauucuau

SEQ ID NO: 1745843 - RNA, 19 nt, Artificial Sequence
  Description of Artificial Sequence: Synthetic oligonucleotide
  Sense strand starting at position 1138 of SEQ ID NO: 1562424
uagaauuacugugcuuuga

SEQ ID NO: 1745844 - RNA, 19 nt, Artificial Sequence
  Description of Artificial Sequence: Synthetic oligonucleotide
  Antisense strand to SEQ ID NO: 1745843
ucaaagcacaguaauucua

SEQ ID NO: 1745845 - RNA, 19 nt, Artificial Sequence
  Description of Artificial Sequence: Synthetic oligonucleotide
  Sense strand starting at position 1140 of SEQ ID NO: 1562424
gaauuacugugcuuugaga

SEQ ID NO: 1745846 - RNA, 19 nt, Artificial Sequence
  Description of Artificial Sequence: Synthetic oligonucleotide
  Antisense strand to SEQ ID NO: 1745845
ucucaaagcacaguaauuc

SEQ ID NO: 1745847 - RNA, 19 nt, Artificial Sequence
  Description of Artificial Sequence: Synthetic oligonucleotide
  Sense strand starting at position 1142 of SEQ ID NO: 1562424
auuacugugcuuugagaua

SEQ ID NO: 1745848 - RNA, 19 nt, Artificial Sequence
  Description of Artificial Sequence: Synthetic oligonucleotide
  Antisense strand to SEQ ID NO: 1745847
uaucucaaagcacaguaau

SEQ ID NO: 1745849 - RNA, 19 nt, Artificial Sequence
  Description of Artificial Sequence: Synthetic oligonucleotide
  Sense strand starting at position 1361 of SEQ ID NO: 1562424
uuagaauggugcccaaauu

SEQ ID NO: 1745850 - RNA, 19 nt, Artificial Sequence
  Description of Artificial Sequence: Synthetic oligonucleotide
  Antisense strand to SEQ ID NO: 1745849
aauuugggcaccauucuaa

SEQ ID NO: 1745851 - RNA, 19 nt, Artificial Sequence
  Description of Artificial Sequence: Synthetic oligonucleotide
  Sense strand starting at position 1465 of SEQ ID NO: 1562424
agacaaacagcuugauuga

SEQ ID NO: 1745852 - RNA, 19 nt, Artificial Sequence
  Description of Artificial Sequence: Synthetic oligonucleotide
  Antisense strand to SEQ ID NO: 1745851
ucaaucaagcuguuugucu

SEQ ID NO: 1745853 - RNA, 19 nt, Artificial Sequence
  Description of Artificial Sequence: Synthetic oligonucleotide
  Sense strand starting at position 1468 of SEQ ID NO: 1562424
caaacagcuugauugaagu

SEQ ID NO: 1745854 - RNA, 19 nt, Artificial Sequence
  Description of Artificial Sequence: Synthetic oligonucleotide
  Antisense strand to SEQ ID NO: 1745853
acuucaaucaagcuguuug

SEQ ID NO: 1745855 - RNA, 19 nt, Artificial Sequence
  Description of Artificial Sequence: Synthetic oligonucleotide
  Sense strand starting at position 1588 of SEQ ID NO: 1562424
aacagaugucagugacuaa

SEQ ID NO: 1745856 - RNA, 19 nt, Artificial Sequence
  Description of Artificial Sequence: Synthetic oligonucleotide
  Antisense strand to SEQ ID NO: 1745855
uuagucacugacaucuguu

SEQ ID NO: 1745857 - RNA, 19 nt, Artificial Sequence
  Description of Artificial Sequence: Synthetic oligonucleotide
  Sense strand starting at position 1591 of SEQ ID NO: 1562424
agaugucagugacuaaaua

SEQ ID NO: 1745858 - RNA, 19 nt, Artificial Sequence
  Description of Artificial Sequence: Synthetic oligonucleotide
  Antisense strand to SEQ ID NO: 1745857
uauuuagucacugacaucu

SEQ ID NO: 1745859 - RNA, 19 nt, Artificial Sequence
  Description of Artificial Sequence: Synthetic oligonucleotide
  Sense strand starting at position 1753 of SEQ ID NO: 1562424
gggcaagaucuuggaguua

SEQ ID NO: 1745860 - RNA, 19 nt, Artificial Sequence
  Description of Artificial Sequence: Synthetic oligonucleotide
  Antisense strand to SEQ ID NO: 1745859
uaacuccaagaucuugccc

SEQ ID NO: 1745861 - RNA, 19 nt, Artificial Sequence
  Description of Artificial Sequence: Synthetic oligonucleotide
  Sense strand starting at position 1765 of SEQ ID NO: 1562424
ggaguuagaguaugagaau

SEQ ID NO: 1745862 - RNA, 19 nt, Artificial Sequence
  Description of Artificial Sequence: Synthetic oligonucleotide
  Antisense strand to SEQ ID NO: 1745861
auucucauacucuaacucc

SEQ ID NO: 1745863 - RNA, 19 nt, Artificial Sequence
  Description of Artificial Sequence: Synthetic oligonucleotide
  Sense strand starting at position 1774 of SEQ ID NO: 1562424
guaugagaaucagcaaguu

SEQ ID NO: 1745864 - RNA, 19 nt, Artificial Sequence
  Description of Artificial Sequence: Synthetic oligonucleotide
  Antisense strand to SEQ ID NO: 1745863
aacuugcugauucucauac

SEQ ID NO: 1745865 - RNA, 19 nt, Artificial Sequence
  Description of Artificial Sequence: Synthetic oligonucleotide
  Sense strand starting at position 2004 of SEQ ID NO: 1562424
aaugaugaguuuccugagu

SEQ ID NO: 1745866 - RNA, 19 nt, Artificial Sequence
  Description of Artificial Sequence: Synthetic oligonucleotide
  Antisense strand to SEQ ID NO: 1745865
acucaggaaacucaucauu

SEQ ID NO: 1745867 - RNA, 19 nt, Artificial Sequence
  Description of Artificial Sequence: Synthetic oligonucleotide
  Sense strand starting at position 2084 of SEQ ID NO: 1562424
aaugacaggugaucuuauu

SEQ ID NO: 1745868 - RNA, 19 nt, Artificial Sequence
  Description of Artificial Sequence: Synthetic oligonucleotide
  Antisense strand to SEQ ID NO: 1745867
aauaagaucaccugucauu

SEQ ID NO: 1745869 - RNA, 19 nt, Artificial Sequence
  Description of Artificial Sequence: Synthetic oligonucleotide
  Sense strand starting at position 2311 of SEQ ID NO: 1562424
ccaguaacgcuguaauuac

SEQ ID NO: 1745870 - RNA, 19 nt, Artificial Sequence
  Description of Artificial Sequence: Synthetic oligonucleotide
  Antisense strand to SEQ ID NO: 1745869
guaauuacagcguuacugg

SEQ ID NO: 1745871 - RNA, 19 nt, Artificial Sequence
  Description of Artificial Sequence: Synthetic oligonucleotide
  Sense strand starting at position 2428 of SEQ ID NO: 1562424
gucacaaagucauuaguga

SEQ ID NO: 1745872 - RNA, 19 nt, Artificial Sequence
  Description of Artificial Sequence: Synthetic oligonucleotide
  Antisense strand to SEQ ID NO: 1745871
ucacuaaugacuuugugac

SEQ ID NO: 1745873 - RNA, 19 nt, Artificial Sequence
  Description of Artificial Sequence: Synthetic oligonucleotide
  Sense strand starting at position 2429 of SEQ ID NO: 1562424
ucacaaagucauuagugau

SEQ ID NO: 1745874 - RNA, 19 nt, Artificial Sequence
  Description of Artificial Sequence: Synthetic oligonucleotide
  Antisense strand to SEQ ID NO: 1745873
aucacuaaugacuuuguga

SEQ ID NO: 1745875 - RNA, 19 nt, Artificial Sequence
  Description of Artificial Sequence: Synthetic oligonucleotide
  Sense strand starting at position 2454 of SEQ ID NO: 1562424
uagucaaauuuagaggaaa

SEQ ID NO: 1745876 - RNA, 19 nt, Artificial Sequence
  Description of Artificial Sequence: Synthetic oligonucleotide
  Antisense strand to SEQ ID NO: 1745875
uuuccucuaaauuugacua

SEQ ID NO: 1745877 - RNA, 19 nt, Artificial Sequence
  Description of Artificial Sequence: Synthetic oligonucleotide
  Sense strand starting at position 2556 of SEQ ID NO: 1562424
ugccuuaauuucuaugaga

SEQ ID NO: 1745878 - RNA, 19 nt, Artificial Sequence
  Description of Artificial Sequence: Synthetic oligonucleotide
  Antisense strand to SEQ ID NO: 1745877
ucucauagaaauuaaggca

SEQ ID NO: 1745879 - RNA, 19 nt, Artificial Sequence
  Description of Artificial Sequence: Synthetic oligonucleotide
  Sense strand starting at position 2795 of SEQ ID NO: 1562424
gcauacuaaucacugguua

SEQ ID NO: 1745880 - RNA, 19 nt, Artificial Sequence
  Description of Artificial Sequence: Synthetic oligonucleotide
  Antisense strand to SEQ ID NO: 1745879
uaaccagugauuaguaugc

SEQ ID NO: 1745881 - RNA, 19 nt, Artificial Sequence
  Description of Artificial Sequence: Synthetic oligonucleotide
  Sense strand starting at position 2817 of SEQ ID NO: 1562424
gaguaauaaucacugguaa

SEQ ID NO: 1745882 - RNA, 19 nt, Artificial Sequence
  Description of Artificial Sequence: Synthetic oligonucleotide
  Antisense strand to SEQ ID NO: 1745881
uuaccagugauuauuacuc

SEQ ID NO: 1745883 - RNA, 19 nt, Artificial Sequence
  Description of Artificial Sequence: Synthetic oligonucleotide
  Sense strand starting at position 2818 of SEQ ID NO: 1562424
aguaauaaucacugguaaa

SEQ ID NO: 1745884 - RNA, 19 nt, Artificial Sequence
  Description of Artificial Sequence: Synthetic oligonucleotide
  Antisense strand to SEQ ID NO: 1745883
uuuaccagugauuauuacu

SEQ ID NO: 1745885 - RNA, 19 nt, Artificial Sequence
  Description of Artificial Sequence: Synthetic oligonucleotide
  Sense strand starting at position 3526 of SEQ ID NO: 1562424
acuagagauuagguuugau

SEQ ID NO: 1745886 - RNA, 19 nt, Artificial Sequence
  Description of Artificial Sequence: Synthetic oligonucleotide
  Antisense strand to SEQ ID NO: 1745885
aucaaaccuaaucucuagu

SEQ ID NO: 1745887 - RNA, 19 nt, Artificial Sequence
  Description of Artificial Sequence: Synthetic oligonucleotide
  Sense strand starting at position 3529 of SEQ ID NO: 1562424
agagauuagguuugaugcu

SEQ ID NO: 1745888 - RNA, 19 nt, Artificial Sequence
  Description of Artificial Sequence: Synthetic oligonucleotide
  Antisense strand to SEQ ID NO: 1745887
agcaucaaaccuaaucucu

SEQ ID NO: 1745889 - RNA, 19 nt, Artificial Sequence
  Description of Artificial Sequence: Synthetic oligonucleotide
  Sense strand starting at position 3541 of SEQ ID NO: 1562424
ugaugcuaaagaugaguuu

SEQ ID NO: 1745890 - RNA, 19 nt, Artificial Sequence
  Description of Artificial Sequence: Synthetic oligonucleotide
  Antisense strand to SEQ ID NO: 1745889
aaacucaucuuuagcauca

SEQ ID NO: 1745891 - RNA, 19 nt, Artificial Sequence
  Description of Artificial Sequence: Synthetic oligonucleotide
  Sense strand starting at position 3570 of SEQ ID NO: 1562424
gugggauuucugugucaua

SEQ ID NO: 1745892 - RNA, 19 nt, Artificial Sequence
  Description of Artificial Sequence: Synthetic oligonucleotide
  Antisense strand to SEQ ID NO: 1745891
uaugacacagaaaucccac

SEQ ID NO: 1745893 - RNA, 19 nt, Artificial Sequence
  Description of Artificial Sequence: Synthetic oligonucleotide
  Sense strand starting at position 3663 of SEQ ID NO: 1562424
acuaauagcgaaugaggau

SEQ ID NO: 1745894 - RNA, 19 nt, Artificial Sequence
  Description of Artificial Sequence: Synthetic oligonucleotide
  Antisense strand to SEQ ID NO: 1745893
auccucauucgcuauuagu

SEQ ID NO: 1745895 - RNA, 19 nt, Artificial Sequence
  Description of Artificial Sequence: Synthetic oligonucleotide
  Sense strand starting at position 3741 of SEQ ID NO: 1562424
uccguacagauuuguuuga

SEQ ID NO: 1745896 - RNA, 19 nt, Artificial Sequence
  Description of Artificial Sequence: Synthetic oligonucleotide
  Antisense strand to SEQ ID NO: 1745895
ucaaacaaaucuguacgga

SEQ ID NO: 1745897 - RNA, 19 nt, Artificial Sequence
  Description of Artificial Sequence: Synthetic oligonucleotide
  Sense strand starting at position 3931 of SEQ ID NO: 1562424
guggaaucuuacucaagga

SEQ ID NO: 1745898 - RNA, 19 nt, Artificial Sequence
  Description of Artificial Sequence: Synthetic oligonucleotide
  Antisense strand to SEQ ID NO: 1745897
uccuugaguaagauuccac

SEQ ID NO: 1745899 - RNA, 19 nt, Artificial Sequence
  Description of Artificial Sequence: Synthetic oligonucleotide
  Sense strand starting at position 32 of SEQ ID NO: 1562425
ugccuauacccucauuguu

SEQ ID NO: 1745900 - RNA, 19 nt, Artificial Sequence
  Description of Artificial Sequence: Synthetic oligonucleotide
  Antisense strand to SEQ ID NO: 1745899
aacaaugaggguauaggca

SEQ ID NO: 1745901 - RNA, 19 nt, Artificial Sequence
  Description of Artificial Sequence: Synthetic oligonucleotide
  Sense strand starting at position 41 of SEQ ID NO: 1562425
ccucauuguuucuuggaag

SEQ ID NO: 1745902 - RNA, 19 nt, Artificial Sequence
  Description of Artificial Sequence: Synthetic oligonucleotide
  Antisense strand to SEQ ID NO: 1745901
cuuccaagaaacaaugagg

SEQ ID NO: 1745903 - RNA, 19 nt, Artificial Sequence
  Description of Artificial Sequence: Synthetic oligonucleotide
  Sense strand starting at position 101 of SEQ ID NO: 1562425
agacuagccuugucucaaa

SEQ ID NO: 1745904 - RNA, 19 nt, Artificial Sequence
  Description of Artificial Sequence: Synthetic oligonucleotide
  Antisense strand to SEQ ID NO: 1745903
uuugagacaaggcuagucu

SEQ ID NO: 1745905 - RNA, 19 nt, Artificial Sequence
  Description of Artificial Sequence: Synthetic oligonucleotide
  Sense strand starting at position 374 of SEQ ID NO: 1562425
cgccuuggugcugucauga

SEQ ID NO: 1745906 - RNA, 19 nt, Artificial Sequence
  Description of Artificial Sequence: Synthetic oligonucleotide
  Antisense strand to SEQ ID NO: 1745905
ucaugacagcaccaaggcg

SEQ ID NO: 1745907 - RNA, 19 nt, Artificial Sequence
  Description of Artificial Sequence: Synthetic oligonucleotide
  Sense strand starting at position 384 of SEQ ID NO: 1562425
cugucaugacagugaguga

SEQ ID NO: 1745908 - RNA, 19 nt, Artificial Sequence
  Description of Artificial Sequence: Synthetic oligonucleotide
  Antisense strand to SEQ ID NO: 1745907
ucacucacugucaugacag

SEQ ID NO: 1745909 - RNA, 19 nt, Artificial Sequence
  Description of Artificial Sequence: Synthetic oligonucleotide
  Sense strand starting at position 563 of SEQ ID NO: 1562425
guagauggccugcaucauu

SEQ ID NO: 1745910 - RNA, 19 nt, Artificial Sequence
  Description of Artificial Sequence: Synthetic oligonucleotide
  Antisense strand to SEQ ID NO: 1745909
aaugaugcaggccaucuac

SEQ ID NO: 1745911 - RNA, 19 nt, Artificial Sequence
  Description of Artificial Sequence: Synthetic oligonucleotide
  Sense strand starting at position 926 of SEQ ID NO: 1562425
auaaauuggcccgagcuuu

SEQ ID NO: 1745912 - RNA, 19 nt, Artificial Sequence
  Description of Artificial Sequence: Synthetic oligonucleotide
  Antisense strand to SEQ ID NO: 1745911
aaagcucgggccaauuuau

SEQ ID NO: 1745913 - RNA, 19 nt, Artificial Sequence
  Description of Artificial Sequence: Synthetic oligonucleotide
  Sense strand starting at position 1091 of SEQ ID NO: 1562425
guuauaaucuaugugcaag

SEQ ID NO: 1745914 - RNA, 19 nt, Artificial Sequence
  Description of Artificial Sequence: Synthetic oligonucleotide
  Antisense strand to SEQ ID NO: 1745913
cuugcacauagauuauaac

SEQ ID NO: 1745915 - RNA, 19 nt, Artificial Sequence
  Description of Artificial Sequence: Synthetic oligonucleotide
  Sense strand starting at position 1094 of SEQ ID NO: 1562425
auaaucuaugugcaagcua

SEQ ID NO: 1745916 - RNA, 19 nt, Artificial Sequence
  Description of Artificial Sequence: Synthetic oligonucleotide
  Antisense strand to SEQ ID NO: 1745915
uagcuugcacauagauuau

SEQ ID NO: 1745917 - RNA, 19 nt, Artificial Sequence
  Description of Artificial Sequence: Synthetic oligonucleotide
  Sense strand starting at position 1233 of SEQ ID NO: 1562425
ccuguuugccuggacaaga

SEQ ID NO: 1745918 - RNA, 19 nt, Artificial Sequence
  Description of Artificial Sequence: Synthetic oligonucleotide
  Antisense strand to SEQ ID NO: 1745917
ucuuguccaggcaaacagg

SEQ ID NO: 1745919 - RNA, 19 nt, Artificial Sequence
  Description of Artificial Sequence: Synthetic oligonucleotide
  Sense strand starting at position 1399 of SEQ ID NO: 1562425
ugaagaaauaaucgugaca

SEQ ID NO: 1745920 - RNA, 19 nt, Artificial Sequence
  Description of Artificial Sequence: Synthetic oligonucleotide
  Antisense strand to SEQ ID NO: 1745919
ugucacgauuauuucuuca

SEQ ID NO: 1745921 - RNA, 19 nt, Artificial Sequence
  Description of Artificial Sequence: Synthetic oligonucleotide
  Sense strand starting at position 1413 of SEQ ID NO: 1562425
ugacauauaacguauuggu

SEQ ID NO: 1745922 - RNA, 19 nt, Artificial Sequence
  Description of Artificial Sequence: Synthetic oligonucleotide
  Antisense strand to SEQ ID NO: 1745921
accaauacguuauauguca

SEQ ID NO: 1745923 - RNA, 19 nt, Artificial Sequence
  Description of Artificial Sequence: Synthetic oligonucleotide
  Sense strand starting at position 1456 of SEQ ID NO: 1562425
auaucaccaugguugauua

SEQ ID NO: 1745924 - RNA, 19 nt, Artificial Sequence
  Description of Artificial Sequence: Synthetic oligonucleotide
  Antisense strand to SEQ ID NO: 1745923
uaaucaaccauggugauau

SEQ ID NO: 1745925 - RNA, 19 nt, Artificial Sequence
  Description of Artificial Sequence: Synthetic oligonucleotide
  Sense strand starting at position 1574 of SEQ ID NO: 1562425
agacaaucuuucuuagagu

SEQ ID NO: 1745926 - RNA, 19 nt, Artificial Sequence
  Description of Artificial Sequence: Synthetic oligonucleotide
  Antisense strand to SEQ ID NO: 1745925
acucuaagaaagauugucu

SEQ ID NO: 1745927 - RNA, 19 nt, Artificial Sequence
  Description of Artificial Sequence: Synthetic oligonucleotide
  Sense strand starting at position 1580 of SEQ ID NO: 1562425
ucuuucuuagaguauaaug

SEQ ID NO: 1745928 - RNA, 19 nt, Artificial Sequence
  Description of Artificial Sequence: Synthetic oligonucleotide
  Antisense strand to SEQ ID NO: 1745927
cauuauacucuaagaaaga

SEQ ID NO: 1745929 - RNA, 19 nt, Artificial Sequence
  Description of Artificial Sequence: Synthetic oligonucleotide
  Sense strand starting at position 1650 of SEQ ID NO: 1562425
gccaauaucuaguugauca

SEQ ID NO: 1745930 - RNA, 19 nt, Artificial Sequence
  Description of Artificial Sequence: Synthetic oligonucleotide
  Antisense strand to SEQ ID NO: 1745929
ugaucaacuagauauuggc

SEQ ID NO: 1745931 - RNA, 19 nt, Artificial Sequence
  Description of Artificial Sequence: Synthetic oligonucleotide
  Sense strand starting at position 1654 of SEQ ID NO: 1562425
auaucuaguugaucaaguu

SEQ ID NO: 1745932 - RNA, 19 nt, Artificial Sequence
  Description of Artificial Sequence: Synthetic oligonucleotide
  Antisense strand to SEQ ID NO: 1745931
aacuugaucaacuagauau

SEQ ID NO: 1745933 - RNA, 19 nt, Artificial Sequence
  Description of Artificial Sequence: Synthetic oligonucleotide
  Sense strand starting at position 1718 of SEQ ID NO: 1562425
uguuauggaauauggaauu

SEQ ID NO: 1745934 - RNA, 19 nt, Artificial Sequence
  Description of Artificial Sequence: Synthetic oligonucleotide
  Antisense strand to SEQ ID NO: 1745933
aauuccauauuccauaaca

SEQ ID NO: 1745935 - RNA, 19 nt, Artificial Sequence
  Description of Artificial Sequence: Synthetic oligonucleotide
  Sense strand starting at position 1733 of SEQ ID NO: 1562425
aauuccauaugguuaugga

SEQ ID NO: 1745936 - RNA, 19 nt, Artificial Sequence
  Description of Artificial Sequence: Synthetic oligonucleotide
  Antisense strand to SEQ ID NO: 1745935
uccauaaccauauggaauu

SEQ ID NO: 1745937 - RNA, 19 nt, Artificial Sequence
  Description of Artificial Sequence: Synthetic oligonucleotide
  Sense strand starting at position 1964 of SEQ ID NO: 1562425
agccuaggccuccauagua

SEQ ID NO: 1745938 - RNA, 19 nt, Artificial Sequence
  Description of Artificial Sequence: Synthetic oligonucleotide
  Antisense strand to SEQ ID NO: 1745937
uacuauggaggccuaggcu

SEQ ID NO: 1745939 - RNA, 19 nt, Artificial Sequence
  Description of Artificial Sequence: Synthetic oligonucleotide
  Sense strand starting at position 2070 of SEQ ID NO: 1562425
cucugaugcauguggaaag

SEQ ID NO: 1745940 - RNA, 19 nt, Artificial Sequence
  Description of Artificial Sequence: Synthetic oligonucleotide
  Antisense strand to SEQ ID NO: 1745939
cuuuccacaugcaucagag

SEQ ID NO: 1745941 - RNA, 19 nt, Artificial Sequence
  Description of Artificial Sequence: Synthetic oligonucleotide
  Sense strand starting at position 2112 of SEQ ID NO: 1562425
uagaacguguuaccugaaa

SEQ ID NO: 1745942 - RNA, 19 nt, Artificial Sequence
  Description of Artificial Sequence: Synthetic oligonucleotide
  Antisense strand to SEQ ID NO: 1745941
uuucagguaacacguucua

SEQ ID NO: 1745943 - RNA, 19 nt, Artificial Sequence
  Description of Artificial Sequence: Synthetic oligonucleotide
  Sense strand starting at position 2443 of SEQ ID NO: 1562425
ggauguuaucuuuauucug

SEQ ID NO: 1745944 - RNA, 19 nt, Artificial Sequence
  Description of Artificial Sequence: Synthetic oligonucleotide
  Antisense strand to SEQ ID NO: 1745943
cagaauaaagauaacaucc

SEQ ID NO: 1745945 - RNA, 19 nt, Artificial Sequence
  Description of Artificial Sequence: Synthetic oligonucleotide
  Sense strand starting at position 2486 of SEQ ID NO: 1562425
auuauuguucucugaaaug

SEQ ID NO: 1745946 - RNA, 19 nt, Artificial Sequence
  Description of Artificial Sequence: Synthetic oligonucleotide
  Antisense strand to SEQ ID NO: 1745945
cauuucagagaacaauaau

SEQ ID NO: 1745947 - RNA, 19 nt, Artificial Sequence
  Description of Artificial Sequence: Synthetic oligonucleotide
  Sense strand starting at position 2504 of SEQ ID NO: 1562425
ggcaaucaacuaugaugua

SEQ ID NO: 1745948 - RNA, 19 nt, Artificial Sequence
  Description of Artificial Sequence: Synthetic oligonucleotide
  Antisense strand to SEQ ID NO: 1745947
uacaucauaguugauugcc

SEQ ID NO: 1745949 - RNA, 19 nt, Artificial Sequence
  Description of Artificial Sequence: Synthetic oligonucleotide
  Sense strand starting at position 2516 of SEQ ID NO: 1562425
ugauguaugucuuuauaca

SEQ ID NO: 1745950 - RNA, 19 nt, Artificial Sequence
  Description of Artificial Sequence: Synthetic oligonucleotide
  Antisense strand to SEQ ID NO: 1745949
uguauaaagacauacauca

SEQ ID NO: 1745951 - RNA, 19 nt, Artificial Sequence
  Description of Artificial Sequence: Synthetic oligonucleotide
  Sense strand starting at position 2566 of SEQ ID NO: 1562425
uuuauaguggaaugaugau

SEQ ID NO: 1745952 - RNA, 19 nt, Artificial Sequence
  Description of Artificial Sequence: Synthetic oligonucleotide
  Antisense strand to SEQ ID NO: 1745951
aucaucauuccacuauaaa

SEQ ID NO: 1745953 - RNA, 19 nt, Artificial Sequence
  Description of Artificial Sequence: Synthetic oligonucleotide
  Sense strand starting at position 2572 of SEQ ID NO: 1562425
guggaaugaugauauuuaa

SEQ ID NO: 1745954 - RNA, 19 nt, Artificial Sequence
  Description of Artificial Sequence: Synthetic oligonucleotide
  Antisense strand to SEQ ID NO: 1745953
uuaaauaucaucauuccac

SEQ ID NO: 1745955 - RNA, 19 nt, Artificial Sequence
  Description of Artificial Sequence: Synthetic oligonucleotide
  Sense strand starting at position 2671 of SEQ ID NO: 1562425
accauuaaagugugcauaa

SEQ ID NO: 1745956 - RNA, 19 nt, Artificial Sequence
  Description of Artificial Sequence: Synthetic oligonucleotide
  Antisense strand to SEQ ID NO: 1745955
uuaugcacacuuuaauggu

SEQ ID NO: 1745957 - RNA, 19 nt, Artificial Sequence
  Description of Artificial Sequence: Synthetic oligonucleotide
  Sense strand starting at position 2672 of SEQ ID NO: 1562425
ccauuaaagugugcauaaa

SEQ ID NO: 1745958 - RNA, 19 nt, Artificial Sequence
  Description of Artificial Sequence: Synthetic oligonucleotide
  Antisense strand to SEQ ID NO: 1745957
uuuaugcacacuuuaaugg

SEQ ID NO: 1745959 - RNA, 19 nt, Artificial Sequence
  Description of Artificial Sequence: Synthetic oligonucleotide
  Sense strand starting at position 2673 of SEQ ID NO: 1562425
cauuaaagugugcauaaag

SEQ ID NO: 1745960 - RNA, 19 nt, Artificial Sequence
  Description of Artificial Sequence: Synthetic oligonucleotide
  Antisense strand to SEQ ID NO: 1745959
cuuuaugcacacuuuaaug

SEQ ID NO: 1745961 - RNA, 19 nt, Artificial Sequence
  Description of Artificial Sequence: Synthetic oligonucleotide
  Sense strand starting at position 2821 of SEQ ID NO: 1562425
guucuuguuacugaugaga

SEQ ID NO: 1745962 - RNA, 19 nt, Artificial Sequence
  Description of Artificial Sequence: Synthetic oligonucleotide
  Antisense strand to SEQ ID NO: 1745961
ucucaucaguaacaagaac

SEQ ID NO: 1745963 - RNA, 19 nt, Artificial Sequence
  Description of Artificial Sequence: Synthetic oligonucleotide
  Sense strand starting at position 2863 of SEQ ID NO: 1562425
agaguuacgcaacagugaa

SEQ ID NO: 1745964 - RNA, 19 nt, Artificial Sequence
  Description of Artificial Sequence: Synthetic oligonucleotide
  Antisense strand to SEQ ID NO: 1745963
uucacuguugcguaacucu

SEQ ID NO: 1745965 - RNA, 19 nt, Artificial Sequence
  Description of Artificial Sequence: Synthetic oligonucleotide
  Sense strand starting at position 2877 of SEQ ID NO: 1562425
gugaaacuuaguggcagau

SEQ ID NO: 1745966 - RNA, 19 nt, Artificial Sequence
  Description of Artificial Sequence: Synthetic oligonucleotide
  Antisense strand to SEQ ID NO: 1745965
aucugccacuaaguuucac

SEQ ID NO: 1745967 - RNA, 19 nt, Artificial Sequence
  Description of Artificial Sequence: Synthetic oligonucleotide
  Sense strand starting at position 2971 of SEQ ID NO: 1562425
ggguauaucuucucccaca

SEQ ID NO: 1745968 - RNA, 19 nt, Artificial Sequence
  Description of Artificial Sequence: Synthetic oligonucleotide
  Antisense strand to SEQ ID NO: 1745967
ugugggagaagauauaccc

SEQ ID NO: 1745969 - RNA, 19 nt, Artificial Sequence
  Description of Artificial Sequence: Synthetic oligonucleotide
  Sense strand starting at position 3324 of SEQ ID NO: 1562425
auguguucucauugauuaa

SEQ ID NO: 1745970 - RNA, 19 nt, Artificial Sequence
  Description of Artificial Sequence: Synthetic oligonucleotide
  Antisense strand to SEQ ID NO: 1745969
uuaaucaaugagaacacau

SEQ ID NO: 1745971 - RNA, 19 nt, Artificial Sequence
  Description of Artificial Sequence: Synthetic oligonucleotide
  Sense strand starting at position 3614 of SEQ ID NO: 1562425
auauuuccauccugaggga

SEQ ID NO: 1745972 - RNA, 19 nt, Artificial Sequence
  Description of Artificial Sequence: Synthetic oligonucleotide
  Antisense strand to SEQ ID NO: 1745971
ucccucaggauggaaauau

SEQ ID NO: 1745973 - RNA, 19 nt, Artificial Sequence
  Description of Artificial Sequence: Synthetic oligonucleotide
  Sense strand starting at position 3666 of SEQ ID NO: 1562425
augguaaagaauugcugua

SEQ ID NO: 1745974 - RNA, 19 nt, Artificial Sequence
  Description of Artificial Sequence: Synthetic oligonucleotide
  Antisense strand to SEQ ID NO: 1745973
uacagcaauucuuuaccau

SEQ ID NO: 1745975 - RNA, 19 nt, Artificial Sequence
  Description of Artificial Sequence: Synthetic oligonucleotide
  Sense strand starting at position 3668 of SEQ ID NO: 1562425
gguaaagaauugcuguauu

SEQ ID NO: 1745976 - RNA, 19 nt, Artificial Sequence
  Description of Artificial Sequence: Synthetic oligonucleotide
  Antisense strand to SEQ ID NO: 1745975
aauacagcaauucuuuacc

SEQ ID NO: 1745977 - RNA, 19 nt, Artificial Sequence
  Description of Artificial Sequence: Synthetic oligonucleotide
  Sense strand starting at position 3866 of SEQ ID NO: 1562425
aggguccucugcuuuauuu

SEQ ID NO: 1745978 - RNA, 19 nt, Artificial Sequence
  Description of Artificial Sequence: Synthetic oligonucleotide
  Antisense strand to SEQ ID NO: 1745977
aaauaaagcagaggacccu

SEQ ID NO: 1745979 - RNA, 19 nt, Artificial Sequence
  Description of Artificial Sequence: Synthetic oligonucleotide
  Sense strand starting at position 153 of SEQ ID NO: 1562426
ugaauuaucugcuccuaga

SEQ ID NO: 1745980 - RNA, 19 nt, Artificial Sequence
  Description of Artificial Sequence: Synthetic oligonucleotide
  Antisense strand to SEQ ID NO: 1745979
ucuaggagcagauaauuca

SEQ ID NO: 1745981 - RNA, 19 nt, Artificial Sequence
  Description of Artificial Sequence: Synthetic oligonucleotide
  Sense strand starting at position 553 of SEQ ID NO: 1562426
guaauauuccauuguaaga

SEQ ID NO: 1745982 - RNA, 19 nt, Artificial Sequence
  Description of Artificial Sequence: Synthetic oligonucleotide
  Antisense strand to SEQ ID NO: 1745981
ucuuacaauggaauauuac

SEQ ID NO: 1745983 - RNA, 19 nt, Artificial Sequence
  Description of Artificial Sequence: Synthetic oligonucleotide
  Sense strand starting at position 742 of SEQ ID NO: 1562426
ccuguaaggguguacauau

SEQ ID NO: 1745984 - RNA, 19 nt, Artificial Sequence
  Description of Artificial Sequence: Synthetic oligonucleotide
  Antisense strand to SEQ ID NO: 1745983
auauguacacccuuacagg

SEQ ID NO: 1745985 - RNA, 19 nt, Artificial Sequence
  Description of Artificial Sequence: Synthetic oligonucleotide
  Sense strand starting at position 854 of SEQ ID NO: 1562426
guguguauaagaggaaaug

SEQ ID NO: 1745986 - RNA, 19 nt, Artificial Sequence
  Description of Artificial Sequence: Synthetic oligonucleotide
  Antisense strand to SEQ ID NO: 1745985
cauuuccucuuauacacac

SEQ ID NO: 1745987 - RNA, 19 nt, Artificial Sequence
  Description of Artificial Sequence: Synthetic oligonucleotide
  Sense strand starting at position 1022 of SEQ ID NO: 1562426
agguauugucaugaccaca

SEQ ID NO: 1745988 - RNA, 19 nt, Artificial Sequence
  Description of Artificial Sequence: Synthetic oligonucleotide
  Antisense strand to SEQ ID NO: 1745987
uguggucaugacaauaccu

SEQ ID NO: 1745989 - RNA, 19 nt, Artificial Sequence
  Description of Artificial Sequence: Synthetic oligonucleotide
  Sense strand starting at position 1092 of SEQ ID NO: 1562426
gguucugugaaaugaauca

SEQ ID NO: 1745990 - RNA, 19 nt, Artificial Sequence
  Description of Artificial Sequence: Synthetic oligonucleotide
  Antisense strand to SEQ ID NO: 1745989
ugauucauuucacagaacc

SEQ ID NO: 1745991 - RNA, 19 nt, Artificial Sequence
  Description of Artificial Sequence: Synthetic oligonucleotide
  Sense strand starting at position 1162 of SEQ ID NO: 1562426
ccgauuccacuuuacauga

SEQ ID NO: 1745992 - RNA, 19 nt, Artificial Sequence
  Description of Artificial Sequence: Synthetic oligonucleotide
  Antisense strand to SEQ ID NO: 1745991
ucauguaaaguggaaucgg

SEQ ID NO: 1745993 - RNA, 19 nt, Artificial Sequence
  Description of Artificial Sequence: Synthetic oligonucleotide
  Sense strand starting at position 1267 of SEQ ID NO: 1562426
gacaaagaggcaugaaguu

SEQ ID NO: 1745994 - RNA, 19 nt, Artificial Sequence
  Description of Artificial Sequence: Synthetic oligonucleotide
  Antisense strand to SEQ ID NO: 1745993
aacuucaugccucuuuguc

SEQ ID NO: 1745995 - RNA, 19 nt, Artificial Sequence
  Description of Artificial Sequence: Synthetic oligonucleotide
  Sense strand starting at position 1274 of SEQ ID NO: 1562426
aggcaugaaguuuaaguca

SEQ ID NO: 1745996 - RNA, 19 nt, Artificial Sequence
  Description of Artificial Sequence: Synthetic oligonucleotide
  Antisense strand to SEQ ID NO: 1745995
ugacuuaaacuucaugccu

SEQ ID NO: 1745997 - RNA, 19 nt, Artificial Sequence
  Description of Artificial Sequence: Synthetic oligonucleotide
  Sense strand starting at position 1279 of SEQ ID NO: 1562426
ugaaguuuaagucaggcaa

SEQ ID NO: 1745998 - RNA, 19 nt, Artificial Sequence
  Description of Artificial Sequence: Synthetic oligonucleotide
  Antisense strand to SEQ ID NO: 1745997
uugccugacuuaaacuuca

SEQ ID NO: 1745999 - RNA, 19 nt, Artificial Sequence
  Description of Artificial Sequence: Synthetic oligonucleotide
  Sense strand starting at position 1317 of SEQ ID NO: 1562426
ucagcuauacaguauggua

SEQ ID NO: 1746000 - RNA, 19 nt, Artificial Sequence
  Description of Artificial Sequence: Synthetic oligonucleotide
  Antisense strand to SEQ ID NO: 1745999
uaccauacuguauagcuga

SEQ ID NO: 1746001 - RNA, 19 nt, Artificial Sequence
  Description of Artificial Sequence: Synthetic oligonucleotide
  Sense strand starting at position 1335 of SEQ ID NO: 1562426
accuguagucgacaauaau

SEQ ID NO: 1746002 - RNA, 19 nt, Artificial Sequence
  Description of Artificial Sequence: Synthetic oligonucleotide
  Antisense strand to SEQ ID NO: 1746001
auuauugucgacuacaggu

SEQ ID NO: 1746003 - RNA, 19 nt, Artificial Sequence
  Description of Artificial Sequence: Synthetic oligonucleotide
  Sense strand starting at position 1338 of SEQ ID NO: 1562426
uguagucgacaauaaugua

SEQ ID NO: 1746004 - RNA, 19 nt, Artificial Sequence
  Description of Artificial Sequence: Synthetic oligonucleotide
  Antisense strand to SEQ ID NO: 1746003
uacauuauugucgacuaca

SEQ ID NO: 1746005 - RNA, 19 nt, Artificial Sequence
  Description of Artificial Sequence: Synthetic oligonucleotide
  Sense strand starting at position 1343 of SEQ ID NO: 1562426
ucgacaauaauguaugguu

SEQ ID NO: 1746006 - RNA, 19 nt, Artificial Sequence
  Description of Artificial Sequence: Synthetic oligonucleotide
  Antisense strand to SEQ ID NO: 1746005
aaccauacauuauugucga

SEQ ID NO: 1746007 - RNA, 19 nt, Artificial Sequence
  Description of Artificial Sequence: Synthetic oligonucleotide
  Sense strand starting at position 1345 of SEQ ID NO: 1562426
gacaauaauguaugguuga

SEQ ID NO: 1746008 - RNA, 19 nt, Artificial Sequence
  Description of Artificial Sequence: Synthetic oligonucleotide
  Antisense strand to SEQ ID NO: 1746007
ucaaccauacauuauuguc

SEQ ID NO: 1746009 - RNA, 19 nt, Artificial Sequence
  Description of Artificial Sequence: Synthetic oligonucleotide
  Sense strand starting at position 1350 of SEQ ID NO: 1562426
uaauguaugguugacucaa

SEQ ID NO: 1746010 - RNA, 19 nt, Artificial Sequence
  Description of Artificial Sequence: Synthetic oligonucleotide
  Antisense strand to SEQ ID NO: 1746009
uugagucaaccauacauua

SEQ ID NO: 1746011 - RNA, 19 nt, Artificial Sequence
  Description of Artificial Sequence: Synthetic oligonucleotide
  Sense strand starting at position 1371 of SEQ ID NO: 1562426
aguuguuaggaggguagau

SEQ ID NO: 1746012 - RNA, 19 nt, Artificial Sequence
  Description of Artificial Sequence: Synthetic oligonucleotide
  Antisense strand to SEQ ID NO: 1746011
aucuacccuccuaacaacu

SEQ ID NO: 1746013 - RNA, 19 nt, Artificial Sequence
  Description of Artificial Sequence: Synthetic oligonucleotide
  Sense strand starting at position 1528 of SEQ ID NO: 1562426
cagcuugaaaggugggauu

SEQ ID NO: 1746014 - RNA, 19 nt, Artificial Sequence
  Description of Artificial Sequence: Synthetic oligonucleotide
  Antisense strand to SEQ ID NO: 1746013
aaucccaccuuucaagcug

SEQ ID NO: 1746015 - RNA, 19 nt, Artificial Sequence
  Description of Artificial Sequence: Synthetic oligonucleotide
  Sense strand starting at position 1616 of SEQ ID NO: 1562426
gagucuugacuuugaagag

SEQ ID NO: 1746016 - RNA, 19 nt, Artificial Sequence
  Description of Artificial Sequence: Synthetic oligonucleotide
  Antisense strand to SEQ ID NO: 1746015
cucuucaaagucaagacuc

SEQ ID NO: 1746017 - RNA, 19 nt, Artificial Sequence
  Description of Artificial Sequence: Synthetic oligonucleotide
  Sense strand starting at position 1656 of SEQ ID NO: 1562426
cuuugucugguuuaucaag

SEQ ID NO: 1746018 - RNA, 19 nt, Artificial Sequence
  Description of Artificial Sequence: Synthetic oligonucleotide
  Antisense strand to SEQ ID NO: 1746017
cuugauaaaccagacaaag

SEQ ID NO: 1746019 - RNA, 19 nt, Artificial Sequence
  Description of Artificial Sequence: Synthetic oligonucleotide
  Sense strand starting at position 1743 of SEQ ID NO: 1562426
agauucuagugauccaaag

SEQ ID NO: 1746020 - RNA, 19 nt, Artificial Sequence
  Description of Artificial Sequence: Synthetic oligonucleotide
  Antisense strand to SEQ ID NO: 1746019
cuuuggaucacuagaaucu

SEQ ID NO: 1746021 - RNA, 19 nt, Artificial Sequence
  Description of Artificial Sequence: Synthetic oligonucleotide
  Sense strand starting at position 1931 of SEQ ID NO: 1562426
agcccaggccuccauaaua

SEQ ID NO: 1746022 - RNA, 19 nt, Artificial Sequence
  Description of Artificial Sequence: Synthetic oligonucleotide
  Antisense strand to SEQ ID NO: 1746021
uauuauggaggccugggcu

SEQ ID NO: 1746023 - RNA, 19 nt, Artificial Sequence
  Description of Artificial Sequence: Synthetic oligonucleotide
  Sense strand starting at position 2007 of SEQ ID NO: 1562426
guuuccugaguacaacuau

SEQ ID NO: 1746024 - RNA, 19 nt, Artificial Sequence
  Description of Artificial Sequence: Synthetic oligonucleotide
  Antisense strand to SEQ ID NO: 1746023
auaguuguacucaggaaac

SEQ ID NO: 1746025 - RNA, 19 nt, Artificial Sequence
  Description of Artificial Sequence: Synthetic oligonucleotide
  Sense strand starting at position 2045 of SEQ ID NO: 1562426
uuuauacauccucagugau

SEQ ID NO: 1746026 - RNA, 19 nt, Artificial Sequence
  Description of Artificial Sequence: Synthetic oligonucleotide
  Antisense strand to SEQ ID NO: 1746025
aucacugaggauguauaaa

SEQ ID NO: 1746027 - RNA, 19 nt, Artificial Sequence
  Description of Artificial Sequence: Synthetic oligonucleotide
  Sense strand starting at position 2048 of SEQ ID NO: 1562426
auacauccucagugauuag

SEQ ID NO: 1746028 - RNA, 19 nt, Artificial Sequence
  Description of Artificial Sequence: Synthetic oligonucleotide
  Antisense strand to SEQ ID NO: 1746027
cuaaucacugaggauguau

SEQ ID NO: 1746029 - RNA, 19 nt, Artificial Sequence
  Description of Artificial Sequence: Synthetic oligonucleotide
  Sense strand starting at position 2241 of SEQ ID NO: 1562426
guuaaagcucuauaaucag

SEQ ID NO: 1746030 - RNA, 19 nt, Artificial Sequence
  Description of Artificial Sequence: Synthetic oligonucleotide
  Antisense strand to SEQ ID NO: 1746029
cugauuauagagcuuuaac

SEQ ID NO: 1746031 - RNA, 19 nt, Artificial Sequence
  Description of Artificial Sequence: Synthetic oligonucleotide
  Sense strand starting at position 2393 of SEQ ID NO: 1562426
ugcucagagcuagagauau

SEQ ID NO: 1746032 - RNA, 19 nt, Artificial Sequence
  Description of Artificial Sequence: Synthetic oligonucleotide
  Antisense strand to SEQ ID NO: 1746031
auaucucuagcucugagca

SEQ ID NO: 1746033 - RNA, 19 nt, Artificial Sequence
  Description of Artificial Sequence: Synthetic oligonucleotide
  Sense strand starting at position 2403 of SEQ ID NO: 1562426
uagagauauggcuguaaau

SEQ ID NO: 1746034 - RNA, 19 nt, Artificial Sequence
  Description of Artificial Sequence: Synthetic oligonucleotide
  Antisense strand to SEQ ID NO: 1746033
auuuacagccauaucucua

SEQ ID NO: 1746035 - RNA, 19 nt, Artificial Sequence
  Description of Artificial Sequence: Synthetic oligonucleotide
  Sense strand starting at position 2494 of SEQ ID NO: 1562426
gagguacacuuacuguaua

SEQ ID NO: 1746036 - RNA, 19 nt, Artificial Sequence
  Description of Artificial Sequence: Synthetic oligonucleotide
  Antisense strand to SEQ ID NO: 1746035
uauacaguaaguguaccuc

SEQ ID NO: 1746037 - RNA, 19 nt, Artificial Sequence
  Description of Artificial Sequence: Synthetic oligonucleotide
  Sense strand starting at position 2497 of SEQ ID NO: 1562426
guacacuuacuguauaaau

SEQ ID NO: 1746038 - RNA, 19 nt, Artificial Sequence
  Description of Artificial Sequence: Synthetic oligonucleotide
  Antisense strand to SEQ ID NO: 1746037
auuuauacaguaaguguac

SEQ ID NO: 1746039 - RNA, 19 nt, Artificial Sequence
  Description of Artificial Sequence: Synthetic oligonucleotide
  Sense strand starting at position 2624 of SEQ ID NO: 1562426
acucaauguuguuuaugaa

SEQ ID NO: 1746040 - RNA, 19 nt, Artificial Sequence
  Description of Artificial Sequence: Synthetic oligonucleotide
  Antisense strand to SEQ ID NO: 1746039
uucauaaacaacauugagu

SEQ ID NO: 1746041 - RNA, 19 nt, Artificial Sequence
  Description of Artificial Sequence: Synthetic oligonucleotide
  Sense strand starting at position 2625 of SEQ ID NO: 1562426
cucaauguuguuuaugaaa

SEQ ID NO: 1746042 - RNA, 19 nt, Artificial Sequence
  Description of Artificial Sequence: Synthetic oligonucleotide
  Antisense strand to SEQ ID NO: 1746041
uuucauaaacaacauugag

SEQ ID NO: 1746043 - RNA, 19 nt, Artificial Sequence
  Description of Artificial Sequence: Synthetic oligonucleotide
  Sense strand starting at position 2941 of SEQ ID NO: 1562426
ucuucugcucucuaaggaa

SEQ ID NO: 1746044 - RNA, 19 nt, Artificial Sequence
  Description of Artificial Sequence: Synthetic oligonucleotide
  Antisense strand to SEQ ID NO: 1746043
uuccuuagagagcagaaga

SEQ ID NO: 1746045 - RNA, 19 nt, Artificial Sequence
  Description of Artificial Sequence: Synthetic oligonucleotide
  Sense strand starting at position 3234 of SEQ ID NO: 1562426
cagaucacccagugaguga

SEQ ID NO: 1746046 - RNA, 19 nt, Artificial Sequence
  Description of Artificial Sequence: Synthetic oligonucleotide
  Antisense strand to SEQ ID NO: 1746045
ucacucacugggugaucug

SEQ ID NO: 1746047 - RNA, 19 nt, Artificial Sequence
  Description of Artificial Sequence: Synthetic oligonucleotide
  Sense strand starting at position 3426 of SEQ ID NO: 1562426
gaucuauaugcugauuggu

SEQ ID NO: 1746048 - RNA, 19 nt, Artificial Sequence
  Description of Artificial Sequence: Synthetic oligonucleotide
  Antisense strand to SEQ ID NO: 1746047
accaaucagcauauagauc

SEQ ID NO: 1746049 - RNA, 19 nt, Artificial Sequence
  Description of Artificial Sequence: Synthetic oligonucleotide
  Sense strand starting at position 3487 of SEQ ID NO: 1562426
gcaaguggacacugaaagu

SEQ ID NO: 1746050 - RNA, 19 nt, Artificial Sequence
  Description of Artificial Sequence: Synthetic oligonucleotide
  Antisense strand to SEQ ID NO: 1746049
acuuucaguguccacuugc

SEQ ID NO: 1746051 - RNA, 19 nt, Artificial Sequence
  Description of Artificial Sequence: Synthetic oligonucleotide
  Sense strand starting at position 3728 of SEQ ID NO: 1562426
gaaccuguaucaucaguga

SEQ ID NO: 1746052 - RNA, 19 nt, Artificial Sequence
  Description of Artificial Sequence: Synthetic oligonucleotide
  Antisense strand to SEQ ID NO: 1746051
ucacugaugauacagguuc

SEQ ID NO: 1746053 - RNA, 19 nt, Artificial Sequence
  Description of Artificial Sequence: Synthetic oligonucleotide
  Sense strand starting at position 3731 of SEQ ID NO: 1562426
ccuguaucaucagugacaa

SEQ ID NO: 1746054 - RNA, 19 nt, Artificial Sequence
  Description of Artificial Sequence: Synthetic oligonucleotide
  Antisense strand to SEQ ID NO: 1746053
uugucacugaugauacagg

SEQ ID NO: 1746055 - RNA, 19 nt, Artificial Sequence
  Description of Artificial Sequence: Synthetic oligonucleotide
  Sense strand starting at position 3773 of SEQ ID NO: 1562426
gugguaaucuaccuaagaa

SEQ ID NO: 1746056 - RNA, 19 nt, Artificial Sequence
  Description of Artificial Sequence: Synthetic oligonucleotide
  Antisense strand to SEQ ID NO: 1746055
uucuuagguagauuaccac

SEQ ID NO: 1746057 - RNA, 19 nt, Artificial Sequence
  Description of Artificial Sequence: Synthetic oligonucleotide
  Sense strand starting at position 3829 of SEQ ID NO: 1562426
gucugcaacuaauugaaau

SEQ ID NO: 1746058 - RNA, 19 nt, Artificial Sequence
  Description of Artificial Sequence: Synthetic oligonucleotide
  Antisense strand to SEQ ID NO: 1746057
auuucaauuaguugcagac

SEQ ID NO: 1746059 - RNA, 19 nt, Artificial Sequence
  Description of Artificial Sequence: Synthetic oligonucleotide
  Sense strand starting at position 226 of SEQ ID NO: 1562427
ggucaaucucuuuaauguc

SEQ ID NO: 1746060 - RNA, 19 nt, Artificial Sequence
  Description of Artificial Sequence: Synthetic oligonucleotide
  Antisense strand to SEQ ID NO: 1746059
gacauuaaagagauugacc

SEQ ID NO: 1746061 - RNA, 19 nt, Artificial Sequence
  Description of Artificial Sequence: Synthetic oligonucleotide
  Sense strand starting at position 238 of SEQ ID NO: 1562427
uaaugucucgcuuaaugga

SEQ ID NO: 1746062 - RNA, 19 nt, Artificial Sequence
  Description of Artificial Sequence: Synthetic oligonucleotide
  Antisense strand to SEQ ID NO: 1746061
uccauuaagcgagacauua

SEQ ID NO: 1746063 - RNA, 19 nt, Artificial Sequence
  Description of Artificial Sequence: Synthetic oligonucleotide
  Sense strand starting at position 246 of SEQ ID NO: 1562427
cgcuuaauggaagacaguu

SEQ ID NO: 1746064 - RNA, 19 nt, Artificial Sequence
  Description of Artificial Sequence: Synthetic oligonucleotide
  Antisense strand to SEQ ID NO: 1746063
aacugucuuccauuaagcg

SEQ ID NO: 1746065 - RNA, 19 nt, Artificial Sequence
  Description of Artificial Sequence: Synthetic oligonucleotide
  Sense strand starting at position 254 of SEQ ID NO: 1562427
ggaagacaguuucucauau

SEQ ID NO: 1746066 - RNA, 19 nt, Artificial Sequence
  Description of Artificial Sequence: Synthetic oligonucleotide
  Antisense strand to SEQ ID NO: 1746065
auaugagaaacugucuucc

SEQ ID NO: 1746067 - RNA, 19 nt, Artificial Sequence
  Description of Artificial Sequence: Synthetic oligonucleotide
  Sense strand starting at position 301 of SEQ ID NO: 1562427
acaugcauauaucuggaaa

SEQ ID NO: 1746068 - RNA, 19 nt, Artificial Sequence
  Description of Artificial Sequence: Synthetic oligonucleotide
  Antisense strand to SEQ ID NO: 1746067
uuuccagauauaugcaugu

SEQ ID NO: 1746069 - RNA, 19 nt, Artificial Sequence
  Description of Artificial Sequence: Synthetic oligonucleotide
  Sense strand starting at position 383 of SEQ ID NO: 1562427
ugcccuuaucgagaccuca

SEQ ID NO: 1746070 - RNA, 19 nt, Artificial Sequence
  Description of Artificial Sequence: Synthetic oligonucleotide
  Antisense strand to SEQ ID NO: 1746069
ugaggucucgauaagggca

SEQ ID NO: 1746071 - RNA, 19 nt, Artificial Sequence
  Description of Artificial Sequence: Synthetic oligonucleotide
  Sense strand starting at position 823 of SEQ ID NO: 1562427
ccuuaaugucaauaguuua

SEQ ID NO: 1746072 - RNA, 19 nt, Artificial Sequence
  Description of Artificial Sequence: Synthetic oligonucleotide
  Antisense strand to SEQ ID NO: 1746071
uaaacuauugacauuaagg

SEQ ID NO: 1746073 - RNA, 19 nt, Artificial Sequence
  Description of Artificial Sequence: Synthetic oligonucleotide
  Sense strand starting at position 1056 of SEQ ID NO: 1562427
gcaugccuagaauacuuua

SEQ ID NO: 1746074 - RNA, 19 nt, Artificial Sequence
  Description of Artificial Sequence: Synthetic oligonucleotide
  Antisense strand to SEQ ID NO: 1746073
uaaaguauucuaggcaugc

SEQ ID NO: 1746075 - RNA, 19 nt, Artificial Sequence
  Description of Artificial Sequence: Synthetic oligonucleotide
  Sense strand starting at position 1059 of SEQ ID NO: 1562427
ugccuagaauacuuuagga

SEQ ID NO: 1746076 - RNA, 19 nt, Artificial Sequence
  Description of Artificial Sequence: Synthetic oligonucleotide
  Antisense strand to SEQ ID NO: 1746075
uccuaaaguauucuaggca

SEQ ID NO: 1746077 - RNA, 19 nt, Artificial Sequence
  Description of Artificial Sequence: Synthetic oligonucleotide
  Sense strand starting at position 1081 of SEQ ID NO: 1562427
guugcaugaaugcaaugaa

SEQ ID NO: 1746078 - RNA, 19 nt, Artificial Sequence
  Description of Artificial Sequence: Synthetic oligonucleotide
  Antisense strand to SEQ ID NO: 1746077
uucauugcauucaugcaac

SEQ ID NO: 1746079 - RNA, 19 nt, Artificial Sequence
  Description of Artificial Sequence: Synthetic oligonucleotide
  Sense strand starting at position 1084 of SEQ ID NO: 1562427
gcaugaaugcaaugaaaua

SEQ ID NO: 1746080 - RNA, 19 nt, Artificial Sequence
  Description of Artificial Sequence: Synthetic oligonucleotide
  Antisense strand to SEQ ID NO: 1746079
uauuucauugcauucaugc

SEQ ID NO: 1746081 - RNA, 19 nt, Artificial Sequence
  Description of Artificial Sequence: Synthetic oligonucleotide
  Sense strand starting at position 1187 of SEQ ID NO: 1562427
uccuguauacaggaucuau

SEQ ID NO: 1746082 - RNA, 19 nt, Artificial Sequence
  Description of Artificial Sequence: Synthetic oligonucleotide
  Antisense strand to SEQ ID NO: 1746081
auagauccuguauacagga

SEQ ID NO: 1746083 - RNA, 19 nt, Artificial Sequence
  Description of Artificial Sequence: Synthetic oligonucleotide
  Sense strand starting at position 1311 of SEQ ID NO: 1562427
cuaugugcucuggagaaac

SEQ ID NO: 1746084 - RNA, 19 nt, Artificial Sequence
  Description of Artificial Sequence: Synthetic oligonucleotide
  Antisense strand to SEQ ID NO: 1746083
guuucuccagagcacauag

SEQ ID NO: 1746085 - RNA, 19 nt, Artificial Sequence
  Description of Artificial Sequence: Synthetic oligonucleotide
  Sense strand starting at position 1510 of SEQ ID NO: 1562427
uugggauaguaauuaucca

SEQ ID NO: 1746086 - RNA, 19 nt, Artificial Sequence
  Description of Artificial Sequence: Synthetic oligonucleotide
  Antisense strand to SEQ ID NO: 1746085
uggauaauuacuaucccaa

SEQ ID NO: 1746087 - RNA, 19 nt, Artificial Sequence
  Description of Artificial Sequence: Synthetic oligonucleotide
  Sense strand starting at position 1517 of SEQ ID NO: 1562427
aguaauuauccacagguuu

SEQ ID NO: 1746088 - RNA, 19 nt, Artificial Sequence
  Description of Artificial Sequence: Synthetic oligonucleotide
  Antisense strand to SEQ ID NO: 1746087
aaaccuguggauaauuacu

SEQ ID NO: 1746089 - RNA, 19 nt, Artificial Sequence
  Description of Artificial Sequence: Synthetic oligonucleotide
  Sense strand starting at position 1715 of SEQ ID NO: 1562427
uugauaauagccuaguuua

SEQ ID NO: 1746090 - RNA, 19 nt, Artificial Sequence
  Description of Artificial Sequence: Synthetic oligonucleotide
  Antisense strand to SEQ ID NO: 1746089
uaaacuaggcuauuaucaa

SEQ ID NO: 1746091 - RNA, 19 nt, Artificial Sequence
  Description of Artificial Sequence: Synthetic oligonucleotide
  Sense strand starting at position 1769 of SEQ ID NO: 1562427
acaagagcagcaugagaau

SEQ ID NO: 1746092 - RNA, 19 nt, Artificial Sequence
  Description of Artificial Sequence: Synthetic oligonucleotide
  Antisense strand to SEQ ID NO: 1746091
auucucaugcugcucuugu

SEQ ID NO: 1746093 - RNA, 19 nt, Artificial Sequence
  Description of Artificial Sequence: Synthetic oligonucleotide
  Sense strand starting at position 1810 of SEQ ID NO: 1562427
ucuggugagcucuagaauu

SEQ ID NO: 1746094 - RNA, 19 nt, Artificial Sequence
  Description of Artificial Sequence: Synthetic oligonucleotide
  Antisense strand to SEQ ID NO: 1746093
aauucuagagcucaccaga

SEQ ID NO: 1746095 - RNA, 19 nt, Artificial Sequence
  Description of Artificial Sequence: Synthetic oligonucleotide
  Sense strand starting at position 1812 of SEQ ID NO: 1562427
uggugagcucuagaauugu

SEQ ID NO: 1746096 - RNA, 19 nt, Artificial Sequence
  Description of Artificial Sequence: Synthetic oligonucleotide
  Antisense strand to SEQ ID NO: 1746095
acaauucuagagcucacca

SEQ ID NO: 1746097 - RNA, 19 nt, Artificial Sequence
  Description of Artificial Sequence: Synthetic oligonucleotide
  Sense strand starting at position 2003 of SEQ ID NO: 1562427
gugucagaaauggaugguu

SEQ ID NO: 1746098 - RNA, 19 nt, Artificial Sequence
  Description of Artificial Sequence: Synthetic oligonucleotide
  Antisense strand to SEQ ID NO: 1746097
aaccauccauuucugacac

SEQ ID NO: 1746099 - RNA, 19 nt, Artificial Sequence
  Description of Artificial Sequence: Synthetic oligonucleotide
  Sense strand starting at position 2005 of SEQ ID NO: 1562427
gucagaaauggaugguuca

SEQ ID NO: 1746100 - RNA, 19 nt, Artificial Sequence
  Description of Artificial Sequence: Synthetic oligonucleotide
  Antisense strand to SEQ ID NO: 1746099
ugaaccauccauuucugac

SEQ ID NO: 1746101 - RNA, 19 nt, Artificial Sequence
  Description of Artificial Sequence: Synthetic oligonucleotide
  Sense strand starting at position 2016 of SEQ ID NO: 1562427
augguucagguguagaaga

SEQ ID NO: 1746102 - RNA, 19 nt, Artificial Sequence
  Description of Artificial Sequence: Synthetic oligonucleotide
  Antisense strand to SEQ ID NO: 1746101
ucuucuacaccugaaccau

SEQ ID NO: 1746103 - RNA, 19 nt, Artificial Sequence
  Description of Artificial Sequence: Synthetic oligonucleotide
  Sense strand starting at position 2075 of SEQ ID NO: 1562427
uuuauacuuccucaguagu

SEQ ID NO: 1746104 - RNA, 19 nt, Artificial Sequence
  Description of Artificial Sequence: Synthetic oligonucleotide
  Antisense strand to SEQ ID NO: 1746103
acuacugaggaaguauaaa

SEQ ID NO: 1746105 - RNA, 19 nt, Artificial Sequence
  Description of Artificial Sequence: Synthetic oligonucleotide
  Sense strand starting at position 2217 of SEQ ID NO: 1562427
cuaggauuccucuaguguu

SEQ ID NO: 1746106 - RNA, 19 nt, Artificial Sequence
  Description of Artificial Sequence: Synthetic oligonucleotide
  Antisense strand to SEQ ID NO: 1746105
aacacuagaggaauccuag

SEQ ID NO: 1746107 - RNA, 19 nt, Artificial Sequence
  Description of Artificial Sequence: Synthetic oligonucleotide
  Sense strand starting at position 2253 of SEQ ID NO: 1562427
aucaaagaaugugauuuga

SEQ ID NO: 1746108 - RNA, 19 nt, Artificial Sequence
  Description of Artificial Sequence: Synthetic oligonucleotide
  Antisense strand to SEQ ID NO: 1746107
ucaaaucacauucuuugau

SEQ ID NO: 1746109 - RNA, 19 nt, Artificial Sequence
  Description of Artificial Sequence: Synthetic oligonucleotide
  Sense strand starting at position 2462 of SEQ ID NO: 1562427
gggagacagaugugccuaa

SEQ ID NO: 1746110 - RNA, 19 nt, Artificial Sequence
  Description of Artificial Sequence: Synthetic oligonucleotide
  Antisense strand to SEQ ID NO: 1746109
uuaggcacaucugucuccc

SEQ ID NO: 1746111 - RNA, 19 nt, Artificial Sequence
  Description of Artificial Sequence: Synthetic oligonucleotide
  Sense strand starting at position 2486 of SEQ ID NO: 1562427
aagucuuucgaguaugaga

SEQ ID NO: 1746112 - RNA, 19 nt, Artificial Sequence
  Description of Artificial Sequence: Synthetic oligonucleotide
  Antisense strand to SEQ ID NO: 1746111
ucucauacucgaaagacuu

SEQ ID NO: 1746113 - RNA, 19 nt, Artificial Sequence
  Description of Artificial Sequence: Synthetic oligonucleotide
  Sense strand starting at position 2497 of SEQ ID NO: 1562427
guaugagaucuguaauauu

SEQ ID NO: 1746114 - RNA, 19 nt, Artificial Sequence
  Description of Artificial Sequence: Synthetic oligonucleotide
  Antisense strand to SEQ ID NO: 1746113
aauauuacagaucucauac

SEQ ID NO: 1746115 - RNA, 19 nt, Artificial Sequence
  Description of Artificial Sequence: Synthetic oligonucleotide
  Sense strand starting at position 2723 of SEQ ID NO: 1562427
ucugguugucaguauuaaa

SEQ ID NO: 1746116 - RNA, 19 nt, Artificial Sequence
  Description of Artificial Sequence: Synthetic oligonucleotide
  Antisense strand to SEQ ID NO: 1746115
uuuaauacugacaaccaga

SEQ ID NO: 1746117 - RNA, 19 nt, Artificial Sequence
  Description of Artificial Sequence: Synthetic oligonucleotide
  Sense strand starting at position 2781 of SEQ ID NO: 1562427
gccugaggugugcuucgau

SEQ ID NO: 1746118 - RNA, 19 nt, Artificial Sequence
  Description of Artificial Sequence: Synthetic oligonucleotide
  Antisense strand to SEQ ID NO: 1746117
aucgaagcacaccucaggc

SEQ ID NO: 1746119 - RNA, 19 nt, Artificial Sequence
  Description of Artificial Sequence: Synthetic oligonucleotide
  Sense strand starting at position 2850 of SEQ ID NO: 1562427
gacaccuuuggauggcaua

SEQ ID NO: 1746120 - RNA, 19 nt, Artificial Sequence
  Description of Artificial Sequence: Synthetic oligonucleotide
  Antisense strand to SEQ ID NO: 1746119
uaugccauccaaagguguc

SEQ ID NO: 1746121 - RNA, 19 nt, Artificial Sequence
  Description of Artificial Sequence: Synthetic oligonucleotide
  Sense strand starting at position 2973 of SEQ ID NO: 1562427
gguuguaguaaggaaauca

SEQ ID NO: 1746122 - RNA, 19 nt, Artificial Sequence
  Description of Artificial Sequence: Synthetic oligonucleotide
  Antisense strand to SEQ ID NO: 1746121
ugauuuccuuacuacaacc

SEQ ID NO: 1746123 - RNA, 19 nt, Artificial Sequence
  Description of Artificial Sequence: Synthetic oligonucleotide
  Sense strand starting at position 3239 of SEQ ID NO: 1562427
ugaagcuucuauccagaaa

SEQ ID NO: 1746124 - RNA, 19 nt, Artificial Sequence
  Description of Artificial Sequence: Synthetic oligonucleotide
  Antisense strand to SEQ ID NO: 1746123
uuucuggauagaagcuuca

SEQ ID NO: 1746125 - RNA, 19 nt, Artificial Sequence
  Description of Artificial Sequence: Synthetic oligonucleotide
  Sense strand starting at position 3440 of SEQ ID NO: 1562427
aguuaacaguggucagaca

SEQ ID NO: 1746126 - RNA, 19 nt, Artificial Sequence
  Description of Artificial Sequence: Synthetic oligonucleotide
  Antisense strand to SEQ ID NO: 1746125
ugucugaccacuguuaacu

SEQ ID NO: 1746127 - RNA, 19 nt, Artificial Sequence
  Description of Artificial Sequence: Synthetic oligonucleotide
  Sense strand starting at position 3449 of SEQ ID NO: 1562427
uggucagacagcuauggau

SEQ ID NO: 1746128 - RNA, 19 nt, Artificial Sequence
  Description of Artificial Sequence: Synthetic oligonucleotide
  Antisense strand to SEQ ID NO: 1746127
auccauagcugucugacca

SEQ ID NO: 1746129 - RNA, 19 nt, Artificial Sequence
  Description of Artificial Sequence: Synthetic oligonucleotide
  Sense strand starting at position 3675 of SEQ ID NO: 1562427
aaagacuucuuguuugaug

SEQ ID NO: 1746130 - RNA, 19 nt, Artificial Sequence
  Description of Artificial Sequence: Synthetic oligonucleotide
  Antisense strand to SEQ ID NO: 1746129
caucaaacaagaagucuuu

SEQ ID NO: 1746131 - RNA, 19 nt, Artificial Sequence
  Description of Artificial Sequence: Synthetic oligonucleotide
  Sense strand starting at position 3684 of SEQ ID NO: 1562427
uuguuugaugguggaaaua

SEQ ID NO: 1746132 - RNA, 19 nt, Artificial Sequence
  Description of Artificial Sequence: Synthetic oligonucleotide
  Antisense strand to SEQ ID NO: 1746131
uauuuccaccaucaaacaa

SEQ ID NO: 1746133 - RNA, 19 nt, Artificial Sequence
  Description of Artificial Sequence: Synthetic oligonucleotide
  Sense strand starting at position 3696 of SEQ ID NO: 1562427
ggaaauauaguagguugca

SEQ ID NO: 1746134 - RNA, 19 nt, Artificial Sequence
  Description of Artificial Sequence: Synthetic oligonucleotide
  Antisense strand to SEQ ID NO: 1746133
ugcaaccuacuauauuucc

SEQ ID NO: 1746135 - RNA, 19 nt, Artificial Sequence
  Description of Artificial Sequence: Synthetic oligonucleotide
  Sense strand starting at position 3697 of SEQ ID NO: 1562427
gaaauauaguagguugcau

SEQ ID NO: 1746136 - RNA, 19 nt, Artificial Sequence
  Description of Artificial Sequence: Synthetic oligonucleotide
  Antisense strand to SEQ ID NO: 1746135
augcaaccuacuauauuuc

SEQ ID NO: 1746137 - RNA, 19 nt, Artificial Sequence
  Description of Artificial Sequence: Synthetic oligonucleotide
  Sense strand starting at position 3949 of SEQ ID NO: 1562427
uuucucaugccugguauuu

SEQ ID NO: 1746138 - RNA, 19 nt, Artificial Sequence
  Description of Artificial Sequence: Synthetic oligonucleotide
  Antisense strand to SEQ ID NO: 1746137
aaauaccaggcaugagaaa

SEQ ID NO: 1746139 - RNA, 19 nt, Artificial Sequence
  Description of Artificial Sequence: Synthetic oligonucleotide
  Sense strand starting at position 11 of SEQ ID NO: 1562428
gcaugcugaauuugaguua

SEQ ID NO: 1746140 - RNA, 19 nt, Artificial Sequence
  Description of Artificial Sequence: Synthetic oligonucleotide
  Antisense strand to SEQ ID NO: 1746139
uaacucaaauucagcaugc

SEQ ID NO: 1746141 - RNA, 19 nt, Artificial Sequence
  Description of Artificial Sequence: Synthetic oligonucleotide
  Sense strand starting at position 41 of SEQ ID NO: 1562428
aguaguuagagaugaaauu

SEQ ID NO: 1746142 - RNA, 19 nt, Artificial Sequence
  Description of Artificial Sequence: Synthetic oligonucleotide
  Antisense strand to SEQ ID NO: 1746141
aauuucaucucuaacuacu

SEQ ID NO: 1746143 - RNA, 19 nt, Artificial Sequence
  Description of Artificial Sequence: Synthetic oligonucleotide
  Sense strand starting at position 59 of SEQ ID NO: 1562428
uaguauuuccgaugugggu

SEQ ID NO: 1746144 - RNA, 19 nt, Artificial Sequence
  Description of Artificial Sequence: Synthetic oligonucleotide
  Antisense strand to SEQ ID NO: 1746143
acccacaucggaaauacua

SEQ ID NO: 1746145 - RNA, 19 nt, Artificial Sequence
  Description of Artificial Sequence: Synthetic oligonucleotide
  Sense strand starting at position 61 of SEQ ID NO: 1562428
guauuuccgauguggguau

SEQ ID NO: 1746146 - RNA, 19 nt, Artificial Sequence
  Description of Artificial Sequence: Synthetic oligonucleotide
  Antisense strand to SEQ ID NO: 1746145
auacccacaucggaaauac

SEQ ID NO: 1746147 - RNA, 19 nt, Artificial Sequence
  Description of Artificial Sequence: Synthetic oligonucleotide
  Sense strand starting at position 65 of SEQ ID NO: 1562428
uuccgauguggguauggaa

SEQ ID NO: 1746148 - RNA, 19 nt, Artificial Sequence
  Description of Artificial Sequence: Synthetic oligonucleotide
  Antisense strand to SEQ ID NO: 1746147
uuccauacccacaucggaa

SEQ ID NO: 1746149 - RNA, 19 nt, Artificial Sequence
  Description of Artificial Sequence: Synthetic oligonucleotide
  Sense strand starting at position 119 of SEQ ID NO: 1562428
gguugaguugcucaagaga

SEQ ID NO: 1746150 - RNA, 19 nt, Artificial Sequence
  Description of Artificial Sequence: Synthetic oligonucleotide
  Antisense strand to SEQ ID NO: 1746149
ucucuugagcaacucaacc

SEQ ID NO: 1746151 - RNA, 19 nt, Artificial Sequence
  Description of Artificial Sequence: Synthetic oligonucleotide
  Sense strand starting at position 141 of SEQ ID NO: 1562428
ccugauagagucuguauga

SEQ ID NO: 1746152 - RNA, 19 nt, Artificial Sequence
  Description of Artificial Sequence: Synthetic oligonucleotide
  Antisense strand to SEQ ID NO: 1746151
ucauacagacucuaucagg

SEQ ID NO: 1746153 - RNA, 19 nt, Artificial Sequence
  Description of Artificial Sequence: Synthetic oligonucleotide
  Sense strand starting at position 142 of SEQ ID NO: 1562428
cugauagagucuguaugac

SEQ ID NO: 1746154 - RNA, 19 nt, Artificial Sequence
  Description of Artificial Sequence: Synthetic oligonucleotide
  Antisense strand to SEQ ID NO: 1746153
gucauacagacucuaucag

SEQ ID NO: 1746155 - RNA, 19 nt, Artificial Sequence
  Description of Artificial Sequence: Synthetic oligonucleotide
  Sense strand starting at position 148 of SEQ ID NO: 1562428
gagucuguaugaccagaau

SEQ ID NO: 1746156 - RNA, 19 nt, Artificial Sequence
  Description of Artificial Sequence: Synthetic oligonucleotide
  Antisense strand to SEQ ID NO: 1746155
auucuggucauacagacuc

SEQ ID NO: 1746157 - RNA, 19 nt, Artificial Sequence
  Description of Artificial Sequence: Synthetic oligonucleotide
  Sense strand starting at position 233 of SEQ ID NO: 1562428
uggugucagaaauggaaag

SEQ ID NO: 1746158 - RNA, 19 nt, Artificial Sequence
  Description of Artificial Sequence: Synthetic oligonucleotide
  Antisense strand to SEQ ID NO: 1746157
cuuuccauuucugacacca

SEQ ID NO: 1746159 - RNA, 19 nt, Artificial Sequence
  Description of Artificial Sequence: Synthetic oligonucleotide
  Sense strand starting at position 235 of SEQ ID NO: 1562428
gugucagaaauggaaaguu

SEQ ID NO: 1746160 - RNA, 19 nt, Artificial Sequence
  Description of Artificial Sequence: Synthetic oligonucleotide
  Antisense strand to SEQ ID NO: 1746159
aacuuuccauuucugacac

SEQ ID NO: 1746161 - RNA, 19 nt, Artificial Sequence
  Description of Artificial Sequence: Synthetic oligonucleotide
  Sense strand starting at position 545 of SEQ ID NO: 1562428
agugaccauuaucuacaua

SEQ ID NO: 1746162 - RNA, 19 nt, Artificial Sequence
  Description of Artificial Sequence: Synthetic oligonucleotide
  Antisense strand to SEQ ID NO: 1746161
uauguagauaauggucacu

SEQ ID NO: 1746163 - RNA, 19 nt, Artificial Sequence
  Description of Artificial Sequence: Synthetic oligonucleotide
  Sense strand starting at position 913 of SEQ ID NO: 1562428
gauaaugugucccuauagg

SEQ ID NO: 1746164 - RNA, 19 nt, Artificial Sequence
  Description of Artificial Sequence: Synthetic oligonucleotide
  Antisense strand to SEQ ID NO: 1746163
ccuauagggacacauuauc

SEQ ID NO: 1746165 - RNA, 19 nt, Artificial Sequence
  Description of Artificial Sequence: Synthetic oligonucleotide
  Sense strand starting at position 950 of SEQ ID NO: 1562428
caucaugugcuauaagaug

SEQ ID NO: 1746166 - RNA, 19 nt, Artificial Sequence
  Description of Artificial Sequence: Synthetic oligonucleotide
  Antisense strand to SEQ ID NO: 1746165
caucuuauagcacaugaug

SEQ ID NO: 1746167 - RNA, 19 nt, Artificial Sequence
  Description of Artificial Sequence: Synthetic oligonucleotide
  Sense strand starting at position 1327 of SEQ ID NO: 1562428
cagaaauaugcaugaaguu

SEQ ID NO: 1746168 - RNA, 19 nt, Artificial Sequence
  Description of Artificial Sequence: Synthetic oligonucleotide
  Antisense strand to SEQ ID NO: 1746167
aacuucaugcauauuucug

SEQ ID NO: 1746169 - RNA, 19 nt, Artificial Sequence
  Description of Artificial Sequence: Synthetic oligonucleotide
  Sense strand starting at position 1343 of SEQ ID NO: 1562428
guuggacuagccuaaacau

SEQ ID NO: 1746170 - RNA, 19 nt, Artificial Sequence
  Description of Artificial Sequence: Synthetic oligonucleotide
  Antisense strand to SEQ ID NO: 1746169
auguuuaggcuaguccaac

SEQ ID NO: 1746171 - RNA, 19 nt, Artificial Sequence
  Description of Artificial Sequence: Synthetic oligonucleotide
  Sense strand starting at position 1375 of SEQ ID NO: 1562428
ggaugcuccgaagaauugu

SEQ ID NO: 1746172 - RNA, 19 nt, Artificial Sequence
  Description of Artificial Sequence: Synthetic oligonucleotide
  Antisense strand to SEQ ID NO: 1746171
acaauucuucggagcaucc

SEQ ID NO: 1746173 - RNA, 19 nt, Artificial Sequence
  Description of Artificial Sequence: Synthetic oligonucleotide
  Sense strand starting at position 1653 of SEQ ID NO: 1562428
ugcagcaucugaccuauuu

SEQ ID NO: 1746174 - RNA, 19 nt, Artificial Sequence
  Description of Artificial Sequence: Synthetic oligonucleotide
  Antisense strand to SEQ ID NO: 1746173
aaauaggucagaugcugca

SEQ ID NO: 1746175 - RNA, 19 nt, Artificial Sequence
  Description of Artificial Sequence: Synthetic oligonucleotide
  Sense strand starting at position 1681 of SEQ ID NO: 1562428
gauacuuaaggaugauguu

SEQ ID NO: 1746176 - RNA, 19 nt, Artificial Sequence
  Description of Artificial Sequence: Synthetic oligonucleotide
  Antisense strand to SEQ ID NO: 1746175
aacaucauccuuaaguauc

SEQ ID NO: 1746177 - RNA, 19 nt, Artificial Sequence
  Description of Artificial Sequence: Synthetic oligonucleotide
  Sense strand starting at position 1754 of SEQ ID NO: 1562428
uuaggaaguccauguggaa

SEQ ID NO: 1746178 - RNA, 19 nt, Artificial Sequence
  Description of Artificial Sequence: Synthetic oligonucleotide
  Antisense strand to SEQ ID NO: 1746177
uuccacauggacuuccuaa

SEQ ID NO: 1746179 - RNA, 19 nt, Artificial Sequence
  Description of Artificial Sequence: Synthetic oligonucleotide
  Sense strand starting at position 2001 of SEQ ID NO: 1562428
ugguuucaagaguggagga

SEQ ID NO: 1746180 - RNA, 19 nt, Artificial Sequence
  Description of Artificial Sequence: Synthetic oligonucleotide
  Antisense strand to SEQ ID NO: 1746179
uccuccacucuugaaacca

SEQ ID NO: 1746181 - RNA, 19 nt, Artificial Sequence
  Description of Artificial Sequence: Synthetic oligonucleotide
  Sense strand starting at position 2052 of SEQ ID NO: 1562428
guuugaauaucccuauaug

SEQ ID NO: 1746182 - RNA, 19 nt, Artificial Sequence
  Description of Artificial Sequence: Synthetic oligonucleotide
  Antisense strand to SEQ ID NO: 1746181
cauauagggauauucaaac

SEQ ID NO: 1746183 - RNA, 19 nt, Artificial Sequence
  Description of Artificial Sequence: Synthetic oligonucleotide
  Sense strand starting at position 2192 of SEQ ID NO: 1562428
augugaagccuuuauaaac

SEQ ID NO: 1746184 - RNA, 19 nt, Artificial Sequence
  Description of Artificial Sequence: Synthetic oligonucleotide
  Antisense strand to SEQ ID NO: 1746183
guuuauaaaggcuucacau

SEQ ID NO: 1746185 - RNA, 19 nt, Artificial Sequence
  Description of Artificial Sequence: Synthetic oligonucleotide
  Sense strand starting at position 2209 of SEQ ID NO: 1562428
acaagaugacuuugcuauu

SEQ ID NO: 1746186 - RNA, 19 nt, Artificial Sequence
  Description of Artificial Sequence: Synthetic oligonucleotide
  Antisense strand to SEQ ID NO: 1746185
aauagcaaagucaucuugu

SEQ ID NO: 1746187 - RNA, 19 nt, Artificial Sequence
  Description of Artificial Sequence: Synthetic oligonucleotide
  Sense strand starting at position 2234 of SEQ ID NO: 1562428
gccuucucaugaucaaaug

SEQ ID NO: 1746188 - RNA, 19 nt, Artificial Sequence
  Description of Artificial Sequence: Synthetic oligonucleotide
  Antisense strand to SEQ ID NO: 1746187
cauuugaucaugagaaggc

SEQ ID NO: 1746189 - RNA, 19 nt, Artificial Sequence
  Description of Artificial Sequence: Synthetic oligonucleotide
  Sense strand starting at position 2342 of SEQ ID NO: 1562428
aucauugaauggguuguaa

SEQ ID NO: 1746190 - RNA, 19 nt, Artificial Sequence
  Description of Artificial Sequence: Synthetic oligonucleotide
  Antisense strand to SEQ ID NO: 1746189
uuacaacccauucaaugau

SEQ ID NO: 1746191 - RNA, 19 nt, Artificial Sequence
  Description of Artificial Sequence: Synthetic oligonucleotide
  Sense strand starting at position 2383 of SEQ ID NO: 1562428
ugauuacuugugcauacau

SEQ ID NO: 1746192 - RNA, 19 nt, Artificial Sequence
  Description of Artificial Sequence: Synthetic oligonucleotide
  Antisense strand to SEQ ID NO: 1746191
auguaugcacaaguaauca

SEQ ID NO: 1746193 - RNA, 19 nt, Artificial Sequence
  Description of Artificial Sequence: Synthetic oligonucleotide
  Sense strand starting at position 2385 of SEQ ID NO: 1562428
auuacuugugcauacauua

SEQ ID NO: 1746194 - RNA, 19 nt, Artificial Sequence
  Description of Artificial Sequence: Synthetic oligonucleotide
  Antisense strand to SEQ ID NO: 1746193
uaauguaugcacaaguaau

SEQ ID NO: 1746195 - RNA, 19 nt, Artificial Sequence
  Description of Artificial Sequence: Synthetic oligonucleotide
  Sense strand starting at position 2393 of SEQ ID NO: 1562428
ugcauacauuaugugagaa

SEQ ID NO: 1746196 - RNA, 19 nt, Artificial Sequence
  Description of Artificial Sequence: Synthetic oligonucleotide
  Antisense strand to SEQ ID NO: 1746195
uucucacauaauguaugca

SEQ ID NO: 1746197 - RNA, 19 nt, Artificial Sequence
  Description of Artificial Sequence: Synthetic oligonucleotide
  Sense strand starting at position 2403 of SEQ ID NO: 1562428
augugagaaucuucuacaa

SEQ ID NO: 1746198 - RNA, 19 nt, Artificial Sequence
  Description of Artificial Sequence: Synthetic oligonucleotide
  Antisense strand to SEQ ID NO: 1746197
uuguagaagauucucacau

SEQ ID NO: 1746199 - RNA, 19 nt, Artificial Sequence
  Description of Artificial Sequence: Synthetic oligonucleotide
  Sense strand starting at position 2955 of SEQ ID NO: 1562428
uauuguuucgaggaaacuu

SEQ ID NO: 1746200 - RNA, 19 nt, Artificial Sequence
  Description of Artificial Sequence: Synthetic oligonucleotide
  Antisense strand to SEQ ID NO: 1746199
aaguuuccucgaaacaaua

SEQ ID NO: 1746201 - RNA, 19 nt, Artificial Sequence
  Description of Artificial Sequence: Synthetic oligonucleotide
  Sense strand starting at position 2963 of SEQ ID NO: 1562428
cgaggaaacuuuguuauug

SEQ ID NO: 1746202 - RNA, 19 nt, Artificial Sequence
  Description of Artificial Sequence: Synthetic oligonucleotide
  Antisense strand to SEQ ID NO: 1746201
caauaacaaaguuuccucg

SEQ ID NO: 1746203 - RNA, 19 nt, Artificial Sequence
  Description of Artificial Sequence: Synthetic oligonucleotide
  Sense strand starting at position 2964 of SEQ ID NO: 1562428
gaggaaacuuuguuauugu

SEQ ID NO: 1746204 - RNA, 19 nt, Artificial Sequence
  Description of Artificial Sequence: Synthetic oligonucleotide
  Antisense strand to SEQ ID NO: 1746203
acaauaacaaaguuuccuc

SEQ ID NO: 1746205 - RNA, 19 nt, Artificial Sequence
  Description of Artificial Sequence: Synthetic oligonucleotide
  Sense strand starting at position 2975 of SEQ ID NO: 1562428
guuauuguccuauagaauu

SEQ ID NO: 1746206 - RNA, 19 nt, Artificial Sequence
  Description of Artificial Sequence: Synthetic oligonucleotide
  Antisense strand to SEQ ID NO: 1746205
aauucuauaggacaauaac

SEQ ID NO: 1746207 - RNA, 19 nt, Artificial Sequence
  Description of Artificial Sequence: Synthetic oligonucleotide
  Sense strand starting at position 3011 of SEQ ID NO: 1562428
gcugauuucuuucuuguuu

SEQ ID NO: 1746208 - RNA, 19 nt, Artificial Sequence
  Description of Artificial Sequence: Synthetic oligonucleotide
  Antisense strand to SEQ ID NO: 1746207
aaacaagaaagaaaucagc

SEQ ID NO: 1746209 - RNA, 19 nt, Artificial Sequence
  Description of Artificial Sequence: Synthetic oligonucleotide
  Sense strand starting at position 3071 of SEQ ID NO: 1562428
guagaugacaaagguugau

SEQ ID NO: 1746210 - RNA, 19 nt, Artificial Sequence
  Description of Artificial Sequence: Synthetic oligonucleotide
  Antisense strand to SEQ ID NO: 1746209
aucaaccuuugucaucuac

SEQ ID NO: 1746211 - RNA, 19 nt, Artificial Sequence
  Description of Artificial Sequence: Synthetic oligonucleotide
  Sense strand starting at position 3114 of SEQ ID NO: 1562428
uguugacaagagugauauu

SEQ ID NO: 1746212 - RNA, 19 nt, Artificial Sequence
  Description of Artificial Sequence: Synthetic oligonucleotide
  Antisense strand to SEQ ID NO: 1746211
aauaucacucuugucaaca

SEQ ID NO: 1746213 - RNA, 19 nt, Artificial Sequence
  Description of Artificial Sequence: Synthetic oligonucleotide
  Sense strand starting at position 3137 of SEQ ID NO: 1562428
aguugcucuguguacauuu

SEQ ID NO: 1746214 - RNA, 19 nt, Artificial Sequence
  Description of Artificial Sequence: Synthetic oligonucleotide
  Antisense strand to SEQ ID NO: 1746213
aaauguacacagagcaacu

SEQ ID NO: 1746215 - RNA, 19 nt, Artificial Sequence
  Description of Artificial Sequence: Synthetic oligonucleotide
  Sense strand starting at position 3305 of SEQ ID NO: 1562428
ccauuauugccagaaguuc

SEQ ID NO: 1746216 - RNA, 19 nt, Artificial Sequence
  Description of Artificial Sequence: Synthetic oligonucleotide
  Antisense strand to SEQ ID NO: 1746215
gaacuucuggcaauaaugg

SEQ ID NO: 1746217 - RNA, 19 nt, Artificial Sequence
  Description of Artificial Sequence: Synthetic oligonucleotide
  Sense strand starting at position 3897 of SEQ ID NO: 1562428
acuacaucguaucuaagaa

SEQ ID NO: 1746218 - RNA, 19 nt, Artificial Sequence
  Description of Artificial Sequence: Synthetic oligonucleotide
  Antisense strand to SEQ ID NO: 1746217
uucuuagauacgauguagu

SEQ ID NO: 1746219 - RNA, 19 nt, Artificial Sequence
  Description of Artificial Sequence: Synthetic oligonucleotide
  Sense strand starting at position 48 of SEQ ID NO: 1562429
uuccgauucccguaucaca

SEQ ID NO: 1746220 - RNA, 19 nt, Artificial Sequence
  Description of Artificial Sequence: Synthetic oligonucleotide
  Antisense strand to SEQ ID NO: 1746219
ugugauacgggaaucggaa

SEQ ID NO: 1746221 - RNA, 19 nt, Artificial Sequence
  Description of Artificial Sequence: Synthetic oligonucleotide
  Sense strand starting at position 162 of SEQ ID NO: 1562429
augggcauguucuuuaacu

SEQ ID NO: 1746222 - RNA, 19 nt, Artificial Sequence
  Description of Artificial Sequence: Synthetic oligonucleotide
  Antisense strand to SEQ ID NO: 1746221
aguuaaagaacaugcccau

SEQ ID NO: 1746223 - RNA, 19 nt, Artificial Sequence
  Description of Artificial Sequence: Synthetic oligonucleotide
  Sense strand starting at position 240 of SEQ ID NO: 1562429
acauuaagaccuugcauug

SEQ ID NO: 1746224 - RNA, 19 nt, Artificial Sequence
  Description of Artificial Sequence: Synthetic oligonucleotide
  Antisense strand to SEQ ID NO: 1746223
caaugcaaggucuuaaugu

SEQ ID NO: 1746225 - RNA, 19 nt, Artificial Sequence
  Description of Artificial Sequence: Synthetic oligonucleotide
  Sense strand starting at position 732 of SEQ ID NO: 1562429
uauauauggccuugauguu

SEQ ID NO: 1746226 - RNA, 19 nt, Artificial Sequence
  Description of Artificial Sequence: Synthetic oligonucleotide
  Antisense strand to SEQ ID NO: 1746225
aacaucaaggccauauaua

SEQ ID NO: 1746227 - RNA, 19 nt, Artificial Sequence
  Description of Artificial Sequence: Synthetic oligonucleotide
  Sense strand starting at position 798 of SEQ ID NO: 1562429
gcccacuguucucucaaga

SEQ ID NO: 1746228 - RNA, 19 nt, Artificial Sequence
  Description of Artificial Sequence: Synthetic oligonucleotide
  Antisense strand to SEQ ID NO: 1746227
ucuugagagaacagugggc

SEQ ID NO: 1746229 - RNA, 19 nt, Artificial Sequence
  Description of Artificial Sequence: Synthetic oligonucleotide
  Sense strand starting at position 831 of SEQ ID NO: 1562429
augacuuugcagugcaaua

SEQ ID NO: 1746230 - RNA, 19 nt, Artificial Sequence
  Description of Artificial Sequence: Synthetic oligonucleotide
  Antisense strand to SEQ ID NO: 1746229
uauugcacugcaaagucau

SEQ ID NO: 1746231 - RNA, 19 nt, Artificial Sequence
  Description of Artificial Sequence: Synthetic oligonucleotide
  Sense strand starting at position 963 of SEQ ID NO: 1562429
ugaucuguuugcucuacaa

SEQ ID NO: 1746232 - RNA, 19 nt, Artificial Sequence
  Description of Artificial Sequence: Synthetic oligonucleotide
  Antisense strand to SEQ ID NO: 1746231
uuguagagcaaacagauca

SEQ ID NO: 1746233 - RNA, 19 nt, Artificial Sequence
  Description of Artificial Sequence: Synthetic oligonucleotide
  Sense strand starting at position 1204 of SEQ ID NO: 1562429
augacauuggccuggccaa

SEQ ID NO: 1746234 - RNA, 19 nt, Artificial Sequence
  Description of Artificial Sequence: Synthetic oligonucleotide
  Antisense strand to SEQ ID NO: 1746233
uuggccaggccaaugucau

SEQ ID NO: 1746235 - RNA, 19 nt, Artificial Sequence
  Description of Artificial Sequence: Synthetic oligonucleotide
  Sense strand starting at position 1205 of SEQ ID NO: 1562429
ugacauuggccuggccaaa

SEQ ID NO: 1746236 - RNA, 19 nt, Artificial Sequence
  Description of Artificial Sequence: Synthetic oligonucleotide
  Antisense strand to SEQ ID NO: 1746235
uuuggccaggccaauguca

SEQ ID NO: 1746237 - RNA, 19 nt, Artificial Sequence
  Description of Artificial Sequence: Synthetic oligonucleotide
  Sense strand starting at position 1216 of SEQ ID NO: 1562429
uggccaaaguaaguuuaau

SEQ ID NO: 1746238 - RNA, 19 nt, Artificial Sequence
  Description of Artificial Sequence: Synthetic oligonucleotide
  Antisense strand to SEQ ID NO: 1746237
auuaaacuuacuuuggcca

SEQ ID NO: 1746239 - RNA, 19 nt, Artificial Sequence
  Description of Artificial Sequence: Synthetic oligonucleotide
  Sense strand starting at position 1378 of SEQ ID NO: 1562429
guguucuuugccuagaauu

SEQ ID NO: 1746240 - RNA, 19 nt, Artificial Sequence
  Description of Artificial Sequence: Synthetic oligonucleotide
  Antisense strand to SEQ ID NO: 1746239
aauucuaggcaaagaacac

SEQ ID NO: 1746241 - RNA, 19 nt, Artificial Sequence
  Description of Artificial Sequence: Synthetic oligonucleotide
  Sense strand starting at position 1380 of SEQ ID NO: 1562429
guucuuugccuagaauuag

SEQ ID NO: 1746242 - RNA, 19 nt, Artificial Sequence
  Description of Artificial Sequence: Synthetic oligonucleotide
  Antisense strand to SEQ ID NO: 1746241
cuaauucuaggcaaagaac

SEQ ID NO: 1746243 - RNA, 19 nt, Artificial Sequence
  Description of Artificial Sequence: Synthetic oligonucleotide
  Sense strand starting at position 1988 of SEQ ID NO: 1562429
uuaagucucuagccugaga

SEQ ID NO: 1746244 - RNA, 19 nt, Artificial Sequence
  Description of Artificial Sequence: Synthetic oligonucleotide
  Antisense strand to SEQ ID NO: 1746243
ucucaggcuagagacuuaa

SEQ ID NO: 1746245 - RNA, 19 nt, Artificial Sequence
  Description of Artificial Sequence: Synthetic oligonucleotide
  Sense strand starting at position 2001 of SEQ ID NO: 1562429
cugagaggccagcauaagu

SEQ ID NO: 1746246 - RNA, 19 nt, Artificial Sequence
  Description of Artificial Sequence: Synthetic oligonucleotide
  Antisense strand to SEQ ID NO: 1746245
acuuaugcuggccucucag

SEQ ID NO: 1746247 - RNA, 19 nt, Artificial Sequence
  Description of Artificial Sequence: Synthetic oligonucleotide
  Sense strand starting at position 2194 of SEQ ID NO: 1562429
ucuucucaguauguuauga

SEQ ID NO: 1746248 - RNA, 19 nt, Artificial Sequence
  Description of Artificial Sequence: Synthetic oligonucleotide
  Antisense strand to SEQ ID NO: 1746247
ucauaacauacugagaaga

SEQ ID NO: 1746249 - RNA, 19 nt, Artificial Sequence
  Description of Artificial Sequence: Synthetic oligonucleotide
  Sense strand starting at position 2301 of SEQ ID NO: 1562429
agcuauguuggaugacauc

SEQ ID NO: 1746250 - RNA, 19 nt, Artificial Sequence
  Description of Artificial Sequence: Synthetic oligonucleotide
  Antisense strand to SEQ ID NO: 1746249
gaugucauccaacauagcu

SEQ ID NO: 1746251 - RNA, 19 nt, Artificial Sequence
  Description of Artificial Sequence: Synthetic oligonucleotide
  Sense strand starting at position 2347 of SEQ ID NO: 1562429
uccgaucacuuugcuaaua

SEQ ID NO: 1746252 - RNA, 19 nt, Artificial Sequence
  Description of Artificial Sequence: Synthetic oligonucleotide
  Antisense strand to SEQ ID NO: 1746251
uauuagcaaagugaucgga

SEQ ID NO: 1746253 - RNA, 19 nt, Artificial Sequence
  Description of Artificial Sequence: Synthetic oligonucleotide
  Sense strand starting at position 2348 of SEQ ID NO: 1562429
ccgaucacuuugcuaauaa

SEQ ID NO: 1746254 - RNA, 19 nt, Artificial Sequence
  Description of Artificial Sequence: Synthetic oligonucleotide
  Antisense strand to SEQ ID NO: 1746253
uuauuagcaaagugaucgg

SEQ ID NO: 1746255 - RNA, 19 nt, Artificial Sequence
  Description of Artificial Sequence: Synthetic oligonucleotide
  Sense strand starting at position 2401 of SEQ ID NO: 1562429
ucaacacagcugugauguu

SEQ ID NO: 1746256 - RNA, 19 nt, Artificial Sequence
  Description of Artificial Sequence: Synthetic oligonucleotide
  Antisense strand to SEQ ID NO: 1746255
aacaucacagcuguguuga

SEQ ID NO: 1746257 - RNA, 19 nt, Artificial Sequence
  Description of Artificial Sequence: Synthetic oligonucleotide
  Sense strand starting at position 2454 of SEQ ID NO: 1562429
ucuugaauaccaugaguuu

SEQ ID NO: 1746258 - RNA, 19 nt, Artificial Sequence
  Description of Artificial Sequence: Synthetic oligonucleotide
  Antisense strand to SEQ ID NO: 1746257
aaacucaugguauucaaga

SEQ ID NO: 1746259 - RNA, 19 nt, Artificial Sequence
  Description of Artificial Sequence: Synthetic oligonucleotide
  Sense strand starting at position 2457 of SEQ ID NO: 1562429
ugaauaccaugaguuugaa

SEQ ID NO: 1746260 - RNA, 19 nt, Artificial Sequence
  Description of Artificial Sequence: Synthetic oligonucleotide
  Antisense strand to SEQ ID NO: 1746259
uucaaacucaugguauuca

SEQ ID NO: 1746261 - RNA, 19 nt, Artificial Sequence
  Description of Artificial Sequence: Synthetic oligonucleotide
  Sense strand starting at position 2467 of SEQ ID NO: 1562429
gaguuugaacugcacagau

SEQ ID NO: 1746262 - RNA, 19 nt, Artificial Sequence
  Description of Artificial Sequence: Synthetic oligonucleotide
  Antisense strand to SEQ ID NO: 1746261
aucugugcaguucaaacuc

SEQ ID NO: 1746263 - RNA, 19 nt, Artificial Sequence
  Description of Artificial Sequence: Synthetic oligonucleotide
  Sense strand starting at position 2697 of SEQ ID NO: 1562429
auaggaguauaaucucuca

SEQ ID NO: 1746264 - RNA, 19 nt, Artificial Sequence
  Description of Artificial Sequence: Synthetic oligonucleotide
  Antisense strand to SEQ ID NO: 1746263
ugagagauuauacuccuau

SEQ ID NO: 1746265 - RNA, 19 nt, Artificial Sequence
  Description of Artificial Sequence: Synthetic oligonucleotide
  Sense strand starting at position 2700 of SEQ ID NO: 1562429
ggaguauaaucucucauua

SEQ ID NO: 1746266 - RNA, 19 nt, Artificial Sequence
  Description of Artificial Sequence: Synthetic oligonucleotide
  Antisense strand to SEQ ID NO: 1746265
uaaugagagauuauacucc

SEQ ID NO: 1746267 - RNA, 19 nt, Artificial Sequence
  Description of Artificial Sequence: Synthetic oligonucleotide
  Sense strand starting at position 2722 of SEQ ID NO: 1562429
guaacauaagcauguauua

SEQ ID NO: 1746268 - RNA, 19 nt, Artificial Sequence
  Description of Artificial Sequence: Synthetic oligonucleotide
  Antisense strand to SEQ ID NO: 1746267
uaauacaugcuuauguuac

SEQ ID NO: 1746269 - RNA, 19 nt, Artificial Sequence
  Description of Artificial Sequence: Synthetic oligonucleotide
  Sense strand starting at position 2875 of SEQ ID NO: 1562429
aggaucaacugugauuuau

SEQ ID NO: 1746270 - RNA, 19 nt, Artificial Sequence
  Description of Artificial Sequence: Synthetic oligonucleotide
  Antisense strand to SEQ ID NO: 1746269
auaaaucacaguugauccu

SEQ ID NO: 1746271 - RNA, 19 nt, Artificial Sequence
  Description of Artificial Sequence: Synthetic oligonucleotide
  Sense strand starting at position 3018 of SEQ ID NO: 1562429
aaaguuguuugguugauua

SEQ ID NO: 1746272 - RNA, 19 nt, Artificial Sequence
  Description of Artificial Sequence: Synthetic oligonucleotide
  Antisense strand to SEQ ID NO: 1746271
uaaucaaccaaacaacuuu

SEQ ID NO: 1746273 - RNA, 19 nt, Artificial Sequence
  Description of Artificial Sequence: Synthetic oligonucleotide
  Sense strand starting at position 3020 of SEQ ID NO: 1562429
aguuguuugguugauuauc

SEQ ID NO: 1746274 - RNA, 19 nt, Artificial Sequence
  Description of Artificial Sequence: Synthetic oligonucleotide
  Antisense strand to SEQ ID NO: 1746273
gauaaucaaccaaacaacu

SEQ ID NO: 1746275 - RNA, 19 nt, Artificial Sequence
  Description of Artificial Sequence: Synthetic oligonucleotide
  Sense strand starting at position 3022 of SEQ ID NO: 1562429
uuguuugguugauuaucuu

SEQ ID NO: 1746276 - RNA, 19 nt, Artificial Sequence
  Description of Artificial Sequence: Synthetic oligonucleotide
  Antisense strand to SEQ ID NO: 1746275
aagauaaucaaccaaacaa

SEQ ID NO: 1746277 - RNA, 19 nt, Artificial Sequence
  Description of Artificial Sequence: Synthetic oligonucleotide
  Sense strand starting at position 3025 of SEQ ID NO: 1562429
uuugguugauuaucuugua

SEQ ID NO: 1746278 - RNA, 19 nt, Artificial Sequence
  Description of Artificial Sequence: Synthetic oligonucleotide
  Antisense strand to SEQ ID NO: 1746277
uacaagauaaucaaccaaa

SEQ ID NO: 1746279 - RNA, 19 nt, Artificial Sequence
  Description of Artificial Sequence: Synthetic oligonucleotide
  Sense strand starting at position 3057 of SEQ ID NO: 1562429
guagauauguuucuucgga

SEQ ID NO: 1746280 - RNA, 19 nt, Artificial Sequence
  Description of Artificial Sequence: Synthetic oligonucleotide
  Antisense strand to SEQ ID NO: 1746279
uccgaagaaacauaucuac

SEQ ID NO: 1746281 - RNA, 19 nt, Artificial Sequence
  Description of Artificial Sequence: Synthetic oligonucleotide
  Sense strand starting at position 3058 of SEQ ID NO: 1562429
uagauauguuucuucggag

SEQ ID NO: 1746282 - RNA, 19 nt, Artificial Sequence
  Description of Artificial Sequence: Synthetic oligonucleotide
  Antisense strand to SEQ ID NO: 1746281
cuccgaagaaacauaucua

SEQ ID NO: 1746283 - RNA, 19 nt, Artificial Sequence
  Description of Artificial Sequence: Synthetic oligonucleotide
  Sense strand starting at position 3059 of SEQ ID NO: 1562429
agauauguuucuucggaga

SEQ ID NO: 1746284 - RNA, 19 nt, Artificial Sequence
  Description of Artificial Sequence: Synthetic oligonucleotide
  Antisense strand to SEQ ID NO: 1746283
ucuccgaagaaacauaucu

SEQ ID NO: 1746285 - RNA, 19 nt, Artificial Sequence
  Description of Artificial Sequence: Synthetic oligonucleotide
  Sense strand starting at position 3089 of SEQ ID NO: 1562429
uugagaaucuuaucugauu

SEQ ID NO: 1746286 - RNA, 19 nt, Artificial Sequence
  Description of Artificial Sequence: Synthetic oligonucleotide
  Antisense strand to SEQ ID NO: 1746285
aaucagauaagauucucaa

SEQ ID NO: 1746287 - RNA, 19 nt, Artificial Sequence
  Description of Artificial Sequence: Synthetic oligonucleotide
  Sense strand starting at position 3090 of SEQ ID NO: 1562429
ugagaaucuuaucugauuc

SEQ ID NO: 1746288 - RNA, 19 nt, Artificial Sequence
  Description of Artificial Sequence: Synthetic oligonucleotide
  Antisense strand to SEQ ID NO: 1746287
gaaucagauaagauucuca

SEQ ID NO: 1746289 - RNA, 19 nt, Artificial Sequence
  Description of Artificial Sequence: Synthetic oligonucleotide
  Sense strand starting at position 3186 of SEQ ID NO: 1562429
ggauauugacucugucugu

SEQ ID NO: 1746290 - RNA, 19 nt, Artificial Sequence
  Description of Artificial Sequence: Synthetic oligonucleotide
  Antisense strand to SEQ ID NO: 1746289
acagacagagucaauaucc

SEQ ID NO: 1746291 - RNA, 19 nt, Artificial Sequence
  Description of Artificial Sequence: Synthetic oligonucleotide
  Sense strand starting at position 3187 of SEQ ID NO: 1562429
gauauugacucugucugua

SEQ ID NO: 1746292 - RNA, 19 nt, Artificial Sequence
  Description of Artificial Sequence: Synthetic oligonucleotide
  Antisense strand to SEQ ID NO: 1746291
uacagacagagucaauauc

SEQ ID NO: 1746293 - RNA, 19 nt, Artificial Sequence
  Description of Artificial Sequence: Synthetic oligonucleotide
  Sense strand starting at position 3191 of SEQ ID NO: 1562429
uugacucugucuguaucau

SEQ ID NO: 1746294 - RNA, 19 nt, Artificial Sequence
  Description of Artificial Sequence: Synthetic oligonucleotide
  Antisense strand to SEQ ID NO: 1746293
augauacagacagagucaa

SEQ ID NO: 1746295 - RNA, 19 nt, Artificial Sequence
  Description of Artificial Sequence: Synthetic oligonucleotide
  Sense strand starting at position 3325 of SEQ ID NO: 1562429
cccgauuugaucuguugua

SEQ ID NO: 1746296 - RNA, 19 nt, Artificial Sequence
  Description of Artificial Sequence: Synthetic oligonucleotide
  Antisense strand to SEQ ID NO: 1746295
uacaacagaucaaaucggg

SEQ ID NO: 1746297 - RNA, 19 nt, Artificial Sequence
  Description of Artificial Sequence: Synthetic oligonucleotide
  Sense strand starting at position 3326 of SEQ ID NO: 1562429
ccgauuugaucuguuguac

SEQ ID NO: 1746298 - RNA, 19 nt, Artificial Sequence
  Description of Artificial Sequence: Synthetic oligonucleotide
  Antisense strand to SEQ ID NO: 1746297
guacaacagaucaaaucgg

SEQ ID NO: 1746299 - RNA, 19 nt, Artificial Sequence
  Description of Artificial Sequence: Synthetic oligonucleotide
  Sense strand starting at position 65 of SEQ ID NO: 1562430
guauuaugagcucaaaugu

SEQ ID NO: 1746300 - RNA, 19 nt, Artificial Sequence
  Description of Artificial Sequence: Synthetic oligonucleotide
  Antisense strand to SEQ ID NO: 1746299
acauuugagcucauaauac

SEQ ID NO: 1746301 - RNA, 19 nt, Artificial Sequence
  Description of Artificial Sequence: Synthetic oligonucleotide
  Sense strand starting at position 94 of SEQ ID NO: 1562430
agauacuucccugagcugu

SEQ ID NO: 1746302 - RNA, 19 nt, Artificial Sequence
  Description of Artificial Sequence: Synthetic oligonucleotide
  Antisense strand to SEQ ID NO: 1746301
acagcucagggaaguaucu

SEQ ID NO: 1746303 - RNA, 19 nt, Artificial Sequence
  Description of Artificial Sequence: Synthetic oligonucleotide
  Sense strand starting at position 171 of SEQ ID NO: 1562430
gcaauuaucugucugaauu

SEQ ID NO: 1746304 - RNA, 19 nt, Artificial Sequence
  Description of Artificial Sequence: Synthetic oligonucleotide
  Antisense strand to SEQ ID NO: 1746303
aauucagacagauaauugc

SEQ ID NO: 1746305 - RNA, 19 nt, Artificial Sequence
  Description of Artificial Sequence: Synthetic oligonucleotide
  Sense strand starting at position 699 of SEQ ID NO: 1562430
uugucagauguagauacau

SEQ ID NO: 1746306 - RNA, 19 nt, Artificial Sequence
  Description of Artificial Sequence: Synthetic oligonucleotide
  Antisense strand to SEQ ID NO: 1746305
auguaucuacaucugacaa

SEQ ID NO: 1746307 - RNA, 19 nt, Artificial Sequence
  Description of Artificial Sequence: Synthetic oligonucleotide
  Sense strand starting at position 708 of SEQ ID NO: 1562430
guagauacauuugauagua

SEQ ID NO: 1746308 - RNA, 19 nt, Artificial Sequence
  Description of Artificial Sequence: Synthetic oligonucleotide
  Antisense strand to SEQ ID NO: 1746307
uacuaucaaauguaucuac

SEQ ID NO: 1746309 - RNA, 19 nt, Artificial Sequence
  Description of Artificial Sequence: Synthetic oligonucleotide
  Sense strand starting at position 1089 of SEQ ID NO: 1562430
gggauuauauuacuucuuu

SEQ ID NO: 1746310 - RNA, 19 nt, Artificial Sequence
  Description of Artificial Sequence: Synthetic oligonucleotide
  Antisense strand to SEQ ID NO: 1746309
aaagaaguaauauaauccc

SEQ ID NO: 1746311 - RNA, 19 nt, Artificial Sequence
  Description of Artificial Sequence: Synthetic oligonucleotide
  Sense strand starting at position 1231 of SEQ ID NO: 1562430
ucugaaauacucugugauu

SEQ ID NO: 1746312 - RNA, 19 nt, Artificial Sequence
  Description of Artificial Sequence: Synthetic oligonucleotide
  Antisense strand to SEQ ID NO: 1746311
aaucacagaguauuucaga

SEQ ID NO: 1746313 - RNA, 19 nt, Artificial Sequence
  Description of Artificial Sequence: Synthetic oligonucleotide
  Sense strand starting at position 1243 of SEQ ID NO: 1562430
ugugauuugugcuugggua

SEQ ID NO: 1746314 - RNA, 19 nt, Artificial Sequence
  Description of Artificial Sequence: Synthetic oligonucleotide
  Antisense strand to SEQ ID NO: 1746313
uacccaagcacaaaucaca

SEQ ID NO: 1746315 - RNA, 19 nt, Artificial Sequence
  Description of Artificial Sequence: Synthetic oligonucleotide
  Sense strand starting at position 1244 of SEQ ID NO: 1562430
gugauuugugcuuggguau

SEQ ID NO: 1746316 - RNA, 19 nt, Artificial Sequence
  Description of Artificial Sequence: Synthetic oligonucleotide
  Antisense strand to SEQ ID NO: 1746315
auacccaagcacaaaucac

SEQ ID NO: 1746317 - RNA, 19 nt, Artificial Sequence
  Description of Artificial Sequence: Synthetic oligonucleotide
  Sense strand starting at position 1245 of SEQ ID NO: 1562430
ugauuugugcuuggguaug

SEQ ID NO: 1746318 - RNA, 19 nt, Artificial Sequence
  Description of Artificial Sequence: Synthetic oligonucleotide
  Antisense strand to SEQ ID NO: 1746317
cauacccaagcacaaauca

SEQ ID NO: 1746319 - RNA, 19 nt, Artificial Sequence
  Description of Artificial Sequence: Synthetic oligonucleotide
  Sense strand starting at position 1329 of SEQ ID NO: 1562430
agaggaaauaauugcguua

SEQ ID NO: 1746320 - RNA, 19 nt, Artificial Sequence
  Description of Artificial Sequence: Synthetic oligonucleotide
  Antisense strand to SEQ ID NO: 1746319
uaacgcaauuauuuccucu

SEQ ID NO: 1746321 - RNA, 19 nt, Artificial Sequence
  Description of Artificial Sequence: Synthetic oligonucleotide
  Sense strand starting at position 1332 of SEQ ID NO: 1562430
ggaaauaauugcguuauau

SEQ ID NO: 1746322 - RNA, 19 nt, Artificial Sequence
  Description of Artificial Sequence: Synthetic oligonucleotide
  Antisense strand to SEQ ID NO: 1746321
auauaacgcaauuauuucc

SEQ ID NO: 1746323 - RNA, 19 nt, Artificial Sequence
  Description of Artificial Sequence: Synthetic oligonucleotide
  Sense strand starting at position 1343 of SEQ ID NO: 1562430
cguuauaucaaggaaguac

SEQ ID NO: 1746324 - RNA, 19 nt, Artificial Sequence
  Description of Artificial Sequence: Synthetic oligonucleotide
  Antisense strand to SEQ ID NO: 1746323
guacuuccuugauauaacg

SEQ ID NO: 1746325 - RNA, 19 nt, Artificial Sequence
  Description of Artificial Sequence: Synthetic oligonucleotide
  Sense strand starting at position 1486 of SEQ ID NO: 1562430
gauugacuuccgcaacugu

SEQ ID NO: 1746326 - RNA, 19 nt, Artificial Sequence
  Description of Artificial Sequence: Synthetic oligonucleotide
  Antisense strand to SEQ ID NO: 1746325
acaguugcggaagucaauc

SEQ ID NO: 1746327 - RNA, 19 nt, Artificial Sequence
  Description of Artificial Sequence: Synthetic oligonucleotide
  Sense strand starting at position 1630 of SEQ ID NO: 1562430
gaggcuagaggucgaagau

SEQ ID NO: 1746328 - RNA, 19 nt, Artificial Sequence
  Description of Artificial Sequence: Synthetic oligonucleotide
  Antisense strand to SEQ ID NO: 1746327
aucuucgaccucuagccuc

SEQ ID NO: 1746329 - RNA, 19 nt, Artificial Sequence
  Description of Artificial Sequence: Synthetic oligonucleotide
  Sense strand starting at position 1631 of SEQ ID NO: 1562430
aggcuagaggucgaagauu

SEQ ID NO: 1746330 - RNA, 19 nt, Artificial Sequence
  Description of Artificial Sequence: Synthetic oligonucleotide
  Antisense strand to SEQ ID NO: 1746329
aaucuucgaccucuagccu

SEQ ID NO: 1746331 - RNA, 19 nt, Artificial Sequence
  Description of Artificial Sequence: Synthetic oligonucleotide
  Sense strand starting at position 1673 of SEQ ID NO: 1562430
uauagaaaucuuggaguac

SEQ ID NO: 1746332 - RNA, 19 nt, Artificial Sequence
  Description of Artificial Sequence: Synthetic oligonucleotide
  Antisense strand to SEQ ID NO: 1746331
guacuccaagauuucuaua

SEQ ID NO: 1746333 - RNA, 19 nt, Artificial Sequence
  Description of Artificial Sequence: Synthetic oligonucleotide
  Sense strand starting at position 1686 of SEQ ID NO: 1562430
gaguacgaauccuugaauc

SEQ ID NO: 1746334 - RNA, 19 nt, Artificial Sequence
  Description of Artificial Sequence: Synthetic oligonucleotide
  Antisense strand to SEQ ID NO: 1746333
gauucaaggauucguacuc

SEQ ID NO: 1746335 - RNA, 19 nt, Artificial Sequence
  Description of Artificial Sequence: Synthetic oligonucleotide
  Sense strand starting at position 1688 of SEQ ID NO: 1562430
guacgaauccuugaaucag

SEQ ID NO: 1746336 - RNA, 19 nt, Artificial Sequence
  Description of Artificial Sequence: Synthetic oligonucleotide
  Antisense strand to SEQ ID NO: 1746335
cugauucaaggauucguac

SEQ ID NO: 1746337 - RNA, 19 nt, Artificial Sequence
  Description of Artificial Sequence: Synthetic oligonucleotide
  Sense strand starting at position 1739 of SEQ ID NO: 1562430
augguccuccgacagugau

SEQ ID NO: 1746338 - RNA, 19 nt, Artificial Sequence
  Description of Artificial Sequence: Synthetic oligonucleotide
  Antisense strand to SEQ ID NO: 1746337
aucacugucggaggaccau

SEQ ID NO: 1746339 - RNA, 19 nt, Artificial Sequence
  Description of Artificial Sequence: Synthetic oligonucleotide
  Sense strand starting at position 2162 of SEQ ID NO: 1562430
gucacuguugaccaucaau

SEQ ID NO: 1746340 - RNA, 19 nt, Artificial Sequence
  Description of Artificial Sequence: Synthetic oligonucleotide
  Antisense strand to SEQ ID NO: 1746339
auugauggucaacagugac

SEQ ID NO: 1746341 - RNA, 19 nt, Artificial Sequence
  Description of Artificial Sequence: Synthetic oligonucleotide
  Sense strand starting at position 2273 of SEQ ID NO: 1562430
augaaaucaugugcccaaa

SEQ ID NO: 1746342 - RNA, 19 nt, Artificial Sequence
  Description of Artificial Sequence: Synthetic oligonucleotide
  Antisense strand to SEQ ID NO: 1746341
uuugggcacaugauuucau

SEQ ID NO: 1746343 - RNA, 19 nt, Artificial Sequence
  Description of Artificial Sequence: Synthetic oligonucleotide
  Sense strand starting at position 2355 of SEQ ID NO: 1562430
uugggaggauaauaacaaa

SEQ ID NO: 1746344 - RNA, 19 nt, Artificial Sequence
  Description of Artificial Sequence: Synthetic oligonucleotide
  Antisense strand to SEQ ID NO: 1746343
uuuguuauuauccucccaa

SEQ ID NO: 1746345 - RNA, 19 nt, Artificial Sequence
  Description of Artificial Sequence: Synthetic oligonucleotide
  Sense strand starting at position 2444 of SEQ ID NO: 1562430
aucuccuuuccugagucau

SEQ ID NO: 1746346 - RNA, 19 nt, Artificial Sequence
  Description of Artificial Sequence: Synthetic oligonucleotide
  Antisense strand to SEQ ID NO: 1746345
augacucaggaaaggagau

SEQ ID NO: 1746347 - RNA, 19 nt, Artificial Sequence
  Description of Artificial Sequence: Synthetic oligonucleotide
  Sense strand starting at position 2446 of SEQ ID NO: 1562430
cuccuuuccugagucauua

SEQ ID NO: 1746348 - RNA, 19 nt, Artificial Sequence
  Description of Artificial Sequence: Synthetic oligonucleotide
  Antisense strand to SEQ ID NO: 1746347
uaaugacucaggaaaggag

SEQ ID NO: 1746349 - RNA, 19 nt, Artificial Sequence
  Description of Artificial Sequence: Synthetic oligonucleotide
  Sense strand starting at position 2731 of SEQ ID NO: 1562430
ucauuuggauaaggaagua

SEQ ID NO: 1746350 - RNA, 19 nt, Artificial Sequence
  Description of Artificial Sequence: Synthetic oligonucleotide
  Antisense strand to SEQ ID NO: 1746349
uacuuccuuauccaaauga

SEQ ID NO: 1746351 - RNA, 19 nt, Artificial Sequence
  Description of Artificial Sequence: Synthetic oligonucleotide
  Sense strand starting at position 3371 of SEQ ID NO: 1562430
ucucauuucucugcuaugu

SEQ ID NO: 1746352 - RNA, 19 nt, Artificial Sequence
  Description of Artificial Sequence: Synthetic oligonucleotide
  Antisense strand to SEQ ID NO: 1746351
acauagcagagaaaugaga

SEQ ID NO: 1746353 - RNA, 19 nt, Artificial Sequence
  Description of Artificial Sequence: Synthetic oligonucleotide
  Sense strand starting at position 3519 of SEQ ID NO: 1562430
cuccuauaugcagacgaau

SEQ ID NO: 1746354 - RNA, 19 nt, Artificial Sequence
  Description of Artificial Sequence: Synthetic oligonucleotide
  Antisense strand to SEQ ID NO: 1746353
auucgucugcauauaggag

SEQ ID NO: 1746355 - RNA, 19 nt, Artificial Sequence
  Description of Artificial Sequence: Synthetic oligonucleotide
  Sense strand starting at position 3522 of SEQ ID NO: 1562430
cuauaugcagacgaauaua

SEQ ID NO: 1746356 - RNA, 19 nt, Artificial Sequence
  Description of Artificial Sequence: Synthetic oligonucleotide
  Antisense strand to SEQ ID NO: 1746355
uauauucgucugcauauag

SEQ ID NO: 1746357 - RNA, 19 nt, Artificial Sequence
  Description of Artificial Sequence: Synthetic oligonucleotide
  Sense strand starting at position 3550 of SEQ ID NO: 1562430
ucaugcuuuggugaaacuu

SEQ ID NO: 1746358 - RNA, 19 nt, Artificial Sequence
  Description of Artificial Sequence: Synthetic oligonucleotide
  Antisense strand to SEQ ID NO: 1746357
aaguuucaccaaagcauga

SEQ ID NO: 1746359 - RNA, 19 nt, Artificial Sequence
  Description of Artificial Sequence: Synthetic oligonucleotide
  Sense strand starting at position 3559 of SEQ ID NO: 1562430
ggugaaacuuuauccuguu

SEQ ID NO: 1746360 - RNA, 19 nt, Artificial Sequence
  Description of Artificial Sequence: Synthetic oligonucleotide
  Antisense strand to SEQ ID NO: 1746359
aacaggauaaaguuucacc

SEQ ID NO: 1746361 - RNA, 19 nt, Artificial Sequence
  Description of Artificial Sequence: Synthetic oligonucleotide
  Sense strand starting at position 3627 of SEQ ID NO: 1562430
guagaaauuccaggcaaac

SEQ ID NO: 1746362 - RNA, 19 nt, Artificial Sequence
  Description of Artificial Sequence: Synthetic oligonucleotide
  Antisense strand to SEQ ID NO: 1746361
guuugccuggaauuucuac

SEQ ID NO: 1746363 - RNA, 19 nt, Artificial Sequence
  Description of Artificial Sequence: Synthetic oligonucleotide
  Sense strand starting at position 3737 of SEQ ID NO: 1562430
uugggucuagucuagauau

SEQ ID NO: 1746364 - RNA, 19 nt, Artificial Sequence
  Description of Artificial Sequence: Synthetic oligonucleotide
  Antisense strand to SEQ ID NO: 1746363
auaucuagacuagacccaa

SEQ ID NO: 1746365 - RNA, 19 nt, Artificial Sequence
  Description of Artificial Sequence: Synthetic oligonucleotide
  Sense strand starting at position 3739 of SEQ ID NO: 1562430
gggucuagucuagauauga

SEQ ID NO: 1746366 - RNA, 19 nt, Artificial Sequence
  Description of Artificial Sequence: Synthetic oligonucleotide
  Antisense strand to SEQ ID NO: 1746365
ucauaucuagacuagaccc

SEQ ID NO: 1746367 - RNA, 19 nt, Artificial Sequence
  Description of Artificial Sequence: Synthetic oligonucleotide
  Sense strand starting at position 3747 of SEQ ID NO: 1562430
ucuagauaugacuguagcu

SEQ ID NO: 1746368 - RNA, 19 nt, Artificial Sequence
  Description of Artificial Sequence: Synthetic oligonucleotide
  Antisense strand to SEQ ID NO: 1746367
agcuacagucauaucuaga

SEQ ID NO: 1746369 - RNA, 19 nt, Artificial Sequence
  Description of Artificial Sequence: Synthetic oligonucleotide
  Sense strand starting at position 3771 of SEQ ID NO: 1562430
uugggucuagucuagguaa

SEQ ID NO: 1746370 - RNA, 19 nt, Artificial Sequence
  Description of Artificial Sequence: Synthetic oligonucleotide
  Antisense strand to SEQ ID NO: 1746369
uuaccuagacuagacccaa

SEQ ID NO: 1746371 - RNA, 19 nt, Artificial Sequence
  Description of Artificial Sequence: Synthetic oligonucleotide
  Sense strand starting at position 3773 of SEQ ID NO: 1562430
gggucuagucuagguaaga

SEQ ID NO: 1746372 - RNA, 19 nt, Artificial Sequence
  Description of Artificial Sequence: Synthetic oligonucleotide
  Antisense strand to SEQ ID NO: 1746371
ucuuaccuagacuagaccc

SEQ ID NO: 1746373 - RNA, 19 nt, Artificial Sequence
  Description of Artificial Sequence: Synthetic oligonucleotide
  Sense strand starting at position 3774 of SEQ ID NO: 1562430
ggucuagucuagguaagac

SEQ ID NO: 1746374 - RNA, 19 nt, Artificial Sequence
  Description of Artificial Sequence: Synthetic oligonucleotide
  Antisense strand to SEQ ID NO: 1746373
gucuuaccuagacuagacc

SEQ ID NO: 1746375 - RNA, 19 nt, Artificial Sequence
  Description of Artificial Sequence: Synthetic oligonucleotide
  Sense strand starting at position 3861 of SEQ ID NO: 1562430
ggaauugguguugagccau

SEQ ID NO: 1746376 - RNA, 19 nt, Artificial Sequence
  Description of Artificial Sequence: Synthetic oligonucleotide
  Antisense strand to SEQ ID NO: 1746375
auggcucaacaccaauucc

SEQ ID NO: 1746377 - RNA, 19 nt, Artificial Sequence
  Description of Artificial Sequence: Synthetic oligonucleotide
  Sense strand starting at position 3976 of SEQ ID NO: 1562430
cauggugauucugcaagag

SEQ ID NO: 1746378 - RNA, 19 nt, Artificial Sequence
  Description of Artificial Sequence: Synthetic oligonucleotide
  Antisense strand to SEQ ID NO: 1746377
cucuugcagaaucaccaug

SEQ ID NO: 1746379 - RNA, 19 nt, Artificial Sequence
  Description of Artificial Sequence: Synthetic oligonucleotide
  Sense strand starting at position 95 of SEQ ID NO: 1562431
gcaucaccgagauagcaaa

SEQ ID NO: 1746380 - RNA, 19 nt, Artificial Sequence
  Description of Artificial Sequence: Synthetic oligonucleotide
  Antisense strand to SEQ ID NO: 1746379
uuugcuaucucggugaugc

SEQ ID NO: 1746381 - RNA, 19 nt, Artificial Sequence
  Description of Artificial Sequence: Synthetic oligonucleotide
  Sense strand starting at position 181 of SEQ ID NO: 1562431
cacguaguagcauaaauga

SEQ ID NO: 1746382 - RNA, 19 nt, Artificial Sequence
  Description of Artificial Sequence: Synthetic oligonucleotide
  Antisense strand to SEQ ID NO: 1746381
ucauuuaugcuacuacgug

SEQ ID NO: 1746383 - RNA, 19 nt, Artificial Sequence
  Description of Artificial Sequence: Synthetic oligonucleotide
  Sense strand starting at position 209 of SEQ ID NO: 1562431
ugcaauugugcugaaagaa

SEQ ID NO: 1746384 - RNA, 19 nt, Artificial Sequence
  Description of Artificial Sequence: Synthetic oligonucleotide
  Antisense strand to SEQ ID NO: 1746383
uucuuucagcacaauugca

SEQ ID NO: 1746385 - RNA, 19 nt, Artificial Sequence
  Description of Artificial Sequence: Synthetic oligonucleotide
  Sense strand starting at position 349 of SEQ ID NO: 1562431
auaacaagguguuuaugaa

SEQ ID NO: 1746386 - RNA, 19 nt, Artificial Sequence
  Description of Artificial Sequence: Synthetic oligonucleotide
  Antisense strand to SEQ ID NO: 1746385
uucauaaacaccuuguuau

SEQ ID NO: 1746387 - RNA, 19 nt, Artificial Sequence
  Description of Artificial Sequence: Synthetic oligonucleotide
  Sense strand starting at position 356 of SEQ ID NO: 1562431
gguguuuaugaaugagaga

SEQ ID NO: 1746388 - RNA, 19 nt, Artificial Sequence
  Description of Artificial Sequence: Synthetic oligonucleotide
  Antisense strand to SEQ ID NO: 1746387
ucucucauucauaaacacc

SEQ ID NO: 1746389 - RNA, 19 nt, Artificial Sequence
  Description of Artificial Sequence: Synthetic oligonucleotide
  Sense strand starting at position 460 of SEQ ID NO: 1562431
gagcuauguguggacaaac

SEQ ID NO: 1746390 - RNA, 19 nt, Artificial Sequence
  Description of Artificial Sequence: Synthetic oligonucleotide
  Antisense strand to SEQ ID NO: 1746389
guuuguccacacauagcuc

SEQ ID NO: 1746391 - RNA, 19 nt, Artificial Sequence
  Description of Artificial Sequence: Synthetic oligonucleotide
  Sense strand starting at position 574 of SEQ ID NO: 1562431
cucaaauugcuguaggaac

SEQ ID NO: 1746392 - RNA, 19 nt, Artificial Sequence
  Description of Artificial Sequence: Synthetic oligonucleotide
  Antisense strand to SEQ ID NO: 1746391
guuccuacagcaauuugag

SEQ ID NO: 1746393 - RNA, 19 nt, Artificial Sequence
  Description of Artificial Sequence: Synthetic oligonucleotide
  Sense strand starting at position 576 of SEQ ID NO: 1562431
caaauugcuguaggaacau

SEQ ID NO: 1746394 - RNA, 19 nt, Artificial Sequence
  Description of Artificial Sequence: Synthetic oligonucleotide
  Antisense strand to SEQ ID NO: 1746393
auguuccuacagcaauuug

SEQ ID NO: 1746395 - RNA, 19 nt, Artificial Sequence
  Description of Artificial Sequence: Synthetic oligonucleotide
  Sense strand starting at position 677 of SEQ ID NO: 1562431
augauugcugacuagcaga

SEQ ID NO: 1746396 - RNA, 19 nt, Artificial Sequence
  Description of Artificial Sequence: Synthetic oligonucleotide
  Antisense strand to SEQ ID NO: 1746395
ucugcuagucagcaaucau

SEQ ID NO: 1746397 - RNA, 19 nt, Artificial Sequence
  Description of Artificial Sequence: Synthetic oligonucleotide
  Sense strand starting at position 853 of SEQ ID NO: 1562431
uccuuacuugugcagaaug

SEQ ID NO: 1746398 - RNA, 19 nt, Artificial Sequence
  Description of Artificial Sequence: Synthetic oligonucleotide
  Antisense strand to SEQ ID NO: 1746397
cauucugcacaaguaagga

SEQ ID NO: 1746399 - RNA, 19 nt, Artificial Sequence
  Description of Artificial Sequence: Synthetic oligonucleotide
  Sense strand starting at position 865 of SEQ ID NO: 1562431
cagaauguuggucauacac

SEQ ID NO: 1746400 - RNA, 19 nt, Artificial Sequence
  Description of Artificial Sequence: Synthetic oligonucleotide
  Antisense strand to SEQ ID NO: 1746399
guguaugaccaacauucug

SEQ ID NO: 1746401 - RNA, 19 nt, Artificial Sequence
  Description of Artificial Sequence: Synthetic oligonucleotide
  Sense strand starting at position 977 of SEQ ID NO: 1562431
gcacuuguaggagacuuau

SEQ ID NO: 1746402 - RNA, 19 nt, Artificial Sequence
  Description of Artificial Sequence: Synthetic oligonucleotide
  Antisense strand to SEQ ID NO: 1746401
auaagucuccuacaagugc

SEQ ID NO: 1746403 - RNA, 19 nt, Artificial Sequence
  Description of Artificial Sequence: Synthetic oligonucleotide
  Sense strand starting at position 985 of SEQ ID NO: 1562431
aggagacuuaucugcuuag

SEQ ID NO: 1746404 - RNA, 19 nt, Artificial Sequence
  Description of Artificial Sequence: Synthetic oligonucleotide
  Antisense strand to SEQ ID NO: 1746403
cuaagcagauaagucuccu

SEQ ID NO: 1746405 - RNA, 19 nt, Artificial Sequence
  Description of Artificial Sequence: Synthetic oligonucleotide
  Sense strand starting at position 994 of SEQ ID NO: 1562431
aucugcuuagucuaagauu

SEQ ID NO: 1746406 - RNA, 19 nt, Artificial Sequence
  Description of Artificial Sequence: Synthetic oligonucleotide
  Antisense strand to SEQ ID NO: 1746405
aaucuuagacuaagcagau

SEQ ID NO: 1746407 - RNA, 19 nt, Artificial Sequence
  Description of Artificial Sequence: Synthetic oligonucleotide
  Sense strand starting at position 1090 of SEQ ID NO: 1562431
acaagauagucauugcuga

SEQ ID NO: 1746408 - RNA, 19 nt, Artificial Sequence
  Description of Artificial Sequence: Synthetic oligonucleotide
  Antisense strand to SEQ ID NO: 1746407
ucagcaaugacuaucuugu

SEQ ID NO: 1746409 - RNA, 19 nt, Artificial Sequence
  Description of Artificial Sequence: Synthetic oligonucleotide
  Sense strand starting at position 1091 of SEQ ID NO: 1562431
caagauagucauugcugaa

SEQ ID NO: 1746410 - RNA, 19 nt, Artificial Sequence
  Description of Artificial Sequence: Synthetic oligonucleotide
  Antisense strand to SEQ ID NO: 1746409
uucagcaaugacuaucuug

SEQ ID NO: 1746411 - RNA, 19 nt, Artificial Sequence
  Description of Artificial Sequence: Synthetic oligonucleotide
  Sense strand starting at position 1193 of SEQ ID NO: 1562431
ugagcuuaauauuuguguu

SEQ ID NO: 1746412 - RNA, 19 nt, Artificial Sequence
  Description of Artificial Sequence: Synthetic oligonucleotide
  Antisense strand to SEQ ID NO: 1746411
aacacaaauauuaagcuca

SEQ ID NO: 1746413 - RNA, 19 nt, Artificial Sequence
  Description of Artificial Sequence: Synthetic oligonucleotide
  Sense strand starting at position 1300 of SEQ ID NO: 1562431
cguugucuuauuuaaaguu

SEQ ID NO: 1746414 - RNA, 19 nt, Artificial Sequence
  Description of Artificial Sequence: Synthetic oligonucleotide
  Antisense strand to SEQ ID NO: 1746413
aacuuuaaauaagacaacg

SEQ ID NO: 1746415 - RNA, 19 nt, Artificial Sequence
  Description of Artificial Sequence: Synthetic oligonucleotide
  Sense strand starting at position 1375 of SEQ ID NO: 1562431
agaccagacuucuuaguga

SEQ ID NO: 1746416 - RNA, 19 nt, Artificial Sequence
  Description of Artificial Sequence: Synthetic oligonucleotide
  Antisense strand to SEQ ID NO: 1746415
ucacuaagaagucuggucu

SEQ ID NO: 1746417 - RNA, 19 nt, Artificial Sequence
  Description of Artificial Sequence: Synthetic oligonucleotide
  Sense strand starting at position 1503 of SEQ ID NO: 1562431
gauguaagagcuuacauua

SEQ ID NO: 1746418 - RNA, 19 nt, Artificial Sequence
  Description of Artificial Sequence: Synthetic oligonucleotide
  Antisense strand to SEQ ID NO: 1746417
uaauguaagcucuuacauc

SEQ ID NO: 1746419 - RNA, 19 nt, Artificial Sequence
  Description of Artificial Sequence: Synthetic oligonucleotide
  Sense strand starting at position 1566 of SEQ ID NO: 1562431
cagcgaugugaugaaacua

SEQ ID NO: 1746420 - RNA, 19 nt, Artificial Sequence
  Description of Artificial Sequence: Synthetic oligonucleotide
  Antisense strand to SEQ ID NO: 1746419
uaguuucaucacaucgcug

SEQ ID NO: 1746421 - RNA, 19 nt, Artificial Sequence
  Description of Artificial Sequence: Synthetic oligonucleotide
  Sense strand starting at position 1574 of SEQ ID NO: 1562431
ugaugaaacuacucagucu

SEQ ID NO: 1746422 - RNA, 19 nt, Artificial Sequence
  Description of Artificial Sequence: Synthetic oligonucleotide
  Antisense strand to SEQ ID NO: 1746421
agacugaguaguuucauca

SEQ ID NO: 1746423 - RNA, 19 nt, Artificial Sequence
  Description of Artificial Sequence: Synthetic oligonucleotide
  Sense strand starting at position 1701 of SEQ ID NO: 1562431
ugaucuuggagaggucauu

SEQ ID NO: 1746424 - RNA, 19 nt, Artificial Sequence
  Description of Artificial Sequence: Synthetic oligonucleotide
  Antisense strand to SEQ ID NO: 1746423
aaugaccucuccaagauca

SEQ ID NO: 1746425 - RNA, 19 nt, Artificial Sequence
  Description of Artificial Sequence: Synthetic oligonucleotide
  Sense strand starting at position 1707 of SEQ ID NO: 1562431
uggagaggucauugcaaag

SEQ ID NO: 1746426 - RNA, 19 nt, Artificial Sequence
  Description of Artificial Sequence: Synthetic oligonucleotide
  Antisense strand to SEQ ID NO: 1746425
cuuugcaaugaccucucca

SEQ ID NO: 1746427 - RNA, 19 nt, Artificial Sequence
  Description of Artificial Sequence: Synthetic oligonucleotide
  Sense strand starting at position 1732 of SEQ ID NO: 1562431
augaccuguagugaugauu

SEQ ID NO: 1746428 - RNA, 19 nt, Artificial Sequence
  Description of Artificial Sequence: Synthetic oligonucleotide
  Antisense strand to SEQ ID NO: 1746427
aaucaucacuacaggucau

SEQ ID NO: 1746429 - RNA, 19 nt, Artificial Sequence
  Description of Artificial Sequence: Synthetic oligonucleotide
  Sense strand starting at position 1735 of SEQ ID NO: 1562431
accuguagugaugauuagu

SEQ ID NO: 1746430 - RNA, 19 nt, Artificial Sequence
  Description of Artificial Sequence: Synthetic oligonucleotide
  Antisense strand to SEQ ID NO: 1746429
acuaaucaucacuacaggu

SEQ ID NO: 1746431 - RNA, 19 nt, Artificial Sequence
  Description of Artificial Sequence: Synthetic oligonucleotide
  Sense strand starting at position 2025 of SEQ ID NO: 1562431
ugagguguaggaggauauu

SEQ ID NO: 1746432 - RNA, 19 nt, Artificial Sequence
  Description of Artificial Sequence: Synthetic oligonucleotide
  Antisense strand to SEQ ID NO: 1746431
aauauccuccuacaccuca

SEQ ID NO: 1746433 - RNA, 19 nt, Artificial Sequence
  Description of Artificial Sequence: Synthetic oligonucleotide
  Sense strand starting at position 2082 of SEQ ID NO: 1562431
auauacuuccagggaugca

SEQ ID NO: 1746434 - RNA, 19 nt, Artificial Sequence
  Description of Artificial Sequence: Synthetic oligonucleotide
  Antisense strand to SEQ ID NO: 1746433
ugcaucccuggaaguauau

SEQ ID NO: 1746435 - RNA, 19 nt, Artificial Sequence
  Description of Artificial Sequence: Synthetic oligonucleotide
  Sense strand starting at position 2204 of SEQ ID NO: 1562431
augacuucccuaggaauau

SEQ ID NO: 1746436 - RNA, 19 nt, Artificial Sequence
  Description of Artificial Sequence: Synthetic oligonucleotide
  Antisense strand to SEQ ID NO: 1746435
auauuccuagggaagucau

SEQ ID NO: 1746437 - RNA, 19 nt, Artificial Sequence
  Description of Artificial Sequence: Synthetic oligonucleotide
  Sense strand starting at position 2338 of SEQ ID NO: 1562431
auguuugaccuauaaaugu

SEQ ID NO: 1746438 - RNA, 19 nt, Artificial Sequence
  Description of Artificial Sequence: Synthetic oligonucleotide
  Antisense strand to SEQ ID NO: 1746437
acauuuauaggucaaacau

SEQ ID NO: 1746439 - RNA, 19 nt, Artificial Sequence
  Description of Artificial Sequence: Synthetic oligonucleotide
  Sense strand starting at position 2375 of SEQ ID NO: 1562431
uuguaaggucuugagaauu

SEQ ID NO: 1746440 - RNA, 19 nt, Artificial Sequence
  Description of Artificial Sequence: Synthetic oligonucleotide
  Antisense strand to SEQ ID NO: 1746439
aauucucaagaccuuacaa

SEQ ID NO: 1746441 - RNA, 19 nt, Artificial Sequence
  Description of Artificial Sequence: Synthetic oligonucleotide
  Sense strand starting at position 2669 of SEQ ID NO: 1562431
aggucaguuauguaauaug

SEQ ID NO: 1746442 - RNA, 19 nt, Artificial Sequence
  Description of Artificial Sequence: Synthetic oligonucleotide
  Antisense strand to SEQ ID NO: 1746441
cauauuacauaacugaccu

SEQ ID NO: 1746443 - RNA, 19 nt, Artificial Sequence
  Description of Artificial Sequence: Synthetic oligonucleotide
  Sense strand starting at position 3199 of SEQ ID NO: 1562431
ggcucuguaguagaaauag

SEQ ID NO: 1746444 - RNA, 19 nt, Artificial Sequence
  Description of Artificial Sequence: Synthetic oligonucleotide
  Antisense strand to SEQ ID NO: 1746443
cuauuucuacuacagagcc

SEQ ID NO: 1746445 - RNA, 19 nt, Artificial Sequence
  Description of Artificial Sequence: Synthetic oligonucleotide
  Sense strand starting at position 3210 of SEQ ID NO: 1562431
agaaauagcuuucccugga

SEQ ID NO: 1746446 - RNA, 19 nt, Artificial Sequence
  Description of Artificial Sequence: Synthetic oligonucleotide
  Antisense strand to SEQ ID NO: 1746445
uccagggaaagcuauuucu

SEQ ID NO: 1746447 - RNA, 19 nt, Artificial Sequence
  Description of Artificial Sequence: Synthetic oligonucleotide
  Sense strand starting at position 3388 of SEQ ID NO: 1562431
aggcaauauaaguagugua

SEQ ID NO: 1746448 - RNA, 19 nt, Artificial Sequence
  Description of Artificial Sequence: Synthetic oligonucleotide
  Antisense strand to SEQ ID NO: 1746447
uacacuacuuauauugccu

SEQ ID NO: 1746449 - RNA, 19 nt, Artificial Sequence
  Description of Artificial Sequence: Synthetic oligonucleotide
  Sense strand starting at position 3393 of SEQ ID NO: 1562431
auauaaguaguguagcaau

SEQ ID NO: 1746450 - RNA, 19 nt, Artificial Sequence
  Description of Artificial Sequence: Synthetic oligonucleotide
  Antisense strand to SEQ ID NO: 1746449
auugcuacacuacuuauau

SEQ ID NO: 1746451 - RNA, 19 nt, Artificial Sequence
  Description of Artificial Sequence: Synthetic oligonucleotide
  Sense strand starting at position 3584 of SEQ ID NO: 1562431
guaugugauauacauaugu

SEQ ID NO: 1746452 - RNA, 19 nt, Artificial Sequence
  Description of Artificial Sequence: Synthetic oligonucleotide
  Antisense strand to SEQ ID NO: 1746451
acauauguauaucacauac

SEQ ID NO: 1746453 - RNA, 19 nt, Artificial Sequence
  Description of Artificial Sequence: Synthetic oligonucleotide
  Sense strand starting at position 3682 of SEQ ID NO: 1562431
uguaauugaccucaguuua

SEQ ID NO: 1746454 - RNA, 19 nt, Artificial Sequence
  Description of Artificial Sequence: Synthetic oligonucleotide
  Antisense strand to SEQ ID NO: 1746453
uaaacugaggucaauuaca

SEQ ID NO: 1746455 - RNA, 19 nt, Artificial Sequence
  Description of Artificial Sequence: Synthetic oligonucleotide
  Sense strand starting at position 3781 of SEQ ID NO: 1562431
gugguagugguauaaauau

SEQ ID NO: 1746456 - RNA, 19 nt, Artificial Sequence
  Description of Artificial Sequence: Synthetic oligonucleotide
  Antisense strand to SEQ ID NO: 1746455
auauuuauaccacuaccac

SEQ ID NO: 1746457 - RNA, 19 nt, Artificial Sequence
  Description of Artificial Sequence: Synthetic oligonucleotide
  Sense strand starting at position 3864 of SEQ ID NO: 1562431
cuguucuuugacuaaguca

SEQ ID NO: 1746458 - RNA, 19 nt, Artificial Sequence
  Description of Artificial Sequence: Synthetic oligonucleotide
  Antisense strand to SEQ ID NO: 1746457
ugacuuagucaaagaacag

SEQ ID NO: 1746459 - RNA, 19 nt, Artificial Sequence
  Description of Artificial Sequence: Synthetic oligonucleotide
  Sense strand starting at position 319 of SEQ ID NO: 1562432
uggcaacaguccucugaca

SEQ ID NO: 1746460 - RNA, 19 nt, Artificial Sequence
  Description of Artificial Sequence: Synthetic oligonucleotide
  Antisense strand to SEQ ID NO: 1746459
ugucagaggacuguugcca

SEQ ID NO: 1746461 - RNA, 19 nt, Artificial Sequence
  Description of Artificial Sequence: Synthetic oligonucleotide
  Sense strand starting at position 321 of SEQ ID NO: 1562432
gcaacaguccucugacauc

SEQ ID NO: 1746462 - RNA, 19 nt, Artificial Sequence
  Description of Artificial Sequence: Synthetic oligonucleotide
  Antisense strand to SEQ ID NO: 1746461
gaugucagaggacuguugc

SEQ ID NO: 1746463 - RNA, 19 nt, Artificial Sequence
  Description of Artificial Sequence: Synthetic oligonucleotide
  Sense strand starting at position 330 of SEQ ID NO: 1562432
cucugacaucaguguuuau

SEQ ID NO: 1746464 - RNA, 19 nt, Artificial Sequence
  Description of Artificial Sequence: Synthetic oligonucleotide
  Antisense strand to SEQ ID NO: 1746463
auaaacacugaugucagag

SEQ ID NO: 1746465 - RNA, 19 nt, Artificial Sequence
  Description of Artificial Sequence: Synthetic oligonucleotide
  Sense strand starting at position 333 of SEQ ID NO: 1562432
ugacaucaguguuuauaac

SEQ ID NO: 1746466 - RNA, 19 nt, Artificial Sequence
  Description of Artificial Sequence: Synthetic oligonucleotide
  Antisense strand to SEQ ID NO: 1746465
guuauaaacacugauguca

SEQ ID NO: 1746467 - RNA, 19 nt, Artificial Sequence
  Description of Artificial Sequence: Synthetic oligonucleotide
  Sense strand starting at position 427 of SEQ ID NO: 1562432
augggaacauuggcaucua

SEQ ID NO: 1746468 - RNA, 19 nt, Artificial Sequence
  Description of Artificial Sequence: Synthetic oligonucleotide
  Antisense strand to SEQ ID NO: 1746467
uagaugccaauguucccau

SEQ ID NO: 1746469 - RNA, 19 nt, Artificial Sequence
  Description of Artificial Sequence: Synthetic oligonucleotide
  Sense strand starting at position 498 of SEQ ID NO: 1562432
gugacuacacuuugccaua

SEQ ID NO: 1746470 - RNA, 19 nt, Artificial Sequence
  Description of Artificial Sequence: Synthetic oligonucleotide
  Antisense strand to SEQ ID NO: 1746469
uauggcaaaguguagucac

SEQ ID NO: 1746471 - RNA, 19 nt, Artificial Sequence
  Description of Artificial Sequence: Synthetic oligonucleotide
  Sense strand starting at position 518 of SEQ ID NO: 1562432
aggagaauuguuugauauc

SEQ ID NO: 1746472 - RNA, 19 nt, Artificial Sequence
  Description of Artificial Sequence: Synthetic oligonucleotide
  Antisense strand to SEQ ID NO: 1746471
gauaucaaacaauucuccu

SEQ ID NO: 1746473 - RNA, 19 nt, Artificial Sequence
  Description of Artificial Sequence: Synthetic oligonucleotide
  Sense strand starting at position 549 of SEQ ID NO: 1562432
guccuagacucacuuuauc

SEQ ID NO: 1746474 - RNA, 19 nt, Artificial Sequence
  Description of Artificial Sequence: Synthetic oligonucleotide
  Antisense strand to SEQ ID NO: 1746473
gauaaagugagucuaggac

SEQ ID NO: 1746475 - RNA, 19 nt, Artificial Sequence
  Description of Artificial Sequence: Synthetic oligonucleotide
  Sense strand starting at position 860 of SEQ ID NO: 1562432
guggaauguuaggcaaagu

SEQ ID NO: 1746476 - RNA, 19 nt, Artificial Sequence
  Description of Artificial Sequence: Synthetic oligonucleotide
  Antisense strand to SEQ ID NO: 1746475
acuuugccuaacauuccac

SEQ ID NO: 1746477 - RNA, 19 nt, Artificial Sequence
  Description of Artificial Sequence: Synthetic oligonucleotide
  Sense strand starting at position 921 of SEQ ID NO: 1562432
cagaacugucuaugagaau

SEQ ID NO: 1746478 - RNA, 19 nt, Artificial Sequence
  Description of Artificial Sequence: Synthetic oligonucleotide
  Antisense strand to SEQ ID NO: 1746477
auucucauagacaguucug

SEQ ID NO: 1746479 - RNA, 19 nt, Artificial Sequence
  Description of Artificial Sequence: Synthetic oligonucleotide
  Sense strand starting at position 951 of SEQ ID NO: 1562432
ggccgacggaauuagaauu

SEQ ID NO: 1746480 - RNA, 19 nt, Artificial Sequence
  Description of Artificial Sequence: Synthetic oligonucleotide
  Antisense strand to SEQ ID NO: 1746479
aauucuaauuccgucggcc

SEQ ID NO: 1746481 - RNA, 19 nt, Artificial Sequence
  Description of Artificial Sequence: Synthetic oligonucleotide
  Sense strand starting at position 965 of SEQ ID NO: 1562432
gaauuagaaucauuguguu

SEQ ID NO: 1746482 - RNA, 19 nt, Artificial Sequence
  Description of Artificial Sequence: Synthetic oligonucleotide
  Antisense strand to SEQ ID NO: 1746481
aacacaaugauucuaauuc

SEQ ID NO: 1746483 - RNA, 19 nt, Artificial Sequence
  Description of Artificial Sequence: Synthetic oligonucleotide
  Sense strand starting at position 1299 of SEQ ID NO: 1562432
ggcugauaauaaucuacua

SEQ ID NO: 1746484 - RNA, 19 nt, Artificial Sequence
  Description of Artificial Sequence: Synthetic oligonucleotide
  Antisense strand to SEQ ID NO: 1746483
uaguagauuauuaucagcc

SEQ ID NO: 1746485 - RNA, 19 nt, Artificial Sequence
  Description of Artificial Sequence: Synthetic oligonucleotide
  Sense strand starting at position 1406 of SEQ ID NO: 1562432
auauuaaauauguggugga

SEQ ID NO: 1746486 - RNA, 19 nt, Artificial Sequence
  Description of Artificial Sequence: Synthetic oligonucleotide
  Antisense strand to SEQ ID NO: 1746485
uccaccacauauuuaauau

SEQ ID NO: 1746487 - RNA, 19 nt, Artificial Sequence
  Description of Artificial Sequence: Synthetic oligonucleotide
  Sense strand starting at position 1410 of SEQ ID NO: 1562432
uaaauaugugguggauacu

SEQ ID NO: 1746488 - RNA, 19 nt, Artificial Sequence
  Description of Artificial Sequence: Synthetic oligonucleotide
  Antisense strand to SEQ ID NO: 1746487
aguauccaccacauauuua

SEQ ID NO: 1746489 - RNA, 19 nt, Artificial Sequence
  Description of Artificial Sequence: Synthetic oligonucleotide
  Sense strand starting at position 1500 of SEQ ID NO: 1562432
agaaauuucuaagaagcua

SEQ ID NO: 1746490 - RNA, 19 nt, Artificial Sequence
  Description of Artificial Sequence: Synthetic oligonucleotide
  Antisense strand to SEQ ID NO: 1746489
uagcuucuuagaaauuucu

SEQ ID NO: 1746491 - RNA, 19 nt, Artificial Sequence
  Description of Artificial Sequence: Synthetic oligonucleotide
  Sense strand starting at position 1662 of SEQ ID NO: 1562432
ccacauuaugucuaugacu

SEQ ID NO: 1746492 - RNA, 19 nt, Artificial Sequence
  Description of Artificial Sequence: Synthetic oligonucleotide
  Antisense strand to SEQ ID NO: 1746491
agucauagacauaaugugg

SEQ ID NO: 1746493 - RNA, 19 nt, Artificial Sequence
  Description of Artificial Sequence: Synthetic oligonucleotide
  Sense strand starting at position 1983 of SEQ ID NO: 1562432
agugucaggagaugagaau

SEQ ID NO: 1746494 - RNA, 19 nt, Artificial Sequence
  Description of Artificial Sequence: Synthetic oligonucleotide
  Antisense strand to SEQ ID NO: 1746493
auucucaucuccugacacu

SEQ ID NO: 1746495 - RNA, 19 nt, Artificial Sequence
  Description of Artificial Sequence: Synthetic oligonucleotide
  Sense strand starting at position 2054 of SEQ ID NO: 1562432
uaauaagaggucugcaaag

SEQ ID NO: 1746496 - RNA, 19 nt, Artificial Sequence
  Description of Artificial Sequence: Synthetic oligonucleotide
  Antisense strand to SEQ ID NO: 1746495
cuuugcagaccucuuauua

SEQ ID NO: 1746497 - RNA, 19 nt, Artificial Sequence
  Description of Artificial Sequence: Synthetic oligonucleotide
  Sense strand starting at position 2139 of SEQ ID NO: 1562432
uuuauucuguguccuaaga

SEQ ID NO: 1746498 - RNA, 19 nt, Artificial Sequence
  Description of Artificial Sequence: Synthetic oligonucleotide
  Antisense strand to SEQ ID NO: 1746497
ucuuaggacacagaauaaa

SEQ ID NO: 1746499 - RNA, 19 nt, Artificial Sequence
  Description of Artificial Sequence: Synthetic oligonucleotide
  Sense strand starting at position 2188 of SEQ ID NO: 1562432
ccugcaaguuaaucauaga

SEQ ID NO: 1746500 - RNA, 19 nt, Artificial Sequence
  Description of Artificial Sequence: Synthetic oligonucleotide
  Antisense strand to SEQ ID NO: 1746499
ucuaugauuaacuugcagg

SEQ ID NO: 1746501 - RNA, 19 nt, Artificial Sequence
  Description of Artificial Sequence: Synthetic oligonucleotide
  Sense strand starting at position 2221 of SEQ ID NO: 1562432
uuguacacucuguauacau

SEQ ID NO: 1746502 - RNA, 19 nt, Artificial Sequence
  Description of Artificial Sequence: Synthetic oligonucleotide
  Antisense strand to SEQ ID NO: 1746501
auguauacagaguguacaa

SEQ ID NO: 1746503 - RNA, 19 nt, Artificial Sequence
  Description of Artificial Sequence: Synthetic oligonucleotide
  Sense strand starting at position 2232 of SEQ ID NO: 1562432
guauacauguucucaguga

SEQ ID NO: 1746504 - RNA, 19 nt, Artificial Sequence
  Description of Artificial Sequence: Synthetic oligonucleotide
  Antisense strand to SEQ ID NO: 1746503
ucacugagaacauguauac

SEQ ID NO: 1746505 - RNA, 19 nt, Artificial Sequence
  Description of Artificial Sequence: Synthetic oligonucleotide
  Sense strand starting at position 2284 of SEQ ID NO: 1562432
cuaaaucuugcagggaagu

SEQ ID NO: 1746506 - RNA, 19 nt, Artificial Sequence
  Description of Artificial Sequence: Synthetic oligonucleotide
  Antisense strand to SEQ ID NO: 1746505
acuucccugcaagauuuag

SEQ ID NO: 1746507 - RNA, 19 nt, Artificial Sequence
  Description of Artificial Sequence: Synthetic oligonucleotide
  Sense strand starting at position 2285 of SEQ ID NO: 1562432
uaaaucuugcagggaagua

SEQ ID NO: 1746508 - RNA, 19 nt, Artificial Sequence
  Description of Artificial Sequence: Synthetic oligonucleotide
  Antisense strand to SEQ ID NO: 1746507
uacuucccugcaagauuua

SEQ ID NO: 1746509 - RNA, 19 nt, Artificial Sequence
  Description of Artificial Sequence: Synthetic oligonucleotide
  Sense strand starting at position 2297 of SEQ ID NO: 1562432
ggaaguacuucccucagcu

SEQ ID NO: 1746510 - RNA, 19 nt, Artificial Sequence
  Description of Artificial Sequence: Synthetic oligonucleotide
  Antisense strand to SEQ ID NO: 1746509
agcugagggaaguacuucc

SEQ ID NO: 1746511 - RNA, 19 nt, Artificial Sequence
  Description of Artificial Sequence: Synthetic oligonucleotide
  Sense strand starting at position 2654 of SEQ ID NO: 1562432
gauugaugcgguuagagaa

SEQ ID NO: 1746512 - RNA, 19 nt, Artificial Sequence
  Description of Artificial Sequence: Synthetic oligonucleotide
  Antisense strand to SEQ ID NO: 1746511
uucucuaaccgcaucaauc

SEQ ID NO: 1746513 - RNA, 19 nt, Artificial Sequence
  Description of Artificial Sequence: Synthetic oligonucleotide
  Sense strand starting at position 3155 of SEQ ID NO: 1562432
auggcauaaucagcucaau

SEQ ID NO: 1746514 - RNA, 19 nt, Artificial Sequence
  Description of Artificial Sequence: Synthetic oligonucleotide
  Antisense strand to SEQ ID NO: 1746513
auugagcugauuaugccau

SEQ ID NO: 1746515 - RNA, 19 nt, Artificial Sequence
  Description of Artificial Sequence: Synthetic oligonucleotide
  Sense strand starting at position 3197 of SEQ ID NO: 1562432
ccauuuauccaguguacuu

SEQ ID NO: 1746516 - RNA, 19 nt, Artificial Sequence
  Description of Artificial Sequence: Synthetic oligonucleotide
  Antisense strand to SEQ ID NO: 1746515
aaguacacuggauaaaugg

SEQ ID NO: 1746517 - RNA, 19 nt, Artificial Sequence
  Description of Artificial Sequence: Synthetic oligonucleotide
  Sense strand starting at position 3222 of SEQ ID NO: 1562432
guccuauuucuucgaaacc

SEQ ID NO: 1746518 - RNA, 19 nt, Artificial Sequence
  Description of Artificial Sequence: Synthetic oligonucleotide
  Antisense strand to SEQ ID NO: 1746517
gguuucgaagaaauaggac

SEQ ID NO: 1746519 - RNA, 19 nt, Artificial Sequence
  Description of Artificial Sequence: Synthetic oligonucleotide
  Sense strand starting at position 3248 of SEQ ID NO: 1562432
gcuaaauuauucucuugag

SEQ ID NO: 1746520 - RNA, 19 nt, Artificial Sequence
  Description of Artificial Sequence: Synthetic oligonucleotide
  Antisense strand to SEQ ID NO: 1746519
cucaagagaauaauuuagc

SEQ ID NO: 1746521 - RNA, 19 nt, Artificial Sequence
  Description of Artificial Sequence: Synthetic oligonucleotide
  Sense strand starting at position 3254 of SEQ ID NO: 1562432
uuauucucuugagcaaaga

SEQ ID NO: 1746522 - RNA, 19 nt, Artificial Sequence
  Description of Artificial Sequence: Synthetic oligonucleotide
  Antisense strand to SEQ ID NO: 1746521
ucuuugcucaagagaauaa

SEQ ID NO: 1746523 - RNA, 19 nt, Artificial Sequence
  Description of Artificial Sequence: Synthetic oligonucleotide
  Sense strand starting at position 3270 of SEQ ID NO: 1562432
agaucuuuccuugagcacu

SEQ ID NO: 1746524 - RNA, 19 nt, Artificial Sequence
  Description of Artificial Sequence: Synthetic oligonucleotide
  Antisense strand to SEQ ID NO: 1746523
agugcucaaggaaagaucu

SEQ ID NO: 1746525 - RNA, 19 nt, Artificial Sequence
  Description of Artificial Sequence: Synthetic oligonucleotide
  Sense strand starting at position 3300 of SEQ ID NO: 1562432
cauugaauuuguggcauuu

SEQ ID NO: 1746526 - RNA, 19 nt, Artificial Sequence
  Description of Artificial Sequence: Synthetic oligonucleotide
  Antisense strand to SEQ ID NO: 1746525
aaaugccacaaauucaaug

SEQ ID NO: 1746527 - RNA, 19 nt, Artificial Sequence
  Description of Artificial Sequence: Synthetic oligonucleotide
  Sense strand starting at position 3325 of SEQ ID NO: 1562432
ccaauuauguuuccaggaa

SEQ ID NO: 1746528 - RNA, 19 nt, Artificial Sequence
  Description of Artificial Sequence: Synthetic oligonucleotide
  Antisense strand to SEQ ID NO: 1746527
uuccuggaaacauaauugg

SEQ ID NO: 1746529 - RNA, 19 nt, Artificial Sequence
  Description of Artificial Sequence: Synthetic oligonucleotide
  Sense strand starting at position 3346 of SEQ ID NO: 1562432
cuaggacugggagguauua

SEQ ID NO: 1746530 - RNA, 19 nt, Artificial Sequence
  Description of Artificial Sequence: Synthetic oligonucleotide
  Antisense strand to SEQ ID NO: 1746529
uaauaccucccaguccuag

SEQ ID NO: 1746531 - RNA, 19 nt, Artificial Sequence
  Description of Artificial Sequence: Synthetic oligonucleotide
  Sense strand starting at position 3454 of SEQ ID NO: 1562432
uacauaugcgcuguaaguu

SEQ ID NO: 1746532 - RNA, 19 nt, Artificial Sequence
  Description of Artificial Sequence: Synthetic oligonucleotide
  Antisense strand to SEQ ID NO: 1746531
aacuuacagcgcauaugua

SEQ ID NO: 1746533 - RNA, 19 nt, Artificial Sequence
  Description of Artificial Sequence: Synthetic oligonucleotide
  Sense strand starting at position 3481 of SEQ ID NO: 1562432
accuaaaugccagguauug

SEQ ID NO: 1746534 - RNA, 19 nt, Artificial Sequence
  Description of Artificial Sequence: Synthetic oligonucleotide
  Antisense strand to SEQ ID NO: 1746533
caauaccuggcauuuaggu

SEQ ID NO: 1746535 - RNA, 19 nt, Artificial Sequence
  Description of Artificial Sequence: Synthetic oligonucleotide
  Sense strand starting at position 3549 of SEQ ID NO: 1562432
ggaggacaacuguguaaag

SEQ ID NO: 1746536 - RNA, 19 nt, Artificial Sequence
  Description of Artificial Sequence: Synthetic oligonucleotide
  Antisense strand to SEQ ID NO: 1746535
cuuuacacaguuguccucc

SEQ ID NO: 1746537 - RNA, 19 nt, Artificial Sequence
  Description of Artificial Sequence: Synthetic oligonucleotide
  Sense strand starting at position 3662 of SEQ ID NO: 1562432
aucgucuuagaguauaugu

SEQ ID NO: 1746538 - RNA, 19 nt, Artificial Sequence
  Description of Artificial Sequence: Synthetic oligonucleotide
  Antisense strand to SEQ ID NO: 1746537
acauauacucuaagacgau

SEQ ID NO: 1746539 - RNA, 19 nt, Artificial Sequence
  Description of Artificial Sequence: Synthetic oligonucleotide
  Sense strand starting at position 75 of SEQ ID NO: 1562433
acauaccucuuggucagau

SEQ ID NO: 1746540 - RNA, 19 nt, Artificial Sequence
  Description of Artificial Sequence: Synthetic oligonucleotide
  Antisense strand to SEQ ID NO: 1746539
aucugaccaagagguaugu

SEQ ID NO: 1746541 - RNA, 19 nt, Artificial Sequence
  Description of Artificial Sequence: Synthetic oligonucleotide
  Sense strand starting at position 127 of SEQ ID NO: 1562433
ggacaugagauaugcuaau

SEQ ID NO: 1746542 - RNA, 19 nt, Artificial Sequence
  Description of Artificial Sequence: Synthetic oligonucleotide
  Antisense strand to SEQ ID NO: 1746541
auuagcauaucucaugucc

SEQ ID NO: 1746543 - RNA, 19 nt, Artificial Sequence
  Description of Artificial Sequence: Synthetic oligonucleotide
  Sense strand starting at position 271 of SEQ ID NO: 1562433
gcugauugugaacaaguga

SEQ ID NO: 1746544 - RNA, 19 nt, Artificial Sequence
  Description of Artificial Sequence: Synthetic oligonucleotide
  Antisense strand to SEQ ID NO: 1746543
ucacuuguucacaaucagc

SEQ ID NO: 1746545 - RNA, 19 nt, Artificial Sequence
  Description of Artificial Sequence: Synthetic oligonucleotide
  Sense strand starting at position 358 of SEQ ID NO: 1562433
gccuuaggauaauuaccaa

SEQ ID NO: 1746546 - RNA, 19 nt, Artificial Sequence
  Description of Artificial Sequence: Synthetic oligonucleotide
  Antisense strand to SEQ ID NO: 1746545
uugguaauuauccuaaggc

SEQ ID NO: 1746547 - RNA, 19 nt, Artificial Sequence
  Description of Artificial Sequence: Synthetic oligonucleotide
  Sense strand starting at position 395 of SEQ ID NO: 1562433
aguauauacuaagucugau

SEQ ID NO: 1746548 - RNA, 19 nt, Artificial Sequence
  Description of Artificial Sequence: Synthetic oligonucleotide
  Antisense strand to SEQ ID NO: 1746547
aucagacuuaguauauacu

SEQ ID NO: 1746549 - RNA, 19 nt, Artificial Sequence
  Description of Artificial Sequence: Synthetic oligonucleotide
  Sense strand starting at position 443 of SEQ ID NO: 1562433
ugaguaugauggguuauug

SEQ ID NO: 1746550 - RNA, 19 nt, Artificial Sequence
  Description of Artificial Sequence: Synthetic oligonucleotide
  Antisense strand to SEQ ID NO: 1746549
caauaacccaucauacuca

SEQ ID NO: 1746551 - RNA, 19 nt, Artificial Sequence
  Description of Artificial Sequence: Synthetic oligonucleotide
  Sense strand starting at position 451 of SEQ ID NO: 1562433
auggguuauugaguccaaa

SEQ ID NO: 1746552 - RNA, 19 nt, Artificial Sequence
  Description of Artificial Sequence: Synthetic oligonucleotide
  Antisense strand to SEQ ID NO: 1746551
uuuggacucaauaacccau

SEQ ID NO: 1746553 - RNA, 19 nt, Artificial Sequence
  Description of Artificial Sequence: Synthetic oligonucleotide
  Sense strand starting at position 454 of SEQ ID NO: 1562433
gguuauugaguccaaaguc

SEQ ID NO: 1746554 - RNA, 19 nt, Artificial Sequence
  Description of Artificial Sequence: Synthetic oligonucleotide
  Antisense strand to SEQ ID NO: 1746553
gacuuuggacucaauaacc

SEQ ID NO: 1746555 - RNA, 19 nt, Artificial Sequence
  Description of Artificial Sequence: Synthetic oligonucleotide
  Sense strand starting at position 527 of SEQ ID NO: 1562433
cugggaaucugacuccuaa

SEQ ID NO: 1746556 - RNA, 19 nt, Artificial Sequence
  Description of Artificial Sequence: Synthetic oligonucleotide
  Antisense strand to SEQ ID NO: 1746555
uuaggagucagauucccag

SEQ ID NO: 1746557 - RNA, 19 nt, Artificial Sequence
  Description of Artificial Sequence: Synthetic oligonucleotide
  Sense strand starting at position 625 of SEQ ID NO: 1562433
cugucaauacuuggagaug

SEQ ID NO: 1746558 - RNA, 19 nt, Artificial Sequence
  Description of Artificial Sequence: Synthetic oligonucleotide
  Antisense strand to SEQ ID NO: 1746557
caucuccaaguauugacag

SEQ ID NO: 1746559 - RNA, 19 nt, Artificial Sequence
  Description of Artificial Sequence: Synthetic oligonucleotide
  Sense strand starting at position 746 of SEQ ID NO: 1562433
uuggaagcuaguuaagagu

SEQ ID NO: 1746560 - RNA, 19 nt, Artificial Sequence
  Description of Artificial Sequence: Synthetic oligonucleotide
  Antisense strand to SEQ ID NO: 1746559
acucuuaacuagcuuccaa

SEQ ID NO: 1746561 - RNA, 19 nt, Artificial Sequence
  Description of Artificial Sequence: Synthetic oligonucleotide
  Sense strand starting at position 754 of SEQ ID NO: 1562433
uaguuaagaguuuagccaa

SEQ ID NO: 1746562 - RNA, 19 nt, Artificial Sequence
  Description of Artificial Sequence: Synthetic oligonucleotide
  Antisense strand to SEQ ID NO: 1746561
uuggcuaaacucuuaacua

SEQ ID NO: 1746563 - RNA, 19 nt, Artificial Sequence
  Description of Artificial Sequence: Synthetic oligonucleotide
  Sense strand starting at position 893 of SEQ ID NO: 1562433
aucaaugucgacugauaaa

SEQ ID NO: 1746564 - RNA, 19 nt, Artificial Sequence
  Description of Artificial Sequence: Synthetic oligonucleotide
  Antisense strand to SEQ ID NO: 1746563
uuuaucagucgacauugau

SEQ ID NO: 1746565 - RNA, 19 nt, Artificial Sequence
  Description of Artificial Sequence: Synthetic oligonucleotide
  Sense strand starting at position 1039 of SEQ ID NO: 1562433
agcagauauugaccuugau

SEQ ID NO: 1746566 - RNA, 19 nt, Artificial Sequence
  Description of Artificial Sequence: Synthetic oligonucleotide
  Antisense strand to SEQ ID NO: 1746565
aucaaggucaauaucugcu

SEQ ID NO: 1746567 - RNA, 19 nt, Artificial Sequence
  Description of Artificial Sequence: Synthetic oligonucleotide
  Sense strand starting at position 1269 of SEQ ID NO: 1562433
auguaugugcaacagaaua

SEQ ID NO: 1746568 - RNA, 19 nt, Artificial Sequence
  Description of Artificial Sequence: Synthetic oligonucleotide
  Antisense strand to SEQ ID NO: 1746567
uauucuguugcacauacau

SEQ ID NO: 1746569 - RNA, 19 nt, Artificial Sequence
  Description of Artificial Sequence: Synthetic oligonucleotide
  Sense strand starting at position 1392 of SEQ ID NO: 1562433
ggcucugcccaugagaaua

SEQ ID NO: 1746570 - RNA, 19 nt, Artificial Sequence
  Description of Artificial Sequence: Synthetic oligonucleotide
  Antisense strand to SEQ ID NO: 1746569
uauucucaugggcagagcc

SEQ ID NO: 1746571 - RNA, 19 nt, Artificial Sequence
  Description of Artificial Sequence: Synthetic oligonucleotide
  Sense strand starting at position 1422 of SEQ ID NO: 1562433
aguacuauuggucagaccu

SEQ ID NO: 1746572 - RNA, 19 nt, Artificial Sequence
  Description of Artificial Sequence: Synthetic oligonucleotide
  Antisense strand to SEQ ID NO: 1746571
aggucugaccaauaguacu

SEQ ID NO: 1746573 - RNA, 19 nt, Artificial Sequence
  Description of Artificial Sequence: Synthetic oligonucleotide
  Sense strand starting at position 1491 of SEQ ID NO: 1562433
auaugugcuccugaacaca

SEQ ID NO: 1746574 - RNA, 19 nt, Artificial Sequence
  Description of Artificial Sequence: Synthetic oligonucleotide
  Antisense strand to SEQ ID NO: 1746573
uguguucaggagcacauau

SEQ ID NO: 1746575 - RNA, 19 nt, Artificial Sequence
  Description of Artificial Sequence: Synthetic oligonucleotide
  Sense strand starting at position 1826 of SEQ ID NO: 1562433
gccuaaacagaucagcaau

SEQ ID NO: 1746576 - RNA, 19 nt, Artificial Sequence
  Description of Artificial Sequence: Synthetic oligonucleotide
  Antisense strand to SEQ ID NO: 1746575
auugcugaucuguuuaggc

SEQ ID NO: 1746577 - RNA, 19 nt, Artificial Sequence
  Description of Artificial Sequence: Synthetic oligonucleotide
  Sense strand starting at position 2024 of SEQ ID NO: 1562433
guuguauagcaggaucaga

SEQ ID NO: 1746578 - RNA, 19 nt, Artificial Sequence
  Description of Artificial Sequence: Synthetic oligonucleotide
  Antisense strand to SEQ ID NO: 1746577
ucugauccugcuauacaac

SEQ ID NO: 1746579 - RNA, 19 nt, Artificial Sequence
  Description of Artificial Sequence: Synthetic oligonucleotide
  Sense strand starting at position 2112 of SEQ ID NO: 1562433
acaugaaugguauguggga

SEQ ID NO: 1746580 - RNA, 19 nt, Artificial Sequence
  Description of Artificial Sequence: Synthetic oligonucleotide
  Antisense strand to SEQ ID NO: 1746579
ucccacauaccauucaugu

SEQ ID NO: 1746581 - RNA, 19 nt, Artificial Sequence
  Description of Artificial Sequence: Synthetic oligonucleotide
  Sense strand starting at position 2114 of SEQ ID NO: 1562433
augaaugguaugugggaca

SEQ ID NO: 1746582 - RNA, 19 nt, Artificial Sequence
  Description of Artificial Sequence: Synthetic oligonucleotide
  Antisense strand to SEQ ID NO: 1746581
ugucccacauaccauucau

SEQ ID NO: 1746583 - RNA, 19 nt, Artificial Sequence
  Description of Artificial Sequence: Synthetic oligonucleotide
  Sense strand starting at position 2290 of SEQ ID NO: 1562433
uuugaugacucguuuauuu

SEQ ID NO: 1746584 - RNA, 19 nt, Artificial Sequence
  Description of Artificial Sequence: Synthetic oligonucleotide
  Antisense strand to SEQ ID NO: 1746583
aaauaaacgagucaucaaa

SEQ ID NO: 1746585 - RNA, 19 nt, Artificial Sequence
  Description of Artificial Sequence: Synthetic oligonucleotide
  Sense strand starting at position 2712 of SEQ ID NO: 1562433
auaugcagacuugggaaua

SEQ ID NO: 1746586 - RNA, 19 nt, Artificial Sequence
  Description of Artificial Sequence: Synthetic oligonucleotide
  Antisense strand to SEQ ID NO: 1746585
uauucccaagucugcauau

SEQ ID NO: 1746587 - RNA, 19 nt, Artificial Sequence
  Description of Artificial Sequence: Synthetic oligonucleotide
  Sense strand starting at position 2760 of SEQ ID NO: 1562433
augauaagcguguaagaga

SEQ ID NO: 1746588 - RNA, 19 nt, Artificial Sequence
  Description of Artificial Sequence: Synthetic oligonucleotide
  Antisense strand to SEQ ID NO: 1746587
ucucuuacacgcuuaucau

SEQ ID NO: 1746589 - RNA, 19 nt, Artificial Sequence
  Description of Artificial Sequence: Synthetic oligonucleotide
  Sense strand starting at position 2935 of SEQ ID NO: 1562433
guugauucuggguauauag

SEQ ID NO: 1746590 - RNA, 19 nt, Artificial Sequence
  Description of Artificial Sequence: Synthetic oligonucleotide
  Antisense strand to SEQ ID NO: 1746589
cuauauacccagaaucaac

SEQ ID NO: 1746591 - RNA, 19 nt, Artificial Sequence
  Description of Artificial Sequence: Synthetic oligonucleotide
  Sense strand starting at position 2937 of SEQ ID NO: 1562433
ugauucuggguauauagua

SEQ ID NO: 1746592 - RNA, 19 nt, Artificial Sequence
  Description of Artificial Sequence: Synthetic oligonucleotide
  Antisense strand to SEQ ID NO: 1746591
uacuauauacccagaauca

SEQ ID NO: 1746593 - RNA, 19 nt, Artificial Sequence
  Description of Artificial Sequence: Synthetic oligonucleotide
  Sense strand starting at position 3182 of SEQ ID NO: 1562433
acgaaugaaccaugagcaa

SEQ ID NO: 1746594 - RNA, 19 nt, Artificial Sequence
  Description of Artificial Sequence: Synthetic oligonucleotide
  Antisense strand to SEQ ID NO: 1746593
uugcucaugguucauucgu

SEQ ID NO: 1746595 - RNA, 19 nt, Artificial Sequence
  Description of Artificial Sequence: Synthetic oligonucleotide
  Sense strand starting at position 3196 of SEQ ID NO: 1562433
agcaauuggaggugacuaa

SEQ ID NO: 1746596 - RNA, 19 nt, Artificial Sequence
  Description of Artificial Sequence: Synthetic oligonucleotide
  Antisense strand to SEQ ID NO: 1746595
uuagucaccuccaauugcu

SEQ ID NO: 1746597 - RNA, 19 nt, Artificial Sequence
  Description of Artificial Sequence: Synthetic oligonucleotide
  Sense strand starting at position 3393 of SEQ ID NO: 1562433
caguuaauuucuuuggugu

SEQ ID NO: 1746598 - RNA, 19 nt, Artificial Sequence
  Description of Artificial Sequence: Synthetic oligonucleotide
  Antisense strand to SEQ ID NO: 1746597
acaccaaagaaauuaacug

SEQ ID NO: 1746599 - RNA, 19 nt, Artificial Sequence
  Description of Artificial Sequence: Synthetic oligonucleotide
  Sense strand starting at position 3408 of SEQ ID NO: 1562433
gugugauaaguggauuaug

SEQ ID NO: 1746600 - RNA, 19 nt, Artificial Sequence
  Description of Artificial Sequence: Synthetic oligonucleotide
  Antisense strand to SEQ ID NO: 1746599
cauaauccacuuaucacac

SEQ ID NO: 1746601 - RNA, 19 nt, Artificial Sequence
  Description of Artificial Sequence: Synthetic oligonucleotide
  Sense strand starting at position 3411 of SEQ ID NO: 1562433
ugauaaguggauuaugguu

SEQ ID NO: 1746602 - RNA, 19 nt, Artificial Sequence
  Description of Artificial Sequence: Synthetic oligonucleotide
  Antisense strand to SEQ ID NO: 1746601
aaccauaauccacuuauca

SEQ ID NO: 1746603 - RNA, 19 nt, Artificial Sequence
  Description of Artificial Sequence: Synthetic oligonucleotide
  Sense strand starting at position 3416 of SEQ ID NO: 1562433
aguggauuaugguuaugaa

SEQ ID NO: 1746604 - RNA, 19 nt, Artificial Sequence
  Description of Artificial Sequence: Synthetic oligonucleotide
  Antisense strand to SEQ ID NO: 1746603
uucauaaccauaauccacu

SEQ ID NO: 1746605 - RNA, 19 nt, Artificial Sequence
  Description of Artificial Sequence: Synthetic oligonucleotide
  Sense strand starting at position 3500 of SEQ ID NO: 1562433
aucucuaugccugagauua

SEQ ID NO: 1746606 - RNA, 19 nt, Artificial Sequence
  Description of Artificial Sequence: Synthetic oligonucleotide
  Antisense strand to SEQ ID NO: 1746605
uaaucucaggcauagagau

SEQ ID NO: 1746607 - RNA, 19 nt, Artificial Sequence
  Description of Artificial Sequence: Synthetic oligonucleotide
  Sense strand starting at position 3630 of SEQ ID NO: 1562433
uccguagagguugaacaua

SEQ ID NO: 1746608 - RNA, 19 nt, Artificial Sequence
  Description of Artificial Sequence: Synthetic oligonucleotide
  Antisense strand to SEQ ID NO: 1746607
uauguucaaccucuacgga

SEQ ID NO: 1746609 - RNA, 19 nt, Artificial Sequence
  Description of Artificial Sequence: Synthetic oligonucleotide
  Sense strand starting at position 3744 of SEQ ID NO: 1562433
acaucauggcuuuaguaua

SEQ ID NO: 1746610 - RNA, 19 nt, Artificial Sequence
  Description of Artificial Sequence: Synthetic oligonucleotide
  Antisense strand to SEQ ID NO: 1746609
uauacuaaagccaugaugu

SEQ ID NO: 1746611 - RNA, 19 nt, Artificial Sequence
  Description of Artificial Sequence: Synthetic oligonucleotide
  Sense strand starting at position 3916 of SEQ ID NO: 1562433
ugauguaaaggauggcuau

SEQ ID NO: 1746612 - RNA, 19 nt, Artificial Sequence
  Description of Artificial Sequence: Synthetic oligonucleotide
  Antisense strand to SEQ ID NO: 1746611
auagccauccuuuacauca

SEQ ID NO: 1746613 - RNA, 19 nt, Artificial Sequence
  Description of Artificial Sequence: Synthetic oligonucleotide
  Sense strand starting at position 3917 of SEQ ID NO: 1562433
gauguaaaggauggcuaua

SEQ ID NO: 1746614 - RNA, 19 nt, Artificial Sequence
  Description of Artificial Sequence: Synthetic oligonucleotide
  Antisense strand to SEQ ID NO: 1746613
uauagccauccuuuacauc

SEQ ID NO: 1746615 - RNA, 19 nt, Artificial Sequence
  Description of Artificial Sequence: Synthetic oligonucleotide
  Sense strand starting at position 3919 of SEQ ID NO: 1562433
uguaaaggauggcuauaga

SEQ ID NO: 1746616 - RNA, 19 nt, Artificial Sequence
  Description of Artificial Sequence: Synthetic oligonucleotide
  Antisense strand to SEQ ID NO: 1746615
ucuauagccauccuuuaca

SEQ ID NO: 1746617 - RNA, 19 nt, Artificial Sequence
  Description of Artificial Sequence: Synthetic oligonucleotide
  Sense strand starting at position 3941 of SEQ ID NO: 1562433
ucuaguuugaggcaggauu

SEQ ID NO: 1746618 - RNA, 19 nt, Artificial Sequence
  Description of Artificial Sequence: Synthetic oligonucleotide
  Antisense strand to SEQ ID NO: 1746617
aauccugccucaaacuaga

SEQ ID NO: 1746619 - RNA, 19 nt, Artificial Sequence
  Description of Artificial Sequence: Synthetic oligonucleotide
  Sense strand starting at position 253 of SEQ ID NO: 1562434
gaaucagaacuguguacag

SEQ ID NO: 1746620 - RNA, 19 nt, Artificial Sequence
  Description of Artificial Sequence: Synthetic oligonucleotide
  Antisense strand to SEQ ID NO: 1746619
cuguacacaguucugauuc

SEQ ID NO: 1746621 - RNA, 19 nt, Artificial Sequence
  Description of Artificial Sequence: Synthetic oligonucleotide
  Sense strand starting at position 339 of SEQ ID NO: 1562434
uugauuuaauuuggcauga

SEQ ID NO: 1746622 - RNA, 19 nt, Artificial Sequence
  Description of Artificial Sequence: Synthetic oligonucleotide
  Antisense strand to SEQ ID NO: 1746621
ucaugccaaauuaaaucaa

SEQ ID NO: 1746623 - RNA, 19 nt, Artificial Sequence
  Description of Artificial Sequence: Synthetic oligonucleotide
  Sense strand starting at position 349 of SEQ ID NO: 1562434
uuggcaugacugcaauaga

SEQ ID NO: 1746624 - RNA, 19 nt, Artificial Sequence
  Description of Artificial Sequence: Synthetic oligonucleotide
  Antisense strand to SEQ ID NO: 1746623
ucuauugcagucaugccaa

SEQ ID NO: 1746625 - RNA, 19 nt, Artificial Sequence
  Description of Artificial Sequence: Synthetic oligonucleotide
  Sense strand starting at position 352 of SEQ ID NO: 1562434
gcaugacugcaauagaaau

SEQ ID NO: 1746626 - RNA, 19 nt, Artificial Sequence
  Description of Artificial Sequence: Synthetic oligonucleotide
  Antisense strand to SEQ ID NO: 1746625
auuucuauugcagucaugc

SEQ ID NO: 1746627 - RNA, 19 nt, Artificial Sequence
  Description of Artificial Sequence: Synthetic oligonucleotide
  Sense strand starting at position 542 of SEQ ID NO: 1562434
uuggguuggaacugcuaau

SEQ ID NO: 1746628 - RNA, 19 nt, Artificial Sequence
  Description of Artificial Sequence: Synthetic oligonucleotide
  Antisense strand to SEQ ID NO: 1746627
auuagcaguuccaacccaa

SEQ ID NO: 1746629 - RNA, 19 nt, Artificial Sequence
  Description of Artificial Sequence: Synthetic oligonucleotide
  Sense strand starting at position 848 of SEQ ID NO: 1562434
aaauuaucacagggaguuu

SEQ ID NO: 1746630 - RNA, 19 nt, Artificial Sequence
  Description of Artificial Sequence: Synthetic oligonucleotide
  Antisense strand to SEQ ID NO: 1746629
aaacucccugugauaauuu

SEQ ID NO: 1746631 - RNA, 19 nt, Artificial Sequence
  Description of Artificial Sequence: Synthetic oligonucleotide
  Sense strand starting at position 920 of SEQ ID NO: 1562434
agaaaugugguuugcaaga

SEQ ID NO: 1746632 - RNA, 19 nt, Artificial Sequence
  Description of Artificial Sequence: Synthetic oligonucleotide
  Antisense strand to SEQ ID NO: 1746631
ucuugcaaaccacauuucu

SEQ ID NO: 1746633 - RNA, 19 nt, Artificial Sequence
  Description of Artificial Sequence: Synthetic oligonucleotide
  Sense strand starting at position 987 of SEQ ID NO: 1562434
gcuagaagaugaucagagu

SEQ ID NO: 1746634 - RNA, 19 nt, Artificial Sequence
  Description of Artificial Sequence: Synthetic oligonucleotide
  Antisense strand to SEQ ID NO: 1746633
acucugaucaucuucuagc

SEQ ID NO: 1746635 - RNA, 19 nt, Artificial Sequence
  Description of Artificial Sequence: Synthetic oligonucleotide
  Sense strand starting at position 1109 of SEQ ID NO: 1562434
uaucuauaagagugaguga

SEQ ID NO: 1746636 - RNA, 19 nt, Artificial Sequence
  Description of Artificial Sequence: Synthetic oligonucleotide
  Antisense strand to SEQ ID NO: 1746635
ucacucacucuuauagaua

SEQ ID NO: 1746637 - RNA, 19 nt, Artificial Sequence
  Description of Artificial Sequence: Synthetic oligonucleotide
  Sense strand starting at position 1157 of SEQ ID NO: 1562434
ggaguuguaucaguacaga

SEQ ID NO: 1746638 - RNA, 19 nt, Artificial Sequence
  Description of Artificial Sequence: Synthetic oligonucleotide
  Antisense strand to SEQ ID NO: 1746637
ucuguacugauacaacucc

SEQ ID NO: 1746639 - RNA, 19 nt, Artificial Sequence
  Description of Artificial Sequence: Synthetic oligonucleotide
  Sense strand starting at position 1174 of SEQ ID NO: 1562434
gaagcacauguuuaaaugu

SEQ ID NO: 1746640 - RNA, 19 nt, Artificial Sequence
  Description of Artificial Sequence: Synthetic oligonucleotide
  Antisense strand to SEQ ID NO: 1746639
acauuuaaacaugugcuuc

SEQ ID NO: 1746641 - RNA, 19 nt, Artificial Sequence
  Description of Artificial Sequence: Synthetic oligonucleotide
  Sense strand starting at position 1225 of SEQ ID NO: 1562434
aauagcuugguggguaaua

SEQ ID NO: 1746642 - RNA, 19 nt, Artificial Sequence
  Description of Artificial Sequence: Synthetic oligonucleotide
  Antisense strand to SEQ ID NO: 1746641
uauuacccaccaagcuauu

SEQ ID NO: 1746643 - RNA, 19 nt, Artificial Sequence
  Description of Artificial Sequence: Synthetic oligonucleotide
  Sense strand starting at position 1258 of SEQ ID NO: 1562434
gccaauuaccuaggucaaa

SEQ ID NO: 1746644 - RNA, 19 nt, Artificial Sequence
  Description of Artificial Sequence: Synthetic oligonucleotide
  Antisense strand to SEQ ID NO: 1746643
uuugaccuagguaauuggc

SEQ ID NO: 1746645 - RNA, 19 nt, Artificial Sequence
  Description of Artificial Sequence: Synthetic oligonucleotide
  Sense strand starting at position 1682 of SEQ ID NO: 1562434
cacuaacugguaggaaauu

SEQ ID NO: 1746646 - RNA, 19 nt, Artificial Sequence
  Description of Artificial Sequence: Synthetic oligonucleotide
  Antisense strand to SEQ ID NO: 1746645
aauuuccuaccaguuagug

SEQ ID NO: 1746647 - RNA, 19 nt, Artificial Sequence
  Description of Artificial Sequence: Synthetic oligonucleotide
  Sense strand starting at position 1716 of SEQ ID NO: 1562434
aaauaugaccugugguaau

SEQ ID NO: 1746648 - RNA, 19 nt, Artificial Sequence
  Description of Artificial Sequence: Synthetic oligonucleotide
  Antisense strand to SEQ ID NO: 1746647
auuaccacaggucauauuu

SEQ ID NO: 1746649 - RNA, 19 nt, Artificial Sequence
  Description of Artificial Sequence: Synthetic oligonucleotide
  Sense strand starting at position 1729 of SEQ ID NO: 1562434
gguaaucaauaauuagagu

SEQ ID NO: 1746650 - RNA, 19 nt, Artificial Sequence
  Description of Artificial Sequence: Synthetic oligonucleotide
  Antisense strand to SEQ ID NO: 1746649
acucuaauuauugauuacc

SEQ ID NO: 1746651 - RNA, 19 nt, Artificial Sequence
  Description of Artificial Sequence: Synthetic oligonucleotide
  Sense strand starting at position 1795 of SEQ ID NO: 1562434
augcaauuagugcaucaca

SEQ ID NO: 1746652 - RNA, 19 nt, Artificial Sequence
  Description of Artificial Sequence: Synthetic oligonucleotide
  Antisense strand to SEQ ID NO: 1746651
ugugaugcacuaauugcau

SEQ ID NO: 1746653 - RNA, 19 nt, Artificial Sequence
  Description of Artificial Sequence: Synthetic oligonucleotide
  Sense strand starting at position 1821 of SEQ ID NO: 1562434
ggcucaaagugaucagcaa

SEQ ID NO: 1746654 - RNA, 19 nt, Artificial Sequence
  Description of Artificial Sequence: Synthetic oligonucleotide
  Antisense strand to SEQ ID NO: 1746653
uugcugaucacuuugagcc

SEQ ID NO: 1746655 - RNA, 19 nt, Artificial Sequence
  Description of Artificial Sequence: Synthetic oligonucleotide
  Sense strand starting at position 1895 of SEQ ID NO: 1562434
caggcauauccagaguuac

SEQ ID NO: 1746656 - RNA, 19 nt, Artificial Sequence
  Description of Artificial Sequence: Synthetic oligonucleotide
  Antisense strand to SEQ ID NO: 1746655
guaacucuggauaugccug

SEQ ID NO: 1746657 - RNA, 19 nt, Artificial Sequence
  Description of Artificial Sequence: Synthetic oligonucleotide
  Sense strand starting at position 2024 of SEQ ID NO: 1562434
auuugacucuccugauuug

SEQ ID NO: 1746658 - RNA, 19 nt, Artificial Sequence
  Description of Artificial Sequence: Synthetic oligonucleotide
  Antisense strand to SEQ ID NO: 1746657
caaaucaggagagucaaau

SEQ ID NO: 1746659 - RNA, 19 nt, Artificial Sequence
  Description of Artificial Sequence: Synthetic oligonucleotide
  Sense strand starting at position 2061 of SEQ ID NO: 1562434
accugaguuauaugugaag

SEQ ID NO: 1746660 - RNA, 19 nt, Artificial Sequence
  Description of Artificial Sequence: Synthetic oligonucleotide
  Antisense strand to SEQ ID NO: 1746659
cuucacauauaacucaggu

SEQ ID NO: 1746661 - RNA, 19 nt, Artificial Sequence
  Description of Artificial Sequence: Synthetic oligonucleotide
  Sense strand starting at position 2063 of SEQ ID NO: 1562434
cugaguuauaugugaagga

SEQ ID NO: 1746662 - RNA, 19 nt, Artificial Sequence
  Description of Artificial Sequence: Synthetic oligonucleotide
  Antisense strand to SEQ ID NO: 1746661
uccuucacauauaacucag

SEQ ID NO: 1746663 - RNA, 19 nt, Artificial Sequence
  Description of Artificial Sequence: Synthetic oligonucleotide
  Sense strand starting at position 2154 of SEQ ID NO: 1562434
uagccauauguccaggaaa

SEQ ID NO: 1746664 - RNA, 19 nt, Artificial Sequence
  Description of Artificial Sequence: Synthetic oligonucleotide
  Antisense strand to SEQ ID NO: 1746663
uuuccuggacauauggcua

SEQ ID NO: 1746665 - RNA, 19 nt, Artificial Sequence
  Description of Artificial Sequence: Synthetic oligonucleotide
  Sense strand starting at position 2291 of SEQ ID NO: 1562434
cuucucugugaucacauua

SEQ ID NO: 1746666 - RNA, 19 nt, Artificial Sequence
  Description of Artificial Sequence: Synthetic oligonucleotide
  Antisense strand to SEQ ID NO: 1746665
uaaugugaucacagagaag

SEQ ID NO: 1746667 - RNA, 19 nt, Artificial Sequence
  Description of Artificial Sequence: Synthetic oligonucleotide
  Sense strand starting at position 2296 of SEQ ID NO: 1562434
cugugaucacauuaagcuu

SEQ ID NO: 1746668 - RNA, 19 nt, Artificial Sequence
  Description of Artificial Sequence: Synthetic oligonucleotide
  Antisense strand to SEQ ID NO: 1746667
aagcuuaaugugaucacag

SEQ ID NO: 1746669 - RNA, 19 nt, Artificial Sequence
  Description of Artificial Sequence: Synthetic oligonucleotide
  Sense strand starting at position 2498 of SEQ ID NO: 1562434
uuucuuaaucaaugggacu

SEQ ID NO: 1746670 - RNA, 19 nt, Artificial Sequence
  Description of Artificial Sequence: Synthetic oligonucleotide
  Antisense strand to SEQ ID NO: 1746669
agucccauugauuaagaaa

SEQ ID NO: 1746671 - RNA, 19 nt, Artificial Sequence
  Description of Artificial Sequence: Synthetic oligonucleotide
  Sense strand starting at position 2586 of SEQ ID NO: 1562434
ccucacuuugguuauauua

SEQ ID NO: 1746672 - RNA, 19 nt, Artificial Sequence
  Description of Artificial Sequence: Synthetic oligonucleotide
  Antisense strand to SEQ ID NO: 1746671
uaauauaaccaaagugagg

SEQ ID NO: 1746673 - RNA, 19 nt, Artificial Sequence
  Description of Artificial Sequence: Synthetic oligonucleotide
  Sense strand starting at position 2610 of SEQ ID NO: 1562434
ugugguguucucuuugcau

SEQ ID NO: 1746674 - RNA, 19 nt, Artificial Sequence
  Description of Artificial Sequence: Synthetic oligonucleotide
  Antisense strand to SEQ ID NO: 1746673
augcaaagagaacaccaca

SEQ ID NO: 1746675 - RNA, 19 nt, Artificial Sequence
  Description of Artificial Sequence: Synthetic oligonucleotide
  Sense strand starting at position 2886 of SEQ ID NO: 1562434
uggugauagccuuaauuau

SEQ ID NO: 1746676 - RNA, 19 nt, Artificial Sequence
  Description of Artificial Sequence: Synthetic oligonucleotide
  Antisense strand to SEQ ID NO: 1746675
auaauuaaggcuaucacca

SEQ ID NO: 1746677 - RNA, 19 nt, Artificial Sequence
  Description of Artificial Sequence: Synthetic oligonucleotide
  Sense strand starting at position 2906 of SEQ ID NO: 1562434
agagcugacuuucuaugaa

SEQ ID NO: 1746678 - RNA, 19 nt, Artificial Sequence
  Description of Artificial Sequence: Synthetic oligonucleotide
  Antisense strand to SEQ ID NO: 1746677
uucauagaaagucagcucu

SEQ ID NO: 1746679 - RNA, 19 nt, Artificial Sequence
  Description of Artificial Sequence: Synthetic oligonucleotide
  Sense strand starting at position 2930 of SEQ ID NO: 1562434
cugugauaauuugucacgu

SEQ ID NO: 1746680 - RNA, 19 nt, Artificial Sequence
  Description of Artificial Sequence: Synthetic oligonucleotide
  Antisense strand to SEQ ID NO: 1746679
acgugacaaauuaucacag

SEQ ID NO: 1746681 - RNA, 19 nt, Artificial Sequence
  Description of Artificial Sequence: Synthetic oligonucleotide
  Sense strand starting at position 2931 of SEQ ID NO: 1562434
ugugauaauuugucacguu

SEQ ID NO: 1746682 - RNA, 19 nt, Artificial Sequence
  Description of Artificial Sequence: Synthetic oligonucleotide
  Antisense strand to SEQ ID NO: 1746681
aacgugacaaauuaucaca

SEQ ID NO: 1746683 - RNA, 19 nt, Artificial Sequence
  Description of Artificial Sequence: Synthetic oligonucleotide
  Sense strand starting at position 3095 of SEQ ID NO: 1562434
gggaucauacuuuguagau

SEQ ID NO: 1746684 - RNA, 19 nt, Artificial Sequence
  Description of Artificial Sequence: Synthetic oligonucleotide
  Antisense strand to SEQ ID NO: 1746683
aucuacaaaguaugauccc

SEQ ID NO: 1746685 - RNA, 19 nt, Artificial Sequence
  Description of Artificial Sequence: Synthetic oligonucleotide
  Sense strand starting at position 3096 of SEQ ID NO: 1562434
ggaucauacuuuguagauc

SEQ ID NO: 1746686 - RNA, 19 nt, Artificial Sequence
  Description of Artificial Sequence: Synthetic oligonucleotide
  Antisense strand to SEQ ID NO: 1746685
gaucuacaaaguaugaucc

SEQ ID NO: 1746687 - RNA, 19 nt, Artificial Sequence
  Description of Artificial Sequence: Synthetic oligonucleotide
  Sense strand starting at position 3105 of SEQ ID NO: 1562434
uuuguagaucaaugugaga

SEQ ID NO: 1746688 - RNA, 19 nt, Artificial Sequence
  Description of Artificial Sequence: Synthetic oligonucleotide
  Antisense strand to SEQ ID NO: 1746687
ucucacauugaucuacaaa

SEQ ID NO: 1746689 - RNA, 19 nt, Artificial Sequence
  Description of Artificial Sequence: Synthetic oligonucleotide
  Sense strand starting at position 3107 of SEQ ID NO: 1562434
uguagaucaaugugagacu

SEQ ID NO: 1746690 - RNA, 19 nt, Artificial Sequence
  Description of Artificial Sequence: Synthetic oligonucleotide
  Antisense strand to SEQ ID NO: 1746689
agucucacauugaucuaca

SEQ ID NO: 1746691 - RNA, 19 nt, Artificial Sequence
  Description of Artificial Sequence: Synthetic oligonucleotide
  Sense strand starting at position 3195 of SEQ ID NO: 1562434
ucauaaacuuuaguggaua

SEQ ID NO: 1746692 - RNA, 19 nt, Artificial Sequence
  Description of Artificial Sequence: Synthetic oligonucleotide
  Antisense strand to SEQ ID NO: 1746691
uauccacuaaaguuuauga

SEQ ID NO: 1746693 - RNA, 19 nt, Artificial Sequence
  Description of Artificial Sequence: Synthetic oligonucleotide
  Sense strand starting at position 3476 of SEQ ID NO: 1562434
cguuauaagaaaugcagau

SEQ ID NO: 1746694 - RNA, 19 nt, Artificial Sequence
  Description of Artificial Sequence: Synthetic oligonucleotide
  Antisense strand to SEQ ID NO: 1746693
aucugcauuucuuauaacg

SEQ ID NO: 1746695 - RNA, 19 nt, Artificial Sequence
  Description of Artificial Sequence: Synthetic oligonucleotide
  Sense strand starting at position 3733 of SEQ ID NO: 1562434
agucaaauauuccugguau

SEQ ID NO: 1746696 - RNA, 19 nt, Artificial Sequence
  Description of Artificial Sequence: Synthetic oligonucleotide
  Antisense strand to SEQ ID NO: 1746695
auaccaggaauauuugacu

SEQ ID NO: 1746697 - RNA, 19 nt, Artificial Sequence
  Description of Artificial Sequence: Synthetic oligonucleotide
  Sense strand starting at position 3842 of SEQ ID NO: 1562434
gaguuugagcauuauagau

SEQ ID NO: 1746698 - RNA, 19 nt, Artificial Sequence
  Description of Artificial Sequence: Synthetic oligonucleotide
  Antisense strand to SEQ ID NO: 1746697
aucuauaaugcucaaacuc

SEQ ID NO: 1746699 - RNA, 19 nt, Artificial Sequence
  Description of Artificial Sequence: Synthetic oligonucleotide
  Sense strand starting at position 724 of SEQ ID NO: 1562435
cuuauuauaguggaaugca

SEQ ID NO: 1746700 - RNA, 19 nt, Artificial Sequence
  Description of Artificial Sequence: Synthetic oligonucleotide
  Antisense strand to SEQ ID NO: 1746699
ugcauuccacuauaauaag

SEQ ID NO: 1746701 - RNA, 19 nt, Artificial Sequence
  Description of Artificial Sequence: Synthetic oligonucleotide
  Sense strand starting at position 835 of SEQ ID NO: 1562435
gcuuauauaugucugggaa

SEQ ID NO: 1746702 - RNA, 19 nt, Artificial Sequence
  Description of Artificial Sequence: Synthetic oligonucleotide
  Antisense strand to SEQ ID NO: 1746701
uucccagacauauauaagc

SEQ ID NO: 1746703 - RNA, 19 nt, Artificial Sequence
  Description of Artificial Sequence: Synthetic oligonucleotide
  Sense strand starting at position 836 of SEQ ID NO: 1562435
cuuauauaugucugggaag

SEQ ID NO: 1746704 - RNA, 19 nt, Artificial Sequence
  Description of Artificial Sequence: Synthetic oligonucleotide
  Antisense strand to SEQ ID NO: 1746703
cuucccagacauauauaag

SEQ ID NO: 1746705 - RNA, 19 nt, Artificial Sequence
  Description of Artificial Sequence: Synthetic oligonucleotide
  Sense strand starting at position 959 of SEQ ID NO: 1562435
ccaugaguagcuuaaccaa

SEQ ID NO: 1746706 - RNA, 19 nt, Artificial Sequence
  Description of Artificial Sequence: Synthetic oligonucleotide
  Antisense strand to SEQ ID NO: 1746705
uugguuaagcuacucaugg

SEQ ID NO: 1746707 - RNA, 19 nt, Artificial Sequence
  Description of Artificial Sequence: Synthetic oligonucleotide
  Sense strand starting at position 996 of SEQ ID NO: 1562435
ggccuaaauggccaugaau

SEQ ID NO: 1746708 - RNA, 19 nt, Artificial Sequence
  Description of Artificial Sequence: Synthetic oligonucleotide
  Antisense strand to SEQ ID NO: 1746707
auucauggccauuuaggcc

SEQ ID NO: 1746709 - RNA, 19 nt, Artificial Sequence
  Description of Artificial Sequence: Synthetic oligonucleotide
  Sense strand starting at position 1046 of SEQ ID NO: 1562435
cugagucuacuuggcagaa

SEQ ID NO: 1746710 - RNA, 19 nt, Artificial Sequence
  Description of Artificial Sequence: Synthetic oligonucleotide
  Antisense strand to SEQ ID NO: 1746709
uucugccaaguagacucag

SEQ ID NO: 1746711 - RNA, 19 nt, Artificial Sequence
  Description of Artificial Sequence: Synthetic oligonucleotide
  Sense strand starting at position 1047 of SEQ ID NO: 1562435
ugagucuacuuggcagaaa

SEQ ID NO: 1746712 - RNA, 19 nt, Artificial Sequence
  Description of Artificial Sequence: Synthetic oligonucleotide
  Antisense strand to SEQ ID NO: 1746711
uuucugccaaguagacuca

SEQ ID NO: 1746713 - RNA, 19 nt, Artificial Sequence
  Description of Artificial Sequence: Synthetic oligonucleotide
  Sense strand starting at position 1050 of SEQ ID NO: 1562435
gucuacuuggcagaaauuc

SEQ ID NO: 1746714 - RNA, 19 nt, Artificial Sequence
  Description of Artificial Sequence: Synthetic oligonucleotide
  Antisense strand to SEQ ID NO: 1746713
gaauuucugccaaguagac

SEQ ID NO: 1746715 - RNA, 19 nt, Artificial Sequence
  Description of Artificial Sequence: Synthetic oligonucleotide
  Sense strand starting at position 1072 of SEQ ID NO: 1562435
ggaacuagaucucuguugu

SEQ ID NO: 1746716 - RNA, 19 nt, Artificial Sequence
  Description of Artificial Sequence: Synthetic oligonucleotide
  Antisense strand to SEQ ID NO: 1746715
acaacagagaucuaguucc

SEQ ID NO: 1746717 - RNA, 19 nt, Artificial Sequence
  Description of Artificial Sequence: Synthetic oligonucleotide
  Sense strand starting at position 1398 of SEQ ID NO: 1562435
auagguucuagccagauga

SEQ ID NO: 1746718 - RNA, 19 nt, Artificial Sequence
  Description of Artificial Sequence: Synthetic oligonucleotide
  Antisense strand to SEQ ID NO: 1746717
ucaucuggcuagaaccuau

SEQ ID NO: 1746719 - RNA, 19 nt, Artificial Sequence
  Description of Artificial Sequence: Synthetic oligonucleotide
  Sense strand starting at position 1400 of SEQ ID NO: 1562435
agguucuagccagaugaua

SEQ ID NO: 1746720 - RNA, 19 nt, Artificial Sequence
  Description of Artificial Sequence: Synthetic oligonucleotide
  Antisense strand to SEQ ID NO: 1746719
uaucaucuggcuagaaccu

SEQ ID NO: 1746721 - RNA, 19 nt, Artificial Sequence
  Description of Artificial Sequence: Synthetic oligonucleotide
  Sense strand starting at position 1408 of SEQ ID NO: 1562435
gccagaugauagcugagau

SEQ ID NO: 1746722 - RNA, 19 nt, Artificial Sequence
  Description of Artificial Sequence: Synthetic oligonucleotide
  Antisense strand to SEQ ID NO: 1746721
aucucagcuaucaucuggc

SEQ ID NO: 1746723 - RNA, 19 nt, Artificial Sequence
  Description of Artificial Sequence: Synthetic oligonucleotide
  Sense strand starting at position 1409 of SEQ ID NO: 1562435
ccagaugauagcugagaug

SEQ ID NO: 1746724 - RNA, 19 nt, Artificial Sequence
  Description of Artificial Sequence: Synthetic oligonucleotide
  Antisense strand to SEQ ID NO: 1746723
caucucagcuaucaucugg

SEQ ID NO: 1746725 - RNA, 19 nt, Artificial Sequence
  Description of Artificial Sequence: Synthetic oligonucleotide
  Sense strand starting at position 1443 of SEQ ID NO: 1562435
aauuguaauguggagguuu

SEQ ID NO: 1746726 - RNA, 19 nt, Artificial Sequence
  Description of Artificial Sequence: Synthetic oligonucleotide
  Antisense strand to SEQ ID NO: 1746725
aaaccuccacauuacaauu

SEQ ID NO: 1746727 - RNA, 19 nt, Artificial Sequence
  Description of Artificial Sequence: Synthetic oligonucleotide
  Sense strand starting at position 1499 of SEQ ID NO: 1562435
acaaguuggucuguaacag

SEQ ID NO: 1746728 - RNA, 19 nt, Artificial Sequence
  Description of Artificial Sequence: Synthetic oligonucleotide
  Antisense strand to SEQ ID NO: 1746727
cuguuacagaccaacuugu

SEQ ID NO: 1746729 - RNA, 19 nt, Artificial Sequence
  Description of Artificial Sequence: Synthetic oligonucleotide
  Sense strand starting at position 1813 of SEQ ID NO: 1562435
cccagcaagucuccugaaa

SEQ ID NO: 1746730 - RNA, 19 nt, Artificial Sequence
  Description of Artificial Sequence: Synthetic oligonucleotide
  Antisense strand to SEQ ID NO: 1746729
uuucaggagacuugcuggg

SEQ ID NO: 1746731 - RNA, 19 nt, Artificial Sequence
  Description of Artificial Sequence: Synthetic oligonucleotide
  Sense strand starting at position 2024 of SEQ ID NO: 1562435
cugagcugcauugagaaga

SEQ ID NO: 1746732 - RNA, 19 nt, Artificial Sequence
  Description of Artificial Sequence: Synthetic oligonucleotide
  Antisense strand to SEQ ID NO: 1746731
ucuucucaaugcagcucag

SEQ ID NO: 1746733 - RNA, 19 nt, Artificial Sequence
  Description of Artificial Sequence: Synthetic oligonucleotide
  Sense strand starting at position 2161 of SEQ ID NO: 1562435
cuaaguaaccuagguuaua

SEQ ID NO: 1746734 - RNA, 19 nt, Artificial Sequence
  Description of Artificial Sequence: Synthetic oligonucleotide
  Antisense strand to SEQ ID NO: 1746733
uauaaccuagguuacuuag

SEQ ID NO: 1746735 - RNA, 19 nt, Artificial Sequence
  Description of Artificial Sequence: Synthetic oligonucleotide
  Sense strand starting at position 2164 of SEQ ID NO: 1562435
aguaaccuagguuauaauu

SEQ ID NO: 1746736 - RNA, 19 nt, Artificial Sequence
  Description of Artificial Sequence: Synthetic oligonucleotide
  Antisense strand to SEQ ID NO: 1746735
aauuauaaccuagguuacu

SEQ ID NO: 1746737 - RNA, 19 nt, Artificial Sequence
  Description of Artificial Sequence: Synthetic oligonucleotide
  Sense strand starting at position 2207 of SEQ ID NO: 1562435
uuaacagcaguguaaucau

SEQ ID NO: 1746738 - RNA, 19 nt, Artificial Sequence
  Description of Artificial Sequence: Synthetic oligonucleotide
  Antisense strand to SEQ ID NO: 1746737
augauuacacugcuguuaa

SEQ ID NO: 1746739 - RNA, 19 nt, Artificial Sequence
  Description of Artificial Sequence: Synthetic oligonucleotide
  Sense strand starting at position 2429 of SEQ ID NO: 1562435
auguacucccaacaguaau

SEQ ID NO: 1746740 - RNA, 19 nt, Artificial Sequence
  Description of Artificial Sequence: Synthetic oligonucleotide
  Antisense strand to SEQ ID NO: 1746739
auuacuguugggaguacau

SEQ ID NO: 1746741 - RNA, 19 nt, Artificial Sequence
  Description of Artificial Sequence: Synthetic oligonucleotide
  Sense strand starting at position 2553 of SEQ ID NO: 1562435
agauacaaguugucauaaa

SEQ ID NO: 1746742 - RNA, 19 nt, Artificial Sequence
  Description of Artificial Sequence: Synthetic oligonucleotide
  Antisense strand to SEQ ID NO: 1746741
uuuaugacaacuuguaucu

SEQ ID NO: 1746743 - RNA, 19 nt, Artificial Sequence
  Description of Artificial Sequence: Synthetic oligonucleotide
  Sense strand starting at position 2709 of SEQ ID NO: 1562435
auuugugaagcuuguaauu

SEQ ID NO: 1746744 - RNA, 19 nt, Artificial Sequence
  Description of Artificial Sequence: Synthetic oligonucleotide
  Antisense strand to SEQ ID NO: 1746743
aauuacaagcuucacaaau

SEQ ID NO: 1746745 - RNA, 19 nt, Artificial Sequence
  Description of Artificial Sequence: Synthetic oligonucleotide
  Sense strand starting at position 2721 of SEQ ID NO: 1562435
uguaauuucugcucccaga

SEQ ID NO: 1746746 - RNA, 19 nt, Artificial Sequence
  Description of Artificial Sequence: Synthetic oligonucleotide
  Antisense strand to SEQ ID NO: 1746745
ucugggagcagaaauuaca

SEQ ID NO: 1746747 - RNA, 19 nt, Artificial Sequence
  Description of Artificial Sequence: Synthetic oligonucleotide
  Sense strand starting at position 2782 of SEQ ID NO: 1562435
agguguuaauauuugcauu

SEQ ID NO: 1746748 - RNA, 19 nt, Artificial Sequence
  Description of Artificial Sequence: Synthetic oligonucleotide
  Antisense strand to SEQ ID NO: 1746747
aaugcaaauauuaacaccu

SEQ ID NO: 1746749 - RNA, 19 nt, Artificial Sequence
  Description of Artificial Sequence: Synthetic oligonucleotide
  Sense strand starting at position 2806 of SEQ ID NO: 1562435
ugauauaucuacuugagua

SEQ ID NO: 1746750 - RNA, 19 nt, Artificial Sequence
  Description of Artificial Sequence: Synthetic oligonucleotide
  Antisense strand to SEQ ID NO: 1746749
uacucaaguagauauauca

SEQ ID NO: 1746751 - RNA, 19 nt, Artificial Sequence
  Description of Artificial Sequence: Synthetic oligonucleotide
  Sense strand starting at position 2810 of SEQ ID NO: 1562435
auaucuacuugaguauucu

SEQ ID NO: 1746752 - RNA, 19 nt, Artificial Sequence
  Description of Artificial Sequence: Synthetic oligonucleotide
  Antisense strand to SEQ ID NO: 1746751
agaauacucaaguagauau

SEQ ID NO: 1746753 - RNA, 19 nt, Artificial Sequence
  Description of Artificial Sequence: Synthetic oligonucleotide
  Sense strand starting at position 2919 of SEQ ID NO: 1562435
uggagaugcuuuguuacaa

SEQ ID NO: 1746754 - RNA, 19 nt, Artificial Sequence
  Description of Artificial Sequence: Synthetic oligonucleotide
  Antisense strand to SEQ ID NO: 1746753
uuguaacaaagcaucucca

SEQ ID NO: 1746755 - RNA, 19 nt, Artificial Sequence
  Description of Artificial Sequence: Synthetic oligonucleotide
  Sense strand starting at position 2920 of SEQ ID NO: 1562435
ggagaugcuuuguuacaaa

SEQ ID NO: 1746756 - RNA, 19 nt, Artificial Sequence
  Description of Artificial Sequence: Synthetic oligonucleotide
  Antisense strand to SEQ ID NO: 1746755
uuuguaacaaagcaucucc

SEQ ID NO: 1746757 - RNA, 19 nt, Artificial Sequence
  Description of Artificial Sequence: Synthetic oligonucleotide
  Sense strand starting at position 2991 of SEQ ID NO: 1562435
uuuauccaccauggaguua

SEQ ID NO: 1746758 - RNA, 19 nt, Artificial Sequence
  Description of Artificial Sequence: Synthetic oligonucleotide
  Antisense strand to SEQ ID NO: 1746757
uaacuccaugguggauaaa

SEQ ID NO: 1746759 - RNA, 19 nt, Artificial Sequence
  Description of Artificial Sequence: Synthetic oligonucleotide
  Sense strand starting at position 3084 of SEQ ID NO: 1562435
cugauaugccuuuagugag

SEQ ID NO: 1746760 - RNA, 19 nt, Artificial Sequence
  Description of Artificial Sequence: Synthetic oligonucleotide
  Antisense strand to SEQ ID NO: 1746759
cucacuaaaggcauaucag

SEQ ID NO: 1746761 - RNA, 19 nt, Artificial Sequence
  Description of Artificial Sequence: Synthetic oligonucleotide
  Sense strand starting at position 3096 of SEQ ID NO: 1562435
uagugaguugacuaccaau

SEQ ID NO: 1746762 - RNA, 19 nt, Artificial Sequence
  Description of Artificial Sequence: Synthetic oligonucleotide
  Antisense strand to SEQ ID NO: 1746761
auugguagucaacucacua

SEQ ID NO: 1746763 - RNA, 19 nt, Artificial Sequence
  Description of Artificial Sequence: Synthetic oligonucleotide
  Sense strand starting at position 3167 of SEQ ID NO: 1562435
cucaguugggagugagaaa

SEQ ID NO: 1746764 - RNA, 19 nt, Artificial Sequence
  Description of Artificial Sequence: Synthetic oligonucleotide
  Antisense strand to SEQ ID NO: 1746763
uuucucacucccaacugag

SEQ ID NO: 1746765 - RNA, 19 nt, Artificial Sequence
  Description of Artificial Sequence: Synthetic oligonucleotide
  Sense strand starting at position 3188 of SEQ ID NO: 1562435
cgacaccuuccagagugau

SEQ ID NO: 1746766 - RNA, 19 nt, Artificial Sequence
  Description of Artificial Sequence: Synthetic oligonucleotide
  Antisense strand to SEQ ID NO: 1746765
aucacucuggaaggugucg

SEQ ID NO: 1746767 - RNA, 19 nt, Artificial Sequence
  Description of Artificial Sequence: Synthetic oligonucleotide
  Sense strand starting at position 3474 of SEQ ID NO: 1562435
uguaaucuccuguaauauu

SEQ ID NO: 1746768 - RNA, 19 nt, Artificial Sequence
  Description of Artificial Sequence: Synthetic oligonucleotide
  Antisense strand to SEQ ID NO: 1746767
aauauuacaggagauuaca

SEQ ID NO: 1746769 - RNA, 19 nt, Artificial Sequence
  Description of Artificial Sequence: Synthetic oligonucleotide
  Sense strand starting at position 3571 of SEQ ID NO: 1562435
ccaaaucccuuugugaaag

SEQ ID NO: 1746770 - RNA, 19 nt, Artificial Sequence
  Description of Artificial Sequence: Synthetic oligonucleotide
  Antisense strand to SEQ ID NO: 1746769
cuuucacaaagggauuugg

SEQ ID NO: 1746771 - RNA, 19 nt, Artificial Sequence
  Description of Artificial Sequence: Synthetic oligonucleotide
  Sense strand starting at position 3877 of SEQ ID NO: 1562435
cuuggaugugccuaugauc

SEQ ID NO: 1746772 - RNA, 19 nt, Artificial Sequence
  Description of Artificial Sequence: Synthetic oligonucleotide
  Antisense strand to SEQ ID NO: 1746771
gaucauaggcacauccaag

SEQ ID NO: 1746773 - RNA, 19 nt, Artificial Sequence
  Description of Artificial Sequence: Synthetic oligonucleotide
  Sense strand starting at position 3913 of SEQ ID NO: 1562435
ugcacauuccuagauugca

SEQ ID NO: 1746774 - RNA, 19 nt, Artificial Sequence
  Description of Artificial Sequence: Synthetic oligonucleotide
  Antisense strand to SEQ ID NO: 1746773
ugcaaucuaggaaugugca

SEQ ID NO: 1746775 - RNA, 19 nt, Artificial Sequence
  Description of Artificial Sequence: Synthetic oligonucleotide
  Sense strand starting at position 3964 of SEQ ID NO: 1562435
uucugaagagcauauguga

SEQ ID NO: 1746776 - RNA, 19 nt, Artificial Sequence
  Description of Artificial Sequence: Synthetic oligonucleotide
  Antisense strand to SEQ ID NO: 1746775
ucacauaugcucuucagaa

SEQ ID NO: 1746777 - RNA, 19 nt, Artificial Sequence
  Description of Artificial Sequence: Synthetic oligonucleotide
  Sense strand starting at position 3967 of SEQ ID NO: 1562435
ugaagagcauaugugaguu

SEQ ID NO: 1746778 - RNA, 19 nt, Artificial Sequence
  Description of Artificial Sequence: Synthetic oligonucleotide
  Antisense strand to SEQ ID NO: 1746777
aacucacauaugcucuuca

SEQ ID NO: 1746779 - RNA, 19 nt, Artificial Sequence
  Description of Artificial Sequence: Synthetic oligonucleotide
  Sense strand starting at position 283 of SEQ ID NO: 1562436
auguauauugcccagaaua

SEQ ID NO: 1746780 - RNA, 19 nt, Artificial Sequence
  Description of Artificial Sequence: Synthetic oligonucleotide
  Antisense strand to SEQ ID NO: 1746779
uauucugggcaauauacau

SEQ ID NO: 1746781 - RNA, 19 nt, Artificial Sequence
  Description of Artificial Sequence: Synthetic oligonucleotide
  Sense strand starting at position 285 of SEQ ID NO: 1562436
guauauugcccagaauaug

SEQ ID NO: 1746782 - RNA, 19 nt, Artificial Sequence
  Description of Artificial Sequence: Synthetic oligonucleotide
  Antisense strand to SEQ ID NO: 1746781
cauauucugggcaauauac

SEQ ID NO: 1746783 - RNA, 19 nt, Artificial Sequence
  Description of Artificial Sequence: Synthetic oligonucleotide
  Sense strand starting at position 538 of SEQ ID NO: 1562436
uuucuuaggcauggagaac

SEQ ID NO: 1746784 - RNA, 19 nt, Artificial Sequence
  Description of Artificial Sequence: Synthetic oligonucleotide
  Antisense strand to SEQ ID NO: 1746783
guucuccaugccuaagaaa

SEQ ID NO: 1746785 - RNA, 19 nt, Artificial Sequence
  Description of Artificial Sequence: Synthetic oligonucleotide
  Sense strand starting at position 648 of SEQ ID NO: 1562436
cuauuugccuguucuuaca

SEQ ID NO: 1746786 - RNA, 19 nt, Artificial Sequence
  Description of Artificial Sequence: Synthetic oligonucleotide
  Antisense strand to SEQ ID NO: 1746785
uguaagaacaggcaaauag

SEQ ID NO: 1746787 - RNA, 19 nt, Artificial Sequence
  Description of Artificial Sequence: Synthetic oligonucleotide
  Sense strand starting at position 702 of SEQ ID NO: 1562436
uauuaugcucaagauagug

SEQ ID NO: 1746788 - RNA, 19 nt, Artificial Sequence
  Description of Artificial Sequence: Synthetic oligonucleotide
  Antisense strand to SEQ ID NO: 1746787
cacuaucuugagcauaaua

SEQ ID NO: 1746789 - RNA, 19 nt, Artificial Sequence
  Description of Artificial Sequence: Synthetic oligonucleotide
  Sense strand starting at position 845 of SEQ ID NO: 1562436
ucaggaaagguaggugaua

SEQ ID NO: 1746790 - RNA, 19 nt, Artificial Sequence
  Description of Artificial Sequence: Synthetic oligonucleotide
  Antisense strand to SEQ ID NO: 1746789
uaucaccuaccuuuccuga

SEQ ID NO: 1746791 - RNA, 19 nt, Artificial Sequence
  Description of Artificial Sequence: Synthetic oligonucleotide
  Sense strand starting at position 859 of SEQ ID NO: 1562436
ugauaaucacacugucaga

SEQ ID NO: 1746792 - RNA, 19 nt, Artificial Sequence
  Description of Artificial Sequence: Synthetic oligonucleotide
  Antisense strand to SEQ ID NO: 1746791
ucugacagugugauuauca

SEQ ID NO: 1746793 - RNA, 19 nt, Artificial Sequence
  Description of Artificial Sequence: Synthetic oligonucleotide
  Sense strand starting at position 1052 of SEQ ID NO: 1562436
acuggcugugguuaauaaa

SEQ ID NO: 1746794 - RNA, 19 nt, Artificial Sequence
  Description of Artificial Sequence: Synthetic oligonucleotide
  Antisense strand to SEQ ID NO: 1746793
uuuauuaaccacagccagu

SEQ ID NO: 1746795 - RNA, 19 nt, Artificial Sequence
  Description of Artificial Sequence: Synthetic oligonucleotide
  Sense strand starting at position 1061 of SEQ ID NO: 1562436
gguuaauaaaccugggagu

SEQ ID NO: 1746796 - RNA, 19 nt, Artificial Sequence
  Description of Artificial Sequence: Synthetic oligonucleotide
  Antisense strand to SEQ ID NO: 1746795
acucccagguuuauuaacc

SEQ ID NO: 1746797 - RNA, 19 nt, Artificial Sequence
  Description of Artificial Sequence: Synthetic oligonucleotide
  Sense strand starting at position 1062 of SEQ ID NO: 1562436
guuaauaaaccugggaguu

SEQ ID NO: 1746798 - RNA, 19 nt, Artificial Sequence
  Description of Artificial Sequence: Synthetic oligonucleotide
  Antisense strand to SEQ ID NO: 1746797
aacucccagguuuauuaac

SEQ ID NO: 1746799 - RNA, 19 nt, Artificial Sequence
  Description of Artificial Sequence: Synthetic oligonucleotide
  Sense strand starting at position 1063 of SEQ ID NO: 1562436
uuaauaaaccugggaguug

SEQ ID NO: 1746800 - RNA, 19 nt, Artificial Sequence
  Description of Artificial Sequence: Synthetic oligonucleotide
  Antisense strand to SEQ ID NO: 1746799
caacucccagguuuauuaa

SEQ ID NO: 1746801 - RNA, 19 nt, Artificial Sequence
  Description of Artificial Sequence: Synthetic oligonucleotide
  Sense strand starting at position 1102 of SEQ ID NO: 1562436
agauucuuaggcugaauaa

SEQ ID NO: 1746802 - RNA, 19 nt, Artificial Sequence
  Description of Artificial Sequence: Synthetic oligonucleotide
  Antisense strand to SEQ ID NO: 1746801
uuauucagccuaagaaucu

SEQ ID NO: 1746803 - RNA, 19 nt, Artificial Sequence
  Description of Artificial Sequence: Synthetic oligonucleotide
  Sense strand starting at position 1198 of SEQ ID NO: 1562436
ucuggaaguuggucaauag

SEQ ID NO: 1746804 - RNA, 19 nt, Artificial Sequence
  Description of Artificial Sequence: Synthetic oligonucleotide
  Antisense strand to SEQ ID NO: 1746803
cuauugaccaacuuccaga

SEQ ID NO: 1746805 - RNA, 19 nt, Artificial Sequence
  Description of Artificial Sequence: Synthetic oligonucleotide
  Sense strand starting at position 1202 of SEQ ID NO: 1562436
gaaguuggucaauagcauu

SEQ ID NO: 1746806 - RNA, 19 nt, Artificial Sequence
  Description of Artificial Sequence: Synthetic oligonucleotide
  Antisense strand to SEQ ID NO: 1746805
aaugcuauugaccaacuuc

SEQ ID NO: 1746807 - RNA, 19 nt, Artificial Sequence
  Description of Artificial Sequence: Synthetic oligonucleotide
  Sense strand starting at position 1240 of SEQ ID NO: 1562436
gcacaaauaccucagaggu

SEQ ID NO: 1746808 - RNA, 19 nt, Artificial Sequence
  Description of Artificial Sequence: Synthetic oligonucleotide
  Antisense strand to SEQ ID NO: 1746807
accucugagguauuugugc

SEQ ID NO: 1746809 - RNA, 19 nt, Artificial Sequence
  Description of Artificial Sequence: Synthetic oligonucleotide
  Sense strand starting at position 1258 of SEQ ID NO: 1562436
uggaaagguacuggguaua

SEQ ID NO: 1746810 - RNA, 19 nt, Artificial Sequence
  Description of Artificial Sequence: Synthetic oligonucleotide
  Antisense strand to SEQ ID NO: 1746809
uauacccaguaccuuucca

SEQ ID NO: 1746811 - RNA, 19 nt, Artificial Sequence
  Description of Artificial Sequence: Synthetic oligonucleotide
  Sense strand starting at position 1300 of SEQ ID NO: 1562436
agauaaauagcucaguggu

SEQ ID NO: 1746812 - RNA, 19 nt, Artificial Sequence
  Description of Artificial Sequence: Synthetic oligonucleotide
  Antisense strand to SEQ ID NO: 1746811
accacugagcuauuuaucu

SEQ ID NO: 1746813 - RNA, 19 nt, Artificial Sequence
  Description of Artificial Sequence: Synthetic oligonucleotide
  Sense strand starting at position 1475 of SEQ ID NO: 1562436
ugguuuagaguuuggaaac

SEQ ID NO: 1746814 - RNA, 19 nt, Artificial Sequence
  Description of Artificial Sequence: Synthetic oligonucleotide
  Antisense strand to SEQ ID NO: 1746813
guuuccaaacucuaaacca

SEQ ID NO: 1746815 - RNA, 19 nt, Artificial Sequence
  Description of Artificial Sequence: Synthetic oligonucleotide
  Sense strand starting at position 1560 of SEQ ID NO: 1562436
augcauuucgaguggguau

SEQ ID NO: 1746816 - RNA, 19 nt, Artificial Sequence
  Description of Artificial Sequence: Synthetic oligonucleotide
  Antisense strand to SEQ ID NO: 1746815
auacccacucgaaaugcau

SEQ ID NO: 1746817 - RNA, 19 nt, Artificial Sequence
  Description of Artificial Sequence: Synthetic oligonucleotide
  Sense strand starting at position 1784 of SEQ ID NO: 1562436
gauucuuggcaguaaucca

SEQ ID NO: 1746818 - RNA, 19 nt, Artificial Sequence
  Description of Artificial Sequence: Synthetic oligonucleotide
  Antisense strand to SEQ ID NO: 1746817
uggauuacugccaagaauc

SEQ ID NO: 1746819 - RNA, 19 nt, Artificial Sequence
  Description of Artificial Sequence: Synthetic oligonucleotide
  Sense strand starting at position 1792 of SEQ ID NO: 1562436
gcaguaauccaggagccag

SEQ ID NO: 1746820 - RNA, 19 nt, Artificial Sequence
  Description of Artificial Sequence: Synthetic oligonucleotide
  Antisense strand to SEQ ID NO: 1746819
cuggcuccuggauuacugc

SEQ ID NO: 1746821 - RNA, 19 nt, Artificial Sequence
  Description of Artificial Sequence: Synthetic oligonucleotide
  Sense strand starting at position 1895 of SEQ ID NO: 1562436
gggauauaacagugaguuc

SEQ ID NO: 1746822 - RNA, 19 nt, Artificial Sequence
  Description of Artificial Sequence: Synthetic oligonucleotide
  Antisense strand to SEQ ID NO: 1746821
gaacucacuguuauauccc

SEQ ID NO: 1746823 - RNA, 19 nt, Artificial Sequence
  Description of Artificial Sequence: Synthetic oligonucleotide
  Sense strand starting at position 1904 of SEQ ID NO: 1562436
cagugaguucuguaugaug

SEQ ID NO: 1746824 - RNA, 19 nt, Artificial Sequence
  Description of Artificial Sequence: Synthetic oligonucleotide
  Antisense strand to SEQ ID NO: 1746823
caucauacagaacucacug

SEQ ID NO: 1746825 - RNA, 19 nt, Artificial Sequence
  Description of Artificial Sequence: Synthetic oligonucleotide
  Sense strand starting at position 1938 of SEQ ID NO: 1562436
caggauagccuguaguaga

SEQ ID NO: 1746826 - RNA, 19 nt, Artificial Sequence
  Description of Artificial Sequence: Synthetic oligonucleotide
  Antisense strand to SEQ ID NO: 1746825
ucuacuacaggcuauccug

SEQ ID NO: 1746827 - RNA, 19 nt, Artificial Sequence
  Description of Artificial Sequence: Synthetic oligonucleotide
  Sense strand starting at position 2651 of SEQ ID NO: 1562436
gggcauuuguugcuaagca

SEQ ID NO: 1746828 - RNA, 19 nt, Artificial Sequence
  Description of Artificial Sequence: Synthetic oligonucleotide
  Antisense strand to SEQ ID NO: 1746827
ugcuuagcaacaaaugccc

SEQ ID NO: 1746829 - RNA, 19 nt, Artificial Sequence
  Description of Artificial Sequence: Synthetic oligonucleotide
  Sense strand starting at position 2707 of SEQ ID NO: 1562436
ggcaauaugcacuaucaaa

SEQ ID NO: 1746830 - RNA, 19 nt, Artificial Sequence
  Description of Artificial Sequence: Synthetic oligonucleotide
  Antisense strand to SEQ ID NO: 1746829
uuugauagugcauauugcc

SEQ ID NO: 1746831 - RNA, 19 nt, Artificial Sequence
  Description of Artificial Sequence: Synthetic oligonucleotide
  Sense strand starting at position 2739 of SEQ ID NO: 1562436
gcaagaugauaccuuccua

SEQ ID NO: 1746832 - RNA, 19 nt, Artificial Sequence
  Description of Artificial Sequence: Synthetic oligonucleotide
  Antisense strand to SEQ ID NO: 1746831
uaggaagguaucaucuugc

SEQ ID NO: 1746833 - RNA, 19 nt, Artificial Sequence
  Description of Artificial Sequence: Synthetic oligonucleotide
  Sense strand starting at position 2782 of SEQ ID NO: 1562436
guuccauugccugcuguaa

SEQ ID NO: 1746834 - RNA, 19 nt, Artificial Sequence
  Description of Artificial Sequence: Synthetic oligonucleotide
  Antisense strand to SEQ ID NO: 1746833
uuacagcaggcaauggaac

SEQ ID NO: 1746835 - RNA, 19 nt, Artificial Sequence
  Description of Artificial Sequence: Synthetic oligonucleotide
  Sense strand starting at position 2928 of SEQ ID NO: 1562436
aguuuaugucaaugaaagg

SEQ ID NO: 1746836 - RNA, 19 nt, Artificial Sequence
  Description of Artificial Sequence: Synthetic oligonucleotide
  Antisense strand to SEQ ID NO: 1746835
ccuuucauugacauaaacu

SEQ ID NO: 1746837 - RNA, 19 nt, Artificial Sequence
  Description of Artificial Sequence: Synthetic oligonucleotide
  Sense strand starting at position 2970 of SEQ ID NO: 1562436
cugaauaaacuguauaguu

SEQ ID NO: 1746838 - RNA, 19 nt, Artificial Sequence
  Description of Artificial Sequence: Synthetic oligonucleotide
  Antisense strand to SEQ ID NO: 1746837
aacuauacaguuuauucag

SEQ ID NO: 1746839 - RNA, 19 nt, Artificial Sequence
  Description of Artificial Sequence: Synthetic oligonucleotide
  Sense strand starting at position 3201 of SEQ ID NO: 1562436
cagguauaaucagcuauag

SEQ ID NO: 1746840 - RNA, 19 nt, Artificial Sequence
  Description of Artificial Sequence: Synthetic oligonucleotide
  Antisense strand to SEQ ID NO: 1746839
cuauagcugauuauaccug

SEQ ID NO: 1746841 - RNA, 19 nt, Artificial Sequence
  Description of Artificial Sequence: Synthetic oligonucleotide
  Sense strand starting at position 3247 of SEQ ID NO: 1562436
auagcaaacuaugagauuu

SEQ ID NO: 1746842 - RNA, 19 nt, Artificial Sequence
  Description of Artificial Sequence: Synthetic oligonucleotide
  Antisense strand to SEQ ID NO: 1746841
aaaucucauaguuugcuau

SEQ ID NO: 1746843 - RNA, 19 nt, Artificial Sequence
  Description of Artificial Sequence: Synthetic oligonucleotide
  Sense strand starting at position 3376 of SEQ ID NO: 1562436
cucaguauuuguucuguaa

SEQ ID NO: 1746844 - RNA, 19 nt, Artificial Sequence
  Description of Artificial Sequence: Synthetic oligonucleotide
  Antisense strand to SEQ ID NO: 1746843
uuacagaacaaauacugag

SEQ ID NO: 1746845 - RNA, 19 nt, Artificial Sequence
  Description of Artificial Sequence: Synthetic oligonucleotide
  Sense strand starting at position 3379 of SEQ ID NO: 1562436
aguauuuguucuguaaguu

SEQ ID NO: 1746846 - RNA, 19 nt, Artificial Sequence
  Description of Artificial Sequence: Synthetic oligonucleotide
  Antisense strand to SEQ ID NO: 1746845
aacuuacagaacaaauacu

SEQ ID NO: 1746847 - RNA, 19 nt, Artificial Sequence
  Description of Artificial Sequence: Synthetic oligonucleotide
  Sense strand starting at position 3380 of SEQ ID NO: 1562436
guauuuguucuguaaguug

SEQ ID NO: 1746848 - RNA, 19 nt, Artificial Sequence
  Description of Artificial Sequence: Synthetic oligonucleotide
  Antisense strand to SEQ ID NO: 1746847
caacuuacagaacaaauac

SEQ ID NO: 1746849 - RNA, 19 nt, Artificial Sequence
  Description of Artificial Sequence: Synthetic oligonucleotide
  Sense strand starting at position 3391 of SEQ ID NO: 1562436
guaaguugacaauaagcaa

SEQ ID NO: 1746850 - RNA, 19 nt, Artificial Sequence
  Description of Artificial Sequence: Synthetic oligonucleotide
  Antisense strand to SEQ ID NO: 1746849
uugcuuauugucaacuuac

SEQ ID NO: 1746851 - RNA, 19 nt, Artificial Sequence
  Description of Artificial Sequence: Synthetic oligonucleotide
  Sense strand starting at position 3493 of SEQ ID NO: 1562436
auuguuuggcuauagagag

SEQ ID NO: 1746852 - RNA, 19 nt, Artificial Sequence
  Description of Artificial Sequence: Synthetic oligonucleotide
  Antisense strand to SEQ ID NO: 1746851
cucucuauagccaaacaau

SEQ ID NO: 1746853 - RNA, 19 nt, Artificial Sequence
  Description of Artificial Sequence: Synthetic oligonucleotide
  Sense strand starting at position 3503 of SEQ ID NO: 1562436
uauagagagccuugggauu

SEQ ID NO: 1746854 - RNA, 19 nt, Artificial Sequence
  Description of Artificial Sequence: Synthetic oligonucleotide
  Antisense strand to SEQ ID NO: 1746853
aaucccaaggcucucuaua

SEQ ID NO: 1746855 - RNA, 19 nt, Artificial Sequence
  Description of Artificial Sequence: Synthetic oligonucleotide
  Sense strand starting at position 3563 of SEQ ID NO: 1562436
agaagauacaugggcaguu

SEQ ID NO: 1746856 - RNA, 19 nt, Artificial Sequence
  Description of Artificial Sequence: Synthetic oligonucleotide
  Antisense strand to SEQ ID NO: 1746855
aacugcccauguaucuucu

SEQ ID NO: 1746857 - RNA, 19 nt, Artificial Sequence
  Description of Artificial Sequence: Synthetic oligonucleotide
  Sense strand starting at position 3564 of SEQ ID NO: 1562436
gaagauacaugggcaguua

SEQ ID NO: 1746858 - RNA, 19 nt, Artificial Sequence
  Description of Artificial Sequence: Synthetic oligonucleotide
  Antisense strand to SEQ ID NO: 1746857
uaacugcccauguaucuuc

SEQ ID NO: 1746859 - RNA, 19 nt, Artificial Sequence
  Description of Artificial Sequence: Synthetic oligonucleotide
  Sense strand starting at position 162 of SEQ ID NO: 1562437
ugcuaugauguguauaaau

SEQ ID NO: 1746860 - RNA, 19 nt, Artificial Sequence
  Description of Artificial Sequence: Synthetic oligonucleotide
  Antisense strand to SEQ ID NO: 1746859
auuuauacacaucauagca

SEQ ID NO: 1746861 - RNA, 19 nt, Artificial Sequence
  Description of Artificial Sequence: Synthetic oligonucleotide
  Sense strand starting at position 196 of SEQ ID NO: 1562437
gaaauuaaauuuggaggaa

SEQ ID NO: 1746862 - RNA, 19 nt, Artificial Sequence
  Description of Artificial Sequence: Synthetic oligonucleotide
  Antisense strand to SEQ ID NO: 1746861
uuccuccaaauuuaauuuc

SEQ ID NO: 1746863 - RNA, 19 nt, Artificial Sequence
  Description of Artificial Sequence: Synthetic oligonucleotide
  Sense strand starting at position 240 of SEQ ID NO: 1562437
ccauuuauaugggaaauaa

SEQ ID NO: 1746864 - RNA, 19 nt, Artificial Sequence
  Description of Artificial Sequence: Synthetic oligonucleotide
  Antisense strand to SEQ ID NO: 1746863
uuauuucccauauaaaugg

SEQ ID NO: 1746865 - RNA, 19 nt, Artificial Sequence
  Description of Artificial Sequence: Synthetic oligonucleotide
  Sense strand starting at position 271 of SEQ ID NO: 1562437
gggcauacuccauaaaggu

SEQ ID NO: 1746866 - RNA, 19 nt, Artificial Sequence
  Description of Artificial Sequence: Synthetic oligonucleotide
  Antisense strand to SEQ ID NO: 1746865
accuuuauggaguaugccc

SEQ ID NO: 1746867 - RNA, 19 nt, Artificial Sequence
  Description of Artificial Sequence: Synthetic oligonucleotide
  Sense strand starting at position 287 of SEQ ID NO: 1562437
gguacacaccauuaaaguu

SEQ ID NO: 1746868 - RNA, 19 nt, Artificial Sequence
  Description of Artificial Sequence: Synthetic oligonucleotide
  Antisense strand to SEQ ID NO: 1746867
aacuuuaaugguguguacc

SEQ ID NO: 1746869 - RNA, 19 nt, Artificial Sequence
  Description of Artificial Sequence: Synthetic oligonucleotide
  Sense strand starting at position 390 of SEQ ID NO: 1562437
ugaagauuauggucaccaa

SEQ ID NO: 1746870 - RNA, 19 nt, Artificial Sequence
  Description of Artificial Sequence: Synthetic oligonucleotide
  Antisense strand to SEQ ID NO: 1746869
uuggugaccauaaucuuca

SEQ ID NO: 1746871 - RNA, 19 nt, Artificial Sequence
  Description of Artificial Sequence: Synthetic oligonucleotide
  Sense strand starting at position 401 of SEQ ID NO: 1562437
gucaccaaguaauugauaa

SEQ ID NO: 1746872 - RNA, 19 nt, Artificial Sequence
  Description of Artificial Sequence: Synthetic oligonucleotide
  Antisense strand to SEQ ID NO: 1746871
uuaucaauuacuuggugac

SEQ ID NO: 1746873 - RNA, 19 nt, Artificial Sequence
  Description of Artificial Sequence: Synthetic oligonucleotide
  Sense strand starting at position 428 of SEQ ID NO: 1562437
uggcuucuagauuagccaa

SEQ ID NO: 1746874 - RNA, 19 nt, Artificial Sequence
  Description of Artificial Sequence: Synthetic oligonucleotide
  Antisense strand to SEQ ID NO: 1746873
uuggcuaaucuagaagcca

SEQ ID NO: 1746875 - RNA, 19 nt, Artificial Sequence
  Description of Artificial Sequence: Synthetic oligonucleotide
  Sense strand starting at position 598 of SEQ ID NO: 1562437
ggagauuauugaucaugua

SEQ ID NO: 1746876 - RNA, 19 nt, Artificial Sequence
  Description of Artificial Sequence: Synthetic oligonucleotide
  Antisense strand to SEQ ID NO: 1746875
uacaugaucaauaaucucc

SEQ ID NO: 1746877 - RNA, 19 nt, Artificial Sequence
  Description of Artificial Sequence: Synthetic oligonucleotide
  Sense strand starting at position 652 of SEQ ID NO: 1562437
guggaauaguuauuggaau

SEQ ID NO: 1746878 - RNA, 19 nt, Artificial Sequence
  Description of Artificial Sequence: Synthetic oligonucleotide
  Antisense strand to SEQ ID NO: 1746877
auuccaauaacuauuccac

SEQ ID NO: 1746879 - RNA, 19 nt, Artificial Sequence
  Description of Artificial Sequence: Synthetic oligonucleotide
  Sense strand starting at position 703 of SEQ ID NO: 1562437
cagugaguagguggaauaa

SEQ ID NO: 1746880 - RNA, 19 nt, Artificial Sequence
  Description of Artificial Sequence: Synthetic oligonucleotide
  Antisense strand to SEQ ID NO: 1746879
uuauuccaccuacucacug

SEQ ID NO: 1746881 - RNA, 19 nt, Artificial Sequence
  Description of Artificial Sequence: Synthetic oligonucleotide
  Sense strand starting at position 846 of SEQ ID NO: 1562437
uugugcuguccguuguaca

SEQ ID NO: 1746882 - RNA, 19 nt, Artificial Sequence
  Description of Artificial Sequence: Synthetic oligonucleotide
  Antisense strand to SEQ ID NO: 1746881
uguacaacggacagcacaa

SEQ ID NO: 1746883 - RNA, 19 nt, Artificial Sequence
  Description of Artificial Sequence: Synthetic oligonucleotide
  Sense strand starting at position 951 of SEQ ID NO: 1562437
agacauaugcagggcugau

SEQ ID NO: 1746884 - RNA, 19 nt, Artificial Sequence
  Description of Artificial Sequence: Synthetic oligonucleotide
  Antisense strand to SEQ ID NO: 1746883
aucagcccugcauaugucu

SEQ ID NO: 1746885 - RNA, 19 nt, Artificial Sequence
  Description of Artificial Sequence: Synthetic oligonucleotide
  Sense strand starting at position 1011 of SEQ ID NO: 1562437
ggcauuauuccugauagug

SEQ ID NO: 1746886 - RNA, 19 nt, Artificial Sequence
  Description of Artificial Sequence: Synthetic oligonucleotide
  Antisense strand to SEQ ID NO: 1746885
cacuaucaggaauaaugcc

SEQ ID NO: 1746887 - RNA, 19 nt, Artificial Sequence
  Description of Artificial Sequence: Synthetic oligonucleotide
  Sense strand starting at position 1249 of SEQ ID NO: 1562437
gcaaucagauucuugaaag

SEQ ID NO: 1746888 - RNA, 19 nt, Artificial Sequence
  Description of Artificial Sequence: Synthetic oligonucleotide
  Antisense strand to SEQ ID NO: 1746887
cuuucaagaaucugauugc

SEQ ID NO: 1746889 - RNA, 19 nt, Artificial Sequence
  Description of Artificial Sequence: Synthetic oligonucleotide
  Sense strand starting at position 1450 of SEQ ID NO: 1562437
ggacauauuauuggcauag

SEQ ID NO: 1746890 - RNA, 19 nt, Artificial Sequence
  Description of Artificial Sequence: Synthetic oligonucleotide
  Antisense strand to SEQ ID NO: 1746889
cuaugccaauaauaugucc

SEQ ID NO: 1746891 - RNA, 19 nt, Artificial Sequence
  Description of Artificial Sequence: Synthetic oligonucleotide
  Sense strand starting at position 1451 of SEQ ID NO: 1562437
gacauauuauuggcauaga

SEQ ID NO: 1746892 - RNA, 19 nt, Artificial Sequence
  Description of Artificial Sequence: Synthetic oligonucleotide
  Antisense strand to SEQ ID NO: 1746891
ucuaugccaauaauauguc

SEQ ID NO: 1746893 - RNA, 19 nt, Artificial Sequence
  Description of Artificial Sequence: Synthetic oligonucleotide
  Sense strand starting at position 1521 of SEQ ID NO: 1562437
cucuuagaauuugaucaag

SEQ ID NO: 1746894 - RNA, 19 nt, Artificial Sequence
  Description of Artificial Sequence: Synthetic oligonucleotide
  Antisense strand to SEQ ID NO: 1746893
cuugaucaaauucuaagag

SEQ ID NO: 1746895 - RNA, 19 nt, Artificial Sequence
  Description of Artificial Sequence: Synthetic oligonucleotide
  Sense strand starting at position 1584 of SEQ ID NO: 1562437
gguccaucagccuaagaac

SEQ ID NO: 1746896 - RNA, 19 nt, Artificial Sequence
  Description of Artificial Sequence: Synthetic oligonucleotide
  Antisense strand to SEQ ID NO: 1746895
guucuuaggcugauggacc

SEQ ID NO: 1746897 - RNA, 19 nt, Artificial Sequence
  Description of Artificial Sequence: Synthetic oligonucleotide
  Sense strand starting at position 1807 of SEQ ID NO: 1562437
ccuauaguuugauuaccau

SEQ ID NO: 1746898 - RNA, 19 nt, Artificial Sequence
  Description of Artificial Sequence: Synthetic oligonucleotide
  Antisense strand to SEQ ID NO: 1746897
augguaaucaaacuauagg

SEQ ID NO: 1746899 - RNA, 19 nt, Artificial Sequence
  Description of Artificial Sequence: Synthetic oligonucleotide
  Sense strand starting at position 1870 of SEQ ID NO: 1562437
agugauugacagcgacaaa

SEQ ID NO: 1746900 - RNA, 19 nt, Artificial Sequence
  Description of Artificial Sequence: Synthetic oligonucleotide
  Antisense strand to SEQ ID NO: 1746899
uuugucgcugucaaucacu

SEQ ID NO: 1746901 - RNA, 19 nt, Artificial Sequence
  Description of Artificial Sequence: Synthetic oligonucleotide
  Sense strand starting at position 1977 of SEQ ID NO: 1562437
ugaggauuggcaggaacuu

SEQ ID NO: 1746902 - RNA, 19 nt, Artificial Sequence
  Description of Artificial Sequence: Synthetic oligonucleotide
  Antisense strand to SEQ ID NO: 1746901
aaguuccugccaauccuca

SEQ ID NO: 1746903 - RNA, 19 nt, Artificial Sequence
  Description of Artificial Sequence: Synthetic oligonucleotide
  Sense strand starting at position 2118 of SEQ ID NO: 1562437
gaagguuuaccacaugucu

SEQ ID NO: 1746904 - RNA, 19 nt, Artificial Sequence
  Description of Artificial Sequence: Synthetic oligonucleotide
  Antisense strand to SEQ ID NO: 1746903
agacaugugguaaaccuuc

SEQ ID NO: 1746905 - RNA, 19 nt, Artificial Sequence
  Description of Artificial Sequence: Synthetic oligonucleotide
  Sense strand starting at position 2303 of SEQ ID NO: 1562437
caugacagagucugaagua

SEQ ID NO: 1746906 - RNA, 19 nt, Artificial Sequence
  Description of Artificial Sequence: Synthetic oligonucleotide
  Antisense strand to SEQ ID NO: 1746905
uacuucagacucugucaug

SEQ ID NO: 1746907 - RNA, 19 nt, Artificial Sequence
  Description of Artificial Sequence: Synthetic oligonucleotide
  Sense strand starting at position 2469 of SEQ ID NO: 1562437
cuuaguguuguguugccua

SEQ ID NO: 1746908 - RNA, 19 nt, Artificial Sequence
  Description of Artificial Sequence: Synthetic oligonucleotide
  Antisense strand to SEQ ID NO: 1746907
uaggcaacacaacacuaag

SEQ ID NO: 1746909 - RNA, 19 nt, Artificial Sequence
  Description of Artificial Sequence: Synthetic oligonucleotide
  Sense strand starting at position 2535 of SEQ ID NO: 1562437
ucuauauaucuacaguugu

SEQ ID NO: 1746910 - RNA, 19 nt, Artificial Sequence
  Description of Artificial Sequence: Synthetic oligonucleotide
  Antisense strand to SEQ ID NO: 1746909
acaacuguagauauauaga

SEQ ID NO: 1746911 - RNA, 19 nt, Artificial Sequence
  Description of Artificial Sequence: Synthetic oligonucleotide
  Sense strand starting at position 2754 of SEQ ID NO: 1562437
uguugcaaugcuuagagga

SEQ ID NO: 1746912 - RNA, 19 nt, Artificial Sequence
  Description of Artificial Sequence: Synthetic oligonucleotide
  Antisense strand to SEQ ID NO: 1746911
uccucuaagcauugcaaca

SEQ ID NO: 1746913 - RNA, 19 nt, Artificial Sequence
  Description of Artificial Sequence: Synthetic oligonucleotide
  Sense strand starting at position 2801 of SEQ ID NO: 1562437
auaucaaaguuucuuggau

SEQ ID NO: 1746914 - RNA, 19 nt, Artificial Sequence
  Description of Artificial Sequence: Synthetic oligonucleotide
  Antisense strand to SEQ ID NO: 1746913
auccaagaaacuuugauau

SEQ ID NO: 1746915 - RNA, 19 nt, Artificial Sequence
  Description of Artificial Sequence: Synthetic oligonucleotide
  Sense strand starting at position 2856 of SEQ ID NO: 1562437
ucauacuuagcugagaauc

SEQ ID NO: 1746916 - RNA, 19 nt, Artificial Sequence
  Description of Artificial Sequence: Synthetic oligonucleotide
  Antisense strand to SEQ ID NO: 1746915
gauucucagcuaaguauga

SEQ ID NO: 1746917 - RNA, 19 nt, Artificial Sequence
  Description of Artificial Sequence: Synthetic oligonucleotide
  Sense strand starting at position 2866 of SEQ ID NO: 1562437
cugagaaucuaauuaugug

SEQ ID NO: 1746918 - RNA, 19 nt, Artificial Sequence
  Description of Artificial Sequence: Synthetic oligonucleotide
  Antisense strand to SEQ ID NO: 1746917
cacauaauuagauucucag

SEQ ID NO: 1746919 - RNA, 19 nt, Artificial Sequence
  Description of Artificial Sequence: Synthetic oligonucleotide
  Sense strand starting at position 2870 of SEQ ID NO: 1562437
gaaucuaauuaugugaugu

SEQ ID NO: 1746920 - RNA, 19 nt, Artificial Sequence
  Description of Artificial Sequence: Synthetic oligonucleotide
  Antisense strand to SEQ ID NO: 1746919
acaucacauaauuagauuc

SEQ ID NO: 1746921 - RNA, 19 nt, Artificial Sequence
  Description of Artificial Sequence: Synthetic oligonucleotide
  Sense strand starting at position 3271 of SEQ ID NO: 1562437
guccgaagccugcuuacuu

SEQ ID NO: 1746922 - RNA, 19 nt, Artificial Sequence
  Description of Artificial Sequence: Synthetic oligonucleotide
  Antisense strand to SEQ ID NO: 1746921
aaguaagcaggcuucggac

SEQ ID NO: 1746923 - RNA, 19 nt, Artificial Sequence
  Description of Artificial Sequence: Synthetic oligonucleotide
  Sense strand starting at position 3316 of SEQ ID NO: 1562437
uuuggauucuucccuaaag

SEQ ID NO: 1746924 - RNA, 19 nt, Artificial Sequence
  Description of Artificial Sequence: Synthetic oligonucleotide
  Antisense strand to SEQ ID NO: 1746923
cuuuagggaagaauccaaa

SEQ ID NO: 1746925 - RNA, 19 nt, Artificial Sequence
  Description of Artificial Sequence: Synthetic oligonucleotide
  Sense strand starting at position 3317 of SEQ ID NO: 1562437
uuggauucuucccuaaaga

SEQ ID NO: 1746926 - RNA, 19 nt, Artificial Sequence
  Description of Artificial Sequence: Synthetic oligonucleotide
  Antisense strand to SEQ ID NO: 1746925
ucuuuagggaagaauccaa

SEQ ID NO: 1746927 - RNA, 19 nt, Artificial Sequence
  Description of Artificial Sequence: Synthetic oligonucleotide
  Sense strand starting at position 3435 of SEQ ID NO: 1562437
ggaguuguucaugagcaga

SEQ ID NO: 1746928 - RNA, 19 nt, Artificial Sequence
  Description of Artificial Sequence: Synthetic oligonucleotide
  Antisense strand to SEQ ID NO: 1746927
ucugcucaugaacaacucc

SEQ ID NO: 1746929 - RNA, 19 nt, Artificial Sequence
  Description of Artificial Sequence: Synthetic oligonucleotide
  Sense strand starting at position 3482 of SEQ ID NO: 1562437
ggcaucuuagaguaucauu

SEQ ID NO: 1746930 - RNA, 19 nt, Artificial Sequence
  Description of Artificial Sequence: Synthetic oligonucleotide
  Antisense strand to SEQ ID NO: 1746929
aaugauacucuaagaugcc

SEQ ID NO: 1746931 - RNA, 19 nt, Artificial Sequence
  Description of Artificial Sequence: Synthetic oligonucleotide
  Sense strand starting at position 3487 of SEQ ID NO: 1562437
cuuagaguaucauugauga

SEQ ID NO: 1746932 - RNA, 19 nt, Artificial Sequence
  Description of Artificial Sequence: Synthetic oligonucleotide
  Antisense strand to SEQ ID NO: 1746931
ucaucaaugauacucuaag

SEQ ID NO: 1746933 - RNA, 19 nt, Artificial Sequence
  Description of Artificial Sequence: Synthetic oligonucleotide
  Sense strand starting at position 3501 of SEQ ID NO: 1562437
gaugauccuucuguugaau

SEQ ID NO: 1746934 - RNA, 19 nt, Artificial Sequence
  Description of Artificial Sequence: Synthetic oligonucleotide
  Antisense strand to SEQ ID NO: 1746933
auucaacagaaggaucauc

SEQ ID NO: 1746935 - RNA, 19 nt, Artificial Sequence
  Description of Artificial Sequence: Synthetic oligonucleotide
  Sense strand starting at position 3765 of SEQ ID NO: 1562437
caugacauuugguacagau

SEQ ID NO: 1746936 - RNA, 19 nt, Artificial Sequence
  Description of Artificial Sequence: Synthetic oligonucleotide
  Antisense strand to SEQ ID NO: 1746935
aucuguaccaaaugucaug

SEQ ID NO: 1746937 - RNA, 19 nt, Artificial Sequence
  Description of Artificial Sequence: Synthetic oligonucleotide
  Sense strand starting at position 3773 of SEQ ID NO: 1562437
uugguacagauguaguaua

SEQ ID NO: 1746938 - RNA, 19 nt, Artificial Sequence
  Description of Artificial Sequence: Synthetic oligonucleotide
  Antisense strand to SEQ ID NO: 1746937
uauacuacaucuguaccaa

SEQ ID NO: 1746939 - RNA, 19 nt, Artificial Sequence
  Description of Artificial Sequence: Synthetic oligonucleotide
  Sense strand starting at position 79 of SEQ ID NO: 1562438
uuacaugucccauagcuua

SEQ ID NO: 1746940 - RNA, 19 nt, Artificial Sequence
  Description of Artificial Sequence: Synthetic oligonucleotide
  Antisense strand to SEQ ID NO: 1746939
uaagcuaugggacauguaa

SEQ ID NO: 1746941 - RNA, 19 nt, Artificial Sequence
  Description of Artificial Sequence: Synthetic oligonucleotide
  Sense strand starting at position 116 of SEQ ID NO: 1562438
gugauaguucaggacuguu

SEQ ID NO: 1746942 - RNA, 19 nt, Artificial Sequence
  Description of Artificial Sequence: Synthetic oligonucleotide
  Antisense strand to SEQ ID NO: 1746941
aacaguccugaacuaucac

SEQ ID NO: 1746943 - RNA, 19 nt, Artificial Sequence
  Description of Artificial Sequence: Synthetic oligonucleotide
  Sense strand starting at position 440 of SEQ ID NO: 1562438
gagggaacuaggugucaug

SEQ ID NO: 1746944 - RNA, 19 nt, Artificial Sequence
  Description of Artificial Sequence: Synthetic oligonucleotide
  Antisense strand to SEQ ID NO: 1746943
caugacaccuaguucccuc

SEQ ID NO: 1746945 - RNA, 19 nt, Artificial Sequence
  Description of Artificial Sequence: Synthetic oligonucleotide
  Sense strand starting at position 457 of SEQ ID NO: 1562438
ugcuaagagguuugaauau

SEQ ID NO: 1746946 - RNA, 19 nt, Artificial Sequence
  Description of Artificial Sequence: Synthetic oligonucleotide
  Antisense strand to SEQ ID NO: 1746945
auauucaaaccucuuagca

SEQ ID NO: 1746947 - RNA, 19 nt, Artificial Sequence
  Description of Artificial Sequence: Synthetic oligonucleotide
  Sense strand starting at position 520 of SEQ ID NO: 1562438
cagaaacuugguuagguuu

SEQ ID NO: 1746948 - RNA, 19 nt, Artificial Sequence
  Description of Artificial Sequence: Synthetic oligonucleotide
  Antisense strand to SEQ ID NO: 1746947
aaaccuaaccaaguuucug

SEQ ID NO: 1746949 - RNA, 19 nt, Artificial Sequence
  Description of Artificial Sequence: Synthetic oligonucleotide
  Sense strand starting at position 654 of SEQ ID NO: 1562438
aguacauagggucagaagu

SEQ ID NO: 1746950 - RNA, 19 nt, Artificial Sequence
  Description of Artificial Sequence: Synthetic oligonucleotide
  Antisense strand to SEQ ID NO: 1746949
acuucugacccuauguacu

SEQ ID NO: 1746951 - RNA, 19 nt, Artificial Sequence
  Description of Artificial Sequence: Synthetic oligonucleotide
  Sense strand starting at position 725 of SEQ ID NO: 1562438
aagaauauaugguugagua

SEQ ID NO: 1746952 - RNA, 19 nt, Artificial Sequence
  Description of Artificial Sequence: Synthetic oligonucleotide
  Antisense strand to SEQ ID NO: 1746951
uacucaaccauauauucuu

SEQ ID NO: 1746953 - RNA, 19 nt, Artificial Sequence
  Description of Artificial Sequence: Synthetic oligonucleotide
  Sense strand starting at position 726 of SEQ ID NO: 1562438
agaauauaugguugaguau

SEQ ID NO: 1746954 - RNA, 19 nt, Artificial Sequence
  Description of Artificial Sequence: Synthetic oligonucleotide
  Antisense strand to SEQ ID NO: 1746953
auacucaaccauauauucu

SEQ ID NO: 1746955 - RNA, 19 nt, Artificial Sequence
  Description of Artificial Sequence: Synthetic oligonucleotide
  Sense strand starting at position 782 of SEQ ID NO: 1562438
uugguuauuucuguguuga

SEQ ID NO: 1746956 - RNA, 19 nt, Artificial Sequence
  Description of Artificial Sequence: Synthetic oligonucleotide
  Antisense strand to SEQ ID NO: 1746955
ucaacacagaaauaaccaa

SEQ ID NO: 1746957 - RNA, 19 nt, Artificial Sequence
  Description of Artificial Sequence: Synthetic oligonucleotide
  Sense strand starting at position 795 of SEQ ID NO: 1562438
uguugaaauuaagucauga

SEQ ID NO: 1746958 - RNA, 19 nt, Artificial Sequence
  Description of Artificial Sequence: Synthetic oligonucleotide
  Antisense strand to SEQ ID NO: 1746957
ucaugacuuaauuucaaca

SEQ ID NO: 1746959 - RNA, 19 nt, Artificial Sequence
  Description of Artificial Sequence: Synthetic oligonucleotide
  Sense strand starting at position 904 of SEQ ID NO: 1562438
auugaauagcauuguaaac

SEQ ID NO: 1746960 - RNA, 19 nt, Artificial Sequence
  Description of Artificial Sequence: Synthetic oligonucleotide
  Antisense strand to SEQ ID NO: 1746959
guuuacaaugcuauucaau

SEQ ID NO: 1746961 - RNA, 19 nt, Artificial Sequence
  Description of Artificial Sequence: Synthetic oligonucleotide
  Sense strand starting at position 1069 of SEQ ID NO: 1562438
ggaugcucagagugauuau

SEQ ID NO: 1746962 - RNA, 19 nt, Artificial Sequence
  Description of Artificial Sequence: Synthetic oligonucleotide
  Antisense strand to SEQ ID NO: 1746961
auaaucacucugagcaucc

SEQ ID NO: 1746963 - RNA, 19 nt, Artificial Sequence
  Description of Artificial Sequence: Synthetic oligonucleotide
  Sense strand starting at position 1251 of SEQ ID NO: 1562438
aggguuggcauccagaagu

SEQ ID NO: 1746964 - RNA, 19 nt, Artificial Sequence
  Description of Artificial Sequence: Synthetic oligonucleotide
  Antisense strand to SEQ ID NO: 1746963
acuucuggaugccaacccu

SEQ ID NO: 1746965 - RNA, 19 nt, Artificial Sequence
  Description of Artificial Sequence: Synthetic oligonucleotide
  Sense strand starting at position 1486 of SEQ ID NO: 1562438
guaguaagcaguggaagaa

SEQ ID NO: 1746966 - RNA, 19 nt, Artificial Sequence
  Description of Artificial Sequence: Synthetic oligonucleotide
  Antisense strand to SEQ ID NO: 1746965
uucuuccacugcuuacuac

SEQ ID NO: 1746967 - RNA, 19 nt, Artificial Sequence
  Description of Artificial Sequence: Synthetic oligonucleotide
  Sense strand starting at position 1596 of SEQ ID NO: 1562438
agguauggucuugagagcu

SEQ ID NO: 1746968 - RNA, 19 nt, Artificial Sequence
  Description of Artificial Sequence: Synthetic oligonucleotide
  Antisense strand to SEQ ID NO: 1746967
agcucucaagaccauaccu

SEQ ID NO: 1746969 - RNA, 19 nt, Artificial Sequence
  Description of Artificial Sequence: Synthetic oligonucleotide
  Sense strand starting at position 1678 of SEQ ID NO: 1562438
aggaauauggcgggagguu

SEQ ID NO: 1746970 - RNA, 19 nt, Artificial Sequence
  Description of Artificial Sequence: Synthetic oligonucleotide
  Antisense strand to SEQ ID NO: 1746969
aaccucccgccauauuccu

SEQ ID NO: 1746971 - RNA, 19 nt, Artificial Sequence
  Description of Artificial Sequence: Synthetic oligonucleotide
  Sense strand starting at position 1701 of SEQ ID NO: 1562438
gagauccugaguuggaguu

SEQ ID NO: 1746972 - RNA, 19 nt, Artificial Sequence
  Description of Artificial Sequence: Synthetic oligonucleotide
  Antisense strand to SEQ ID NO: 1746971
aacuccaacucaggaucuc

SEQ ID NO: 1746973 - RNA, 19 nt, Artificial Sequence
  Description of Artificial Sequence: Synthetic oligonucleotide
  Sense strand starting at position 1779 of SEQ ID NO: 1562438
caaagaagugagugucuga

SEQ ID NO: 1746974 - RNA, 19 nt, Artificial Sequence
  Description of Artificial Sequence: Synthetic oligonucleotide
  Antisense strand to SEQ ID NO: 1746973
ucagacacucacuucuuug

SEQ ID NO: 1746975 - RNA, 19 nt, Artificial Sequence
  Description of Artificial Sequence: Synthetic oligonucleotide
  Sense strand starting at position 1900 of SEQ ID NO: 1562438
ucuuuauuauagccaagga

SEQ ID NO: 1746976 - RNA, 19 nt, Artificial Sequence
  Description of Artificial Sequence: Synthetic oligonucleotide
  Antisense strand to SEQ ID NO: 1746975
uccuuggcuauaauaaaga

SEQ ID NO: 1746977 - RNA, 19 nt, Artificial Sequence
  Description of Artificial Sequence: Synthetic oligonucleotide
  Sense strand starting at position 1969 of SEQ ID NO: 1562438
auugauuacgucuaucuau

SEQ ID NO: 1746978 - RNA, 19 nt, Artificial Sequence
  Description of Artificial Sequence: Synthetic oligonucleotide
  Antisense strand to SEQ ID NO: 1746977
auagauagacguaaucaau

SEQ ID NO: 1746979 - RNA, 19 nt, Artificial Sequence
  Description of Artificial Sequence: Synthetic oligonucleotide
  Sense strand starting at position 2116 of SEQ ID NO: 1562438
cucuuagaauugucuuuga

SEQ ID NO: 1746980 - RNA, 19 nt, Artificial Sequence
  Description of Artificial Sequence: Synthetic oligonucleotide
  Antisense strand to SEQ ID NO: 1746979
ucaaagacaauucuaagag

SEQ ID NO: 1746981 - RNA, 19 nt, Artificial Sequence
  Description of Artificial Sequence: Synthetic oligonucleotide
  Sense strand starting at position 2119 of SEQ ID NO: 1562438
uuagaauugucuuugaaag

SEQ ID NO: 1746982 - RNA, 19 nt, Artificial Sequence
  Description of Artificial Sequence: Synthetic oligonucleotide
  Antisense strand to SEQ ID NO: 1746981
cuuucaaagacaauucuaa

SEQ ID NO: 1746983 - RNA, 19 nt, Artificial Sequence
  Description of Artificial Sequence: Synthetic oligonucleotide
  Sense strand starting at position 2120 of SEQ ID NO: 1562438
uagaauugucuuugaaagu

SEQ ID NO: 1746984 - RNA, 19 nt, Artificial Sequence
  Description of Artificial Sequence: Synthetic oligonucleotide
  Antisense strand to SEQ ID NO: 1746983
acuuucaaagacaauucua

SEQ ID NO: 1746985 - RNA, 19 nt, Artificial Sequence
  Description of Artificial Sequence: Synthetic oligonucleotide
  Sense strand starting at position 2324 of SEQ ID NO: 1562438
aguugugauuugcuuuauu

SEQ ID NO: 1746986 - RNA, 19 nt, Artificial Sequence
  Description of Artificial Sequence: Synthetic oligonucleotide
  Antisense strand to SEQ ID NO: 1746985
aauaaagcaaaucacaacu

SEQ ID NO: 1746987 - RNA, 19 nt, Artificial Sequence
  Description of Artificial Sequence: Synthetic oligonucleotide
  Sense strand starting at position 2443 of SEQ ID NO: 1562438
gaaaccuuggcuuauguuu

SEQ ID NO: 1746988 - RNA, 19 nt, Artificial Sequence
  Description of Artificial Sequence: Synthetic oligonucleotide
  Antisense strand to SEQ ID NO: 1746987
aaacauaagccaagguuuc

SEQ ID NO: 1746989 - RNA, 19 nt, Artificial Sequence
  Description of Artificial Sequence: Synthetic oligonucleotide
  Sense strand starting at position 2449 of SEQ ID NO: 1562438
uuggcuuauguuuaagaua

SEQ ID NO: 1746990 - RNA, 19 nt, Artificial Sequence
  Description of Artificial Sequence: Synthetic oligonucleotide
  Antisense strand to SEQ ID NO: 1746989
uaucuuaaacauaagccaa

SEQ ID NO: 1746991 - RNA, 19 nt, Artificial Sequence
  Description of Artificial Sequence: Synthetic oligonucleotide
  Sense strand starting at position 2509 of SEQ ID NO: 1562438
uguauccuacugugaacaa

SEQ ID NO: 1746992 - RNA, 19 nt, Artificial Sequence
  Description of Artificial Sequence: Synthetic oligonucleotide
  Antisense strand to SEQ ID NO: 1746991
uuguucacaguaggauaca

SEQ ID NO: 1746993 - RNA, 19 nt, Artificial Sequence
  Description of Artificial Sequence: Synthetic oligonucleotide
  Sense strand starting at position 2789 of SEQ ID NO: 1562438
aaggucauuugagaauaug

SEQ ID NO: 1746994 - RNA, 19 nt, Artificial Sequence
  Description of Artificial Sequence: Synthetic oligonucleotide
  Antisense strand to SEQ ID NO: 1746993
cauauucucaaaugaccuu

SEQ ID NO: 1746995 - RNA, 19 nt, Artificial Sequence
  Description of Artificial Sequence: Synthetic oligonucleotide
  Sense strand starting at position 2999 of SEQ ID NO: 1562438
guguuugagggacauacuu

SEQ ID NO: 1746996 - RNA, 19 nt, Artificial Sequence
  Description of Artificial Sequence: Synthetic oligonucleotide
  Antisense strand to SEQ ID NO: 1746995
aaguaugucccucaaacac

SEQ ID NO: 1746997 - RNA, 19 nt, Artificial Sequence
  Description of Artificial Sequence: Synthetic oligonucleotide
  Sense strand starting at position 3033 of SEQ ID NO: 1562438
cccucuguccuggaggagu

SEQ ID NO: 1746998 - RNA, 19 nt, Artificial Sequence
  Description of Artificial Sequence: Synthetic oligonucleotide
  Antisense strand to SEQ ID NO: 1746997
acuccuccaggacagaggg

SEQ ID NO: 1746999 - RNA, 19 nt, Artificial Sequence
  Description of Artificial Sequence: Synthetic oligonucleotide
  Sense strand starting at position 3067 of SEQ ID NO: 1562438
gaaaguugguuucucaaug

SEQ ID NO: 1747000 - RNA, 19 nt, Artificial Sequence
  Description of Artificial Sequence: Synthetic oligonucleotide
  Antisense strand to SEQ ID NO: 1746999
cauugagaaaccaacuuuc

SEQ ID NO: 1747001 - RNA, 19 nt, Artificial Sequence
  Description of Artificial Sequence: Synthetic oligonucleotide
  Sense strand starting at position 3068 of SEQ ID NO: 1562438
aaaguugguuucucaauga

SEQ ID NO: 1747002 - RNA, 19 nt, Artificial Sequence
  Description of Artificial Sequence: Synthetic oligonucleotide
  Antisense strand to SEQ ID NO: 1747001
ucauugagaaaccaacuuu

SEQ ID NO: 1747003 - RNA, 19 nt, Artificial Sequence
  Description of Artificial Sequence: Synthetic oligonucleotide
  Sense strand starting at position 3072 of SEQ ID NO: 1562438
uugguuucucaaugagaca

SEQ ID NO: 1747004 - RNA, 19 nt, Artificial Sequence
  Description of Artificial Sequence: Synthetic oligonucleotide
  Antisense strand to SEQ ID NO: 1747003
ugucucauugagaaaccaa

SEQ ID NO: 1747005 - RNA, 19 nt, Artificial Sequence
  Description of Artificial Sequence: Synthetic oligonucleotide
  Sense strand starting at position 3205 of SEQ ID NO: 1562438
ccugauguauuugagaaag

SEQ ID NO: 1747006 - RNA, 19 nt, Artificial Sequence
  Description of Artificial Sequence: Synthetic oligonucleotide
  Antisense strand to SEQ ID NO: 1747005
cuuucucaaauacaucagg

SEQ ID NO: 1747007 - RNA, 19 nt, Artificial Sequence
  Description of Artificial Sequence: Synthetic oligonucleotide
  Sense strand starting at position 3272 of SEQ ID NO: 1562438
uuuguauaaccggauacuu

SEQ ID NO: 1747008 - RNA, 19 nt, Artificial Sequence
  Description of Artificial Sequence: Synthetic oligonucleotide
  Antisense strand to SEQ ID NO: 1747007
aaguauccgguuauacaaa

SEQ ID NO: 1747009 - RNA, 19 nt, Artificial Sequence
  Description of Artificial Sequence: Synthetic oligonucleotide
  Sense strand starting at position 3378 of SEQ ID NO: 1562438
uaguaauagguacagucau

SEQ ID NO: 1747010 - RNA, 19 nt, Artificial Sequence
  Description of Artificial Sequence: Synthetic oligonucleotide
  Antisense strand to SEQ ID NO: 1747009
augacuguaccuauuacua

SEQ ID NO: 1747011 - RNA, 19 nt, Artificial Sequence
  Description of Artificial Sequence: Synthetic oligonucleotide
  Sense strand starting at position 3413 of SEQ ID NO: 1562438
augaaauuguauguugauc

SEQ ID NO: 1747012 - RNA, 19 nt, Artificial Sequence
  Description of Artificial Sequence: Synthetic oligonucleotide
  Antisense strand to SEQ ID NO: 1747011
gaucaacauacaauuucau

SEQ ID NO: 1747013 - RNA, 19 nt, Artificial Sequence
  Description of Artificial Sequence: Synthetic oligonucleotide
  Sense strand starting at position 3478 of SEQ ID NO: 1562438
guaucauuaguacaucaau

SEQ ID NO: 1747014 - RNA, 19 nt, Artificial Sequence
  Description of Artificial Sequence: Synthetic oligonucleotide
  Antisense strand to SEQ ID NO: 1747013
auugauguacuaaugauac

SEQ ID NO: 1747015 - RNA, 19 nt, Artificial Sequence
  Description of Artificial Sequence: Synthetic oligonucleotide
  Sense strand starting at position 3847 of SEQ ID NO: 1562438
aaccaauaaccgugugaau

SEQ ID NO: 1747016 - RNA, 19 nt, Artificial Sequence
  Description of Artificial Sequence: Synthetic oligonucleotide
  Antisense strand to SEQ ID NO: 1747015
auucacacgguuauugguu

SEQ ID NO: 1747017 - RNA, 19 nt, Artificial Sequence
  Description of Artificial Sequence: Synthetic oligonucleotide
  Sense strand starting at position 3896 of SEQ ID NO: 1562438
agucacuaucaguauaauu

SEQ ID NO: 1747018 - RNA, 19 nt, Artificial Sequence
  Description of Artificial Sequence: Synthetic oligonucleotide
  Antisense strand to SEQ ID NO: 1747017
aauuauacugauagugacu

SEQ ID NO: 1747019 - RNA, 19 nt, Artificial Sequence
  Description of Artificial Sequence: Synthetic oligonucleotide
  Sense strand starting at position 363 of SEQ ID NO: 1562439
ugacuaccaccaugaguua

SEQ ID NO: 1747020 - RNA, 19 nt, Artificial Sequence
  Description of Artificial Sequence: Synthetic oligonucleotide
  Antisense strand to SEQ ID NO: 1747019
uaacucauggugguaguca

SEQ ID NO: 1747021 - RNA, 19 nt, Artificial Sequence
  Description of Artificial Sequence: Synthetic oligonucleotide
  Sense strand starting at position 731 of SEQ ID NO: 1562439
agcccauggaggugaaauu

SEQ ID NO: 1747022 - RNA, 19 nt, Artificial Sequence
  Description of Artificial Sequence: Synthetic oligonucleotide
  Antisense strand to SEQ ID NO: 1747021
aauuucaccuccaugggcu

SEQ ID NO: 1747023 - RNA, 19 nt, Artificial Sequence
  Description of Artificial Sequence: Synthetic oligonucleotide
  Sense strand starting at position 762 of SEQ ID NO: 1562439
gcucuauucgaacaauaga

SEQ ID NO: 1747024 - RNA, 19 nt, Artificial Sequence
  Description of Artificial Sequence: Synthetic oligonucleotide
  Antisense strand to SEQ ID NO: 1747023
ucuauuguucgaauagagc

SEQ ID NO: 1747025 - RNA, 19 nt, Artificial Sequence
  Description of Artificial Sequence: Synthetic oligonucleotide
  Sense strand starting at position 789 of SEQ ID NO: 1562439
ucuaguuaauuugagaaug

SEQ ID NO: 1747026 - RNA, 19 nt, Artificial Sequence
  Description of Artificial Sequence: Synthetic oligonucleotide
  Antisense strand to SEQ ID NO: 1747025
cauucucaaauuaacuaga

SEQ ID NO: 1747027 - RNA, 19 nt, Artificial Sequence
  Description of Artificial Sequence: Synthetic oligonucleotide
  Sense strand starting at position 887 of SEQ ID NO: 1562439
uugggcaaccucugauaga

SEQ ID NO: 1747028 - RNA, 19 nt, Artificial Sequence
  Description of Artificial Sequence: Synthetic oligonucleotide
  Antisense strand to SEQ ID NO: 1747027
ucuaucagagguugcccaa

SEQ ID NO: 1747029 - RNA, 19 nt, Artificial Sequence
  Description of Artificial Sequence: Synthetic oligonucleotide
  Sense strand starting at position 963 of SEQ ID NO: 1562439
uuaugaauuucugagacua

SEQ ID NO: 1747030 - RNA, 19 nt, Artificial Sequence
  Description of Artificial Sequence: Synthetic oligonucleotide
  Antisense strand to SEQ ID NO: 1747029
uagucucagaaauucauaa

SEQ ID NO: 1747031 - RNA, 19 nt, Artificial Sequence
  Description of Artificial Sequence: Synthetic oligonucleotide
  Sense strand starting at position 965 of SEQ ID NO: 1562439
augaauuucugagacuagu

SEQ ID NO: 1747032 - RNA, 19 nt, Artificial Sequence
  Description of Artificial Sequence: Synthetic oligonucleotide
  Antisense strand to SEQ ID NO: 1747031
acuagucucagaaauucau

SEQ ID NO: 1747033 - RNA, 19 nt, Artificial Sequence
  Description of Artificial Sequence: Synthetic oligonucleotide
  Sense strand starting at position 1052 of SEQ ID NO: 1562439
ugauguuuccuuuaaguau

SEQ ID NO: 1747034 - RNA, 19 nt, Artificial Sequence
  Description of Artificial Sequence: Synthetic oligonucleotide
  Antisense strand to SEQ ID NO: 1747033
auacuuaaaggaaacauca

SEQ ID NO: 1747035 - RNA, 19 nt, Artificial Sequence
  Description of Artificial Sequence: Synthetic oligonucleotide
  Sense strand starting at position 1071 of SEQ ID NO: 1562439
ucauguuauuuccuggcua

SEQ ID NO: 1747036 - RNA, 19 nt, Artificial Sequence
  Description of Artificial Sequence: Synthetic oligonucleotide
  Antisense strand to SEQ ID NO: 1747035
uagccaggaaauaacauga

SEQ ID NO: 1747037 - RNA, 19 nt, Artificial Sequence
  Description of Artificial Sequence: Synthetic oligonucleotide
  Sense strand starting at position 1073 of SEQ ID NO: 1562439
auguuauuuccuggcuaca

SEQ ID NO: 1747038 - RNA, 19 nt, Artificial Sequence
  Description of Artificial Sequence: Synthetic oligonucleotide
  Antisense strand to SEQ ID NO: 1747037
uguagccaggaaauaacau

SEQ ID NO: 1747039 - RNA, 19 nt, Artificial Sequence
  Description of Artificial Sequence: Synthetic oligonucleotide
  Sense strand starting at position 1198 of SEQ ID NO: 1562439
aaaucuugucuuuggagac

SEQ ID NO: 1747040 - RNA, 19 nt, Artificial Sequence
  Description of Artificial Sequence: Synthetic oligonucleotide
  Antisense strand to SEQ ID NO: 1747039
gucuccaaagacaagauuu

SEQ ID NO: 1747041 - RNA, 19 nt, Artificial Sequence
  Description of Artificial Sequence: Synthetic oligonucleotide
  Sense strand starting at position 1202 of SEQ ID NO: 1562439
cuugucuuuggagacagua

SEQ ID NO: 1747042 - RNA, 19 nt, Artificial Sequence
  Description of Artificial Sequence: Synthetic oligonucleotide
  Antisense strand to SEQ ID NO: 1747041
uacugucuccaaagacaag

SEQ ID NO: 1747043 - RNA, 19 nt, Artificial Sequence
  Description of Artificial Sequence: Synthetic oligonucleotide
  Sense strand starting at position 1472 of SEQ ID NO: 1562439
ggguucugagacugacacu

SEQ ID NO: 1747044 - RNA, 19 nt, Artificial Sequence
  Description of Artificial Sequence: Synthetic oligonucleotide
  Antisense strand to SEQ ID NO: 1747043
agugucagucucagaaccc

SEQ ID NO: 1747045 - RNA, 19 nt, Artificial Sequence
  Description of Artificial Sequence: Synthetic oligonucleotide
  Sense strand starting at position 1706 of SEQ ID NO: 1562439
gaguaaguaguuuggacaa

SEQ ID NO: 1747046 - RNA, 19 nt, Artificial Sequence
  Description of Artificial Sequence: Synthetic oligonucleotide
  Antisense strand to SEQ ID NO: 1747045
uuguccaaacuacuuacuc

SEQ ID NO: 1747047 - RNA, 19 nt, Artificial Sequence
  Description of Artificial Sequence: Synthetic oligonucleotide
  Sense strand starting at position 1810 of SEQ ID NO: 1562439
auugcagguuucuugaaag

SEQ ID NO: 1747048 - RNA, 19 nt, Artificial Sequence
  Description of Artificial Sequence: Synthetic oligonucleotide
  Antisense strand to SEQ ID NO: 1747047
cuuucaagaaaccugcaau

SEQ ID NO: 1747049 - RNA, 19 nt, Artificial Sequence
  Description of Artificial Sequence: Synthetic oligonucleotide
  Sense strand starting at position 1820 of SEQ ID NO: 1562439
ucuugaaaguuguccagga

SEQ ID NO: 1747050 - RNA, 19 nt, Artificial Sequence
  Description of Artificial Sequence: Synthetic oligonucleotide
  Antisense strand to SEQ ID NO: 1747049
uccuggacaacuuucaaga

SEQ ID NO: 1747051 - RNA, 19 nt, Artificial Sequence
  Description of Artificial Sequence: Synthetic oligonucleotide
  Sense strand starting at position 1821 of SEQ ID NO: 1562439
cuugaaaguuguccaggaa

SEQ ID NO: 1747052 - RNA, 19 nt, Artificial Sequence
  Description of Artificial Sequence: Synthetic oligonucleotide
  Antisense strand to SEQ ID NO: 1747051
uuccuggacaacuuucaag

SEQ ID NO: 1747053 - RNA, 19 nt, Artificial Sequence
  Description of Artificial Sequence: Synthetic oligonucleotide
  Sense strand starting at position 1824 of SEQ ID NO: 1562439
gaaaguuguccaggaaaca

SEQ ID NO: 1747054 - RNA, 19 nt, Artificial Sequence
  Description of Artificial Sequence: Synthetic oligonucleotide
  Antisense strand to SEQ ID NO: 1747053
uguuuccuggacaacuuuc

SEQ ID NO: 1747055 - RNA, 19 nt, Artificial Sequence
  Description of Artificial Sequence: Synthetic oligonucleotide
  Sense strand starting at position 1936 of SEQ ID NO: 1562439
guggaagcuccugagugaa

SEQ ID NO: 1747056 - RNA, 19 nt, Artificial Sequence
  Description of Artificial Sequence: Synthetic oligonucleotide
  Antisense strand to SEQ ID NO: 1747055
uucacucaggagcuuccac

SEQ ID NO: 1747057 - RNA, 19 nt, Artificial Sequence
  Description of Artificial Sequence: Synthetic oligonucleotide
  Sense strand starting at position 1938 of SEQ ID NO: 1562439
ggaagcuccugagugaaug

SEQ ID NO: 1747058 - RNA, 19 nt, Artificial Sequence
  Description of Artificial Sequence: Synthetic oligonucleotide
  Antisense strand to SEQ ID NO: 1747057
cauucacucaggagcuucc

SEQ ID NO: 1747059 - RNA, 19 nt, Artificial Sequence
  Description of Artificial Sequence: Synthetic oligonucleotide
  Sense strand starting at position 1985 of SEQ ID NO: 1562439
auccuuaaagauggucaua

SEQ ID NO: 1747060 - RNA, 19 nt, Artificial Sequence
  Description of Artificial Sequence: Synthetic oligonucleotide
  Antisense strand to SEQ ID NO: 1747059
uaugaccaucuuuaaggau

SEQ ID NO: 1747061 - RNA, 19 nt, Artificial Sequence
  Description of Artificial Sequence: Synthetic oligonucleotide
  Sense strand starting at position 1987 of SEQ ID NO: 1562439
ccuuaaagauggucauaag

SEQ ID NO: 1747062 - RNA, 19 nt, Artificial Sequence
  Description of Artificial Sequence: Synthetic oligonucleotide
  Antisense strand to SEQ ID NO: 1747061
cuuaugaccaucuuuaagg

SEQ ID NO: 1747063 - RNA, 19 nt, Artificial Sequence
  Description of Artificial Sequence: Synthetic oligonucleotide
  Sense strand starting at position 2009 of SEQ ID NO: 1562439
ucaacaugcugaguuugaa

SEQ ID NO: 1747064 - RNA, 19 nt, Artificial Sequence
  Description of Artificial Sequence: Synthetic oligonucleotide
  Antisense strand to SEQ ID NO: 1747063
uucaaacucagcauguuga

SEQ ID NO: 1747065 - RNA, 19 nt, Artificial Sequence
  Description of Artificial Sequence: Synthetic oligonucleotide
  Sense strand starting at position 2047 of SEQ ID NO: 1562439
gcgauuauauacucagaaa

SEQ ID NO: 1747066 - RNA, 19 nt, Artificial Sequence
  Description of Artificial Sequence: Synthetic oligonucleotide
  Antisense strand to SEQ ID NO: 1747065
uuucugaguauauaaucgc

SEQ ID NO: 1747067 - RNA, 19 nt, Artificial Sequence
  Description of Artificial Sequence: Synthetic oligonucleotide
  Sense strand starting at position 2135 of SEQ ID NO: 1562439
uuaccacuuugguuauaua

SEQ ID NO: 1747068 - RNA, 19 nt, Artificial Sequence
  Description of Artificial Sequence: Synthetic oligonucleotide
  Antisense strand to SEQ ID NO: 1747067
uauauaaccaaagugguaa

SEQ ID NO: 1747069 - RNA, 19 nt, Artificial Sequence
  Description of Artificial Sequence: Synthetic oligonucleotide
  Sense strand starting at position 2144 of SEQ ID NO: 1562439
ugguuauauaugcagauga

SEQ ID NO: 1747070 - RNA, 19 nt, Artificial Sequence
  Description of Artificial Sequence: Synthetic oligonucleotide
  Antisense strand to SEQ ID NO: 1747069
ucaucugcauauauaacca

SEQ ID NO: 1747071 - RNA, 19 nt, Artificial Sequence
  Description of Artificial Sequence: Synthetic oligonucleotide
  Sense strand starting at position 2146 of SEQ ID NO: 1562439
guuauauaugcagaugaug

SEQ ID NO: 1747072 - RNA, 19 nt, Artificial Sequence
  Description of Artificial Sequence: Synthetic oligonucleotide
  Antisense strand to SEQ ID NO: 1747071
caucaucugcauauauaac

SEQ ID NO: 1747073 - RNA, 19 nt, Artificial Sequence
  Description of Artificial Sequence: Synthetic oligonucleotide
  Sense strand starting at position 2212 of SEQ ID NO: 1562439
uuauguuagcuccaaagau

SEQ ID NO: 1747074 - RNA, 19 nt, Artificial Sequence
  Description of Artificial Sequence: Synthetic oligonucleotide
  Antisense strand to SEQ ID NO: 1747073
aucuuuggagcuaacauaa

SEQ ID NO: 1747075 - RNA, 19 nt, Artificial Sequence
  Description of Artificial Sequence: Synthetic oligonucleotide
  Sense strand starting at position 2338 of SEQ ID NO: 1562439
augagaaaugcaugaggca

SEQ ID NO: 1747076 - RNA, 19 nt, Artificial Sequence
  Description of Artificial Sequence: Synthetic oligonucleotide
  Antisense strand to SEQ ID NO: 1747075
ugccucaugcauuucucau

SEQ ID NO: 1747077 - RNA, 19 nt, Artificial Sequence
  Description of Artificial Sequence: Synthetic oligonucleotide
  Sense strand starting at position 2493 of SEQ ID NO: 1562439
uauuguucucuccagugga

SEQ ID NO: 1747078 - RNA, 19 nt, Artificial Sequence
  Description of Artificial Sequence: Synthetic oligonucleotide
  Antisense strand to SEQ ID NO: 1747077
uccacuggagagaacaaua

SEQ ID NO: 1747079 - RNA, 19 nt, Artificial Sequence
  Description of Artificial Sequence: Synthetic oligonucleotide
  Sense strand starting at position 2519 of SEQ ID NO: 1562439
gugagaggacuuugugauc

SEQ ID NO: 1747080 - RNA, 19 nt, Artificial Sequence
  Description of Artificial Sequence: Synthetic oligonucleotide
  Antisense strand to SEQ ID NO: 1747079
gaucacaaaguccucucac

SEQ ID NO: 1747081 - RNA, 19 nt, Artificial Sequence
  Description of Artificial Sequence: Synthetic oligonucleotide
  Sense strand starting at position 2573 of SEQ ID NO: 1562439
guggccauugcccaauaaa

SEQ ID NO: 1747082 - RNA, 19 nt, Artificial Sequence
  Description of Artificial Sequence: Synthetic oligonucleotide
  Antisense strand to SEQ ID NO: 1747081
uuuauugggcaauggccac

SEQ ID NO: 1747083 - RNA, 19 nt, Artificial Sequence
  Description of Artificial Sequence: Synthetic oligonucleotide
  Sense strand starting at position 2777 of SEQ ID NO: 1562439
cuucucaaagguugauuau

SEQ ID NO: 1747084 - RNA, 19 nt, Artificial Sequence
  Description of Artificial Sequence: Synthetic oligonucleotide
  Antisense strand to SEQ ID NO: 1747083
auaaucaaccuuugagaag

SEQ ID NO: 1747085 - RNA, 19 nt, Artificial Sequence
  Description of Artificial Sequence: Synthetic oligonucleotide
  Sense strand starting at position 2778 of SEQ ID NO: 1562439
uucucaaagguugauuauu

SEQ ID NO: 1747086 - RNA, 19 nt, Artificial Sequence
  Description of Artificial Sequence: Synthetic oligonucleotide
  Antisense strand to SEQ ID NO: 1747085
aauaaucaaccuuugagaa

SEQ ID NO: 1747087 - RNA, 19 nt, Artificial Sequence
  Description of Artificial Sequence: Synthetic oligonucleotide
  Sense strand starting at position 2863 of SEQ ID NO: 1562439
gacagaugaucaguuccua

SEQ ID NO: 1747088 - RNA, 19 nt, Artificial Sequence
  Description of Artificial Sequence: Synthetic oligonucleotide
  Antisense strand to SEQ ID NO: 1747087
uaggaacugaucaucuguc

SEQ ID NO: 1747089 - RNA, 19 nt, Artificial Sequence
  Description of Artificial Sequence: Synthetic oligonucleotide
  Sense strand starting at position 2999 of SEQ ID NO: 1562439
auagaaguauagucuuagu

SEQ ID NO: 1747090 - RNA, 19 nt, Artificial Sequence
  Description of Artificial Sequence: Synthetic oligonucleotide
  Antisense strand to SEQ ID NO: 1747089
acuaagacuauacuucuau

SEQ ID NO: 1747091 - RNA, 19 nt, Artificial Sequence
  Description of Artificial Sequence: Synthetic oligonucleotide
  Sense strand starting at position 3034 of SEQ ID NO: 1562439
cuuucuaaggucugaagaa

SEQ ID NO: 1747092 - RNA, 19 nt, Artificial Sequence
  Description of Artificial Sequence: Synthetic oligonucleotide
  Antisense strand to SEQ ID NO: 1747091
uucuucagaccuuagaaag

SEQ ID NO: 1747093 - RNA, 19 nt, Artificial Sequence
  Description of Artificial Sequence: Synthetic oligonucleotide
  Sense strand starting at position 3089 of SEQ ID NO: 1562439
gcaaacacuuccuugaaag

SEQ ID NO: 1747094 - RNA, 19 nt, Artificial Sequence
  Description of Artificial Sequence: Synthetic oligonucleotide
  Antisense strand to SEQ ID NO: 1747093
cuuucaaggaaguguuugc

SEQ ID NO: 1747095 - RNA, 19 nt, Artificial Sequence
  Description of Artificial Sequence: Synthetic oligonucleotide
  Sense strand starting at position 3229 of SEQ ID NO: 1562439
acacuuguauguuuaaaga

SEQ ID NO: 1747096 - RNA, 19 nt, Artificial Sequence
  Description of Artificial Sequence: Synthetic oligonucleotide
  Antisense strand to SEQ ID NO: 1747095
ucuuuaaacauacaagugu

SEQ ID NO: 1747097 - RNA, 19 nt, Artificial Sequence
  Description of Artificial Sequence: Synthetic oligonucleotide
  Sense strand starting at position 3361 of SEQ ID NO: 1562439
ugacuuucuugcuuaaaga

SEQ ID NO: 1747098 - RNA, 19 nt, Artificial Sequence
  Description of Artificial Sequence: Synthetic oligonucleotide
  Antisense strand to SEQ ID NO: 1747097
ucuuuaagcaagaaaguca

SEQ ID NO: 1747099 - RNA, 19 nt, Artificial Sequence
  Description of Artificial Sequence: Synthetic oligonucleotide
  Sense strand starting at position 24 of SEQ ID NO: 1562440
uuguacaaauugucaaaga

SEQ ID NO: 1747100 - RNA, 19 nt, Artificial Sequence
  Description of Artificial Sequence: Synthetic oligonucleotide
  Antisense strand to SEQ ID NO: 1747099
ucuuugacaauuuguacaa

SEQ ID NO: 1747101 - RNA, 19 nt, Artificial Sequence
  Description of Artificial Sequence: Synthetic oligonucleotide
  Sense strand starting at position 124 of SEQ ID NO: 1562440
caagaugcccagugaauac

SEQ ID NO: 1747102 - RNA, 19 nt, Artificial Sequence
  Description of Artificial Sequence: Synthetic oligonucleotide
  Antisense strand to SEQ ID NO: 1747101
guauucacugggcaucuug

SEQ ID NO: 1747103 - RNA, 19 nt, Artificial Sequence
  Description of Artificial Sequence: Synthetic oligonucleotide
  Sense strand starting at position 835 of SEQ ID NO: 1562440
aaggcaugaccuuggaaau

SEQ ID NO: 1747104 - RNA, 19 nt, Artificial Sequence
  Description of Artificial Sequence: Synthetic oligonucleotide
  Antisense strand to SEQ ID NO: 1747103
auuuccaaggucaugccuu

SEQ ID NO: 1747105 - RNA, 19 nt, Artificial Sequence
  Description of Artificial Sequence: Synthetic oligonucleotide
  Sense strand starting at position 836 of SEQ ID NO: 1562440
aggcaugaccuuggaaaug

SEQ ID NO: 1747106 - RNA, 19 nt, Artificial Sequence
  Description of Artificial Sequence: Synthetic oligonucleotide
  Antisense strand to SEQ ID NO: 1747105
cauuuccaaggucaugccu

SEQ ID NO: 1747107 - RNA, 19 nt, Artificial Sequence
  Description of Artificial Sequence: Synthetic oligonucleotide
  Sense strand starting at position 865 of SEQ ID NO: 1562440
cagauaagcccuggguaca

SEQ ID NO: 1747108 - RNA, 19 nt, Artificial Sequence
  Description of Artificial Sequence: Synthetic oligonucleotide
  Antisense strand to SEQ ID NO: 1747107
uguacccagggcuuaucug

SEQ ID NO: 1747109 - RNA, 19 nt, Artificial Sequence
  Description of Artificial Sequence: Synthetic oligonucleotide
  Sense strand starting at position 866 of SEQ ID NO: 1562440
agauaagcccuggguacaa

SEQ ID NO: 1747110 - RNA, 19 nt, Artificial Sequence
  Description of Artificial Sequence: Synthetic oligonucleotide
  Antisense strand to SEQ ID NO: 1747109
uuguacccagggcuuaucu

SEQ ID NO: 1747111 - RNA, 19 nt, Artificial Sequence
  Description of Artificial Sequence: Synthetic oligonucleotide
  Sense strand starting at position 937 of SEQ ID NO: 1562440
cgguuuauaccugaaauag

SEQ ID NO: 1747112 - RNA, 19 nt, Artificial Sequence
  Description of Artificial Sequence: Synthetic oligonucleotide
  Antisense strand to SEQ ID NO: 1747111
cuauuucagguauaaaccg

SEQ ID NO: 1747113 - RNA, 19 nt, Artificial Sequence
  Description of Artificial Sequence: Synthetic oligonucleotide
  Sense strand starting at position 1008 of SEQ ID NO: 1562440
cuauuacuagcuuagagua

SEQ ID NO: 1747114 - RNA, 19 nt, Artificial Sequence
  Description of Artificial Sequence: Synthetic oligonucleotide
  Antisense strand to SEQ ID NO: 1747113
uacucuaagcuaguaauag

SEQ ID NO: 1747115 - RNA, 19 nt, Artificial Sequence
  Description of Artificial Sequence: Synthetic oligonucleotide
  Sense strand starting at position 1013 of SEQ ID NO: 1562440
acuagcuuagaguauacua

SEQ ID NO: 1747116 - RNA, 19 nt, Artificial Sequence
  Description of Artificial Sequence: Synthetic oligonucleotide
  Antisense strand to SEQ ID NO: 1747115
uaguauacucuaagcuagu

SEQ ID NO: 1747117 - RNA, 19 nt, Artificial Sequence
  Description of Artificial Sequence: Synthetic oligonucleotide
  Sense strand starting at position 1015 of SEQ ID NO: 1562440
uagcuuagaguauacuaga

SEQ ID NO: 1747118 - RNA, 19 nt, Artificial Sequence
  Description of Artificial Sequence: Synthetic oligonucleotide
  Antisense strand to SEQ ID NO: 1747117
ucuaguauacucuaagcua

SEQ ID NO: 1747119 - RNA, 19 nt, Artificial Sequence
  Description of Artificial Sequence: Synthetic oligonucleotide
  Sense strand starting at position 1327 of SEQ ID NO: 1562440
acaauugagcuuugaauug

SEQ ID NO: 1747120 - RNA, 19 nt, Artificial Sequence
  Description of Artificial Sequence: Synthetic oligonucleotide
  Antisense strand to SEQ ID NO: 1747119
caauucaaagcucaauugu

SEQ ID NO: 1747121 - RNA, 19 nt, Artificial Sequence
  Description of Artificial Sequence: Synthetic oligonucleotide
  Sense strand starting at position 1334 of SEQ ID NO: 1562440
agcuuugaauuggcaaaga

SEQ ID NO: 1747122 - RNA, 19 nt, Artificial Sequence
  Description of Artificial Sequence: Synthetic oligonucleotide
  Antisense strand to SEQ ID NO: 1747121
ucuuugccaauucaaagcu

SEQ ID NO: 1747123 - RNA, 19 nt, Artificial Sequence
  Description of Artificial Sequence: Synthetic oligonucleotide
  Sense strand starting at position 1476 of SEQ ID NO: 1562440
guuucucuucuggauuaaa

SEQ ID NO: 1747124 - RNA, 19 nt, Artificial Sequence
  Description of Artificial Sequence: Synthetic oligonucleotide
  Antisense strand to SEQ ID NO: 1747123
uuuaauccagaagagaaac

SEQ ID NO: 1747125 - RNA, 19 nt, Artificial Sequence
  Description of Artificial Sequence: Synthetic oligonucleotide
  Sense strand starting at position 1555 of SEQ ID NO: 1562440
gugacaccaucauucugau

SEQ ID NO: 1747126 - RNA, 19 nt, Artificial Sequence
  Description of Artificial Sequence: Synthetic oligonucleotide
  Antisense strand to SEQ ID NO: 1747125
aucagaaugauggugucac

SEQ ID NO: 1747127 - RNA, 19 nt, Artificial Sequence
  Description of Artificial Sequence: Synthetic oligonucleotide
  Sense strand starting at position 1670 of SEQ ID NO: 1562440
uuagacuuccauugcagga

SEQ ID NO: 1747128 - RNA, 19 nt, Artificial Sequence
  Description of Artificial Sequence: Synthetic oligonucleotide
  Antisense strand to SEQ ID NO: 1747127
uccugcaauggaagucuaa

SEQ ID NO: 1747129 - RNA, 19 nt, Artificial Sequence
  Description of Artificial Sequence: Synthetic oligonucleotide
  Sense strand starting at position 1675 of SEQ ID NO: 1562440
cuuccauugcaggauauca

SEQ ID NO: 1747130 - RNA, 19 nt, Artificial Sequence
  Description of Artificial Sequence: Synthetic oligonucleotide
  Antisense strand to SEQ ID NO: 1747129
ugauauccugcaauggaag

SEQ ID NO: 1747131 - RNA, 19 nt, Artificial Sequence
  Description of Artificial Sequence: Synthetic oligonucleotide
  Sense strand starting at position 1735 of SEQ ID NO: 1562440
agugaaucucaguaucaca

SEQ ID NO: 1747132 - RNA, 19 nt, Artificial Sequence
  Description of Artificial Sequence: Synthetic oligonucleotide
  Antisense strand to SEQ ID NO: 1747131
ugugauacugagauucacu

SEQ ID NO: 1747133 - RNA, 19 nt, Artificial Sequence
  Description of Artificial Sequence: Synthetic oligonucleotide
  Sense strand starting at position 1777 of SEQ ID NO: 1562440
uggcauccucaauaauagu

SEQ ID NO: 1747134 - RNA, 19 nt, Artificial Sequence
  Description of Artificial Sequence: Synthetic oligonucleotide
  Antisense strand to SEQ ID NO: 1747133
acuauuauugaggaugcca

SEQ ID NO: 1747135 - RNA, 19 nt, Artificial Sequence
  Description of Artificial Sequence: Synthetic oligonucleotide
  Sense strand starting at position 1967 of SEQ ID NO: 1562440
ugccauaguaguuuccgua

SEQ ID NO: 1747136 - RNA, 19 nt, Artificial Sequence
  Description of Artificial Sequence: Synthetic oligonucleotide
  Antisense strand to SEQ ID NO: 1747135
uacggaaacuacuauggca

SEQ ID NO: 1747137 - RNA, 19 nt, Artificial Sequence
  Description of Artificial Sequence: Synthetic oligonucleotide
  Sense strand starting at position 2031 of SEQ ID NO: 1562440
ggaggaaguguaggugacu

SEQ ID NO: 1747138 - RNA, 19 nt, Artificial Sequence
  Description of Artificial Sequence: Synthetic oligonucleotide
  Antisense strand to SEQ ID NO: 1747137
agucaccuacacuuccucc

SEQ ID NO: 1747139 - RNA, 19 nt, Artificial Sequence
  Description of Artificial Sequence: Synthetic oligonucleotide
  Sense strand starting at position 2032 of SEQ ID NO: 1562440
gaggaaguguaggugacuu

SEQ ID NO: 1747140 - RNA, 19 nt, Artificial Sequence
  Description of Artificial Sequence: Synthetic oligonucleotide
  Antisense strand to SEQ ID NO: 1747139
aagucaccuacacuuccuc

SEQ ID NO: 1747141 - RNA, 19 nt, Artificial Sequence
  Description of Artificial Sequence: Synthetic oligonucleotide
  Sense strand starting at position 2137 of SEQ ID NO: 1562440
gaaggaccagcaugaguaa

SEQ ID NO: 1747142 - RNA, 19 nt, Artificial Sequence
  Description of Artificial Sequence: Synthetic oligonucleotide
  Antisense strand to SEQ ID NO: 1747141
uuacucaugcugguccuuc

SEQ ID NO: 1747143 - RNA, 19 nt, Artificial Sequence
  Description of Artificial Sequence: Synthetic oligonucleotide
  Sense strand starting at position 2676 of SEQ ID NO: 1562440
ucaaauucguaaucaauga

SEQ ID NO: 1747144 - RNA, 19 nt, Artificial Sequence
  Description of Artificial Sequence: Synthetic oligonucleotide
  Antisense strand to SEQ ID NO: 1747143
ucauugauuacgaauuuga

SEQ ID NO: 1747145 - RNA, 19 nt, Artificial Sequence
  Description of Artificial Sequence: Synthetic oligonucleotide
  Sense strand starting at position 2758 of SEQ ID NO: 1562440
uuauauuuguguucuggcu

SEQ ID NO: 1747146 - RNA, 19 nt, Artificial Sequence
  Description of Artificial Sequence: Synthetic oligonucleotide
  Antisense strand to SEQ ID NO: 1747145
agccagaacacaaauauaa

SEQ ID NO: 1747147 - RNA, 19 nt, Artificial Sequence
  Description of Artificial Sequence: Synthetic oligonucleotide
  Sense strand starting at position 2865 of SEQ ID NO: 1562440
acaagaagucuuuggcaaa

SEQ ID NO: 1747148 - RNA, 19 nt, Artificial Sequence
  Description of Artificial Sequence: Synthetic oligonucleotide
  Antisense strand to SEQ ID NO: 1747147
uuugccaaagacuucuugu

SEQ ID NO: 1747149 - RNA, 19 nt, Artificial Sequence
  Description of Artificial Sequence: Synthetic oligonucleotide
  Sense strand starting at position 2953 of SEQ ID NO: 1562440
uugaaugauuaagucaagu

SEQ ID NO: 1747150 - RNA, 19 nt, Artificial Sequence
  Description of Artificial Sequence: Synthetic oligonucleotide
  Antisense strand to SEQ ID NO: 1747149
acuugacuuaaucauucaa

SEQ ID NO: 1747151 - RNA, 19 nt, Artificial Sequence
  Description of Artificial Sequence: Synthetic oligonucleotide
  Sense strand starting at position 2980 of SEQ ID NO: 1562440
ggacuuauauucuuaguaa

SEQ ID NO: 1747152 - RNA, 19 nt, Artificial Sequence
  Description of Artificial Sequence: Synthetic oligonucleotide
  Antisense strand to SEQ ID NO: 1747151
uuacuaagaauauaagucc

SEQ ID NO: 1747153 - RNA, 19 nt, Artificial Sequence
  Description of Artificial Sequence: Synthetic oligonucleotide
  Sense strand starting at position 3003 of SEQ ID NO: 1562440
acuuuauaagagugaguug

SEQ ID NO: 1747154 - RNA, 19 nt, Artificial Sequence
  Description of Artificial Sequence: Synthetic oligonucleotide
  Antisense strand to SEQ ID NO: 1747153
caacucacucuuauaaagu

SEQ ID NO: 1747155 - RNA, 19 nt, Artificial Sequence
  Description of Artificial Sequence: Synthetic oligonucleotide
  Sense strand starting at position 3006 of SEQ ID NO: 1562440
uuauaagagugaguugaau

SEQ ID NO: 1747156 - RNA, 19 nt, Artificial Sequence
  Description of Artificial Sequence: Synthetic oligonucleotide
  Antisense strand to SEQ ID NO: 1747155
auucaacucacucuuauaa

SEQ ID NO: 1747157 - RNA, 19 nt, Artificial Sequence
  Description of Artificial Sequence: Synthetic oligonucleotide
  Sense strand starting at position 3008 of SEQ ID NO: 1562440
auaagagugaguugaauau

SEQ ID NO: 1747158 - RNA, 19 nt, Artificial Sequence
  Description of Artificial Sequence: Synthetic oligonucleotide
  Antisense strand to SEQ ID NO: 1747157
auauucaacucacucuuau

SEQ ID NO: 1747159 - RNA, 19 nt, Artificial Sequence
  Description of Artificial Sequence: Synthetic oligonucleotide
  Sense strand starting at position 3012 of SEQ ID NO: 1562440
gagugaguugaauauagua

SEQ ID NO: 1747160 - RNA, 19 nt, Artificial Sequence
  Description of Artificial Sequence: Synthetic oligonucleotide
  Antisense strand to SEQ ID NO: 1747159
uacuauauucaacucacuc

SEQ ID NO: 1747161 - RNA, 19 nt, Artificial Sequence
  Description of Artificial Sequence: Synthetic oligonucleotide
  Sense strand starting at position 3134 of SEQ ID NO: 1562440
ugcaaaugggauuguaaua

SEQ ID NO: 1747162 - RNA, 19 nt, Artificial Sequence
  Description of Artificial Sequence: Synthetic oligonucleotide
  Antisense strand to SEQ ID NO: 1747161
uauuacaaucccauuugca

SEQ ID NO: 1747163 - RNA, 19 nt, Artificial Sequence
  Description of Artificial Sequence: Synthetic oligonucleotide
  Sense strand starting at position 3311 of SEQ ID NO: 1562440
ucaguagagaguugaucaa

SEQ ID NO: 1747164 - RNA, 19 nt, Artificial Sequence
  Description of Artificial Sequence: Synthetic oligonucleotide
  Antisense strand to SEQ ID NO: 1747163
uugaucaacucucuacuga

SEQ ID NO: 1747165 - RNA, 19 nt, Artificial Sequence
  Description of Artificial Sequence: Synthetic oligonucleotide
  Sense strand starting at position 3337 of SEQ ID NO: 1562440
agagaacucaggcaugcuu

SEQ ID NO: 1747166 - RNA, 19 nt, Artificial Sequence
  Description of Artificial Sequence: Synthetic oligonucleotide
  Antisense strand to SEQ ID NO: 1747165
aagcaugccugaguucucu

SEQ ID NO: 1747167 - RNA, 19 nt, Artificial Sequence
  Description of Artificial Sequence: Synthetic oligonucleotide
  Sense strand starting at position 3401 of SEQ ID NO: 1562440
gaaacucugcauugaggau

SEQ ID NO: 1747168 - RNA, 19 nt, Artificial Sequence
  Description of Artificial Sequence: Synthetic oligonucleotide
  Antisense strand to SEQ ID NO: 1747167
auccucaaugcagaguuuc

SEQ ID NO: 1747169 - RNA, 19 nt, Artificial Sequence
  Description of Artificial Sequence: Synthetic oligonucleotide
  Sense strand starting at position 3515 of SEQ ID NO: 1562440
auacaaugauugguucuca

SEQ ID NO: 1747170 - RNA, 19 nt, Artificial Sequence
  Description of Artificial Sequence: Synthetic oligonucleotide
  Antisense strand to SEQ ID NO: 1747169
ugagaaccaaucauuguau

SEQ ID NO: 1747171 - RNA, 19 nt, Artificial Sequence
  Description of Artificial Sequence: Synthetic oligonucleotide
  Sense strand starting at position 3537 of SEQ ID NO: 1562440
agguggaucugaguggaga

SEQ ID NO: 1747172 - RNA, 19 nt, Artificial Sequence
  Description of Artificial Sequence: Synthetic oligonucleotide
  Antisense strand to SEQ ID NO: 1747171
ucuccacucagauccaccu

SEQ ID NO: 1747173 - RNA, 19 nt, Artificial Sequence
  Description of Artificial Sequence: Synthetic oligonucleotide
  Sense strand starting at position 3844 of SEQ ID NO: 1562440
uguugaguuuaccugaaag

SEQ ID NO: 1747174 - RNA, 19 nt, Artificial Sequence
  Description of Artificial Sequence: Synthetic oligonucleotide
  Antisense strand to SEQ ID NO: 1747173
cuuucagguaaacucaaca

SEQ ID NO: 1747175 - RNA, 19 nt, Artificial Sequence
  Description of Artificial Sequence: Synthetic oligonucleotide
  Sense strand starting at position 3908 of SEQ ID NO: 1562440
gauagaauuugguauaaca

SEQ ID NO: 1747176 - RNA, 19 nt, Artificial Sequence
  Description of Artificial Sequence: Synthetic oligonucleotide
  Antisense strand to SEQ ID NO: 1747175
uguuauaccaaauucuauc

SEQ ID NO: 1747177 - RNA, 19 nt, Artificial Sequence
  Description of Artificial Sequence: Synthetic oligonucleotide
  Sense strand starting at position 3941 of SEQ ID NO: 1562440
auuuguacguuuguaaagu

SEQ ID NO: 1747178 - RNA, 19 nt, Artificial Sequence
  Description of Artificial Sequence: Synthetic oligonucleotide
  Antisense strand to SEQ ID NO: 1747177
acuuuacaaacguacaaau

SEQ ID NO: 1747179 - RNA, 19 nt, Artificial Sequence
  Description of Artificial Sequence: Synthetic oligonucleotide
  Sense strand starting at position 62 of SEQ ID NO: 1562441
uuccuagaauuuggagaaa

SEQ ID NO: 1747180 - RNA, 19 nt, Artificial Sequence
  Description of Artificial Sequence: Synthetic oligonucleotide
  Antisense strand to SEQ ID NO: 1747179
uuucuccaaauucuaggaa

SEQ ID NO: 1747181 - RNA, 19 nt, Artificial Sequence
  Description of Artificial Sequence: Synthetic oligonucleotide
  Sense strand starting at position 160 of SEQ ID NO: 1562441
uaaauagaguggucaguau

SEQ ID NO: 1747182 - RNA, 19 nt, Artificial Sequence
  Description of Artificial Sequence: Synthetic oligonucleotide
  Antisense strand to SEQ ID NO: 1747181
auacugaccacucuauuua

SEQ ID NO: 1747183 - RNA, 19 nt, Artificial Sequence
  Description of Artificial Sequence: Synthetic oligonucleotide
  Sense strand starting at position 164 of SEQ ID NO: 1562441
uagaguggucaguauaaau

SEQ ID NO: 1747184 - RNA, 19 nt, Artificial Sequence
  Description of Artificial Sequence: Synthetic oligonucleotide
  Antisense strand to SEQ ID NO: 1747183
auuuauacugaccacucua

SEQ ID NO: 1747185 - RNA, 19 nt, Artificial Sequence
  Description of Artificial Sequence: Synthetic oligonucleotide
  Sense strand starting at position 299 of SEQ ID NO: 1562441
aagccuaucccgggagaua

SEQ ID NO: 1747186 - RNA, 19 nt, Artificial Sequence
  Description of Artificial Sequence: Synthetic oligonucleotide
  Antisense strand to SEQ ID NO: 1747185
uaucucccgggauaggcuu

SEQ ID NO: 1747187 - RNA, 19 nt, Artificial Sequence
  Description of Artificial Sequence: Synthetic oligonucleotide
  Sense strand starting at position 300 of SEQ ID NO: 1562441
agccuaucccgggagauaa

SEQ ID NO: 1747188 - RNA, 19 nt, Artificial Sequence
  Description of Artificial Sequence: Synthetic oligonucleotide
  Antisense strand to SEQ ID NO: 1747187
uuaucucccgggauaggcu

SEQ ID NO: 1747189 - RNA, 19 nt, Artificial Sequence
  Description of Artificial Sequence: Synthetic oligonucleotide
  Sense strand starting at position 346 of SEQ ID NO: 1562441
ugcaauuaucuagagucaa

SEQ ID NO: 1747190 - RNA, 19 nt, Artificial Sequence
  Description of Artificial Sequence: Synthetic oligonucleotide
  Antisense strand to SEQ ID NO: 1747189
uugacucuagauaauugca

SEQ ID NO: 1747191 - RNA, 19 nt, Artificial Sequence
  Description of Artificial Sequence: Synthetic oligonucleotide
  Sense strand starting at position 410 of SEQ ID NO: 1562441
guggguaugaaauaucucu

SEQ ID NO: 1747192 - RNA, 19 nt, Artificial Sequence
  Description of Artificial Sequence: Synthetic oligonucleotide
  Antisense strand to SEQ ID NO: 1747191
agagauauuucauacccac

SEQ ID NO: 1747193 - RNA, 19 nt, Artificial Sequence
  Description of Artificial Sequence: Synthetic oligonucleotide
  Sense strand starting at position 445 of SEQ ID NO: 1562441
augagaaaguuacuccauu

SEQ ID NO: 1747194 - RNA, 19 nt, Artificial Sequence
  Description of Artificial Sequence: Synthetic oligonucleotide
  Antisense strand to SEQ ID NO: 1747193
aauggaguaacuuucucau

SEQ ID NO: 1747195 - RNA, 19 nt, Artificial Sequence
  Description of Artificial Sequence: Synthetic oligonucleotide
  Sense strand starting at position 446 of SEQ ID NO: 1562441
ugagaaaguuacuccauuc

SEQ ID NO: 1747196 - RNA, 19 nt, Artificial Sequence
  Description of Artificial Sequence: Synthetic oligonucleotide
  Antisense strand to SEQ ID NO: 1747195
gaauggaguaacuuucuca

SEQ ID NO: 1747197 - RNA, 19 nt, Artificial Sequence
  Description of Artificial Sequence: Synthetic oligonucleotide
  Sense strand starting at position 627 of SEQ ID NO: 1562441
cgccauucuccuguagcua

SEQ ID NO: 1747198 - RNA, 19 nt, Artificial Sequence
  Description of Artificial Sequence: Synthetic oligonucleotide
  Antisense strand to SEQ ID NO: 1747197
uagcuacaggagaauggcg

SEQ ID NO: 1747199 - RNA, 19 nt, Artificial Sequence
  Description of Artificial Sequence: Synthetic oligonucleotide
  Sense strand starting at position 1140 of SEQ ID NO: 1562441
ugagaugauguacguuaaa

SEQ ID NO: 1747200 - RNA, 19 nt, Artificial Sequence
  Description of Artificial Sequence: Synthetic oligonucleotide
  Antisense strand to SEQ ID NO: 1747199
uuuaacguacaucaucuca

SEQ ID NO: 1747201 - RNA, 19 nt, Artificial Sequence
  Description of Artificial Sequence: Synthetic oligonucleotide
  Sense strand starting at position 1181 of SEQ ID NO: 1562441
augcuaaacggcuaauaaa

SEQ ID NO: 1747202 - RNA, 19 nt, Artificial Sequence
  Description of Artificial Sequence: Synthetic oligonucleotide
  Antisense strand to SEQ ID NO: 1747201
uuuauuagccguuuagcau

SEQ ID NO: 1747203 - RNA, 19 nt, Artificial Sequence
  Description of Artificial Sequence: Synthetic oligonucleotide
  Sense strand starting at position 1242 of SEQ ID NO: 1562441
agaguugugauaugaacua

SEQ ID NO: 1747204 - RNA, 19 nt, Artificial Sequence
  Description of Artificial Sequence: Synthetic oligonucleotide
  Antisense strand to SEQ ID NO: 1747203
uaguucauaucacaacucu

SEQ ID NO: 1747205 - RNA, 19 nt, Artificial Sequence
  Description of Artificial Sequence: Synthetic oligonucleotide
  Sense strand starting at position 1262 of SEQ ID NO: 1562441
auagaacaaguuugacagu

SEQ ID NO: 1747206 - RNA, 19 nt, Artificial Sequence
  Description of Artificial Sequence: Synthetic oligonucleotide
  Antisense strand to SEQ ID NO: 1747205
acugucaaacuuguucuau

SEQ ID NO: 1747207 - RNA, 19 nt, Artificial Sequence
  Description of Artificial Sequence: Synthetic oligonucleotide
  Sense strand starting at position 1377 of SEQ ID NO: 1562441
auggguuacguugagacau

SEQ ID NO: 1747208 - RNA, 19 nt, Artificial Sequence
  Description of Artificial Sequence: Synthetic oligonucleotide
  Antisense strand to SEQ ID NO: 1747207
augucucaacguaacccau

SEQ ID NO: 1747209 - RNA, 19 nt, Artificial Sequence
  Description of Artificial Sequence: Synthetic oligonucleotide
  Sense strand starting at position 1390 of SEQ ID NO: 1562441
agacauuguuagguuaaca

SEQ ID NO: 1747210 - RNA, 19 nt, Artificial Sequence
  Description of Artificial Sequence: Synthetic oligonucleotide
  Antisense strand to SEQ ID NO: 1747209
uguuaaccuaacaaugucu

SEQ ID NO: 1747211 - RNA, 19 nt, Artificial Sequence
  Description of Artificial Sequence: Synthetic oligonucleotide
  Sense strand starting at position 1462 of SEQ ID NO: 1562441
ucaggaugguaauuccaga

SEQ ID NO: 1747212 - RNA, 19 nt, Artificial Sequence
  Description of Artificial Sequence: Synthetic oligonucleotide
  Antisense strand to SEQ ID NO: 1747211
ucuggaauuaccauccuga

SEQ ID NO: 1747213 - RNA, 19 nt, Artificial Sequence
  Description of Artificial Sequence: Synthetic oligonucleotide
  Sense strand starting at position 1753 of SEQ ID NO: 1562441
gguucagaauuggugaauc

SEQ ID NO: 1747214 - RNA, 19 nt, Artificial Sequence
  Description of Artificial Sequence: Synthetic oligonucleotide
  Antisense strand to SEQ ID NO: 1747213
gauucaccaauucugaacc

SEQ ID NO: 1747215 - RNA, 19 nt, Artificial Sequence
  Description of Artificial Sequence: Synthetic oligonucleotide
  Sense strand starting at position 1771 of SEQ ID NO: 1562441
cccgaugucacaggauaga

SEQ ID NO: 1747216 - RNA, 19 nt, Artificial Sequence
  Description of Artificial Sequence: Synthetic oligonucleotide
  Antisense strand to SEQ ID NO: 1747215
ucuauccugugacaucggg

SEQ ID NO: 1747217 - RNA, 19 nt, Artificial Sequence
  Description of Artificial Sequence: Synthetic oligonucleotide
  Sense strand starting at position 2032 of SEQ ID NO: 1562441
gaaggaguguaggugacuu

SEQ ID NO: 1747218 - RNA, 19 nt, Artificial Sequence
  Description of Artificial Sequence: Synthetic oligonucleotide
  Antisense strand to SEQ ID NO: 1747217
aagucaccuacacuccuuc

SEQ ID NO: 1747219 - RNA, 19 nt, Artificial Sequence
  Description of Artificial Sequence: Synthetic oligonucleotide
  Sense strand starting at position 2042 of SEQ ID NO: 1562441
aggugacuucaguauggau

SEQ ID NO: 1747220 - RNA, 19 nt, Artificial Sequence
  Description of Artificial Sequence: Synthetic oligonucleotide
  Antisense strand to SEQ ID NO: 1747219
auccauacugaagucaccu

SEQ ID NO: 1747221 - RNA, 19 nt, Artificial Sequence
  Description of Artificial Sequence: Synthetic oligonucleotide
  Sense strand starting at position 2054 of SEQ ID NO: 1562441
uauggauacuuccuguaga

SEQ ID NO: 1747222 - RNA, 19 nt, Artificial Sequence
  Description of Artificial Sequence: Synthetic oligonucleotide
  Antisense strand to SEQ ID NO: 1747221
ucuacaggaaguauccaua

SEQ ID NO: 1747223 - RNA, 19 nt, Artificial Sequence
  Description of Artificial Sequence: Synthetic oligonucleotide
  Sense strand starting at position 2057 of SEQ ID NO: 1562441
ggauacuuccuguagaagu

SEQ ID NO: 1747224 - RNA, 19 nt, Artificial Sequence
  Description of Artificial Sequence: Synthetic oligonucleotide
  Antisense strand to SEQ ID NO: 1747223
acuucuacaggaaguaucc

SEQ ID NO: 1747225 - RNA, 19 nt, Artificial Sequence
  Description of Artificial Sequence: Synthetic oligonucleotide
  Sense strand starting at position 2175 of SEQ ID NO: 1562441
gauaaugcugcagagguau

SEQ ID NO: 1747226 - RNA, 19 nt, Artificial Sequence
  Description of Artificial Sequence: Synthetic oligonucleotide
  Antisense strand to SEQ ID NO: 1747225
auaccucugcagcauuauc

SEQ ID NO: 1747227 - RNA, 19 nt, Artificial Sequence
  Description of Artificial Sequence: Synthetic oligonucleotide
  Sense strand starting at position 2242 of SEQ ID NO: 1562441
gauugagggcucugaugaa

SEQ ID NO: 1747228 - RNA, 19 nt, Artificial Sequence
  Description of Artificial Sequence: Synthetic oligonucleotide
  Antisense strand to SEQ ID NO: 1747227
uucaucagagcccucaauc

SEQ ID NO: 1747229 - RNA, 19 nt, Artificial Sequence
  Description of Artificial Sequence: Synthetic oligonucleotide
  Sense strand starting at position 2494 of SEQ ID NO: 1562441
agccaugauguugauaaua

SEQ ID NO: 1747230 - RNA, 19 nt, Artificial Sequence
  Description of Artificial Sequence: Synthetic oligonucleotide
  Antisense strand to SEQ ID NO: 1747229
uauuaucaacaucauggcu

SEQ ID NO: 1747231 - RNA, 19 nt, Artificial Sequence
  Description of Artificial Sequence: Synthetic oligonucleotide
  Sense strand starting at position 2574 of SEQ ID NO: 1562441
uuauaccagugagucuaau

SEQ ID NO: 1747232 - RNA, 19 nt, Artificial Sequence
  Description of Artificial Sequence: Synthetic oligonucleotide
  Antisense strand to SEQ ID NO: 1747231
auuagacucacugguauaa

SEQ ID NO: 1747233 - RNA, 19 nt, Artificial Sequence
  Description of Artificial Sequence: Synthetic oligonucleotide
  Sense strand starting at position 2844 of SEQ ID NO: 1562441
agaaauuaacuguguacag

SEQ ID NO: 1747234 - RNA, 19 nt, Artificial Sequence
  Description of Artificial Sequence: Synthetic oligonucleotide
  Antisense strand to SEQ ID NO: 1747233
cuguacacaguuaauuucu

SEQ ID NO: 1747235 - RNA, 19 nt, Artificial Sequence
  Description of Artificial Sequence: Synthetic oligonucleotide
  Sense strand starting at position 3127 of SEQ ID NO: 1562441
ccaauugaaucugucuaag

SEQ ID NO: 1747236 - RNA, 19 nt, Artificial Sequence
  Description of Artificial Sequence: Synthetic oligonucleotide
  Antisense strand to SEQ ID NO: 1747235
cuuagacagauucaauugg

SEQ ID NO: 1747237 - RNA, 19 nt, Artificial Sequence
  Description of Artificial Sequence: Synthetic oligonucleotide
  Sense strand starting at position 3129 of SEQ ID NO: 1562441
aauugaaucugucuaaggu

SEQ ID NO: 1747238 - RNA, 19 nt, Artificial Sequence
  Description of Artificial Sequence: Synthetic oligonucleotide
  Antisense strand to SEQ ID NO: 1747237
accuuagacagauucaauu

SEQ ID NO: 1747239 - RNA, 19 nt, Artificial Sequence
  Description of Artificial Sequence: Synthetic oligonucleotide
  Sense strand starting at position 3130 of SEQ ID NO: 1562441
auugaaucugucuaagguu

SEQ ID NO: 1747240 - RNA, 19 nt, Artificial Sequence
  Description of Artificial Sequence: Synthetic oligonucleotide
  Antisense strand to SEQ ID NO: 1747239
aaccuuagacagauucaau

SEQ ID NO: 1747241 - RNA, 19 nt, Artificial Sequence
  Description of Artificial Sequence: Synthetic oligonucleotide
  Sense strand starting at position 3152 of SEQ ID NO: 1562441
ucauauguagauugagguu

SEQ ID NO: 1747242 - RNA, 19 nt, Artificial Sequence
  Description of Artificial Sequence: Synthetic oligonucleotide
  Antisense strand to SEQ ID NO: 1747241
aaccucaaucuacauauga

SEQ ID NO: 1747243 - RNA, 19 nt, Artificial Sequence
  Description of Artificial Sequence: Synthetic oligonucleotide
  Sense strand starting at position 3204 of SEQ ID NO: 1562441
ugccaucucagggagucau

SEQ ID NO: 1747244 - RNA, 19 nt, Artificial Sequence
  Description of Artificial Sequence: Synthetic oligonucleotide
  Antisense strand to SEQ ID NO: 1747243
augacucccugagauggca

SEQ ID NO: 1747245 - RNA, 19 nt, Artificial Sequence
  Description of Artificial Sequence: Synthetic oligonucleotide
  Sense strand starting at position 3226 of SEQ ID NO: 1562441
gccaauaaaucuuugagua

SEQ ID NO: 1747246 - RNA, 19 nt, Artificial Sequence
  Description of Artificial Sequence: Synthetic oligonucleotide
  Antisense strand to SEQ ID NO: 1747245
uacucaaagauuuauuggc

SEQ ID NO: 1747247 - RNA, 19 nt, Artificial Sequence
  Description of Artificial Sequence: Synthetic oligonucleotide
  Sense strand starting at position 3234 of SEQ ID NO: 1562441
aucuuugaguaauucugga

SEQ ID NO: 1747248 - RNA, 19 nt, Artificial Sequence
  Description of Artificial Sequence: Synthetic oligonucleotide
  Antisense strand to SEQ ID NO: 1747247
uccagaauuacucaaagau

SEQ ID NO: 1747249 - RNA, 19 nt, Artificial Sequence
  Description of Artificial Sequence: Synthetic oligonucleotide
  Sense strand starting at position 3239 of SEQ ID NO: 1562441
ugaguaauucuggaauugu

SEQ ID NO: 1747250 - RNA, 19 nt, Artificial Sequence
  Description of Artificial Sequence: Synthetic oligonucleotide
  Antisense strand to SEQ ID NO: 1747249
acaauuccagaauuacuca

SEQ ID NO: 1747251 - RNA, 19 nt, Artificial Sequence
  Description of Artificial Sequence: Synthetic oligonucleotide
  Sense strand starting at position 3361 of SEQ ID NO: 1562441
augauagcuacaugugaag

SEQ ID NO: 1747252 - RNA, 19 nt, Artificial Sequence
  Description of Artificial Sequence: Synthetic oligonucleotide
  Antisense strand to SEQ ID NO: 1747251
cuucacauguagcuaucau

SEQ ID NO: 1747253 - RNA, 19 nt, Artificial Sequence
  Description of Artificial Sequence: Synthetic oligonucleotide
  Sense strand starting at position 3527 of SEQ ID NO: 1562441
gucugcauauauguauuua

SEQ ID NO: 1747254 - RNA, 19 nt, Artificial Sequence
  Description of Artificial Sequence: Synthetic oligonucleotide
  Antisense strand to SEQ ID NO: 1747253
uaaauacauauaugcagac

SEQ ID NO: 1747255 - RNA, 19 nt, Artificial Sequence
  Description of Artificial Sequence: Synthetic oligonucleotide
  Sense strand starting at position 3531 of SEQ ID NO: 1562441
gcauauauguauuuaggcu

SEQ ID NO: 1747256 - RNA, 19 nt, Artificial Sequence
  Description of Artificial Sequence: Synthetic oligonucleotide
  Antisense strand to SEQ ID NO: 1747255
agccuaaauacauauaugc

SEQ ID NO: 1747257 - RNA, 19 nt, Artificial Sequence
  Description of Artificial Sequence: Synthetic oligonucleotide
  Sense strand starting at position 3554 of SEQ ID NO: 1562441
gauauuauugggugaaagu

SEQ ID NO: 1747258 - RNA, 19 nt, Artificial Sequence
  Description of Artificial Sequence: Synthetic oligonucleotide
  Antisense strand to SEQ ID NO: 1747257
acuuucacccaauaauauc

SEQ ID NO: 1747259 - RNA, 19 nt, Artificial Sequence
  Description of Artificial Sequence: Synthetic oligonucleotide
  Sense strand starting at position 85 of SEQ ID NO: 1562442
uuaaauuggugaccuacau

SEQ ID NO: 1747260 - RNA, 19 nt, Artificial Sequence
  Description of Artificial Sequence: Synthetic oligonucleotide
  Antisense strand to SEQ ID NO: 1747259
auguaggucaccaauuuaa

SEQ ID NO: 1747261 - RNA, 19 nt, Artificial Sequence
  Description of Artificial Sequence: Synthetic oligonucleotide
  Sense strand starting at position 310 of SEQ ID NO: 1562442
cugucuacagaguaaacau

SEQ ID NO: 1747262 - RNA, 19 nt, Artificial Sequence
  Description of Artificial Sequence: Synthetic oligonucleotide
  Antisense strand to SEQ ID NO: 1747261
auguuuacucuguagacag

SEQ ID NO: 1747263 - RNA, 19 nt, Artificial Sequence
  Description of Artificial Sequence: Synthetic oligonucleotide
  Sense strand starting at position 437 of SEQ ID NO: 1562442
cccuuuaaacaugggcaaa

SEQ ID NO: 1747264 - RNA, 19 nt, Artificial Sequence
  Description of Artificial Sequence: Synthetic oligonucleotide
  Antisense strand to SEQ ID NO: 1747263
uuugcccauguuuaaaggg

SEQ ID NO: 1747265 - RNA, 19 nt, Artificial Sequence
  Description of Artificial Sequence: Synthetic oligonucleotide
  Sense strand starting at position 741 of SEQ ID NO: 1562442
cuggaaagcaucuggagau

SEQ ID NO: 1747266 - RNA, 19 nt, Artificial Sequence
  Description of Artificial Sequence: Synthetic oligonucleotide
  Antisense strand to SEQ ID NO: 1747265
aucuccagaugcuuuccag

SEQ ID NO: 1747267 - RNA, 19 nt, Artificial Sequence
  Description of Artificial Sequence: Synthetic oligonucleotide
  Sense strand starting at position 919 of SEQ ID NO: 1562442
gucuaacaauaguugacaa

SEQ ID NO: 1747268 - RNA, 19 nt, Artificial Sequence
  Description of Artificial Sequence: Synthetic oligonucleotide
  Antisense strand to SEQ ID NO: 1747267
uugucaacuauuguuagac

SEQ ID NO: 1747269 - RNA, 19 nt, Artificial Sequence
  Description of Artificial Sequence: Synthetic oligonucleotide
  Sense strand starting at position 1357 of SEQ ID NO: 1562442
ucucuuguggauuaaaugu

SEQ ID NO: 1747270 - RNA, 19 nt, Artificial Sequence
  Description of Artificial Sequence: Synthetic oligonucleotide
  Antisense strand to SEQ ID NO: 1747269
acauuuaauccacaagaga

SEQ ID NO: 1747271 - RNA, 19 nt, Artificial Sequence
  Description of Artificial Sequence: Synthetic oligonucleotide
  Sense strand starting at position 1375 of SEQ ID NO: 1562442
uguuuauuaggucagcaga

SEQ ID NO: 1747272 - RNA, 19 nt, Artificial Sequence
  Description of Artificial Sequence: Synthetic oligonucleotide
  Antisense strand to SEQ ID NO: 1747271
ucugcugaccuaauaaaca

SEQ ID NO: 1747273 - RNA, 19 nt, Artificial Sequence
  Description of Artificial Sequence: Synthetic oligonucleotide
  Sense strand starting at position 1377 of SEQ ID NO: 1562442
uuuauuaggucagcagaga

SEQ ID NO: 1747274 - RNA, 19 nt, Artificial Sequence
  Description of Artificial Sequence: Synthetic oligonucleotide
  Antisense strand to SEQ ID NO: 1747273
ucucugcugaccuaauaaa

SEQ ID NO: 1747275 - RNA, 19 nt, Artificial Sequence
  Description of Artificial Sequence: Synthetic oligonucleotide
  Sense strand starting at position 1990 of SEQ ID NO: 1562442
ggucauccuuggguaggaa

SEQ ID NO: 1747276 - RNA, 19 nt, Artificial Sequence
  Description of Artificial Sequence: Synthetic oligonucleotide
  Antisense strand to SEQ ID NO: 1747275
uuccuacccaaggaugacc

SEQ ID NO: 1747277 - RNA, 19 nt, Artificial Sequence
  Description of Artificial Sequence: Synthetic oligonucleotide
  Sense strand starting at position 2006 of SEQ ID NO: 1562442
gaaggaguguaggugacuu

SEQ ID NO: 1747278 - RNA, 19 nt, Artificial Sequence
  Description of Artificial Sequence: Synthetic oligonucleotide
  Antisense strand to SEQ ID NO: 1747277
aagucaccuacacuccuuc

SEQ ID NO: 1747279 - RNA, 19 nt, Artificial Sequence
  Description of Artificial Sequence: Synthetic oligonucleotide
  Sense strand starting at position 2016 of SEQ ID NO: 1562442
aggugacuucaguauggac

SEQ ID NO: 1747280 - RNA, 19 nt, Artificial Sequence
  Description of Artificial Sequence: Synthetic oligonucleotide
  Antisense strand to SEQ ID NO: 1747279
guccauacugaagucaccu

SEQ ID NO: 1747281 - RNA, 19 nt, Artificial Sequence
  Description of Artificial Sequence: Synthetic oligonucleotide
  Sense strand starting at position 2140 of SEQ ID NO: 1562442
uuacguaucucucugauuu

SEQ ID NO: 1747282 - RNA, 19 nt, Artificial Sequence
  Description of Artificial Sequence: Synthetic oligonucleotide
  Antisense strand to SEQ ID NO: 1747281
aaaucagagagauacguaa

SEQ ID NO: 1747283 - RNA, 19 nt, Artificial Sequence
  Description of Artificial Sequence: Synthetic oligonucleotide
  Sense strand starting at position 2296 of SEQ ID NO: 1562442
ccaggaauauuugacucau

SEQ ID NO: 1747284 - RNA, 19 nt, Artificial Sequence
  Description of Artificial Sequence: Synthetic oligonucleotide
  Antisense strand to SEQ ID NO: 1747283
augagucaaauauuccugg

SEQ ID NO: 1747285 - RNA, 19 nt, Artificial Sequence
  Description of Artificial Sequence: Synthetic oligonucleotide
  Sense strand starting at position 2499 of SEQ ID NO: 1562442
cauuguaaccugcagaaag

SEQ ID NO: 1747286 - RNA, 19 nt, Artificial Sequence
  Description of Artificial Sequence: Synthetic oligonucleotide
  Antisense strand to SEQ ID NO: 1747285
cuuucugcagguuacaaug

SEQ ID NO: 1747287 - RNA, 19 nt, Artificial Sequence
  Description of Artificial Sequence: Synthetic oligonucleotide
  Sense strand starting at position 2501 of SEQ ID NO: 1562442
uuguaaccugcagaaagua

SEQ ID NO: 1747288 - RNA, 19 nt, Artificial Sequence
  Description of Artificial Sequence: Synthetic oligonucleotide
  Antisense strand to SEQ ID NO: 1747287
uacuuucugcagguuacaa

SEQ ID NO: 1747289 - RNA, 19 nt, Artificial Sequence
  Description of Artificial Sequence: Synthetic oligonucleotide
  Sense strand starting at position 2516 of SEQ ID NO: 1562442
aguagagacuuugucuauu

SEQ ID NO: 1747290 - RNA, 19 nt, Artificial Sequence
  Description of Artificial Sequence: Synthetic oligonucleotide
  Antisense strand to SEQ ID NO: 1747289
aauagacaaagucucuacu

SEQ ID NO: 1747291 - RNA, 19 nt, Artificial Sequence
  Description of Artificial Sequence: Synthetic oligonucleotide
  Sense strand starting at position 2654 of SEQ ID NO: 1562442
cucaaauucuguguagaau

SEQ ID NO: 1747292 - RNA, 19 nt, Artificial Sequence
  Description of Artificial Sequence: Synthetic oligonucleotide
  Antisense strand to SEQ ID NO: 1747291
auucuacacagaauuugag

SEQ ID NO: 1747293 - RNA, 19 nt, Artificial Sequence
  Description of Artificial Sequence: Synthetic oligonucleotide
  Sense strand starting at position 2655 of SEQ ID NO: 1562442
ucaaauucuguguagaaua

SEQ ID NO: 1747294 - RNA, 19 nt, Artificial Sequence
  Description of Artificial Sequence: Synthetic oligonucleotide
  Antisense strand to SEQ ID NO: 1747293
uauucuacacagaauuuga

SEQ ID NO: 1747295 - RNA, 19 nt, Artificial Sequence
  Description of Artificial Sequence: Synthetic oligonucleotide
  Sense strand starting at position 2663 of SEQ ID NO: 1562442
uguguagaauaaucacaau

SEQ ID NO: 1747296 - RNA, 19 nt, Artificial Sequence
  Description of Artificial Sequence: Synthetic oligonucleotide
  Antisense strand to SEQ ID NO: 1747295
auugugauuauucuacaca

SEQ ID NO: 1747297 - RNA, 19 nt, Artificial Sequence
  Description of Artificial Sequence: Synthetic oligonucleotide
  Sense strand starting at position 2757 of SEQ ID NO: 1562442
ggaggaauuuaucauggug

SEQ ID NO: 1747298 - RNA, 19 nt, Artificial Sequence
  Description of Artificial Sequence: Synthetic oligonucleotide
  Antisense strand to SEQ ID NO: 1747297
caccaugauaaauuccucc

SEQ ID NO: 1747299 - RNA, 19 nt, Artificial Sequence
  Description of Artificial Sequence: Synthetic oligonucleotide
  Sense strand starting at position 2822 of SEQ ID NO: 1562442
ggugguauauauccacuaa

SEQ ID NO: 1747300 - RNA, 19 nt, Artificial Sequence
  Description of Artificial Sequence: Synthetic oligonucleotide
  Antisense strand to SEQ ID NO: 1747299
uuaguggauauauaccacc

SEQ ID NO: 1747301 - RNA, 19 nt, Artificial Sequence
  Description of Artificial Sequence: Synthetic oligonucleotide
  Sense strand starting at position 2826 of SEQ ID NO: 1562442
guauauauccacuaaaguu

SEQ ID NO: 1747302 - RNA, 19 nt, Artificial Sequence
  Description of Artificial Sequence: Synthetic oligonucleotide
  Antisense strand to SEQ ID NO: 1747301
aacuuuaguggauauauac

SEQ ID NO: 1747303 - RNA, 19 nt, Artificial Sequence
  Description of Artificial Sequence: Synthetic oligonucleotide
  Sense strand starting at position 2866 of SEQ ID NO: 1562442
ccgaaauucugacuaaaug

SEQ ID NO: 1747304 - RNA, 19 nt, Artificial Sequence
  Description of Artificial Sequence: Synthetic oligonucleotide
  Antisense strand to SEQ ID NO: 1747303
cauuuagucagaauuucgg

SEQ ID NO: 1747305 - RNA, 19 nt, Artificial Sequence
  Description of Artificial Sequence: Synthetic oligonucleotide
  Sense strand starting at position 2867 of SEQ ID NO: 1562442
cgaaauucugacuaaaugu

SEQ ID NO: 1747306 - RNA, 19 nt, Artificial Sequence
  Description of Artificial Sequence: Synthetic oligonucleotide
  Antisense strand to SEQ ID NO: 1747305
acauuuagucagaauuucg

SEQ ID NO: 1747307 - RNA, 19 nt, Artificial Sequence
  Description of Artificial Sequence: Synthetic oligonucleotide
  Sense strand starting at position 2901 of SEQ ID NO: 1562442
uugauaugauacuuugcca

SEQ ID NO: 1747308 - RNA, 19 nt, Artificial Sequence
  Description of Artificial Sequence: Synthetic oligonucleotide
  Antisense strand to SEQ ID NO: 1747307
uggcaaaguaucauaucaa

SEQ ID NO: 1747309 - RNA, 19 nt, Artificial Sequence
  Description of Artificial Sequence: Synthetic oligonucleotide
  Sense strand starting at position 2917 of SEQ ID NO: 1562442
ccagucucacauugaucua

SEQ ID NO: 1747310 - RNA, 19 nt, Artificial Sequence
  Description of Artificial Sequence: Synthetic oligonucleotide
  Antisense strand to SEQ ID NO: 1747309
uagaucaaugugagacugg

SEQ ID NO: 1747311 - RNA, 19 nt, Artificial Sequence
  Description of Artificial Sequence: Synthetic oligonucleotide
  Sense strand starting at position 2937 of SEQ ID NO: 1562442
aaaguaugaucccuagguu

SEQ ID NO: 1747312 - RNA, 19 nt, Artificial Sequence
  Description of Artificial Sequence: Synthetic oligonucleotide
  Antisense strand to SEQ ID NO: 1747311
aaccuagggaucauacuuu

SEQ ID NO: 1747313 - RNA, 19 nt, Artificial Sequence
  Description of Artificial Sequence: Synthetic oligonucleotide
  Sense strand starting at position 2938 of SEQ ID NO: 1562442
aaguaugaucccuagguug

SEQ ID NO: 1747314 - RNA, 19 nt, Artificial Sequence
  Description of Artificial Sequence: Synthetic oligonucleotide
  Antisense strand to SEQ ID NO: 1747313
caaccuagggaucauacuu

SEQ ID NO: 1747315 - RNA, 19 nt, Artificial Sequence
  Description of Artificial Sequence: Synthetic oligonucleotide
  Sense strand starting at position 2944 of SEQ ID NO: 1562442
gaucccuagguugaucauu

SEQ ID NO: 1747316 - RNA, 19 nt, Artificial Sequence
  Description of Artificial Sequence: Synthetic oligonucleotide
  Antisense strand to SEQ ID NO: 1747315
aaugaucaaccuagggauc

SEQ ID NO: 1747317 - RNA, 19 nt, Artificial Sequence
  Description of Artificial Sequence: Synthetic oligonucleotide
  Sense strand starting at position 2977 of SEQ ID NO: 1562442
auuuaagaguagcaaauga

SEQ ID NO: 1747318 - RNA, 19 nt, Artificial Sequence
  Description of Artificial Sequence: Synthetic oligonucleotide
  Antisense strand to SEQ ID NO: 1747317
ucauuugcuacucuuaaau

SEQ ID NO: 1747319 - RNA, 19 nt, Artificial Sequence
  Description of Artificial Sequence: Synthetic oligonucleotide
  Sense strand starting at position 3147 of SEQ ID NO: 1562442
aggcuaucaccagaaugca

SEQ ID NO: 1747320 - RNA, 19 nt, Artificial Sequence
  Description of Artificial Sequence: Synthetic oligonucleotide
  Antisense strand to SEQ ID NO: 1747319
ugcauucuggugauagccu

SEQ ID NO: 1747321 - RNA, 19 nt, Artificial Sequence
  Description of Artificial Sequence: Synthetic oligonucleotide
  Sense strand starting at position 3341 of SEQ ID NO: 1562442
ugaauauuaugugucagga

SEQ ID NO: 1747322 - RNA, 19 nt, Artificial Sequence
  Description of Artificial Sequence: Synthetic oligonucleotide
  Antisense strand to SEQ ID NO: 1747321
uccugacacauaauauuca

SEQ ID NO: 1747323 - RNA, 19 nt, Artificial Sequence
  Description of Artificial Sequence: Synthetic oligonucleotide
  Sense strand starting at position 3731 of SEQ ID NO: 1562442
agcuuaaugugaucacaga

SEQ ID NO: 1747324 - RNA, 19 nt, Artificial Sequence
  Description of Artificial Sequence: Synthetic oligonucleotide
  Antisense strand to SEQ ID NO: 1747323
ucugugaucacauuaagcu

SEQ ID NO: 1747325 - RNA, 19 nt, Artificial Sequence
  Description of Artificial Sequence: Synthetic oligonucleotide
  Sense strand starting at position 3732 of SEQ ID NO: 1562442
gcuuaaugugaucacagag

SEQ ID NO: 1747326 - RNA, 19 nt, Artificial Sequence
  Description of Artificial Sequence: Synthetic oligonucleotide
  Antisense strand to SEQ ID NO: 1747325
cucugugaucacauuaagc

SEQ ID NO: 1747327 - RNA, 19 nt, Artificial Sequence
  Description of Artificial Sequence: Synthetic oligonucleotide
  Sense strand starting at position 3749 of SEQ ID NO: 1562442
agaagcuaaucaucaaguu

SEQ ID NO: 1747328 - RNA, 19 nt, Artificial Sequence
  Description of Artificial Sequence: Synthetic oligonucleotide
  Antisense strand to SEQ ID NO: 1747327
aacuugaugauuagcuucu

SEQ ID NO: 1747329 - RNA, 19 nt, Artificial Sequence
  Description of Artificial Sequence: Synthetic oligonucleotide
  Sense strand starting at position 3808 of SEQ ID NO: 1562442
agaauaucuccuuaaggcu

SEQ ID NO: 1747330 - RNA, 19 nt, Artificial Sequence
  Description of Artificial Sequence: Synthetic oligonucleotide
  Antisense strand to SEQ ID NO: 1747329
agccuuaaggagauauucu

SEQ ID NO: 1747331 - RNA, 19 nt, Artificial Sequence
  Description of Artificial Sequence: Synthetic oligonucleotide
  Sense strand starting at position 3815 of SEQ ID NO: 1562442
cuccuuaaggcucaugauu

SEQ ID NO: 1747332 - RNA, 19 nt, Artificial Sequence
  Description of Artificial Sequence: Synthetic oligonucleotide
  Antisense strand to SEQ ID NO: 1747331
aaucaugagccuuaaggag

SEQ ID NO: 1747333 - RNA, 19 nt, Artificial Sequence
  Description of Artificial Sequence: Synthetic oligonucleotide
  Sense strand starting at position 3931 of SEQ ID NO: 1562442
uugugagaaugaguccaau

SEQ ID NO: 1747334 - RNA, 19 nt, Artificial Sequence
  Description of Artificial Sequence: Synthetic oligonucleotide
  Antisense strand to SEQ ID NO: 1747333
auuggacucauucucacaa

SEQ ID NO: 1747335 - RNA, 19 nt, Artificial Sequence
  Description of Artificial Sequence: Synthetic oligonucleotide
  Sense strand starting at position 3937 of SEQ ID NO: 1562442
gaaugaguccaauguagau

SEQ ID NO: 1747336 - RNA, 19 nt, Artificial Sequence
  Description of Artificial Sequence: Synthetic oligonucleotide
  Antisense strand to SEQ ID NO: 1747335
aucuacauuggacucauuc

SEQ ID NO: 1747337 - RNA, 19 nt, Artificial Sequence
  Description of Artificial Sequence: Synthetic oligonucleotide
  Sense strand starting at position 3972 of SEQ ID NO: 1562442
uauaacucagguuggauaa

SEQ ID NO: 1747338 - RNA, 19 nt, Artificial Sequence
  Description of Artificial Sequence: Synthetic oligonucleotide
  Antisense strand to SEQ ID NO: 1747337
uuauccaaccugaguuaua

SEQ ID NO: 1747339 - RNA, 19 nt, Artificial Sequence
  Description of Artificial Sequence: Synthetic oligonucleotide
  Sense strand starting at position 753 of SEQ ID NO: 1562443
uguauaaucagaggugaag

SEQ ID NO: 1747340 - RNA, 19 nt, Artificial Sequence
  Description of Artificial Sequence: Synthetic oligonucleotide
  Antisense strand to SEQ ID NO: 1747339
cuucaccucugauuauaca

SEQ ID NO: 1747341 - RNA, 19 nt, Artificial Sequence
  Description of Artificial Sequence: Synthetic oligonucleotide
  Sense strand starting at position 945 of SEQ ID NO: 1562443
agcugaguucuauaaacag

SEQ ID NO: 1747342 - RNA, 19 nt, Artificial Sequence
  Description of Artificial Sequence: Synthetic oligonucleotide
  Antisense strand to SEQ ID NO: 1747341
cuguuuauagaacucagcu

SEQ ID NO: 1747343 - RNA, 19 nt, Artificial Sequence
  Description of Artificial Sequence: Synthetic oligonucleotide
  Sense strand starting at position 989 of SEQ ID NO: 1562443
ggaaucuugucacuaagga

SEQ ID NO: 1747344 - RNA, 19 nt, Artificial Sequence
  Description of Artificial Sequence: Synthetic oligonucleotide
  Antisense strand to SEQ ID NO: 1747343
uccuuagugacaagauucc

SEQ ID NO: 1747345 - RNA, 19 nt, Artificial Sequence
  Description of Artificial Sequence: Synthetic oligonucleotide
  Sense strand starting at position 1093 of SEQ ID NO: 1562443
caguauaucuggguuaaau

SEQ ID NO: 1747346 - RNA, 19 nt, Artificial Sequence
  Description of Artificial Sequence: Synthetic oligonucleotide
  Antisense strand to SEQ ID NO: 1747345
auuuaacccagauauacug

SEQ ID NO: 1747347 - RNA, 19 nt, Artificial Sequence
  Description of Artificial Sequence: Synthetic oligonucleotide
  Sense strand starting at position 1095 of SEQ ID NO: 1562443
guauaucuggguuaaauac

SEQ ID NO: 1747348 - RNA, 19 nt, Artificial Sequence
  Description of Artificial Sequence: Synthetic oligonucleotide
  Antisense strand to SEQ ID NO: 1747347
guauuuaacccagauauac

SEQ ID NO: 1747349 - RNA, 19 nt, Artificial Sequence
  Description of Artificial Sequence: Synthetic oligonucleotide
  Sense strand starting at position 1103 of SEQ ID NO: 1562443
ggguuaaauacgggacauu

SEQ ID NO: 1747350 - RNA, 19 nt, Artificial Sequence
  Description of Artificial Sequence: Synthetic oligonucleotide
  Antisense strand to SEQ ID NO: 1747349
aaugucccguauuuaaccc

SEQ ID NO: 1747351 - RNA, 19 nt, Artificial Sequence
  Description of Artificial Sequence: Synthetic oligonucleotide
  Sense strand starting at position 1113 of SEQ ID NO: 1562443
cgggacauuuccagggagu

SEQ ID NO: 1747352 - RNA, 19 nt, Artificial Sequence
  Description of Artificial Sequence: Synthetic oligonucleotide
  Antisense strand to SEQ ID NO: 1747351
acucccuggaaaugucccg

SEQ ID NO: 1747353 - RNA, 19 nt, Artificial Sequence
  Description of Artificial Sequence: Synthetic oligonucleotide
  Sense strand starting at position 1237 of SEQ ID NO: 1562443
acggguuuaaacugauuga

SEQ ID NO: 1747354 - RNA, 19 nt, Artificial Sequence
  Description of Artificial Sequence: Synthetic oligonucleotide
  Antisense strand to SEQ ID NO: 1747353
ucaaucaguuuaaacccgu

SEQ ID NO: 1747355 - RNA, 19 nt, Artificial Sequence
  Description of Artificial Sequence: Synthetic oligonucleotide
  Sense strand starting at position 1238 of SEQ ID NO: 1562443
cggguuuaaacugauugau

SEQ ID NO: 1747356 - RNA, 19 nt, Artificial Sequence
  Description of Artificial Sequence: Synthetic oligonucleotide
  Antisense strand to SEQ ID NO: 1747355
aucaaucaguuuaaacccg

SEQ ID NO: 1747357 - RNA, 19 nt, Artificial Sequence
  Description of Artificial Sequence: Synthetic oligonucleotide
  Sense strand starting at position 1240 of SEQ ID NO: 1562443
gguuuaaacugauugauga

SEQ ID NO: 1747358 - RNA, 19 nt, Artificial Sequence
  Description of Artificial Sequence: Synthetic oligonucleotide
  Antisense strand to SEQ ID NO: 1747357
ucaucaaucaguuuaaacc

SEQ ID NO: 1747359 - RNA, 19 nt, Artificial Sequence
  Description of Artificial Sequence: Synthetic oligonucleotide
  Sense strand starting at position 1241 of SEQ ID NO: 1562443
guuuaaacugauugaugaa

SEQ ID NO: 1747360 - RNA, 19 nt, Artificial Sequence
  Description of Artificial Sequence: Synthetic oligonucleotide
  Antisense strand to SEQ ID NO: 1747359
uucaucaaucaguuuaaac

SEQ ID NO: 1747361 - RNA, 19 nt, Artificial Sequence
  Description of Artificial Sequence: Synthetic oligonucleotide
  Sense strand starting at position 1496 of SEQ ID NO: 1562443
ucuguagaugaguaucagu

SEQ ID NO: 1747362 - RNA, 19 nt, Artificial Sequence
  Description of Artificial Sequence: Synthetic oligonucleotide
  Antisense strand to SEQ ID NO: 1747361
acugauacucaucuacaga

SEQ ID NO: 1747363 - RNA, 19 nt, Artificial Sequence
  Description of Artificial Sequence: Synthetic oligonucleotide
  Sense strand starting at position 1900 of SEQ ID NO: 1562443
cauggaaguuggucccaua

SEQ ID NO: 1747364 - RNA, 19 nt, Artificial Sequence
  Description of Artificial Sequence: Synthetic oligonucleotide
  Antisense strand to SEQ ID NO: 1747363
uaugggaccaacuuccaug

SEQ ID NO: 1747365 - RNA, 19 nt, Artificial Sequence
  Description of Artificial Sequence: Synthetic oligonucleotide
  Sense strand starting at position 1921 of SEQ ID NO: 1562443
uaggguauccugggaagua

SEQ ID NO: 1747366 - RNA, 19 nt, Artificial Sequence
  Description of Artificial Sequence: Synthetic oligonucleotide
  Antisense strand to SEQ ID NO: 1747365
uacuucccaggauacccua

SEQ ID NO: 1747367 - RNA, 19 nt, Artificial Sequence
  Description of Artificial Sequence: Synthetic oligonucleotide
  Sense strand starting at position 1948 of SEQ ID NO: 1562443
agcagaaguaacgagucau

SEQ ID NO: 1747368 - RNA, 19 nt, Artificial Sequence
  Description of Artificial Sequence: Synthetic oligonucleotide
  Antisense strand to SEQ ID NO: 1747367
augacucguuacuucugcu

SEQ ID NO: 1747369 - RNA, 19 nt, Artificial Sequence
  Description of Artificial Sequence: Synthetic oligonucleotide
  Sense strand starting at position 1952 of SEQ ID NO: 1562443
gaaguaacgagucauggug

SEQ ID NO: 1747370 - RNA, 19 nt, Artificial Sequence
  Description of Artificial Sequence: Synthetic oligonucleotide
  Antisense strand to SEQ ID NO: 1747369
caccaugacucguuacuuc

SEQ ID NO: 1747371 - RNA, 19 nt, Artificial Sequence
  Description of Artificial Sequence: Synthetic oligonucleotide
  Sense strand starting at position 1994 of SEQ ID NO: 1562443
uggauugugaaggguaagu

SEQ ID NO: 1747372 - RNA, 19 nt, Artificial Sequence
  Description of Artificial Sequence: Synthetic oligonucleotide
  Antisense strand to SEQ ID NO: 1747371
acuuacccuucacaaucca

SEQ ID NO: 1747373 - RNA, 19 nt, Artificial Sequence
  Description of Artificial Sequence: Synthetic oligonucleotide
  Sense strand starting at position 1996 of SEQ ID NO: 1562443
gauugugaaggguaaguua

SEQ ID NO: 1747374 - RNA, 19 nt, Artificial Sequence
  Description of Artificial Sequence: Synthetic oligonucleotide
  Antisense strand to SEQ ID NO: 1747373
uaacuuacccuucacaauc

SEQ ID NO: 1747375 - RNA, 19 nt, Artificial Sequence
  Description of Artificial Sequence: Synthetic oligonucleotide
  Sense strand starting at position 2245 of SEQ ID NO: 1562443
aucagagucccauaguuua

SEQ ID NO: 1747376 - RNA, 19 nt, Artificial Sequence
  Description of Artificial Sequence: Synthetic oligonucleotide
  Antisense strand to SEQ ID NO: 1747375
uaaacuaugggacucugau

SEQ ID NO: 1747377 - RNA, 19 nt, Artificial Sequence
  Description of Artificial Sequence: Synthetic oligonucleotide
  Sense strand starting at position 2272 of SEQ ID NO: 1562443
ucuugauugcaucauguga

SEQ ID NO: 1747378 - RNA, 19 nt, Artificial Sequence
  Description of Artificial Sequence: Synthetic oligonucleotide
  Antisense strand to SEQ ID NO: 1747377
ucacaugaugcaaucaaga

SEQ ID NO: 1747379 - RNA, 19 nt, Artificial Sequence
  Description of Artificial Sequence: Synthetic oligonucleotide
  Sense strand starting at position 2347 of SEQ ID NO: 1562443
aagcuuuggcaagaaugca

SEQ ID NO: 1747380 - RNA, 19 nt, Artificial Sequence
  Description of Artificial Sequence: Synthetic oligonucleotide
  Antisense strand to SEQ ID NO: 1747379
ugcauucuugccaaagcuu

SEQ ID NO: 1747381 - RNA, 19 nt, Artificial Sequence
  Description of Artificial Sequence: Synthetic oligonucleotide
  Sense strand starting at position 2490 of SEQ ID NO: 1562443
acuaguuaauggguacaga

SEQ ID NO: 1747382 - RNA, 19 nt, Artificial Sequence
  Description of Artificial Sequence: Synthetic oligonucleotide
  Antisense strand to SEQ ID NO: 1747381
ucuguacccauuaacuagu

SEQ ID NO: 1747383 - RNA, 19 nt, Artificial Sequence
  Description of Artificial Sequence: Synthetic oligonucleotide
  Sense strand starting at position 2493 of SEQ ID NO: 1562443
aguuaauggguacagaguu

SEQ ID NO: 1747384 - RNA, 19 nt, Artificial Sequence
  Description of Artificial Sequence: Synthetic oligonucleotide
  Antisense strand to SEQ ID NO: 1747383
aacucuguacccauuaacu

SEQ ID NO: 1747385 - RNA, 19 nt, Artificial Sequence
  Description of Artificial Sequence: Synthetic oligonucleotide
  Sense strand starting at position 2731 of SEQ ID NO: 1562443
gugaauaaccugcaaguaa

SEQ ID NO: 1747386 - RNA, 19 nt, Artificial Sequence
  Description of Artificial Sequence: Synthetic oligonucleotide
  Antisense strand to SEQ ID NO: 1747385
uuacuugcagguuauucac

SEQ ID NO: 1747387 - RNA, 19 nt, Artificial Sequence
  Description of Artificial Sequence: Synthetic oligonucleotide
  Sense strand starting at position 2956 of SEQ ID NO: 1562443
ccugaaugccaugauccau

SEQ ID NO: 1747388 - RNA, 19 nt, Artificial Sequence
  Description of Artificial Sequence: Synthetic oligonucleotide
  Antisense strand to SEQ ID NO: 1747387
auggaucauggcauucagg

SEQ ID NO: 1747389 - RNA, 19 nt, Artificial Sequence
  Description of Artificial Sequence: Synthetic oligonucleotide
  Sense strand starting at position 3068 of SEQ ID NO: 1562443
aggaucugagcucagcaaa

SEQ ID NO: 1747390 - RNA, 19 nt, Artificial Sequence
  Description of Artificial Sequence: Synthetic oligonucleotide
  Antisense strand to SEQ ID NO: 1747389
uuugcugagcucagauccu

SEQ ID NO: 1747391 - RNA, 19 nt, Artificial Sequence
  Description of Artificial Sequence: Synthetic oligonucleotide
  Sense strand starting at position 3106 of SEQ ID NO: 1562443
aaagguuuacgacaucauc

SEQ ID NO: 1747392 - RNA, 19 nt, Artificial Sequence
  Description of Artificial Sequence: Synthetic oligonucleotide
  Antisense strand to SEQ ID NO: 1747391
gaugaugucguaaaccuuu

SEQ ID NO: 1747393 - RNA, 19 nt, Artificial Sequence
  Description of Artificial Sequence: Synthetic oligonucleotide
  Sense strand starting at position 3109 of SEQ ID NO: 1562443
gguuuacgacaucaucuuu

SEQ ID NO: 1747394 - RNA, 19 nt, Artificial Sequence
  Description of Artificial Sequence: Synthetic oligonucleotide
  Antisense strand to SEQ ID NO: 1747393
aaagaugaugucguaaacc

SEQ ID NO: 1747395 - RNA, 19 nt, Artificial Sequence
  Description of Artificial Sequence: Synthetic oligonucleotide
  Sense strand starting at position 3144 of SEQ ID NO: 1562443
gucagaauucucugaaagu

SEQ ID NO: 1747396 - RNA, 19 nt, Artificial Sequence
  Description of Artificial Sequence: Synthetic oligonucleotide
  Antisense strand to SEQ ID NO: 1747395
acuuucagagaauucugac

SEQ ID NO: 1747397 - RNA, 19 nt, Artificial Sequence
  Description of Artificial Sequence: Synthetic oligonucleotide
  Sense strand starting at position 3320 of SEQ ID NO: 1562443
aauguucuauaaguggaua

SEQ ID NO: 1747398 - RNA, 19 nt, Artificial Sequence
  Description of Artificial Sequence: Synthetic oligonucleotide
  Antisense strand to SEQ ID NO: 1747397
uauccacuuauagaacauu

SEQ ID NO: 1747399 - RNA, 19 nt, Artificial Sequence
  Description of Artificial Sequence: Synthetic oligonucleotide
  Sense strand starting at position 3458 of SEQ ID NO: 1562443
gguuguguccucaggguuu

SEQ ID NO: 1747400 - RNA, 19 nt, Artificial Sequence
  Description of Artificial Sequence: Synthetic oligonucleotide
  Antisense strand to SEQ ID NO: 1747399
aaacccugaggacacaacc

SEQ ID NO: 1747401 - RNA, 19 nt, Artificial Sequence
  Description of Artificial Sequence: Synthetic oligonucleotide
  Sense strand starting at position 3464 of SEQ ID NO: 1562443
guccucaggguuuaaauua

SEQ ID NO: 1747402 - RNA, 19 nt, Artificial Sequence
  Description of Artificial Sequence: Synthetic oligonucleotide
  Antisense strand to SEQ ID NO: 1747401
uaauuuaaacccugaggac

SEQ ID NO: 1747403 - RNA, 19 nt, Artificial Sequence
  Description of Artificial Sequence: Synthetic oligonucleotide
  Sense strand starting at position 3521 of SEQ ID NO: 1562443
uacguuugugauuaggaga

SEQ ID NO: 1747404 - RNA, 19 nt, Artificial Sequence
  Description of Artificial Sequence: Synthetic oligonucleotide
  Antisense strand to SEQ ID NO: 1747403
ucuccuaaucacaaacgua

SEQ ID NO: 1747405 - RNA, 19 nt, Artificial Sequence
  Description of Artificial Sequence: Synthetic oligonucleotide
  Sense strand starting at position 3657 of SEQ ID NO: 1562443
aguuacuccguauaaacca

SEQ ID NO: 1747406 - RNA, 19 nt, Artificial Sequence
  Description of Artificial Sequence: Synthetic oligonucleotide
  Antisense strand to SEQ ID NO: 1747405
ugguuuauacggaguaacu

SEQ ID NO: 1747407 - RNA, 19 nt, Artificial Sequence
  Description of Artificial Sequence: Synthetic oligonucleotide
  Sense strand starting at position 3743 of SEQ ID NO: 1562443
ucagaauuccaggagcucu

SEQ ID NO: 1747408 - RNA, 19 nt, Artificial Sequence
  Description of Artificial Sequence: Synthetic oligonucleotide
  Antisense strand to SEQ ID NO: 1747407
agagcuccuggaauucuga

SEQ ID NO: 1747409 - RNA, 19 nt, Artificial Sequence
  Description of Artificial Sequence: Synthetic oligonucleotide
  Sense strand starting at position 3807 of SEQ ID NO: 1562443
ggguaucucagguaauucu

SEQ ID NO: 1747410 - RNA, 19 nt, Artificial Sequence
  Description of Artificial Sequence: Synthetic oligonucleotide
  Antisense strand to SEQ ID NO: 1747409
agaauuaccugagauaccc

SEQ ID NO: 1747411 - RNA, 19 nt, Artificial Sequence
  Description of Artificial Sequence: Synthetic oligonucleotide
  Sense strand starting at position 3857 of SEQ ID NO: 1562443
cugguuugucaugagaauu

SEQ ID NO: 1747412 - RNA, 19 nt, Artificial Sequence
  Description of Artificial Sequence: Synthetic oligonucleotide
  Antisense strand to SEQ ID NO: 1747411
aauucucaugacaaaccag

SEQ ID NO: 1747413 - RNA, 19 nt, Artificial Sequence
  Description of Artificial Sequence: Synthetic oligonucleotide
  Sense strand starting at position 3898 of SEQ ID NO: 1562443
ugugaaauugcccagagau

SEQ ID NO: 1747414 - RNA, 19 nt, Artificial Sequence
  Description of Artificial Sequence: Synthetic oligonucleotide
  Antisense strand to SEQ ID NO: 1747413
aucucugggcaauuucaca

SEQ ID NO: 1747415 - RNA, 19 nt, Artificial Sequence
  Description of Artificial Sequence: Synthetic oligonucleotide
  Sense strand starting at position 3908 of SEQ ID NO: 1562443
cccagagaugcuuaucucu

SEQ ID NO: 1747416 - RNA, 19 nt, Artificial Sequence
  Description of Artificial Sequence: Synthetic oligonucleotide
  Antisense strand to SEQ ID NO: 1747415
agagauaagcaucucuggg

SEQ ID NO: 1747417 - RNA, 19 nt, Artificial Sequence
  Description of Artificial Sequence: Synthetic oligonucleotide
  Sense strand starting at position 3967 of SEQ ID NO: 1562443
uucccuuaacucuggauga

SEQ ID NO: 1747418 - RNA, 19 nt, Artificial Sequence
  Description of Artificial Sequence: Synthetic oligonucleotide
  Antisense strand to SEQ ID NO: 1747417
ucauccagaguuaagggaa

SEQ ID NO: 1747419 - RNA, 19 nt, Artificial Sequence
  Description of Artificial Sequence: Synthetic oligonucleotide
  Sense strand starting at position 16 of SEQ ID NO: 1562444
aguguacaucuguaaugac

SEQ ID NO: 1747420 - RNA, 19 nt, Artificial Sequence
  Description of Artificial Sequence: Synthetic oligonucleotide
  Antisense strand to SEQ ID NO: 1747419
gucauuacagauguacacu

SEQ ID NO: 1747421 - RNA, 19 nt, Artificial Sequence
  Description of Artificial Sequence: Synthetic oligonucleotide
  Sense strand starting at position 196 of SEQ ID NO: 1562444
guaauucuccugcauacug

SEQ ID NO: 1747422 - RNA, 19 nt, Artificial Sequence
  Description of Artificial Sequence: Synthetic oligonucleotide
  Antisense strand to SEQ ID NO: 1747421
caguaugcaggagaauuac

SEQ ID NO: 1747423 - RNA, 19 nt, Artificial Sequence
  Description of Artificial Sequence: Synthetic oligonucleotide
  Sense strand starting at position 278 of SEQ ID NO: 1562444
gucagucaucuuuacagaa

SEQ ID NO: 1747424 - RNA, 19 nt, Artificial Sequence
  Description of Artificial Sequence: Synthetic oligonucleotide
  Antisense strand to SEQ ID NO: 1747423
uucuguaaagaugacugac

SEQ ID NO: 1747425 - RNA, 19 nt, Artificial Sequence
  Description of Artificial Sequence: Synthetic oligonucleotide
  Sense strand starting at position 563 of SEQ ID NO: 1562444
cugaaaugaccucgccaaa

SEQ ID NO: 1747426 - RNA, 19 nt, Artificial Sequence
  Description of Artificial Sequence: Synthetic oligonucleotide
  Antisense strand to SEQ ID NO: 1747425
uuuggcgaggucauuucag

SEQ ID NO: 1747427 - RNA, 19 nt, Artificial Sequence
  Description of Artificial Sequence: Synthetic oligonucleotide
  Sense strand starting at position 577 of SEQ ID NO: 1562444
ccaaauagucuuuauguuu

SEQ ID NO: 1747428 - RNA, 19 nt, Artificial Sequence
  Description of Artificial Sequence: Synthetic oligonucleotide
  Antisense strand to SEQ ID NO: 1747427
aaacauaaagacuauuugg

SEQ ID NO: 1747429 - RNA, 19 nt, Artificial Sequence
  Description of Artificial Sequence: Synthetic oligonucleotide
  Sense strand starting at position 603 of SEQ ID NO: 1562444
cgaagugaaccauaugcaa

SEQ ID NO: 1747430 - RNA, 19 nt, Artificial Sequence
  Description of Artificial Sequence: Synthetic oligonucleotide
  Antisense strand to SEQ ID NO: 1747429
uugcauaugguucacuucg

SEQ ID NO: 1747431 - RNA, 19 nt, Artificial Sequence
  Description of Artificial Sequence: Synthetic oligonucleotide
  Sense strand starting at position 606 of SEQ ID NO: 1562444
agugaaccauaugcaauau

SEQ ID NO: 1747432 - RNA, 19 nt, Artificial Sequence
  Description of Artificial Sequence: Synthetic oligonucleotide
  Antisense strand to SEQ ID NO: 1747431
auauugcauaugguucacu

SEQ ID NO: 1747433 - RNA, 19 nt, Artificial Sequence
  Description of Artificial Sequence: Synthetic oligonucleotide
  Sense strand starting at position 869 of SEQ ID NO: 1562444
uuaagaaacuugucauggu

SEQ ID NO: 1747434 - RNA, 19 nt, Artificial Sequence
  Description of Artificial Sequence: Synthetic oligonucleotide
  Antisense strand to SEQ ID NO: 1747433
accaugacaaguuucuuaa

SEQ ID NO: 1747435 - RNA, 19 nt, Artificial Sequence
  Description of Artificial Sequence: Synthetic oligonucleotide
  Sense strand starting at position 882 of SEQ ID NO: 1562444
caugguugugaauaaccca

SEQ ID NO: 1747436 - RNA, 19 nt, Artificial Sequence
  Description of Artificial Sequence: Synthetic oligonucleotide
  Antisense strand to SEQ ID NO: 1747435
uggguuauucacaaccaug

SEQ ID NO: 1747437 - RNA, 19 nt, Artificial Sequence
  Description of Artificial Sequence: Synthetic oligonucleotide
  Sense strand starting at position 925 of SEQ ID NO: 1562444
caccuuagaugguuugaua

SEQ ID NO: 1747438 - RNA, 19 nt, Artificial Sequence
  Description of Artificial Sequence: Synthetic oligonucleotide
  Antisense strand to SEQ ID NO: 1747437
uaucaaaccaucuaaggug

SEQ ID NO: 1747439 - RNA, 19 nt, Artificial Sequence
  Description of Artificial Sequence: Synthetic oligonucleotide
  Sense strand starting at position 972 of SEQ ID NO: 1562444
cucucagauuuccaaagga

SEQ ID NO: 1747440 - RNA, 19 nt, Artificial Sequence
  Description of Artificial Sequence: Synthetic oligonucleotide
  Antisense strand to SEQ ID NO: 1747439
uccuuuggaaaucugagag

SEQ ID NO: 1747441 - RNA, 19 nt, Artificial Sequence
  Description of Artificial Sequence: Synthetic oligonucleotide
  Sense strand starting at position 1044 of SEQ ID NO: 1562444
ggcacuuuagucuauaauc

SEQ ID NO: 1747442 - RNA, 19 nt, Artificial Sequence
  Description of Artificial Sequence: Synthetic oligonucleotide
  Antisense strand to SEQ ID NO: 1747441
gauuauagacuaaagugcc

SEQ ID NO: 1747443 - RNA, 19 nt, Artificial Sequence
  Description of Artificial Sequence: Synthetic oligonucleotide
  Sense strand starting at position 1059 of SEQ ID NO: 1562444
aauccuuagucccugggaa

SEQ ID NO: 1747444 - RNA, 19 nt, Artificial Sequence
  Description of Artificial Sequence: Synthetic oligonucleotide
  Antisense strand to SEQ ID NO: 1747443
uucccagggacuaaggauu

SEQ ID NO: 1747445 - RNA, 19 nt, Artificial Sequence
  Description of Artificial Sequence: Synthetic oligonucleotide
  Sense strand starting at position 1060 of SEQ ID NO: 1562444
auccuuagucccugggaaa

SEQ ID NO: 1747446 - RNA, 19 nt, Artificial Sequence
  Description of Artificial Sequence: Synthetic oligonucleotide
  Antisense strand to SEQ ID NO: 1747445
uuucccagggacuaaggau

SEQ ID NO: 1747447 - RNA, 19 nt, Artificial Sequence
  Description of Artificial Sequence: Synthetic oligonucleotide
  Sense strand starting at position 1061 of SEQ ID NO: 1562444
uccuuagucccugggaaag

SEQ ID NO: 1747448 - RNA, 19 nt, Artificial Sequence
  Description of Artificial Sequence: Synthetic oligonucleotide
  Antisense strand to SEQ ID NO: 1747447
cuuucccagggacuaagga

SEQ ID NO: 1747449 - RNA, 19 nt, Artificial Sequence
  Description of Artificial Sequence: Synthetic oligonucleotide
  Sense strand starting at position 1213 of SEQ ID NO: 1562444
guuggaggugggcaucaua

SEQ ID NO: 1747450 - RNA, 19 nt, Artificial Sequence
  Description of Artificial Sequence: Synthetic oligonucleotide
  Antisense strand to SEQ ID NO: 1747449
uaugaugcccaccuccaac

SEQ ID NO: 1747451 - RNA, 19 nt, Artificial Sequence
  Description of Artificial Sequence: Synthetic oligonucleotide
  Sense strand starting at position 1337 of SEQ ID NO: 1562444
uccuaaugcccacaugaga

SEQ ID NO: 1747452 - RNA, 19 nt, Artificial Sequence
  Description of Artificial Sequence: Synthetic oligonucleotide
  Antisense strand to SEQ ID NO: 1747451
ucucaugugggcauuagga

SEQ ID NO: 1747453 - RNA, 19 nt, Artificial Sequence
  Description of Artificial Sequence: Synthetic oligonucleotide
  Sense strand starting at position 1423 of SEQ ID NO: 1562444
ucgcucuagcaugagaaua

SEQ ID NO: 1747454 - RNA, 19 nt, Artificial Sequence
  Description of Artificial Sequence: Synthetic oligonucleotide
  Antisense strand to SEQ ID NO: 1747453
uauucucaugcuagagcga

SEQ ID NO: 1747455 - RNA, 19 nt, Artificial Sequence
  Description of Artificial Sequence: Synthetic oligonucleotide
  Sense strand starting at position 1527 of SEQ ID NO: 1562444
aaaguagcucaugacaagu

SEQ ID NO: 1747456 - RNA, 19 nt, Artificial Sequence
  Description of Artificial Sequence: Synthetic oligonucleotide
  Antisense strand to SEQ ID NO: 1747455
acuugucaugagcuacuuu

SEQ ID NO: 1747457 - RNA, 19 nt, Artificial Sequence
  Description of Artificial Sequence: Synthetic oligonucleotide
  Sense strand starting at position 1538 of SEQ ID NO: 1562444
ugacaagugggaggucaaa

SEQ ID NO: 1747458 - RNA, 19 nt, Artificial Sequence
  Description of Artificial Sequence: Synthetic oligonucleotide
  Antisense strand to SEQ ID NO: 1747457
uuugaccucccacuuguca

SEQ ID NO: 1747459 - RNA, 19 nt, Artificial Sequence
  Description of Artificial Sequence: Synthetic oligonucleotide
  Sense strand starting at position 1890 of SEQ ID NO: 1562444
cgcuauaucccagcgggua

SEQ ID NO: 1747460 - RNA, 19 nt, Artificial Sequence
  Description of Artificial Sequence: Synthetic oligonucleotide
  Antisense strand to SEQ ID NO: 1747459
uacccgcugggauauagcg

SEQ ID NO: 1747461 - RNA, 19 nt, Artificial Sequence
  Description of Artificial Sequence: Synthetic oligonucleotide
  Sense strand starting at position 1950 of SEQ ID NO: 1562444
ggaaguugucgcagagcau

SEQ ID NO: 1747462 - RNA, 19 nt, Artificial Sequence
  Description of Artificial Sequence: Synthetic oligonucleotide
  Antisense strand to SEQ ID NO: 1747461
augcucugcgacaacuucc

SEQ ID NO: 1747463 - RNA, 19 nt, Artificial Sequence
  Description of Artificial Sequence: Synthetic oligonucleotide
  Sense strand starting at position 2003 of SEQ ID NO: 1562444
gugcguuuccucaguggga

SEQ ID NO: 1747464 - RNA, 19 nt, Artificial Sequence
  Description of Artificial Sequence: Synthetic oligonucleotide
  Antisense strand to SEQ ID NO: 1747463
ucccacugaggaaacgcac

SEQ ID NO: 1747465 - RNA, 19 nt, Artificial Sequence
  Description of Artificial Sequence: Synthetic oligonucleotide
  Sense strand starting at position 2021 of SEQ ID NO: 1562444
auggauuccuagucucaga

SEQ ID NO: 1747466 - RNA, 19 nt, Artificial Sequence
  Description of Artificial Sequence: Synthetic oligonucleotide
  Antisense strand to SEQ ID NO: 1747465
ucugagacuaggaauccau

SEQ ID NO: 1747467 - RNA, 19 nt, Artificial Sequence
  Description of Artificial Sequence: Synthetic oligonucleotide
  Sense strand starting at position 2152 of SEQ ID NO: 1562444
uuaugaugucuuuacagug

SEQ ID NO: 1747468 - RNA, 19 nt, Artificial Sequence
  Description of Artificial Sequence: Synthetic oligonucleotide
  Antisense strand to SEQ ID NO: 1747467
cacuguaaagacaucauaa

SEQ ID NO: 1747469 - RNA, 19 nt, Artificial Sequence
  Description of Artificial Sequence: Synthetic oligonucleotide
  Sense strand starting at position 2162 of SEQ ID NO: 1562444
uuuacaguggcuuaagaaa

SEQ ID NO: 1747470 - RNA, 19 nt, Artificial Sequence
  Description of Artificial Sequence: Synthetic oligonucleotide
  Antisense strand to SEQ ID NO: 1747469
uuucuuaagccacuguaaa

SEQ ID NO: 1747471 - RNA, 19 nt, Artificial Sequence
  Description of Artificial Sequence: Synthetic oligonucleotide
  Sense strand starting at position 2336 of SEQ ID NO: 1562444
gguuguuagcuguuaugca

SEQ ID NO: 1747472 - RNA, 19 nt, Artificial Sequence
  Description of Artificial Sequence: Synthetic oligonucleotide
  Antisense strand to SEQ ID NO: 1747471
ugcauaacagcuaacaacc

SEQ ID NO: 1747473 - RNA, 19 nt, Artificial Sequence
  Description of Artificial Sequence: Synthetic oligonucleotide
  Sense strand starting at position 2344 of SEQ ID NO: 1562444
gcuguuaugcaguccucuu

SEQ ID NO: 1747474 - RNA, 19 nt, Artificial Sequence
  Description of Artificial Sequence: Synthetic oligonucleotide
  Antisense strand to SEQ ID NO: 1747473
aagaggacugcauaacagc

SEQ ID NO: 1747475 - RNA, 19 nt, Artificial Sequence
  Description of Artificial Sequence: Synthetic oligonucleotide
  Sense strand starting at position 2707 of SEQ ID NO: 1562444
uuggauuaauccuuguacu

SEQ ID NO: 1747476 - RNA, 19 nt, Artificial Sequence
  Description of Artificial Sequence: Synthetic oligonucleotide
  Antisense strand to SEQ ID NO: 1747475
aguacaaggauuaauccaa

SEQ ID NO: 1747477 - RNA, 19 nt, Artificial Sequence
  Description of Artificial Sequence: Synthetic oligonucleotide
  Sense strand starting at position 2708 of SEQ ID NO: 1562444
uggauuaauccuuguacug

SEQ ID NO: 1747478 - RNA, 19 nt, Artificial Sequence
  Description of Artificial Sequence: Synthetic oligonucleotide
  Antisense strand to SEQ ID NO: 1747477
caguacaaggauuaaucca

SEQ ID NO: 1747479 - RNA, 19 nt, Artificial Sequence
  Description of Artificial Sequence: Synthetic oligonucleotide
  Sense strand starting at position 2720 of SEQ ID NO: 1562444
uguacugaauugucaaaca

SEQ ID NO: 1747480 - RNA, 19 nt, Artificial Sequence
  Description of Artificial Sequence: Synthetic oligonucleotide
  Antisense strand to SEQ ID NO: 1747479
uguuugacaauucaguaca

SEQ ID NO: 1747481 - RNA, 19 nt, Artificial Sequence
  Description of Artificial Sequence: Synthetic oligonucleotide
  Sense strand starting at position 2859 of SEQ ID NO: 1562444
augaaacuagauugucuga

SEQ ID NO: 1747482 - RNA, 19 nt, Artificial Sequence
  Description of Artificial Sequence: Synthetic oligonucleotide
  Antisense strand to SEQ ID NO: 1747481
ucagacaaucuaguuucau

SEQ ID NO: 1747483 - RNA, 19 nt, Artificial Sequence
  Description of Artificial Sequence: Synthetic oligonucleotide
  Sense strand starting at position 2870 of SEQ ID NO: 1562444
uugucugacaaaugugaug

SEQ ID NO: 1747484 - RNA, 19 nt, Artificial Sequence
  Description of Artificial Sequence: Synthetic oligonucleotide
  Antisense strand to SEQ ID NO: 1747483
caucacauuugucagacaa

SEQ ID NO: 1747485 - RNA, 19 nt, Artificial Sequence
  Description of Artificial Sequence: Synthetic oligonucleotide
  Sense strand starting at position 2872 of SEQ ID NO: 1562444
gucugacaaaugugaugau

SEQ ID NO: 1747486 - RNA, 19 nt, Artificial Sequence
  Description of Artificial Sequence: Synthetic oligonucleotide
  Antisense strand to SEQ ID NO: 1747485
aucaucacauuugucagac

SEQ ID NO: 1747487 - RNA, 19 nt, Artificial Sequence
  Description of Artificial Sequence: Synthetic oligonucleotide
  Sense strand starting at position 2963 of SEQ ID NO: 1562444
gaaggaauguuauuccuuu

SEQ ID NO: 1747488 - RNA, 19 nt, Artificial Sequence
  Description of Artificial Sequence: Synthetic oligonucleotide
  Antisense strand to SEQ ID NO: 1747487
aaaggaauaacauuccuuc

SEQ ID NO: 1747489 - RNA, 19 nt, Artificial Sequence
  Description of Artificial Sequence: Synthetic oligonucleotide
  Sense strand starting at position 2985 of SEQ ID NO: 1562444
aacagagagucaguucuca

SEQ ID NO: 1747490 - RNA, 19 nt, Artificial Sequence
  Description of Artificial Sequence: Synthetic oligonucleotide
  Antisense strand to SEQ ID NO: 1747489
ugagaacugacucucuguu

SEQ ID NO: 1747491 - RNA, 19 nt, Artificial Sequence
  Description of Artificial Sequence: Synthetic oligonucleotide
  Sense strand starting at position 2997 of SEQ ID NO: 1562444
guucucaagcaugaguuaa

SEQ ID NO: 1747492 - RNA, 19 nt, Artificial Sequence
  Description of Artificial Sequence: Synthetic oligonucleotide
  Antisense strand to SEQ ID NO: 1747491
uuaacucaugcuugagaac

SEQ ID NO: 1747493 - RNA, 19 nt, Artificial Sequence
  Description of Artificial Sequence: Synthetic oligonucleotide
  Sense strand starting at position 2999 of SEQ ID NO: 1562444
ucucaagcaugaguuaaag

SEQ ID NO: 1747494 - RNA, 19 nt, Artificial Sequence
  Description of Artificial Sequence: Synthetic oligonucleotide
  Antisense strand to SEQ ID NO: 1747493
cuuuaacucaugcuugaga

SEQ ID NO: 1747495 - RNA, 19 nt, Artificial Sequence
  Description of Artificial Sequence: Synthetic oligonucleotide
  Sense strand starting at position 3268 of SEQ ID NO: 1562444
gcuaucagcagcuaggaau

SEQ ID NO: 1747496 - RNA, 19 nt, Artificial Sequence
  Description of Artificial Sequence: Synthetic oligonucleotide
  Antisense strand to SEQ ID NO: 1747495
auuccuagcugcugauagc

SEQ ID NO: 1747497 - RNA, 19 nt, Artificial Sequence
  Description of Artificial Sequence: Synthetic oligonucleotide
  Sense strand starting at position 3338 of SEQ ID NO: 1562444
gccaguguucuagccagca

SEQ ID NO: 1747498 - RNA, 19 nt, Artificial Sequence
  Description of Artificial Sequence: Synthetic oligonucleotide
  Antisense strand to SEQ ID NO: 1747497
ugcuggcuagaacacuggc

SEQ ID NO: 1747499 - RNA, 19 nt, Artificial Sequence
  Description of Artificial Sequence: Synthetic oligonucleotide
  Sense strand starting at position 94 of SEQ ID NO: 1562445
gguuucagaugagucuuga

SEQ ID NO: 1747500 - RNA, 19 nt, Artificial Sequence
  Description of Artificial Sequence: Synthetic oligonucleotide
  Antisense strand to SEQ ID NO: 1747499
ucaagacucaucugaaacc

SEQ ID NO: 1747501 - RNA, 19 nt, Artificial Sequence
  Description of Artificial Sequence: Synthetic oligonucleotide
  Sense strand starting at position 154 of SEQ ID NO: 1562445
guguuuaugauguggauca

SEQ ID NO: 1747502 - RNA, 19 nt, Artificial Sequence
  Description of Artificial Sequence: Synthetic oligonucleotide
  Antisense strand to SEQ ID NO: 1747501
ugauccacaucauaaacac

SEQ ID NO: 1747503 - RNA, 19 nt, Artificial Sequence
  Description of Artificial Sequence: Synthetic oligonucleotide
  Sense strand starting at position 156 of SEQ ID NO: 1562445
guuuaugauguggaucauu

SEQ ID NO: 1747504 - RNA, 19 nt, Artificial Sequence
  Description of Artificial Sequence: Synthetic oligonucleotide
  Antisense strand to SEQ ID NO: 1747503
aaugauccacaucauaaac

SEQ ID NO: 1747505 - RNA, 19 nt, Artificial Sequence
  Description of Artificial Sequence: Synthetic oligonucleotide
  Sense strand starting at position 170 of SEQ ID NO: 1562445
ucauuaauccaagggcaau

SEQ ID NO: 1747506 - RNA, 19 nt, Artificial Sequence
  Description of Artificial Sequence: Synthetic oligonucleotide
  Antisense strand to SEQ ID NO: 1747505
auugcccuuggauuaauga

SEQ ID NO: 1747507 - RNA, 19 nt, Artificial Sequence
  Description of Artificial Sequence: Synthetic oligonucleotide
  Sense strand starting at position 361 of SEQ ID NO: 1562445
ggguguccacgacaaugaa

SEQ ID NO: 1747508 - RNA, 19 nt, Artificial Sequence
  Description of Artificial Sequence: Synthetic oligonucleotide
  Antisense strand to SEQ ID NO: 1747507
uucauugucguggacaccc

SEQ ID NO: 1747509 - RNA, 19 nt, Artificial Sequence
  Description of Artificial Sequence: Synthetic oligonucleotide
  Sense strand starting at position 537 of SEQ ID NO: 1562445
ggaggagacugagugguau

SEQ ID NO: 1747510 - RNA, 19 nt, Artificial Sequence
  Description of Artificial Sequence: Synthetic oligonucleotide
  Antisense strand to SEQ ID NO: 1747509
auaccacucagucuccucc

SEQ ID NO: 1747511 - RNA, 19 nt, Artificial Sequence
  Description of Artificial Sequence: Synthetic oligonucleotide
  Sense strand starting at position 539 of SEQ ID NO: 1562445
aggagacugagugguauua

SEQ ID NO: 1747512 - RNA, 19 nt, Artificial Sequence
  Description of Artificial Sequence: Synthetic oligonucleotide
  Antisense strand to SEQ ID NO: 1747511
uaauaccacucagucuccu

SEQ ID NO: 1747513 - RNA, 19 nt, Artificial Sequence
  Description of Artificial Sequence: Synthetic oligonucleotide
  Sense strand starting at position 676 of SEQ ID NO: 1562445
ugccuugugcuagaugaag

SEQ ID NO: 1747514 - RNA, 19 nt, Artificial Sequence
  Description of Artificial Sequence: Synthetic oligonucleotide
  Antisense strand to SEQ ID NO: 1747513
cuucaucuagcacaaggca

SEQ ID NO: 1747515 - RNA, 19 nt, Artificial Sequence
  Description of Artificial Sequence: Synthetic oligonucleotide
  Sense strand starting at position 695 of SEQ ID NO: 1562445
gggcgcaauggagaauaaa

SEQ ID NO: 1747516 - RNA, 19 nt, Artificial Sequence
  Description of Artificial Sequence: Synthetic oligonucleotide
  Antisense strand to SEQ ID NO: 1747515
uuuauucuccauugcgccc

SEQ ID NO: 1747517 - RNA, 19 nt, Artificial Sequence
  Description of Artificial Sequence: Synthetic oligonucleotide
  Sense strand starting at position 717 of SEQ ID NO: 1562445
ggaacagaugccgagcuuu

SEQ ID NO: 1747518 - RNA, 19 nt, Artificial Sequence
  Description of Artificial Sequence: Synthetic oligonucleotide
  Antisense strand to SEQ ID NO: 1747517
aaagcucggcaucuguucc

SEQ ID NO: 1747519 - RNA, 19 nt, Artificial Sequence
  Description of Artificial Sequence: Synthetic oligonucleotide
  Sense strand starting at position 830 of SEQ ID NO: 1562445
ggaagacaguguuuguaga

SEQ ID NO: 1747520 - RNA, 19 nt, Artificial Sequence
  Description of Artificial Sequence: Synthetic oligonucleotide
  Antisense strand to SEQ ID NO: 1747519
ucuacaaacacugucuucc

SEQ ID NO: 1747521 - RNA, 19 nt, Artificial Sequence
  Description of Artificial Sequence: Synthetic oligonucleotide
  Sense strand starting at position 832 of SEQ ID NO: 1562445
aagacaguguuuguagagu

SEQ ID NO: 1747522 - RNA, 19 nt, Artificial Sequence
  Description of Artificial Sequence: Synthetic oligonucleotide
  Antisense strand to SEQ ID NO: 1747521
acucuacaaacacugucuu

SEQ ID NO: 1747523 - RNA, 19 nt, Artificial Sequence
  Description of Artificial Sequence: Synthetic oligonucleotide
  Sense strand starting at position 838 of SEQ ID NO: 1562445
guguuuguagagugaaaug

SEQ ID NO: 1747524 - RNA, 19 nt, Artificial Sequence
  Description of Artificial Sequence: Synthetic oligonucleotide
  Antisense strand to SEQ ID NO: 1747523
cauuucacucuacaaacac

SEQ ID NO: 1747525 - RNA, 19 nt, Artificial Sequence
  Description of Artificial Sequence: Synthetic oligonucleotide
  Sense strand starting at position 869 of SEQ ID NO: 1562445
ucagaugccgcugagagau

SEQ ID NO: 1747526 - RNA, 19 nt, Artificial Sequence
  Description of Artificial Sequence: Synthetic oligonucleotide
  Antisense strand to SEQ ID NO: 1747525
aucucucagcggcaucuga

SEQ ID NO: 1747527 - RNA, 19 nt, Artificial Sequence
  Description of Artificial Sequence: Synthetic oligonucleotide
  Sense strand starting at position 999 of SEQ ID NO: 1562445
auggcaguucuuuaaaguu

SEQ ID NO: 1747528 - RNA, 19 nt, Artificial Sequence
  Description of Artificial Sequence: Synthetic oligonucleotide
  Antisense strand to SEQ ID NO: 1747527
aacuuuaaagaacugccau

SEQ ID NO: 1747529 - RNA, 19 nt, Artificial Sequence
  Description of Artificial Sequence: Synthetic oligonucleotide
  Sense strand starting at position 1350 of SEQ ID NO: 1562445
caagcuucucuaugaagug

SEQ ID NO: 1747530 - RNA, 19 nt, Artificial Sequence
  Description of Artificial Sequence: Synthetic oligonucleotide
  Antisense strand to SEQ ID NO: 1747529
cacuucauagagaagcuug

SEQ ID NO: 1747531 - RNA, 19 nt, Artificial Sequence
  Description of Artificial Sequence: Synthetic oligonucleotide
  Sense strand starting at position 1379 of SEQ ID NO: 1562445
ggcguggugggagaucaaa

SEQ ID NO: 1747532 - RNA, 19 nt, Artificial Sequence
  Description of Artificial Sequence: Synthetic oligonucleotide
  Antisense strand to SEQ ID NO: 1747531
uuugaucucccaccacgcc

SEQ ID NO: 1747533 - RNA, 19 nt, Artificial Sequence
  Description of Artificial Sequence: Synthetic oligonucleotide
  Sense strand starting at position 1389 of SEQ ID NO: 1562445
gagaucaaaucugaggaaa

SEQ ID NO: 1747534 - RNA, 19 nt, Artificial Sequence
  Description of Artificial Sequence: Synthetic oligonucleotide
  Antisense strand to SEQ ID NO: 1747533
uuuccucagauuugaucuc

SEQ ID NO: 1747535 - RNA, 19 nt, Artificial Sequence
  Description of Artificial Sequence: Synthetic oligonucleotide
  Sense strand starting at position 1407 of SEQ ID NO: 1562445
aauggucauuuaugaaaug

SEQ ID NO: 1747536 - RNA, 19 nt, Artificial Sequence
  Description of Artificial Sequence: Synthetic oligonucleotide
  Antisense strand to SEQ ID NO: 1747535
cauuucauaaaugaccauu

SEQ ID NO: 1747537 - RNA, 19 nt, Artificial Sequence
  Description of Artificial Sequence: Synthetic oligonucleotide
  Sense strand starting at position 1945 of SEQ ID NO: 1562445
ucagcauacggaugaucau

SEQ ID NO: 1747538 - RNA, 19 nt, Artificial Sequence
  Description of Artificial Sequence: Synthetic oligonucleotide
  Antisense strand to SEQ ID NO: 1747537
augaucauccguaugcuga

SEQ ID NO: 1747539 - RNA, 19 nt, Artificial Sequence
  Description of Artificial Sequence: Synthetic oligonucleotide
  Sense strand starting at position 1946 of SEQ ID NO: 1562445
cagcauacggaugaucauu

SEQ ID NO: 1747540 - RNA, 19 nt, Artificial Sequence
  Description of Artificial Sequence: Synthetic oligonucleotide
  Antisense strand to SEQ ID NO: 1747539
aaugaucauccguaugcug

SEQ ID NO: 1747541 - RNA, 19 nt, Artificial Sequence
  Description of Artificial Sequence: Synthetic oligonucleotide
  Sense strand starting at position 1957 of SEQ ID NO: 1562445
ugaucauuugucugcaucu

SEQ ID NO: 1747542 - RNA, 19 nt, Artificial Sequence
  Description of Artificial Sequence: Synthetic oligonucleotide
  Antisense strand to SEQ ID NO: 1747541
agaugcagacaaaugauca

SEQ ID NO: 1747543 - RNA, 19 nt, Artificial Sequence
  Description of Artificial Sequence: Synthetic oligonucleotide
  Sense strand starting at position 2084 of SEQ ID NO: 1562445
ucaggacagucccuuguaa

SEQ ID NO: 1747544 - RNA, 19 nt, Artificial Sequence
  Description of Artificial Sequence: Synthetic oligonucleotide
  Antisense strand to SEQ ID NO: 1747543
uuacaagggacuguccuga

SEQ ID NO: 1747545 - RNA, 19 nt, Artificial Sequence
  Description of Artificial Sequence: Synthetic oligonucleotide
  Sense strand starting at position 2086 of SEQ ID NO: 1562445
aggacagucccuuguaaag

SEQ ID NO: 1747546 - RNA, 19 nt, Artificial Sequence
  Description of Artificial Sequence: Synthetic oligonucleotide
  Antisense strand to SEQ ID NO: 1747545
cuuuacaagggacuguccu

SEQ ID NO: 1747547 - RNA, 19 nt, Artificial Sequence
  Description of Artificial Sequence: Synthetic oligonucleotide
  Sense strand starting at position 2500 of SEQ ID NO: 1562445
uugugaaucuauucugggu

SEQ ID NO: 1747548 - RNA, 19 nt, Artificial Sequence
  Description of Artificial Sequence: Synthetic oligonucleotide
  Antisense strand to SEQ ID NO: 1747547
acccagaauagauucacaa

SEQ ID NO: 1747549 - RNA, 19 nt, Artificial Sequence
  Description of Artificial Sequence: Synthetic oligonucleotide
  Sense strand starting at position 2504 of SEQ ID NO: 1562445
gaaucuauucugggugcau

SEQ ID NO: 1747550 - RNA, 19 nt, Artificial Sequence
  Description of Artificial Sequence: Synthetic oligonucleotide
  Antisense strand to SEQ ID NO: 1747549
augcacccagaauagauuc

SEQ ID NO: 1747551 - RNA, 19 nt, Artificial Sequence
  Description of Artificial Sequence: Synthetic oligonucleotide
  Sense strand starting at position 2505 of SEQ ID NO: 1562445
aaucuauucugggugcauu

SEQ ID NO: 1747552 - RNA, 19 nt, Artificial Sequence
  Description of Artificial Sequence: Synthetic oligonucleotide
  Antisense strand to SEQ ID NO: 1747551
aaugcacccagaauagauu

SEQ ID NO: 1747553 - RNA, 19 nt, Artificial Sequence
  Description of Artificial Sequence: Synthetic oligonucleotide
  Sense strand starting at position 2506 of SEQ ID NO: 1562445
aucuauucugggugcauuu

SEQ ID NO: 1747554 - RNA, 19 nt, Artificial Sequence
  Description of Artificial Sequence: Synthetic oligonucleotide
  Antisense strand to SEQ ID NO: 1747553
aaaugcacccagaauagau

SEQ ID NO: 1747555 - RNA, 19 nt, Artificial Sequence
  Description of Artificial Sequence: Synthetic oligonucleotide
  Sense strand starting at position 2616 of SEQ ID NO: 1562445
agcaacuaugauggauuaa

SEQ ID NO: 1747556 - RNA, 19 nt, Artificial Sequence
  Description of Artificial Sequence: Synthetic oligonucleotide
  Antisense strand to SEQ ID NO: 1747555
uuaauccaucauaguugcu

SEQ ID NO: 1747557 - RNA, 19 nt, Artificial Sequence
  Description of Artificial Sequence: Synthetic oligonucleotide
  Sense strand starting at position 2661 of SEQ ID NO: 1562445
gggaauuauugagcgcuau

SEQ ID NO: 1747558 - RNA, 19 nt, Artificial Sequence
  Description of Artificial Sequence: Synthetic oligonucleotide
  Antisense strand to SEQ ID NO: 1747557
auagcgcucaauaauuccc

SEQ ID NO: 1747559 - RNA, 19 nt, Artificial Sequence
  Description of Artificial Sequence: Synthetic oligonucleotide
  Sense strand starting at position 2807 of SEQ ID NO: 1562445
ucagauaggcucugaguac

SEQ ID NO: 1747560 - RNA, 19 nt, Artificial Sequence
  Description of Artificial Sequence: Synthetic oligonucleotide
  Antisense strand to SEQ ID NO: 1747559
guacucagagccuaucuga

SEQ ID NO: 1747561 - RNA, 19 nt, Artificial Sequence
  Description of Artificial Sequence: Synthetic oligonucleotide
  Sense strand starting at position 2837 of SEQ ID NO: 1562445
ugaguucaucuagggauug

SEQ ID NO: 1747562 - RNA, 19 nt, Artificial Sequence
  Description of Artificial Sequence: Synthetic oligonucleotide
  Antisense strand to SEQ ID NO: 1747561
caaucccuagaugaacuca

SEQ ID NO: 1747563 - RNA, 19 nt, Artificial Sequence
  Description of Artificial Sequence: Synthetic oligonucleotide
  Sense strand starting at position 2842 of SEQ ID NO: 1562445
ucaucuagggauugagugu

SEQ ID NO: 1747564 - RNA, 19 nt, Artificial Sequence
  Description of Artificial Sequence: Synthetic oligonucleotide
  Antisense strand to SEQ ID NO: 1747563
acacucaaucccuagauga

SEQ ID NO: 1747565 - RNA, 19 nt, Artificial Sequence
  Description of Artificial Sequence: Synthetic oligonucleotide
  Sense strand starting at position 2849 of SEQ ID NO: 1562445
gggauugaguguagacaga

SEQ ID NO: 1747566 - RNA, 19 nt, Artificial Sequence
  Description of Artificial Sequence: Synthetic oligonucleotide
  Antisense strand to SEQ ID NO: 1747565
ucugucuacacucaauccc

SEQ ID NO: 1747567 - RNA, 19 nt, Artificial Sequence
  Description of Artificial Sequence: Synthetic oligonucleotide
  Sense strand starting at position 3036 of SEQ ID NO: 1562445
gauuuagauuccuacgaga

SEQ ID NO: 1747568 - RNA, 19 nt, Artificial Sequence
  Description of Artificial Sequence: Synthetic oligonucleotide
  Antisense strand to SEQ ID NO: 1747567
ucucguaggaaucuaaauc

SEQ ID NO: 1747569 - RNA, 19 nt, Artificial Sequence
  Description of Artificial Sequence: Synthetic oligonucleotide
  Sense strand starting at position 3038 of SEQ ID NO: 1562445
uuuagauuccuacgagaua

SEQ ID NO: 1747570 - RNA, 19 nt, Artificial Sequence
  Description of Artificial Sequence: Synthetic oligonucleotide
  Antisense strand to SEQ ID NO: 1747569
uaucucguaggaaucuaaa

SEQ ID NO: 1747571 - RNA, 19 nt, Artificial Sequence
  Description of Artificial Sequence: Synthetic oligonucleotide
  Sense strand starting at position 3740 of SEQ ID NO: 1562445
uguagacgucuguaaacga

SEQ ID NO: 1747572 - RNA, 19 nt, Artificial Sequence
  Description of Artificial Sequence: Synthetic oligonucleotide
  Antisense strand to SEQ ID NO: 1747571
ucguuuacagacgucuaca

SEQ ID NO: 1747573 - RNA, 19 nt, Artificial Sequence
  Description of Artificial Sequence: Synthetic oligonucleotide
  Sense strand starting at position 3877 of SEQ ID NO: 1562445
uagguaacuugagucagua

SEQ ID NO: 1747574 - RNA, 19 nt, Artificial Sequence
  Description of Artificial Sequence: Synthetic oligonucleotide
  Antisense strand to SEQ ID NO: 1747573
uacugacucaaguuaccua

SEQ ID NO: 1747575 - RNA, 19 nt, Artificial Sequence
  Description of Artificial Sequence: Synthetic oligonucleotide
  Sense strand starting at position 3910 of SEQ ID NO: 1562445
ccuggucaauuccugggaa

SEQ ID NO: 1747576 - RNA, 19 nt, Artificial Sequence
  Description of Artificial Sequence: Synthetic oligonucleotide
  Antisense strand to SEQ ID NO: 1747575
uucccaggaauugaccagg

SEQ ID NO: 1747577 - RNA, 19 nt, Artificial Sequence
  Description of Artificial Sequence: Synthetic oligonucleotide
  Sense strand starting at position 3913 of SEQ ID NO: 1562445
ggucaauuccugggaagca

SEQ ID NO: 1747578 - RNA, 19 nt, Artificial Sequence
  Description of Artificial Sequence: Synthetic oligonucleotide
  Antisense strand to SEQ ID NO: 1747577
ugcuucccaggaauugacc

SEQ ID NO: 1747579 - RNA, 19 nt, Artificial Sequence
  Description of Artificial Sequence: Synthetic oligonucleotide
  Sense strand starting at position 145 of SEQ ID NO: 1562446
augagacccuguccaaaga

SEQ ID NO: 1747580 - RNA, 19 nt, Artificial Sequence
  Description of Artificial Sequence: Synthetic oligonucleotide
  Antisense strand to SEQ ID NO: 1747579
ucuuuggacagggucucau

SEQ ID NO: 1747581 - RNA, 19 nt, Artificial Sequence
  Description of Artificial Sequence: Synthetic oligonucleotide
  Sense strand starting at position 215 of SEQ ID NO: 1562446
caguguaaaugguuacaau

SEQ ID NO: 1747582 - RNA, 19 nt, Artificial Sequence
  Description of Artificial Sequence: Synthetic oligonucleotide
  Antisense strand to SEQ ID NO: 1747581
auuguaaccauuuacacug

SEQ ID NO: 1747583 - RNA, 19 nt, Artificial Sequence
  Description of Artificial Sequence: Synthetic oligonucleotide
  Sense strand starting at position 296 of SEQ ID NO: 1562446
auagauguacuguauaucu

SEQ ID NO: 1747584 - RNA, 19 nt, Artificial Sequence
  Description of Artificial Sequence: Synthetic oligonucleotide
  Antisense strand to SEQ ID NO: 1747583
agauauacaguacaucuau

SEQ ID NO: 1747585 - RNA, 19 nt, Artificial Sequence
  Description of Artificial Sequence: Synthetic oligonucleotide
  Sense strand starting at position 304 of SEQ ID NO: 1562446
acuguauaucuguauaaag

SEQ ID NO: 1747586 - RNA, 19 nt, Artificial Sequence
  Description of Artificial Sequence: Synthetic oligonucleotide
  Antisense strand to SEQ ID NO: 1747585
cuuuauacagauauacagu

SEQ ID NO: 1747587 - RNA, 19 nt, Artificial Sequence
  Description of Artificial Sequence: Synthetic oligonucleotide
  Sense strand starting at position 466 of SEQ ID NO: 1562446
cuccuugagguauauauca

SEQ ID NO: 1747588 - RNA, 19 nt, Artificial Sequence
  Description of Artificial Sequence: Synthetic oligonucleotide
  Antisense strand to SEQ ID NO: 1747587
ugauauauaccucaaggag

SEQ ID NO: 1747589 - RNA, 19 nt, Artificial Sequence
  Description of Artificial Sequence: Synthetic oligonucleotide
  Sense strand starting at position 500 of SEQ ID NO: 1562446
aagaaaggagcauguguaa

SEQ ID NO: 1747590 - RNA, 19 nt, Artificial Sequence
  Description of Artificial Sequence: Synthetic oligonucleotide
  Antisense strand to SEQ ID NO: 1747589
uuacacaugcuccuuucuu

SEQ ID NO: 1747591 - RNA, 19 nt, Artificial Sequence
  Description of Artificial Sequence: Synthetic oligonucleotide
  Sense strand starting at position 503 of SEQ ID NO: 1562446
aaaggagcauguguaauaa

SEQ ID NO: 1747592 - RNA, 19 nt, Artificial Sequence
  Description of Artificial Sequence: Synthetic oligonucleotide
  Antisense strand to SEQ ID NO: 1747591
uuauuacacaugcuccuuu

SEQ ID NO: 1747593 - RNA, 19 nt, Artificial Sequence
  Description of Artificial Sequence: Synthetic oligonucleotide
  Sense strand starting at position 608 of SEQ ID NO: 1562446
uagagucuacauggguuaa

SEQ ID NO: 1747594 - RNA, 19 nt, Artificial Sequence
  Description of Artificial Sequence: Synthetic oligonucleotide
  Antisense strand to SEQ ID NO: 1747593
uuaacccauguagacucua

SEQ ID NO: 1747595 - RNA, 19 nt, Artificial Sequence
  Description of Artificial Sequence: Synthetic oligonucleotide
  Sense strand starting at position 609 of SEQ ID NO: 1562446
agagucuacauggguuaaa

SEQ ID NO: 1747596 - RNA, 19 nt, Artificial Sequence
  Description of Artificial Sequence: Synthetic oligonucleotide
  Antisense strand to SEQ ID NO: 1747595
uuuaacccauguagacucu

SEQ ID NO: 1747597 - RNA, 19 nt, Artificial Sequence
  Description of Artificial Sequence: Synthetic oligonucleotide
  Sense strand starting at position 627 of SEQ ID NO: 1562446
aaaugaauuugaggaucag

SEQ ID NO: 1747598 - RNA, 19 nt, Artificial Sequence
  Description of Artificial Sequence: Synthetic oligonucleotide
  Antisense strand to SEQ ID NO: 1747597
cugauccucaaauucauuu

SEQ ID NO: 1747599 - RNA, 19 nt, Artificial Sequence
  Description of Artificial Sequence: Synthetic oligonucleotide
  Sense strand starting at position 787 of SEQ ID NO: 1562446
uuaggcaacugacuaaaua

SEQ ID NO: 1747600 - RNA, 19 nt, Artificial Sequence
  Description of Artificial Sequence: Synthetic oligonucleotide
  Antisense strand to SEQ ID NO: 1747599
uauuuagucaguugccuaa

SEQ ID NO: 1747601 - RNA, 19 nt, Artificial Sequence
  Description of Artificial Sequence: Synthetic oligonucleotide
  Sense strand starting at position 827 of SEQ ID NO: 1562446
aucagaaagucugucaaau

SEQ ID NO: 1747602 - RNA, 19 nt, Artificial Sequence
  Description of Artificial Sequence: Synthetic oligonucleotide
  Antisense strand to SEQ ID NO: 1747601
auuugacagacuuucugau

SEQ ID NO: 1747603 - RNA, 19 nt, Artificial Sequence
  Description of Artificial Sequence: Synthetic oligonucleotide
  Sense strand starting at position 1197 of SEQ ID NO: 1562446
aggaaauaaucugcucuca

SEQ ID NO: 1747604 - RNA, 19 nt, Artificial Sequence
  Description of Artificial Sequence: Synthetic oligonucleotide
  Antisense strand to SEQ ID NO: 1747603
ugagagcagauuauuuccu

SEQ ID NO: 1747605 - RNA, 19 nt, Artificial Sequence
  Description of Artificial Sequence: Synthetic oligonucleotide
  Sense strand starting at position 1261 of SEQ ID NO: 1562446
cuguuauuaccauaaagua

SEQ ID NO: 1747606 - RNA, 19 nt, Artificial Sequence
  Description of Artificial Sequence: Synthetic oligonucleotide
  Antisense strand to SEQ ID NO: 1747605
uacuuuaugguaauaacag

SEQ ID NO: 1747607 - RNA, 19 nt, Artificial Sequence
  Description of Artificial Sequence: Synthetic oligonucleotide
  Sense strand starting at position 1296 of SEQ ID NO: 1562446
uuauaagucgaacaaguaa

SEQ ID NO: 1747608 - RNA, 19 nt, Artificial Sequence
  Description of Artificial Sequence: Synthetic oligonucleotide
  Antisense strand to SEQ ID NO: 1747607
uuacuuguucgacuuauaa

SEQ ID NO: 1747609 - RNA, 19 nt, Artificial Sequence
  Description of Artificial Sequence: Synthetic oligonucleotide
  Sense strand starting at position 1366 of SEQ ID NO: 1562446
auuacuguacgccaauaaa

SEQ ID NO: 1747610 - RNA, 19 nt, Artificial Sequence
  Description of Artificial Sequence: Synthetic oligonucleotide
  Antisense strand to SEQ ID NO: 1747609
uuuauuggcguacaguaau

SEQ ID NO: 1747611 - RNA, 19 nt, Artificial Sequence
  Description of Artificial Sequence: Synthetic oligonucleotide
  Sense strand starting at position 1677 of SEQ ID NO: 1562446
auuaucuggcaaggaaaua

SEQ ID NO: 1747612 - RNA, 19 nt, Artificial Sequence
  Description of Artificial Sequence: Synthetic oligonucleotide
  Antisense strand to SEQ ID NO: 1747611
uauuuccuugccagauaau

SEQ ID NO: 1747613 - RNA, 19 nt, Artificial Sequence
  Description of Artificial Sequence: Synthetic oligonucleotide
  Sense strand starting at position 2023 of SEQ ID NO: 1562446
uucucuuugguaggaucau

SEQ ID NO: 1747614 - RNA, 19 nt, Artificial Sequence
  Description of Artificial Sequence: Synthetic oligonucleotide
  Antisense strand to SEQ ID NO: 1747613
augauccuaccaaagagaa

SEQ ID NO: 1747615 - RNA, 19 nt, Artificial Sequence
  Description of Artificial Sequence: Synthetic oligonucleotide
  Sense strand starting at position 2206 of SEQ ID NO: 1562446
aguugaauuuaagggaaug

SEQ ID NO: 1747616 - RNA, 19 nt, Artificial Sequence
  Description of Artificial Sequence: Synthetic oligonucleotide
  Antisense strand to SEQ ID NO: 1747615
cauucccuuaaauucaacu

SEQ ID NO: 1747617 - RNA, 19 nt, Artificial Sequence
  Description of Artificial Sequence: Synthetic oligonucleotide
  Sense strand starting at position 2269 of SEQ ID NO: 1562446
uucagaagcggucaggaaa

SEQ ID NO: 1747618 - RNA, 19 nt, Artificial Sequence
  Description of Artificial Sequence: Synthetic oligonucleotide
  Antisense strand to SEQ ID NO: 1747617
uuuccugaccgcuucugaa

SEQ ID NO: 1747619 - RNA, 19 nt, Artificial Sequence
  Description of Artificial Sequence: Synthetic oligonucleotide
  Sense strand starting at position 2506 of SEQ ID NO: 1562446
ggcucaucacuugaggcua

SEQ ID NO: 1747620 - RNA, 19 nt, Artificial Sequence
  Description of Artificial Sequence: Synthetic oligonucleotide
  Antisense strand to SEQ ID NO: 1747619
uagccucaagugaugagcc

SEQ ID NO: 1747621 - RNA, 19 nt, Artificial Sequence
  Description of Artificial Sequence: Synthetic oligonucleotide
  Sense strand starting at position 2632 of SEQ ID NO: 1562446
ggacuuuaguaagcaagaa

SEQ ID NO: 1747622 - RNA, 19 nt, Artificial Sequence
  Description of Artificial Sequence: Synthetic oligonucleotide
  Antisense strand to SEQ ID NO: 1747621
uucuugcuuacuaaagucc

SEQ ID NO: 1747623 - RNA, 19 nt, Artificial Sequence
  Description of Artificial Sequence: Synthetic oligonucleotide
  Sense strand starting at position 2767 of SEQ ID NO: 1562446
uguuauaaaucugcagaaa

SEQ ID NO: 1747624 - RNA, 19 nt, Artificial Sequence
  Description of Artificial Sequence: Synthetic oligonucleotide
  Antisense strand to SEQ ID NO: 1747623
uuucugcagauuuauaaca

SEQ ID NO: 1747625 - RNA, 19 nt, Artificial Sequence
  Description of Artificial Sequence: Synthetic oligonucleotide
  Sense strand starting at position 2768 of SEQ ID NO: 1562446
guuauaaaucugcagaaac

SEQ ID NO: 1747626 - RNA, 19 nt, Artificial Sequence
  Description of Artificial Sequence: Synthetic oligonucleotide
  Antisense strand to SEQ ID NO: 1747625
guuucugcagauuuauaac

SEQ ID NO: 1747627 - RNA, 19 nt, Artificial Sequence
  Description of Artificial Sequence: Synthetic oligonucleotide
  Sense strand starting at position 2996 of SEQ ID NO: 1562446
agcacuuagcuguaagaac

SEQ ID NO: 1747628 - RNA, 19 nt, Artificial Sequence
  Description of Artificial Sequence: Synthetic oligonucleotide
  Antisense strand to SEQ ID NO: 1747627
guucuuacagcuaagugcu

SEQ ID NO: 1747629 - RNA, 19 nt, Artificial Sequence
  Description of Artificial Sequence: Synthetic oligonucleotide
  Sense strand starting at position 3068 of SEQ ID NO: 1562446
gaaagauaaugugucauac

SEQ ID NO: 1747630 - RNA, 19 nt, Artificial Sequence
  Description of Artificial Sequence: Synthetic oligonucleotide
  Antisense strand to SEQ ID NO: 1747629
guaugacacauuaucuuuc

SEQ ID NO: 1747631 - RNA, 19 nt, Artificial Sequence
  Description of Artificial Sequence: Synthetic oligonucleotide
  Sense strand starting at position 3251 of SEQ ID NO: 1562446
uggcauaucaggcaguaua

SEQ ID NO: 1747632 - RNA, 19 nt, Artificial Sequence
  Description of Artificial Sequence: Synthetic oligonucleotide
  Antisense strand to SEQ ID NO: 1747631
uauacugccugauaugcca

SEQ ID NO: 1747633 - RNA, 19 nt, Artificial Sequence
  Description of Artificial Sequence: Synthetic oligonucleotide
  Sense strand starting at position 3261 of SEQ ID NO: 1562446
ggcaguauaauauagaguu

SEQ ID NO: 1747634 - RNA, 19 nt, Artificial Sequence
  Description of Artificial Sequence: Synthetic oligonucleotide
  Antisense strand to SEQ ID NO: 1747633
aacucuauauuauacugcc

SEQ ID NO: 1747635 - RNA, 19 nt, Artificial Sequence
  Description of Artificial Sequence: Synthetic oligonucleotide
  Sense strand starting at position 3320 of SEQ ID NO: 1562446
gccuacugccaauaugaga

SEQ ID NO: 1747636 - RNA, 19 nt, Artificial Sequence
  Description of Artificial Sequence: Synthetic oligonucleotide
  Antisense strand to SEQ ID NO: 1747635
ucucauauuggcaguaggc

SEQ ID NO: 1747637 - RNA, 19 nt, Artificial Sequence
  Description of Artificial Sequence: Synthetic oligonucleotide
  Sense strand starting at position 3444 of SEQ ID NO: 1562446
uuaguccuccuuggauaua

SEQ ID NO: 1747638 - RNA, 19 nt, Artificial Sequence
  Description of Artificial Sequence: Synthetic oligonucleotide
  Antisense strand to SEQ ID NO: 1747637
uauauccaaggaggacuaa

SEQ ID NO: 1747639 - RNA, 19 nt, Artificial Sequence
  Description of Artificial Sequence: Synthetic oligonucleotide
  Sense strand starting at position 3565 of SEQ ID NO: 1562446
uuuauugagcccuauguau

SEQ ID NO: 1747640 - RNA, 19 nt, Artificial Sequence
  Description of Artificial Sequence: Synthetic oligonucleotide
  Antisense strand to SEQ ID NO: 1747639
auacauagggcucaauaaa

SEQ ID NO: 1747641 - RNA, 19 nt, Artificial Sequence
  Description of Artificial Sequence: Synthetic oligonucleotide
  Sense strand starting at position 3601 of SEQ ID NO: 1562446
cuuuacaagugaguuaauu

SEQ ID NO: 1747642 - RNA, 19 nt, Artificial Sequence
  Description of Artificial Sequence: Synthetic oligonucleotide
  Antisense strand to SEQ ID NO: 1747641
aauuaacucacuuguaaag

SEQ ID NO: 1747643 - RNA, 19 nt, Artificial Sequence
  Description of Artificial Sequence: Synthetic oligonucleotide
  Sense strand starting at position 3614 of SEQ ID NO: 1562446
uuaauuaguguuugagaug

SEQ ID NO: 1747644 - RNA, 19 nt, Artificial Sequence
  Description of Artificial Sequence: Synthetic oligonucleotide
  Antisense strand to SEQ ID NO: 1747643
caucucaaacacuaauuaa

SEQ ID NO: 1747645 - RNA, 19 nt, Artificial Sequence
  Description of Artificial Sequence: Synthetic oligonucleotide
  Sense strand starting at position 3676 of SEQ ID NO: 1562446
uuaauuugucaauguguca

SEQ ID NO: 1747646 - RNA, 19 nt, Artificial Sequence
  Description of Artificial Sequence: Synthetic oligonucleotide
  Antisense strand to SEQ ID NO: 1747645
ugacacauugacaaauuaa

SEQ ID NO: 1747647 - RNA, 19 nt, Artificial Sequence
  Description of Artificial Sequence: Synthetic oligonucleotide
  Sense strand starting at position 3800 of SEQ ID NO: 1562446
uggcaaauggccuacaugu

SEQ ID NO: 1747648 - RNA, 19 nt, Artificial Sequence
  Description of Artificial Sequence: Synthetic oligonucleotide
  Antisense strand to SEQ ID NO: 1747647
acauguaggccauuugcca

SEQ ID NO: 1747649 - RNA, 19 nt, Artificial Sequence
  Description of Artificial Sequence: Synthetic oligonucleotide
  Sense strand starting at position 3808 of SEQ ID NO: 1562446
ggccuacaugugcacaaau

SEQ ID NO: 1747650 - RNA, 19 nt, Artificial Sequence
  Description of Artificial Sequence: Synthetic oligonucleotide
  Antisense strand to SEQ ID NO: 1747649
auuugugcacauguaggcc

SEQ ID NO: 1747651 - RNA, 19 nt, Artificial Sequence
  Description of Artificial Sequence: Synthetic oligonucleotide
  Sense strand starting at position 3897 of SEQ ID NO: 1562446
augagagauuagucuaauu

SEQ ID NO: 1747652 - RNA, 19 nt, Artificial Sequence
  Description of Artificial Sequence: Synthetic oligonucleotide
  Antisense strand to SEQ ID NO: 1747651
aauuagacuaaucucucau

SEQ ID NO: 1747653 - RNA, 19 nt, Artificial Sequence
  Description of Artificial Sequence: Synthetic oligonucleotide
  Sense strand starting at position 3902 of SEQ ID NO: 1562446
agauuagucuaauuaggua

SEQ ID NO: 1747654 - RNA, 19 nt, Artificial Sequence
  Description of Artificial Sequence: Synthetic oligonucleotide
  Antisense strand to SEQ ID NO: 1747653
uaccuaauuagacuaaucu

SEQ ID NO: 1747655 - RNA, 19 nt, Artificial Sequence
  Description of Artificial Sequence: Synthetic oligonucleotide
  Sense strand starting at position 3918 of SEQ ID NO: 1562446
guaucuacuguggauuaaa

SEQ ID NO: 1747656 - RNA, 19 nt, Artificial Sequence
  Description of Artificial Sequence: Synthetic oligonucleotide
  Antisense strand to SEQ ID NO: 1747655
uuuaauccacaguagauac

SEQ ID NO: 1747657 - RNA, 19 nt, Artificial Sequence
  Description of Artificial Sequence: Synthetic oligonucleotide
  Sense strand starting at position 3943 of SEQ ID NO: 1562446
gauacagauugaucaguau

SEQ ID NO: 1747658 - RNA, 19 nt, Artificial Sequence
  Description of Artificial Sequence: Synthetic oligonucleotide
  Antisense strand to SEQ ID NO: 1747657
auacugaucaaucuguauc

SEQ ID NO: 1747659 - RNA, 19 nt, Artificial Sequence
  Description of Artificial Sequence: Synthetic oligonucleotide
  Sense strand starting at position 423 of SEQ ID NO: 1562447
ucagaaagcacguauuaug

SEQ ID NO: 1747660 - RNA, 19 nt, Artificial Sequence
  Description of Artificial Sequence: Synthetic oligonucleotide
  Antisense strand to SEQ ID NO: 1747659
cauaauacgugcuuucuga

SEQ ID NO: 1747661 - RNA, 19 nt, Artificial Sequence
  Description of Artificial Sequence: Synthetic oligonucleotide
  Sense strand starting at position 542 of SEQ ID NO: 1562447
caugauauagcguauauau

SEQ ID NO: 1747662 - RNA, 19 nt, Artificial Sequence
  Description of Artificial Sequence: Synthetic oligonucleotide
  Antisense strand to SEQ ID NO: 1747661
auauauacgcuauaucaug

SEQ ID NO: 1747663 - RNA, 19 nt, Artificial Sequence
  Description of Artificial Sequence: Synthetic oligonucleotide
  Sense strand starting at position 614 of SEQ ID NO: 1562447
caucuuuauuggguaagau

SEQ ID NO: 1747664 - RNA, 19 nt, Artificial Sequence
  Description of Artificial Sequence: Synthetic oligonucleotide
  Antisense strand to SEQ ID NO: 1747663
aucuuacccaauaaagaug

SEQ ID NO: 1747665 - RNA, 19 nt, Artificial Sequence
  Description of Artificial Sequence: Synthetic oligonucleotide
  Sense strand starting at position 655 of SEQ ID NO: 1562447
ugcagugaugcugauuaaa

SEQ ID NO: 1747666 - RNA, 19 nt, Artificial Sequence
  Description of Artificial Sequence: Synthetic oligonucleotide
  Antisense strand to SEQ ID NO: 1747665
uuuaaucagcaucacugca

SEQ ID NO: 1747667 - RNA, 19 nt, Artificial Sequence
  Description of Artificial Sequence: Synthetic oligonucleotide
  Sense strand starting at position 657 of SEQ ID NO: 1562447
cagugaugcugauuaaauu

SEQ ID NO: 1747668 - RNA, 19 nt, Artificial Sequence
  Description of Artificial Sequence: Synthetic oligonucleotide
  Antisense strand to SEQ ID NO: 1747667
aauuuaaucagcaucacug

SEQ ID NO: 1747669 - RNA, 19 nt, Artificial Sequence
  Description of Artificial Sequence: Synthetic oligonucleotide
  Sense strand starting at position 658 of SEQ ID NO: 1562447
agugaugcugauuaaauug

SEQ ID NO: 1747670 - RNA, 19 nt, Artificial Sequence
  Description of Artificial Sequence: Synthetic oligonucleotide
  Antisense strand to SEQ ID NO: 1747669
caauuuaaucagcaucacu

SEQ ID NO: 1747671 - RNA, 19 nt, Artificial Sequence
  Description of Artificial Sequence: Synthetic oligonucleotide
  Sense strand starting at position 666 of SEQ ID NO: 1562447
ugauuaaauuguguucuca

SEQ ID NO: 1747672 - RNA, 19 nt, Artificial Sequence
  Description of Artificial Sequence: Synthetic oligonucleotide
  Antisense strand to SEQ ID NO: 1747671
ugagaacacaauuuaauca

SEQ ID NO: 1747673 - RNA, 19 nt, Artificial Sequence
  Description of Artificial Sequence: Synthetic oligonucleotide
  Sense strand starting at position 690 of SEQ ID NO: 1562447
ucuguauuucucuguguga

SEQ ID NO: 1747674 - RNA, 19 nt, Artificial Sequence
  Description of Artificial Sequence: Synthetic oligonucleotide
  Antisense strand to SEQ ID NO: 1747673
ucacacagagaaauacaga

SEQ ID NO: 1747675 - RNA, 19 nt, Artificial Sequence
  Description of Artificial Sequence: Synthetic oligonucleotide
  Sense strand starting at position 691 of SEQ ID NO: 1562447
cuguauuucucugugugau

SEQ ID NO: 1747676 - RNA, 19 nt, Artificial Sequence
  Description of Artificial Sequence: Synthetic oligonucleotide
  Antisense strand to SEQ ID NO: 1747675
aucacacagagaaauacag

SEQ ID NO: 1747677 - RNA, 19 nt, Artificial Sequence
  Description of Artificial Sequence: Synthetic oligonucleotide
  Sense strand starting at position 692 of SEQ ID NO: 1562447
uguauuucucugugugauu

SEQ ID NO: 1747678 - RNA, 19 nt, Artificial Sequence
  Description of Artificial Sequence: Synthetic oligonucleotide
  Antisense strand to SEQ ID NO: 1747677
aaucacacagagaaauaca

SEQ ID NO: 1747679 - RNA, 19 nt, Artificial Sequence
  Description of Artificial Sequence: Synthetic oligonucleotide
  Sense strand starting at position 697 of SEQ ID NO: 1562447
uucucugugugauuucuau

SEQ ID NO: 1747680 - RNA, 19 nt, Artificial Sequence
  Description of Artificial Sequence: Synthetic oligonucleotide
  Antisense strand to SEQ ID NO: 1747679
auagaaaucacacagagaa

SEQ ID NO: 1747681 - RNA, 19 nt, Artificial Sequence
  Description of Artificial Sequence: Synthetic oligonucleotide
  Sense strand starting at position 706 of SEQ ID NO: 1562447
ugauuucuauugucuguau

SEQ ID NO: 1747682 - RNA, 19 nt, Artificial Sequence
  Description of Artificial Sequence: Synthetic oligonucleotide
  Antisense strand to SEQ ID NO: 1747681
auacagacaauagaaauca

SEQ ID NO: 1747683 - RNA, 19 nt, Artificial Sequence
  Description of Artificial Sequence: Synthetic oligonucleotide
  Sense strand starting at position 735 of SEQ ID NO: 1562447
uuaguuuccuaugucuaaa

SEQ ID NO: 1747684 - RNA, 19 nt, Artificial Sequence
  Description of Artificial Sequence: Synthetic oligonucleotide
  Antisense strand to SEQ ID NO: 1747683
uuuagacauaggaaacuaa

SEQ ID NO: 1747685 - RNA, 19 nt, Artificial Sequence
  Description of Artificial Sequence: Synthetic oligonucleotide
  Sense strand starting at position 909 of SEQ ID NO: 1562447
aauugaggaucugagaaau

SEQ ID NO: 1747686 - RNA, 19 nt, Artificial Sequence
  Description of Artificial Sequence: Synthetic oligonucleotide
  Antisense strand to SEQ ID NO: 1747685
auuucucagauccucaauu

SEQ ID NO: 1747687 - RNA, 19 nt, Artificial Sequence
  Description of Artificial Sequence: Synthetic oligonucleotide
  Sense strand starting at position 1005 of SEQ ID NO: 1562447
agauaaugacucuagcagu

SEQ ID NO: 1747688 - RNA, 19 nt, Artificial Sequence
  Description of Artificial Sequence: Synthetic oligonucleotide
  Antisense strand to SEQ ID NO: 1747687
acugcuagagucauuaucu

SEQ ID NO: 1747689 - RNA, 19 nt, Artificial Sequence
  Description of Artificial Sequence: Synthetic oligonucleotide
  Sense strand starting at position 1184 of SEQ ID NO: 1562447
caguuacaaugccugugaa

SEQ ID NO: 1747690 - RNA, 19 nt, Artificial Sequence
  Description of Artificial Sequence: Synthetic oligonucleotide
  Antisense strand to SEQ ID NO: 1747689
uucacaggcauuguaacug

SEQ ID NO: 1747691 - RNA, 19 nt, Artificial Sequence
  Description of Artificial Sequence: Synthetic oligonucleotide
  Sense strand starting at position 1187 of SEQ ID NO: 1562447
uuacaaugccugugaaauu

SEQ ID NO: 1747692 - RNA, 19 nt, Artificial Sequence
  Description of Artificial Sequence: Synthetic oligonucleotide
  Antisense strand to SEQ ID NO: 1747691
aauuucacaggcauuguaa

SEQ ID NO: 1747693 - RNA, 19 nt, Artificial Sequence
  Description of Artificial Sequence: Synthetic oligonucleotide
  Sense strand starting at position 1350 of SEQ ID NO: 1562447
guuuccucauguuuaaaug

SEQ ID NO: 1747694 - RNA, 19 nt, Artificial Sequence
  Description of Artificial Sequence: Synthetic oligonucleotide
  Antisense strand to SEQ ID NO: 1747693
cauuuaaacaugaggaaac

SEQ ID NO: 1747695 - RNA, 19 nt, Artificial Sequence
  Description of Artificial Sequence: Synthetic oligonucleotide
  Sense strand starting at position 1380 of SEQ ID NO: 1562447
aagaaauggucuccuguua

SEQ ID NO: 1747696 - RNA, 19 nt, Artificial Sequence
  Description of Artificial Sequence: Synthetic oligonucleotide
  Antisense strand to SEQ ID NO: 1747695
uaacaggagaccauuucuu

SEQ ID NO: 1747697 - RNA, 19 nt, Artificial Sequence
  Description of Artificial Sequence: Synthetic oligonucleotide
  Sense strand starting at position 1436 of SEQ ID NO: 1562447
gggcaagcugcugagauaa

SEQ ID NO: 1747698 - RNA, 19 nt, Artificial Sequence
  Description of Artificial Sequence: Synthetic oligonucleotide
  Antisense strand to SEQ ID NO: 1747697
uuaucucagcagcuugccc

SEQ ID NO: 1747699 - RNA, 19 nt, Artificial Sequence
  Description of Artificial Sequence: Synthetic oligonucleotide
  Sense strand starting at position 1446 of SEQ ID NO: 1562447
cugagauaaguuugucuug

SEQ ID NO: 1747700 - RNA, 19 nt, Artificial Sequence
  Description of Artificial Sequence: Synthetic oligonucleotide
  Antisense strand to SEQ ID NO: 1747699
caagacaaacuuaucucag

SEQ ID NO: 1747701 - RNA, 19 nt, Artificial Sequence
  Description of Artificial Sequence: Synthetic oligonucleotide
  Sense strand starting at position 1449 of SEQ ID NO: 1562447
agauaaguuugucuugcaa

SEQ ID NO: 1747702 - RNA, 19 nt, Artificial Sequence
  Description of Artificial Sequence: Synthetic oligonucleotide
  Antisense strand to SEQ ID NO: 1747701
uugcaagacaaacuuaucu

SEQ ID NO: 1747703 - RNA, 19 nt, Artificial Sequence
  Description of Artificial Sequence: Synthetic oligonucleotide
  Sense strand starting at position 1723 of SEQ ID NO: 1562447
cggauuuguuaacaacaac

SEQ ID NO: 1747704 - RNA, 19 nt, Artificial Sequence
  Description of Artificial Sequence: Synthetic oligonucleotide
  Antisense strand to SEQ ID NO: 1747703
guuguuguuaacaaauccg

SEQ ID NO: 1747705 - RNA, 19 nt, Artificial Sequence
  Description of Artificial Sequence: Synthetic oligonucleotide
  Sense strand starting at position 1940 of SEQ ID NO: 1562447
uggcacaaguuauuaugua

SEQ ID NO: 1747706 - RNA, 19 nt, Artificial Sequence
  Description of Artificial Sequence: Synthetic oligonucleotide
  Antisense strand to SEQ ID NO: 1747705
uacauaauaacuugugcca

SEQ ID NO: 1747707 - RNA, 19 nt, Artificial Sequence
  Description of Artificial Sequence: Synthetic oligonucleotide
  Sense strand starting at position 2160 of SEQ ID NO: 1562447
cugaaugcuaguggcagaa

SEQ ID NO: 1747708 - RNA, 19 nt, Artificial Sequence
  Description of Artificial Sequence: Synthetic oligonucleotide
  Antisense strand to SEQ ID NO: 1747707
uucugccacuagcauucag

SEQ ID NO: 1747709 - RNA, 19 nt, Artificial Sequence
  Description of Artificial Sequence: Synthetic oligonucleotide
  Sense strand starting at position 2190 of SEQ ID NO: 1562447
aggcaaauauagcuuuaau

SEQ ID NO: 1747710 - RNA, 19 nt, Artificial Sequence
  Description of Artificial Sequence: Synthetic oligonucleotide
  Antisense strand to SEQ ID NO: 1747709
auuaaagcuauauuugccu

SEQ ID NO: 1747711 - RNA, 19 nt, Artificial Sequence
  Description of Artificial Sequence: Synthetic oligonucleotide
  Sense strand starting at position 2212 of SEQ ID NO: 1562447
guaguugugaagcaaucaa

SEQ ID NO: 1747712 - RNA, 19 nt, Artificial Sequence
  Description of Artificial Sequence: Synthetic oligonucleotide
  Antisense strand to SEQ ID NO: 1747711
uugauugcuucacaacuac

SEQ ID NO: 1747713 - RNA, 19 nt, Artificial Sequence
  Description of Artificial Sequence: Synthetic oligonucleotide
  Sense strand starting at position 2290 of SEQ ID NO: 1562447
ucuacaucagcguagaaug

SEQ ID NO: 1747714 - RNA, 19 nt, Artificial Sequence
  Description of Artificial Sequence: Synthetic oligonucleotide
  Antisense strand to SEQ ID NO: 1747713
cauucuacgcugauguaga

SEQ ID NO: 1747715 - RNA, 19 nt, Artificial Sequence
  Description of Artificial Sequence: Synthetic oligonucleotide
  Sense strand starting at position 2377 of SEQ ID NO: 1562447
augguaacuguuugagaua

SEQ ID NO: 1747716 - RNA, 19 nt, Artificial Sequence
  Description of Artificial Sequence: Synthetic oligonucleotide
  Antisense strand to SEQ ID NO: 1747715
uaucucaaacaguuaccau

SEQ ID NO: 1747717 - RNA, 19 nt, Artificial Sequence
  Description of Artificial Sequence: Synthetic oligonucleotide
  Sense strand starting at position 2413 of SEQ ID NO: 1562447
uugauaugaucacuaugca

SEQ ID NO: 1747718 - RNA, 19 nt, Artificial Sequence
  Description of Artificial Sequence: Synthetic oligonucleotide
  Antisense strand to SEQ ID NO: 1747717
ugcauagugaucauaucaa

SEQ ID NO: 1747719 - RNA, 19 nt, Artificial Sequence
  Description of Artificial Sequence: Synthetic oligonucleotide
  Sense strand starting at position 2472 of SEQ ID NO: 1562447
aggcacaacuaugucaauu

SEQ ID NO: 1747720 - RNA, 19 nt, Artificial Sequence
  Description of Artificial Sequence: Synthetic oligonucleotide
  Antisense strand to SEQ ID NO: 1747719
aauugacauaguugugccu

SEQ ID NO: 1747721 - RNA, 19 nt, Artificial Sequence
  Description of Artificial Sequence: Synthetic oligonucleotide
  Sense strand starting at position 2582 of SEQ ID NO: 1562447
uaaaguaggugucuaacaa

SEQ ID NO: 1747722 - RNA, 19 nt, Artificial Sequence
  Description of Artificial Sequence: Synthetic oligonucleotide
  Antisense strand to SEQ ID NO: 1747721
uuguuagacaccuacuuua

SEQ ID NO: 1747723 - RNA, 19 nt, Artificial Sequence
  Description of Artificial Sequence: Synthetic oligonucleotide
  Sense strand starting at position 2601 of SEQ ID NO: 1562447
gucuuuauaccaggaauuc

SEQ ID NO: 1747724 - RNA, 19 nt, Artificial Sequence
  Description of Artificial Sequence: Synthetic oligonucleotide
  Antisense strand to SEQ ID NO: 1747723
gaauuccugguauaaagac

SEQ ID NO: 1747725 - RNA, 19 nt, Artificial Sequence
  Description of Artificial Sequence: Synthetic oligonucleotide
  Sense strand starting at position 2884 of SEQ ID NO: 1562447
ugcuuucuacgugaccaaa

SEQ ID NO: 1747726 - RNA, 19 nt, Artificial Sequence
  Description of Artificial Sequence: Synthetic oligonucleotide
  Antisense strand to SEQ ID NO: 1747725
uuuggucacguagaaagca

SEQ ID NO: 1747727 - RNA, 19 nt, Artificial Sequence
  Description of Artificial Sequence: Synthetic oligonucleotide
  Sense strand starting at position 2977 of SEQ ID NO: 1562447
gguuaagugacuuggcaca

SEQ ID NO: 1747728 - RNA, 19 nt, Artificial Sequence
  Description of Artificial Sequence: Synthetic oligonucleotide
  Antisense strand to SEQ ID NO: 1747727
ugugccaagucacuuaacc

SEQ ID NO: 1747729 - RNA, 19 nt, Artificial Sequence
  Description of Artificial Sequence: Synthetic oligonucleotide
  Sense strand starting at position 3056 of SEQ ID NO: 1562447
acaugauccuuguuuaaag

SEQ ID NO: 1747730 - RNA, 19 nt, Artificial Sequence
  Description of Artificial Sequence: Synthetic oligonucleotide
  Antisense strand to SEQ ID NO: 1747729
cuuuaaacaaggaucaugu

SEQ ID NO: 1747731 - RNA, 19 nt, Artificial Sequence
  Description of Artificial Sequence: Synthetic oligonucleotide
  Sense strand starting at position 3256 of SEQ ID NO: 1562447
uucuaagguucuguaacuu

SEQ ID NO: 1747732 - RNA, 19 nt, Artificial Sequence
  Description of Artificial Sequence: Synthetic oligonucleotide
  Antisense strand to SEQ ID NO: 1747731
aaguuacagaaccuuagaa

SEQ ID NO: 1747733 - RNA, 19 nt, Artificial Sequence
  Description of Artificial Sequence: Synthetic oligonucleotide
  Sense strand starting at position 3331 of SEQ ID NO: 1562447
uuaguagaauugcuaaucu

SEQ ID NO: 1747734 - RNA, 19 nt, Artificial Sequence
  Description of Artificial Sequence: Synthetic oligonucleotide
  Antisense strand to SEQ ID NO: 1747733
agauuagcaauucuacuaa

SEQ ID NO: 1747735 - RNA, 19 nt, Artificial Sequence
  Description of Artificial Sequence: Synthetic oligonucleotide
  Sense strand starting at position 3398 of SEQ ID NO: 1562447
acuacaaguucugugacuu

SEQ ID NO: 1747736 - RNA, 19 nt, Artificial Sequence
  Description of Artificial Sequence: Synthetic oligonucleotide
  Antisense strand to SEQ ID NO: 1747735
aagucacagaacuuguagu

SEQ ID NO: 1747737 - RNA, 19 nt, Artificial Sequence
  Description of Artificial Sequence: Synthetic oligonucleotide
  Sense strand starting at position 3608 of SEQ ID NO: 1562447
aauauuuggugacaugaaa

SEQ ID NO: 1747738 - RNA, 19 nt, Artificial Sequence
  Description of Artificial Sequence: Synthetic oligonucleotide
  Antisense strand to SEQ ID NO: 1747737
uuucaugucaccaaauauu

SEQ ID NO: 1747739 - RNA, 19 nt, Artificial Sequence
  Description of Artificial Sequence: Synthetic oligonucleotide
  Sense strand starting at position 16 of SEQ ID NO: 1562448
ccaugugaaugguuuauau

SEQ ID NO: 1747740 - RNA, 19 nt, Artificial Sequence
  Description of Artificial Sequence: Synthetic oligonucleotide
  Antisense strand to SEQ ID NO: 1747739
auauaaaccauucacaugg

SEQ ID NO: 1747741 - RNA, 19 nt, Artificial Sequence
  Description of Artificial Sequence: Synthetic oligonucleotide
  Sense strand starting at position 18 of SEQ ID NO: 1562448
augugaaugguuuauaucu

SEQ ID NO: 1747742 - RNA, 19 nt, Artificial Sequence
  Description of Artificial Sequence: Synthetic oligonucleotide
  Antisense strand to SEQ ID NO: 1747741
agauauaaaccauucacau

SEQ ID NO: 1747743 - RNA, 19 nt, Artificial Sequence
  Description of Artificial Sequence: Synthetic oligonucleotide
  Sense strand starting at position 135 of SEQ ID NO: 1562448
gaguuuccacugcauugaa

SEQ ID NO: 1747744 - RNA, 19 nt, Artificial Sequence
  Description of Artificial Sequence: Synthetic oligonucleotide
  Antisense strand to SEQ ID NO: 1747743
uucaaugcaguggaaacuc

SEQ ID NO: 1747745 - RNA, 19 nt, Artificial Sequence
  Description of Artificial Sequence: Synthetic oligonucleotide
  Sense strand starting at position 251 of SEQ ID NO: 1562448
cuuugaaagcuaugauaau

SEQ ID NO: 1747746 - RNA, 19 nt, Artificial Sequence
  Description of Artificial Sequence: Synthetic oligonucleotide
  Antisense strand to SEQ ID NO: 1747745
auuaucauagcuuucaaag

SEQ ID NO: 1747747 - RNA, 19 nt, Artificial Sequence
  Description of Artificial Sequence: Synthetic oligonucleotide
  Sense strand starting at position 575 of SEQ ID NO: 1562448
ggaaguggcaucuaaaucu

SEQ ID NO: 1747748 - RNA, 19 nt, Artificial Sequence
  Description of Artificial Sequence: Synthetic oligonucleotide
  Antisense strand to SEQ ID NO: 1747747
agauuuagaugccacuucc

SEQ ID NO: 1747749 - RNA, 19 nt, Artificial Sequence
  Description of Artificial Sequence: Synthetic oligonucleotide
  Sense strand starting at position 601 of SEQ ID NO: 1562448
uauggaaguucuuuaucug

SEQ ID NO: 1747750 - RNA, 19 nt, Artificial Sequence
  Description of Artificial Sequence: Synthetic oligonucleotide
  Antisense strand to SEQ ID NO: 1747749
cagauaaagaacuuccaua

SEQ ID NO: 1747751 - RNA, 19 nt, Artificial Sequence
  Description of Artificial Sequence: Synthetic oligonucleotide
  Sense strand starting at position 602 of SEQ ID NO: 1562448
auggaaguucuuuaucugu

SEQ ID NO: 1747752 - RNA, 19 nt, Artificial Sequence
  Description of Artificial Sequence: Synthetic oligonucleotide
  Antisense strand to SEQ ID NO: 1747751
acagauaaagaacuuccau

SEQ ID NO: 1747753 - RNA, 19 nt, Artificial Sequence
  Description of Artificial Sequence: Synthetic oligonucleotide
  Sense strand starting at position 604 of SEQ ID NO: 1562448
ggaaguucuuuaucuguag

SEQ ID NO: 1747754 - RNA, 19 nt, Artificial Sequence
  Description of Artificial Sequence: Synthetic oligonucleotide
  Antisense strand to SEQ ID NO: 1747753
cuacagauaaagaacuucc

SEQ ID NO: 1747755 - RNA, 19 nt, Artificial Sequence
  Description of Artificial Sequence: Synthetic oligonucleotide
  Sense strand starting at position 623 of SEQ ID NO: 1562448
uagacauaggcugguuuau

SEQ ID NO: 1747756 - RNA, 19 nt, Artificial Sequence
  Description of Artificial Sequence: Synthetic oligonucleotide
  Antisense strand to SEQ ID NO: 1747755
auaaaccagccuaugucua

SEQ ID NO: 1747757 - RNA, 19 nt, Artificial Sequence
  Description of Artificial Sequence: Synthetic oligonucleotide
  Sense strand starting at position 625 of SEQ ID NO: 1562448
gacauaggcugguuuauau

SEQ ID NO: 1747758 - RNA, 19 nt, Artificial Sequence
  Description of Artificial Sequence: Synthetic oligonucleotide
  Antisense strand to SEQ ID NO: 1747757
auauaaaccagccuauguc

SEQ ID NO: 1747759 - RNA, 19 nt, Artificial Sequence
  Description of Artificial Sequence: Synthetic oligonucleotide
  Sense strand starting at position 1176 of SEQ ID NO: 1562448
uuguauaaugcagagaacu

SEQ ID NO: 1747760 - RNA, 19 nt, Artificial Sequence
  Description of Artificial Sequence: Synthetic oligonucleotide
  Antisense strand to SEQ ID NO: 1747759
aguucucugcauuauacaa

SEQ ID NO: 1747761 - RNA, 19 nt, Artificial Sequence
  Description of Artificial Sequence: Synthetic oligonucleotide
  Sense strand starting at position 1184 of SEQ ID NO: 1562448
ugcagagaacucuaucucu

SEQ ID NO: 1747762 - RNA, 19 nt, Artificial Sequence
  Description of Artificial Sequence: Synthetic oligonucleotide
  Antisense strand to SEQ ID NO: 1747761
agagauagaguucucugca

SEQ ID NO: 1747763 - RNA, 19 nt, Artificial Sequence
  Description of Artificial Sequence: Synthetic oligonucleotide
  Sense strand starting at position 1187 of SEQ ID NO: 1562448
agagaacucuaucucuagu

SEQ ID NO: 1747764 - RNA, 19 nt, Artificial Sequence
  Description of Artificial Sequence: Synthetic oligonucleotide
  Antisense strand to SEQ ID NO: 1747763
acuagagauagaguucucu

SEQ ID NO: 1747765 - RNA, 19 nt, Artificial Sequence
  Description of Artificial Sequence: Synthetic oligonucleotide
  Sense strand starting at position 1267 of SEQ ID NO: 1562448
aaaugaugguguguaucca

SEQ ID NO: 1747766 - RNA, 19 nt, Artificial Sequence
  Description of Artificial Sequence: Synthetic oligonucleotide
  Antisense strand to SEQ ID NO: 1747765
uggauacacaccaucauuu

SEQ ID NO: 1747767 - RNA, 19 nt, Artificial Sequence
  Description of Artificial Sequence: Synthetic oligonucleotide
  Sense strand starting at position 1268 of SEQ ID NO: 1562448
aaugaugguguguauccau

SEQ ID NO: 1747768 - RNA, 19 nt, Artificial Sequence
  Description of Artificial Sequence: Synthetic oligonucleotide
  Antisense strand to SEQ ID NO: 1747767
auggauacacaccaucauu

SEQ ID NO: 1747769 - RNA, 19 nt, Artificial Sequence
  Description of Artificial Sequence: Synthetic oligonucleotide
  Sense strand starting at position 1271 of SEQ ID NO: 1562448
gaugguguguauccauaaa

SEQ ID NO: 1747770 - RNA, 19 nt, Artificial Sequence
  Description of Artificial Sequence: Synthetic oligonucleotide
  Antisense strand to SEQ ID NO: 1747769
uuuauggauacacaccauc

SEQ ID NO: 1747771 - RNA, 19 nt, Artificial Sequence
  Description of Artificial Sequence: Synthetic oligonucleotide
  Sense strand starting at position 1294 of SEQ ID NO: 1562448
ggaaacaguuuauuacagu

SEQ ID NO: 1747772 - RNA, 19 nt, Artificial Sequence
  Description of Artificial Sequence: Synthetic oligonucleotide
  Antisense strand to SEQ ID NO: 1747771
acuguaauaaacuguuucc

SEQ ID NO: 1747773 - RNA, 19 nt, Artificial Sequence
  Description of Artificial Sequence: Synthetic oligonucleotide
  Sense strand starting at position 1311 of SEQ ID NO: 1562448
gugguuagagcauaaacuu

SEQ ID NO: 1747774 - RNA, 19 nt, Artificial Sequence
  Description of Artificial Sequence: Synthetic oligonucleotide
  Antisense strand to SEQ ID NO: 1747773
aaguuuaugcucuaaccac

SEQ ID NO: 1747775 - RNA, 19 nt, Artificial Sequence
  Description of Artificial Sequence: Synthetic oligonucleotide
  Sense strand starting at position 1328 of SEQ ID NO: 1562448
uuugaaagcagccagugau

SEQ ID NO: 1747776 - RNA, 19 nt, Artificial Sequence
  Description of Artificial Sequence: Synthetic oligonucleotide
  Antisense strand to SEQ ID NO: 1747775
aucacuggcugcuuucaaa

SEQ ID NO: 1747777 - RNA, 19 nt, Artificial Sequence
  Description of Artificial Sequence: Synthetic oligonucleotide
  Sense strand starting at position 1393 of SEQ ID NO: 1562448
acugcaaaccuguaguuaa

SEQ ID NO: 1747778 - RNA, 19 nt, Artificial Sequence
  Description of Artificial Sequence: Synthetic oligonucleotide
  Antisense strand to SEQ ID NO: 1747777
uuaacuacagguuugcagu

SEQ ID NO: 1747779 - RNA, 19 nt, Artificial Sequence
  Description of Artificial Sequence: Synthetic oligonucleotide
  Sense strand starting at position 1411 of SEQ ID NO: 1562448
aacuauggguagcuugaaa

SEQ ID NO: 1747780 - RNA, 19 nt, Artificial Sequence
  Description of Artificial Sequence: Synthetic oligonucleotide
  Antisense strand to SEQ ID NO: 1747779
uuucaagcuacccauaguu

SEQ ID NO: 1747781 - RNA, 19 nt, Artificial Sequence
  Description of Artificial Sequence: Synthetic oligonucleotide
  Sense strand starting at position 1462 of SEQ ID NO: 1562448
uugacaaacgcauaaaucu

SEQ ID NO: 1747782 - RNA, 19 nt, Artificial Sequence
  Description of Artificial Sequence: Synthetic oligonucleotide
  Antisense strand to SEQ ID NO: 1747781
agauuuaugcguuugucaa

SEQ ID NO: 1747783 - RNA, 19 nt, Artificial Sequence
  Description of Artificial Sequence: Synthetic oligonucleotide
  Sense strand starting at position 1950 of SEQ ID NO: 1562448
ucaguucuacuagacaugu

SEQ ID NO: 1747784 - RNA, 19 nt, Artificial Sequence
  Description of Artificial Sequence: Synthetic oligonucleotide
  Antisense strand to SEQ ID NO: 1747783
acaugucuaguagaacuga

SEQ ID NO: 1747785 - RNA, 19 nt, Artificial Sequence
  Description of Artificial Sequence: Synthetic oligonucleotide
  Sense strand starting at position 2124 of SEQ ID NO: 1562448
uuaaauuauccugggcaua

SEQ ID NO: 1747786 - RNA, 19 nt, Artificial Sequence
  Description of Artificial Sequence: Synthetic oligonucleotide
  Antisense strand to SEQ ID NO: 1747785
uaugcccaggauaauuuaa

SEQ ID NO: 1747787 - RNA, 19 nt, Artificial Sequence
  Description of Artificial Sequence: Synthetic oligonucleotide
  Sense strand starting at position 2149 of SEQ ID NO: 1562448
aagaguuuacaguaugcua

SEQ ID NO: 1747788 - RNA, 19 nt, Artificial Sequence
  Description of Artificial Sequence: Synthetic oligonucleotide
  Antisense strand to SEQ ID NO: 1747787
uagcauacuguaaacucuu

SEQ ID NO: 1747789 - RNA, 19 nt, Artificial Sequence
  Description of Artificial Sequence: Synthetic oligonucleotide
  Sense strand starting at position 2187 of SEQ ID NO: 1562448
acaguaaagccaggaauua

SEQ ID NO: 1747790 - RNA, 19 nt, Artificial Sequence
  Description of Artificial Sequence: Synthetic oligonucleotide
  Antisense strand to SEQ ID NO: 1747789
uaauuccuggcuuuacugu

SEQ ID NO: 1747791 - RNA, 19 nt, Artificial Sequence
  Description of Artificial Sequence: Synthetic oligonucleotide
  Sense strand starting at position 2256 of SEQ ID NO: 1562448
uaaacaagaguuuaagugu

SEQ ID NO: 1747792 - RNA, 19 nt, Artificial Sequence
  Description of Artificial Sequence: Synthetic oligonucleotide
  Antisense strand to SEQ ID NO: 1747791
acacuuaaacucuuguuua

SEQ ID NO: 1747793 - RNA, 19 nt, Artificial Sequence
  Description of Artificial Sequence: Synthetic oligonucleotide
  Sense strand starting at position 2304 of SEQ ID NO: 1562448
ccucaagagguauguugaa

SEQ ID NO: 1747794 - RNA, 19 nt, Artificial Sequence
  Description of Artificial Sequence: Synthetic oligonucleotide
  Antisense strand to SEQ ID NO: 1747793
uucaacauaccucuugagg

SEQ ID NO: 1747795 - RNA, 19 nt, Artificial Sequence
  Description of Artificial Sequence: Synthetic oligonucleotide
  Sense strand starting at position 2370 of SEQ ID NO: 1562448
aacuguguugguuacagau

SEQ ID NO: 1747796 - RNA, 19 nt, Artificial Sequence
  Description of Artificial Sequence: Synthetic oligonucleotide
  Antisense strand to SEQ ID NO: 1747795
aucuguaaccaacacaguu

SEQ ID NO: 1747797 - RNA, 19 nt, Artificial Sequence
  Description of Artificial Sequence: Synthetic oligonucleotide
  Sense strand starting at position 2414 of SEQ ID NO: 1562448
gguaccaccucccuuuaua

SEQ ID NO: 1747798 - RNA, 19 nt, Artificial Sequence
  Description of Artificial Sequence: Synthetic oligonucleotide
  Antisense strand to SEQ ID NO: 1747797
uauaaagggaggugguacc

SEQ ID NO: 1747799 - RNA, 19 nt, Artificial Sequence
  Description of Artificial Sequence: Synthetic oligonucleotide
  Sense strand starting at position 2433 of SEQ ID NO: 1562448
agaaauacagucugcucua

SEQ ID NO: 1747800 - RNA, 19 nt, Artificial Sequence
  Description of Artificial Sequence: Synthetic oligonucleotide
  Antisense strand to SEQ ID NO: 1747799
uagagcagacuguauuucu

SEQ ID NO: 1747801 - RNA, 19 nt, Artificial Sequence
  Description of Artificial Sequence: Synthetic oligonucleotide
  Sense strand starting at position 2457 of SEQ ID NO: 1562448
cuuucucaacuguaaagua

SEQ ID NO: 1747802 - RNA, 19 nt, Artificial Sequence
  Description of Artificial Sequence: Synthetic oligonucleotide
  Antisense strand to SEQ ID NO: 1747801
uacuuuacaguugagaaag

SEQ ID NO: 1747803 - RNA, 19 nt, Artificial Sequence
  Description of Artificial Sequence: Synthetic oligonucleotide
  Sense strand starting at position 2531 of SEQ ID NO: 1562448
aucguuucuccacaauaag

SEQ ID NO: 1747804 - RNA, 19 nt, Artificial Sequence
  Description of Artificial Sequence: Synthetic oligonucleotide
  Antisense strand to SEQ ID NO: 1747803
cuuauuguggagaaacgau

SEQ ID NO: 1747805 - RNA, 19 nt, Artificial Sequence
  Description of Artificial Sequence: Synthetic oligonucleotide
  Sense strand starting at position 2733 of SEQ ID NO: 1562448
uggagagcaucucugggau

SEQ ID NO: 1747806 - RNA, 19 nt, Artificial Sequence
  Description of Artificial Sequence: Synthetic oligonucleotide
  Antisense strand to SEQ ID NO: 1747805
aucccagagaugcucucca

SEQ ID NO: 1747807 - RNA, 19 nt, Artificial Sequence
  Description of Artificial Sequence: Synthetic oligonucleotide
  Sense strand starting at position 2885 of SEQ ID NO: 1562448
gggaaucucugaucccaau

SEQ ID NO: 1747808 - RNA, 19 nt, Artificial Sequence
  Description of Artificial Sequence: Synthetic oligonucleotide
  Antisense strand to SEQ ID NO: 1747807
auugggaucagagauuccc

SEQ ID NO: 1747809 - RNA, 19 nt, Artificial Sequence
  Description of Artificial Sequence: Synthetic oligonucleotide
  Sense strand starting at position 3192 of SEQ ID NO: 1562448
ggccuuugucuugcaucga

SEQ ID NO: 1747810 - RNA, 19 nt, Artificial Sequence
  Description of Artificial Sequence: Synthetic oligonucleotide
  Antisense strand to SEQ ID NO: 1747809
ucgaugcaagacaaaggcc

SEQ ID NO: 1747811 - RNA, 19 nt, Artificial Sequence
  Description of Artificial Sequence: Synthetic oligonucleotide
  Sense strand starting at position 3450 of SEQ ID NO: 1562448
gagacuuaguggcuuuaga

SEQ ID NO: 1747812 - RNA, 19 nt, Artificial Sequence
  Description of Artificial Sequence: Synthetic oligonucleotide
  Antisense strand to SEQ ID NO: 1747811
ucuaaagccacuaagucuc

SEQ ID NO: 1747813 - RNA, 19 nt, Artificial Sequence
  Description of Artificial Sequence: Synthetic oligonucleotide
  Sense strand starting at position 3457 of SEQ ID NO: 1562448
aguggcuuuagaugagacu

SEQ ID NO: 1747814 - RNA, 19 nt, Artificial Sequence
  Description of Artificial Sequence: Synthetic oligonucleotide
  Antisense strand to SEQ ID NO: 1747813
agucucaucuaaagccacu

SEQ ID NO: 1747815 - RNA, 19 nt, Artificial Sequence
  Description of Artificial Sequence: Synthetic oligonucleotide
  Sense strand starting at position 3612 of SEQ ID NO: 1562448
guaaucucuuauuccagga

SEQ ID NO: 1747816 - RNA, 19 nt, Artificial Sequence
  Description of Artificial Sequence: Synthetic oligonucleotide
  Antisense strand to SEQ ID NO: 1747815
uccuggaauaagagauuac

SEQ ID NO: 1747817 - RNA, 19 nt, Artificial Sequence
  Description of Artificial Sequence: Synthetic oligonucleotide
  Sense strand starting at position 3871 of SEQ ID NO: 1562448
gugccagcucagcuguaau

SEQ ID NO: 1747818 - RNA, 19 nt, Artificial Sequence
  Description of Artificial Sequence: Synthetic oligonucleotide
  Antisense strand to SEQ ID NO: 1747817
auuacagcugagcuggcac

SEQ ID NO: 1747819 - RNA, 19 nt, Artificial Sequence
  Description of Artificial Sequence: Synthetic oligonucleotide
  Sense strand starting at position 167 of SEQ ID NO: 1562449
cugagacugccagagguau

SEQ ID NO: 1747820 - RNA, 19 nt, Artificial Sequence
  Description of Artificial Sequence: Synthetic oligonucleotide
  Antisense strand to SEQ ID NO: 1747819
auaccucuggcagucucag

SEQ ID NO: 1747821 - RNA, 19 nt, Artificial Sequence
  Description of Artificial Sequence: Synthetic oligonucleotide
  Sense strand starting at position 180 of SEQ ID NO: 1562449
agguaugugacuugcucca

SEQ ID NO: 1747822 - RNA, 19 nt, Artificial Sequence
  Description of Artificial Sequence: Synthetic oligonucleotide
  Antisense strand to SEQ ID NO: 1747821
uggagcaagucacauaccu

SEQ ID NO: 1747823 - RNA, 19 nt, Artificial Sequence
  Description of Artificial Sequence: Synthetic oligonucleotide
  Sense strand starting at position 185 of SEQ ID NO: 1562449
ugugacuugcuccaaguga

SEQ ID NO: 1747824 - RNA, 19 nt, Artificial Sequence
  Description of Artificial Sequence: Synthetic oligonucleotide
  Antisense strand to SEQ ID NO: 1747823
ucacuuggagcaagucaca

SEQ ID NO: 1747825 - RNA, 19 nt, Artificial Sequence
  Description of Artificial Sequence: Synthetic oligonucleotide
  Sense strand starting at position 262 of SEQ ID NO: 1562449
cacgguucuaggugugauc

SEQ ID NO: 1747826 - RNA, 19 nt, Artificial Sequence
  Description of Artificial Sequence: Synthetic oligonucleotide
  Antisense strand to SEQ ID NO: 1747825
gaucacaccuagaaccgug

SEQ ID NO: 1747827 - RNA, 19 nt, Artificial Sequence
  Description of Artificial Sequence: Synthetic oligonucleotide
  Sense strand starting at position 757 of SEQ ID NO: 1562449
gaggaaugguuucucugag

SEQ ID NO: 1747828 - RNA, 19 nt, Artificial Sequence
  Description of Artificial Sequence: Synthetic oligonucleotide
  Antisense strand to SEQ ID NO: 1747827
cucagagaaaccauuccuc

SEQ ID NO: 1747829 - RNA, 19 nt, Artificial Sequence
  Description of Artificial Sequence: Synthetic oligonucleotide
  Sense strand starting at position 758 of SEQ ID NO: 1562449
aggaaugguuucucugagu

SEQ ID NO: 1747830 - RNA, 19 nt, Artificial Sequence
  Description of Artificial Sequence: Synthetic oligonucleotide
  Antisense strand to SEQ ID NO: 1747829
acucagagaaaccauuccu

SEQ ID NO: 1747831 - RNA, 19 nt, Artificial Sequence
  Description of Artificial Sequence: Synthetic oligonucleotide
  Sense strand starting at position 763 of SEQ ID NO: 1562449
ugguuucucugaguggaaa

SEQ ID NO: 1747832 - RNA, 19 nt, Artificial Sequence
  Description of Artificial Sequence: Synthetic oligonucleotide
  Antisense strand to SEQ ID NO: 1747831
uuuccacucagagaaacca

SEQ ID NO: 1747833 - RNA, 19 nt, Artificial Sequence
  Description of Artificial Sequence: Synthetic oligonucleotide
  Sense strand starting at position 764 of SEQ ID NO: 1562449
gguuucucugaguggaaau

SEQ ID NO: 1747834 - RNA, 19 nt, Artificial Sequence
  Description of Artificial Sequence: Synthetic oligonucleotide
  Antisense strand to SEQ ID NO: 1747833
auuuccacucagagaaacc

SEQ ID NO: 1747835 - RNA, 19 nt, Artificial Sequence
  Description of Artificial Sequence: Synthetic oligonucleotide
  Sense strand starting at position 765 of SEQ ID NO: 1562449
guuucucugaguggaaaug

SEQ ID NO: 1747836 - RNA, 19 nt, Artificial Sequence
  Description of Artificial Sequence: Synthetic oligonucleotide
  Antisense strand to SEQ ID NO: 1747835
cauuuccacucagagaaac

SEQ ID NO: 1747837 - RNA, 19 nt, Artificial Sequence
  Description of Artificial Sequence: Synthetic oligonucleotide
  Sense strand starting at position 866 of SEQ ID NO: 1562449
gccacacauuuccuguuua

SEQ ID NO: 1747838 - RNA, 19 nt, Artificial Sequence
  Description of Artificial Sequence: Synthetic oligonucleotide
  Antisense strand to SEQ ID NO: 1747837
uaaacaggaaauguguggc

SEQ ID NO: 1747839 - RNA, 19 nt, Artificial Sequence
  Description of Artificial Sequence: Synthetic oligonucleotide
  Sense strand starting at position 906 of SEQ ID NO: 1562449
gagugcucacgccuauagu

SEQ ID NO: 1747840 - RNA, 19 nt, Artificial Sequence
  Description of Artificial Sequence: Synthetic oligonucleotide
  Antisense strand to SEQ ID NO: 1747839
acuauaggcgugagcacuc

SEQ ID NO: 1747841 - RNA, 19 nt, Artificial Sequence
  Description of Artificial Sequence: Synthetic oligonucleotide
  Sense strand starting at position 1259 of SEQ ID NO: 1562449
aagcaugaagcaugacaga

SEQ ID NO: 1747842 - RNA, 19 nt, Artificial Sequence
  Description of Artificial Sequence: Synthetic oligonucleotide
  Antisense strand to SEQ ID NO: 1747841
ucugucaugcuucaugcuu

SEQ ID NO: 1747843 - RNA, 19 nt, Artificial Sequence
  Description of Artificial Sequence: Synthetic oligonucleotide
  Sense strand starting at position 2001 of SEQ ID NO: 1562449
ugccucuugacaggaagua

SEQ ID NO: 1747844 - RNA, 19 nt, Artificial Sequence
  Description of Artificial Sequence: Synthetic oligonucleotide
  Antisense strand to SEQ ID NO: 1747843
uacuuccugucaagaggca

SEQ ID NO: 1747845 - RNA, 19 nt, Artificial Sequence
  Description of Artificial Sequence: Synthetic oligonucleotide
  Sense strand starting at position 2002 of SEQ ID NO: 1562449
gccucuugacaggaaguaa

SEQ ID NO: 1747846 - RNA, 19 nt, Artificial Sequence
  Description of Artificial Sequence: Synthetic oligonucleotide
  Antisense strand to SEQ ID NO: 1747845
uuacuuccugucaagaggc

SEQ ID NO: 1747847 - RNA, 19 nt, Artificial Sequence
  Description of Artificial Sequence: Synthetic oligonucleotide
  Sense strand starting at position 2312 of SEQ ID NO: 1562449
caggauguauuagaaagga

SEQ ID NO: 1747848 - RNA, 19 nt, Artificial Sequence
  Description of Artificial Sequence: Synthetic oligonucleotide
  Antisense strand to SEQ ID NO: 1747847
uccuuucuaauacauccug

SEQ ID NO: 1747849 - RNA, 19 nt, Artificial Sequence
  Description of Artificial Sequence: Synthetic oligonucleotide
  Sense strand starting at position 2316 of SEQ ID NO: 1562449
auguauuagaaaggaguau

SEQ ID NO: 1747850 - RNA, 19 nt, Artificial Sequence
  Description of Artificial Sequence: Synthetic oligonucleotide
  Antisense strand to SEQ ID NO: 1747849
auacuccuuucuaauacau

SEQ ID NO: 1747851 - RNA, 19 nt, Artificial Sequence
  Description of Artificial Sequence: Synthetic oligonucleotide
  Sense strand starting at position 2498 of SEQ ID NO: 1562449
cagcuccugucccugagau

SEQ ID NO: 1747852 - RNA, 19 nt, Artificial Sequence
  Description of Artificial Sequence: Synthetic oligonucleotide
  Antisense strand to SEQ ID NO: 1747851
aucucagggacaggagcug

SEQ ID NO: 1747853 - RNA, 19 nt, Artificial Sequence
  Description of Artificial Sequence: Synthetic oligonucleotide
  Sense strand starting at position 2517 of SEQ ID NO: 1562449
gcaaauuaauguucucaug

SEQ ID NO: 1747854 - RNA, 19 nt, Artificial Sequence
  Description of Artificial Sequence: Synthetic oligonucleotide
  Antisense strand to SEQ ID NO: 1747853
caugagaacauuaauuugc

SEQ ID NO: 1747855 - RNA, 19 nt, Artificial Sequence
  Description of Artificial Sequence: Synthetic oligonucleotide
  Sense strand starting at position 2606 of SEQ ID NO: 1562449
cauugacaucgcugggcau

SEQ ID NO: 1747856 - RNA, 19 nt, Artificial Sequence
  Description of Artificial Sequence: Synthetic oligonucleotide
  Antisense strand to SEQ ID NO: 1747855
augcccagcgaugucaaug

SEQ ID NO: 1747857 - RNA, 19 nt, Artificial Sequence
  Description of Artificial Sequence: Synthetic oligonucleotide
  Sense strand starting at position 2610 of SEQ ID NO: 1562449
gacaucgcugggcaugaua

SEQ ID NO: 1747858 - RNA, 19 nt, Artificial Sequence
  Description of Artificial Sequence: Synthetic oligonucleotide
  Antisense strand to SEQ ID NO: 1747857
uaucaugcccagcgauguc

SEQ ID NO: 1747859 - RNA, 19 nt, Artificial Sequence
  Description of Artificial Sequence: Synthetic oligonucleotide
  Sense strand starting at position 2633 of SEQ ID NO: 1562449
ccgccagugcuguugcuua

SEQ ID NO: 1747860 - RNA, 19 nt, Artificial Sequence
  Description of Artificial Sequence: Synthetic oligonucleotide
  Antisense strand to SEQ ID NO: 1747859
uaagcaacagcacuggcgg

SEQ ID NO: 1747861 - RNA, 19 nt, Artificial Sequence
  Description of Artificial Sequence: Synthetic oligonucleotide
  Sense strand starting at position 2656 of SEQ ID NO: 1562449
cucaauacccuucgagaaa

SEQ ID NO: 1747862 - RNA, 19 nt, Artificial Sequence
  Description of Artificial Sequence: Synthetic oligonucleotide
  Antisense strand to SEQ ID NO: 1747861
uuucucgaaggguauugag

SEQ ID NO: 1747863 - RNA, 19 nt, Artificial Sequence
  Description of Artificial Sequence: Synthetic oligonucleotide
  Sense strand starting at position 2737 of SEQ ID NO: 1562449
gaaagauacuaacagguuu

SEQ ID NO: 1747864 - RNA, 19 nt, Artificial Sequence
  Description of Artificial Sequence: Synthetic oligonucleotide
  Antisense strand to SEQ ID NO: 1747863
aaaccuguuaguaucuuuc

SEQ ID NO: 1747865 - RNA, 19 nt, Artificial Sequence
  Description of Artificial Sequence: Synthetic oligonucleotide
  Sense strand starting at position 2792 of SEQ ID NO: 1562449
ucccauacagaucgacaua

SEQ ID NO: 1747866 - RNA, 19 nt, Artificial Sequence
  Description of Artificial Sequence: Synthetic oligonucleotide
  Antisense strand to SEQ ID NO: 1747865
uaugucgaucuguauggga

SEQ ID NO: 1747867 - RNA, 19 nt, Artificial Sequence
  Description of Artificial Sequence: Synthetic oligonucleotide
  Sense strand starting at position 3013 of SEQ ID NO: 1562449
agcccaugucaugagucau

SEQ ID NO: 1747868 - RNA, 19 nt, Artificial Sequence
  Description of Artificial Sequence: Synthetic oligonucleotide
  Antisense strand to SEQ ID NO: 1747867
augacucaugacaugggcu

SEQ ID NO: 1747869 - RNA, 19 nt, Artificial Sequence
  Description of Artificial Sequence: Synthetic oligonucleotide
  Sense strand starting at position 3165 of SEQ ID NO: 1562449
aggugaguaauggaugcaa

SEQ ID NO: 1747870 - RNA, 19 nt, Artificial Sequence
  Description of Artificial Sequence: Synthetic oligonucleotide
  Antisense strand to SEQ ID NO: 1747869
uugcauccauuacucaccu

SEQ ID NO: 1747871 - RNA, 19 nt, Artificial Sequence
  Description of Artificial Sequence: Synthetic oligonucleotide
  Sense strand starting at position 3167 of SEQ ID NO: 1562449
gugaguaauggaugcaaga

SEQ ID NO: 1747872 - RNA, 19 nt, Artificial Sequence
  Description of Artificial Sequence: Synthetic oligonucleotide
  Antisense strand to SEQ ID NO: 1747871
ucuugcauccauuacucac

SEQ ID NO: 1747873 - RNA, 19 nt, Artificial Sequence
  Description of Artificial Sequence: Synthetic oligonucleotide
  Sense strand starting at position 3189 of SEQ ID NO: 1562449
gguaaacaugagcaagguu

SEQ ID NO: 1747874 - RNA, 19 nt, Artificial Sequence
  Description of Artificial Sequence: Synthetic oligonucleotide
  Antisense strand to SEQ ID NO: 1747873
aaccuugcucauguuuacc

SEQ ID NO: 1747875 - RNA, 19 nt, Artificial Sequence
  Description of Artificial Sequence: Synthetic oligonucleotide
  Sense strand starting at position 3233 of SEQ ID NO: 1562449
gccaucagagcucaaggaa

SEQ ID NO: 1747876 - RNA, 19 nt, Artificial Sequence
  Description of Artificial Sequence: Synthetic oligonucleotide
  Antisense strand to SEQ ID NO: 1747875
uuccuugagcucugauggc

SEQ ID NO: 1747877 - RNA, 19 nt, Artificial Sequence
  Description of Artificial Sequence: Synthetic oligonucleotide
  Sense strand starting at position 3236 of SEQ ID NO: 1562449
aucagagcucaaggaaguu

SEQ ID NO: 1747878 - RNA, 19 nt, Artificial Sequence
  Description of Artificial Sequence: Synthetic oligonucleotide
  Antisense strand to SEQ ID NO: 1747877
aacuuccuugagcucugau

SEQ ID NO: 1747879 - RNA, 19 nt, Artificial Sequence
  Description of Artificial Sequence: Synthetic oligonucleotide
  Sense strand starting at position 3242 of SEQ ID NO: 1562449
gcucaaggaaguugucauu

SEQ ID NO: 1747880 - RNA, 19 nt, Artificial Sequence
  Description of Artificial Sequence: Synthetic oligonucleotide
  Antisense strand to SEQ ID NO: 1747879
aaugacaacuuccuugagc

SEQ ID NO: 1747881 - RNA, 19 nt, Artificial Sequence
  Description of Artificial Sequence: Synthetic oligonucleotide
  Sense strand starting at position 3245 of SEQ ID NO: 1562449
caaggaaguugucauuugu

SEQ ID NO: 1747882 - RNA, 19 nt, Artificial Sequence
  Description of Artificial Sequence: Synthetic oligonucleotide
  Antisense strand to SEQ ID NO: 1747881
acaaaugacaacuuccuug

SEQ ID NO: 1747883 - RNA, 19 nt, Artificial Sequence
  Description of Artificial Sequence: Synthetic oligonucleotide
  Sense strand starting at position 3288 of SEQ ID NO: 1562449
ugggcuauguaucuuggaa

SEQ ID NO: 1747884 - RNA, 19 nt, Artificial Sequence
  Description of Artificial Sequence: Synthetic oligonucleotide
  Antisense strand to SEQ ID NO: 1747883
uuccaagauacauagccca

SEQ ID NO: 1747885 - RNA, 19 nt, Artificial Sequence
  Description of Artificial Sequence: Synthetic oligonucleotide
  Sense strand starting at position 3477 of SEQ ID NO: 1562449
ugcgacguaagauaagaaa

SEQ ID NO: 1747886 - RNA, 19 nt, Artificial Sequence
  Description of Artificial Sequence: Synthetic oligonucleotide
  Antisense strand to SEQ ID NO: 1747885
uuucuuaucuuacgucgca

SEQ ID NO: 1747887 - RNA, 19 nt, Artificial Sequence
  Description of Artificial Sequence: Synthetic oligonucleotide
  Sense strand starting at position 3578 of SEQ ID NO: 1562449
acauaaaucggguggguga

SEQ ID NO: 1747888 - RNA, 19 nt, Artificial Sequence
  Description of Artificial Sequence: Synthetic oligonucleotide
  Antisense strand to SEQ ID NO: 1747887
ucacccacccgauuuaugu

SEQ ID NO: 1747889 - RNA, 19 nt, Artificial Sequence
  Description of Artificial Sequence: Synthetic oligonucleotide
  Sense strand starting at position 3579 of SEQ ID NO: 1562449
cauaaaucgggugggugau

SEQ ID NO: 1747890 - RNA, 19 nt, Artificial Sequence
  Description of Artificial Sequence: Synthetic oligonucleotide
  Antisense strand to SEQ ID NO: 1747889
aucacccacccgauuuaug

SEQ ID NO: 1747891 - RNA, 19 nt, Artificial Sequence
  Description of Artificial Sequence: Synthetic oligonucleotide
  Sense strand starting at position 3596 of SEQ ID NO: 1562449
augagcuucuuauuugcau

SEQ ID NO: 1747892 - RNA, 19 nt, Artificial Sequence
  Description of Artificial Sequence: Synthetic oligonucleotide
  Antisense strand to SEQ ID NO: 1747891
augcaaauaagaagcucau

SEQ ID NO: 1747893 - RNA, 19 nt, Artificial Sequence
  Description of Artificial Sequence: Synthetic oligonucleotide
  Sense strand starting at position 3602 of SEQ ID NO: 1562449
uucuuauuugcauggcuca

SEQ ID NO: 1747894 - RNA, 19 nt, Artificial Sequence
  Description of Artificial Sequence: Synthetic oligonucleotide
  Antisense strand to SEQ ID NO: 1747893
ugagccaugcaaauaagaa

SEQ ID NO: 1747895 - RNA, 19 nt, Artificial Sequence
  Description of Artificial Sequence: Synthetic oligonucleotide
  Sense strand starting at position 3622 of SEQ ID NO: 1562449
gcaaauaugccaugauguu

SEQ ID NO: 1747896 - RNA, 19 nt, Artificial Sequence
  Description of Artificial Sequence: Synthetic oligonucleotide
  Antisense strand to SEQ ID NO: 1747895
aacaucauggcauauuugc

SEQ ID NO: 1747897 - RNA, 19 nt, Artificial Sequence
  Description of Artificial Sequence: Synthetic oligonucleotide
  Sense strand starting at position 3920 of SEQ ID NO: 1562449
ugucaagucccaggaaagu

SEQ ID NO: 1747898 - RNA, 19 nt, Artificial Sequence
  Description of Artificial Sequence: Synthetic oligonucleotide
  Antisense strand to SEQ ID NO: 1747897
acuuuccugggacuugaca

SEQ ID NO: 1747899 - RNA, 19 nt, Artificial Sequence
  Description of Artificial Sequence: Synthetic oligonucleotide
  Sense strand starting at position 1168 of SEQ ID NO: 1562450
ccuguaacuuacuucugga

SEQ ID NO: 1747900 - RNA, 19 nt, Artificial Sequence
  Description of Artificial Sequence: Synthetic oligonucleotide
  Antisense strand to SEQ ID NO: 1747899
uccagaaguaaguuacagg

SEQ ID NO: 1747901 - RNA, 19 nt, Artificial Sequence
  Description of Artificial Sequence: Synthetic oligonucleotide
  Sense strand starting at position 2061 of SEQ ID NO: 1562450
gagacaggcugugucgauu

SEQ ID NO: 1747902 - RNA, 19 nt, Artificial Sequence
  Description of Artificial Sequence: Synthetic oligonucleotide
  Antisense strand to SEQ ID NO: 1747901
aaucgacacagccugucuc

SEQ ID NO: 1747903 - RNA, 19 nt, Artificial Sequence
  Description of Artificial Sequence: Synthetic oligonucleotide
  Sense strand starting at position 2228 of SEQ ID NO: 1562450
cgguggugcggcuuuagau

SEQ ID NO: 1747904 - RNA, 19 nt, Artificial Sequence
  Description of Artificial Sequence: Synthetic oligonucleotide
  Antisense strand to SEQ ID NO: 1747903
aucuaaagccgcaccaccg

SEQ ID NO: 1747905 - RNA, 19 nt, Artificial Sequence
  Description of Artificial Sequence: Synthetic oligonucleotide
  Sense strand starting at position 2284 of SEQ ID NO: 1562450
gcggguugugggaguaauu

SEQ ID NO: 1747906 - RNA, 19 nt, Artificial Sequence
  Description of Artificial Sequence: Synthetic oligonucleotide
  Antisense strand to SEQ ID NO: 1747905
aauuacucccacaacccgc

SEQ ID NO: 1747907 - RNA, 19 nt, Artificial Sequence
  Description of Artificial Sequence: Synthetic oligonucleotide
  Sense strand starting at position 2286 of SEQ ID NO: 1562450
ggguugugggaguaauugu

SEQ ID NO: 1747908 - RNA, 19 nt, Artificial Sequence
  Description of Artificial Sequence: Synthetic oligonucleotide
  Antisense strand to SEQ ID NO: 1747907
acaauuacucccacaaccc

SEQ ID NO: 1747909 - RNA, 19 nt, Artificial Sequence
  Description of Artificial Sequence: Synthetic oligonucleotide
  Sense strand starting at position 2542 of SEQ ID NO: 1562450
gggcuagaucuccgcccau

SEQ ID NO: 1747910 - RNA, 19 nt, Artificial Sequence
  Description of Artificial Sequence: Synthetic oligonucleotide
  Antisense strand to SEQ ID NO: 1747909
augggcggagaucuagccc

SEQ ID NO: 1747911 - RNA, 19 nt, Artificial Sequence
  Description of Artificial Sequence: Synthetic oligonucleotide
  Sense strand starting at position 2679 of SEQ ID NO: 1562450
guguaauugacagacggua

SEQ ID NO: 1747912 - RNA, 19 nt, Artificial Sequence
  Description of Artificial Sequence: Synthetic oligonucleotide
  Antisense strand to SEQ ID NO: 1747911
uaccgucugucaauuacac

SEQ ID NO: 1747913 - RNA, 19 nt, Artificial Sequence
  Description of Artificial Sequence: Synthetic oligonucleotide
  Sense strand starting at position 2732 of SEQ ID NO: 1562450
cggauacuccugugaaacc

SEQ ID NO: 1747914 - RNA, 19 nt, Artificial Sequence
  Description of Artificial Sequence: Synthetic oligonucleotide
  Antisense strand to SEQ ID NO: 1747913
gguuucacaggaguauccg

SEQ ID NO: 1747915 - RNA, 19 nt, Artificial Sequence
  Description of Artificial Sequence: Synthetic oligonucleotide
  Sense strand starting at position 2733 of SEQ ID NO: 1562450
ggauacuccugugaaacca

SEQ ID NO: 1747916 - RNA, 19 nt, Artificial Sequence
  Description of Artificial Sequence: Synthetic oligonucleotide
  Antisense strand to SEQ ID NO: 1747915
ugguuucacaggaguaucc

SEQ ID NO: 1747917 - RNA, 19 nt, Artificial Sequence
  Description of Artificial Sequence: Synthetic oligonucleotide
  Sense strand starting at position 2942 of SEQ ID NO: 1562450
uugagauuugccugcguca

SEQ ID NO: 1747918 - RNA, 19 nt, Artificial Sequence
  Description of Artificial Sequence: Synthetic oligonucleotide
  Antisense strand to SEQ ID NO: 1747917
ugacgcaggcaaaucucaa

SEQ ID NO: 1747919 - RNA, 19 nt, Artificial Sequence
  Description of Artificial Sequence: Synthetic oligonucleotide
  Sense strand starting at position 2944 of SEQ ID NO: 1562450
gagauuugccugcgucauu

SEQ ID NO: 1747920 - RNA, 19 nt, Artificial Sequence
  Description of Artificial Sequence: Synthetic oligonucleotide
  Antisense strand to SEQ ID NO: 1747919
aaugacgcaggcaaaucuc

SEQ ID NO: 1747921 - RNA, 19 nt, Artificial Sequence
  Description of Artificial Sequence: Synthetic oligonucleotide
  Sense strand starting at position 2954 of SEQ ID NO: 1562450
ugcgucauuugguuuguca

SEQ ID NO: 1747922 - RNA, 19 nt, Artificial Sequence
  Description of Artificial Sequence: Synthetic oligonucleotide
  Antisense strand to SEQ ID NO: 1747921
ugacaaaccaaaugacgca

SEQ ID NO: 1747923 - RNA, 19 nt, Artificial Sequence
  Description of Artificial Sequence: Synthetic oligonucleotide
  Sense strand starting at position 2956 of SEQ ID NO: 1562450
cgucauuugguuugucaau

SEQ ID NO: 1747924 - RNA, 19 nt, Artificial Sequence
  Description of Artificial Sequence: Synthetic oligonucleotide
  Antisense strand to SEQ ID NO: 1747923
auugacaaaccaaaugacg

SEQ ID NO: 1747925 - RNA, 19 nt, Artificial Sequence
  Description of Artificial Sequence: Synthetic oligonucleotide
  Sense strand starting at position 2957 of SEQ ID NO: 1562450
gucauuugguuugucaaug

SEQ ID NO: 1747926 - RNA, 19 nt, Artificial Sequence
  Description of Artificial Sequence: Synthetic oligonucleotide
  Antisense strand to SEQ ID NO: 1747925
cauugacaaaccaaaugac

SEQ ID NO: 1747927 - RNA, 19 nt, Artificial Sequence
  Description of Artificial Sequence: Synthetic oligonucleotide
  Sense strand starting at position 2963 of SEQ ID NO: 1562450
ugguuugucaaugcguauu

SEQ ID NO: 1747928 - RNA, 19 nt, Artificial Sequence
  Description of Artificial Sequence: Synthetic oligonucleotide
  Antisense strand to SEQ ID NO: 1747927
aauacgcauugacaaacca

SEQ ID NO: 1747929 - RNA, 19 nt, Artificial Sequence
  Description of Artificial Sequence: Synthetic oligonucleotide
  Sense strand starting at position 2996 of SEQ ID NO: 1562450
augguacuccaguguauga

SEQ ID NO: 1747930 - RNA, 19 nt, Artificial Sequence
  Description of Artificial Sequence: Synthetic oligonucleotide
  Antisense strand to SEQ ID NO: 1747929
ucauacacuggaguaccau

SEQ ID NO: 1747931 - RNA, 19 nt, Artificial Sequence
  Description of Artificial Sequence: Synthetic oligonucleotide
  Sense strand starting at position 2998 of SEQ ID NO: 1562450
gguacuccaguguaugaau

SEQ ID NO: 1747932 - RNA, 19 nt, Artificial Sequence
  Description of Artificial Sequence: Synthetic oligonucleotide
  Antisense strand to SEQ ID NO: 1747931
auucauacacuggaguacc

SEQ ID NO: 1747933 - RNA, 19 nt, Artificial Sequence
  Description of Artificial Sequence: Synthetic oligonucleotide
  Sense strand starting at position 3006 of SEQ ID NO: 1562450
aguguaugaauguaccaca

SEQ ID NO: 1747934 - RNA, 19 nt, Artificial Sequence
  Description of Artificial Sequence: Synthetic oligonucleotide
  Antisense strand to SEQ ID NO: 1747933
ugugguacauucauacacu

SEQ ID NO: 1747935 - RNA, 19 nt, Artificial Sequence
  Description of Artificial Sequence: Synthetic oligonucleotide
  Sense strand starting at position 3106 of SEQ ID NO: 1562450
ugcacaagucuuuggauga

SEQ ID NO: 1747936 - RNA, 19 nt, Artificial Sequence
  Description of Artificial Sequence: Synthetic oligonucleotide
  Antisense strand to SEQ ID NO: 1747935
ucauccaaagacuugugca

SEQ ID NO: 1747937 - RNA, 19 nt, Artificial Sequence
  Description of Artificial Sequence: Synthetic oligonucleotide
  Sense strand starting at position 3133 of SEQ ID NO: 1562450
cuuucucuugaauagaugu

SEQ ID NO: 1747938 - RNA, 19 nt, Artificial Sequence
  Description of Artificial Sequence: Synthetic oligonucleotide
  Antisense strand to SEQ ID NO: 1747937
acaucuauucaagagaaag

SEQ ID NO: 1747939 - RNA, 19 nt, Artificial Sequence
  Description of Artificial Sequence: Synthetic oligonucleotide
  Sense strand starting at position 3144 of SEQ ID NO: 1562450
auagaugucuaggagugga

SEQ ID NO: 1747940 - RNA, 19 nt, Artificial Sequence
  Description of Artificial Sequence: Synthetic oligonucleotide
  Antisense strand to SEQ ID NO: 1747939
uccacuccuagacaucuau

SEQ ID NO: 1747941 - RNA, 19 nt, Artificial Sequence
  Description of Artificial Sequence: Synthetic oligonucleotide
  Sense strand starting at position 3176 of SEQ ID NO: 1562450
acgguagccauaugugaaa

SEQ ID NO: 1747942 - RNA, 19 nt, Artificial Sequence
  Description of Artificial Sequence: Synthetic oligonucleotide
  Antisense strand to SEQ ID NO: 1747941
uuucacauauggcuaccgu

SEQ ID NO: 1747943 - RNA, 19 nt, Artificial Sequence
  Description of Artificial Sequence: Synthetic oligonucleotide
  Sense strand starting at position 3178 of SEQ ID NO: 1562450
gguagccauaugugaaacu

SEQ ID NO: 1747944 - RNA, 19 nt, Artificial Sequence
  Description of Artificial Sequence: Synthetic oligonucleotide
  Antisense strand to SEQ ID NO: 1747943
aguuucacauauggcuacc

SEQ ID NO: 1747945 - RNA, 19 nt, Artificial Sequence
  Description of Artificial Sequence: Synthetic oligonucleotide
  Sense strand starting at position 3297 of SEQ ID NO: 1562450
uguggugauagauggaacu

SEQ ID NO: 1747946 - RNA, 19 nt, Artificial Sequence
  Description of Artificial Sequence: Synthetic oligonucleotide
  Antisense strand to SEQ ID NO: 1747945
aguuccaucuaucaccaca

SEQ ID NO: 1747947 - RNA, 19 nt, Artificial Sequence
  Description of Artificial Sequence: Synthetic oligonucleotide
  Sense strand starting at position 3303 of SEQ ID NO: 1562450
gauagauggaacugugguu

SEQ ID NO: 1747948 - RNA, 19 nt, Artificial Sequence
  Description of Artificial Sequence: Synthetic oligonucleotide
  Antisense strand to SEQ ID NO: 1747947
aaccacaguuccaucuauc

SEQ ID NO: 1747949 - RNA, 19 nt, Artificial Sequence
  Description of Artificial Sequence: Synthetic oligonucleotide
  Sense strand starting at position 3336 of SEQ ID NO: 1562450
ccuguuggccaaugauguu

SEQ ID NO: 1747950 - RNA, 19 nt, Artificial Sequence
  Description of Artificial Sequence: Synthetic oligonucleotide
  Antisense strand to SEQ ID NO: 1747949
aacaucauuggccaacagg

SEQ ID NO: 1747951 - RNA, 19 nt, Artificial Sequence
  Description of Artificial Sequence: Synthetic oligonucleotide
  Sense strand starting at position 3345 of SEQ ID NO: 1562450
caaugauguugagcaucau

SEQ ID NO: 1747952 - RNA, 19 nt, Artificial Sequence
  Description of Artificial Sequence: Synthetic oligonucleotide
  Antisense strand to SEQ ID NO: 1747951
augaugcucaacaucauug

SEQ ID NO: 1747953 - RNA, 19 nt, Artificial Sequence
  Description of Artificial Sequence: Synthetic oligonucleotide
  Sense strand starting at position 3378 of SEQ ID NO: 1562450
cuccaucuccuguaguaag

SEQ ID NO: 1747954 - RNA, 19 nt, Artificial Sequence
  Description of Artificial Sequence: Synthetic oligonucleotide
  Antisense strand to SEQ ID NO: 1747953
cuuacuacaggagauggag

SEQ ID NO: 1747955 - RNA, 19 nt, Artificial Sequence
  Description of Artificial Sequence: Synthetic oligonucleotide
  Sense strand starting at position 3386 of SEQ ID NO: 1562450
ccuguaguaagcguugagu

SEQ ID NO: 1747956 - RNA, 19 nt, Artificial Sequence
  Description of Artificial Sequence: Synthetic oligonucleotide
  Antisense strand to SEQ ID NO: 1747955
acucaacgcuuacuacagg

SEQ ID NO: 1747957 - RNA, 19 nt, Artificial Sequence
  Description of Artificial Sequence: Synthetic oligonucleotide
  Sense strand starting at position 3389 of SEQ ID NO: 1562450
guaguaagcguugaguuca

SEQ ID NO: 1747958 - RNA, 19 nt, Artificial Sequence
  Description of Artificial Sequence: Synthetic oligonucleotide
  Antisense strand to SEQ ID NO: 1747957
ugaacucaacgcuuacuac

SEQ ID NO: 1747959 - RNA, 19 nt, Artificial Sequence
  Description of Artificial Sequence: Synthetic oligonucleotide
  Sense strand starting at position 3495 of SEQ ID NO: 1562450
ucagauaugugaucuguaa

SEQ ID NO: 1747960 - RNA, 19 nt, Artificial Sequence
  Description of Artificial Sequence: Synthetic oligonucleotide
  Antisense strand to SEQ ID NO: 1747959
uuacagaucacauaucuga

SEQ ID NO: 1747961 - RNA, 19 nt, Artificial Sequence
  Description of Artificial Sequence: Synthetic oligonucleotide
  Sense strand starting at position 3499 of SEQ ID NO: 1562450
auaugugaucuguaaaugc

SEQ ID NO: 1747962 - RNA, 19 nt, Artificial Sequence
  Description of Artificial Sequence: Synthetic oligonucleotide
  Antisense strand to SEQ ID NO: 1747961
gcauuuacagaucacauau

SEQ ID NO: 1747963 - RNA, 19 nt, Artificial Sequence
  Description of Artificial Sequence: Synthetic oligonucleotide
  Sense strand starting at position 3509 of SEQ ID NO: 1562450
uguaaaugcuuucuccaag

SEQ ID NO: 1747964 - RNA, 19 nt, Artificial Sequence
  Description of Artificial Sequence: Synthetic oligonucleotide
  Antisense strand to SEQ ID NO: 1747963
cuuggagaaagcauuuaca

SEQ ID NO: 1747965 - RNA, 19 nt, Artificial Sequence
  Description of Artificial Sequence: Synthetic oligonucleotide
  Sense strand starting at position 3692 of SEQ ID NO: 1562450
guuugcauuugggucuauu

SEQ ID NO: 1747966 - RNA, 19 nt, Artificial Sequence
  Description of Artificial Sequence: Synthetic oligonucleotide
  Antisense strand to SEQ ID NO: 1747965
aauagacccaaaugcaaac

SEQ ID NO: 1747967 - RNA, 19 nt, Artificial Sequence
  Description of Artificial Sequence: Synthetic oligonucleotide
  Sense strand starting at position 3730 of SEQ ID NO: 1562450
ggguuuauaguaugagaua

SEQ ID NO: 1747968 - RNA, 19 nt, Artificial Sequence
  Description of Artificial Sequence: Synthetic oligonucleotide
  Antisense strand to SEQ ID NO: 1747967
uaucucauacuauaaaccc

SEQ ID NO: 1747969 - RNA, 19 nt, Artificial Sequence
  Description of Artificial Sequence: Synthetic oligonucleotide
  Sense strand starting at position 3731 of SEQ ID NO: 1562450
gguuuauaguaugagauau

SEQ ID NO: 1747970 - RNA, 19 nt, Artificial Sequence
  Description of Artificial Sequence: Synthetic oligonucleotide
  Antisense strand to SEQ ID NO: 1747969
auaucucauacuauaaacc

SEQ ID NO: 1747971 - RNA, 19 nt, Artificial Sequence
  Description of Artificial Sequence: Synthetic oligonucleotide
  Sense strand starting at position 3816 of SEQ ID NO: 1562450
uuucucuuguuugcugaga

SEQ ID NO: 1747972 - RNA, 19 nt, Artificial Sequence
  Description of Artificial Sequence: Synthetic oligonucleotide
  Antisense strand to SEQ ID NO: 1747971
ucucagcaaacaagagaaa

SEQ ID NO: 1747973 - RNA, 19 nt, Artificial Sequence
  Description of Artificial Sequence: Synthetic oligonucleotide
  Sense strand starting at position 3917 of SEQ ID NO: 1562450
gauagaguauaaugauuga

SEQ ID NO: 1747974 - RNA, 19 nt, Artificial Sequence
  Description of Artificial Sequence: Synthetic oligonucleotide
  Antisense strand to SEQ ID NO: 1747973
ucaaucauuauacucuauc

SEQ ID NO: 1747975 - RNA, 19 nt, Artificial Sequence
  Description of Artificial Sequence: Synthetic oligonucleotide
  Sense strand starting at position 3953 of SEQ ID NO: 1562450
aaucuuguguucuugggau

SEQ ID NO: 1747976 - RNA, 19 nt, Artificial Sequence
  Description of Artificial Sequence: Synthetic oligonucleotide
  Antisense strand to SEQ ID NO: 1747975
aucccaagaacacaagauu

SEQ ID NO: 1747977 - RNA, 19 nt, Artificial Sequence
  Description of Artificial Sequence: Synthetic oligonucleotide
  Sense strand starting at position 3955 of SEQ ID NO: 1562450
ucuuguguucuugggauaa

SEQ ID NO: 1747978 - RNA, 19 nt, Artificial Sequence
  Description of Artificial Sequence: Synthetic oligonucleotide
  Antisense strand to SEQ ID NO: 1747977
uuaucccaagaacacaaga

SEQ ID NO: 1747979 - RNA, 19 nt, Artificial Sequence
  Description of Artificial Sequence: Synthetic oligonucleotide
  Sense strand starting at position 33 of SEQ ID NO: 1562451
uuacaaagucagcguagua

SEQ ID NO: 1747980 - RNA, 19 nt, Artificial Sequence
  Description of Artificial Sequence: Synthetic oligonucleotide
  Antisense strand to SEQ ID NO: 1747979
uacuacgcugacuuuguaa

SEQ ID NO: 1747981 - RNA, 19 nt, Artificial Sequence
  Description of Artificial Sequence: Synthetic oligonucleotide
  Sense strand starting at position 58 of SEQ ID NO: 1562451
aaugauguaucaguaagag

SEQ ID NO: 1747982 - RNA, 19 nt, Artificial Sequence
  Description of Artificial Sequence: Synthetic oligonucleotide
  Antisense strand to SEQ ID NO: 1747981
cucuuacugauacaucauu

SEQ ID NO: 1747983 - RNA, 19 nt, Artificial Sequence
  Description of Artificial Sequence: Synthetic oligonucleotide
  Sense strand starting at position 68 of SEQ ID NO: 1562451
caguaagaguuaucacaga

SEQ ID NO: 1747984 - RNA, 19 nt, Artificial Sequence
  Description of Artificial Sequence: Synthetic oligonucleotide
  Antisense strand to SEQ ID NO: 1747983
ucugugauaacucuuacug

SEQ ID NO: 1747985 - RNA, 19 nt, Artificial Sequence
  Description of Artificial Sequence: Synthetic oligonucleotide
  Sense strand starting at position 119 of SEQ ID NO: 1562451
uugaaacaaugugauuaca

SEQ ID NO: 1747986 - RNA, 19 nt, Artificial Sequence
  Description of Artificial Sequence: Synthetic oligonucleotide
  Antisense strand to SEQ ID NO: 1747985
uguaaucacauuguuucaa

SEQ ID NO: 1747987 - RNA, 19 nt, Artificial Sequence
  Description of Artificial Sequence: Synthetic oligonucleotide
  Sense strand starting at position 238 of SEQ ID NO: 1562451
aauagucuuguguagccaa

SEQ ID NO: 1747988 - RNA, 19 nt, Artificial Sequence
  Description of Artificial Sequence: Synthetic oligonucleotide
  Antisense strand to SEQ ID NO: 1747987
uuggcuacacaagacuauu

SEQ ID NO: 1747989 - RNA, 19 nt, Artificial Sequence
  Description of Artificial Sequence: Synthetic oligonucleotide
  Sense strand starting at position 241 of SEQ ID NO: 1562451
agucuuguguagccaaauc

SEQ ID NO: 1747990 - RNA, 19 nt, Artificial Sequence
  Description of Artificial Sequence: Synthetic oligonucleotide
  Antisense strand to SEQ ID NO: 1747989
gauuuggcuacacaagacu

SEQ ID NO: 1747991 - RNA, 19 nt, Artificial Sequence
  Description of Artificial Sequence: Synthetic oligonucleotide
  Sense strand starting at position 313 of SEQ ID NO: 1562451
accugaagcucuccugcaa

SEQ ID NO: 1747992 - RNA, 19 nt, Artificial Sequence
  Description of Artificial Sequence: Synthetic oligonucleotide
  Antisense strand to SEQ ID NO: 1747991
uugcaggagagcuucaggu

SEQ ID NO: 1747993 - RNA, 19 nt, Artificial Sequence
  Description of Artificial Sequence: Synthetic oligonucleotide
  Sense strand starting at position 505 of SEQ ID NO: 1562451
uugcuucucuuaucagaga

SEQ ID NO: 1747994 - RNA, 19 nt, Artificial Sequence
  Description of Artificial Sequence: Synthetic oligonucleotide
  Antisense strand to SEQ ID NO: 1747993
ucucugauaagagaagcaa

SEQ ID NO: 1747995 - RNA, 19 nt, Artificial Sequence
  Description of Artificial Sequence: Synthetic oligonucleotide
  Sense strand starting at position 571 of SEQ ID NO: 1562451
gcaggacgacucugacaua

SEQ ID NO: 1747996 - RNA, 19 nt, Artificial Sequence
  Description of Artificial Sequence: Synthetic oligonucleotide
  Antisense strand to SEQ ID NO: 1747995
uaugucagagucguccugc

SEQ ID NO: 1747997 - RNA, 19 nt, Artificial Sequence
  Description of Artificial Sequence: Synthetic oligonucleotide
  Sense strand starting at position 667 of SEQ ID NO: 1562451
ccaggaucccaagggugau

SEQ ID NO: 1747998 - RNA, 19 nt, Artificial Sequence
  Description of Artificial Sequence: Synthetic oligonucleotide
  Antisense strand to SEQ ID NO: 1747997
aucacccuugggauccugg

SEQ ID NO: 1747999 - RNA, 19 nt, Artificial Sequence
  Description of Artificial Sequence: Synthetic oligonucleotide
  Sense strand starting at position 841 of SEQ ID NO: 1562451
uugggcaaguccuuaaagu

SEQ ID NO: 1748000 - RNA, 19 nt, Artificial Sequence
  Description of Artificial Sequence: Synthetic oligonucleotide
  Antisense strand to SEQ ID NO: 1747999
acuuuaaggacuugcccaa

SEQ ID NO: 1748001 - RNA, 19 nt, Artificial Sequence
  Description of Artificial Sequence: Synthetic oligonucleotide
  Sense strand starting at position 842 of SEQ ID NO: 1562451
ugggcaaguccuuaaagua

SEQ ID NO: 1748002 - RNA, 19 nt, Artificial Sequence
  Description of Artificial Sequence: Synthetic oligonucleotide
  Antisense strand to SEQ ID NO: 1748001
uacuuuaaggacuugccca

SEQ ID NO: 1748003 - RNA, 19 nt, Artificial Sequence
  Description of Artificial Sequence: Synthetic oligonucleotide
  Sense strand starting at position 857 of SEQ ID NO: 1562451
aguaauucuucugcaaaga

SEQ ID NO: 1748004 - RNA, 19 nt, Artificial Sequence
  Description of Artificial Sequence: Synthetic oligonucleotide
  Antisense strand to SEQ ID NO: 1748003
ucuuugcagaagaauuacu

SEQ ID NO: 1748005 - RNA, 19 nt, Artificial Sequence
  Description of Artificial Sequence: Synthetic oligonucleotide
  Sense strand starting at position 858 of SEQ ID NO: 1562451
guaauucuucugcaaagag

SEQ ID NO: 1748006 - RNA, 19 nt, Artificial Sequence
  Description of Artificial Sequence: Synthetic oligonucleotide
  Antisense strand to SEQ ID NO: 1748005
cucuuugcagaagaauuac

SEQ ID NO: 1748007 - RNA, 19 nt, Artificial Sequence
  Description of Artificial Sequence: Synthetic oligonucleotide
  Sense strand starting at position 1004 of SEQ ID NO: 1562451
gucugaaacucuuugauga

SEQ ID NO: 1748008 - RNA, 19 nt, Artificial Sequence
  Description of Artificial Sequence: Synthetic oligonucleotide
  Antisense strand to SEQ ID NO: 1748007
ucaucaaagaguuucagac

SEQ ID NO: 1748009 - RNA, 19 nt, Artificial Sequence
  Description of Artificial Sequence: Synthetic oligonucleotide
  Sense strand starting at position 1005 of SEQ ID NO: 1562451
ucugaaacucuuugaugag

SEQ ID NO: 1748010 - RNA, 19 nt, Artificial Sequence
  Description of Artificial Sequence: Synthetic oligonucleotide
  Antisense strand to SEQ ID NO: 1748009
cucaucaaagaguuucaga

SEQ ID NO: 1748011 - RNA, 19 nt, Artificial Sequence
  Description of Artificial Sequence: Synthetic oligonucleotide
  Sense strand starting at position 1006 of SEQ ID NO: 1562451
cugaaacucuuugaugaga

SEQ ID NO: 1748012 - RNA, 19 nt, Artificial Sequence
  Description of Artificial Sequence: Synthetic oligonucleotide
  Antisense strand to SEQ ID NO: 1748011
ucucaucaaagaguuucag

SEQ ID NO: 1748013 - RNA, 19 nt, Artificial Sequence
  Description of Artificial Sequence: Synthetic oligonucleotide
  Sense strand starting at position 1068 of SEQ ID NO: 1562451
uugcuuuauuugccaguca

SEQ ID NO: 1748014 - RNA, 19 nt, Artificial Sequence
  Description of Artificial Sequence: Synthetic oligonucleotide
  Antisense strand to SEQ ID NO: 1748013
ugacuggcaaauaaagcaa

SEQ ID NO: 1748015 - RNA, 19 nt, Artificial Sequence
  Description of Artificial Sequence: Synthetic oligonucleotide
  Sense strand starting at position 1103 of SEQ ID NO: 1562451
ucuccaagaugucuggaau

SEQ ID NO: 1748016 - RNA, 19 nt, Artificial Sequence
  Description of Artificial Sequence: Synthetic oligonucleotide
  Antisense strand to SEQ ID NO: 1748015
auuccagacaucuuggaga

SEQ ID NO: 1748017 - RNA, 19 nt, Artificial Sequence
  Description of Artificial Sequence: Synthetic oligonucleotide
  Sense strand starting at position 1104 of SEQ ID NO: 1562451
cuccaagaugucuggaaua

SEQ ID NO: 1748018 - RNA, 19 nt, Artificial Sequence
  Description of Artificial Sequence: Synthetic oligonucleotide
  Antisense strand to SEQ ID NO: 1748017
uauuccagacaucuuggag

SEQ ID NO: 1748019 - RNA, 19 nt, Artificial Sequence
  Description of Artificial Sequence: Synthetic oligonucleotide
  Sense strand starting at position 1240 of SEQ ID NO: 1562451
aggagacccuguuuacacu

SEQ ID NO: 1748020 - RNA, 19 nt, Artificial Sequence
  Description of Artificial Sequence: Synthetic oligonucleotide
  Antisense strand to SEQ ID NO: 1748019
aguguaaacagggucuccu

SEQ ID NO: 1748021 - RNA, 19 nt, Artificial Sequence
  Description of Artificial Sequence: Synthetic oligonucleotide
  Sense strand starting at position 1422 of SEQ ID NO: 1562451
cuaugcgugguuuagagau

SEQ ID NO: 1748022 - RNA, 19 nt, Artificial Sequence
  Description of Artificial Sequence: Synthetic oligonucleotide
  Antisense strand to SEQ ID NO: 1748021
aucucuaaaccacgcauag

SEQ ID NO: 1748023 - RNA, 19 nt, Artificial Sequence
  Description of Artificial Sequence: Synthetic oligonucleotide
  Sense strand starting at position 3013 of SEQ ID NO: 1562451
gucugacuguuggaaacau

SEQ ID NO: 1748024 - RNA, 19 nt, Artificial Sequence
  Description of Artificial Sequence: Synthetic oligonucleotide
  Antisense strand to SEQ ID NO: 1748023
auguuuccaacagucagac

SEQ ID NO: 1748025 - RNA, 19 nt, Artificial Sequence
  Description of Artificial Sequence: Synthetic oligonucleotide
  Sense strand starting at position 3053 of SEQ ID NO: 1562451
gccagugguccguaaguca

SEQ ID NO: 1748026 - RNA, 19 nt, Artificial Sequence
  Description of Artificial Sequence: Synthetic oligonucleotide
  Antisense strand to SEQ ID NO: 1748025
ugacuuacggaccacuggc

SEQ ID NO: 1748027 - RNA, 19 nt, Artificial Sequence
  Description of Artificial Sequence: Synthetic oligonucleotide
  Sense strand starting at position 3367 of SEQ ID NO: 1562451
gcaauaagaugggugggua

SEQ ID NO: 1748028 - RNA, 19 nt, Artificial Sequence
  Description of Artificial Sequence: Synthetic oligonucleotide
  Antisense strand to SEQ ID NO: 1748027
uacccacccaucuuauugc

SEQ ID NO: 1748029 - RNA, 19 nt, Artificial Sequence
  Description of Artificial Sequence: Synthetic oligonucleotide
  Sense strand starting at position 3368 of SEQ ID NO: 1562451
caauaagauggguggguau

SEQ ID NO: 1748030 - RNA, 19 nt, Artificial Sequence
  Description of Artificial Sequence: Synthetic oligonucleotide
  Antisense strand to SEQ ID NO: 1748029
auacccacccaucuuauug

SEQ ID NO: 1748031 - RNA, 19 nt, Artificial Sequence
  Description of Artificial Sequence: Synthetic oligonucleotide
  Sense strand starting at position 3370 of SEQ ID NO: 1562451
auaagauggguggguauca

SEQ ID NO: 1748032 - RNA, 19 nt, Artificial Sequence
  Description of Artificial Sequence: Synthetic oligonucleotide
  Antisense strand to SEQ ID NO: 1748031
ugauacccacccaucuuau

SEQ ID NO: 1748033 - RNA, 19 nt, Artificial Sequence
  Description of Artificial Sequence: Synthetic oligonucleotide
  Sense strand starting at position 3371 of SEQ ID NO: 1562451
uaagauggguggguaucaa

SEQ ID NO: 1748034 - RNA, 19 nt, Artificial Sequence
  Description of Artificial Sequence: Synthetic oligonucleotide
  Antisense strand to SEQ ID NO: 1748033
uugauacccacccaucuua

SEQ ID NO: 1748035 - RNA, 19 nt, Artificial Sequence
  Description of Artificial Sequence: Synthetic oligonucleotide
  Sense strand starting at position 3433 of SEQ ID NO: 1562451
aggcuuaaaucugcaagca

SEQ ID NO: 1748036 - RNA, 19 nt, Artificial Sequence
  Description of Artificial Sequence: Synthetic oligonucleotide
  Antisense strand to SEQ ID NO: 1748035
ugcuugcagauuuaagccu

SEQ ID NO: 1748037 - RNA, 19 nt, Artificial Sequence
  Description of Artificial Sequence: Synthetic oligonucleotide
  Sense strand starting at position 3434 of SEQ ID NO: 1562451
ggcuuaaaucugcaagcaa

SEQ ID NO: 1748038 - RNA, 19 nt, Artificial Sequence
  Description of Artificial Sequence: Synthetic oligonucleotide
  Antisense strand to SEQ ID NO: 1748037
uugcuugcagauuuaagcc

SEQ ID NO: 1748039 - RNA, 19 nt, Artificial Sequence
  Description of Artificial Sequence: Synthetic oligonucleotide
  Sense strand starting at position 3461 of SEQ ID NO: 1562451
gcuacuaaaucacccguua

SEQ ID NO: 1748040 - RNA, 19 nt, Artificial Sequence
  Description of Artificial Sequence: Synthetic oligonucleotide
  Antisense strand to SEQ ID NO: 1748039
uaacgggugauuuaguagc

SEQ ID NO: 1748041 - RNA, 19 nt, Artificial Sequence
  Description of Artificial Sequence: Synthetic oligonucleotide
  Sense strand starting at position 3701 of SEQ ID NO: 1562451
cagguaaguuccuccaugu

SEQ ID NO: 1748042 - RNA, 19 nt, Artificial Sequence
  Description of Artificial Sequence: Synthetic oligonucleotide
  Antisense strand to SEQ ID NO: 1748041
acauggaggaacuuaccug

SEQ ID NO: 1748043 - RNA, 19 nt, Artificial Sequence
  Description of Artificial Sequence: Synthetic oligonucleotide
  Sense strand starting at position 3810 of SEQ ID NO: 1562451
uggauaagaguuugaguuu

SEQ ID NO: 1748044 - RNA, 19 nt, Artificial Sequence
  Description of Artificial Sequence: Synthetic oligonucleotide
  Antisense strand to SEQ ID NO: 1748043
aaacucaaacucuuaucca

SEQ ID NO: 1748045 - RNA, 19 nt, Artificial Sequence
  Description of Artificial Sequence: Synthetic oligonucleotide
  Sense strand starting at position 3828 of SEQ ID NO: 1562451
uugauaucuuaauggacug

SEQ ID NO: 1748046 - RNA, 19 nt, Artificial Sequence
  Description of Artificial Sequence: Synthetic oligonucleotide
  Antisense strand to SEQ ID NO: 1748045
caguccauuaagauaucaa

SEQ ID NO: 1748047 - RNA, 19 nt, Artificial Sequence
  Description of Artificial Sequence: Synthetic oligonucleotide
  Sense strand starting at position 3901 of SEQ ID NO: 1562451
agcuguaaacuacgucuga

SEQ ID NO: 1748048 - RNA, 19 nt, Artificial Sequence
  Description of Artificial Sequence: Synthetic oligonucleotide
  Antisense strand to SEQ ID NO: 1748047
ucagacguaguuuacagcu

SEQ ID NO: 1748049 - RNA, 19 nt, Artificial Sequence
  Description of Artificial Sequence: Synthetic oligonucleotide
  Sense strand starting at position 3905 of SEQ ID NO: 1562451
guaaacuacgucugagaau

SEQ ID NO: 1748050 - RNA, 19 nt, Artificial Sequence
  Description of Artificial Sequence: Synthetic oligonucleotide
  Antisense strand to SEQ ID NO: 1748049
auucucagacguaguuuac

SEQ ID NO: 1748051 - RNA, 19 nt, Artificial Sequence
  Description of Artificial Sequence: Synthetic oligonucleotide
  Sense strand starting at position 3906 of SEQ ID NO: 1562451
uaaacuacgucugagaauu

SEQ ID NO: 1748052 - RNA, 19 nt, Artificial Sequence
  Description of Artificial Sequence: Synthetic oligonucleotide
  Antisense strand to SEQ ID NO: 1748051
aauucucagacguaguuua

SEQ ID NO: 1748053 - RNA, 19 nt, Artificial Sequence
  Description of Artificial Sequence: Synthetic oligonucleotide
  Sense strand starting at position 3908 of SEQ ID NO: 1562451
aacuacgucugagaauuga

SEQ ID NO: 1748054 - RNA, 19 nt, Artificial Sequence
  Description of Artificial Sequence: Synthetic oligonucleotide
  Antisense strand to SEQ ID NO: 1748053
ucaauucucagacguaguu

SEQ ID NO: 1748055 - RNA, 19 nt, Artificial Sequence
  Description of Artificial Sequence: Synthetic oligonucleotide
  Sense strand starting at position 3912 of SEQ ID NO: 1562451
acgucugagaauugacaca

SEQ ID NO: 1748056 - RNA, 19 nt, Artificial Sequence
  Description of Artificial Sequence: Synthetic oligonucleotide
  Antisense strand to SEQ ID NO: 1748055
ugugucaauucucagacgu

SEQ ID NO: 1748057 - RNA, 19 nt, Artificial Sequence
  Description of Artificial Sequence: Synthetic oligonucleotide
  Sense strand starting at position 3967 of SEQ ID NO: 1562451
guuccuaucugcuuacaua

SEQ ID NO: 1748058 - RNA, 19 nt, Artificial Sequence
  Description of Artificial Sequence: Synthetic oligonucleotide
  Antisense strand to SEQ ID NO: 1748057
uauguaagcagauaggaac

SEQ ID NO: 1748059 - RNA, 19 nt, Artificial Sequence
  Description of Artificial Sequence: Synthetic oligonucleotide
  Sense strand starting at position 318 of SEQ ID NO: 1562452
gagcgacccugucuuacaa

SEQ ID NO: 1748060 - RNA, 19 nt, Artificial Sequence
  Description of Artificial Sequence: Synthetic oligonucleotide
  Antisense strand to SEQ ID NO: 1748059
uuguaagacagggucgcuc

SEQ ID NO: 1748061 - RNA, 19 nt, Artificial Sequence
  Description of Artificial Sequence: Synthetic oligonucleotide
  Sense strand starting at position 355 of SEQ ID NO: 1562452
agagaacauuauugggaua

SEQ ID NO: 1748062 - RNA, 19 nt, Artificial Sequence
  Description of Artificial Sequence: Synthetic oligonucleotide
  Antisense strand to SEQ ID NO: 1748061
uaucccaauaauguucucu

SEQ ID NO: 1748063 - RNA, 19 nt, Artificial Sequence
  Description of Artificial Sequence: Synthetic oligonucleotide
  Sense strand starting at position 395 of SEQ ID NO: 1562452
ggcuguauccuggauuaca

SEQ ID NO: 1748064 - RNA, 19 nt, Artificial Sequence
  Description of Artificial Sequence: Synthetic oligonucleotide
  Antisense strand to SEQ ID NO: 1748063
uguaauccaggauacagcc

SEQ ID NO: 1748065 - RNA, 19 nt, Artificial Sequence
  Description of Artificial Sequence: Synthetic oligonucleotide
  Sense strand starting at position 427 of SEQ ID NO: 1562452
gucaaaguuucugcauacu

SEQ ID NO: 1748066 - RNA, 19 nt, Artificial Sequence
  Description of Artificial Sequence: Synthetic oligonucleotide
  Antisense strand to SEQ ID NO: 1748065
aguaugcagaaacuuugac

SEQ ID NO: 1748067 - RNA, 19 nt, Artificial Sequence
  Description of Artificial Sequence: Synthetic oligonucleotide
  Sense strand starting at position 456 of SEQ ID NO: 1562452
uuauaauugcugcaggcua

SEQ ID NO: 1748068 - RNA, 19 nt, Artificial Sequence
  Description of Artificial Sequence: Synthetic oligonucleotide
  Antisense strand to SEQ ID NO: 1748067
uagccugcagcaauuauaa

SEQ ID NO: 1748069 - RNA, 19 nt, Artificial Sequence
  Description of Artificial Sequence: Synthetic oligonucleotide
  Sense strand starting at position 495 of SEQ ID NO: 1562452
aagauacaugcugauguau

SEQ ID NO: 1748070 - RNA, 19 nt, Artificial Sequence
  Description of Artificial Sequence: Synthetic oligonucleotide
  Antisense strand to SEQ ID NO: 1748069
auacaucagcauguaucuu

SEQ ID NO: 1748071 - RNA, 19 nt, Artificial Sequence
  Description of Artificial Sequence: Synthetic oligonucleotide
  Sense strand starting at position 506 of SEQ ID NO: 1562452
ugauguauuuaggaguuaa

SEQ ID NO: 1748072 - RNA, 19 nt, Artificial Sequence
  Description of Artificial Sequence: Synthetic oligonucleotide
  Antisense strand to SEQ ID NO: 1748071
uuaacuccuaaauacauca

SEQ ID NO: 1748073 - RNA, 19 nt, Artificial Sequence
  Description of Artificial Sequence: Synthetic oligonucleotide
  Sense strand starting at position 528 of SEQ ID NO: 1562452
ucccgacuucugcaacuaa

SEQ ID NO: 1748074 - RNA, 19 nt, Artificial Sequence
  Description of Artificial Sequence: Synthetic oligonucleotide
  Antisense strand to SEQ ID NO: 1748073
uuaguugcagaagucggga

SEQ ID NO: 1748075 - RNA, 19 nt, Artificial Sequence
  Description of Artificial Sequence: Synthetic oligonucleotide
  Sense strand starting at position 614 of SEQ ID NO: 1562452
ugguaaauguagguaaaga

SEQ ID NO: 1748076 - RNA, 19 nt, Artificial Sequence
  Description of Artificial Sequence: Synthetic oligonucleotide
  Antisense strand to SEQ ID NO: 1748075
ucuuuaccuacauuuacca

SEQ ID NO: 1748077 - RNA, 19 nt, Artificial Sequence
  Description of Artificial Sequence: Synthetic oligonucleotide
  Sense strand starting at position 631 of SEQ ID NO: 1562452
gaguauaugggaugucguu

SEQ ID NO: 1748078 - RNA, 19 nt, Artificial Sequence
  Description of Artificial Sequence: Synthetic oligonucleotide
  Antisense strand to SEQ ID NO: 1748077
aacgacaucccauauacuc

SEQ ID NO: 1748079 - RNA, 19 nt, Artificial Sequence
  Description of Artificial Sequence: Synthetic oligonucleotide
  Sense strand starting at position 898 of SEQ ID NO: 1562452
uggacugugcuauaauaaa

SEQ ID NO: 1748080 - RNA, 19 nt, Artificial Sequence
  Description of Artificial Sequence: Synthetic oligonucleotide
  Antisense strand to SEQ ID NO: 1748079
uuuauuauagcacagucca

SEQ ID NO: 1748081 - RNA, 19 nt, Artificial Sequence
  Description of Artificial Sequence: Synthetic oligonucleotide
  Sense strand starting at position 977 of SEQ ID NO: 1562452
acuuuaaggucguccuuaa

SEQ ID NO: 1748082 - RNA, 19 nt, Artificial Sequence
  Description of Artificial Sequence: Synthetic oligonucleotide
  Antisense strand to SEQ ID NO: 1748081
uuaaggacgaccuuaaagu

SEQ ID NO: 1748083 - RNA, 19 nt, Artificial Sequence
  Description of Artificial Sequence: Synthetic oligonucleotide
  Sense strand starting at position 981 of SEQ ID NO: 1562452
uaaggucguccuuaagcaa

SEQ ID NO: 1748084 - RNA, 19 nt, Artificial Sequence
  Description of Artificial Sequence: Synthetic oligonucleotide
  Antisense strand to SEQ ID NO: 1748083
uugcuuaaggacgaccuua

SEQ ID NO: 1748085 - RNA, 19 nt, Artificial Sequence
  Description of Artificial Sequence: Synthetic oligonucleotide
  Sense strand starting at position 1157 of SEQ ID NO: 1562452
cuaccaagagggugaucau

SEQ ID NO: 1748086 - RNA, 19 nt, Artificial Sequence
  Description of Artificial Sequence: Synthetic oligonucleotide
  Antisense strand to SEQ ID NO: 1748085
augaucacccucuugguag

SEQ ID NO: 1748087 - RNA, 19 nt, Artificial Sequence
  Description of Artificial Sequence: Synthetic oligonucleotide
  Sense strand starting at position 1190 of SEQ ID NO: 1562452
aggugucgagagcaaaguu

SEQ ID NO: 1748088 - RNA, 19 nt, Artificial Sequence
  Description of Artificial Sequence: Synthetic oligonucleotide
  Antisense strand to SEQ ID NO: 1748087
aacuuugcucucgacaccu

SEQ ID NO: 1748089 - RNA, 19 nt, Artificial Sequence
  Description of Artificial Sequence: Synthetic oligonucleotide
  Sense strand starting at position 1262 of SEQ ID NO: 1562452
ugaagagaucaguguggcu

SEQ ID NO: 1748090 - RNA, 19 nt, Artificial Sequence
  Description of Artificial Sequence: Synthetic oligonucleotide
  Antisense strand to SEQ ID NO: 1748089
agccacacugaucucuuca

SEQ ID NO: 1748091 - RNA, 19 nt, Artificial Sequence
  Description of Artificial Sequence: Synthetic oligonucleotide
  Sense strand starting at position 1269 of SEQ ID NO: 1562452
aucaguguggcuggaugaa

SEQ ID NO: 1748092 - RNA, 19 nt, Artificial Sequence
  Description of Artificial Sequence: Synthetic oligonucleotide
  Antisense strand to SEQ ID NO: 1748091
uucauccagccacacugau

SEQ ID NO: 1748093 - RNA, 19 nt, Artificial Sequence
  Description of Artificial Sequence: Synthetic oligonucleotide
  Sense strand starting at position 1371 of SEQ ID NO: 1562452
agagcuuuagcuuaggaga

SEQ ID NO: 1748094 - RNA, 19 nt, Artificial Sequence
  Description of Artificial Sequence: Synthetic oligonucleotide
  Antisense strand to SEQ ID NO: 1748093
ucuccuaagcuaaagcucu

SEQ ID NO: 1748095 - RNA, 19 nt, Artificial Sequence
  Description of Artificial Sequence: Synthetic oligonucleotide
  Sense strand starting at position 2065 of SEQ ID NO: 1562452
gccugucugagugauguca

SEQ ID NO: 1748096 - RNA, 19 nt, Artificial Sequence
  Description of Artificial Sequence: Synthetic oligonucleotide
  Antisense strand to SEQ ID NO: 1748095
ugacaucacucagacaggc

SEQ ID NO: 1748097 - RNA, 19 nt, Artificial Sequence
  Description of Artificial Sequence: Synthetic oligonucleotide
  Sense strand starting at position 2077 of SEQ ID NO: 1562452
gaugucauuccuggccaau

SEQ ID NO: 1748098 - RNA, 19 nt, Artificial Sequence
  Description of Artificial Sequence: Synthetic oligonucleotide
  Antisense strand to SEQ ID NO: 1748097
auuggccaggaaugacauc

SEQ ID NO: 1748099 - RNA, 19 nt, Artificial Sequence
  Description of Artificial Sequence: Synthetic oligonucleotide
  Sense strand starting at position 2079 of SEQ ID NO: 1562452
ugucauuccuggccaauag

SEQ ID NO: 1748100 - RNA, 19 nt, Artificial Sequence
  Description of Artificial Sequence: Synthetic oligonucleotide
  Antisense strand to SEQ ID NO: 1748099
cuauuggccaggaaugaca

SEQ ID NO: 1748101 - RNA, 19 nt, Artificial Sequence
  Description of Artificial Sequence: Synthetic oligonucleotide
  Sense strand starting at position 2178 of SEQ ID NO: 1562452
aggaaacuggcgugaauca

SEQ ID NO: 1748102 - RNA, 19 nt, Artificial Sequence
  Description of Artificial Sequence: Synthetic oligonucleotide
  Antisense strand to SEQ ID NO: 1748101
ugauucacgccaguuuccu

SEQ ID NO: 1748103 - RNA, 19 nt, Artificial Sequence
  Description of Artificial Sequence: Synthetic oligonucleotide
  Sense strand starting at position 2179 of SEQ ID NO: 1562452
ggaaacuggcgugaaucau

SEQ ID NO: 1748104 - RNA, 19 nt, Artificial Sequence
  Description of Artificial Sequence: Synthetic oligonucleotide
  Antisense strand to SEQ ID NO: 1748103
augauucacgccaguuucc

SEQ ID NO: 1748105 - RNA, 19 nt, Artificial Sequence
  Description of Artificial Sequence: Synthetic oligonucleotide
  Sense strand starting at position 2221 of SEQ ID NO: 1562452
guagcauuagaauguuaug

SEQ ID NO: 1748106 - RNA, 19 nt, Artificial Sequence
  Description of Artificial Sequence: Synthetic oligonucleotide
  Antisense strand to SEQ ID NO: 1748105
cauaacauucuaaugcuac

SEQ ID NO: 1748107 - RNA, 19 nt, Artificial Sequence
  Description of Artificial Sequence: Synthetic oligonucleotide
  Sense strand starting at position 2467 of SEQ ID NO: 1562452
uaacgugcaguuuaggaaa

SEQ ID NO: 1748108 - RNA, 19 nt, Artificial Sequence
  Description of Artificial Sequence: Synthetic oligonucleotide
  Antisense strand to SEQ ID NO: 1748107
uuuccuaaacugcacguua

SEQ ID NO: 1748109 - RNA, 19 nt, Artificial Sequence
  Description of Artificial Sequence: Synthetic oligonucleotide
  Sense strand starting at position 2522 of SEQ ID NO: 1562452
guacaaauccuguaaccca

SEQ ID NO: 1748110 - RNA, 19 nt, Artificial Sequence
  Description of Artificial Sequence: Synthetic oligonucleotide
  Antisense strand to SEQ ID NO: 1748109
uggguuacaggauuuguac

SEQ ID NO: 1748111 - RNA, 19 nt, Artificial Sequence
  Description of Artificial Sequence: Synthetic oligonucleotide
  Sense strand starting at position 2530 of SEQ ID NO: 1562452
ccuguaacccauugauugu

SEQ ID NO: 1748112 - RNA, 19 nt, Artificial Sequence
  Description of Artificial Sequence: Synthetic oligonucleotide
  Antisense strand to SEQ ID NO: 1748111
acaaucaauggguuacagg

SEQ ID NO: 1748113 - RNA, 19 nt, Artificial Sequence
  Description of Artificial Sequence: Synthetic oligonucleotide
  Sense strand starting at position 2648 of SEQ ID NO: 1562452
gggcuucugcuagauucca

SEQ ID NO: 1748114 - RNA, 19 nt, Artificial Sequence
  Description of Artificial Sequence: Synthetic oligonucleotide
  Antisense strand to SEQ ID NO: 1748113
uggaaucuagcagaagccc

SEQ ID NO: 1748115 - RNA, 19 nt, Artificial Sequence
  Description of Artificial Sequence: Synthetic oligonucleotide
  Sense strand starting at position 2715 of SEQ ID NO: 1562452
ugcuccauucuguaagcau

SEQ ID NO: 1748116 - RNA, 19 nt, Artificial Sequence
  Description of Artificial Sequence: Synthetic oligonucleotide
  Antisense strand to SEQ ID NO: 1748115
augcuuacagaauggagca

SEQ ID NO: 1748117 - RNA, 19 nt, Artificial Sequence
  Description of Artificial Sequence: Synthetic oligonucleotide
  Sense strand starting at position 2866 of SEQ ID NO: 1562452
cagugcucuccucagagau

SEQ ID NO: 1748118 - RNA, 19 nt, Artificial Sequence
  Description of Artificial Sequence: Synthetic oligonucleotide
  Antisense strand to SEQ ID NO: 1748117
aucucugaggagagcacug

SEQ ID NO: 1748119 - RNA, 19 nt, Artificial Sequence
  Description of Artificial Sequence: Synthetic oligonucleotide
  Sense strand starting at position 2912 of SEQ ID NO: 1562452
cccugagcuccugagauag

SEQ ID NO: 1748120 - RNA, 19 nt, Artificial Sequence
  Description of Artificial Sequence: Synthetic oligonucleotide
  Antisense strand to SEQ ID NO: 1748119
cuaucucaggagcucaggg

SEQ ID NO: 1748121 - RNA, 19 nt, Artificial Sequence
  Description of Artificial Sequence: Synthetic oligonucleotide
  Sense strand starting at position 2923 of SEQ ID NO: 1562452
ugagauagccaauguuuga

SEQ ID NO: 1748122 - RNA, 19 nt, Artificial Sequence
  Description of Artificial Sequence: Synthetic oligonucleotide
  Antisense strand to SEQ ID NO: 1748121
ucaaacauuggcuaucuca

SEQ ID NO: 1748123 - RNA, 19 nt, Artificial Sequence
  Description of Artificial Sequence: Synthetic oligonucleotide
  Sense strand starting at position 2940 of SEQ ID NO: 1562452
gagccaccuccucagaagu

SEQ ID NO: 1748124 - RNA, 19 nt, Artificial Sequence
  Description of Artificial Sequence: Synthetic oligonucleotide
  Antisense strand to SEQ ID NO: 1748123
acuucugaggagguggcuc

SEQ ID NO: 1748125 - RNA, 19 nt, Artificial Sequence
  Description of Artificial Sequence: Synthetic oligonucleotide
  Sense strand starting at position 2951 of SEQ ID NO: 1562452
ucagaaguuugagccucaa

SEQ ID NO: 1748126 - RNA, 19 nt, Artificial Sequence
  Description of Artificial Sequence: Synthetic oligonucleotide
  Antisense strand to SEQ ID NO: 1748125
uugaggcucaaacuucuga

SEQ ID NO: 1748127 - RNA, 19 nt, Artificial Sequence
  Description of Artificial Sequence: Synthetic oligonucleotide
  Sense strand starting at position 2984 of SEQ ID NO: 1562452
uucuuugugcuccagagau

SEQ ID NO: 1748128 - RNA, 19 nt, Artificial Sequence
  Description of Artificial Sequence: Synthetic oligonucleotide
  Antisense strand to SEQ ID NO: 1748127
aucucuggagcacaaagaa

SEQ ID NO: 1748129 - RNA, 19 nt, Artificial Sequence
  Description of Artificial Sequence: Synthetic oligonucleotide
  Sense strand starting at position 3120 of SEQ ID NO: 1562452
cuuuccuagcucuaggaau

SEQ ID NO: 1748130 - RNA, 19 nt, Artificial Sequence
  Description of Artificial Sequence: Synthetic oligonucleotide
  Antisense strand to SEQ ID NO: 1748129
auuccuagagcuaggaaag

SEQ ID NO: 1748131 - RNA, 19 nt, Artificial Sequence
  Description of Artificial Sequence: Synthetic oligonucleotide
  Sense strand starting at position 3540 of SEQ ID NO: 1562452
agagcagacugucucagaa

SEQ ID NO: 1748132 - RNA, 19 nt, Artificial Sequence
  Description of Artificial Sequence: Synthetic oligonucleotide
  Antisense strand to SEQ ID NO: 1748131
uucugagacagucugcucu

SEQ ID NO: 1748133 - RNA, 19 nt, Artificial Sequence
  Description of Artificial Sequence: Synthetic oligonucleotide
  Sense strand starting at position 3614 of SEQ ID NO: 1562452
agauaauuguaagcaaccu

SEQ ID NO: 1748134 - RNA, 19 nt, Artificial Sequence
  Description of Artificial Sequence: Synthetic oligonucleotide
  Antisense strand to SEQ ID NO: 1748133
agguugcuuacaauuaucu

SEQ ID NO: 1748135 - RNA, 19 nt, Artificial Sequence
  Description of Artificial Sequence: Synthetic oligonucleotide
  Sense strand starting at position 3622 of SEQ ID NO: 1562452
guaagcaaccuaugucuau

SEQ ID NO: 1748136 - RNA, 19 nt, Artificial Sequence
  Description of Artificial Sequence: Synthetic oligonucleotide
  Antisense strand to SEQ ID NO: 1748135
auagacauagguugcuuac

SEQ ID NO: 1748137 - RNA, 19 nt, Artificial Sequence
  Description of Artificial Sequence: Synthetic oligonucleotide
  Sense strand starting at position 3688 of SEQ ID NO: 1562452
ggcaacauuuaagaagaau

SEQ ID NO: 1748138 - RNA, 19 nt, Artificial Sequence
  Description of Artificial Sequence: Synthetic oligonucleotide
  Antisense strand to SEQ ID NO: 1748137
auucuucuuaaauguugcc

SEQ ID NO: 1748139 - RNA, 19 nt, Artificial Sequence
  Description of Artificial Sequence: Synthetic oligonucleotide
  Sense strand starting at position 61 of SEQ ID NO: 1562453
uaagaaagagcuuggcauu

SEQ ID NO: 1748140 - RNA, 19 nt, Artificial Sequence
  Description of Artificial Sequence: Synthetic oligonucleotide
  Antisense strand to SEQ ID NO: 1748139
aaugccaagcucuuucuua

SEQ ID NO: 1748141 - RNA, 19 nt, Artificial Sequence
  Description of Artificial Sequence: Synthetic oligonucleotide
  Sense strand starting at position 277 of SEQ ID NO: 1562453
ccugaucucaccugggaag

SEQ ID NO: 1748142 - RNA, 19 nt, Artificial Sequence
  Description of Artificial Sequence: Synthetic oligonucleotide
  Antisense strand to SEQ ID NO: 1748141
cuucccaggugagaucagg

SEQ ID NO: 1748143 - RNA, 19 nt, Artificial Sequence
  Description of Artificial Sequence: Synthetic oligonucleotide
  Sense strand starting at position 324 of SEQ ID NO: 1562453
caguguucugaugagacgu

SEQ ID NO: 1748144 - RNA, 19 nt, Artificial Sequence
  Description of Artificial Sequence: Synthetic oligonucleotide
  Antisense strand to SEQ ID NO: 1748143
acgucucaucagaacacug

SEQ ID NO: 1748145 - RNA, 19 nt, Artificial Sequence
  Description of Artificial Sequence: Synthetic oligonucleotide
  Sense strand starting at position 363 of SEQ ID NO: 1562453
cucuuaauagaguggcaga

SEQ ID NO: 1748146 - RNA, 19 nt, Artificial Sequence
  Description of Artificial Sequence: Synthetic oligonucleotide
  Antisense strand to SEQ ID NO: 1748145
ucugccacucuauuaagag

SEQ ID NO: 1748147 - RNA, 19 nt, Artificial Sequence
  Description of Artificial Sequence: Synthetic oligonucleotide
  Sense strand starting at position 364 of SEQ ID NO: 1562453
ucuuaauagaguggcagaa

SEQ ID NO: 1748148 - RNA, 19 nt, Artificial Sequence
  Description of Artificial Sequence: Synthetic oligonucleotide
  Antisense strand to SEQ ID NO: 1748147
uucugccacucuauuaaga

SEQ ID NO: 1748149 - RNA, 19 nt, Artificial Sequence
  Description of Artificial Sequence: Synthetic oligonucleotide
  Sense strand starting at position 510 of SEQ ID NO: 1562453
uuugucaucuauguaauga

SEQ ID NO: 1748150 - RNA, 19 nt, Artificial Sequence
  Description of Artificial Sequence: Synthetic oligonucleotide
  Antisense strand to SEQ ID NO: 1748149
ucauuacauagaugacaaa

SEQ ID NO: 1748151 - RNA, 19 nt, Artificial Sequence
  Description of Artificial Sequence: Synthetic oligonucleotide
  Sense strand starting at position 527 of SEQ ID NO: 1562453
gaauaaacggucugauucu

SEQ ID NO: 1748152 - RNA, 19 nt, Artificial Sequence
  Description of Artificial Sequence: Synthetic oligonucleotide
  Antisense strand to SEQ ID NO: 1748151
agaaucagaccguuuauuc

SEQ ID NO: 1748153 - RNA, 19 nt, Artificial Sequence
  Description of Artificial Sequence: Synthetic oligonucleotide
  Sense strand starting at position 571 of SEQ ID NO: 1562453
agucgaaucagucaggacu

SEQ ID NO: 1748154 - RNA, 19 nt, Artificial Sequence
  Description of Artificial Sequence: Synthetic oligonucleotide
  Antisense strand to SEQ ID NO: 1748153
aguccugacugauucgacu

SEQ ID NO: 1748155 - RNA, 19 nt, Artificial Sequence
  Description of Artificial Sequence: Synthetic oligonucleotide
  Sense strand starting at position 574 of SEQ ID NO: 1562453
cgaaucagucaggacuuua

SEQ ID NO: 1748156 - RNA, 19 nt, Artificial Sequence
  Description of Artificial Sequence: Synthetic oligonucleotide
  Antisense strand to SEQ ID NO: 1748155
uaaaguccugacugauucg

SEQ ID NO: 1748157 - RNA, 19 nt, Artificial Sequence
  Description of Artificial Sequence: Synthetic oligonucleotide
  Sense strand starting at position 584 of SEQ ID NO: 1562453
aggacuuuaccuuagccau

SEQ ID NO: 1748158 - RNA, 19 nt, Artificial Sequence
  Description of Artificial Sequence: Synthetic oligonucleotide
  Antisense strand to SEQ ID NO: 1748157
auggcuaagguaaaguccu

SEQ ID NO: 1748159 - RNA, 19 nt, Artificial Sequence
  Description of Artificial Sequence: Synthetic oligonucleotide
  Sense strand starting at position 611 of SEQ ID NO: 1562453
ucaugugugcuugacagaa

SEQ ID NO: 1748160 - RNA, 19 nt, Artificial Sequence
  Description of Artificial Sequence: Synthetic oligonucleotide
  Antisense strand to SEQ ID NO: 1748159
uucugucaagcacacauga

SEQ ID NO: 1748161 - RNA, 19 nt, Artificial Sequence
  Description of Artificial Sequence: Synthetic oligonucleotide
  Sense strand starting at position 615 of SEQ ID NO: 1562453
gugugcuugacagaaacua

SEQ ID NO: 1748162 - RNA, 19 nt, Artificial Sequence
  Description of Artificial Sequence: Synthetic oligonucleotide
  Antisense strand to SEQ ID NO: 1748161
uaguuucugucaagcacac

SEQ ID NO: 1748163 - RNA, 19 nt, Artificial Sequence
  Description of Artificial Sequence: Synthetic oligonucleotide
  Sense strand starting at position 768 of SEQ ID NO: 1562453
aggagaguauuguuuaguc

SEQ ID NO: 1748164 - RNA, 19 nt, Artificial Sequence
  Description of Artificial Sequence: Synthetic oligonucleotide
  Antisense strand to SEQ ID NO: 1748163
gacuaaacaauacucuccu

SEQ ID NO: 1748165 - RNA, 19 nt, Artificial Sequence
  Description of Artificial Sequence: Synthetic oligonucleotide
  Sense strand starting at position 770 of SEQ ID NO: 1562453
gagaguauuguuuagucuu

SEQ ID NO: 1748166 - RNA, 19 nt, Artificial Sequence
  Description of Artificial Sequence: Synthetic oligonucleotide
  Antisense strand to SEQ ID NO: 1748165
aagacuaaacaauacucuc

SEQ ID NO: 1748167 - RNA, 19 nt, Artificial Sequence
  Description of Artificial Sequence: Synthetic oligonucleotide
  Sense strand starting at position 847 of SEQ ID NO: 1562453
gaaguuaccucacugguaa

SEQ ID NO: 1748168 - RNA, 19 nt, Artificial Sequence
  Description of Artificial Sequence: Synthetic oligonucleotide
  Antisense strand to SEQ ID NO: 1748167
uuaccagugagguaacuuc

SEQ ID NO: 1748169 - RNA, 19 nt, Artificial Sequence
  Description of Artificial Sequence: Synthetic oligonucleotide
  Sense strand starting at position 848 of SEQ ID NO: 1562453
aaguuaccucacugguaag

SEQ ID NO: 1748170 - RNA, 19 nt, Artificial Sequence
  Description of Artificial Sequence: Synthetic oligonucleotide
  Antisense strand to SEQ ID NO: 1748169
cuuaccagugagguaacuu

SEQ ID NO: 1748171 - RNA, 19 nt, Artificial Sequence
  Description of Artificial Sequence: Synthetic oligonucleotide
  Sense strand starting at position 888 of SEQ ID NO: 1562453
ucuugauugcauggaguua

SEQ ID NO: 1748172 - RNA, 19 nt, Artificial Sequence
  Description of Artificial Sequence: Synthetic oligonucleotide
  Antisense strand to SEQ ID NO: 1748171
uaacuccaugcaaucaaga

SEQ ID NO: 1748173 - RNA, 19 nt, Artificial Sequence
  Description of Artificial Sequence: Synthetic oligonucleotide
  Sense strand starting at position 889 of SEQ ID NO: 1562453
cuugauugcauggaguuaa

SEQ ID NO: 1748174 - RNA, 19 nt, Artificial Sequence
  Description of Artificial Sequence: Synthetic oligonucleotide
  Antisense strand to SEQ ID NO: 1748173
uuaacuccaugcaaucaag

SEQ ID NO: 1748175 - RNA, 19 nt, Artificial Sequence
  Description of Artificial Sequence: Synthetic oligonucleotide
  Sense strand starting at position 925 of SEQ ID NO: 1562453
cuucucugaucagugcaaa

SEQ ID NO: 1748176 - RNA, 19 nt, Artificial Sequence
  Description of Artificial Sequence: Synthetic oligonucleotide
  Antisense strand to SEQ ID NO: 1748175
uuugcacugaucagagaag

SEQ ID NO: 1748177 - RNA, 19 nt, Artificial Sequence
  Description of Artificial Sequence: Synthetic oligonucleotide
  Sense strand starting at position 926 of SEQ ID NO: 1562453
uucucugaucagugcaaag

SEQ ID NO: 1748178 - RNA, 19 nt, Artificial Sequence
  Description of Artificial Sequence: Synthetic oligonucleotide
  Antisense strand to SEQ ID NO: 1748177
cuuugcacugaucagagaa

SEQ ID NO: 1748179 - RNA, 19 nt, Artificial Sequence
  Description of Artificial Sequence: Synthetic oligonucleotide
  Sense strand starting at position 928 of SEQ ID NO: 1562453
cucugaucagugcaaagca

SEQ ID NO: 1748180 - RNA, 19 nt, Artificial Sequence
  Description of Artificial Sequence: Synthetic oligonucleotide
  Antisense strand to SEQ ID NO: 1748179
ugcuuugcacugaucagag

SEQ ID NO: 1748181 - RNA, 19 nt, Artificial Sequence
  Description of Artificial Sequence: Synthetic oligonucleotide
  Sense strand starting at position 1261 of SEQ ID NO: 1562453
acugaaacauaagaugaua

SEQ ID NO: 1748182 - RNA, 19 nt, Artificial Sequence
  Description of Artificial Sequence: Synthetic oligonucleotide
  Antisense strand to SEQ ID NO: 1748181
uaucaucuuauguuucagu

SEQ ID NO: 1748183 - RNA, 19 nt, Artificial Sequence
  Description of Artificial Sequence: Synthetic oligonucleotide
  Sense strand starting at position 1326 of SEQ ID NO: 1562453
ucaggagguuaaggauuua

SEQ ID NO: 1748184 - RNA, 19 nt, Artificial Sequence
  Description of Artificial Sequence: Synthetic oligonucleotide
  Antisense strand to SEQ ID NO: 1748183
uaaauccuuaaccuccuga

SEQ ID NO: 1748185 - RNA, 19 nt, Artificial Sequence
  Description of Artificial Sequence: Synthetic oligonucleotide
  Sense strand starting at position 1496 of SEQ ID NO: 1562453
ugaacugaguccuuaucag

SEQ ID NO: 1748186 - RNA, 19 nt, Artificial Sequence
  Description of Artificial Sequence: Synthetic oligonucleotide
  Antisense strand to SEQ ID NO: 1748185
cugauaaggacucaguuca

SEQ ID NO: 1748187 - RNA, 19 nt, Artificial Sequence
  Description of Artificial Sequence: Synthetic oligonucleotide
  Sense strand starting at position 1724 of SEQ ID NO: 1562453
cacauacgucuggauggua

SEQ ID NO: 1748188 - RNA, 19 nt, Artificial Sequence
  Description of Artificial Sequence: Synthetic oligonucleotide
  Antisense strand to SEQ ID NO: 1748187
uaccauccagacguaugug

SEQ ID NO: 1748189 - RNA, 19 nt, Artificial Sequence
  Description of Artificial Sequence: Synthetic oligonucleotide
  Sense strand starting at position 1727 of SEQ ID NO: 1562453
auacgucuggaugguaaga

SEQ ID NO: 1748190 - RNA, 19 nt, Artificial Sequence
  Description of Artificial Sequence: Synthetic oligonucleotide
  Antisense strand to SEQ ID NO: 1748189
ucuuaccauccagacguau

SEQ ID NO: 1748191 - RNA, 19 nt, Artificial Sequence
  Description of Artificial Sequence: Synthetic oligonucleotide
  Sense strand starting at position 2122 of SEQ ID NO: 1562453
gcagcugccgugcucaauu

SEQ ID NO: 1748192 - RNA, 19 nt, Artificial Sequence
  Description of Artificial Sequence: Synthetic oligonucleotide
  Antisense strand to SEQ ID NO: 1748191
aauugagcacggcagcugc

SEQ ID NO: 1748193 - RNA, 19 nt, Artificial Sequence
  Description of Artificial Sequence: Synthetic oligonucleotide
  Sense strand starting at position 2517 of SEQ ID NO: 1562453
gcuacucugguggagacau

SEQ ID NO: 1748194 - RNA, 19 nt, Artificial Sequence
  Description of Artificial Sequence: Synthetic oligonucleotide
  Antisense strand to SEQ ID NO: 1748193
augucuccaccagaguagc

SEQ ID NO: 1748195 - RNA, 19 nt, Artificial Sequence
  Description of Artificial Sequence: Synthetic oligonucleotide
  Sense strand starting at position 2535 of SEQ ID NO: 1562453
uggagaaccugugugucua

SEQ ID NO: 1748196 - RNA, 19 nt, Artificial Sequence
  Description of Artificial Sequence: Synthetic oligonucleotide
  Antisense strand to SEQ ID NO: 1748195
uagacacacagguucucca

SEQ ID NO: 1748197 - RNA, 19 nt, Artificial Sequence
  Description of Artificial Sequence: Synthetic oligonucleotide
  Sense strand starting at position 3109 of SEQ ID NO: 1562453
guggcuuagaaacgguaga

SEQ ID NO: 1748198 - RNA, 19 nt, Artificial Sequence
  Description of Artificial Sequence: Synthetic oligonucleotide
  Antisense strand to SEQ ID NO: 1748197
ucuaccguuucuaagccac

SEQ ID NO: 1748199 - RNA, 19 nt, Artificial Sequence
  Description of Artificial Sequence: Synthetic oligonucleotide
  Sense strand starting at position 3110 of SEQ ID NO: 1562453
uggcuuagaaacgguagaa

SEQ ID NO: 1748200 - RNA, 19 nt, Artificial Sequence
  Description of Artificial Sequence: Synthetic oligonucleotide
  Antisense strand to SEQ ID NO: 1748199
uucuaccguuucuaagcca

SEQ ID NO: 1748201 - RNA, 19 nt, Artificial Sequence
  Description of Artificial Sequence: Synthetic oligonucleotide
  Sense strand starting at position 3282 of SEQ ID NO: 1562453
ucauaagagcgcuaaucuu

SEQ ID NO: 1748202 - RNA, 19 nt, Artificial Sequence
  Description of Artificial Sequence: Synthetic oligonucleotide
  Antisense strand to SEQ ID NO: 1748201
aagauuagcgcucuuauga

SEQ ID NO: 1748203 - RNA, 19 nt, Artificial Sequence
  Description of Artificial Sequence: Synthetic oligonucleotide
  Sense strand starting at position 3513 of SEQ ID NO: 1562453
guccaauuacaguauaagu

SEQ ID NO: 1748204 - RNA, 19 nt, Artificial Sequence
  Description of Artificial Sequence: Synthetic oligonucleotide
  Antisense strand to SEQ ID NO: 1748203
acuuauacuguaauuggac

SEQ ID NO: 1748205 - RNA, 19 nt, Artificial Sequence
  Description of Artificial Sequence: Synthetic oligonucleotide
  Sense strand starting at position 3560 of SEQ ID NO: 1562453
ggagaaagaugacaaauaa

SEQ ID NO: 1748206 - RNA, 19 nt, Artificial Sequence
  Description of Artificial Sequence: Synthetic oligonucleotide
  Antisense strand to SEQ ID NO: 1748205
uuauuugucaucuuucucc

SEQ ID NO: 1748207 - RNA, 19 nt, Artificial Sequence
  Description of Artificial Sequence: Synthetic oligonucleotide
  Sense strand starting at position 3650 of SEQ ID NO: 1562453
ugucuugggagucaucaaa

SEQ ID NO: 1748208 - RNA, 19 nt, Artificial Sequence
  Description of Artificial Sequence: Synthetic oligonucleotide
  Antisense strand to SEQ ID NO: 1748207
uuugaugacucccaagaca

SEQ ID NO: 1748209 - RNA, 19 nt, Artificial Sequence
  Description of Artificial Sequence: Synthetic oligonucleotide
  Sense strand starting at position 3676 of SEQ ID NO: 1562453
uaaugaaagugucugcaua

SEQ ID NO: 1748210 - RNA, 19 nt, Artificial Sequence
  Description of Artificial Sequence: Synthetic oligonucleotide
  Antisense strand to SEQ ID NO: 1748209
uaugcagacacuuucauua

SEQ ID NO: 1748211 - RNA, 19 nt, Artificial Sequence
  Description of Artificial Sequence: Synthetic oligonucleotide
  Sense strand starting at position 3677 of SEQ ID NO: 1562453
aaugaaagugucugcauac

SEQ ID NO: 1748212 - RNA, 19 nt, Artificial Sequence
  Description of Artificial Sequence: Synthetic oligonucleotide
  Antisense strand to SEQ ID NO: 1748211
guaugcagacacuuucauu

SEQ ID NO: 1748213 - RNA, 19 nt, Artificial Sequence
  Description of Artificial Sequence: Synthetic oligonucleotide
  Sense strand starting at position 3678 of SEQ ID NO: 1562453
augaaagugucugcauacu

SEQ ID NO: 1748214 - RNA, 19 nt, Artificial Sequence
  Description of Artificial Sequence: Synthetic oligonucleotide
  Antisense strand to SEQ ID NO: 1748213
aguaugcagacacuuucau

SEQ ID NO: 1748215 - RNA, 19 nt, Artificial Sequence
  Description of Artificial Sequence: Synthetic oligonucleotide
  Sense strand starting at position 3689 of SEQ ID NO: 1562453
ugcauacugagguagaauu

SEQ ID NO: 1748216 - RNA, 19 nt, Artificial Sequence
  Description of Artificial Sequence: Synthetic oligonucleotide
  Antisense strand to SEQ ID NO: 1748215
aauucuaccucaguaugca

SEQ ID NO: 1748217 - RNA, 19 nt, Artificial Sequence
  Description of Artificial Sequence: Synthetic oligonucleotide
  Sense strand starting at position 3798 of SEQ ID NO: 1562453
cgaacuauuccagguacug

SEQ ID NO: 1748218 - RNA, 19 nt, Artificial Sequence
  Description of Artificial Sequence: Synthetic oligonucleotide
  Antisense strand to SEQ ID NO: 1748217
caguaccuggaauaguucg

SEQ ID NO: 1748219 - RNA, 19 nt, Artificial Sequence
  Description of Artificial Sequence: Synthetic oligonucleotide
  Sense strand starting at position 9 of SEQ ID NO: 1562454
ggaagcuguucuguggauu

SEQ ID NO: 1748220 - RNA, 19 nt, Artificial Sequence
  Description of Artificial Sequence: Synthetic oligonucleotide
  Antisense strand to SEQ ID NO: 1748219
aauccacagaacagcuucc

SEQ ID NO: 1748221 - RNA, 19 nt, Artificial Sequence
  Description of Artificial Sequence: Synthetic oligonucleotide
  Sense strand starting at position 156 of SEQ ID NO: 1562454
gaaccauugcccuagagua

SEQ ID NO: 1748222 - RNA, 19 nt, Artificial Sequence
  Description of Artificial Sequence: Synthetic oligonucleotide
  Antisense strand to SEQ ID NO: 1748221
uacucuagggcaaugguuc

SEQ ID NO: 1748223 - RNA, 19 nt, Artificial Sequence
  Description of Artificial Sequence: Synthetic oligonucleotide
  Sense strand starting at position 158 of SEQ ID NO: 1562454
accauugcccuagaguaau

SEQ ID NO: 1748224 - RNA, 19 nt, Artificial Sequence
  Description of Artificial Sequence: Synthetic oligonucleotide
  Antisense strand to SEQ ID NO: 1748223
auuacucuagggcaauggu

SEQ ID NO: 1748225 - RNA, 19 nt, Artificial Sequence
  Description of Artificial Sequence: Synthetic oligonucleotide
  Sense strand starting at position 164 of SEQ ID NO: 1562454
gcccuagaguaauuacuau

SEQ ID NO: 1748226 - RNA, 19 nt, Artificial Sequence
  Description of Artificial Sequence: Synthetic oligonucleotide
  Antisense strand to SEQ ID NO: 1748225
auaguaauuacucuagggc

SEQ ID NO: 1748227 - RNA, 19 nt, Artificial Sequence
  Description of Artificial Sequence: Synthetic oligonucleotide
  Sense strand starting at position 185 of SEQ ID NO: 1562454
ccuagauugguccaagccu

SEQ ID NO: 1748228 - RNA, 19 nt, Artificial Sequence
  Description of Artificial Sequence: Synthetic oligonucleotide
  Antisense strand to SEQ ID NO: 1748227
aggcuuggaccaaucuagg

SEQ ID NO: 1748229 - RNA, 19 nt, Artificial Sequence
  Description of Artificial Sequence: Synthetic oligonucleotide
  Sense strand starting at position 245 of SEQ ID NO: 1562454
acaugacaaugugacauaa

SEQ ID NO: 1748230 - RNA, 19 nt, Artificial Sequence
  Description of Artificial Sequence: Synthetic oligonucleotide
  Antisense strand to SEQ ID NO: 1748229
uuaugucacauugucaugu

SEQ ID NO: 1748231 - RNA, 19 nt, Artificial Sequence
  Description of Artificial Sequence: Synthetic oligonucleotide
  Sense strand starting at position 247 of SEQ ID NO: 1562454
augacaaugugacauaaac

SEQ ID NO: 1748232 - RNA, 19 nt, Artificial Sequence
  Description of Artificial Sequence: Synthetic oligonucleotide
  Antisense strand to SEQ ID NO: 1748231
guuuaugucacauugucau

SEQ ID NO: 1748233 - RNA, 19 nt, Artificial Sequence
  Description of Artificial Sequence: Synthetic oligonucleotide
  Sense strand starting at position 343 of SEQ ID NO: 1562454
ggguaauuaucaucauucu

SEQ ID NO: 1748234 - RNA, 19 nt, Artificial Sequence
  Description of Artificial Sequence: Synthetic oligonucleotide
  Antisense strand to SEQ ID NO: 1748233
agaaugaugauaauuaccc

SEQ ID NO: 1748235 - RNA, 19 nt, Artificial Sequence
  Description of Artificial Sequence: Synthetic oligonucleotide
  Sense strand starting at position 357 of SEQ ID NO: 1562454
auucucaucuuagugguaa

SEQ ID NO: 1748236 - RNA, 19 nt, Artificial Sequence
  Description of Artificial Sequence: Synthetic oligonucleotide
  Antisense strand to SEQ ID NO: 1748235
uuaccacuaagaugagaau

SEQ ID NO: 1748237 - RNA, 19 nt, Artificial Sequence
  Description of Artificial Sequence: Synthetic oligonucleotide
  Sense strand starting at position 401 of SEQ ID NO: 1562454
uugauaugaccaggguuac

SEQ ID NO: 1748238 - RNA, 19 nt, Artificial Sequence
  Description of Artificial Sequence: Synthetic oligonucleotide
  Antisense strand to SEQ ID NO: 1748237
guaacccuggucauaucaa

SEQ ID NO: 1748239 - RNA, 19 nt, Artificial Sequence
  Description of Artificial Sequence: Synthetic oligonucleotide
  Sense strand starting at position 402 of SEQ ID NO: 1562454
ugauaugaccaggguuacu

SEQ ID NO: 1748240 - RNA, 19 nt, Artificial Sequence
  Description of Artificial Sequence: Synthetic oligonucleotide
  Antisense strand to SEQ ID NO: 1748239
aguaacccuggucauauca

SEQ ID NO: 1748241 - RNA, 19 nt, Artificial Sequence
  Description of Artificial Sequence: Synthetic oligonucleotide
  Sense strand starting at position 411 of SEQ ID NO: 1562454
caggguuacugccugcuaa

SEQ ID NO: 1748242 - RNA, 19 nt, Artificial Sequence
  Description of Artificial Sequence: Synthetic oligonucleotide
  Antisense strand to SEQ ID NO: 1748241
uuagcaggcaguaacccug

SEQ ID NO: 1748243 - RNA, 19 nt, Artificial Sequence
  Description of Artificial Sequence: Synthetic oligonucleotide
  Sense strand starting at position 893 of SEQ ID NO: 1562454
ucaguauuagcugagaaau

SEQ ID NO: 1748244 - RNA, 19 nt, Artificial Sequence
  Description of Artificial Sequence: Synthetic oligonucleotide
  Antisense strand to SEQ ID NO: 1748243
auuucucagcuaauacuga

SEQ ID NO: 1748245 - RNA, 19 nt, Artificial Sequence
  Description of Artificial Sequence: Synthetic oligonucleotide
  Sense strand starting at position 976 of SEQ ID NO: 1562454
agggaagccuaucuguaga

SEQ ID NO: 1748246 - RNA, 19 nt, Artificial Sequence
  Description of Artificial Sequence: Synthetic oligonucleotide
  Antisense strand to SEQ ID NO: 1748245
ucuacagauaggcuucccu

SEQ ID NO: 1748247 - RNA, 19 nt, Artificial Sequence
  Description of Artificial Sequence: Synthetic oligonucleotide
  Sense strand starting at position 978 of SEQ ID NO: 1562454
ggaagccuaucuguagaua

SEQ ID NO: 1748248 - RNA, 19 nt, Artificial Sequence
  Description of Artificial Sequence: Synthetic oligonucleotide
  Antisense strand to SEQ ID NO: 1748247
uaucuacagauaggcuucc

SEQ ID NO: 1748249 - RNA, 19 nt, Artificial Sequence
  Description of Artificial Sequence: Synthetic oligonucleotide
  Sense strand starting at position 979 of SEQ ID NO: 1562454
gaagccuaucuguagauau

SEQ ID NO: 1748250 - RNA, 19 nt, Artificial Sequence
  Description of Artificial Sequence: Synthetic oligonucleotide
  Antisense strand to SEQ ID NO: 1748249
auaucuacagauaggcuuc

SEQ ID NO: 1748251 - RNA, 19 nt, Artificial Sequence
  Description of Artificial Sequence: Synthetic oligonucleotide
  Sense strand starting at position 1017 of SEQ ID NO: 1562454
agcuauuauuuggaaauag

SEQ ID NO: 1748252 - RNA, 19 nt, Artificial Sequence
  Description of Artificial Sequence: Synthetic oligonucleotide
  Antisense strand to SEQ ID NO: 1748251
cuauuuccaaauaauagcu

SEQ ID NO: 1748253 - RNA, 19 nt, Artificial Sequence
  Description of Artificial Sequence: Synthetic oligonucleotide
  Sense strand starting at position 1368 of SEQ ID NO: 1562454
gucagagacguuggagaga

SEQ ID NO: 1748254 - RNA, 19 nt, Artificial Sequence
  Description of Artificial Sequence: Synthetic oligonucleotide
  Antisense strand to SEQ ID NO: 1748253
ucucuccaacgucucugac

SEQ ID NO: 1748255 - RNA, 19 nt, Artificial Sequence
  Description of Artificial Sequence: Synthetic oligonucleotide
  Sense strand starting at position 1379 of SEQ ID NO: 1562454
uggagagauuuguaaucag

SEQ ID NO: 1748256 - RNA, 19 nt, Artificial Sequence
  Description of Artificial Sequence: Synthetic oligonucleotide
  Antisense strand to SEQ ID NO: 1748255
cugauuacaaaucucucca

SEQ ID NO: 1748257 - RNA, 19 nt, Artificial Sequence
  Description of Artificial Sequence: Synthetic oligonucleotide
  Sense strand starting at position 1443 of SEQ ID NO: 1562454
gucuuucuccuguaaacug

SEQ ID NO: 1748258 - RNA, 19 nt, Artificial Sequence
  Description of Artificial Sequence: Synthetic oligonucleotide
  Antisense strand to SEQ ID NO: 1748257
caguuuacaggagaaagac

SEQ ID NO: 1748259 - RNA, 19 nt, Artificial Sequence
  Description of Artificial Sequence: Synthetic oligonucleotide
  Sense strand starting at position 1639 of SEQ ID NO: 1562454
accugagacuuccagaaag

SEQ ID NO: 1748260 - RNA, 19 nt, Artificial Sequence
  Description of Artificial Sequence: Synthetic oligonucleotide
  Antisense strand to SEQ ID NO: 1748259
cuuucuggaagucucaggu

SEQ ID NO: 1748261 - RNA, 19 nt, Artificial Sequence
  Description of Artificial Sequence: Synthetic oligonucleotide
  Sense strand starting at position 2013 of SEQ ID NO: 1562454
gauuccaguccuggauguu

SEQ ID NO: 1748262 - RNA, 19 nt, Artificial Sequence
  Description of Artificial Sequence: Synthetic oligonucleotide
  Antisense strand to SEQ ID NO: 1748261
aacauccaggacuggaauc

SEQ ID NO: 1748263 - RNA, 19 nt, Artificial Sequence
  Description of Artificial Sequence: Synthetic oligonucleotide
  Sense strand starting at position 2052 of SEQ ID NO: 1562454
cucgcucugccucagauuu

SEQ ID NO: 1748264 - RNA, 19 nt, Artificial Sequence
  Description of Artificial Sequence: Synthetic oligonucleotide
  Antisense strand to SEQ ID NO: 1748263
aaaucugaggcagagcgag

SEQ ID NO: 1748265 - RNA, 19 nt, Artificial Sequence
  Description of Artificial Sequence: Synthetic oligonucleotide
  Sense strand starting at position 2243 of SEQ ID NO: 1562454
aucccagcucugcaguauu

SEQ ID NO: 1748266 - RNA, 19 nt, Artificial Sequence
  Description of Artificial Sequence: Synthetic oligonucleotide
  Antisense strand to SEQ ID NO: 1748265
aauacugcagagcugggau

SEQ ID NO: 1748267 - RNA, 19 nt, Artificial Sequence
  Description of Artificial Sequence: Synthetic oligonucleotide
  Sense strand starting at position 2246 of SEQ ID NO: 1562454
ccagcucugcaguauucua

SEQ ID NO: 1748268 - RNA, 19 nt, Artificial Sequence
  Description of Artificial Sequence: Synthetic oligonucleotide
  Antisense strand to SEQ ID NO: 1748267
uagaauacugcagagcugg

SEQ ID NO: 1748269 - RNA, 19 nt, Artificial Sequence
  Description of Artificial Sequence: Synthetic oligonucleotide
  Sense strand starting at position 2256 of SEQ ID NO: 1562454
aguauucuagcuggauuau

SEQ ID NO: 1748270 - RNA, 19 nt, Artificial Sequence
  Description of Artificial Sequence: Synthetic oligonucleotide
  Antisense strand to SEQ ID NO: 1748269
auaauccagcuagaauacu

SEQ ID NO: 1748271 - RNA, 19 nt, Artificial Sequence
  Description of Artificial Sequence: Synthetic oligonucleotide
  Sense strand starting at position 2257 of SEQ ID NO: 1562454
guauucuagcuggauuaug

SEQ ID NO: 1748272 - RNA, 19 nt, Artificial Sequence
  Description of Artificial Sequence: Synthetic oligonucleotide
  Antisense strand to SEQ ID NO: 1748271
cauaauccagcuagaauac

SEQ ID NO: 1748273 - RNA, 19 nt, Artificial Sequence
  Description of Artificial Sequence: Synthetic oligonucleotide
  Sense strand starting at position 2434 of SEQ ID NO: 1562454
gcagaugggaguuacuauc

SEQ ID NO: 1748274 - RNA, 19 nt, Artificial Sequence
  Description of Artificial Sequence: Synthetic oligonucleotide
  Antisense strand to SEQ ID NO: 1748273
gauaguaacucccaucugc

SEQ ID NO: 1748275 - RNA, 19 nt, Artificial Sequence
  Description of Artificial Sequence: Synthetic oligonucleotide
  Sense strand starting at position 2449 of SEQ ID NO: 1562454
uaucauguauuugagaaug

SEQ ID NO: 1748276 - RNA, 19 nt, Artificial Sequence
  Description of Artificial Sequence: Synthetic oligonucleotide
  Antisense strand to SEQ ID NO: 1748275
cauucucaaauacaugaua

SEQ ID NO: 1748277 - RNA, 19 nt, Artificial Sequence
  Description of Artificial Sequence: Synthetic oligonucleotide
  Sense strand starting at position 2451 of SEQ ID NO: 1562454
ucauguauuugagaaugga

SEQ ID NO: 1748278 - RNA, 19 nt, Artificial Sequence
  Description of Artificial Sequence: Synthetic oligonucleotide
  Antisense strand to SEQ ID NO: 1748277
uccauucucaaauacauga

SEQ ID NO: 1748279 - RNA, 19 nt, Artificial Sequence
  Description of Artificial Sequence: Synthetic oligonucleotide
  Sense strand starting at position 2958 of SEQ ID NO: 1562454
ucauguuuccugcaugauu

SEQ ID NO: 1748280 - RNA, 19 nt, Artificial Sequence
  Description of Artificial Sequence: Synthetic oligonucleotide
  Antisense strand to SEQ ID NO: 1748279
aaucaugcaggaaacauga

SEQ ID NO: 1748281 - RNA, 19 nt, Artificial Sequence
  Description of Artificial Sequence: Synthetic oligonucleotide
  Sense strand starting at position 2983 of SEQ ID NO: 1562454
gguggauaauuagucauaa

SEQ ID NO: 1748282 - RNA, 19 nt, Artificial Sequence
  Description of Artificial Sequence: Synthetic oligonucleotide
  Antisense strand to SEQ ID NO: 1748281
uuaugacuaauuauccacc

SEQ ID NO: 1748283 - RNA, 19 nt, Artificial Sequence
  Description of Artificial Sequence: Synthetic oligonucleotide
  Sense strand starting at position 2984 of SEQ ID NO: 1562454
guggauaauuagucauaaa

SEQ ID NO: 1748284 - RNA, 19 nt, Artificial Sequence
  Description of Artificial Sequence: Synthetic oligonucleotide
  Antisense strand to SEQ ID NO: 1748283
uuuaugacuaauuauccac

SEQ ID NO: 1748285 - RNA, 19 nt, Artificial Sequence
  Description of Artificial Sequence: Synthetic oligonucleotide
  Sense strand starting at position 3019 of SEQ ID NO: 1562454
agcaccauuugguaauaca

SEQ ID NO: 1748286 - RNA, 19 nt, Artificial Sequence
  Description of Artificial Sequence: Synthetic oligonucleotide
  Antisense strand to SEQ ID NO: 1748285
uguauuaccaaauggugcu

SEQ ID NO: 1748287 - RNA, 19 nt, Artificial Sequence
  Description of Artificial Sequence: Synthetic oligonucleotide
  Sense strand starting at position 3064 of SEQ ID NO: 1562454
uggagaaauugugaaugaa

SEQ ID NO: 1748288 - RNA, 19 nt, Artificial Sequence
  Description of Artificial Sequence: Synthetic oligonucleotide
  Antisense strand to SEQ ID NO: 1748287
uucauucacaauuucucca

SEQ ID NO: 1748289 - RNA, 19 nt, Artificial Sequence
  Description of Artificial Sequence: Synthetic oligonucleotide
  Sense strand starting at position 3095 of SEQ ID NO: 1562454
auagauguguuguccagua

SEQ ID NO: 1748290 - RNA, 19 nt, Artificial Sequence
  Description of Artificial Sequence: Synthetic oligonucleotide
  Antisense strand to SEQ ID NO: 1748289
uacuggacaacacaucuau

SEQ ID NO: 1748291 - RNA, 19 nt, Artificial Sequence
  Description of Artificial Sequence: Synthetic oligonucleotide
  Sense strand starting at position 3097 of SEQ ID NO: 1562454
agauguguuguccaguaca

SEQ ID NO: 1748292 - RNA, 19 nt, Artificial Sequence
  Description of Artificial Sequence: Synthetic oligonucleotide
  Antisense strand to SEQ ID NO: 1748291
uguacuggacaacacaucu

SEQ ID NO: 1748293 - RNA, 19 nt, Artificial Sequence
  Description of Artificial Sequence: Synthetic oligonucleotide
  Sense strand starting at position 3390 of SEQ ID NO: 1562454
ucuauugaccaaugcagua

SEQ ID NO: 1748294 - RNA, 19 nt, Artificial Sequence
  Description of Artificial Sequence: Synthetic oligonucleotide
  Antisense strand to SEQ ID NO: 1748293
uacugcauuggucaauaga

SEQ ID NO: 1748295 - RNA, 19 nt, Artificial Sequence
  Description of Artificial Sequence: Synthetic oligonucleotide
  Sense strand starting at position 3503 of SEQ ID NO: 1562454
aggccacaggcuugaugau

SEQ ID NO: 1748296 - RNA, 19 nt, Artificial Sequence
  Description of Artificial Sequence: Synthetic oligonucleotide
  Antisense strand to SEQ ID NO: 1748295
aucaucaagccuguggccu

SEQ ID NO: 1748297 - RNA, 19 nt, Artificial Sequence
  Description of Artificial Sequence: Synthetic oligonucleotide
  Sense strand starting at position 3931 of SEQ ID NO: 1562454
uguaacauuugguagaaga

SEQ ID NO: 1748298 - RNA, 19 nt, Artificial Sequence
  Description of Artificial Sequence: Synthetic oligonucleotide
  Antisense strand to SEQ ID NO: 1748297
ucuucuaccaaauguuaca

SEQ ID NO: 1748299 - RNA, 19 nt, Artificial Sequence
  Description of Artificial Sequence: Synthetic oligonucleotide
  Sense strand starting at position 509 of SEQ ID NO: 1562455
uaaagagauucugggaaau

SEQ ID NO: 1748300 - RNA, 19 nt, Artificial Sequence
  Description of Artificial Sequence: Synthetic oligonucleotide
  Antisense strand to SEQ ID NO: 1748299
auuucccagaaucucuuua

SEQ ID NO: 1748301 - RNA, 19 nt, Artificial Sequence
  Description of Artificial Sequence: Synthetic oligonucleotide
  Sense strand starting at position 696 of SEQ ID NO: 1562455
ggaaucaucuuacccagca

SEQ ID NO: 1748302 - RNA, 19 nt, Artificial Sequence
  Description of Artificial Sequence: Synthetic oligonucleotide
  Antisense strand to SEQ ID NO: 1748301
ugcuggguaagaugauucc

SEQ ID NO: 1748303 - RNA, 19 nt, Artificial Sequence
  Description of Artificial Sequence: Synthetic oligonucleotide
  Sense strand starting at position 746 of SEQ ID NO: 1562455
cuaguauagcuuuggagaa

SEQ ID NO: 1748304 - RNA, 19 nt, Artificial Sequence
  Description of Artificial Sequence: Synthetic oligonucleotide
  Antisense strand to SEQ ID NO: 1748303
uucuccaaagcuauacuag

SEQ ID NO: 1748305 - RNA, 19 nt, Artificial Sequence
  Description of Artificial Sequence: Synthetic oligonucleotide
  Sense strand starting at position 774 of SEQ ID NO: 1562455
acuguuuauuauccaguua

SEQ ID NO: 1748306 - RNA, 19 nt, Artificial Sequence
  Description of Artificial Sequence: Synthetic oligonucleotide
  Antisense strand to SEQ ID NO: 1748305
uaacuggauaauaaacagu

SEQ ID NO: 1748307 - RNA, 19 nt, Artificial Sequence
  Description of Artificial Sequence: Synthetic oligonucleotide
  Sense strand starting at position 987 of SEQ ID NO: 1562455
agucuuaccugcucagaau

SEQ ID NO: 1748308 - RNA, 19 nt, Artificial Sequence
  Description of Artificial Sequence: Synthetic oligonucleotide
  Antisense strand to SEQ ID NO: 1748307
auucugagcagguaagacu

SEQ ID NO: 1748309 - RNA, 19 nt, Artificial Sequence
  Description of Artificial Sequence: Synthetic oligonucleotide
  Sense strand starting at position 988 of SEQ ID NO: 1562455
gucuuaccugcucagaauc

SEQ ID NO: 1748310 - RNA, 19 nt, Artificial Sequence
  Description of Artificial Sequence: Synthetic oligonucleotide
  Antisense strand to SEQ ID NO: 1748309
gauucugagcagguaagac

SEQ ID NO: 1748311 - RNA, 19 nt, Artificial Sequence
  Description of Artificial Sequence: Synthetic oligonucleotide
  Sense strand starting at position 1033 of SEQ ID NO: 1562455
uggcauggauugucucaaa

SEQ ID NO: 1748312 - RNA, 19 nt, Artificial Sequence
  Description of Artificial Sequence: Synthetic oligonucleotide
  Antisense strand to SEQ ID NO: 1748311
uuugagacaauccaugcca

SEQ ID NO: 1748313 - RNA, 19 nt, Artificial Sequence
  Description of Artificial Sequence: Synthetic oligonucleotide
  Sense strand starting at position 1109 of SEQ ID NO: 1562455
acuguuaugcauuguacaa

SEQ ID NO: 1748314 - RNA, 19 nt, Artificial Sequence
  Description of Artificial Sequence: Synthetic oligonucleotide
  Antisense strand to SEQ ID NO: 1748313
uuguacaaugcauaacagu

SEQ ID NO: 1748315 - RNA, 19 nt, Artificial Sequence
  Description of Artificial Sequence: Synthetic oligonucleotide
  Sense strand starting at position 1130 of SEQ ID NO: 1562455
accgaaucacuuuagcaua

SEQ ID NO: 1748316 - RNA, 19 nt, Artificial Sequence
  Description of Artificial Sequence: Synthetic oligonucleotide
  Antisense strand to SEQ ID NO: 1748315
uaugcuaaagugauucggu

SEQ ID NO: 1748317 - RNA, 19 nt, Artificial Sequence
  Description of Artificial Sequence: Synthetic oligonucleotide
  Sense strand starting at position 1253 of SEQ ID NO: 1562455
uguaaauaguccucuggua

SEQ ID NO: 1748318 - RNA, 19 nt, Artificial Sequence
  Description of Artificial Sequence: Synthetic oligonucleotide
  Antisense strand to SEQ ID NO: 1748317
uaccagaggacuauuuaca

SEQ ID NO: 1748319 - RNA, 19 nt, Artificial Sequence
  Description of Artificial Sequence: Synthetic oligonucleotide
  Sense strand starting at position 1255 of SEQ ID NO: 1562455
uaaauaguccucugguaug

SEQ ID NO: 1748320 - RNA, 19 nt, Artificial Sequence
  Description of Artificial Sequence: Synthetic oligonucleotide
  Antisense strand to SEQ ID NO: 1748319
cauaccagaggacuauuua

SEQ ID NO: 1748321 - RNA, 19 nt, Artificial Sequence
  Description of Artificial Sequence: Synthetic oligonucleotide
  Sense strand starting at position 1266 of SEQ ID NO: 1562455
cugguaugguuuccagcua

SEQ ID NO: 1748322 - RNA, 19 nt, Artificial Sequence
  Description of Artificial Sequence: Synthetic oligonucleotide
  Antisense strand to SEQ ID NO: 1748321
uagcuggaaaccauaccag

SEQ ID NO: 1748323 - RNA, 19 nt, Artificial Sequence
  Description of Artificial Sequence: Synthetic oligonucleotide
  Sense strand starting at position 1340 of SEQ ID NO: 1562455
gagaacaucugucugccua

SEQ ID NO: 1748324 - RNA, 19 nt, Artificial Sequence
  Description of Artificial Sequence: Synthetic oligonucleotide
  Antisense strand to SEQ ID NO: 1748323
uaggcagacagauguucuc

SEQ ID NO: 1748325 - RNA, 19 nt, Artificial Sequence
  Description of Artificial Sequence: Synthetic oligonucleotide
  Sense strand starting at position 1341 of SEQ ID NO: 1562455
agaacaucugucugccuau

SEQ ID NO: 1748326 - RNA, 19 nt, Artificial Sequence
  Description of Artificial Sequence: Synthetic oligonucleotide
  Antisense strand to SEQ ID NO: 1748325
auaggcagacagauguucu

SEQ ID NO: 1748327 - RNA, 19 nt, Artificial Sequence
  Description of Artificial Sequence: Synthetic oligonucleotide
  Sense strand starting at position 1344 of SEQ ID NO: 1562455
acaucugucugccuaugaa

SEQ ID NO: 1748328 - RNA, 19 nt, Artificial Sequence
  Description of Artificial Sequence: Synthetic oligonucleotide
  Antisense strand to SEQ ID NO: 1748327
uucauaggcagacagaugu

SEQ ID NO: 1748329 - RNA, 19 nt, Artificial Sequence
  Description of Artificial Sequence: Synthetic oligonucleotide
  Sense strand starting at position 1372 of SEQ ID NO: 1562455
gcaagacugaguggacuuu

SEQ ID NO: 1748330 - RNA, 19 nt, Artificial Sequence
  Description of Artificial Sequence: Synthetic oligonucleotide
  Antisense strand to SEQ ID NO: 1748329
aaaguccacucagucuugc

SEQ ID NO: 1748331 - RNA, 19 nt, Artificial Sequence
  Description of Artificial Sequence: Synthetic oligonucleotide
  Sense strand starting at position 1387 of SEQ ID NO: 1562455
cuuugaguuccacaccaug

SEQ ID NO: 1748332 - RNA, 19 nt, Artificial Sequence
  Description of Artificial Sequence: Synthetic oligonucleotide
  Antisense strand to SEQ ID NO: 1748331
caugguguggaacucaaag

SEQ ID NO: 1748333 - RNA, 19 nt, Artificial Sequence
  Description of Artificial Sequence: Synthetic oligonucleotide
  Sense strand starting at position 1494 of SEQ ID NO: 1562455
guaacagagcuuugguuaa

SEQ ID NO: 1748334 - RNA, 19 nt, Artificial Sequence
  Description of Artificial Sequence: Synthetic oligonucleotide
  Antisense strand to SEQ ID NO: 1748333
uuaaccaaagcucuguuac

SEQ ID NO: 1748335 - RNA, 19 nt, Artificial Sequence
  Description of Artificial Sequence: Synthetic oligonucleotide
  Sense strand starting at position 1496 of SEQ ID NO: 1562455
aacagagcuuugguuaagu

SEQ ID NO: 1748336 - RNA, 19 nt, Artificial Sequence
  Description of Artificial Sequence: Synthetic oligonucleotide
  Antisense strand to SEQ ID NO: 1748335
acuuaaccaaagcucuguu

SEQ ID NO: 1748337 - RNA, 19 nt, Artificial Sequence
  Description of Artificial Sequence: Synthetic oligonucleotide
  Sense strand starting at position 1555 of SEQ ID NO: 1562455
uggcuuaccucacuuaguu

SEQ ID NO: 1748338 - RNA, 19 nt, Artificial Sequence
  Description of Artificial Sequence: Synthetic oligonucleotide
  Antisense strand to SEQ ID NO: 1748337
aacuaagugagguaagcca

SEQ ID NO: 1748339 - RNA, 19 nt, Artificial Sequence
  Description of Artificial Sequence: Synthetic oligonucleotide
  Sense strand starting at position 2018 of SEQ ID NO: 1562455
ugucuauuccagcaaacug

SEQ ID NO: 1748340 - RNA, 19 nt, Artificial Sequence
  Description of Artificial Sequence: Synthetic oligonucleotide
  Antisense strand to SEQ ID NO: 1748339
caguuugcuggaauagaca

SEQ ID NO: 1748341 - RNA, 19 nt, Artificial Sequence
  Description of Artificial Sequence: Synthetic oligonucleotide
  Sense strand starting at position 2132 of SEQ ID NO: 1562455
agaugauagcagcgaggau

SEQ ID NO: 1748342 - RNA, 19 nt, Artificial Sequence
  Description of Artificial Sequence: Synthetic oligonucleotide
  Antisense strand to SEQ ID NO: 1748341
auccucgcugcuaucaucu

SEQ ID NO: 1748343 - RNA, 19 nt, Artificial Sequence
  Description of Artificial Sequence: Synthetic oligonucleotide
  Sense strand starting at position 2144 of SEQ ID NO: 1562455
cgaggauccugguuaagaa

SEQ ID NO: 1748344 - RNA, 19 nt, Artificial Sequence
  Description of Artificial Sequence: Synthetic oligonucleotide
  Antisense strand to SEQ ID NO: 1748343
uucuuaaccaggauccucg

SEQ ID NO: 1748345 - RNA, 19 nt, Artificial Sequence
  Description of Artificial Sequence: Synthetic oligonucleotide
  Sense strand starting at position 2153 of SEQ ID NO: 1562455
ugguuaagaaugugagguu

SEQ ID NO: 1748346 - RNA, 19 nt, Artificial Sequence
  Description of Artificial Sequence: Synthetic oligonucleotide
  Antisense strand to SEQ ID NO: 1748345
aaccucacauucuuaacca

SEQ ID NO: 1748347 - RNA, 19 nt, Artificial Sequence
  Description of Artificial Sequence: Synthetic oligonucleotide
  Sense strand starting at position 2160 of SEQ ID NO: 1562455
gaaugugagguuugagguu

SEQ ID NO: 1748348 - RNA, 19 nt, Artificial Sequence
  Description of Artificial Sequence: Synthetic oligonucleotide
  Antisense strand to SEQ ID NO: 1748347
aaccucaaaccucacauuc

SEQ ID NO: 1748349 - RNA, 19 nt, Artificial Sequence
  Description of Artificial Sequence: Synthetic oligonucleotide
  Sense strand starting at position 2189 of SEQ ID NO: 1562455
ugggcuugaugacucgauu

SEQ ID NO: 1748350 - RNA, 19 nt, Artificial Sequence
  Description of Artificial Sequence: Synthetic oligonucleotide
  Antisense strand to SEQ ID NO: 1748349
aaucgagucaucaagccca

SEQ ID NO: 1748351 - RNA, 19 nt, Artificial Sequence
  Description of Artificial Sequence: Synthetic oligonucleotide
  Sense strand starting at position 2291 of SEQ ID NO: 1562455
uguaaaccuggaugucauu

SEQ ID NO: 1748352 - RNA, 19 nt, Artificial Sequence
  Description of Artificial Sequence: Synthetic oligonucleotide
  Antisense strand to SEQ ID NO: 1748351
aaugacauccagguuuaca

SEQ ID NO: 1748353 - RNA, 19 nt, Artificial Sequence
  Description of Artificial Sequence: Synthetic oligonucleotide
  Sense strand starting at position 2297 of SEQ ID NO: 1562455
ccuggaugucauugguacu

SEQ ID NO: 1748354 - RNA, 19 nt, Artificial Sequence
  Description of Artificial Sequence: Synthetic oligonucleotide
  Antisense strand to SEQ ID NO: 1748353
aguaccaaugacauccagg

SEQ ID NO: 1748355 - RNA, 19 nt, Artificial Sequence
  Description of Artificial Sequence: Synthetic oligonucleotide
  Sense strand starting at position 2298 of SEQ ID NO: 1562455
cuggaugucauugguacuu

SEQ ID NO: 1748356 - RNA, 19 nt, Artificial Sequence
  Description of Artificial Sequence: Synthetic oligonucleotide
  Antisense strand to SEQ ID NO: 1748355
aaguaccaaugacauccag

SEQ ID NO: 1748357 - RNA, 19 nt, Artificial Sequence
  Description of Artificial Sequence: Synthetic oligonucleotide
  Sense strand starting at position 2992 of SEQ ID NO: 1562455
gaaguaucuuaagugcaua

SEQ ID NO: 1748358 - RNA, 19 nt, Artificial Sequence
  Description of Artificial Sequence: Synthetic oligonucleotide
  Antisense strand to SEQ ID NO: 1748357
uaugcacuuaagauacuuc

SEQ ID NO: 1748359 - RNA, 19 nt, Artificial Sequence
  Description of Artificial Sequence: Synthetic oligonucleotide
  Sense strand starting at position 2995 of SEQ ID NO: 1562455
guaucuuaagugcauauua

SEQ ID NO: 1748360 - RNA, 19 nt, Artificial Sequence
  Description of Artificial Sequence: Synthetic oligonucleotide
  Antisense strand to SEQ ID NO: 1748359
uaauaugcacuuaagauac

SEQ ID NO: 1748361 - RNA, 19 nt, Artificial Sequence
  Description of Artificial Sequence: Synthetic oligonucleotide
  Sense strand starting at position 3041 of SEQ ID NO: 1562455
ggcuacaugcuguauaauu

SEQ ID NO: 1748362 - RNA, 19 nt, Artificial Sequence
  Description of Artificial Sequence: Synthetic oligonucleotide
  Antisense strand to SEQ ID NO: 1748361
aauuauacagcauguagcc

SEQ ID NO: 1748363 - RNA, 19 nt, Artificial Sequence
  Description of Artificial Sequence: Synthetic oligonucleotide
  Sense strand starting at position 3148 of SEQ ID NO: 1562455
ggaugaauagguggugcau

SEQ ID NO: 1748364 - RNA, 19 nt, Artificial Sequence
  Description of Artificial Sequence: Synthetic oligonucleotide
  Antisense strand to SEQ ID NO: 1748363
augcaccaccuauucaucc

SEQ ID NO: 1748365 - RNA, 19 nt, Artificial Sequence
  Description of Artificial Sequence: Synthetic oligonucleotide
  Sense strand starting at position 3200 of SEQ ID NO: 1562455
ugagacuguaaugguagau

SEQ ID NO: 1748366 - RNA, 19 nt, Artificial Sequence
  Description of Artificial Sequence: Synthetic oligonucleotide
  Antisense strand to SEQ ID NO: 1748365
aucuaccauuacagucuca

SEQ ID NO: 1748367 - RNA, 19 nt, Artificial Sequence
  Description of Artificial Sequence: Synthetic oligonucleotide
  Sense strand starting at position 3462 of SEQ ID NO: 1562455
aggcuuucuuaaucuaaug

SEQ ID NO: 1748368 - RNA, 19 nt, Artificial Sequence
  Description of Artificial Sequence: Synthetic oligonucleotide
  Antisense strand to SEQ ID NO: 1748367
cauuagauuaagaaagccu

SEQ ID NO: 1748369 - RNA, 19 nt, Artificial Sequence
  Description of Artificial Sequence: Synthetic oligonucleotide
  Sense strand starting at position 3487 of SEQ ID NO: 1562455
aggcuaauuuguuaugaua

SEQ ID NO: 1748370 - RNA, 19 nt, Artificial Sequence
  Description of Artificial Sequence: Synthetic oligonucleotide
  Antisense strand to SEQ ID NO: 1748369
uaucauaacaaauuagccu

SEQ ID NO: 1748371 - RNA, 19 nt, Artificial Sequence
  Description of Artificial Sequence: Synthetic oligonucleotide
  Sense strand starting at position 3691 of SEQ ID NO: 1562455
auacaauagucuuugucag

SEQ ID NO: 1748372 - RNA, 19 nt, Artificial Sequence
  Description of Artificial Sequence: Synthetic oligonucleotide
  Antisense strand to SEQ ID NO: 1748371
cugacaaagacuauuguau

SEQ ID NO: 1748373 - RNA, 19 nt, Artificial Sequence
  Description of Artificial Sequence: Synthetic oligonucleotide
  Sense strand starting at position 3693 of SEQ ID NO: 1562455
acaauagucuuugucagua

SEQ ID NO: 1748374 - RNA, 19 nt, Artificial Sequence
  Description of Artificial Sequence: Synthetic oligonucleotide
  Antisense strand to SEQ ID NO: 1748373
uacugacaaagacuauugu

SEQ ID NO: 1748375 - RNA, 19 nt, Artificial Sequence
  Description of Artificial Sequence: Synthetic oligonucleotide
  Sense strand starting at position 3765 of SEQ ID NO: 1562455
caggcuugaggaugaauga

SEQ ID NO: 1748376 - RNA, 19 nt, Artificial Sequence
  Description of Artificial Sequence: Synthetic oligonucleotide
  Antisense strand to SEQ ID NO: 1748375
ucauucauccucaagccug

SEQ ID NO: 1748377 - RNA, 19 nt, Artificial Sequence
  Description of Artificial Sequence: Synthetic oligonucleotide
  Sense strand starting at position 3857 of SEQ ID NO: 1562455
ggaugcacuccguaucaaa

SEQ ID NO: 1748378 - RNA, 19 nt, Artificial Sequence
  Description of Artificial Sequence: Synthetic oligonucleotide
  Antisense strand to SEQ ID NO: 1748377
uuugauacggagugcaucc

SEQ ID NO: 1748379 - RNA, 19 nt, Artificial Sequence
  Description of Artificial Sequence: Synthetic oligonucleotide
  Sense strand starting at position 81 of SEQ ID NO: 1562456
acaauaagauauguacagu

SEQ ID NO: 1748380 - RNA, 19 nt, Artificial Sequence
  Description of Artificial Sequence: Synthetic oligonucleotide
  Antisense strand to SEQ ID NO: 1748379
acuguacauaucuuauugu

SEQ ID NO: 1748381 - RNA, 19 nt, Artificial Sequence
  Description of Artificial Sequence: Synthetic oligonucleotide
  Sense strand starting at position 121 of SEQ ID NO: 1562456
auacauaugcaguacauau

SEQ ID NO: 1748382 - RNA, 19 nt, Artificial Sequence
  Description of Artificial Sequence: Synthetic oligonucleotide
  Antisense strand to SEQ ID NO: 1748381
auauguacugcauauguau

SEQ ID NO: 1748383 - RNA, 19 nt, Artificial Sequence
  Description of Artificial Sequence: Synthetic oligonucleotide
  Sense strand starting at position 232 of SEQ ID NO: 1562456
ugcauauauguauacagua

SEQ ID NO: 1748384 - RNA, 19 nt, Artificial Sequence
  Description of Artificial Sequence: Synthetic oligonucleotide
  Antisense strand to SEQ ID NO: 1748383
uacuguauacauauaugca

SEQ ID NO: 1748385 - RNA, 19 nt, Artificial Sequence
  Description of Artificial Sequence: Synthetic oligonucleotide
  Sense strand starting at position 374 of SEQ ID NO: 1562456
guacacauacuaugcauau

SEQ ID NO: 1748386 - RNA, 19 nt, Artificial Sequence
  Description of Artificial Sequence: Synthetic oligonucleotide
  Antisense strand to SEQ ID NO: 1748385
auaugcauaguauguguac

SEQ ID NO: 1748387 - RNA, 19 nt, Artificial Sequence
  Description of Artificial Sequence: Synthetic oligonucleotide
  Sense strand starting at position 590 of SEQ ID NO: 1562456
ucccaaugugcugauagua

SEQ ID NO: 1748388 - RNA, 19 nt, Artificial Sequence
  Description of Artificial Sequence: Synthetic oligonucleotide
  Antisense strand to SEQ ID NO: 1748387
uacuaucagcacauuggga

SEQ ID NO: 1748389 - RNA, 19 nt, Artificial Sequence
  Description of Artificial Sequence: Synthetic oligonucleotide
  Sense strand starting at position 656 of SEQ ID NO: 1562456
cauugaaagcaucgaagau

SEQ ID NO: 1748390 - RNA, 19 nt, Artificial Sequence
  Description of Artificial Sequence: Synthetic oligonucleotide
  Antisense strand to SEQ ID NO: 1748389
aucuucgaugcuuucaaug

SEQ ID NO: 1748391 - RNA, 19 nt, Artificial Sequence
  Description of Artificial Sequence: Synthetic oligonucleotide
  Sense strand starting at position 692 of SEQ ID NO: 1562456
uuuaaacaagcaugguauu

SEQ ID NO: 1748392 - RNA, 19 nt, Artificial Sequence
  Description of Artificial Sequence: Synthetic oligonucleotide
  Antisense strand to SEQ ID NO: 1748391
aauaccaugcuuguuuaaa

SEQ ID NO: 1748393 - RNA, 19 nt, Artificial Sequence
  Description of Artificial Sequence: Synthetic oligonucleotide
  Sense strand starting at position 731 of SEQ ID NO: 1562456
agggucauaucacuuaaua

SEQ ID NO: 1748394 - RNA, 19 nt, Artificial Sequence
  Description of Artificial Sequence: Synthetic oligonucleotide
  Antisense strand to SEQ ID NO: 1748393
uauuaagugauaugacccu

SEQ ID NO: 1748395 - RNA, 19 nt, Artificial Sequence
  Description of Artificial Sequence: Synthetic oligonucleotide
  Sense strand starting at position 742 of SEQ ID NO: 1562456
acuuaauagucucugguau

SEQ ID NO: 1748396 - RNA, 19 nt, Artificial Sequence
  Description of Artificial Sequence: Synthetic oligonucleotide
  Antisense strand to SEQ ID NO: 1748395
auaccagagacuauuaagu

SEQ ID NO: 1748397 - RNA, 19 nt, Artificial Sequence
  Description of Artificial Sequence: Synthetic oligonucleotide
  Sense strand starting at position 743 of SEQ ID NO: 1562456
cuuaauagucucugguaua

SEQ ID NO: 1748398 - RNA, 19 nt, Artificial Sequence
  Description of Artificial Sequence: Synthetic oligonucleotide
  Antisense strand to SEQ ID NO: 1748397
uauaccagagacuauuaag

SEQ ID NO: 1748399 - RNA, 19 nt, Artificial Sequence
  Description of Artificial Sequence: Synthetic oligonucleotide
  Sense strand starting at position 763 of SEQ ID NO: 1562456
uuuagucaagaguaguaua

SEQ ID NO: 1748400 - RNA, 19 nt, Artificial Sequence
  Description of Artificial Sequence: Synthetic oligonucleotide
  Antisense strand to SEQ ID NO: 1748399
uauacuacucuugacuaaa

SEQ ID NO: 1748401 - RNA, 19 nt, Artificial Sequence
  Description of Artificial Sequence: Synthetic oligonucleotide
  Sense strand starting at position 853 of SEQ ID NO: 1562456
gcuccuaugcuagacaaug

SEQ ID NO: 1748402 - RNA, 19 nt, Artificial Sequence
  Description of Artificial Sequence: Synthetic oligonucleotide
  Antisense strand to SEQ ID NO: 1748401
cauugucuagcauaggagc

SEQ ID NO: 1748403 - RNA, 19 nt, Artificial Sequence
  Description of Artificial Sequence: Synthetic oligonucleotide
  Sense strand starting at position 865 of SEQ ID NO: 1562456
gacaauggguguccucaga

SEQ ID NO: 1748404 - RNA, 19 nt, Artificial Sequence
  Description of Artificial Sequence: Synthetic oligonucleotide
  Antisense strand to SEQ ID NO: 1748403
ucugaggacacccauuguc

SEQ ID NO: 1748405 - RNA, 19 nt, Artificial Sequence
  Description of Artificial Sequence: Synthetic oligonucleotide
  Sense strand starting at position 1002 of SEQ ID NO: 1562456
cuuugaaugcucuacuuag

SEQ ID NO: 1748406 - RNA, 19 nt, Artificial Sequence
  Description of Artificial Sequence: Synthetic oligonucleotide
  Antisense strand to SEQ ID NO: 1748405
cuaaguagagcauucaaag

SEQ ID NO: 1748407 - RNA, 19 nt, Artificial Sequence
  Description of Artificial Sequence: Synthetic oligonucleotide
  Sense strand starting at position 1202 of SEQ ID NO: 1562456
gcaguacaaguuuaauaac

SEQ ID NO: 1748408 - RNA, 19 nt, Artificial Sequence
  Description of Artificial Sequence: Synthetic oligonucleotide
  Antisense strand to SEQ ID NO: 1748407
guuauuaaacuuguacugc

SEQ ID NO: 1748409 - RNA, 19 nt, Artificial Sequence
  Description of Artificial Sequence: Synthetic oligonucleotide
  Sense strand starting at position 1334 of SEQ ID NO: 1562456
ggcacuuguuggaaggaga

SEQ ID NO: 1748410 - RNA, 19 nt, Artificial Sequence
  Description of Artificial Sequence: Synthetic oligonucleotide
  Antisense strand to SEQ ID NO: 1748409
ucuccuuccaacaagugcc

SEQ ID NO: 1748411 - RNA, 19 nt, Artificial Sequence
  Description of Artificial Sequence: Synthetic oligonucleotide
  Sense strand starting at position 1511 of SEQ ID NO: 1562456
acuuuacuacaguaaugua

SEQ ID NO: 1748412 - RNA, 19 nt, Artificial Sequence
  Description of Artificial Sequence: Synthetic oligonucleotide
  Antisense strand to SEQ ID NO: 1748411
uacauuacuguaguaaagu

SEQ ID NO: 1748413 - RNA, 19 nt, Artificial Sequence
  Description of Artificial Sequence: Synthetic oligonucleotide
  Sense strand starting at position 1580 of SEQ ID NO: 1562456
cgacguccuuauuuauagu

SEQ ID NO: 1748414 - RNA, 19 nt, Artificial Sequence
  Description of Artificial Sequence: Synthetic oligonucleotide
  Antisense strand to SEQ ID NO: 1748413
acuauaaauaaggacgucg

SEQ ID NO: 1748415 - RNA, 19 nt, Artificial Sequence
  Description of Artificial Sequence: Synthetic oligonucleotide
  Sense strand starting at position 1615 of SEQ ID NO: 1562456
acacauaugugaccauacu

SEQ ID NO: 1748416 - RNA, 19 nt, Artificial Sequence
  Description of Artificial Sequence: Synthetic oligonucleotide
  Antisense strand to SEQ ID NO: 1748415
aguauggucacauaugugu

SEQ ID NO: 1748417 - RNA, 19 nt, Artificial Sequence
  Description of Artificial Sequence: Synthetic oligonucleotide
  Sense strand starting at position 1668 of SEQ ID NO: 1562456
uggacuccuugaguugaaa

SEQ ID NO: 1748418 - RNA, 19 nt, Artificial Sequence
  Description of Artificial Sequence: Synthetic oligonucleotide
  Antisense strand to SEQ ID NO: 1748417
uuucaacucaaggagucca

SEQ ID NO: 1748419 - RNA, 19 nt, Artificial Sequence
  Description of Artificial Sequence: Synthetic oligonucleotide
  Sense strand starting at position 1690 of SEQ ID NO: 1562456
aagucuaauugauuaacgu

SEQ ID NO: 1748420 - RNA, 19 nt, Artificial Sequence
  Description of Artificial Sequence: Synthetic oligonucleotide
  Antisense strand to SEQ ID NO: 1748419
acguuaaucaauuagacuu

SEQ ID NO: 1748421 - RNA, 19 nt, Artificial Sequence
  Description of Artificial Sequence: Synthetic oligonucleotide
  Sense strand starting at position 1691 of SEQ ID NO: 1562456
agucuaauugauuaacgua

SEQ ID NO: 1748422 - RNA, 19 nt, Artificial Sequence
  Description of Artificial Sequence: Synthetic oligonucleotide
  Antisense strand to SEQ ID NO: 1748421
uacguuaaucaauuagacu

SEQ ID NO: 1748423 - RNA, 19 nt, Artificial Sequence
  Description of Artificial Sequence: Synthetic oligonucleotide
  Sense strand starting at position 1765 of SEQ ID NO: 1562456
uuuguuaaagaauggauca

SEQ ID NO: 1748424 - RNA, 19 nt, Artificial Sequence
  Description of Artificial Sequence: Synthetic oligonucleotide
  Antisense strand to SEQ ID NO: 1748423
ugauccauucuuuaacaaa

SEQ ID NO: 1748425 - RNA, 19 nt, Artificial Sequence
  Description of Artificial Sequence: Synthetic oligonucleotide
  Sense strand starting at position 2290 of SEQ ID NO: 1562456
gcuugauauguuuauaaug

SEQ ID NO: 1748426 - RNA, 19 nt, Artificial Sequence
  Description of Artificial Sequence: Synthetic oligonucleotide
  Antisense strand to SEQ ID NO: 1748425
cauuauaaacauaucaagc

SEQ ID NO: 1748427 - RNA, 19 nt, Artificial Sequence
  Description of Artificial Sequence: Synthetic oligonucleotide
  Sense strand starting at position 2372 of SEQ ID NO: 1562456
gggacucagacuuacgcaa

SEQ ID NO: 1748428 - RNA, 19 nt, Artificial Sequence
  Description of Artificial Sequence: Synthetic oligonucleotide
  Antisense strand to SEQ ID NO: 1748427
uugcguaagucugaguccc

SEQ ID NO: 1748429 - RNA, 19 nt, Artificial Sequence
  Description of Artificial Sequence: Synthetic oligonucleotide
  Sense strand starting at position 2574 of SEQ ID NO: 1562456
uggcaaauacaaugugacu

SEQ ID NO: 1748430 - RNA, 19 nt, Artificial Sequence
  Description of Artificial Sequence: Synthetic oligonucleotide
  Antisense strand to SEQ ID NO: 1748429
agucacauuguauuugcca

SEQ ID NO: 1748431 - RNA, 19 nt, Artificial Sequence
  Description of Artificial Sequence: Synthetic oligonucleotide
  Sense strand starting at position 2601 of SEQ ID NO: 1562456
guccuuaagcuagaacuuu

SEQ ID NO: 1748432 - RNA, 19 nt, Artificial Sequence
  Description of Artificial Sequence: Synthetic oligonucleotide
  Antisense strand to SEQ ID NO: 1748431
aaaguucuagcuuaaggac

SEQ ID NO: 1748433 - RNA, 19 nt, Artificial Sequence
  Description of Artificial Sequence: Synthetic oligonucleotide
  Sense strand starting at position 2609 of SEQ ID NO: 1562456
gcuagaacuuucuuacuga

SEQ ID NO: 1748434 - RNA, 19 nt, Artificial Sequence
  Description of Artificial Sequence: Synthetic oligonucleotide
  Antisense strand to SEQ ID NO: 1748433
ucaguaagaaaguucuagc

SEQ ID NO: 1748435 - RNA, 19 nt, Artificial Sequence
  Description of Artificial Sequence: Synthetic oligonucleotide
  Sense strand starting at position 2751 of SEQ ID NO: 1562456
uguguuucuccauaacuug

SEQ ID NO: 1748436 - RNA, 19 nt, Artificial Sequence
  Description of Artificial Sequence: Synthetic oligonucleotide
  Antisense strand to SEQ ID NO: 1748435
caaguuauggagaaacaca

SEQ ID NO: 1748437 - RNA, 19 nt, Artificial Sequence
  Description of Artificial Sequence: Synthetic oligonucleotide
  Sense strand starting at position 2780 of SEQ ID NO: 1562456
acacauugggucuguaauc

SEQ ID NO: 1748438 - RNA, 19 nt, Artificial Sequence
  Description of Artificial Sequence: Synthetic oligonucleotide
  Antisense strand to SEQ ID NO: 1748437
gauuacagacccaaugugu

SEQ ID NO: 1748439 - RNA, 19 nt, Artificial Sequence
  Description of Artificial Sequence: Synthetic oligonucleotide
  Sense strand starting at position 2811 of SEQ ID NO: 1562456
guuauuuagcaaugauagc

SEQ ID NO: 1748440 - RNA, 19 nt, Artificial Sequence
  Description of Artificial Sequence: Synthetic oligonucleotide
  Antisense strand to SEQ ID NO: 1748439
gcuaucauugcuaaauaac

SEQ ID NO: 1748441 - RNA, 19 nt, Artificial Sequence
  Description of Artificial Sequence: Synthetic oligonucleotide
  Sense strand starting at position 2950 of SEQ ID NO: 1562456
ccacgauucguggccaugu

SEQ ID NO: 1748442 - RNA, 19 nt, Artificial Sequence
  Description of Artificial Sequence: Synthetic oligonucleotide
  Antisense strand to SEQ ID NO: 1748441
acauggccacgaaucgugg

SEQ ID NO: 1748443 - RNA, 19 nt, Artificial Sequence
  Description of Artificial Sequence: Synthetic oligonucleotide
  Sense strand starting at position 3044 of SEQ ID NO: 1562456
gguucucagacucguauuu

SEQ ID NO: 1748444 - RNA, 19 nt, Artificial Sequence
  Description of Artificial Sequence: Synthetic oligonucleotide
  Antisense strand to SEQ ID NO: 1748443
aaauacgagucugagaacc

SEQ ID NO: 1748445 - RNA, 19 nt, Artificial Sequence
  Description of Artificial Sequence: Synthetic oligonucleotide
  Sense strand starting at position 3431 of SEQ ID NO: 1562456
augucuuaagagcauccaa

SEQ ID NO: 1748446 - RNA, 19 nt, Artificial Sequence
  Description of Artificial Sequence: Synthetic oligonucleotide
  Antisense strand to SEQ ID NO: 1748445
uuggaugcucuuaagacau

SEQ ID NO: 1748447 - RNA, 19 nt, Artificial Sequence
  Description of Artificial Sequence: Synthetic oligonucleotide
  Sense strand starting at position 3458 of SEQ ID NO: 1562456
uuagcuagugaagaugauu

SEQ ID NO: 1748448 - RNA, 19 nt, Artificial Sequence
  Description of Artificial Sequence: Synthetic oligonucleotide
  Antisense strand to SEQ ID NO: 1748447
aaucaucuucacuagcuaa

SEQ ID NO: 1748449 - RNA, 19 nt, Artificial Sequence
  Description of Artificial Sequence: Synthetic oligonucleotide
  Sense strand starting at position 3488 of SEQ ID NO: 1562456
accggauaucauuaguauc

SEQ ID NO: 1748450 - RNA, 19 nt, Artificial Sequence
  Description of Artificial Sequence: Synthetic oligonucleotide
  Antisense strand to SEQ ID NO: 1748449
gauacuaaugauauccggu

SEQ ID NO: 1748451 - RNA, 19 nt, Artificial Sequence
  Description of Artificial Sequence: Synthetic oligonucleotide
  Sense strand starting at position 3499 of SEQ ID NO: 1562456
uuaguaucccuuuaggaca

SEQ ID NO: 1748452 - RNA, 19 nt, Artificial Sequence
  Description of Artificial Sequence: Synthetic oligonucleotide
  Antisense strand to SEQ ID NO: 1748451
uguccuaaagggauacuaa

SEQ ID NO: 1748453 - RNA, 19 nt, Artificial Sequence
  Description of Artificial Sequence: Synthetic oligonucleotide
  Sense strand starting at position 3557 of SEQ ID NO: 1562456
gaguaaaggaguggccauu

SEQ ID NO: 1748454 - RNA, 19 nt, Artificial Sequence
  Description of Artificial Sequence: Synthetic oligonucleotide
  Antisense strand to SEQ ID NO: 1748453
aauggccacuccuuuacuc

SEQ ID NO: 1748455 - RNA, 19 nt, Artificial Sequence
  Description of Artificial Sequence: Synthetic oligonucleotide
  Sense strand starting at position 3563 of SEQ ID NO: 1562456
aggaguggccauuauauua

SEQ ID NO: 1748456 - RNA, 19 nt, Artificial Sequence
  Description of Artificial Sequence: Synthetic oligonucleotide
  Antisense strand to SEQ ID NO: 1748455
uaauauaauggccacuccu

SEQ ID NO: 1748457 - RNA, 19 nt, Artificial Sequence
  Description of Artificial Sequence: Synthetic oligonucleotide
  Sense strand starting at position 3780 of SEQ ID NO: 1562456
acauaacugggauguaagu

SEQ ID NO: 1748458 - RNA, 19 nt, Artificial Sequence
  Description of Artificial Sequence: Synthetic oligonucleotide
  Antisense strand to SEQ ID NO: 1748457
acuuacaucccaguuaugu

SEQ ID NO: 1748459 - RNA, 19 nt, Artificial Sequence
  Description of Artificial Sequence: Synthetic oligonucleotide
  Sense strand starting at position 21 of SEQ ID NO: 1562457
agaguacuauauucuguag

SEQ ID NO: 1748460 - RNA, 19 nt, Artificial Sequence
  Description of Artificial Sequence: Synthetic oligonucleotide
  Antisense strand to SEQ ID NO: 1748459
cuacagaauauaguacucu

SEQ ID NO: 1748461 - RNA, 19 nt, Artificial Sequence
  Description of Artificial Sequence: Synthetic oligonucleotide
  Sense strand starting at position 24 of SEQ ID NO: 1562457
guacuauauucuguaggga

SEQ ID NO: 1748462 - RNA, 19 nt, Artificial Sequence
  Description of Artificial Sequence: Synthetic oligonucleotide
  Antisense strand to SEQ ID NO: 1748461
ucccuacagaauauaguac

SEQ ID NO: 1748463 - RNA, 19 nt, Artificial Sequence
  Description of Artificial Sequence: Synthetic oligonucleotide
  Sense strand starting at position 103 of SEQ ID NO: 1562457
uugaguacuuucucuauau

SEQ ID NO: 1748464 - RNA, 19 nt, Artificial Sequence
  Description of Artificial Sequence: Synthetic oligonucleotide
  Antisense strand to SEQ ID NO: 1748463
auauagagaaaguacucaa

SEQ ID NO: 1748465 - RNA, 19 nt, Artificial Sequence
  Description of Artificial Sequence: Synthetic oligonucleotide
  Sense strand starting at position 104 of SEQ ID NO: 1562457
ugaguacuuucucuauauu

SEQ ID NO: 1748466 - RNA, 19 nt, Artificial Sequence
  Description of Artificial Sequence: Synthetic oligonucleotide
  Antisense strand to SEQ ID NO: 1748465
aauauagagaaaguacuca

SEQ ID NO: 1748467 - RNA, 19 nt, Artificial Sequence
  Description of Artificial Sequence: Synthetic oligonucleotide
  Sense strand starting at position 298 of SEQ ID NO: 1562457
aaugguucuccagaauggu

SEQ ID NO: 1748468 - RNA, 19 nt, Artificial Sequence
  Description of Artificial Sequence: Synthetic oligonucleotide
  Antisense strand to SEQ ID NO: 1748467
accauucuggagaaccauu

SEQ ID NO: 1748469 - RNA, 19 nt, Artificial Sequence
  Description of Artificial Sequence: Synthetic oligonucleotide
  Sense strand starting at position 322 of SEQ ID NO: 1562457
cguugagguagucagggau

SEQ ID NO: 1748470 - RNA, 19 nt, Artificial Sequence
  Description of Artificial Sequence: Synthetic oligonucleotide
  Antisense strand to SEQ ID NO: 1748469
aucccugacuaccucaacg

SEQ ID NO: 1748471 - RNA, 19 nt, Artificial Sequence
  Description of Artificial Sequence: Synthetic oligonucleotide
  Sense strand starting at position 325 of SEQ ID NO: 1562457
ugagguagucagggauguu

SEQ ID NO: 1748472 - RNA, 19 nt, Artificial Sequence
  Description of Artificial Sequence: Synthetic oligonucleotide
  Antisense strand to SEQ ID NO: 1748471
aacaucccugacuaccuca

SEQ ID NO: 1748473 - RNA, 19 nt, Artificial Sequence
  Description of Artificial Sequence: Synthetic oligonucleotide
  Sense strand starting at position 326 of SEQ ID NO: 1562457
gagguagucagggauguuc

SEQ ID NO: 1748474 - RNA, 19 nt, Artificial Sequence
  Description of Artificial Sequence: Synthetic oligonucleotide
  Antisense strand to SEQ ID NO: 1748473
gaacaucccugacuaccuc

SEQ ID NO: 1748475 - RNA, 19 nt, Artificial Sequence
  Description of Artificial Sequence: Synthetic oligonucleotide
  Sense strand starting at position 328 of SEQ ID NO: 1562457
gguagucagggauguucuu

SEQ ID NO: 1748476 - RNA, 19 nt, Artificial Sequence
  Description of Artificial Sequence: Synthetic oligonucleotide
  Antisense strand to SEQ ID NO: 1748475
aagaacaucccugacuacc

SEQ ID NO: 1748477 - RNA, 19 nt, Artificial Sequence
  Description of Artificial Sequence: Synthetic oligonucleotide
  Sense strand starting at position 395 of SEQ ID NO: 1562457
ugugcucucgcuucuguua

SEQ ID NO: 1748478 - RNA, 19 nt, Artificial Sequence
  Description of Artificial Sequence: Synthetic oligonucleotide
  Antisense strand to SEQ ID NO: 1748477
uaacagaagcgagagcaca

SEQ ID NO: 1748479 - RNA, 19 nt, Artificial Sequence
  Description of Artificial Sequence: Synthetic oligonucleotide
  Sense strand starting at position 509 of SEQ ID NO: 1562457
ugucgaagcagaggaaauu

SEQ ID NO: 1748480 - RNA, 19 nt, Artificial Sequence
  Description of Artificial Sequence: Synthetic oligonucleotide
  Antisense strand to SEQ ID NO: 1748479
aauuuccucugcuucgaca

SEQ ID NO: 1748481 - RNA, 19 nt, Artificial Sequence
  Description of Artificial Sequence: Synthetic oligonucleotide
  Sense strand starting at position 555 of SEQ ID NO: 1562457
auguuagaaucccuaaugu

SEQ ID NO: 1748482 - RNA, 19 nt, Artificial Sequence
  Description of Artificial Sequence: Synthetic oligonucleotide
  Antisense strand to SEQ ID NO: 1748481
acauuagggauucuaacau

SEQ ID NO: 1748483 - RNA, 19 nt, Artificial Sequence
  Description of Artificial Sequence: Synthetic oligonucleotide
  Sense strand starting at position 568 of SEQ ID NO: 1562457
uaauguuuaugggagauuu

SEQ ID NO: 1748484 - RNA, 19 nt, Artificial Sequence
  Description of Artificial Sequence: Synthetic oligonucleotide
  Antisense strand to SEQ ID NO: 1748483
aaaucucccauaaacauua

SEQ ID NO: 1748485 - RNA, 19 nt, Artificial Sequence
  Description of Artificial Sequence: Synthetic oligonucleotide
  Sense strand starting at position 917 of SEQ ID NO: 1562457
gucguuugucuggaggaug

SEQ ID NO: 1748486 - RNA, 19 nt, Artificial Sequence
  Description of Artificial Sequence: Synthetic oligonucleotide
  Antisense strand to SEQ ID NO: 1748485
cauccuccagacaaacgac

SEQ ID NO: 1748487 - RNA, 19 nt, Artificial Sequence
  Description of Artificial Sequence: Synthetic oligonucleotide
  Sense strand starting at position 1026 of SEQ ID NO: 1562457
uuucauuaggcugggaagu

SEQ ID NO: 1748488 - RNA, 19 nt, Artificial Sequence
  Description of Artificial Sequence: Synthetic oligonucleotide
  Antisense strand to SEQ ID NO: 1748487
acuucccagccuaaugaaa

SEQ ID NO: 1748489 - RNA, 19 nt, Artificial Sequence
  Description of Artificial Sequence: Synthetic oligonucleotide
  Sense strand starting at position 1042 of SEQ ID NO: 1562457
agugguuccaccugggaaa

SEQ ID NO: 1748490 - RNA, 19 nt, Artificial Sequence
  Description of Artificial Sequence: Synthetic oligonucleotide
  Antisense strand to SEQ ID NO: 1748489
uuucccagguggaaccacu

SEQ ID NO: 1748491 - RNA, 19 nt, Artificial Sequence
  Description of Artificial Sequence: Synthetic oligonucleotide
  Sense strand starting at position 1101 of SEQ ID NO: 1562457
cuggaaagguucgcccaaa

SEQ ID NO: 1748492 - RNA, 19 nt, Artificial Sequence
  Description of Artificial Sequence: Synthetic oligonucleotide
  Antisense strand to SEQ ID NO: 1748491
uuugggcgaaccuuuccag

SEQ ID NO: 1748493 - RNA, 19 nt, Artificial Sequence
  Description of Artificial Sequence: Synthetic oligonucleotide
  Sense strand starting at position 1164 of SEQ ID NO: 1562457
uccaaauauugacuuaggu

SEQ ID NO: 1748494 - RNA, 19 nt, Artificial Sequence
  Description of Artificial Sequence: Synthetic oligonucleotide
  Antisense strand to SEQ ID NO: 1748493
accuaagucaauauuugga

SEQ ID NO: 1748495 - RNA, 19 nt, Artificial Sequence
  Description of Artificial Sequence: Synthetic oligonucleotide
  Sense strand starting at position 1278 of SEQ ID NO: 1562457
ugaagugguagcugaacua

SEQ ID NO: 1748496 - RNA, 19 nt, Artificial Sequence
  Description of Artificial Sequence: Synthetic oligonucleotide
  Antisense strand to SEQ ID NO: 1748495
uaguucagcuaccacuuca

SEQ ID NO: 1748497 - RNA, 19 nt, Artificial Sequence
  Description of Artificial Sequence: Synthetic oligonucleotide
  Sense strand starting at position 1293 of SEQ ID NO: 1562457
acuacuuguuacuugagga

SEQ ID NO: 1748498 - RNA, 19 nt, Artificial Sequence
  Description of Artificial Sequence: Synthetic oligonucleotide
  Antisense strand to SEQ ID NO: 1748497
uccucaaguaacaaguagu

SEQ ID NO: 1748499 - RNA, 19 nt, Artificial Sequence
  Description of Artificial Sequence: Synthetic oligonucleotide
  Sense strand starting at position 1378 of SEQ ID NO: 1562457
gcaauuuggcucuggguuu

SEQ ID NO: 1748500 - RNA, 19 nt, Artificial Sequence
  Description of Artificial Sequence: Synthetic oligonucleotide
  Antisense strand to SEQ ID NO: 1748499
aaacccagagccaaauugc

SEQ ID NO: 1748501 - RNA, 19 nt, Artificial Sequence
  Description of Artificial Sequence: Synthetic oligonucleotide
  Sense strand starting at position 1418 of SEQ ID NO: 1562457
ccaguauugguuugaacac

SEQ ID NO: 1748502 - RNA, 19 nt, Artificial Sequence
  Description of Artificial Sequence: Synthetic oligonucleotide
  Antisense strand to SEQ ID NO: 1748501
guguucaaaccaauacugg

SEQ ID NO: 1748503 - RNA, 19 nt, Artificial Sequence
  Description of Artificial Sequence: Synthetic oligonucleotide
  Sense strand starting at position 1449 of SEQ ID NO: 1562457
agguuuaaagcugaauucu

SEQ ID NO: 1748504 - RNA, 19 nt, Artificial Sequence
  Description of Artificial Sequence: Synthetic oligonucleotide
  Antisense strand to SEQ ID NO: 1748503
agaauucagcuuuaaaccu

SEQ ID NO: 1748505 - RNA, 19 nt, Artificial Sequence
  Description of Artificial Sequence: Synthetic oligonucleotide
  Sense strand starting at position 1515 of SEQ ID NO: 1562457
agcagaagugcuugggaaa

SEQ ID NO: 1748506 - RNA, 19 nt, Artificial Sequence
  Description of Artificial Sequence: Synthetic oligonucleotide
  Antisense strand to SEQ ID NO: 1748505
uuucccaagcacuucugcu

SEQ ID NO: 1748507 - RNA, 19 nt, Artificial Sequence
  Description of Artificial Sequence: Synthetic oligonucleotide
  Sense strand starting at position 1537 of SEQ ID NO: 1562457
ccaacacuggugggugauu

SEQ ID NO: 1748508 - RNA, 19 nt, Artificial Sequence
  Description of Artificial Sequence: Synthetic oligonucleotide
  Antisense strand to SEQ ID NO: 1748507
aaucacccaccaguguugg

SEQ ID NO: 1748509 - RNA, 19 nt, Artificial Sequence
  Description of Artificial Sequence: Synthetic oligonucleotide
  Sense strand starting at position 1569 of SEQ ID NO: 1562457
uguguuucccagcacagau

SEQ ID NO: 1748510 - RNA, 19 nt, Artificial Sequence
  Description of Artificial Sequence: Synthetic oligonucleotide
  Antisense strand to SEQ ID NO: 1748509
aucugugcugggaaacaca

SEQ ID NO: 1748511 - RNA, 19 nt, Artificial Sequence
  Description of Artificial Sequence: Synthetic oligonucleotide
  Sense strand starting at position 1662 of SEQ ID NO: 1562457
uugggugaacccuaauguu

SEQ ID NO: 1748512 - RNA, 19 nt, Artificial Sequence
  Description of Artificial Sequence: Synthetic oligonucleotide
  Antisense strand to SEQ ID NO: 1748511
aacauuaggguucacccaa

SEQ ID NO: 1748513 - RNA, 19 nt, Artificial Sequence
  Description of Artificial Sequence: Synthetic oligonucleotide
  Sense strand starting at position 1674 of SEQ ID NO: 1562457
uaauguuugcacugaagag

SEQ ID NO: 1748514 - RNA, 19 nt, Artificial Sequence
  Description of Artificial Sequence: Synthetic oligonucleotide
  Antisense strand to SEQ ID NO: 1748513
cucuucagugcaaacauua

SEQ ID NO: 1748515 - RNA, 19 nt, Artificial Sequence
  Description of Artificial Sequence: Synthetic oligonucleotide
  Sense strand starting at position 1814 of SEQ ID NO: 1562457
auggaaguguuccuacauu

SEQ ID NO: 1748516 - RNA, 19 nt, Artificial Sequence
  Description of Artificial Sequence: Synthetic oligonucleotide
  Antisense strand to SEQ ID NO: 1748515
aauguaggaacacuuccau

SEQ ID NO: 1748517 - RNA, 19 nt, Artificial Sequence
  Description of Artificial Sequence: Synthetic oligonucleotide
  Sense strand starting at position 1820 of SEQ ID NO: 1562457
guguuccuacauuacuaga

SEQ ID NO: 1748518 - RNA, 19 nt, Artificial Sequence
  Description of Artificial Sequence: Synthetic oligonucleotide
  Antisense strand to SEQ ID NO: 1748517
ucuaguaauguaggaacac

SEQ ID NO: 1748519 - RNA, 19 nt, Artificial Sequence
  Description of Artificial Sequence: Synthetic oligonucleotide
  Sense strand starting at position 1940 of SEQ ID NO: 1562457
uuaauuggcuuccugaaac

SEQ ID NO: 1748520 - RNA, 19 nt, Artificial Sequence
  Description of Artificial Sequence: Synthetic oligonucleotide
  Antisense strand to SEQ ID NO: 1748519
guuucaggaagccaauuaa

SEQ ID NO: 1748521 - RNA, 19 nt, Artificial Sequence
  Description of Artificial Sequence: Synthetic oligonucleotide
  Sense strand starting at position 2018 of SEQ ID NO: 1562457
agaucaucauagcuauguu

SEQ ID NO: 1748522 - RNA, 19 nt, Artificial Sequence
  Description of Artificial Sequence: Synthetic oligonucleotide
  Antisense strand to SEQ ID NO: 1748521
aacauagcuaugaugaucu

SEQ ID NO: 1748523 - RNA, 19 nt, Artificial Sequence
  Description of Artificial Sequence: Synthetic oligonucleotide
  Sense strand starting at position 2037 of SEQ ID NO: 1562457
cugcuacaagucuaagaaa

SEQ ID NO: 1748524 - RNA, 19 nt, Artificial Sequence
  Description of Artificial Sequence: Synthetic oligonucleotide
  Antisense strand to SEQ ID NO: 1748523
uuucuuagacuuguagcag

SEQ ID NO: 1748525 - RNA, 19 nt, Artificial Sequence
  Description of Artificial Sequence: Synthetic oligonucleotide
  Sense strand starting at position 2102 of SEQ ID NO: 1562457
caggcaaaggguuauuauu

SEQ ID NO: 1748526 - RNA, 19 nt, Artificial Sequence
  Description of Artificial Sequence: Synthetic oligonucleotide
  Antisense strand to SEQ ID NO: 1748525
aauaauaacccuuugccug

SEQ ID NO: 1748527 - RNA, 19 nt, Artificial Sequence
  Description of Artificial Sequence: Synthetic oligonucleotide
  Sense strand starting at position 2270 of SEQ ID NO: 1562457
cuccauuggcaguaagaaa

SEQ ID NO: 1748528 - RNA, 19 nt, Artificial Sequence
  Description of Artificial Sequence: Synthetic oligonucleotide
  Antisense strand to SEQ ID NO: 1748527
uuucuuacugccaauggag

SEQ ID NO: 1748529 - RNA, 19 nt, Artificial Sequence
  Description of Artificial Sequence: Synthetic oligonucleotide
  Sense strand starting at position 2343 of SEQ ID NO: 1562457
aucucuacagccggagaau

SEQ ID NO: 1748530 - RNA, 19 nt, Artificial Sequence
  Description of Artificial Sequence: Synthetic oligonucleotide
  Antisense strand to SEQ ID NO: 1748529
auucuccggcuguagagau

SEQ ID NO: 1748531 - RNA, 19 nt, Artificial Sequence
  Description of Artificial Sequence: Synthetic oligonucleotide
  Sense strand starting at position 2344 of SEQ ID NO: 1562457
ucucuacagccggagaauu

SEQ ID NO: 1748532 - RNA, 19 nt, Artificial Sequence
  Description of Artificial Sequence: Synthetic oligonucleotide
  Antisense strand to SEQ ID NO: 1748531
aauucuccggcuguagaga

SEQ ID NO: 1748533 - RNA, 19 nt, Artificial Sequence
  Description of Artificial Sequence: Synthetic oligonucleotide
  Sense strand starting at position 2354 of SEQ ID NO: 1562457
cggagaauucacuguaacg

SEQ ID NO: 1748534 - RNA, 19 nt, Artificial Sequence
  Description of Artificial Sequence: Synthetic oligonucleotide
  Antisense strand to SEQ ID NO: 1748533
cguuacagugaauucuccg

SEQ ID NO: 1748535 - RNA, 19 nt, Artificial Sequence
  Description of Artificial Sequence: Synthetic oligonucleotide
  Sense strand starting at position 3443 of SEQ ID NO: 1562457
acugauuggucuucucuua

SEQ ID NO: 1748536 - RNA, 19 nt, Artificial Sequence
  Description of Artificial Sequence: Synthetic oligonucleotide
  Antisense strand to SEQ ID NO: 1748535
uaagagaagaccaaucagu

SEQ ID NO: 1748537 - RNA, 19 nt, Artificial Sequence
  Description of Artificial Sequence: Synthetic oligonucleotide
  Sense strand starting at position 3772 of SEQ ID NO: 1562457
agaguaaauuuccugucgu

SEQ ID NO: 1748538 - RNA, 19 nt, Artificial Sequence
  Description of Artificial Sequence: Synthetic oligonucleotide
  Antisense strand to SEQ ID NO: 1748537
acgacaggaaauuuacucu

SEQ ID NO: 1748539 - RNA, 19 nt, Artificial Sequence
  Description of Artificial Sequence: Synthetic oligonucleotide
  Sense strand starting at position 31 of SEQ ID NO: 1562458
uggaaaugaauccgaguuc

SEQ ID NO: 1748540 - RNA, 19 nt, Artificial Sequence
  Description of Artificial Sequence: Synthetic oligonucleotide
  Antisense strand to SEQ ID NO: 1748539
gaacucggauucauuucca

SEQ ID NO: 1748541 - RNA, 19 nt, Artificial Sequence
  Description of Artificial Sequence: Synthetic oligonucleotide
  Sense strand starting at position 206 of SEQ ID NO: 1562458
acagucuuucuauaaguaa

SEQ ID NO: 1748542 - RNA, 19 nt, Artificial Sequence
  Description of Artificial Sequence: Synthetic oligonucleotide
  Antisense strand to SEQ ID NO: 1748541
uuacuuauagaaagacugu

SEQ ID NO: 1748543 - RNA, 19 nt, Artificial Sequence
  Description of Artificial Sequence: Synthetic oligonucleotide
  Sense strand starting at position 1020 of SEQ ID NO: 1562458
guaagagguaacugcuaga

SEQ ID NO: 1748544 - RNA, 19 nt, Artificial Sequence
  Description of Artificial Sequence: Synthetic oligonucleotide
  Antisense strand to SEQ ID NO: 1748543
ucuagcaguuaccucuuac

SEQ ID NO: 1748545 - RNA, 19 nt, Artificial Sequence
  Description of Artificial Sequence: Synthetic oligonucleotide
  Sense strand starting at position 1205 of SEQ ID NO: 1562458
agaggcauccgcugauaca

SEQ ID NO: 1748546 - RNA, 19 nt, Artificial Sequence
  Description of Artificial Sequence: Synthetic oligonucleotide
  Antisense strand to SEQ ID NO: 1748545
uguaucagcggaugccucu

SEQ ID NO: 1748547 - RNA, 19 nt, Artificial Sequence
  Description of Artificial Sequence: Synthetic oligonucleotide
  Sense strand starting at position 1275 of SEQ ID NO: 1562458
gugcuuacagucuaguuga

SEQ ID NO: 1748548 - RNA, 19 nt, Artificial Sequence
  Description of Artificial Sequence: Synthetic oligonucleotide
  Antisense strand to SEQ ID NO: 1748547
ucaacuagacuguaagcac

SEQ ID NO: 1748549 - RNA, 19 nt, Artificial Sequence
  Description of Artificial Sequence: Synthetic oligonucleotide
  Sense strand starting at position 1346 of SEQ ID NO: 1562458
uuuguuucugaguaaugcu

SEQ ID NO: 1748550 - RNA, 19 nt, Artificial Sequence
  Description of Artificial Sequence: Synthetic oligonucleotide
  Antisense strand to SEQ ID NO: 1748549
agcauuacucagaaacaaa

SEQ ID NO: 1748551 - RNA, 19 nt, Artificial Sequence
  Description of Artificial Sequence: Synthetic oligonucleotide
  Sense strand starting at position 1353 of SEQ ID NO: 1562458
cugaguaaugcucacgaug

SEQ ID NO: 1748552 - RNA, 19 nt, Artificial Sequence
  Description of Artificial Sequence: Synthetic oligonucleotide
  Antisense strand to SEQ ID NO: 1748551
caucgugagcauuacucag

SEQ ID NO: 1748553 - RNA, 19 nt, Artificial Sequence
  Description of Artificial Sequence: Synthetic oligonucleotide
  Sense strand starting at position 1356 of SEQ ID NO: 1562458
aguaaugcucacgaugaug

SEQ ID NO: 1748554 - RNA, 19 nt, Artificial Sequence
  Description of Artificial Sequence: Synthetic oligonucleotide
  Antisense strand to SEQ ID NO: 1748553
caucaucgugagcauuacu

SEQ ID NO: 1748555 - RNA, 19 nt, Artificial Sequence
  Description of Artificial Sequence: Synthetic oligonucleotide
  Sense strand starting at position 1772 of SEQ ID NO: 1562458
acgcgucuucgcucaugga

SEQ ID NO: 1748556 - RNA, 19 nt, Artificial Sequence
  Description of Artificial Sequence: Synthetic oligonucleotide
  Antisense strand to SEQ ID NO: 1748555
uccaugagcgaagacgcgu

SEQ ID NO: 1748557 - RNA, 19 nt, Artificial Sequence
  Description of Artificial Sequence: Synthetic oligonucleotide
  Sense strand starting at position 1832 of SEQ ID NO: 1562458
ucgagucuucggagagucu

SEQ ID NO: 1748558 - RNA, 19 nt, Artificial Sequence
  Description of Artificial Sequence: Synthetic oligonucleotide
  Antisense strand to SEQ ID NO: 1748557
agacucuccgaagacucga

SEQ ID NO: 1748559 - RNA, 19 nt, Artificial Sequence
  Description of Artificial Sequence: Synthetic oligonucleotide
  Sense strand starting at position 1843 of SEQ ID NO: 1562458
gagagucucuugcccaaca

SEQ ID NO: 1748560 - RNA, 19 nt, Artificial Sequence
  Description of Artificial Sequence: Synthetic oligonucleotide
  Antisense strand to SEQ ID NO: 1748559
uguugggcaagagacucuc

SEQ ID NO: 1748561 - RNA, 19 nt, Artificial Sequence
  Description of Artificial Sequence: Synthetic oligonucleotide
  Sense strand starting at position 2234 of SEQ ID NO: 1562458
gagaaaguuacggguugca

SEQ ID NO: 1748562 - RNA, 19 nt, Artificial Sequence
  Description of Artificial Sequence: Synthetic oligonucleotide
  Antisense strand to SEQ ID NO: 1748561
ugcaacccguaacuuucuc

SEQ ID NO: 1748563 - RNA, 19 nt, Artificial Sequence
  Description of Artificial Sequence: Synthetic oligonucleotide
  Sense strand starting at position 2252 of SEQ ID NO: 1562458
aagcuugagugucuaagaa

SEQ ID NO: 1748564 - RNA, 19 nt, Artificial Sequence
  Description of Artificial Sequence: Synthetic oligonucleotide
  Antisense strand to SEQ ID NO: 1748563
uucuuagacacucaagcuu

SEQ ID NO: 1748565 - RNA, 19 nt, Artificial Sequence
  Description of Artificial Sequence: Synthetic oligonucleotide
  Sense strand starting at position 2336 of SEQ ID NO: 1562458
gcagguuagcccgagaauc

SEQ ID NO: 1748566 - RNA, 19 nt, Artificial Sequence
  Description of Artificial Sequence: Synthetic oligonucleotide
  Antisense strand to SEQ ID NO: 1748565
gauucucgggcuaaccugc

SEQ ID NO: 1748567 - RNA, 19 nt, Artificial Sequence
  Description of Artificial Sequence: Synthetic oligonucleotide
  Sense strand starting at position 2440 of SEQ ID NO: 1562458
cuauguugccggucucgaa

SEQ ID NO: 1748568 - RNA, 19 nt, Artificial Sequence
  Description of Artificial Sequence: Synthetic oligonucleotide
  Antisense strand to SEQ ID NO: 1748567
uucgagaccggcaacauag

SEQ ID NO: 1748569 - RNA, 19 nt, Artificial Sequence
  Description of Artificial Sequence: Synthetic oligonucleotide
  Sense strand starting at position 2556 of SEQ ID NO: 1562458
uuguaaguggacuaauuau

SEQ ID NO: 1748570 - RNA, 19 nt, Artificial Sequence
  Description of Artificial Sequence: Synthetic oligonucleotide
  Antisense strand to SEQ ID NO: 1748569
auaauuaguccacuuacaa

SEQ ID NO: 1748571 - RNA, 19 nt, Artificial Sequence
  Description of Artificial Sequence: Synthetic oligonucleotide
  Sense strand starting at position 2632 of SEQ ID NO: 1562458
gggaccuccuuuccaugaa

SEQ ID NO: 1748572 - RNA, 19 nt, Artificial Sequence
  Description of Artificial Sequence: Synthetic oligonucleotide
  Antisense strand to SEQ ID NO: 1748571
uucauggaaaggagguccc

SEQ ID NO: 1748573 - RNA, 19 nt, Artificial Sequence
  Description of Artificial Sequence: Synthetic oligonucleotide
  Sense strand starting at position 2702 of SEQ ID NO: 1562458
acugcuaucccuggaauga

SEQ ID NO: 1748574 - RNA, 19 nt, Artificial Sequence
  Description of Artificial Sequence: Synthetic oligonucleotide
  Antisense strand to SEQ ID NO: 1748573
ucauuccagggauagcagu

SEQ ID NO: 1748575 - RNA, 19 nt, Artificial Sequence
  Description of Artificial Sequence: Synthetic oligonucleotide
  Sense strand starting at position 2703 of SEQ ID NO: 1562458
cugcuaucccuggaaugag

SEQ ID NO: 1748576 - RNA, 19 nt, Artificial Sequence
  Description of Artificial Sequence: Synthetic oligonucleotide
  Antisense strand to SEQ ID NO: 1748575
cucauuccagggauagcag

SEQ ID NO: 1748577 - RNA, 19 nt, Artificial Sequence
  Description of Artificial Sequence: Synthetic oligonucleotide
  Sense strand starting at position 2851 of SEQ ID NO: 1562458
agaagcaucccuuguugau

SEQ ID NO: 1748578 - RNA, 19 nt, Artificial Sequence
  Description of Artificial Sequence: Synthetic oligonucleotide
  Antisense strand to SEQ ID NO: 1748577
aucaacaagggaugcuucu

SEQ ID NO: 1748579 - RNA, 19 nt, Artificial Sequence
  Description of Artificial Sequence: Synthetic oligonucleotide
  Sense strand starting at position 2855 of SEQ ID NO: 1562458
gcaucccuuguugaugaua

SEQ ID NO: 1748580 - RNA, 19 nt, Artificial Sequence
  Description of Artificial Sequence: Synthetic oligonucleotide
  Antisense strand to SEQ ID NO: 1748579
uaucaucaacaagggaugc

SEQ ID NO: 1748581 - RNA, 19 nt, Artificial Sequence
  Description of Artificial Sequence: Synthetic oligonucleotide
  Sense strand starting at position 2980 of SEQ ID NO: 1562458
ggugguauaccugggaaga

SEQ ID NO: 1748582 - RNA, 19 nt, Artificial Sequence
  Description of Artificial Sequence: Synthetic oligonucleotide
  Antisense strand to SEQ ID NO: 1748581
ucuucccagguauaccacc

SEQ ID NO: 1748583 - RNA, 19 nt, Artificial Sequence
  Description of Artificial Sequence: Synthetic oligonucleotide
  Sense strand starting at position 2981 of SEQ ID NO: 1562458
gugguauaccugggaagaa

SEQ ID NO: 1748584 - RNA, 19 nt, Artificial Sequence
  Description of Artificial Sequence: Synthetic oligonucleotide
  Antisense strand to SEQ ID NO: 1748583
uucuucccagguauaccac

SEQ ID NO: 1748585 - RNA, 19 nt, Artificial Sequence
  Description of Artificial Sequence: Synthetic oligonucleotide
  Sense strand starting at position 3088 of SEQ ID NO: 1562458
auguaaauguacuuccaau

SEQ ID NO: 1748586 - RNA, 19 nt, Artificial Sequence
  Description of Artificial Sequence: Synthetic oligonucleotide
  Antisense strand to SEQ ID NO: 1748585
auuggaaguacauuuacau

SEQ ID NO: 1748587 - RNA, 19 nt, Artificial Sequence
  Description of Artificial Sequence: Synthetic oligonucleotide
  Sense strand starting at position 3151 of SEQ ID NO: 1562458
agugguccugguuaacuua

SEQ ID NO: 1748588 - RNA, 19 nt, Artificial Sequence
  Description of Artificial Sequence: Synthetic oligonucleotide
  Antisense strand to SEQ ID NO: 1748587
uaaguuaaccaggaccacu

SEQ ID NO: 1748589 - RNA, 19 nt, Artificial Sequence
  Description of Artificial Sequence: Synthetic oligonucleotide
  Sense strand starting at position 3186 of SEQ ID NO: 1562458
guaguaacaguguagggaa

SEQ ID NO: 1748590 - RNA, 19 nt, Artificial Sequence
  Description of Artificial Sequence: Synthetic oligonucleotide
  Antisense strand to SEQ ID NO: 1748589
uucccuacacuguuacuac

SEQ ID NO: 1748591 - RNA, 19 nt, Artificial Sequence
  Description of Artificial Sequence: Synthetic oligonucleotide
  Sense strand starting at position 3288 of SEQ ID NO: 1562458
guucaugaggaucgaguuu

SEQ ID NO: 1748592 - RNA, 19 nt, Artificial Sequence
  Description of Artificial Sequence: Synthetic oligonucleotide
  Antisense strand to SEQ ID NO: 1748591
aaacucgauccucaugaac

SEQ ID NO: 1748593 - RNA, 19 nt, Artificial Sequence
  Description of Artificial Sequence: Synthetic oligonucleotide
  Sense strand starting at position 3326 of SEQ ID NO: 1562458
cuuuguaaacccuggcaca

SEQ ID NO: 1748594 - RNA, 19 nt, Artificial Sequence
  Description of Artificial Sequence: Synthetic oligonucleotide
  Antisense strand to SEQ ID NO: 1748593
ugugccaggguuuacaaag

SEQ ID NO: 1748595 - RNA, 19 nt, Artificial Sequence
  Description of Artificial Sequence: Synthetic oligonucleotide
  Sense strand starting at position 3559 of SEQ ID NO: 1562458
acaggcaugccucaccaua

SEQ ID NO: 1748596 - RNA, 19 nt, Artificial Sequence
  Description of Artificial Sequence: Synthetic oligonucleotide
  Antisense strand to SEQ ID NO: 1748595
uauggugaggcaugccugu

SEQ ID NO: 1748597 - RNA, 19 nt, Artificial Sequence
  Description of Artificial Sequence: Synthetic oligonucleotide
  Sense strand starting at position 3635 of SEQ ID NO: 1562458
agcauaauaucucugguac

SEQ ID NO: 1748598 - RNA, 19 nt, Artificial Sequence
  Description of Artificial Sequence: Synthetic oligonucleotide
  Antisense strand to SEQ ID NO: 1748597
guaccagagauauuaugcu

SEQ ID NO: 1748599 - RNA, 19 nt, Artificial Sequence
  Description of Artificial Sequence: Synthetic oligonucleotide
  Sense strand starting at position 3636 of SEQ ID NO: 1562458
gcauaauaucucugguaca

SEQ ID NO: 1748600 - RNA, 19 nt, Artificial Sequence
  Description of Artificial Sequence: Synthetic oligonucleotide
  Antisense strand to SEQ ID NO: 1748599
uguaccagagauauuaugc

SEQ ID NO: 1748601 - RNA, 19 nt, Artificial Sequence
  Description of Artificial Sequence: Synthetic oligonucleotide
  Sense strand starting at position 3647 of SEQ ID NO: 1562458
cugguacaacauugauaca

SEQ ID NO: 1748602 - RNA, 19 nt, Artificial Sequence
  Description of Artificial Sequence: Synthetic oligonucleotide
  Antisense strand to SEQ ID NO: 1748601
uguaucaauguuguaccag

SEQ ID NO: 1748603 - RNA, 19 nt, Artificial Sequence
  Description of Artificial Sequence: Synthetic oligonucleotide
  Sense strand starting at position 3668 of SEQ ID NO: 1562458
ccacaugaguucuuuaagu

SEQ ID NO: 1748604 - RNA, 19 nt, Artificial Sequence
  Description of Artificial Sequence: Synthetic oligonucleotide
  Antisense strand to SEQ ID NO: 1748603
acuuaaagaacucaugugg

SEQ ID NO: 1748605 - RNA, 19 nt, Artificial Sequence
  Description of Artificial Sequence: Synthetic oligonucleotide
  Sense strand starting at position 3670 of SEQ ID NO: 1562458
acaugaguucuuuaaguaa

SEQ ID NO: 1748606 - RNA, 19 nt, Artificial Sequence
  Description of Artificial Sequence: Synthetic oligonucleotide
  Antisense strand to SEQ ID NO: 1748605
uuacuuaaagaacucaugu

SEQ ID NO: 1748607 - RNA, 19 nt, Artificial Sequence
  Description of Artificial Sequence: Synthetic oligonucleotide
  Sense strand starting at position 3673 of SEQ ID NO: 1562458
ugaguucuuuaaguaagug

SEQ ID NO: 1748608 - RNA, 19 nt, Artificial Sequence
  Description of Artificial Sequence: Synthetic oligonucleotide
  Antisense strand to SEQ ID NO: 1748607
cacuuacuuaaagaacuca

SEQ ID NO: 1748609 - RNA, 19 nt, Artificial Sequence
  Description of Artificial Sequence: Synthetic oligonucleotide
  Sense strand starting at position 3713 of SEQ ID NO: 1562458
aggaucaucuugucucaga

SEQ ID NO: 1748610 - RNA, 19 nt, Artificial Sequence
  Description of Artificial Sequence: Synthetic oligonucleotide
  Antisense strand to SEQ ID NO: 1748609
ucugagacaagaugauccu

SEQ ID NO: 1748611 - RNA, 19 nt, Artificial Sequence
  Description of Artificial Sequence: Synthetic oligonucleotide
  Sense strand starting at position 3714 of SEQ ID NO: 1562458
ggaucaucuugucucagac

SEQ ID NO: 1748612 - RNA, 19 nt, Artificial Sequence
  Description of Artificial Sequence: Synthetic oligonucleotide
  Antisense strand to SEQ ID NO: 1748611
gucugagacaagaugaucc

SEQ ID NO: 1748613 - RNA, 19 nt, Artificial Sequence
  Description of Artificial Sequence: Synthetic oligonucleotide
  Sense strand starting at position 3726 of SEQ ID NO: 1562458
cucagacuuuggguuccua

SEQ ID NO: 1748614 - RNA, 19 nt, Artificial Sequence
  Description of Artificial Sequence: Synthetic oligonucleotide
  Antisense strand to SEQ ID NO: 1748613
uaggaacccaaagucugag

SEQ ID NO: 1748615 - RNA, 19 nt, Artificial Sequence
  Description of Artificial Sequence: Synthetic oligonucleotide
  Sense strand starting at position 3885 of SEQ ID NO: 1562458
auagucacauugcuaugaa

SEQ ID NO: 1748616 - RNA, 19 nt, Artificial Sequence
  Description of Artificial Sequence: Synthetic oligonucleotide
  Antisense strand to SEQ ID NO: 1748615
uucauagcaaugugacuau

SEQ ID NO: 1748617 - RNA, 19 nt, Artificial Sequence
  Description of Artificial Sequence: Synthetic oligonucleotide
  Sense strand starting at position 3888 of SEQ ID NO: 1562458
gucacauugcuaugaagau

SEQ ID NO: 1748618 - RNA, 19 nt, Artificial Sequence
  Description of Artificial Sequence: Synthetic oligonucleotide
  Antisense strand to SEQ ID NO: 1748617
aucuucauagcaaugugac

SEQ ID NO: 1748619 - RNA, 19 nt, Artificial Sequence
  Description of Artificial Sequence: Synthetic oligonucleotide
  Sense strand starting at position 103 of SEQ ID NO: 1562459
ccaugagcuguauguaguu

SEQ ID NO: 1748620 - RNA, 19 nt, Artificial Sequence
  Description of Artificial Sequence: Synthetic oligonucleotide
  Antisense strand to SEQ ID NO: 1748619
aacuacauacagcucaugg

SEQ ID NO: 1748621 - RNA, 19 nt, Artificial Sequence
  Description of Artificial Sequence: Synthetic oligonucleotide
  Sense strand starting at position 109 of SEQ ID NO: 1562459
gcuguauguaguuugccaa

SEQ ID NO: 1748622 - RNA, 19 nt, Artificial Sequence
  Description of Artificial Sequence: Synthetic oligonucleotide
  Antisense strand to SEQ ID NO: 1748621
uuggcaaacuacauacagc

SEQ ID NO: 1748623 - RNA, 19 nt, Artificial Sequence
  Description of Artificial Sequence: Synthetic oligonucleotide
  Sense strand starting at position 162 of SEQ ID NO: 1562459
augggagauuucugucagu

SEQ ID NO: 1748624 - RNA, 19 nt, Artificial Sequence
  Description of Artificial Sequence: Synthetic oligonucleotide
  Antisense strand to SEQ ID NO: 1748623
acugacagaaaucucccau

SEQ ID NO: 1748625 - RNA, 19 nt, Artificial Sequence
  Description of Artificial Sequence: Synthetic oligonucleotide
  Sense strand starting at position 165 of SEQ ID NO: 1562459
ggagauuucugucagucag

SEQ ID NO: 1748626 - RNA, 19 nt, Artificial Sequence
  Description of Artificial Sequence: Synthetic oligonucleotide
  Antisense strand to SEQ ID NO: 1748625
cugacugacagaaaucucc

SEQ ID NO: 1748627 - RNA, 19 nt, Artificial Sequence
  Description of Artificial Sequence: Synthetic oligonucleotide
  Sense strand starting at position 245 of SEQ ID NO: 1562459
cagagugcccgcuaacaau

SEQ ID NO: 1748628 - RNA, 19 nt, Artificial Sequence
  Description of Artificial Sequence: Synthetic oligonucleotide
  Antisense strand to SEQ ID NO: 1748627
auuguuagcgggcacucug

SEQ ID NO: 1748629 - RNA, 19 nt, Artificial Sequence
  Description of Artificial Sequence: Synthetic oligonucleotide
  Sense strand starting at position 409 of SEQ ID NO: 1562459
acagguuucugggccugaa

SEQ ID NO: 1748630 - RNA, 19 nt, Artificial Sequence
  Description of Artificial Sequence: Synthetic oligonucleotide
  Antisense strand to SEQ ID NO: 1748629
uucaggcccagaaaccugu

SEQ ID NO: 1748631 - RNA, 19 nt, Artificial Sequence
  Description of Artificial Sequence: Synthetic oligonucleotide
  Sense strand starting at position 412 of SEQ ID NO: 1562459
gguuucugggccugaacaa

SEQ ID NO: 1748632 - RNA, 19 nt, Artificial Sequence
  Description of Artificial Sequence: Synthetic oligonucleotide
  Antisense strand to SEQ ID NO: 1748631
uuguucaggcccagaaacc

SEQ ID NO: 1748633 - RNA, 19 nt, Artificial Sequence
  Description of Artificial Sequence: Synthetic oligonucleotide
  Sense strand starting at position 527 of SEQ ID NO: 1562459
uagguaaggccagacuuua

SEQ ID NO: 1748634 - RNA, 19 nt, Artificial Sequence
  Description of Artificial Sequence: Synthetic oligonucleotide
  Antisense strand to SEQ ID NO: 1748633
uaaagucuggccuuaccua

SEQ ID NO: 1748635 - RNA, 19 nt, Artificial Sequence
  Description of Artificial Sequence: Synthetic oligonucleotide
  Sense strand starting at position 550 of SEQ ID NO: 1562459
accuuaagcuaaugggaaa

SEQ ID NO: 1748636 - RNA, 19 nt, Artificial Sequence
  Description of Artificial Sequence: Synthetic oligonucleotide
  Antisense strand to SEQ ID NO: 1748635
uuucccauuagcuuaaggu

SEQ ID NO: 1748637 - RNA, 19 nt, Artificial Sequence
  Description of Artificial Sequence: Synthetic oligonucleotide
  Sense strand starting at position 561 of SEQ ID NO: 1562459
augggaaagcguuagucaa

SEQ ID NO: 1748638 - RNA, 19 nt, Artificial Sequence
  Description of Artificial Sequence: Synthetic oligonucleotide
  Antisense strand to SEQ ID NO: 1748637
uugacuaacgcuuucccau

SEQ ID NO: 1748639 - RNA, 19 nt, Artificial Sequence
  Description of Artificial Sequence: Synthetic oligonucleotide
  Sense strand starting at position 598 of SEQ ID NO: 1562459
gggaauaauuaauguuuac

SEQ ID NO: 1748640 - RNA, 19 nt, Artificial Sequence
  Description of Artificial Sequence: Synthetic oligonucleotide
  Antisense strand to SEQ ID NO: 1748639
guaaacauuaauuauuccc

SEQ ID NO: 1748641 - RNA, 19 nt, Artificial Sequence
  Description of Artificial Sequence: Synthetic oligonucleotide
  Sense strand starting at position 610 of SEQ ID NO: 1562459
uguuuacacucagugguua

SEQ ID NO: 1748642 - RNA, 19 nt, Artificial Sequence
  Description of Artificial Sequence: Synthetic oligonucleotide
  Antisense strand to SEQ ID NO: 1748641
uaaccacugaguguaaaca

SEQ ID NO: 1748643 - RNA, 19 nt, Artificial Sequence
  Description of Artificial Sequence: Synthetic oligonucleotide
  Sense strand starting at position 611 of SEQ ID NO: 1562459
guuuacacucagugguuaa

SEQ ID NO: 1748644 - RNA, 19 nt, Artificial Sequence
  Description of Artificial Sequence: Synthetic oligonucleotide
  Antisense strand to SEQ ID NO: 1748643
uuaaccacugaguguaaac

SEQ ID NO: 1748645 - RNA, 19 nt, Artificial Sequence
  Description of Artificial Sequence: Synthetic oligonucleotide
  Sense strand starting at position 728 of SEQ ID NO: 1562459
cuuuauccagaauacguaa

SEQ ID NO: 1748646 - RNA, 19 nt, Artificial Sequence
  Description of Artificial Sequence: Synthetic oligonucleotide
  Antisense strand to SEQ ID NO: 1748645
uuacguauucuggauaaag

SEQ ID NO: 1748647 - RNA, 19 nt, Artificial Sequence
  Description of Artificial Sequence: Synthetic oligonucleotide
  Sense strand starting at position 916 of SEQ ID NO: 1562459
ucacaaauaucggacuaga

SEQ ID NO: 1748648 - RNA, 19 nt, Artificial Sequence
  Description of Artificial Sequence: Synthetic oligonucleotide
  Antisense strand to SEQ ID NO: 1748647
ucuaguccgauauuuguga

SEQ ID NO: 1748649 - RNA, 19 nt, Artificial Sequence
  Description of Artificial Sequence: Synthetic oligonucleotide
  Sense strand starting at position 960 of SEQ ID NO: 1562459
gguguuagaaucugccuaa

SEQ ID NO: 1748650 - RNA, 19 nt, Artificial Sequence
  Description of Artificial Sequence: Synthetic oligonucleotide
  Antisense strand to SEQ ID NO: 1748649
uuaggcagauucuaacacc

SEQ ID NO: 1748651 - RNA, 19 nt, Artificial Sequence
  Description of Artificial Sequence: Synthetic oligonucleotide
  Sense strand starting at position 961 of SEQ ID NO: 1562459
guguuagaaucugccuaaa

SEQ ID NO: 1748652 - RNA, 19 nt, Artificial Sequence
  Description of Artificial Sequence: Synthetic oligonucleotide
  Antisense strand to SEQ ID NO: 1748651
uuuaggcagauucuaacac

SEQ ID NO: 1748653 - RNA, 19 nt, Artificial Sequence
  Description of Artificial Sequence: Synthetic oligonucleotide
  Sense strand starting at position 963 of SEQ ID NO: 1562459
guuagaaucugccuaaacg

SEQ ID NO: 1748654 - RNA, 19 nt, Artificial Sequence
  Description of Artificial Sequence: Synthetic oligonucleotide
  Antisense strand to SEQ ID NO: 1748653
cguuuaggcagauucuaac

SEQ ID NO: 1748655 - RNA, 19 nt, Artificial Sequence
  Description of Artificial Sequence: Synthetic oligonucleotide
  Sense strand starting at position 964 of SEQ ID NO: 1562459
uuagaaucugccuaaacga

SEQ ID NO: 1748656 - RNA, 19 nt, Artificial Sequence
  Description of Artificial Sequence: Synthetic oligonucleotide
  Antisense strand to SEQ ID NO: 1748655
ucguuuaggcagauucuaa

SEQ ID NO: 1748657 - RNA, 19 nt, Artificial Sequence
  Description of Artificial Sequence: Synthetic oligonucleotide
  Sense strand starting at position 972 of SEQ ID NO: 1562459
ugccuaaacgaaugaaagu

SEQ ID NO: 1748658 - RNA, 19 nt, Artificial Sequence
  Description of Artificial Sequence: Synthetic oligonucleotide
  Antisense strand to SEQ ID NO: 1748657
acuuucauucguuuaggca

SEQ ID NO: 1748659 - RNA, 19 nt, Artificial Sequence
  Description of Artificial Sequence: Synthetic oligonucleotide
  Sense strand starting at position 981 of SEQ ID NO: 1562459
gaaugaaagucccagagca

SEQ ID NO: 1748660 - RNA, 19 nt, Artificial Sequence
  Description of Artificial Sequence: Synthetic oligonucleotide
  Antisense strand to SEQ ID NO: 1748659
ugcucugggacuuucauuc

SEQ ID NO: 1748661 - RNA, 19 nt, Artificial Sequence
  Description of Artificial Sequence: Synthetic oligonucleotide
  Sense strand starting at position 994 of SEQ ID NO: 1562459
agagcaaugcaccaauuau

SEQ ID NO: 1748662 - RNA, 19 nt, Artificial Sequence
  Description of Artificial Sequence: Synthetic oligonucleotide
  Antisense strand to SEQ ID NO: 1748661
auaauuggugcauugcucu

SEQ ID NO: 1748663 - RNA, 19 nt, Artificial Sequence
  Description of Artificial Sequence: Synthetic oligonucleotide
  Sense strand starting at position 1076 of SEQ ID NO: 1562459
ggcagucauucuuuggcaa

SEQ ID NO: 1748664 - RNA, 19 nt, Artificial Sequence
  Description of Artificial Sequence: Synthetic oligonucleotide
  Antisense strand to SEQ ID NO: 1748663
uugccaaagaaugacugcc

SEQ ID NO: 1748665 - RNA, 19 nt, Artificial Sequence
  Description of Artificial Sequence: Synthetic oligonucleotide
  Sense strand starting at position 1077 of SEQ ID NO: 1562459
gcagucauucuuuggcaaa

SEQ ID NO: 1748666 - RNA, 19 nt, Artificial Sequence
  Description of Artificial Sequence: Synthetic oligonucleotide
  Antisense strand to SEQ ID NO: 1748665
uuugccaaagaaugacugc

SEQ ID NO: 1748667 - RNA, 19 nt, Artificial Sequence
  Description of Artificial Sequence: Synthetic oligonucleotide
  Sense strand starting at position 1219 of SEQ ID NO: 1562459
caaguuaucuugugugacc

SEQ ID NO: 1748668 - RNA, 19 nt, Artificial Sequence
  Description of Artificial Sequence: Synthetic oligonucleotide
  Antisense strand to SEQ ID NO: 1748667
ggucacacaagauaacuug

SEQ ID NO: 1748669 - RNA, 19 nt, Artificial Sequence
  Description of Artificial Sequence: Synthetic oligonucleotide
  Sense strand starting at position 1232 of SEQ ID NO: 1562459
gugaccgcucccuacgauu

SEQ ID NO: 1748670 - RNA, 19 nt, Artificial Sequence
  Description of Artificial Sequence: Synthetic oligonucleotide
  Antisense strand to SEQ ID NO: 1748669
aaucguagggagcggucac

SEQ ID NO: 1748671 - RNA, 19 nt, Artificial Sequence
  Description of Artificial Sequence: Synthetic oligonucleotide
  Sense strand starting at position 1234 of SEQ ID NO: 1562459
gaccgcucccuacgauuua

SEQ ID NO: 1748672 - RNA, 19 nt, Artificial Sequence
  Description of Artificial Sequence: Synthetic oligonucleotide
  Antisense strand to SEQ ID NO: 1748671
uaaaucguagggagcgguc

SEQ ID NO: 1748673 - RNA, 19 nt, Artificial Sequence
  Description of Artificial Sequence: Synthetic oligonucleotide
  Sense strand starting at position 1235 of SEQ ID NO: 1562459
accgcucccuacgauuuaa

SEQ ID NO: 1748674 - RNA, 19 nt, Artificial Sequence
  Description of Artificial Sequence: Synthetic oligonucleotide
  Antisense strand to SEQ ID NO: 1748673
uuaaaucguagggagcggu

SEQ ID NO: 1748675 - RNA, 19 nt, Artificial Sequence
  Description of Artificial Sequence: Synthetic oligonucleotide
  Sense strand starting at position 1330 of SEQ ID NO: 1562459
gcucgagcucagcgaucua

SEQ ID NO: 1748676 - RNA, 19 nt, Artificial Sequence
  Description of Artificial Sequence: Synthetic oligonucleotide
  Antisense strand to SEQ ID NO: 1748675
uagaucgcugagcucgagc

SEQ ID NO: 1748677 - RNA, 19 nt, Artificial Sequence
  Description of Artificial Sequence: Synthetic oligonucleotide
  Sense strand starting at position 2091 of SEQ ID NO: 1562459
gaagaugaauugccugacu

SEQ ID NO: 1748678 - RNA, 19 nt, Artificial Sequence
  Description of Artificial Sequence: Synthetic oligonucleotide
  Antisense strand to SEQ ID NO: 1748677
agucaggcaauucaucuuc

SEQ ID NO: 1748679 - RNA, 19 nt, Artificial Sequence
  Description of Artificial Sequence: Synthetic oligonucleotide
  Sense strand starting at position 2094 of SEQ ID NO: 1562459
gaugaauugccugacuggu

SEQ ID NO: 1748680 - RNA, 19 nt, Artificial Sequence
  Description of Artificial Sequence: Synthetic oligonucleotide
  Antisense strand to SEQ ID NO: 1748679
accagucaggcaauucauc

SEQ ID NO: 1748681 - RNA, 19 nt, Artificial Sequence
  Description of Artificial Sequence: Synthetic oligonucleotide
  Sense strand starting at position 2096 of SEQ ID NO: 1562459
ugaauugccugacugguua

SEQ ID NO: 1748682 - RNA, 19 nt, Artificial Sequence
  Description of Artificial Sequence: Synthetic oligonucleotide
  Antisense strand to SEQ ID NO: 1748681
uaaccagucaggcaauuca

SEQ ID NO: 1748683 - RNA, 19 nt, Artificial Sequence
  Description of Artificial Sequence: Synthetic oligonucleotide
  Sense strand starting at position 2306 of SEQ ID NO: 1562459
ggaugugaauugcgcagaa

SEQ ID NO: 1748684 - RNA, 19 nt, Artificial Sequence
  Description of Artificial Sequence: Synthetic oligonucleotide
  Antisense strand to SEQ ID NO: 1748683
uucugcgcaauucacaucc

SEQ ID NO: 1748685 - RNA, 19 nt, Artificial Sequence
  Description of Artificial Sequence: Synthetic oligonucleotide
  Sense strand starting at position 2355 of SEQ ID NO: 1562459
gugaaaccuuaacgaaaua

SEQ ID NO: 1748686 - RNA, 19 nt, Artificial Sequence
  Description of Artificial Sequence: Synthetic oligonucleotide
  Antisense strand to SEQ ID NO: 1748685
uauuucguuaagguuucac

SEQ ID NO: 1748687 - RNA, 19 nt, Artificial Sequence
  Description of Artificial Sequence: Synthetic oligonucleotide
  Sense strand starting at position 2386 of SEQ ID NO: 1562459
aauguagacuguuuggauu

SEQ ID NO: 1748688 - RNA, 19 nt, Artificial Sequence
  Description of Artificial Sequence: Synthetic oligonucleotide
  Antisense strand to SEQ ID NO: 1748687
aauccaaacagucuacauu

SEQ ID NO: 1748689 - RNA, 19 nt, Artificial Sequence
  Description of Artificial Sequence: Synthetic oligonucleotide
  Sense strand starting at position 3611 of SEQ ID NO: 1562459
uguaaugagccauguucuc

SEQ ID NO: 1748690 - RNA, 19 nt, Artificial Sequence
  Description of Artificial Sequence: Synthetic oligonucleotide
  Antisense strand to SEQ ID NO: 1748689
gagaacauggcucauuaca

SEQ ID NO: 1748691 - RNA, 19 nt, Artificial Sequence
  Description of Artificial Sequence: Synthetic oligonucleotide
  Sense strand starting at position 37 of SEQ ID NO: 1562460
ccucaaaguccuugacugu

SEQ ID NO: 1748692 - RNA, 19 nt, Artificial Sequence
  Description of Artificial Sequence: Synthetic oligonucleotide
  Antisense strand to SEQ ID NO: 1748691
acagucaaggacuuugagg

SEQ ID NO: 1748693 - RNA, 19 nt, Artificial Sequence
  Description of Artificial Sequence: Synthetic oligonucleotide
  Sense strand starting at position 38 of SEQ ID NO: 1562460
cucaaaguccuugacuguu

SEQ ID NO: 1748694 - RNA, 19 nt, Artificial Sequence
  Description of Artificial Sequence: Synthetic oligonucleotide
  Antisense strand to SEQ ID NO: 1748693
aacagucaaggacuuugag

SEQ ID NO: 1748695 - RNA, 19 nt, Artificial Sequence
  Description of Artificial Sequence: Synthetic oligonucleotide
  Sense strand starting at position 92 of SEQ ID NO: 1562460
aagucuugaaggugaaguu

SEQ ID NO: 1748696 - RNA, 19 nt, Artificial Sequence
  Description of Artificial Sequence: Synthetic oligonucleotide
  Antisense strand to SEQ ID NO: 1748695
aacuucaccuucaagacuu

SEQ ID NO: 1748697 - RNA, 19 nt, Artificial Sequence
  Description of Artificial Sequence: Synthetic oligonucleotide
  Sense strand starting at position 129 of SEQ ID NO: 1562460
ucuauuacauuagugauca

SEQ ID NO: 1748698 - RNA, 19 nt, Artificial Sequence
  Description of Artificial Sequence: Synthetic oligonucleotide
  Antisense strand to SEQ ID NO: 1748697
ugaucacuaauguaauaga

SEQ ID NO: 1748699 - RNA, 19 nt, Artificial Sequence
  Description of Artificial Sequence: Synthetic oligonucleotide
  Sense strand starting at position 133 of SEQ ID NO: 1562460
uuacauuagugaucaucac

SEQ ID NO: 1748700 - RNA, 19 nt, Artificial Sequence
  Description of Artificial Sequence: Synthetic oligonucleotide
  Antisense strand to SEQ ID NO: 1748699
gugaugaucacuaauguaa

SEQ ID NO: 1748701 - RNA, 19 nt, Artificial Sequence
  Description of Artificial Sequence: Synthetic oligonucleotide
  Sense strand starting at position 208 of SEQ ID NO: 1562460
ggcacaaacguuuauugaa

SEQ ID NO: 1748702 - RNA, 19 nt, Artificial Sequence
  Description of Artificial Sequence: Synthetic oligonucleotide
  Antisense strand to SEQ ID NO: 1748701
uucaauaaacguuugugcc

SEQ ID NO: 1748703 - RNA, 19 nt, Artificial Sequence
  Description of Artificial Sequence: Synthetic oligonucleotide
  Sense strand starting at position 387 of SEQ ID NO: 1562460
ugugcuauggcugcugcaa

SEQ ID NO: 1748704 - RNA, 19 nt, Artificial Sequence
  Description of Artificial Sequence: Synthetic oligonucleotide
  Antisense strand to SEQ ID NO: 1748703
uugcagcagccauagcaca

SEQ ID NO: 1748705 - RNA, 19 nt, Artificial Sequence
  Description of Artificial Sequence: Synthetic oligonucleotide
  Sense strand starting at position 412 of SEQ ID NO: 1562460
acuagaaacuuggugacuu

SEQ ID NO: 1748706 - RNA, 19 nt, Artificial Sequence
  Description of Artificial Sequence: Synthetic oligonucleotide
  Antisense strand to SEQ ID NO: 1748705
aagucaccaaguuucuagu

SEQ ID NO: 1748707 - RNA, 19 nt, Artificial Sequence
  Description of Artificial Sequence: Synthetic oligonucleotide
  Sense strand starting at position 447 of SEQ ID NO: 1562460
ggugucuuaccuuauguca

SEQ ID NO: 1748708 - RNA, 19 nt, Artificial Sequence
  Description of Artificial Sequence: Synthetic oligonucleotide
  Antisense strand to SEQ ID NO: 1748707
ugacauaagguaagacacc

SEQ ID NO: 1748709 - RNA, 19 nt, Artificial Sequence
  Description of Artificial Sequence: Synthetic oligonucleotide
  Sense strand starting at position 500 of SEQ ID NO: 1562460
gccaguagccuguaaugag

SEQ ID NO: 1748710 - RNA, 19 nt, Artificial Sequence
  Description of Artificial Sequence: Synthetic oligonucleotide
  Antisense strand to SEQ ID NO: 1748709
cucauuacaggcuacuggc

SEQ ID NO: 1748711 - RNA, 19 nt, Artificial Sequence
  Description of Artificial Sequence: Synthetic oligonucleotide
  Sense strand starting at position 514 of SEQ ID NO: 1562460
augagucuuaugggacuca

SEQ ID NO: 1748712 - RNA, 19 nt, Artificial Sequence
  Description of Artificial Sequence: Synthetic oligonucleotide
  Antisense strand to SEQ ID NO: 1748711
ugagucccauaagacucau

SEQ ID NO: 1748713 - RNA, 19 nt, Artificial Sequence
  Description of Artificial Sequence: Synthetic oligonucleotide
  Sense strand starting at position 914 of SEQ ID NO: 1562460
augucacauccugggaaua

SEQ ID NO: 1748714 - RNA, 19 nt, Artificial Sequence
  Description of Artificial Sequence: Synthetic oligonucleotide
  Antisense strand to SEQ ID NO: 1748713
uauucccaggaugugacau

SEQ ID NO: 1748715 - RNA, 19 nt, Artificial Sequence
  Description of Artificial Sequence: Synthetic oligonucleotide
  Sense strand starting at position 915 of SEQ ID NO: 1562460
ugucacauccugggaauau

SEQ ID NO: 1748716 - RNA, 19 nt, Artificial Sequence
  Description of Artificial Sequence: Synthetic oligonucleotide
  Antisense strand to SEQ ID NO: 1748715
auauucccaggaugugaca

SEQ ID NO: 1748717 - RNA, 19 nt, Artificial Sequence
  Description of Artificial Sequence: Synthetic oligonucleotide
  Sense strand starting at position 916 of SEQ ID NO: 1562460
gucacauccugggaauaua

SEQ ID NO: 1748718 - RNA, 19 nt, Artificial Sequence
  Description of Artificial Sequence: Synthetic oligonucleotide
  Antisense strand to SEQ ID NO: 1748717
uauauucccaggaugugac

SEQ ID NO: 1748719 - RNA, 19 nt, Artificial Sequence
  Description of Artificial Sequence: Synthetic oligonucleotide
  Sense strand starting at position 1045 of SEQ ID NO: 1562460
gccauugggagccaacauu

SEQ ID NO: 1748720 - RNA, 19 nt, Artificial Sequence
  Description of Artificial Sequence: Synthetic oligonucleotide
  Antisense strand to SEQ ID NO: 1748719
aauguuggcucccaauggc

SEQ ID NO: 1748721 - RNA, 19 nt, Artificial Sequence
  Description of Artificial Sequence: Synthetic oligonucleotide
  Sense strand starting at position 1067 of SEQ ID NO: 1562460
gaggcaaaugcaggugaau

SEQ ID NO: 1748722 - RNA, 19 nt, Artificial Sequence
  Description of Artificial Sequence: Synthetic oligonucleotide
  Antisense strand to SEQ ID NO: 1748721
auucaccugcauuugccuc

SEQ ID NO: 1748723 - RNA, 19 nt, Artificial Sequence
  Description of Artificial Sequence: Synthetic oligonucleotide
  Sense strand starting at position 1069 of SEQ ID NO: 1562460
ggcaaaugcaggugaauua

SEQ ID NO: 1748724 - RNA, 19 nt, Artificial Sequence
  Description of Artificial Sequence: Synthetic oligonucleotide
  Antisense strand to SEQ ID NO: 1748723
uaauucaccugcauuugcc

SEQ ID NO: 1748725 - RNA, 19 nt, Artificial Sequence
  Description of Artificial Sequence: Synthetic oligonucleotide
  Sense strand starting at position 1102 of SEQ ID NO: 1562460
ggcaaaggcaggugaauua

SEQ ID NO: 1748726 - RNA, 19 nt, Artificial Sequence
  Description of Artificial Sequence: Synthetic oligonucleotide
  Antisense strand to SEQ ID NO: 1748725
uaauucaccugccuuugcc

SEQ ID NO: 1748727 - RNA, 19 nt, Artificial Sequence
  Description of Artificial Sequence: Synthetic oligonucleotide
  Sense strand starting at position 1579 of SEQ ID NO: 1562460
ccuggauuacugugaagca

SEQ ID NO: 1748728 - RNA, 19 nt, Artificial Sequence
  Description of Artificial Sequence: Synthetic oligonucleotide
  Antisense strand to SEQ ID NO: 1748727
ugcuucacaguaauccagg

SEQ ID NO: 1748729 - RNA, 19 nt, Artificial Sequence
  Description of Artificial Sequence: Synthetic oligonucleotide
  Sense strand starting at position 1797 of SEQ ID NO: 1562460
auguguugcaauugcuuga

SEQ ID NO: 1748730 - RNA, 19 nt, Artificial Sequence
  Description of Artificial Sequence: Synthetic oligonucleotide
  Antisense strand to SEQ ID NO: 1748729
ucaagcaauugcaacacau

SEQ ID NO: 1748731 - RNA, 19 nt, Artificial Sequence
  Description of Artificial Sequence: Synthetic oligonucleotide
  Sense strand starting at position 1802 of SEQ ID NO: 1562460
uugcaauugcuugauggga

SEQ ID NO: 1748732 - RNA, 19 nt, Artificial Sequence
  Description of Artificial Sequence: Synthetic oligonucleotide
  Antisense strand to SEQ ID NO: 1748731
ucccaucaagcaauugcaa

SEQ ID NO: 1748733 - RNA, 19 nt, Artificial Sequence
  Description of Artificial Sequence: Synthetic oligonucleotide
  Sense strand starting at position 1818 of SEQ ID NO: 1562460
ggagaugugucucugaagu

SEQ ID NO: 1748734 - RNA, 19 nt, Artificial Sequence
  Description of Artificial Sequence: Synthetic oligonucleotide
  Antisense strand to SEQ ID NO: 1748733
acuucagagacacaucucc

SEQ ID NO: 1748735 - RNA, 19 nt, Artificial Sequence
  Description of Artificial Sequence: Synthetic oligonucleotide
  Sense strand starting at position 1829 of SEQ ID NO: 1562460
ucugaagucuuguuaaauu

SEQ ID NO: 1748736 - RNA, 19 nt, Artificial Sequence
  Description of Artificial Sequence: Synthetic oligonucleotide
  Antisense strand to SEQ ID NO: 1748735
aauuuaacaagacuucaga

SEQ ID NO: 1748737 - RNA, 19 nt, Artificial Sequence
  Description of Artificial Sequence: Synthetic oligonucleotide
  Sense strand starting at position 1852 of SEQ ID NO: 1562460
gguaucuucucuuuccuau

SEQ ID NO: 1748738 - RNA, 19 nt, Artificial Sequence
  Description of Artificial Sequence: Synthetic oligonucleotide
  Antisense strand to SEQ ID NO: 1748737
auaggaaagagaagauacc

SEQ ID NO: 1748739 - RNA, 19 nt, Artificial Sequence
  Description of Artificial Sequence: Synthetic oligonucleotide
  Sense strand starting at position 2096 of SEQ ID NO: 1562460
gguucacuguuguuguaca

SEQ ID NO: 1748740 - RNA, 19 nt, Artificial Sequence
  Description of Artificial Sequence: Synthetic oligonucleotide
  Antisense strand to SEQ ID NO: 1748739
uguacaacaacagugaacc

SEQ ID NO: 1748741 - RNA, 19 nt, Artificial Sequence
  Description of Artificial Sequence: Synthetic oligonucleotide
  Sense strand starting at position 2114 of SEQ ID NO: 1562460
auucuacggguuugggaaa

SEQ ID NO: 1748742 - RNA, 19 nt, Artificial Sequence
  Description of Artificial Sequence: Synthetic oligonucleotide
  Antisense strand to SEQ ID NO: 1748741
uuucccaaacccguagaau

SEQ ID NO: 1748743 - RNA, 19 nt, Artificial Sequence
  Description of Artificial Sequence: Synthetic oligonucleotide
  Sense strand starting at position 2226 of SEQ ID NO: 1562460
agcgucuuccaacaguaaa

SEQ ID NO: 1748744 - RNA, 19 nt, Artificial Sequence
  Description of Artificial Sequence: Synthetic oligonucleotide
  Antisense strand to SEQ ID NO: 1748743
uuuacuguuggaagacgcu

SEQ ID NO: 1748745 - RNA, 19 nt, Artificial Sequence
  Description of Artificial Sequence: Synthetic oligonucleotide
  Sense strand starting at position 2625 of SEQ ID NO: 1562460
uuucuuguccuagaacaag

SEQ ID NO: 1748746 - RNA, 19 nt, Artificial Sequence
  Description of Artificial Sequence: Synthetic oligonucleotide
  Antisense strand to SEQ ID NO: 1748745
cuuguucuaggacaagaaa

SEQ ID NO: 1748747 - RNA, 19 nt, Artificial Sequence
  Description of Artificial Sequence: Synthetic oligonucleotide
  Sense strand starting at position 2634 of SEQ ID NO: 1562460
cuagaacaagcuugccaua

SEQ ID NO: 1748748 - RNA, 19 nt, Artificial Sequence
  Description of Artificial Sequence: Synthetic oligonucleotide
  Antisense strand to SEQ ID NO: 1748747
uauggcaagcuuguucuag

SEQ ID NO: 1748749 - RNA, 19 nt, Artificial Sequence
  Description of Artificial Sequence: Synthetic oligonucleotide
  Sense strand starting at position 2675 of SEQ ID NO: 1562460
cuuugaguguggcucaaua

SEQ ID NO: 1748750 - RNA, 19 nt, Artificial Sequence
  Description of Artificial Sequence: Synthetic oligonucleotide
  Antisense strand to SEQ ID NO: 1748749
uauugagccacacucaaag

SEQ ID NO: 1748751 - RNA, 19 nt, Artificial Sequence
  Description of Artificial Sequence: Synthetic oligonucleotide
  Sense strand starting at position 2677 of SEQ ID NO: 1562460
uugaguguggcucaauaca

SEQ ID NO: 1748752 - RNA, 19 nt, Artificial Sequence
  Description of Artificial Sequence: Synthetic oligonucleotide
  Antisense strand to SEQ ID NO: 1748751
uguauugagccacacucaa

SEQ ID NO: 1748753 - RNA, 19 nt, Artificial Sequence
  Description of Artificial Sequence: Synthetic oligonucleotide
  Sense strand starting at position 2904 of SEQ ID NO: 1562460
guauuuagcuaucaugguc

SEQ ID NO: 1748754 - RNA, 19 nt, Artificial Sequence
  Description of Artificial Sequence: Synthetic oligonucleotide
  Antisense strand to SEQ ID NO: 1748753
gaccaugauagcuaaauac

SEQ ID NO: 1748755 - RNA, 19 nt, Artificial Sequence
  Description of Artificial Sequence: Synthetic oligonucleotide
  Sense strand starting at position 2909 of SEQ ID NO: 1562460
uagcuaucauggucuagau

SEQ ID NO: 1748756 - RNA, 19 nt, Artificial Sequence
  Description of Artificial Sequence: Synthetic oligonucleotide
  Antisense strand to SEQ ID NO: 1748755
aucuagaccaugauagcua

SEQ ID NO: 1748757 - RNA, 19 nt, Artificial Sequence
  Description of Artificial Sequence: Synthetic oligonucleotide
  Sense strand starting at position 2911 of SEQ ID NO: 1562460
gcuaucauggucuagauga

SEQ ID NO: 1748758 - RNA, 19 nt, Artificial Sequence
  Description of Artificial Sequence: Synthetic oligonucleotide
  Antisense strand to SEQ ID NO: 1748757
ucaucuagaccaugauagc

SEQ ID NO: 1748759 - RNA, 19 nt, Artificial Sequence
  Description of Artificial Sequence: Synthetic oligonucleotide
  Sense strand starting at position 2944 of SEQ ID NO: 1562460
gcuacuggguugguuauaa

SEQ ID NO: 1748760 - RNA, 19 nt, Artificial Sequence
  Description of Artificial Sequence: Synthetic oligonucleotide
  Antisense strand to SEQ ID NO: 1748759
uuauaaccaacccaguagc

SEQ ID NO: 1748761 - RNA, 19 nt, Artificial Sequence
  Description of Artificial Sequence: Synthetic oligonucleotide
  Sense strand starting at position 2955 of SEQ ID NO: 1562460
gguuauaauguuuagacca

SEQ ID NO: 1748762 - RNA, 19 nt, Artificial Sequence
  Description of Artificial Sequence: Synthetic oligonucleotide
  Antisense strand to SEQ ID NO: 1748761
uggucuaaacauuauaacc

SEQ ID NO: 1748763 - RNA, 19 nt, Artificial Sequence
  Description of Artificial Sequence: Synthetic oligonucleotide
  Sense strand starting at position 3082 of SEQ ID NO: 1562460
uuaucuuucuuagcuguau

SEQ ID NO: 1748764 - RNA, 19 nt, Artificial Sequence
  Description of Artificial Sequence: Synthetic oligonucleotide
  Antisense strand to SEQ ID NO: 1748763
auacagcuaagaaagauaa

SEQ ID NO: 1748765 - RNA, 19 nt, Artificial Sequence
  Description of Artificial Sequence: Synthetic oligonucleotide
  Sense strand starting at position 3288 of SEQ ID NO: 1562460
ugcuuacaugaguaaguua

SEQ ID NO: 1748766 - RNA, 19 nt, Artificial Sequence
  Description of Artificial Sequence: Synthetic oligonucleotide
  Antisense strand to SEQ ID NO: 1748765
uaacuuacucauguaagca

SEQ ID NO: 1748767 - RNA, 19 nt, Artificial Sequence
  Description of Artificial Sequence: Synthetic oligonucleotide
  Sense strand starting at position 3582 of SEQ ID NO: 1562460
cucuuuguggcugaguagu

SEQ ID NO: 1748768 - RNA, 19 nt, Artificial Sequence
  Description of Artificial Sequence: Synthetic oligonucleotide
  Antisense strand to SEQ ID NO: 1748767
acuacucagccacaaagag

SEQ ID NO: 1748769 - RNA, 19 nt, Artificial Sequence
  Description of Artificial Sequence: Synthetic oligonucleotide
  Sense strand starting at position 3877 of SEQ ID NO: 1562460
uggacuauauauggaauau

SEQ ID NO: 1748770 - RNA, 19 nt, Artificial Sequence
  Description of Artificial Sequence: Synthetic oligonucleotide
  Antisense strand to SEQ ID NO: 1748769
auauuccauauauagucca

SEQ ID NO: 1748771 - RNA, 19 nt, Artificial Sequence
  Description of Artificial Sequence: Synthetic oligonucleotide
  Sense strand starting at position 194 of SEQ ID NO: 1562461
agagcuugaggucagaagu

SEQ ID NO: 1748772 - RNA, 19 nt, Artificial Sequence
  Description of Artificial Sequence: Synthetic oligonucleotide
  Antisense strand to SEQ ID NO: 1748771
acuucugaccucaagcucu

SEQ ID NO: 1748773 - RNA, 19 nt, Artificial Sequence
  Description of Artificial Sequence: Synthetic oligonucleotide
  Sense strand starting at position 509 of SEQ ID NO: 1562461
caggacaaucugugcacua

SEQ ID NO: 1748774 - RNA, 19 nt, Artificial Sequence
  Description of Artificial Sequence: Synthetic oligonucleotide
  Antisense strand to SEQ ID NO: 1748773
uagugcacagauuguccug

SEQ ID NO: 1748775 - RNA, 19 nt, Artificial Sequence
  Description of Artificial Sequence: Synthetic oligonucleotide
  Sense strand starting at position 511 of SEQ ID NO: 1562461
ggacaaucugugcacuaca

SEQ ID NO: 1748776 - RNA, 19 nt, Artificial Sequence
  Description of Artificial Sequence: Synthetic oligonucleotide
  Antisense strand to SEQ ID NO: 1748775
uguagugcacagauugucc

SEQ ID NO: 1748777 - RNA, 19 nt, Artificial Sequence
  Description of Artificial Sequence: Synthetic oligonucleotide
  Sense strand starting at position 757 of SEQ ID NO: 1562461
cugggauuugcuugcucuu

SEQ ID NO: 1748778 - RNA, 19 nt, Artificial Sequence
  Description of Artificial Sequence: Synthetic oligonucleotide
  Antisense strand to SEQ ID NO: 1748777
aagagcaagcaaaucccag

SEQ ID NO: 1748779 - RNA, 19 nt, Artificial Sequence
  Description of Artificial Sequence: Synthetic oligonucleotide
  Sense strand starting at position 970 of SEQ ID NO: 1562461
acuguagggaguugaaaug

SEQ ID NO: 1748780 - RNA, 19 nt, Artificial Sequence
  Description of Artificial Sequence: Synthetic oligonucleotide
  Antisense strand to SEQ ID NO: 1748779
cauuucaacucccuacagu

SEQ ID NO: 1748781 - RNA, 19 nt, Artificial Sequence
  Description of Artificial Sequence: Synthetic oligonucleotide
  Sense strand starting at position 1106 of SEQ ID NO: 1562461
uuccgcauuucugucaauu

SEQ ID NO: 1748782 - RNA, 19 nt, Artificial Sequence
  Description of Artificial Sequence: Synthetic oligonucleotide
  Antisense strand to SEQ ID NO: 1748781
aauugacagaaaugcggaa

SEQ ID NO: 1748783 - RNA, 19 nt, Artificial Sequence
  Description of Artificial Sequence: Synthetic oligonucleotide
  Sense strand starting at position 1158 of SEQ ID NO: 1562461
cuauaaauccuguggagaa

SEQ ID NO: 1748784 - RNA, 19 nt, Artificial Sequence
  Description of Artificial Sequence: Synthetic oligonucleotide
  Antisense strand to SEQ ID NO: 1748783
uucuccacaggauuuauag

SEQ ID NO: 1748785 - RNA, 19 nt, Artificial Sequence
  Description of Artificial Sequence: Synthetic oligonucleotide
  Sense strand starting at position 1543 of SEQ ID NO: 1562461
gagaaaugcugaguuuaua

SEQ ID NO: 1748786 - RNA, 19 nt, Artificial Sequence
  Description of Artificial Sequence: Synthetic oligonucleotide
  Antisense strand to SEQ ID NO: 1748785
uauaaacucagcauuucuc

SEQ ID NO: 1748787 - RNA, 19 nt, Artificial Sequence
  Description of Artificial Sequence: Synthetic oligonucleotide
  Sense strand starting at position 1551 of SEQ ID NO: 1562461
cugaguuuauaucccaaag

SEQ ID NO: 1748788 - RNA, 19 nt, Artificial Sequence
  Description of Artificial Sequence: Synthetic oligonucleotide
  Antisense strand to SEQ ID NO: 1748787
cuuugggauauaaacucag

SEQ ID NO: 1748789 - RNA, 19 nt, Artificial Sequence
  Description of Artificial Sequence: Synthetic oligonucleotide
  Sense strand starting at position 1597 of SEQ ID NO: 1562461
guacgaguauuccuuggga

SEQ ID NO: 1748790 - RNA, 19 nt, Artificial Sequence
  Description of Artificial Sequence: Synthetic oligonucleotide
  Antisense strand to SEQ ID NO: 1748789
ucccaaggaauacucguac

SEQ ID NO: 1748791 - RNA, 19 nt, Artificial Sequence
  Description of Artificial Sequence: Synthetic oligonucleotide
  Sense strand starting at position 1599 of SEQ ID NO: 1562461
acgaguauuccuugggaag

SEQ ID NO: 1748792 - RNA, 19 nt, Artificial Sequence
  Description of Artificial Sequence: Synthetic oligonucleotide
  Antisense strand to SEQ ID NO: 1748791
cuucccaaggaauacucgu

SEQ ID NO: 1748793 - RNA, 19 nt, Artificial Sequence
  Description of Artificial Sequence: Synthetic oligonucleotide
  Sense strand starting at position 1600 of SEQ ID NO: 1562461
cgaguauuccuugggaaga

SEQ ID NO: 1748794 - RNA, 19 nt, Artificial Sequence
  Description of Artificial Sequence: Synthetic oligonucleotide
  Antisense strand to SEQ ID NO: 1748793
ucuucccaaggaauacucg

SEQ ID NO: 1748795 - RNA, 19 nt, Artificial Sequence
  Description of Artificial Sequence: Synthetic oligonucleotide
  Sense strand starting at position 2174 of SEQ ID NO: 1562461
gcguuaccugugcucgaua

SEQ ID NO: 1748796 - RNA, 19 nt, Artificial Sequence
  Description of Artificial Sequence: Synthetic oligonucleotide
  Antisense strand to SEQ ID NO: 1748795
uaucgagcacagguaacgc

SEQ ID NO: 1748797 - RNA, 19 nt, Artificial Sequence
  Description of Artificial Sequence: Synthetic oligonucleotide
  Sense strand starting at position 2566 of SEQ ID NO: 1562461
uggagaggacguuguaauu

SEQ ID NO: 1748798 - RNA, 19 nt, Artificial Sequence
  Description of Artificial Sequence: Synthetic oligonucleotide
  Antisense strand to SEQ ID NO: 1748797
aauuacaacguccucucca

SEQ ID NO: 1748799 - RNA, 19 nt, Artificial Sequence
  Description of Artificial Sequence: Synthetic oligonucleotide
  Sense strand starting at position 2727 of SEQ ID NO: 1562461
aacagauguuucuugaaug

SEQ ID NO: 1748800 - RNA, 19 nt, Artificial Sequence
  Description of Artificial Sequence: Synthetic oligonucleotide
  Antisense strand to SEQ ID NO: 1748799
cauucaagaaacaucuguu

SEQ ID NO: 1748801 - RNA, 19 nt, Artificial Sequence
  Description of Artificial Sequence: Synthetic oligonucleotide
  Sense strand starting at position 2812 of SEQ ID NO: 1562461
acgugaguguuauuugaag

SEQ ID NO: 1748802 - RNA, 19 nt, Artificial Sequence
  Description of Artificial Sequence: Synthetic oligonucleotide
  Antisense strand to SEQ ID NO: 1748801
cuucaaauaacacucacgu

SEQ ID NO: 1748803 - RNA, 19 nt, Artificial Sequence
  Description of Artificial Sequence: Synthetic oligonucleotide
  Sense strand starting at position 2814 of SEQ ID NO: 1562461
gugaguguuauuugaagua

SEQ ID NO: 1748804 - RNA, 19 nt, Artificial Sequence
  Description of Artificial Sequence: Synthetic oligonucleotide
  Antisense strand to SEQ ID NO: 1748803
uacuucaaauaacacucac

SEQ ID NO: 1748805 - RNA, 19 nt, Artificial Sequence
  Description of Artificial Sequence: Synthetic oligonucleotide
  Sense strand starting at position 2891 of SEQ ID NO: 1562461
uuuacuuaagggugucgaa

SEQ ID NO: 1748806 - RNA, 19 nt, Artificial Sequence
  Description of Artificial Sequence: Synthetic oligonucleotide
  Antisense strand to SEQ ID NO: 1748805
uucgacacccuuaaguaaa

SEQ ID NO: 1748807 - RNA, 19 nt, Artificial Sequence
  Description of Artificial Sequence: Synthetic oligonucleotide
  Sense strand starting at position 3059 of SEQ ID NO: 1562461
aggaaaguguaaguaucuu

SEQ ID NO: 1748808 - RNA, 19 nt, Artificial Sequence
  Description of Artificial Sequence: Synthetic oligonucleotide
  Antisense strand to SEQ ID NO: 1748807
aagauacuuacacuuuccu

SEQ ID NO: 1748809 - RNA, 19 nt, Artificial Sequence
  Description of Artificial Sequence: Synthetic oligonucleotide
  Sense strand starting at position 3091 of SEQ ID NO: 1562461
gggaaauguaagugacgga

SEQ ID NO: 1748810 - RNA, 19 nt, Artificial Sequence
  Description of Artificial Sequence: Synthetic oligonucleotide
  Antisense strand to SEQ ID NO: 1748809
uccgucacuuacauuuccc

SEQ ID NO: 1748811 - RNA, 19 nt, Artificial Sequence
  Description of Artificial Sequence: Synthetic oligonucleotide
  Sense strand starting at position 3237 of SEQ ID NO: 1562461
ugcauacaguucccaugaa

SEQ ID NO: 1748812 - RNA, 19 nt, Artificial Sequence
  Description of Artificial Sequence: Synthetic oligonucleotide
  Antisense strand to SEQ ID NO: 1748811
uucaugggaacuguaugca

SEQ ID NO: 1748813 - RNA, 19 nt, Artificial Sequence
  Description of Artificial Sequence: Synthetic oligonucleotide
  Sense strand starting at position 3413 of SEQ ID NO: 1562461
ggaguucaccgguaugaga

SEQ ID NO: 1748814 - RNA, 19 nt, Artificial Sequence
  Description of Artificial Sequence: Synthetic oligonucleotide
  Antisense strand to SEQ ID NO: 1748813
ucucauaccggugaacucc

SEQ ID NO: 1748815 - RNA, 19 nt, Artificial Sequence
  Description of Artificial Sequence: Synthetic oligonucleotide
  Sense strand starting at position 3415 of SEQ ID NO: 1562461
aguucaccgguaugagaaa

SEQ ID NO: 1748816 - RNA, 19 nt, Artificial Sequence
  Description of Artificial Sequence: Synthetic oligonucleotide
  Antisense strand to SEQ ID NO: 1748815
uuucucauaccggugaacu

SEQ ID NO: 1748817 - RNA, 19 nt, Artificial Sequence
  Description of Artificial Sequence: Synthetic oligonucleotide
  Sense strand starting at position 3442 of SEQ ID NO: 1562461
guugaaagguugucacuag

SEQ ID NO: 1748818 - RNA, 19 nt, Artificial Sequence
  Description of Artificial Sequence: Synthetic oligonucleotide
  Antisense strand to SEQ ID NO: 1748817
cuagugacaaccuuucaac

SEQ ID NO: 1748819 - RNA, 19 nt, Artificial Sequence
  Description of Artificial Sequence: Synthetic oligonucleotide
  Sense strand starting at position 3446 of SEQ ID NO: 1562461
aaagguugucacuagugau

SEQ ID NO: 1748820 - RNA, 19 nt, Artificial Sequence
  Description of Artificial Sequence: Synthetic oligonucleotide
  Antisense strand to SEQ ID NO: 1748819
aucacuagugacaaccuuu

SEQ ID NO: 1748821 - RNA, 19 nt, Artificial Sequence
  Description of Artificial Sequence: Synthetic oligonucleotide
  Sense strand starting at position 3450 of SEQ ID NO: 1562461
guugucacuagugauaaug

SEQ ID NO: 1748822 - RNA, 19 nt, Artificial Sequence
  Description of Artificial Sequence: Synthetic oligonucleotide
  Antisense strand to SEQ ID NO: 1748821
cauuaucacuagugacaac

SEQ ID NO: 1748823 - RNA, 19 nt, Artificial Sequence
  Description of Artificial Sequence: Synthetic oligonucleotide
  Sense strand starting at position 3489 of SEQ ID NO: 1562461
aaucauagggcuugguuua

SEQ ID NO: 1748824 - RNA, 19 nt, Artificial Sequence
  Description of Artificial Sequence: Synthetic oligonucleotide
  Antisense strand to SEQ ID NO: 1748823
uaaaccaagcccuaugauu

SEQ ID NO: 1748825 - RNA, 19 nt, Artificial Sequence
  Description of Artificial Sequence: Synthetic oligonucleotide
  Sense strand starting at position 3490 of SEQ ID NO: 1562461
aucauagggcuugguuuau

SEQ ID NO: 1748826 - RNA, 19 nt, Artificial Sequence
  Description of Artificial Sequence: Synthetic oligonucleotide
  Antisense strand to SEQ ID NO: 1748825
auaaaccaagcccuaugau

SEQ ID NO: 1748827 - RNA, 19 nt, Artificial Sequence
  Description of Artificial Sequence: Synthetic oligonucleotide
  Sense strand starting at position 3494 of SEQ ID NO: 1562461
uagggcuugguuuauuaau

SEQ ID NO: 1748828 - RNA, 19 nt, Artificial Sequence
  Description of Artificial Sequence: Synthetic oligonucleotide
  Antisense strand to SEQ ID NO: 1748827
auuaauaaaccaagcccua

SEQ ID NO: 1748829 - RNA, 19 nt, Artificial Sequence
  Description of Artificial Sequence: Synthetic oligonucleotide
  Sense strand starting at position 3587 of SEQ ID NO: 1562461
gagagacauacccgaggua

SEQ ID NO: 1748830 - RNA, 19 nt, Artificial Sequence
  Description of Artificial Sequence: Synthetic oligonucleotide
  Antisense strand to SEQ ID NO: 1748829
uaccucggguaugucucuc

SEQ ID NO: 1748831 - RNA, 19 nt, Artificial Sequence
  Description of Artificial Sequence: Synthetic oligonucleotide
  Sense strand starting at position 3590 of SEQ ID NO: 1562461
agacauacccgagguaaau

SEQ ID NO: 1748832 - RNA, 19 nt, Artificial Sequence
  Description of Artificial Sequence: Synthetic oligonucleotide
  Antisense strand to SEQ ID NO: 1748831
auuuaccucggguaugucu

SEQ ID NO: 1748833 - RNA, 19 nt, Artificial Sequence
  Description of Artificial Sequence: Synthetic oligonucleotide
  Sense strand starting at position 3600 of SEQ ID NO: 1562461
gagguaaaucuuuggccaa

SEQ ID NO: 1748834 - RNA, 19 nt, Artificial Sequence
  Description of Artificial Sequence: Synthetic oligonucleotide
  Antisense strand to SEQ ID NO: 1748833
uuggccaaagauuuaccuc

SEQ ID NO: 1748835 - RNA, 19 nt, Artificial Sequence
  Description of Artificial Sequence: Synthetic oligonucleotide
  Sense strand starting at position 3602 of SEQ ID NO: 1562461
gguaaaucuuuggccaaga

SEQ ID NO: 1748836 - RNA, 19 nt, Artificial Sequence
  Description of Artificial Sequence: Synthetic oligonucleotide
  Antisense strand to SEQ ID NO: 1748835
ucuuggccaaagauuuacc

SEQ ID NO: 1748837 - RNA, 19 nt, Artificial Sequence
  Description of Artificial Sequence: Synthetic oligonucleotide
  Sense strand starting at position 3603 of SEQ ID NO: 1562461
guaaaucuuuggccaagaa

SEQ ID NO: 1748838 - RNA, 19 nt, Artificial Sequence
  Description of Artificial Sequence: Synthetic oligonucleotide
  Antisense strand to SEQ ID NO: 1748837
uucuuggccaaagauuuac

SEQ ID NO: 1748839 - RNA, 19 nt, Artificial Sequence
  Description of Artificial Sequence: Synthetic oligonucleotide
  Sense strand starting at position 3729 of SEQ ID NO: 1562461
guaucaagucuguaacagu

SEQ ID NO: 1748840 - RNA, 19 nt, Artificial Sequence
  Description of Artificial Sequence: Synthetic oligonucleotide
  Antisense strand to SEQ ID NO: 1748839
acuguuacagacuugauac

SEQ ID NO: 1748841 - RNA, 19 nt, Artificial Sequence
  Description of Artificial Sequence: Synthetic oligonucleotide
  Sense strand starting at position 3754 of SEQ ID NO: 1562461
cuaagauaagccuggauca

SEQ ID NO: 1748842 - RNA, 19 nt, Artificial Sequence
  Description of Artificial Sequence: Synthetic oligonucleotide
  Antisense strand to SEQ ID NO: 1748841
ugauccaggcuuaucuuag

SEQ ID NO: 1748843 - RNA, 19 nt, Artificial Sequence
  Description of Artificial Sequence: Synthetic oligonucleotide
  Sense strand starting at position 3767 of SEQ ID NO: 1562461
ggaucauuacugugccaga

SEQ ID NO: 1748844 - RNA, 19 nt, Artificial Sequence
  Description of Artificial Sequence: Synthetic oligonucleotide
  Antisense strand to SEQ ID NO: 1748843
ucuggcacaguaaugaucc

SEQ ID NO: 1748845 - RNA, 19 nt, Artificial Sequence
  Description of Artificial Sequence: Synthetic oligonucleotide
  Sense strand starting at position 3768 of SEQ ID NO: 1562461
gaucauuacugugccagaa

SEQ ID NO: 1748846 - RNA, 19 nt, Artificial Sequence
  Description of Artificial Sequence: Synthetic oligonucleotide
  Antisense strand to SEQ ID NO: 1748845
uucuggcacaguaaugauc

SEQ ID NO: 1748847 - RNA, 19 nt, Artificial Sequence
  Description of Artificial Sequence: Synthetic oligonucleotide
  Sense strand starting at position 3868 of SEQ ID NO: 1562461
guccaaauuugggagaguu

SEQ ID NO: 1748848 - RNA, 19 nt, Artificial Sequence
  Description of Artificial Sequence: Synthetic oligonucleotide
  Antisense strand to SEQ ID NO: 1748847
aacucucccaaauuuggac

SEQ ID NO: 1748849 - RNA, 19 nt, Artificial Sequence
  Description of Artificial Sequence: Synthetic oligonucleotide
  Sense strand starting at position 3876 of SEQ ID NO: 1562461
uugggagaguuugcauaac

SEQ ID NO: 1748850 - RNA, 19 nt, Artificial Sequence
  Description of Artificial Sequence: Synthetic oligonucleotide
  Antisense strand to SEQ ID NO: 1748849
guuaugcaaacucucccaa

SEQ ID NO: 1748851 - RNA, 19 nt, Artificial Sequence
  Description of Artificial Sequence: Synthetic oligonucleotide
  Sense strand starting at position 32 of SEQ ID NO: 1562462
caaauuacgcucuguugau

SEQ ID NO: 1748852 - RNA, 19 nt, Artificial Sequence
  Description of Artificial Sequence: Synthetic oligonucleotide
  Antisense strand to SEQ ID NO: 1748851
aucaacagagcguaauuug

SEQ ID NO: 1748853 - RNA, 19 nt, Artificial Sequence
  Description of Artificial Sequence: Synthetic oligonucleotide
  Sense strand starting at position 33 of SEQ ID NO: 1562462
aaauuacgcucuguugauc

SEQ ID NO: 1748854 - RNA, 19 nt, Artificial Sequence
  Description of Artificial Sequence: Synthetic oligonucleotide
  Antisense strand to SEQ ID NO: 1748853
gaucaacagagcguaauuu

SEQ ID NO: 1748855 - RNA, 19 nt, Artificial Sequence
  Description of Artificial Sequence: Synthetic oligonucleotide
  Sense strand starting at position 68 of SEQ ID NO: 1562462
augggugcuccacauccaa

SEQ ID NO: 1748856 - RNA, 19 nt, Artificial Sequence
  Description of Artificial Sequence: Synthetic oligonucleotide
  Antisense strand to SEQ ID NO: 1748855
uuggauguggagcacccau

SEQ ID NO: 1748857 - RNA, 19 nt, Artificial Sequence
  Description of Artificial Sequence: Synthetic oligonucleotide
  Sense strand starting at position 81 of SEQ ID NO: 1562462
auccaaaggcuauguuauu

SEQ ID NO: 1748858 - RNA, 19 nt, Artificial Sequence
  Description of Artificial Sequence: Synthetic oligonucleotide
  Antisense strand to SEQ ID NO: 1748857
aauaacauagccuuuggau

SEQ ID NO: 1748859 - RNA, 19 nt, Artificial Sequence
  Description of Artificial Sequence: Synthetic oligonucleotide
  Sense strand starting at position 82 of SEQ ID NO: 1562462
uccaaaggcuauguuauua

SEQ ID NO: 1748860 - RNA, 19 nt, Artificial Sequence
  Description of Artificial Sequence: Synthetic oligonucleotide
  Antisense strand to SEQ ID NO: 1748859
uaauaacauagccuuugga

SEQ ID NO: 1748861 - RNA, 19 nt, Artificial Sequence
  Description of Artificial Sequence: Synthetic oligonucleotide
  Sense strand starting at position 157 of SEQ ID NO: 1562462
ccaagauacuuggcaacua

SEQ ID NO: 1748862 - RNA, 19 nt, Artificial Sequence
  Description of Artificial Sequence: Synthetic oligonucleotide
  Antisense strand to SEQ ID NO: 1748861
uaguugccaaguaucuugg

SEQ ID NO: 1748863 - RNA, 19 nt, Artificial Sequence
  Description of Artificial Sequence: Synthetic oligonucleotide
  Sense strand starting at position 225 of SEQ ID NO: 1562462
guuacagaaugagcaaaua

SEQ ID NO: 1748864 - RNA, 19 nt, Artificial Sequence
  Description of Artificial Sequence: Synthetic oligonucleotide
  Antisense strand to SEQ ID NO: 1748863
uauuugcucauucuguaac

SEQ ID NO: 1748865 - RNA, 19 nt, Artificial Sequence
  Description of Artificial Sequence: Synthetic oligonucleotide
  Sense strand starting at position 447 of SEQ ID NO: 1562462
ggaguuacauaugcuggua

SEQ ID NO: 1748866 - RNA, 19 nt, Artificial Sequence
  Description of Artificial Sequence: Synthetic oligonucleotide
  Antisense strand to SEQ ID NO: 1748865
uaccagcauauguaacucc

SEQ ID NO: 1748867 - RNA, 19 nt, Artificial Sequence
  Description of Artificial Sequence: Synthetic oligonucleotide
  Sense strand starting at position 705 of SEQ ID NO: 1562462
ugguaauacuccucgcaau

SEQ ID NO: 1748868 - RNA, 19 nt, Artificial Sequence
  Description of Artificial Sequence: Synthetic oligonucleotide
  Antisense strand to SEQ ID NO: 1748867
auugcgaggaguauuacca

SEQ ID NO: 1748869 - RNA, 19 nt, Artificial Sequence
  Description of Artificial Sequence: Synthetic oligonucleotide
  Sense strand starting at position 706 of SEQ ID NO: 1562462
gguaauacuccucgcaauu

SEQ ID NO: 1748870 - RNA, 19 nt, Artificial Sequence
  Description of Artificial Sequence: Synthetic oligonucleotide
  Antisense strand to SEQ ID NO: 1748869
aauugcgaggaguauuacc

SEQ ID NO: 1748871 - RNA, 19 nt, Artificial Sequence
  Description of Artificial Sequence: Synthetic oligonucleotide
  Sense strand starting at position 719 of SEQ ID NO: 1562462
gcaauugaccuggagccua

SEQ ID NO: 1748872 - RNA, 19 nt, Artificial Sequence
  Description of Artificial Sequence: Synthetic oligonucleotide
  Antisense strand to SEQ ID NO: 1748871
uaggcuccaggucaauugc

SEQ ID NO: 1748873 - RNA, 19 nt, Artificial Sequence
  Description of Artificial Sequence: Synthetic oligonucleotide
  Sense strand starting at position 778 of SEQ ID NO: 1562462
ggaagcugugcuuacaaag

SEQ ID NO: 1748874 - RNA, 19 nt, Artificial Sequence
  Description of Artificial Sequence: Synthetic oligonucleotide
  Antisense strand to SEQ ID NO: 1748873
cuuuguaagcacagcuucc

SEQ ID NO: 1748875 - RNA, 19 nt, Artificial Sequence
  Description of Artificial Sequence: Synthetic oligonucleotide
  Sense strand starting at position 859 of SEQ ID NO: 1562462
caaacuacguuaccgaauu

SEQ ID NO: 1748876 - RNA, 19 nt, Artificial Sequence
  Description of Artificial Sequence: Synthetic oligonucleotide
  Antisense strand to SEQ ID NO: 1748875
aauucgguaacguaguuug

SEQ ID NO: 1748877 - RNA, 19 nt, Artificial Sequence
  Description of Artificial Sequence: Synthetic oligonucleotide
  Sense strand starting at position 876 of SEQ ID NO: 1562462
uuccgaauucacgggagaa

SEQ ID NO: 1748878 - RNA, 19 nt, Artificial Sequence
  Description of Artificial Sequence: Synthetic oligonucleotide
  Antisense strand to SEQ ID NO: 1748877
uucucccgugaauucggaa

SEQ ID NO: 1748879 - RNA, 19 nt, Artificial Sequence
  Description of Artificial Sequence: Synthetic oligonucleotide
  Sense strand starting at position 2727 of SEQ ID NO: 1562462
gcgcgauacgggcauuugu

SEQ ID NO: 1748880 - RNA, 19 nt, Artificial Sequence
  Description of Artificial Sequence: Synthetic oligonucleotide
  Antisense strand to SEQ ID NO: 1748879
acaaaugcccguaucgcgc

SEQ ID NO: 1748881 - RNA, 19 nt, Artificial Sequence
  Description of Artificial Sequence: Synthetic oligonucleotide
  Sense strand starting at position 3054 of SEQ ID NO: 1562462
guacguggaguguuuguca

SEQ ID NO: 1748882 - RNA, 19 nt, Artificial Sequence
  Description of Artificial Sequence: Synthetic oligonucleotide
  Antisense strand to SEQ ID NO: 1748881
ugacaaacacuccacguac

SEQ ID NO: 1748883 - RNA, 19 nt, Artificial Sequence
  Description of Artificial Sequence: Synthetic oligonucleotide
  Sense strand starting at position 3074 of SEQ ID NO: 1562462
cuuaaagugcuuuaacguu

SEQ ID NO: 1748884 - RNA, 19 nt, Artificial Sequence
  Description of Artificial Sequence: Synthetic oligonucleotide
  Antisense strand to SEQ ID NO: 1748883
aacguuaaagcacuuuaag

SEQ ID NO: 1748885 - RNA, 19 nt, Artificial Sequence
  Description of Artificial Sequence: Synthetic oligonucleotide
  Sense strand starting at position 3080 of SEQ ID NO: 1562462
gugcuuuaacguuaauagg

SEQ ID NO: 1748886 - RNA, 19 nt, Artificial Sequence
  Description of Artificial Sequence: Synthetic oligonucleotide
  Antisense strand to SEQ ID NO: 1748885
ccuauuaacguuaaagcac

SEQ ID NO: 1748887 - RNA, 19 nt, Artificial Sequence
  Description of Artificial Sequence: Synthetic oligonucleotide
  Sense strand starting at position 3086 of SEQ ID NO: 1562462
uaacguuaauagguaaagu

SEQ ID NO: 1748888 - RNA, 19 nt, Artificial Sequence
  Description of Artificial Sequence: Synthetic oligonucleotide
  Antisense strand to SEQ ID NO: 1748887
acuuuaccuauuaacguua

SEQ ID NO: 1748889 - RNA, 19 nt, Artificial Sequence
  Description of Artificial Sequence: Synthetic oligonucleotide
  Sense strand starting at position 3096 of SEQ ID NO: 1562462
agguaaaguuuagugaaca

SEQ ID NO: 1748890 - RNA, 19 nt, Artificial Sequence
  Description of Artificial Sequence: Synthetic oligonucleotide
  Antisense strand to SEQ ID NO: 1748889
uguucacuaaacuuuaccu

SEQ ID NO: 1748891 - RNA, 19 nt, Artificial Sequence
  Description of Artificial Sequence: Synthetic oligonucleotide
  Sense strand starting at position 3108 of SEQ ID NO: 1562462
gugaacacuuacucugcau

SEQ ID NO: 1748892 - RNA, 19 nt, Artificial Sequence
  Description of Artificial Sequence: Synthetic oligonucleotide
  Antisense strand to SEQ ID NO: 1748891
augcagaguaaguguucac

SEQ ID NO: 1748893 - RNA, 19 nt, Artificial Sequence
  Description of Artificial Sequence: Synthetic oligonucleotide
  Sense strand starting at position 3304 of SEQ ID NO: 1562462
agaucagguuccucaucuu

SEQ ID NO: 1748894 - RNA, 19 nt, Artificial Sequence
  Description of Artificial Sequence: Synthetic oligonucleotide
  Antisense strand to SEQ ID NO: 1748893
aagaugaggaaccugaucu

SEQ ID NO: 1748895 - RNA, 19 nt, Artificial Sequence
  Description of Artificial Sequence: Synthetic oligonucleotide
  Sense strand starting at position 3355 of SEQ ID NO: 1562462
gccugaguucuacaagaau

SEQ ID NO: 1748896 - RNA, 19 nt, Artificial Sequence
  Description of Artificial Sequence: Synthetic oligonucleotide
  Antisense strand to SEQ ID NO: 1748895
auucuuguagaacucaggc

SEQ ID NO: 1748897 - RNA, 19 nt, Artificial Sequence
  Description of Artificial Sequence: Synthetic oligonucleotide
  Sense strand starting at position 3371 of SEQ ID NO: 1562462
aauccuuuagaucgguuga

SEQ ID NO: 1748898 - RNA, 19 nt, Artificial Sequence
  Description of Artificial Sequence: Synthetic oligonucleotide
  Antisense strand to SEQ ID NO: 1748897
ucaaccgaucuaaaggauu

SEQ ID NO: 1748899 - RNA, 19 nt, Artificial Sequence
  Description of Artificial Sequence: Synthetic oligonucleotide
  Sense strand starting at position 3407 of SEQ ID NO: 1562462
cccgaugguuacucuuagu

SEQ ID NO: 1748900 - RNA, 19 nt, Artificial Sequence
  Description of Artificial Sequence: Synthetic oligonucleotide
  Antisense strand to SEQ ID NO: 1748899
acuaagaguaaccaucggg

SEQ ID NO: 1748901 - RNA, 19 nt, Artificial Sequence
  Description of Artificial Sequence: Synthetic oligonucleotide
  Sense strand starting at position 3520 of SEQ ID NO: 1562462
cgcguugguccugaauaaa

SEQ ID NO: 1748902 - RNA, 19 nt, Artificial Sequence
  Description of Artificial Sequence: Synthetic oligonucleotide
  Antisense strand to SEQ ID NO: 1748901
uuuauucaggaccaacgcg

SEQ ID NO: 1748903 - RNA, 19 nt, Artificial Sequence
  Description of Artificial Sequence: Synthetic oligonucleotide
  Sense strand starting at position 3543 of SEQ ID NO: 1562462
uucuuaccaugcuuuagua

SEQ ID NO: 1748904 - RNA, 19 nt, Artificial Sequence
  Description of Artificial Sequence: Synthetic oligonucleotide
  Antisense strand to SEQ ID NO: 1748903
uacuaaagcaugguaagaa

SEQ ID NO: 1748905 - RNA, 19 nt, Artificial Sequence
  Description of Artificial Sequence: Synthetic oligonucleotide
  Sense strand starting at position 3557 of SEQ ID NO: 1562462
uaguaagcaucacugagua

SEQ ID NO: 1748906 - RNA, 19 nt, Artificial Sequence
  Description of Artificial Sequence: Synthetic oligonucleotide
  Antisense strand to SEQ ID NO: 1748905
uacucagugaugcuuacua

SEQ ID NO: 1748907 - RNA, 19 nt, Artificial Sequence
  Description of Artificial Sequence: Synthetic oligonucleotide
  Sense strand starting at position 3621 of SEQ ID NO: 1562462
uaggaaauguaggcacaaa

SEQ ID NO: 1748908 - RNA, 19 nt, Artificial Sequence
  Description of Artificial Sequence: Synthetic oligonucleotide
  Antisense strand to SEQ ID NO: 1748907
uuugugccuacauuuccua

SEQ ID NO: 1748909 - RNA, 19 nt, Artificial Sequence
  Description of Artificial Sequence: Synthetic oligonucleotide
  Sense strand starting at position 3735 of SEQ ID NO: 1562462
gaugaagaugcugauuguu

SEQ ID NO: 1748910 - RNA, 19 nt, Artificial Sequence
  Description of Artificial Sequence: Synthetic oligonucleotide
  Antisense strand to SEQ ID NO: 1748909
aacaaucagcaucuucauc

SEQ ID NO: 1748911 - RNA, 19 nt, Artificial Sequence
  Description of Artificial Sequence: Synthetic oligonucleotide
  Sense strand starting at position 3737 of SEQ ID NO: 1562462
ugaagaugcugauuguuau

SEQ ID NO: 1748912 - RNA, 19 nt, Artificial Sequence
  Description of Artificial Sequence: Synthetic oligonucleotide
  Antisense strand to SEQ ID NO: 1748911
auaacaaucagcaucuuca

SEQ ID NO: 1748913 - RNA, 19 nt, Artificial Sequence
  Description of Artificial Sequence: Synthetic oligonucleotide
  Sense strand starting at position 3738 of SEQ ID NO: 1562462
gaagaugcugauuguuauu

SEQ ID NO: 1748914 - RNA, 19 nt, Artificial Sequence
  Description of Artificial Sequence: Synthetic oligonucleotide
  Antisense strand to SEQ ID NO: 1748913
aauaacaaucagcaucuuc

SEQ ID NO: 1748915 - RNA, 19 nt, Artificial Sequence
  Description of Artificial Sequence: Synthetic oligonucleotide
  Sense strand starting at position 3761 of SEQ ID NO: 1562462
ggauuaaccguguagucca

SEQ ID NO: 1748916 - RNA, 19 nt, Artificial Sequence
  Description of Artificial Sequence: Synthetic oligonucleotide
  Antisense strand to SEQ ID NO: 1748915
uggacuacacgguuaaucc

SEQ ID NO: 1748917 - RNA, 19 nt, Artificial Sequence
  Description of Artificial Sequence: Synthetic oligonucleotide
  Sense strand starting at position 3778 of SEQ ID NO: 1562462
cacguaagccaagauuaga

SEQ ID NO: 1748918 - RNA, 19 nt, Artificial Sequence
  Description of Artificial Sequence: Synthetic oligonucleotide
  Antisense strand to SEQ ID NO: 1748917
ucuaaucuuggcuuacgug

SEQ ID NO: 1748919 - RNA, 19 nt, Artificial Sequence
  Description of Artificial Sequence: Synthetic oligonucleotide
  Sense strand starting at position 3794 of SEQ ID NO: 1562462
agaguaccuuugucaccuu

SEQ ID NO: 1748920 - RNA, 19 nt, Artificial Sequence
  Description of Artificial Sequence: Synthetic oligonucleotide
  Antisense strand to SEQ ID NO: 1748919
aaggugacaaagguacucu

SEQ ID NO: 1748921 - RNA, 19 nt, Artificial Sequence
  Description of Artificial Sequence: Synthetic oligonucleotide
  Sense strand starting at position 3806 of SEQ ID NO: 1562462
ucaccuuacccagagguua

SEQ ID NO: 1748922 - RNA, 19 nt, Artificial Sequence
  Description of Artificial Sequence: Synthetic oligonucleotide
  Antisense strand to SEQ ID NO: 1748921
uaaccucuggguaagguga

SEQ ID NO: 1748923 - RNA, 19 nt, Artificial Sequence
  Description of Artificial Sequence: Synthetic oligonucleotide
  Sense strand starting at position 3839 of SEQ ID NO: 1562462
augcgucuauuugugacau

SEQ ID NO: 1748924 - RNA, 19 nt, Artificial Sequence
  Description of Artificial Sequence: Synthetic oligonucleotide
  Antisense strand to SEQ ID NO: 1748923
augucacaaauagacgcau

SEQ ID NO: 1748925 - RNA, 19 nt, Artificial Sequence
  Description of Artificial Sequence: Synthetic oligonucleotide
  Sense strand starting at position 3849 of SEQ ID NO: 1562462
uugugacauaugggaggua

SEQ ID NO: 1748926 - RNA, 19 nt, Artificial Sequence
  Description of Artificial Sequence: Synthetic oligonucleotide
  Antisense strand to SEQ ID NO: 1748925
uaccucccauaugucacaa

SEQ ID NO: 1748927 - RNA, 19 nt, Artificial Sequence
  Description of Artificial Sequence: Synthetic oligonucleotide
  Sense strand starting at position 3940 of SEQ ID NO: 1562462
aacccauaccugugugaag

SEQ ID NO: 1748928 - RNA, 19 nt, Artificial Sequence
  Description of Artificial Sequence: Synthetic oligonucleotide
  Antisense strand to SEQ ID NO: 1748927
cuucacacagguauggguu

SEQ ID NO: 1748929 - RNA, 19 nt, Artificial Sequence
  Description of Artificial Sequence: Synthetic oligonucleotide
  Sense strand starting at position 3970 of SEQ ID NO: 1562462
auccaaauugccuggcuaa

SEQ ID NO: 1748930 - RNA, 19 nt, Artificial Sequence
  Description of Artificial Sequence: Synthetic oligonucleotide
  Antisense strand to SEQ ID NO: 1748929
uuagccaggcaauuuggau

SEQ ID NO: 1748931 - RNA, 19 nt, Artificial Sequence
  Description of Artificial Sequence: Synthetic oligonucleotide
  Sense strand starting at position 106 of SEQ ID NO: 1562463
gccugaagugaaggaguaa

SEQ ID NO: 1748932 - RNA, 19 nt, Artificial Sequence
  Description of Artificial Sequence: Synthetic oligonucleotide
  Antisense strand to SEQ ID NO: 1748931
uuacuccuucacuucaggc

SEQ ID NO: 1748933 - RNA, 19 nt, Artificial Sequence
  Description of Artificial Sequence: Synthetic oligonucleotide
  Sense strand starting at position 176 of SEQ ID NO: 1562463
ugugguuauucuugaugau

SEQ ID NO: 1748934 - RNA, 19 nt, Artificial Sequence
  Description of Artificial Sequence: Synthetic oligonucleotide
  Antisense strand to SEQ ID NO: 1748933
aucaucaagaauaaccaca

SEQ ID NO: 1748935 - RNA, 19 nt, Artificial Sequence
  Description of Artificial Sequence: Synthetic oligonucleotide
  Sense strand starting at position 177 of SEQ ID NO: 1562463
gugguuauucuugaugaua

SEQ ID NO: 1748936 - RNA, 19 nt, Artificial Sequence
  Description of Artificial Sequence: Synthetic oligonucleotide
  Antisense strand to SEQ ID NO: 1748935
uaucaucaagaauaaccac

SEQ ID NO: 1748937 - RNA, 19 nt, Artificial Sequence
  Description of Artificial Sequence: Synthetic oligonucleotide
  Sense strand starting at position 179 of SEQ ID NO: 1562463
gguuauucuugaugauaug

SEQ ID NO: 1748938 - RNA, 19 nt, Artificial Sequence
  Description of Artificial Sequence: Synthetic oligonucleotide
  Antisense strand to SEQ ID NO: 1748937
cauaucaucaagaauaacc

SEQ ID NO: 1748939 - RNA, 19 nt, Artificial Sequence
  Description of Artificial Sequence: Synthetic oligonucleotide
  Sense strand starting at position 1161 of SEQ ID NO: 1562463
ggauuaauauaagaggaag

SEQ ID NO: 1748940 - RNA, 19 nt, Artificial Sequence
  Description of Artificial Sequence: Synthetic oligonucleotide
  Antisense strand to SEQ ID NO: 1748939
cuuccucuuauauuaaucc

SEQ ID NO: 1748941 - RNA, 19 nt, Artificial Sequence
  Description of Artificial Sequence: Synthetic oligonucleotide
  Sense strand starting at position 1997 of SEQ ID NO: 1562463
gcucgcugguuuccagaaa

SEQ ID NO: 1748942 - RNA, 19 nt, Artificial Sequence
  Description of Artificial Sequence: Synthetic oligonucleotide
  Antisense strand to SEQ ID NO: 1748941
uuucuggaaaccagcgagc

SEQ ID NO: 1748943 - RNA, 19 nt, Artificial Sequence
  Description of Artificial Sequence: Synthetic oligonucleotide
  Sense strand starting at position 2021 of SEQ ID NO: 1562463
agucaaauugcaugacuuc

SEQ ID NO: 1748944 - RNA, 19 nt, Artificial Sequence
  Description of Artificial Sequence: Synthetic oligonucleotide
  Antisense strand to SEQ ID NO: 1748943
gaagucaugcaauuugacu

SEQ ID NO: 1748945 - RNA, 19 nt, Artificial Sequence
  Description of Artificial Sequence: Synthetic oligonucleotide
  Sense strand starting at position 2221 of SEQ ID NO: 1562463
ggcugcauuuccugcaagu

SEQ ID NO: 1748946 - RNA, 19 nt, Artificial Sequence
  Description of Artificial Sequence: Synthetic oligonucleotide
  Antisense strand to SEQ ID NO: 1748945
acuugcaggaaaugcagcc

SEQ ID NO: 1748947 - RNA, 19 nt, Artificial Sequence
  Description of Artificial Sequence: Synthetic oligonucleotide
  Sense strand starting at position 2348 of SEQ ID NO: 1562463
cucuucugugcguguggua

SEQ ID NO: 1748948 - RNA, 19 nt, Artificial Sequence
  Description of Artificial Sequence: Synthetic oligonucleotide
  Antisense strand to SEQ ID NO: 1748947
uaccacacgcacagaagag

SEQ ID NO: 1748949 - RNA, 19 nt, Artificial Sequence
  Description of Artificial Sequence: Synthetic oligonucleotide
  Sense strand starting at position 2361 of SEQ ID NO: 1562463
gugguauagacccgugcuu

SEQ ID NO: 1748950 - RNA, 19 nt, Artificial Sequence
  Description of Artificial Sequence: Synthetic oligonucleotide
  Antisense strand to SEQ ID NO: 1748949
aagcacgggucuauaccac

SEQ ID NO: 1748951 - RNA, 19 nt, Artificial Sequence
  Description of Artificial Sequence: Synthetic oligonucleotide
  Sense strand starting at position 2384 of SEQ ID NO: 1562463
aagggugguuccuggaaca

SEQ ID NO: 1748952 - RNA, 19 nt, Artificial Sequence
  Description of Artificial Sequence: Synthetic oligonucleotide
  Antisense strand to SEQ ID NO: 1748951
uguuccaggaaccacccuu

SEQ ID NO: 1748953 - RNA, 19 nt, Artificial Sequence
  Description of Artificial Sequence: Synthetic oligonucleotide
  Sense strand starting at position 2421 of SEQ ID NO: 1562463
gggaaauuauuagaaauga

SEQ ID NO: 1748954 - RNA, 19 nt, Artificial Sequence
  Description of Artificial Sequence: Synthetic oligonucleotide
  Antisense strand to SEQ ID NO: 1748953
ucauuucuaauaauuuccc

SEQ ID NO: 1748955 - RNA, 19 nt, Artificial Sequence
  Description of Artificial Sequence: Synthetic oligonucleotide
  Sense strand starting at position 2499 of SEQ ID NO: 1562463
aggugaucccuuggcaacu

SEQ ID NO: 1748956 - RNA, 19 nt, Artificial Sequence
  Description of Artificial Sequence: Synthetic oligonucleotide
  Antisense strand to SEQ ID NO: 1748955
aguugccaagggaucaccu

SEQ ID NO: 1748957 - RNA, 19 nt, Artificial Sequence
  Description of Artificial Sequence: Synthetic oligonucleotide
  Sense strand starting at position 2633 of SEQ ID NO: 1562463
gcugaaauccuuugauacu

SEQ ID NO: 1748958 - RNA, 19 nt, Artificial Sequence
  Description of Artificial Sequence: Synthetic oligonucleotide
  Antisense strand to SEQ ID NO: 1748957
aguaucaaaggauuucagc

SEQ ID NO: 1748959 - RNA, 19 nt, Artificial Sequence
  Description of Artificial Sequence: Synthetic oligonucleotide
  Sense strand starting at position 2634 of SEQ ID NO: 1562463
cugaaauccuuugauacug

SEQ ID NO: 1748960 - RNA, 19 nt, Artificial Sequence
  Description of Artificial Sequence: Synthetic oligonucleotide
  Antisense strand to SEQ ID NO: 1748959
caguaucaaaggauuucag

SEQ ID NO: 1748961 - RNA, 19 nt, Artificial Sequence
  Description of Artificial Sequence: Synthetic oligonucleotide
  Sense strand starting at position 2642 of SEQ ID NO: 1562463
cuuugauacuggugagcuu

SEQ ID NO: 1748962 - RNA, 19 nt, Artificial Sequence
  Description of Artificial Sequence: Synthetic oligonucleotide
  Antisense strand to SEQ ID NO: 1748961
aagcucaccaguaucaaag

SEQ ID NO: 1748963 - RNA, 19 nt, Artificial Sequence
  Description of Artificial Sequence: Synthetic oligonucleotide
  Sense strand starting at position 2653 of SEQ ID NO: 1562463
gugagcuuuggagagccaa

SEQ ID NO: 1748964 - RNA, 19 nt, Artificial Sequence
  Description of Artificial Sequence: Synthetic oligonucleotide
  Antisense strand to SEQ ID NO: 1748963
uuggcucuccaaagcucac

SEQ ID NO: 1748965 - RNA, 19 nt, Artificial Sequence
  Description of Artificial Sequence: Synthetic oligonucleotide
  Sense strand starting at position 3073 of SEQ ID NO: 1562463
uuucgcauacuuugagaug

SEQ ID NO: 1748966 - RNA, 19 nt, Artificial Sequence
  Description of Artificial Sequence: Synthetic oligonucleotide
  Antisense strand to SEQ ID NO: 1748965
caucucaaaguaugcgaaa

SEQ ID NO: 1748967 - RNA, 19 nt, Artificial Sequence
  Description of Artificial Sequence: Synthetic oligonucleotide
  Sense strand starting at position 3085 of SEQ ID NO: 1562463
ugagauggcugcucagaaa

SEQ ID NO: 1748968 - RNA, 19 nt, Artificial Sequence
  Description of Artificial Sequence: Synthetic oligonucleotide
  Antisense strand to SEQ ID NO: 1748967
uuucugagcagccaucuca

SEQ ID NO: 1748969 - RNA, 19 nt, Artificial Sequence
  Description of Artificial Sequence: Synthetic oligonucleotide
  Sense strand starting at position 3352 of SEQ ID NO: 1562463
uggcuucuaugcuggacau

SEQ ID NO: 1748970 - RNA, 19 nt, Artificial Sequence
  Description of Artificial Sequence: Synthetic oligonucleotide
  Antisense strand to SEQ ID NO: 1748969
auguccagcauagaagcca

SEQ ID NO: 1748971 - RNA, 19 nt, Artificial Sequence
  Description of Artificial Sequence: Synthetic oligonucleotide
  Sense strand starting at position 3353 of SEQ ID NO: 1562463
ggcuucuaugcuggacauu

SEQ ID NO: 1748972 - RNA, 19 nt, Artificial Sequence
  Description of Artificial Sequence: Synthetic oligonucleotide
  Antisense strand to SEQ ID NO: 1748971
aauguccagcauagaagcc

SEQ ID NO: 1748973 - RNA, 19 nt, Artificial Sequence
  Description of Artificial Sequence: Synthetic oligonucleotide
  Sense strand starting at position 3362 of SEQ ID NO: 1562463
gcuggacauuugugauaug

SEQ ID NO: 1748974 - RNA, 19 nt, Artificial Sequence
  Description of Artificial Sequence: Synthetic oligonucleotide
  Antisense strand to SEQ ID NO: 1748973
cauaucacaaauguccagc

SEQ ID NO: 1748975 - RNA, 19 nt, Artificial Sequence
  Description of Artificial Sequence: Synthetic oligonucleotide
  Sense strand starting at position 3365 of SEQ ID NO: 1562463
ggacauuugugauaugcaa

SEQ ID NO: 1748976 - RNA, 19 nt, Artificial Sequence
  Description of Artificial Sequence: Synthetic oligonucleotide
  Antisense strand to SEQ ID NO: 1748975
uugcauaucacaaaugucc

SEQ ID NO: 1748977 - RNA, 19 nt, Artificial Sequence
  Description of Artificial Sequence: Synthetic oligonucleotide
  Sense strand starting at position 3373 of SEQ ID NO: 1562463
gugauaugcaaaugaguaa

SEQ ID NO: 1748978 - RNA, 19 nt, Artificial Sequence
  Description of Artificial Sequence: Synthetic oligonucleotide
  Antisense strand to SEQ ID NO: 1748977
uuacucauuugcauaucac

SEQ ID NO: 1748979 - RNA, 19 nt, Artificial Sequence
  Description of Artificial Sequence: Synthetic oligonucleotide
  Sense strand starting at position 3654 of SEQ ID NO: 1562463
uguuaaugcuuuccuugag

SEQ ID NO: 1748980 - RNA, 19 nt, Artificial Sequence
  Description of Artificial Sequence: Synthetic oligonucleotide
  Antisense strand to SEQ ID NO: 1748979
cucaaggaaagcauuaaca

SEQ ID NO: 1748981 - RNA, 19 nt, Artificial Sequence
  Description of Artificial Sequence: Synthetic oligonucleotide
  Sense strand starting at position 3734 of SEQ ID NO: 1562463
ggugcaaugagcuauguuu

SEQ ID NO: 1748982 - RNA, 19 nt, Artificial Sequence
  Description of Artificial Sequence: Synthetic oligonucleotide
  Antisense strand to SEQ ID NO: 1748981
aaacauagcucauugcacc

SEQ ID NO: 1748983 - RNA, 19 nt, Artificial Sequence
  Description of Artificial Sequence: Synthetic oligonucleotide
  Sense strand starting at position 3831 of SEQ ID NO: 1562463
ccuugauccuuguuugugu

SEQ ID NO: 1748984 - RNA, 19 nt, Artificial Sequence
  Description of Artificial Sequence: Synthetic oligonucleotide
  Antisense strand to SEQ ID NO: 1748983
acacaaacaaggaucaagg

SEQ ID NO: 1748985 - RNA, 19 nt, Artificial Sequence
  Description of Artificial Sequence: Synthetic oligonucleotide
  Sense strand starting at position 3835 of SEQ ID NO: 1562463
gauccuuguuugugucaca

SEQ ID NO: 1748986 - RNA, 19 nt, Artificial Sequence
  Description of Artificial Sequence: Synthetic oligonucleotide
  Antisense strand to SEQ ID NO: 1748985
ugugacacaaacaaggauc

SEQ ID NO: 1748987 - RNA, 19 nt, Artificial Sequence
  Description of Artificial Sequence: Synthetic oligonucleotide
  Sense strand starting at position 3838 of SEQ ID NO: 1562463
ccuuguuugugucacagau

SEQ ID NO: 1748988 - RNA, 19 nt, Artificial Sequence
  Description of Artificial Sequence: Synthetic oligonucleotide
  Antisense strand to SEQ ID NO: 1748987
aucugugacacaaacaagg

SEQ ID NO: 1748989 - RNA, 19 nt, Artificial Sequence
  Description of Artificial Sequence: Synthetic oligonucleotide
  Sense strand starting at position 3840 of SEQ ID NO: 1562463
uuguuugugucacagaugu

SEQ ID NO: 1748990 - RNA, 19 nt, Artificial Sequence
  Description of Artificial Sequence: Synthetic oligonucleotide
  Antisense strand to SEQ ID NO: 1748989
acaucugugacacaaacaa

SEQ ID NO: 1748991 - RNA, 19 nt, Artificial Sequence
  Description of Artificial Sequence: Synthetic oligonucleotide
  Sense strand starting at position 3842 of SEQ ID NO: 1562463
guuugugucacagauguga

SEQ ID NO: 1748992 - RNA, 19 nt, Artificial Sequence
  Description of Artificial Sequence: Synthetic oligonucleotide
  Antisense strand to SEQ ID NO: 1748991
ucacaucugugacacaaac

SEQ ID NO: 1748993 - RNA, 19 nt, Artificial Sequence
  Description of Artificial Sequence: Synthetic oligonucleotide
  Sense strand starting at position 3882 of SEQ ID NO: 1562463
ucagcucugugcucuagau

SEQ ID NO: 1748994 - RNA, 19 nt, Artificial Sequence
  Description of Artificial Sequence: Synthetic oligonucleotide
  Antisense strand to SEQ ID NO: 1748993
aucuagagcacagagcuga

SEQ ID NO: 1748995 - RNA, 19 nt, Artificial Sequence
  Description of Artificial Sequence: Synthetic oligonucleotide
  Sense strand starting at position 3884 of SEQ ID NO: 1562463
agcucugugcucuagauuu

SEQ ID NO: 1748996 - RNA, 19 nt, Artificial Sequence
  Description of Artificial Sequence: Synthetic oligonucleotide
  Antisense strand to SEQ ID NO: 1748995
aaaucuagagcacagagcu

SEQ ID NO: 1748997 - RNA, 19 nt, Artificial Sequence
  Description of Artificial Sequence: Synthetic oligonucleotide
  Sense strand starting at position 3980 of SEQ ID NO: 1562463
ggcucacagugaugacaga

SEQ ID NO: 1748998 - RNA, 19 nt, Artificial Sequence
  Description of Artificial Sequence: Synthetic oligonucleotide
  Antisense strand to SEQ ID NO: 1748997
ucugucaucacugugagcc

SEQ ID NO: 1748999 - RNA, 19 nt, Artificial Sequence
  Description of Artificial Sequence: Synthetic oligonucleotide
  Sense strand starting at position 269 of SEQ ID NO: 1562464
acagaauuccugcagugag

SEQ ID NO: 1749000 - RNA, 19 nt, Artificial Sequence
  Description of Artificial Sequence: Synthetic oligonucleotide
  Antisense strand to SEQ ID NO: 1748999
cucacugcaggaauucugu

SEQ ID NO: 1749001 - RNA, 19 nt, Artificial Sequence
  Description of Artificial Sequence: Synthetic oligonucleotide
  Sense strand starting at position 318 of SEQ ID NO: 1562464
guucucuccuuguggugaa

SEQ ID NO: 1749002 - RNA, 19 nt, Artificial Sequence
  Description of Artificial Sequence: Synthetic oligonucleotide
  Antisense strand to SEQ ID NO: 1749001
uucaccacaaggagagaac

SEQ ID NO: 1749003 - RNA, 19 nt, Artificial Sequence
  Description of Artificial Sequence: Synthetic oligonucleotide
  Sense strand starting at position 428 of SEQ ID NO: 1562464
cugccuacguucuaggaaa

SEQ ID NO: 1749004 - RNA, 19 nt, Artificial Sequence
  Description of Artificial Sequence: Synthetic oligonucleotide
  Antisense strand to SEQ ID NO: 1749003
uuuccuagaacguaggcag

SEQ ID NO: 1749005 - RNA, 19 nt, Artificial Sequence
  Description of Artificial Sequence: Synthetic oligonucleotide
  Sense strand starting at position 430 of SEQ ID NO: 1562464
gccuacguucuaggaaaug

SEQ ID NO: 1749006 - RNA, 19 nt, Artificial Sequence
  Description of Artificial Sequence: Synthetic oligonucleotide
  Antisense strand to SEQ ID NO: 1749005
cauuuccuagaacguaggc

SEQ ID NO: 1749007 - RNA, 19 nt, Artificial Sequence
  Description of Artificial Sequence: Synthetic oligonucleotide
  Sense strand starting at position 442 of SEQ ID NO: 1562464
ggaaaugccuaagauggaa

SEQ ID NO: 1749008 - RNA, 19 nt, Artificial Sequence
  Description of Artificial Sequence: Synthetic oligonucleotide
  Antisense strand to SEQ ID NO: 1749007
uuccaucuuaggcauuucc

SEQ ID NO: 1749009 - RNA, 19 nt, Artificial Sequence
  Description of Artificial Sequence: Synthetic oligonucleotide
  Sense strand starting at position 560 of SEQ ID NO: 1562464
agguauacaugugccaauu

SEQ ID NO: 1749010 - RNA, 19 nt, Artificial Sequence
  Description of Artificial Sequence: Synthetic oligonucleotide
  Antisense strand to SEQ ID NO: 1749009
aauuggcacauguauaccu

SEQ ID NO: 1749011 - RNA, 19 nt, Artificial Sequence
  Description of Artificial Sequence: Synthetic oligonucleotide
  Sense strand starting at position 652 of SEQ ID NO: 1562464
cccugcugguauuuaaauu

SEQ ID NO: 1749012 - RNA, 19 nt, Artificial Sequence
  Description of Artificial Sequence: Synthetic oligonucleotide
  Antisense strand to SEQ ID NO: 1749011
aauuuaaauaccagcaggg

SEQ ID NO: 1749013 - RNA, 19 nt, Artificial Sequence
  Description of Artificial Sequence: Synthetic oligonucleotide
  Sense strand starting at position 991 of SEQ ID NO: 1562464
cugugaguguuggugggau

SEQ ID NO: 1749014 - RNA, 19 nt, Artificial Sequence
  Description of Artificial Sequence: Synthetic oligonucleotide
  Antisense strand to SEQ ID NO: 1749013
aucccaccaacacucacag

SEQ ID NO: 1749015 - RNA, 19 nt, Artificial Sequence
  Description of Artificial Sequence: Synthetic oligonucleotide
  Sense strand starting at position 995 of SEQ ID NO: 1562464
gaguguuggugggauggga

SEQ ID NO: 1749016 - RNA, 19 nt, Artificial Sequence
  Description of Artificial Sequence: Synthetic oligonucleotide
  Antisense strand to SEQ ID NO: 1749015
ucccaucccaccaacacuc

SEQ ID NO: 1749017 - RNA, 19 nt, Artificial Sequence
  Description of Artificial Sequence: Synthetic oligonucleotide
  Sense strand starting at position 1262 of SEQ ID NO: 1562464
gcgagaacuccuugaaccu

SEQ ID NO: 1749018 - RNA, 19 nt, Artificial Sequence
  Description of Artificial Sequence: Synthetic oligonucleotide
  Antisense strand to SEQ ID NO: 1749017
agguucaaggaguucucgc

SEQ ID NO: 1749019 - RNA, 19 nt, Artificial Sequence
  Description of Artificial Sequence: Synthetic oligonucleotide
  Sense strand starting at position 1263 of SEQ ID NO: 1562464
cgagaacuccuugaaccuu

SEQ ID NO: 1749020 - RNA, 19 nt, Artificial Sequence
  Description of Artificial Sequence: Synthetic oligonucleotide
  Antisense strand to SEQ ID NO: 1749019
aagguucaaggaguucucg

SEQ ID NO: 1749021 - RNA, 19 nt, Artificial Sequence
  Description of Artificial Sequence: Synthetic oligonucleotide
  Sense strand starting at position 1322 of SEQ ID NO: 1562464
ucgcgcguucccaggaaau

SEQ ID NO: 1749022 - RNA, 19 nt, Artificial Sequence
  Description of Artificial Sequence: Synthetic oligonucleotide
  Antisense strand to SEQ ID NO: 1749021
auuuccugggaacgcgcga

SEQ ID NO: 1749023 - RNA, 19 nt, Artificial Sequence
  Description of Artificial Sequence: Synthetic oligonucleotide
  Sense strand starting at position 1324 of SEQ ID NO: 1562464
gcgcguucccaggaaauag

SEQ ID NO: 1749024 - RNA, 19 nt, Artificial Sequence
  Description of Artificial Sequence: Synthetic oligonucleotide
  Antisense strand to SEQ ID NO: 1749023
cuauuuccugggaacgcgc

SEQ ID NO: 1749025 - RNA, 19 nt, Artificial Sequence
  Description of Artificial Sequence: Synthetic oligonucleotide
  Sense strand starting at position 1393 of SEQ ID NO: 1562464
agccguggaucugaaacuu

SEQ ID NO: 1749026 - RNA, 19 nt, Artificial Sequence
  Description of Artificial Sequence: Synthetic oligonucleotide
  Antisense strand to SEQ ID NO: 1749025
aaguuucagauccacggcu

SEQ ID NO: 1749027 - RNA, 19 nt, Artificial Sequence
  Description of Artificial Sequence: Synthetic oligonucleotide
  Sense strand starting at position 1515 of SEQ ID NO: 1562464
ggauguuucugaugcguca

SEQ ID NO: 1749028 - RNA, 19 nt, Artificial Sequence
  Description of Artificial Sequence: Synthetic oligonucleotide
  Antisense strand to SEQ ID NO: 1749027
ugacgcaucagaaacaucc

SEQ ID NO: 1749029 - RNA, 19 nt, Artificial Sequence
  Description of Artificial Sequence: Synthetic oligonucleotide
  Sense strand starting at position 1594 of SEQ ID NO: 1562464
gcgcccuugcuaugauuau

SEQ ID NO: 1749030 - RNA, 19 nt, Artificial Sequence
  Description of Artificial Sequence: Synthetic oligonucleotide
  Antisense strand to SEQ ID NO: 1749029
auaaucauagcaagggcgc

SEQ ID NO: 1749031 - RNA, 19 nt, Artificial Sequence
  Description of Artificial Sequence: Synthetic oligonucleotide
  Sense strand starting at position 1598 of SEQ ID NO: 1562464
ccuugcuaugauuaugauu

SEQ ID NO: 1749032 - RNA, 19 nt, Artificial Sequence
  Description of Artificial Sequence: Synthetic oligonucleotide
  Antisense strand to SEQ ID NO: 1749031
aaucauaaucauagcaagg

SEQ ID NO: 1749033 - RNA, 19 nt, Artificial Sequence
  Description of Artificial Sequence: Synthetic oligonucleotide
  Sense strand starting at position 2049 of SEQ ID NO: 1562464
ccuaauggcccggagucau

SEQ ID NO: 1749034 - RNA, 19 nt, Artificial Sequence
  Description of Artificial Sequence: Synthetic oligonucleotide
  Antisense strand to SEQ ID NO: 1749033
augacuccgggccauuagg

SEQ ID NO: 1749035 - RNA, 19 nt, Artificial Sequence
  Description of Artificial Sequence: Synthetic oligonucleotide
  Sense strand starting at position 2076 of SEQ ID NO: 1562464
gcacguauccuugaaccua

SEQ ID NO: 1749036 - RNA, 19 nt, Artificial Sequence
  Description of Artificial Sequence: Synthetic oligonucleotide
  Antisense strand to SEQ ID NO: 1749035
uagguucaaggauacgugc

SEQ ID NO: 1749037 - RNA, 19 nt, Artificial Sequence
  Description of Artificial Sequence: Synthetic oligonucleotide
  Sense strand starting at position 2202 of SEQ ID NO: 1562464
ccaggcauugugugccaau

SEQ ID NO: 1749038 - RNA, 19 nt, Artificial Sequence
  Description of Artificial Sequence: Synthetic oligonucleotide
  Antisense strand to SEQ ID NO: 1749037
auuggcacacaaugccugg

SEQ ID NO: 1749039 - RNA, 19 nt, Artificial Sequence
  Description of Artificial Sequence: Synthetic oligonucleotide
  Sense strand starting at position 2445 of SEQ ID NO: 1562464
gguaauaguugucaggcca

SEQ ID NO: 1749040 - RNA, 19 nt, Artificial Sequence
  Description of Artificial Sequence: Synthetic oligonucleotide
  Antisense strand to SEQ ID NO: 1749039
uggccugacaacuauuacc

SEQ ID NO: 1749041 - RNA, 19 nt, Artificial Sequence
  Description of Artificial Sequence: Synthetic oligonucleotide
  Sense strand starting at position 2652 of SEQ ID NO: 1562464
gaagguuauuuguaauucu

SEQ ID NO: 1749042 - RNA, 19 nt, Artificial Sequence
  Description of Artificial Sequence: Synthetic oligonucleotide
  Antisense strand to SEQ ID NO: 1749041
agaauuacaaauaaccuuc

SEQ ID NO: 1749043 - RNA, 19 nt, Artificial Sequence
  Description of Artificial Sequence: Synthetic oligonucleotide
  Sense strand starting at position 3081 of SEQ ID NO: 1562464
uugccaguuuccucagaau

SEQ ID NO: 1749044 - RNA, 19 nt, Artificial Sequence
  Description of Artificial Sequence: Synthetic oligonucleotide
  Antisense strand to SEQ ID NO: 1749043
auucugaggaaacuggcaa

SEQ ID NO: 1749045 - RNA, 19 nt, Artificial Sequence
  Description of Artificial Sequence: Synthetic oligonucleotide
  Sense strand starting at position 3084 of SEQ ID NO: 1562464
ccaguuuccucagaauugu

SEQ ID NO: 1749046 - RNA, 19 nt, Artificial Sequence
  Description of Artificial Sequence: Synthetic oligonucleotide
  Antisense strand to SEQ ID NO: 1749045
acaauucugaggaaacugg

SEQ ID NO: 1749047 - RNA, 19 nt, Artificial Sequence
  Description of Artificial Sequence: Synthetic oligonucleotide
  Sense strand starting at position 3093 of SEQ ID NO: 1562464
ucagaauugucacggguua

SEQ ID NO: 1749048 - RNA, 19 nt, Artificial Sequence
  Description of Artificial Sequence: Synthetic oligonucleotide
  Antisense strand to SEQ ID NO: 1749047
uaacccgugacaauucuga

SEQ ID NO: 1749049 - RNA, 19 nt, Artificial Sequence
  Description of Artificial Sequence: Synthetic oligonucleotide
  Sense strand starting at position 3094 of SEQ ID NO: 1562464
cagaauugucacggguuaa

SEQ ID NO: 1749050 - RNA, 19 nt, Artificial Sequence
  Description of Artificial Sequence: Synthetic oligonucleotide
  Antisense strand to SEQ ID NO: 1749049
uuaacccgugacaauucug

SEQ ID NO: 1749051 - RNA, 19 nt, Artificial Sequence
  Description of Artificial Sequence: Synthetic oligonucleotide
  Sense strand starting at position 3095 of SEQ ID NO: 1562464
agaauugucacggguuaag

SEQ ID NO: 1749052 - RNA, 19 nt, Artificial Sequence
  Description of Artificial Sequence: Synthetic oligonucleotide
  Antisense strand to SEQ ID NO: 1749051
cuuaacccgugacaauucu

SEQ ID NO: 1749053 - RNA, 19 nt, Artificial Sequence
  Description of Artificial Sequence: Synthetic oligonucleotide
  Sense strand starting at position 3098 of SEQ ID NO: 1562464
auugucacggguuaaguaa

SEQ ID NO: 1749054 - RNA, 19 nt, Artificial Sequence
  Description of Artificial Sequence: Synthetic oligonucleotide
  Antisense strand to SEQ ID NO: 1749053
uuacuuaacccgugacaau

SEQ ID NO: 1749055 - RNA, 19 nt, Artificial Sequence
  Description of Artificial Sequence: Synthetic oligonucleotide
  Sense strand starting at position 3129 of SEQ ID NO: 1562464
gucugaaaccuguauccua

SEQ ID NO: 1749056 - RNA, 19 nt, Artificial Sequence
  Description of Artificial Sequence: Synthetic oligonucleotide
  Antisense strand to SEQ ID NO: 1749055
uaggauacagguuucagac

SEQ ID NO: 1749057 - RNA, 19 nt, Artificial Sequence
  Description of Artificial Sequence: Synthetic oligonucleotide
  Sense strand starting at position 3227 of SEQ ID NO: 1562464
ugcuguuggcccgaauuaa

SEQ ID NO: 1749058 - RNA, 19 nt, Artificial Sequence
  Description of Artificial Sequence: Synthetic oligonucleotide
  Antisense strand to SEQ ID NO: 1749057
uuaauucgggccaacagca

SEQ ID NO: 1749059 - RNA, 19 nt, Artificial Sequence
  Description of Artificial Sequence: Synthetic oligonucleotide
  Sense strand starting at position 3479 of SEQ ID NO: 1562464
gcuaaagacuuccaugauu

SEQ ID NO: 1749060 - RNA, 19 nt, Artificial Sequence
  Description of Artificial Sequence: Synthetic oligonucleotide
  Antisense strand to SEQ ID NO: 1749059
aaucauggaagucuuuagc

SEQ ID NO: 1749061 - RNA, 19 nt, Artificial Sequence
  Description of Artificial Sequence: Synthetic oligonucleotide
  Sense strand starting at position 3631 of SEQ ID NO: 1562464
gcucccugugcugaaaucu

SEQ ID NO: 1749062 - RNA, 19 nt, Artificial Sequence
  Description of Artificial Sequence: Synthetic oligonucleotide
  Antisense strand to SEQ ID NO: 1749061
agauuucagcacagggagc

SEQ ID NO: 1749063 - RNA, 19 nt, Artificial Sequence
  Description of Artificial Sequence: Synthetic oligonucleotide
  Sense strand starting at position 3883 of SEQ ID NO: 1562464
gcugaugcuuucugaagca

SEQ ID NO: 1749064 - RNA, 19 nt, Artificial Sequence
  Description of Artificial Sequence: Synthetic oligonucleotide
  Antisense strand to SEQ ID NO: 1749063
ugcuucagaaagcaucagc

SEQ ID NO: 1749065 - RNA, 19 nt, Artificial Sequence
  Description of Artificial Sequence: Synthetic oligonucleotide
  Sense strand starting at position 3902 of SEQ ID NO: 1562464
ggaacagugccuugggaac

SEQ ID NO: 1749066 - RNA, 19 nt, Artificial Sequence
  Description of Artificial Sequence: Synthetic oligonucleotide
  Antisense strand to SEQ ID NO: 1749065
guucccaaggcacuguucc

SEQ ID NO: 1749067 - RNA, 19 nt, Artificial Sequence
  Description of Artificial Sequence: Synthetic oligonucleotide
  Sense strand starting at position 3943 of SEQ ID NO: 1562464
uggcacucaugugaacaga

SEQ ID NO: 1749068 - RNA, 19 nt, Artificial Sequence
  Description of Artificial Sequence: Synthetic oligonucleotide
  Antisense strand to SEQ ID NO: 1749067
ucuguucacaugagugcca

SEQ ID NO: 1749069 - RNA, 19 nt, Artificial Sequence
  Description of Artificial Sequence: Synthetic oligonucleotide
  Sense strand starting at position 7 of SEQ ID NO: 1562465
guaggagguuuagccaaau

SEQ ID NO: 1749070 - RNA, 19 nt, Artificial Sequence
  Description of Artificial Sequence: Synthetic oligonucleotide
  Antisense strand to SEQ ID NO: 1749069
auuuggcuaaaccuccuac

SEQ ID NO: 1749071 - RNA, 19 nt, Artificial Sequence
  Description of Artificial Sequence: Synthetic oligonucleotide
  Sense strand starting at position 65 of SEQ ID NO: 1562465
ccaagaugucucuagaccu

SEQ ID NO: 1749072 - RNA, 19 nt, Artificial Sequence
  Description of Artificial Sequence: Synthetic oligonucleotide
  Antisense strand to SEQ ID NO: 1749071
aggucuagagacaucuugg

SEQ ID NO: 1749073 - RNA, 19 nt, Artificial Sequence
  Description of Artificial Sequence: Synthetic oligonucleotide
  Sense strand starting at position 250 of SEQ ID NO: 1562465
agcaaauaugcauguacca

SEQ ID NO: 1749074 - RNA, 19 nt, Artificial Sequence
  Description of Artificial Sequence: Synthetic oligonucleotide
  Antisense strand to SEQ ID NO: 1749073
ugguacaugcauauuugcu

SEQ ID NO: 1749075 - RNA, 19 nt, Artificial Sequence
  Description of Artificial Sequence: Synthetic oligonucleotide
  Sense strand starting at position 432 of SEQ ID NO: 1562465
ugguauauugccuauugcu

SEQ ID NO: 1749076 - RNA, 19 nt, Artificial Sequence
  Description of Artificial Sequence: Synthetic oligonucleotide
  Antisense strand to SEQ ID NO: 1749075
agcaauaggcaauauacca

SEQ ID NO: 1749077 - RNA, 19 nt, Artificial Sequence
  Description of Artificial Sequence: Synthetic oligonucleotide
  Sense strand starting at position 498 of SEQ ID NO: 1562465
guaacuugauucuuugguu

SEQ ID NO: 1749078 - RNA, 19 nt, Artificial Sequence
  Description of Artificial Sequence: Synthetic oligonucleotide
  Antisense strand to SEQ ID NO: 1749077
aaccaaagaaucaaguuac

SEQ ID NO: 1749079 - RNA, 19 nt, Artificial Sequence
  Description of Artificial Sequence: Synthetic oligonucleotide
  Sense strand starting at position 644 of SEQ ID NO: 1562465
guagacagggucugaguuu

SEQ ID NO: 1749080 - RNA, 19 nt, Artificial Sequence
  Description of Artificial Sequence: Synthetic oligonucleotide
  Antisense strand to SEQ ID NO: 1749079
aaacucagacccugucuac

SEQ ID NO: 1749081 - RNA, 19 nt, Artificial Sequence
  Description of Artificial Sequence: Synthetic oligonucleotide
  Sense strand starting at position 957 of SEQ ID NO: 1562465
uguucuccuugacuggaaa

SEQ ID NO: 1749082 - RNA, 19 nt, Artificial Sequence
  Description of Artificial Sequence: Synthetic oligonucleotide
  Antisense strand to SEQ ID NO: 1749081
uuuccagucaaggagaaca

SEQ ID NO: 1749083 - RNA, 19 nt, Artificial Sequence
  Description of Artificial Sequence: Synthetic oligonucleotide
  Sense strand starting at position 1000 of SEQ ID NO: 1562465
caaguaugagugggugaga

SEQ ID NO: 1749084 - RNA, 19 nt, Artificial Sequence
  Description of Artificial Sequence: Synthetic oligonucleotide
  Antisense strand to SEQ ID NO: 1749083
ucucacccacucauacuug

SEQ ID NO: 1749085 - RNA, 19 nt, Artificial Sequence
  Description of Artificial Sequence: Synthetic oligonucleotide
  Sense strand starting at position 1002 of SEQ ID NO: 1562465
aguaugagugggugagagu

SEQ ID NO: 1749086 - RNA, 19 nt, Artificial Sequence
  Description of Artificial Sequence: Synthetic oligonucleotide
  Antisense strand to SEQ ID NO: 1749085
acucucacccacucauacu

SEQ ID NO: 1749087 - RNA, 19 nt, Artificial Sequence
  Description of Artificial Sequence: Synthetic oligonucleotide
  Sense strand starting at position 1003 of SEQ ID NO: 1562465
guaugagugggugagaguu

SEQ ID NO: 1749088 - RNA, 19 nt, Artificial Sequence
  Description of Artificial Sequence: Synthetic oligonucleotide
  Antisense strand to SEQ ID NO: 1749087
aacucucacccacucauac

SEQ ID NO: 1749089 - RNA, 19 nt, Artificial Sequence
  Description of Artificial Sequence: Synthetic oligonucleotide
  Sense strand starting at position 1099 of SEQ ID NO: 1562465
aauguaaacggugguauca

SEQ ID NO: 1749090 - RNA, 19 nt, Artificial Sequence
  Description of Artificial Sequence: Synthetic oligonucleotide
  Antisense strand to SEQ ID NO: 1749089
ugauaccaccguuuacauu

SEQ ID NO: 1749091 - RNA, 19 nt, Artificial Sequence
  Description of Artificial Sequence: Synthetic oligonucleotide
  Sense strand starting at position 1191 of SEQ ID NO: 1562465
uguuuaacauugccuagga

SEQ ID NO: 1749092 - RNA, 19 nt, Artificial Sequence
  Description of Artificial Sequence: Synthetic oligonucleotide
  Antisense strand to SEQ ID NO: 1749091
uccuaggcaauguuaaaca

SEQ ID NO: 1749093 - RNA, 19 nt, Artificial Sequence
  Description of Artificial Sequence: Synthetic oligonucleotide
  Sense strand starting at position 1192 of SEQ ID NO: 1562465
guuuaacauugccuaggaa

SEQ ID NO: 1749094 - RNA, 19 nt, Artificial Sequence
  Description of Artificial Sequence: Synthetic oligonucleotide
  Antisense strand to SEQ ID NO: 1749093
uuccuaggcaauguuaaac

SEQ ID NO: 1749095 - RNA, 19 nt, Artificial Sequence
  Description of Artificial Sequence: Synthetic oligonucleotide
  Sense strand starting at position 1230 of SEQ ID NO: 1562465
agaccagugauccacggua

SEQ ID NO: 1749096 - RNA, 19 nt, Artificial Sequence
  Description of Artificial Sequence: Synthetic oligonucleotide
  Antisense strand to SEQ ID NO: 1749095
uaccguggaucacuggucu

SEQ ID NO: 1749097 - RNA, 19 nt, Artificial Sequence
  Description of Artificial Sequence: Synthetic oligonucleotide
  Sense strand starting at position 1232 of SEQ ID NO: 1562465
accagugauccacgguaau

SEQ ID NO: 1749098 - RNA, 19 nt, Artificial Sequence
  Description of Artificial Sequence: Synthetic oligonucleotide
  Antisense strand to SEQ ID NO: 1749097
auuaccguggaucacuggu

SEQ ID NO: 1749099 - RNA, 19 nt, Artificial Sequence
  Description of Artificial Sequence: Synthetic oligonucleotide
  Sense strand starting at position 1235 of SEQ ID NO: 1562465
agugauccacgguaauaag

SEQ ID NO: 1749100 - RNA, 19 nt, Artificial Sequence
  Description of Artificial Sequence: Synthetic oligonucleotide
  Antisense strand to SEQ ID NO: 1749099
cuuauuaccguggaucacu

SEQ ID NO: 1749101 - RNA, 19 nt, Artificial Sequence
  Description of Artificial Sequence: Synthetic oligonucleotide
  Sense strand starting at position 1293 of SEQ ID NO: 1562465
ugcucucagccauauaaag

SEQ ID NO: 1749102 - RNA, 19 nt, Artificial Sequence
  Description of Artificial Sequence: Synthetic oligonucleotide
  Antisense strand to SEQ ID NO: 1749101
cuuuauauggcugagagca

SEQ ID NO: 1749103 - RNA, 19 nt, Artificial Sequence
  Description of Artificial Sequence: Synthetic oligonucleotide
  Sense strand starting at position 1492 of SEQ ID NO: 1562465
guggcuucccuacaaagau

SEQ ID NO: 1749104 - RNA, 19 nt, Artificial Sequence
  Description of Artificial Sequence: Synthetic oligonucleotide
  Antisense strand to SEQ ID NO: 1749103
aucuuuguagggaagccac

SEQ ID NO: 1749105 - RNA, 19 nt, Artificial Sequence
  Description of Artificial Sequence: Synthetic oligonucleotide
  Sense strand starting at position 1529 of SEQ ID NO: 1562465
caggguuuguagcuugaga

SEQ ID NO: 1749106 - RNA, 19 nt, Artificial Sequence
  Description of Artificial Sequence: Synthetic oligonucleotide
  Antisense strand to SEQ ID NO: 1749105
ucucaagcuacaaacccug

SEQ ID NO: 1749107 - RNA, 19 nt, Artificial Sequence
  Description of Artificial Sequence: Synthetic oligonucleotide
  Sense strand starting at position 1531 of SEQ ID NO: 1562465
ggguuuguagcuugagacu

SEQ ID NO: 1749108 - RNA, 19 nt, Artificial Sequence
  Description of Artificial Sequence: Synthetic oligonucleotide
  Antisense strand to SEQ ID NO: 1749107
agucucaagcuacaaaccc

SEQ ID NO: 1749109 - RNA, 19 nt, Artificial Sequence
  Description of Artificial Sequence: Synthetic oligonucleotide
  Sense strand starting at position 1537 of SEQ ID NO: 1562465
guagcuugagacugaauca

SEQ ID NO: 1749110 - RNA, 19 nt, Artificial Sequence
  Description of Artificial Sequence: Synthetic oligonucleotide
  Antisense strand to SEQ ID NO: 1749109
ugauucagucucaagcuac

SEQ ID NO: 1749111 - RNA, 19 nt, Artificial Sequence
  Description of Artificial Sequence: Synthetic oligonucleotide
  Sense strand starting at position 1611 of SEQ ID NO: 1562465
uuccuucuaguauagauga

SEQ ID NO: 1749112 - RNA, 19 nt, Artificial Sequence
  Description of Artificial Sequence: Synthetic oligonucleotide
  Antisense strand to SEQ ID NO: 1749111
ucaucuauacuagaaggaa

SEQ ID NO: 1749113 - RNA, 19 nt, Artificial Sequence
  Description of Artificial Sequence: Synthetic oligonucleotide
  Sense strand starting at position 1696 of SEQ ID NO: 1562465
aggcaacgagucuauacau

SEQ ID NO: 1749114 - RNA, 19 nt, Artificial Sequence
  Description of Artificial Sequence: Synthetic oligonucleotide
  Antisense strand to SEQ ID NO: 1749113
auguauagacucguugccu

SEQ ID NO: 1749115 - RNA, 19 nt, Artificial Sequence
  Description of Artificial Sequence: Synthetic oligonucleotide
  Sense strand starting at position 1778 of SEQ ID NO: 1562465
ggcauaucugggcagcagu

SEQ ID NO: 1749116 - RNA, 19 nt, Artificial Sequence
  Description of Artificial Sequence: Synthetic oligonucleotide
  Antisense strand to SEQ ID NO: 1749115
acugcugcccagauaugcc

SEQ ID NO: 1749117 - RNA, 19 nt, Artificial Sequence
  Description of Artificial Sequence: Synthetic oligonucleotide
  Sense strand starting at position 1835 of SEQ ID NO: 1562465
gcucaugucacauggauag

SEQ ID NO: 1749118 - RNA, 19 nt, Artificial Sequence
  Description of Artificial Sequence: Synthetic oligonucleotide
  Antisense strand to SEQ ID NO: 1749117
cuauccaugugacaugagc

SEQ ID NO: 1749119 - RNA, 19 nt, Artificial Sequence
  Description of Artificial Sequence: Synthetic oligonucleotide
  Sense strand starting at position 1989 of SEQ ID NO: 1562465
uuugcaaaguaagcuuaaa

SEQ ID NO: 1749120 - RNA, 19 nt, Artificial Sequence
  Description of Artificial Sequence: Synthetic oligonucleotide
  Antisense strand to SEQ ID NO: 1749119
uuuaagcuuacuuugcaaa

SEQ ID NO: 1749121 - RNA, 19 nt, Artificial Sequence
  Description of Artificial Sequence: Synthetic oligonucleotide
  Sense strand starting at position 2109 of SEQ ID NO: 1562465
cuaguuguucauggugaug

SEQ ID NO: 1749122 - RNA, 19 nt, Artificial Sequence
  Description of Artificial Sequence: Synthetic oligonucleotide
  Antisense strand to SEQ ID NO: 1749121
caucaccaugaacaacuag

SEQ ID NO: 1749123 - RNA, 19 nt, Artificial Sequence
  Description of Artificial Sequence: Synthetic oligonucleotide
  Sense strand starting at position 3057 of SEQ ID NO: 1562465
auagaacuguuuccaaugu

SEQ ID NO: 1749124 - RNA, 19 nt, Artificial Sequence
  Description of Artificial Sequence: Synthetic oligonucleotide
  Antisense strand to SEQ ID NO: 1749123
acauuggaaacaguucuau

SEQ ID NO: 1749125 - RNA, 19 nt, Artificial Sequence
  Description of Artificial Sequence: Synthetic oligonucleotide
  Sense strand starting at position 3097 of SEQ ID NO: 1562465
acgguaauuugauacccaa

SEQ ID NO: 1749126 - RNA, 19 nt, Artificial Sequence
  Description of Artificial Sequence: Synthetic oligonucleotide
  Antisense strand to SEQ ID NO: 1749125
uuggguaucaaauuaccgu

SEQ ID NO: 1749127 - RNA, 19 nt, Artificial Sequence
  Description of Artificial Sequence: Synthetic oligonucleotide
  Sense strand starting at position 3132 of SEQ ID NO: 1562465
acacgugagcucuaaaucu

SEQ ID NO: 1749128 - RNA, 19 nt, Artificial Sequence
  Description of Artificial Sequence: Synthetic oligonucleotide
  Antisense strand to SEQ ID NO: 1749127
agauuuagagcucacgugu

SEQ ID NO: 1749129 - RNA, 19 nt, Artificial Sequence
  Description of Artificial Sequence: Synthetic oligonucleotide
  Sense strand starting at position 3323 of SEQ ID NO: 1562465
uaggacaagugccuaaaua

SEQ ID NO: 1749130 - RNA, 19 nt, Artificial Sequence
  Description of Artificial Sequence: Synthetic oligonucleotide
  Antisense strand to SEQ ID NO: 1749129
uauuuaggcacuuguccua

SEQ ID NO: 1749131 - RNA, 19 nt, Artificial Sequence
  Description of Artificial Sequence: Synthetic oligonucleotide
  Sense strand starting at position 3331 of SEQ ID NO: 1562465
gugccuaaauaugaaauuu

SEQ ID NO: 1749132 - RNA, 19 nt, Artificial Sequence
  Description of Artificial Sequence: Synthetic oligonucleotide
  Antisense strand to SEQ ID NO: 1749131
aaauuucauauuuaggcac

SEQ ID NO: 1749133 - RNA, 19 nt, Artificial Sequence
  Description of Artificial Sequence: Synthetic oligonucleotide
  Sense strand starting at position 3715 of SEQ ID NO: 1562465
agagcuuugcugcaaaucu

SEQ ID NO: 1749134 - RNA, 19 nt, Artificial Sequence
  Description of Artificial Sequence: Synthetic oligonucleotide
  Antisense strand to SEQ ID NO: 1749133
agauuugcagcaaagcucu

SEQ ID NO: 1749135 - RNA, 19 nt, Artificial Sequence
  Description of Artificial Sequence: Synthetic oligonucleotide
  Sense strand starting at position 3730 of SEQ ID NO: 1562465
aucugcugccuggaucaau

SEQ ID NO: 1749136 - RNA, 19 nt, Artificial Sequence
  Description of Artificial Sequence: Synthetic oligonucleotide
  Antisense strand to SEQ ID NO: 1749135
auugauccaggcagcagau

SEQ ID NO: 1749137 - RNA, 19 nt, Artificial Sequence
  Description of Artificial Sequence: Synthetic oligonucleotide
  Sense strand starting at position 3733 of SEQ ID NO: 1562465
ugcugccuggaucaauaau

SEQ ID NO: 1749138 - RNA, 19 nt, Artificial Sequence
  Description of Artificial Sequence: Synthetic oligonucleotide
  Antisense strand to SEQ ID NO: 1749137
auuauugauccaggcagca

SEQ ID NO: 1749139 - RNA, 19 nt, Artificial Sequence
  Description of Artificial Sequence: Synthetic oligonucleotide
  Sense strand starting at position 3794 of SEQ ID NO: 1562465
ccgagagccaugugaucuu

SEQ ID NO: 1749140 - RNA, 19 nt, Artificial Sequence
  Description of Artificial Sequence: Synthetic oligonucleotide
  Antisense strand to SEQ ID NO: 1749139
aagaucacauggcucucgg

SEQ ID NO: 1749141 - RNA, 19 nt, Artificial Sequence
  Description of Artificial Sequence: Synthetic oligonucleotide
  Sense strand starting at position 3803 of SEQ ID NO: 1562465
augugaucuuugucaguac

SEQ ID NO: 1749142 - RNA, 19 nt, Artificial Sequence
  Description of Artificial Sequence: Synthetic oligonucleotide
  Antisense strand to SEQ ID NO: 1749141
guacugacaaagaucacau

SEQ ID NO: 1749143 - RNA, 19 nt, Artificial Sequence
  Description of Artificial Sequence: Synthetic oligonucleotide
  Sense strand starting at position 3806 of SEQ ID NO: 1562465
ugaucuuugucaguaccau

SEQ ID NO: 1749144 - RNA, 19 nt, Artificial Sequence
  Description of Artificial Sequence: Synthetic oligonucleotide
  Antisense strand to SEQ ID NO: 1749143
augguacugacaaagauca

SEQ ID NO: 1749145 - RNA, 19 nt, Artificial Sequence
  Description of Artificial Sequence: Synthetic oligonucleotide
  Sense strand starting at position 3807 of SEQ ID NO: 1562465
gaucuuugucaguaccaug

SEQ ID NO: 1749146 - RNA, 19 nt, Artificial Sequence
  Description of Artificial Sequence: Synthetic oligonucleotide
  Antisense strand to SEQ ID NO: 1749145
caugguacugacaaagauc

SEQ ID NO: 1749147 - RNA, 19 nt, Artificial Sequence
  Description of Artificial Sequence: Synthetic oligonucleotide
  Sense strand starting at position 3950 of SEQ ID NO: 1562465
cgcccaugucaggaagguu

SEQ ID NO: 1749148 - RNA, 19 nt, Artificial Sequence
  Description of Artificial Sequence: Synthetic oligonucleotide
  Antisense strand to SEQ ID NO: 1749147
aaccuuccugacaugggcg

SEQ ID NO: 1749149 - RNA, 19 nt, Artificial Sequence
  Description of Artificial Sequence: Synthetic oligonucleotide
  Sense strand starting at position 122 of SEQ ID NO: 1562466
ggguguugagauuggagga

SEQ ID NO: 1749150 - RNA, 19 nt, Artificial Sequence
  Description of Artificial Sequence: Synthetic oligonucleotide
  Antisense strand to SEQ ID NO: 1749149
uccuccaaucucaacaccc

SEQ ID NO: 1749151 - RNA, 19 nt, Artificial Sequence
  Description of Artificial Sequence: Synthetic oligonucleotide
  Sense strand starting at position 397 of SEQ ID NO: 1562466
cagggucauggcugaccaa

SEQ ID NO: 1749152 - RNA, 19 nt, Artificial Sequence
  Description of Artificial Sequence: Synthetic oligonucleotide
  Antisense strand to SEQ ID NO: 1749151
uuggucagccaugacccug

SEQ ID NO: 1749153 - RNA, 19 nt, Artificial Sequence
  Description of Artificial Sequence: Synthetic oligonucleotide
  Sense strand starting at position 507 of SEQ ID NO: 1562466
agcacuaaguccuugagau

SEQ ID NO: 1749154 - RNA, 19 nt, Artificial Sequence
  Description of Artificial Sequence: Synthetic oligonucleotide
  Antisense strand to SEQ ID NO: 1749153
aucucaaggacuuagugcu

SEQ ID NO: 1749155 - RNA, 19 nt, Artificial Sequence
  Description of Artificial Sequence: Synthetic oligonucleotide
  Sense strand starting at position 508 of SEQ ID NO: 1562466
gcacuaaguccuugagaua

SEQ ID NO: 1749156 - RNA, 19 nt, Artificial Sequence
  Description of Artificial Sequence: Synthetic oligonucleotide
  Antisense strand to SEQ ID NO: 1749155
uaucucaaggacuuagugc

SEQ ID NO: 1749157 - RNA, 19 nt, Artificial Sequence
  Description of Artificial Sequence: Synthetic oligonucleotide
  Sense strand starting at position 1459 of SEQ ID NO: 1562466
cggcaaaggcuagaaauca

SEQ ID NO: 1749158 - RNA, 19 nt, Artificial Sequence
  Description of Artificial Sequence: Synthetic oligonucleotide
  Antisense strand to SEQ ID NO: 1749157
ugauuucuagccuuugccg

SEQ ID NO: 1749159 - RNA, 19 nt, Artificial Sequence
  Description of Artificial Sequence: Synthetic oligonucleotide
  Sense strand starting at position 1546 of SEQ ID NO: 1562466
acgucagagcaucacaaau

SEQ ID NO: 1749160 - RNA, 19 nt, Artificial Sequence
  Description of Artificial Sequence: Synthetic oligonucleotide
  Antisense strand to SEQ ID NO: 1749159
auuugugaugcucugacgu

SEQ ID NO: 1749161 - RNA, 19 nt, Artificial Sequence
  Description of Artificial Sequence: Synthetic oligonucleotide
  Sense strand starting at position 1825 of SEQ ID NO: 1562466
gaaucuuaucuuuguggcu

SEQ ID NO: 1749162 - RNA, 19 nt, Artificial Sequence
  Description of Artificial Sequence: Synthetic oligonucleotide
  Antisense strand to SEQ ID NO: 1749161
agccacaaagauaagauuc

SEQ ID NO: 1749163 - RNA, 19 nt, Artificial Sequence
  Description of Artificial Sequence: Synthetic oligonucleotide
  Sense strand starting at position 1880 of SEQ ID NO: 1562466
ugucacguuacucaggaaa

SEQ ID NO: 1749164 - RNA, 19 nt, Artificial Sequence
  Description of Artificial Sequence: Synthetic oligonucleotide
  Antisense strand to SEQ ID NO: 1749163
uuuccugaguaacgugaca

SEQ ID NO: 1749165 - RNA, 19 nt, Artificial Sequence
  Description of Artificial Sequence: Synthetic oligonucleotide
  Sense strand starting at position 1883 of SEQ ID NO: 1562466
cacguuacucaggaaauau

SEQ ID NO: 1749166 - RNA, 19 nt, Artificial Sequence
  Description of Artificial Sequence: Synthetic oligonucleotide
  Antisense strand to SEQ ID NO: 1749165
auauuuccugaguaacgug

SEQ ID NO: 1749167 - RNA, 19 nt, Artificial Sequence
  Description of Artificial Sequence: Synthetic oligonucleotide
  Sense strand starting at position 1913 of SEQ ID NO: 1562466
gcaucugcugugcaucaga

SEQ ID NO: 1749168 - RNA, 19 nt, Artificial Sequence
  Description of Artificial Sequence: Synthetic oligonucleotide
  Antisense strand to SEQ ID NO: 1749167
ucugaugcacagcagaugc

SEQ ID NO: 1749169 - RNA, 19 nt, Artificial Sequence
  Description of Artificial Sequence: Synthetic oligonucleotide
  Sense strand starting at position 2049 of SEQ ID NO: 1562466
ccugcuccgucaucaacaa

SEQ ID NO: 1749170 - RNA, 19 nt, Artificial Sequence
  Description of Artificial Sequence: Synthetic oligonucleotide
  Antisense strand to SEQ ID NO: 1749169
uuguugaugacggagcagg

SEQ ID NO: 1749171 - RNA, 19 nt, Artificial Sequence
  Description of Artificial Sequence: Synthetic oligonucleotide
  Sense strand starting at position 2050 of SEQ ID NO: 1562466
cugcuccgucaucaacaaa

SEQ ID NO: 1749172 - RNA, 19 nt, Artificial Sequence
  Description of Artificial Sequence: Synthetic oligonucleotide
  Antisense strand to SEQ ID NO: 1749171
uuuguugaugacggagcag

SEQ ID NO: 1749173 - RNA, 19 nt, Artificial Sequence
  Description of Artificial Sequence: Synthetic oligonucleotide
  Sense strand starting at position 2109 of SEQ ID NO: 1562466
gaaacugaguuaucagcgu

SEQ ID NO: 1749174 - RNA, 19 nt, Artificial Sequence
  Description of Artificial Sequence: Synthetic oligonucleotide
  Antisense strand to SEQ ID NO: 1749173
acgcugauaacucaguuuc

SEQ ID NO: 1749175 - RNA, 19 nt, Artificial Sequence
  Description of Artificial Sequence: Synthetic oligonucleotide
  Sense strand starting at position 2114 of SEQ ID NO: 1562466
ugaguuaucagcgugcucu

SEQ ID NO: 1749176 - RNA, 19 nt, Artificial Sequence
  Description of Artificial Sequence: Synthetic oligonucleotide
  Antisense strand to SEQ ID NO: 1749175
agagcacgcugauaacuca

SEQ ID NO: 1749177 - RNA, 19 nt, Artificial Sequence
  Description of Artificial Sequence: Synthetic oligonucleotide
  Sense strand starting at position 2122 of SEQ ID NO: 1562466
cagcgugcucuccagauga

SEQ ID NO: 1749178 - RNA, 19 nt, Artificial Sequence
  Description of Artificial Sequence: Synthetic oligonucleotide
  Antisense strand to SEQ ID NO: 1749177
ucaucuggagagcacgcug

SEQ ID NO: 1749179 - RNA, 19 nt, Artificial Sequence
  Description of Artificial Sequence: Synthetic oligonucleotide
  Sense strand starting at position 2124 of SEQ ID NO: 1562466
gcgugcucuccagaugacu

SEQ ID NO: 1749180 - RNA, 19 nt, Artificial Sequence
  Description of Artificial Sequence: Synthetic oligonucleotide
  Antisense strand to SEQ ID NO: 1749179
agucaucuggagagcacgc

SEQ ID NO: 1749181 - RNA, 19 nt, Artificial Sequence
  Description of Artificial Sequence: Synthetic oligonucleotide
  Sense strand starting at position 2224 of SEQ ID NO: 1562466
cagagagucugaucuguca

SEQ ID NO: 1749182 - RNA, 19 nt, Artificial Sequence
  Description of Artificial Sequence: Synthetic oligonucleotide
  Antisense strand to SEQ ID NO: 1749181
ugacagaucagacucucug

SEQ ID NO: 1749183 - RNA, 19 nt, Artificial Sequence
  Description of Artificial Sequence: Synthetic oligonucleotide
  Sense strand starting at position 2246 of SEQ ID NO: 1562466
cugggcugggccugagaau

SEQ ID NO: 1749184 - RNA, 19 nt, Artificial Sequence
  Description of Artificial Sequence: Synthetic oligonucleotide
  Antisense strand to SEQ ID NO: 1749183
auucucaggcccagcccag

SEQ ID NO: 1749185 - RNA, 19 nt, Artificial Sequence
  Description of Artificial Sequence: Synthetic oligonucleotide
  Sense strand starting at position 2330 of SEQ ID NO: 1562466
aagguucugcccugacagu

SEQ ID NO: 1749186 - RNA, 19 nt, Artificial Sequence
  Description of Artificial Sequence: Synthetic oligonucleotide
  Antisense strand to SEQ ID NO: 1749185
acugucagggcagaaccuu

SEQ ID NO: 1749187 - RNA, 19 nt, Artificial Sequence
  Description of Artificial Sequence: Synthetic oligonucleotide
  Sense strand starting at position 2368 of SEQ ID NO: 1562466
guggcucugaaaugugacu

SEQ ID NO: 1749188 - RNA, 19 nt, Artificial Sequence
  Description of Artificial Sequence: Synthetic oligonucleotide
  Antisense strand to SEQ ID NO: 1749187
agucacauuucagagccac

SEQ ID NO: 1749189 - RNA, 19 nt, Artificial Sequence
  Description of Artificial Sequence: Synthetic oligonucleotide
  Sense strand starting at position 2405 of SEQ ID NO: 1562466
gacuucgaacuccauguaa

SEQ ID NO: 1749190 - RNA, 19 nt, Artificial Sequence
  Description of Artificial Sequence: Synthetic oligonucleotide
  Antisense strand to SEQ ID NO: 1749189
uuacauggaguucgaaguc

SEQ ID NO: 1749191 - RNA, 19 nt, Artificial Sequence
  Description of Artificial Sequence: Synthetic oligonucleotide
  Sense strand starting at position 2407 of SEQ ID NO: 1562466
cuucgaacuccauguaauu

SEQ ID NO: 1749192 - RNA, 19 nt, Artificial Sequence
  Description of Artificial Sequence: Synthetic oligonucleotide
  Antisense strand to SEQ ID NO: 1749191
aauuacauggaguucgaag

SEQ ID NO: 1749193 - RNA, 19 nt, Artificial Sequence
  Description of Artificial Sequence: Synthetic oligonucleotide
  Sense strand starting at position 2448 of SEQ ID NO: 1562466
ucguguaucgggccucaca

SEQ ID NO: 1749194 - RNA, 19 nt, Artificial Sequence
  Description of Artificial Sequence: Synthetic oligonucleotide
  Antisense strand to SEQ ID NO: 1749193
ugugaggcccgauacacga

SEQ ID NO: 1749195 - RNA, 19 nt, Artificial Sequence
  Description of Artificial Sequence: Synthetic oligonucleotide
  Sense strand starting at position 2747 of SEQ ID NO: 1562466
ucuuucugguccucaguua

SEQ ID NO: 1749196 - RNA, 19 nt, Artificial Sequence
  Description of Artificial Sequence: Synthetic oligonucleotide
  Antisense strand to SEQ ID NO: 1749195
uaacugaggaccagaaaga

SEQ ID NO: 1749197 - RNA, 19 nt, Artificial Sequence
  Description of Artificial Sequence: Synthetic oligonucleotide
  Sense strand starting at position 2813 of SEQ ID NO: 1562466
cuuccugcucugugaccaa

SEQ ID NO: 1749198 - RNA, 19 nt, Artificial Sequence
  Description of Artificial Sequence: Synthetic oligonucleotide
  Antisense strand to SEQ ID NO: 1749197
uuggucacagagcaggaag

SEQ ID NO: 1749199 - RNA, 19 nt, Artificial Sequence
  Description of Artificial Sequence: Synthetic oligonucleotide
  Sense strand starting at position 2846 of SEQ ID NO: 1562466
aggcauucccaucaccaga

SEQ ID NO: 1749200 - RNA, 19 nt, Artificial Sequence
  Description of Artificial Sequence: Synthetic oligonucleotide
  Antisense strand to SEQ ID NO: 1749199
ucuggugaugggaaugccu

SEQ ID NO: 1749201 - RNA, 19 nt, Artificial Sequence
  Description of Artificial Sequence: Synthetic oligonucleotide
  Sense strand starting at position 3036 of SEQ ID NO: 1562466
gcuccucuuggcuaaguca

SEQ ID NO: 1749202 - RNA, 19 nt, Artificial Sequence
  Description of Artificial Sequence: Synthetic oligonucleotide
  Antisense strand to SEQ ID NO: 1749201
ugacuuagccaagaggagc

SEQ ID NO: 1749203 - RNA, 19 nt, Artificial Sequence
  Description of Artificial Sequence: Synthetic oligonucleotide
  Sense strand starting at position 3043 of SEQ ID NO: 1562466
uuggcuaagucauuguagu

SEQ ID NO: 1749204 - RNA, 19 nt, Artificial Sequence
  Description of Artificial Sequence: Synthetic oligonucleotide
  Antisense strand to SEQ ID NO: 1749203
acuacaaugacuuagccaa

SEQ ID NO: 1749205 - RNA, 19 nt, Artificial Sequence
  Description of Artificial Sequence: Synthetic oligonucleotide
  Sense strand starting at position 3044 of SEQ ID NO: 1562466
uggcuaagucauuguagug

SEQ ID NO: 1749206 - RNA, 19 nt, Artificial Sequence
  Description of Artificial Sequence: Synthetic oligonucleotide
  Antisense strand to SEQ ID NO: 1749205
cacuacaaugacuuagcca

SEQ ID NO: 1749207 - RNA, 19 nt, Artificial Sequence
  Description of Artificial Sequence: Synthetic oligonucleotide
  Sense strand starting at position 3077 of SEQ ID NO: 1562466
caggcuuaacuuuacggaa

SEQ ID NO: 1749208 - RNA, 19 nt, Artificial Sequence
  Description of Artificial Sequence: Synthetic oligonucleotide
  Antisense strand to SEQ ID NO: 1749207
uuccguaaaguuaagccug

SEQ ID NO: 1749209 - RNA, 19 nt, Artificial Sequence
  Description of Artificial Sequence: Synthetic oligonucleotide
  Sense strand starting at position 3152 of SEQ ID NO: 1562466
aggagaucaucgucaggau

SEQ ID NO: 1749210 - RNA, 19 nt, Artificial Sequence
  Description of Artificial Sequence: Synthetic oligonucleotide
  Antisense strand to SEQ ID NO: 1749209
auccugacgaugaucuccu

SEQ ID NO: 1749211 - RNA, 19 nt, Artificial Sequence
  Description of Artificial Sequence: Synthetic oligonucleotide
  Sense strand starting at position 3153 of SEQ ID NO: 1562466
ggagaucaucgucaggauc

SEQ ID NO: 1749212 - RNA, 19 nt, Artificial Sequence
  Description of Artificial Sequence: Synthetic oligonucleotide
  Antisense strand to SEQ ID NO: 1749211
gauccugacgaugaucucc

SEQ ID NO: 1749213 - RNA, 19 nt, Artificial Sequence
  Description of Artificial Sequence: Synthetic oligonucleotide
  Sense strand starting at position 3274 of SEQ ID NO: 1562466
ucgguuucacuaggaaugu

SEQ ID NO: 1749214 - RNA, 19 nt, Artificial Sequence
  Description of Artificial Sequence: Synthetic oligonucleotide
  Antisense strand to SEQ ID NO: 1749213
acauuccuagugaaaccga

SEQ ID NO: 1749215 - RNA, 19 nt, Artificial Sequence
  Description of Artificial Sequence: Synthetic oligonucleotide
  Sense strand starting at position 3501 of SEQ ID NO: 1562466
gguucuugcguucugagca

SEQ ID NO: 1749216 - RNA, 19 nt, Artificial Sequence
  Description of Artificial Sequence: Synthetic oligonucleotide
  Antisense strand to SEQ ID NO: 1749215
ugcucagaacgcaagaacc

SEQ ID NO: 1749217 - RNA, 19 nt, Artificial Sequence
  Description of Artificial Sequence: Synthetic oligonucleotide
  Sense strand starting at position 3506 of SEQ ID NO: 1562466
uugcguucugagcacuaaa

SEQ ID NO: 1749218 - RNA, 19 nt, Artificial Sequence
  Description of Artificial Sequence: Synthetic oligonucleotide
  Antisense strand to SEQ ID NO: 1749217
uuuagugcucagaacgcaa

SEQ ID NO: 1749219 - RNA, 19 nt, Artificial Sequence
  Description of Artificial Sequence: Synthetic oligonucleotide
  Sense strand starting at position 3660 of SEQ ID NO: 1562466
gugugcagcuugguaaaga

SEQ ID NO: 1749220 - RNA, 19 nt, Artificial Sequence
  Description of Artificial Sequence: Synthetic oligonucleotide
  Antisense strand to SEQ ID NO: 1749219
ucuuuaccaagcugcacac

SEQ ID NO: 1749221 - RNA, 19 nt, Artificial Sequence
  Description of Artificial Sequence: Synthetic oligonucleotide
  Sense strand starting at position 3718 of SEQ ID NO: 1562466
gcacgcugacucuauggaa

SEQ ID NO: 1749222 - RNA, 19 nt, Artificial Sequence
  Description of Artificial Sequence: Synthetic oligonucleotide
  Antisense strand to SEQ ID NO: 1749221
uuccauagagucagcgugc

SEQ ID NO: 1749223 - RNA, 19 nt, Artificial Sequence
  Description of Artificial Sequence: Synthetic oligonucleotide
  Sense strand starting at position 3864 of SEQ ID NO: 1562466
agcaaaugcuuuccugaau

SEQ ID NO: 1749224 - RNA, 19 nt, Artificial Sequence
  Description of Artificial Sequence: Synthetic oligonucleotide
  Antisense strand to SEQ ID NO: 1749223
auucaggaaagcauuugcu

SEQ ID NO: 1749225 - RNA, 19 nt, Artificial Sequence
  Description of Artificial Sequence: Synthetic oligonucleotide
  Sense strand starting at position 3865 of SEQ ID NO: 1562466
gcaaaugcuuuccugaauu

SEQ ID NO: 1749226 - RNA, 19 nt, Artificial Sequence
  Description of Artificial Sequence: Synthetic oligonucleotide
  Antisense strand to SEQ ID NO: 1749225
aauucaggaaagcauuugc

SEQ ID NO: 1749227 - RNA, 19 nt, Artificial Sequence
  Description of Artificial Sequence: Synthetic oligonucleotide
  Sense strand starting at position 3901 of SEQ ID NO: 1562466
ggugaagugcuguagacaa

SEQ ID NO: 1749228 - RNA, 19 nt, Artificial Sequence
  Description of Artificial Sequence: Synthetic oligonucleotide
  Antisense strand to SEQ ID NO: 1749227
uugucuacagcacuucacc

SEQ ID NO: 1749229 - RNA, 19 nt, Artificial Sequence
  Description of Artificial Sequence: Synthetic oligonucleotide
  Sense strand starting at position 208 of SEQ ID NO: 1562467
ucuggacagcuauaugcua

SEQ ID NO: 1749230 - RNA, 19 nt, Artificial Sequence
  Description of Artificial Sequence: Synthetic oligonucleotide
  Antisense strand to SEQ ID NO: 1749229
uagcauauagcuguccaga

SEQ ID NO: 1749231 - RNA, 19 nt, Artificial Sequence
  Description of Artificial Sequence: Synthetic oligonucleotide
  Sense strand starting at position 216 of SEQ ID NO: 1562467
gcuauaugcuaauugggaa

SEQ ID NO: 1749232 - RNA, 19 nt, Artificial Sequence
  Description of Artificial Sequence: Synthetic oligonucleotide
  Antisense strand to SEQ ID NO: 1749231
uucccaauuagcauauagc

SEQ ID NO: 1749233 - RNA, 19 nt, Artificial Sequence
  Description of Artificial Sequence: Synthetic oligonucleotide
  Sense strand starting at position 238 of SEQ ID NO: 1562467
aguaucugaucuuugaaug

SEQ ID NO: 1749234 - RNA, 19 nt, Artificial Sequence
  Description of Artificial Sequence: Synthetic oligonucleotide
  Antisense strand to SEQ ID NO: 1749233
cauucaaagaucagauacu

SEQ ID NO: 1749235 - RNA, 19 nt, Artificial Sequence
  Description of Artificial Sequence: Synthetic oligonucleotide
  Sense strand starting at position 243 of SEQ ID NO: 1562467
cugaucuuugaauguuaac

SEQ ID NO: 1749236 - RNA, 19 nt, Artificial Sequence
  Description of Artificial Sequence: Synthetic oligonucleotide
  Antisense strand to SEQ ID NO: 1749235
guuaacauucaaagaucag

SEQ ID NO: 1749237 - RNA, 19 nt, Artificial Sequence
  Description of Artificial Sequence: Synthetic oligonucleotide
  Sense strand starting at position 625 of SEQ ID NO: 1562467
ugacaagcuccagagguuu

SEQ ID NO: 1749238 - RNA, 19 nt, Artificial Sequence
  Description of Artificial Sequence: Synthetic oligonucleotide
  Antisense strand to SEQ ID NO: 1749237
aaaccucuggagcuuguca

SEQ ID NO: 1749239 - RNA, 19 nt, Artificial Sequence
  Description of Artificial Sequence: Synthetic oligonucleotide
  Sense strand starting at position 669 of SEQ ID NO: 1562467
ucugacaagucuuuauuag

SEQ ID NO: 1749240 - RNA, 19 nt, Artificial Sequence
  Description of Artificial Sequence: Synthetic oligonucleotide
  Antisense strand to SEQ ID NO: 1749239
cuaauaaagacuugucaga

SEQ ID NO: 1749241 - RNA, 19 nt, Artificial Sequence
  Description of Artificial Sequence: Synthetic oligonucleotide
  Sense strand starting at position 690 of SEQ ID NO: 1562467
gguaguaaggucugagaau

SEQ ID NO: 1749242 - RNA, 19 nt, Artificial Sequence
  Description of Artificial Sequence: Synthetic oligonucleotide
  Antisense strand to SEQ ID NO: 1749241
auucucagaccuuacuacc

SEQ ID NO: 1749243 - RNA, 19 nt, Artificial Sequence
  Description of Artificial Sequence: Synthetic oligonucleotide
  Sense strand starting at position 830 of SEQ ID NO: 1562467
ugcaauuugugcuuguaaa

SEQ ID NO: 1749244 - RNA, 19 nt, Artificial Sequence
  Description of Artificial Sequence: Synthetic oligonucleotide
  Antisense strand to SEQ ID NO: 1749243
uuuacaagcacaaauugca

SEQ ID NO: 1749245 - RNA, 19 nt, Artificial Sequence
  Description of Artificial Sequence: Synthetic oligonucleotide
  Sense strand starting at position 831 of SEQ ID NO: 1562467
gcaauuugugcuuguaaau

SEQ ID NO: 1749246 - RNA, 19 nt, Artificial Sequence
  Description of Artificial Sequence: Synthetic oligonucleotide
  Antisense strand to SEQ ID NO: 1749245
auuuacaagcacaaauugc

SEQ ID NO: 1749247 - RNA, 19 nt, Artificial Sequence
  Description of Artificial Sequence: Synthetic oligonucleotide
  Sense strand starting at position 904 of SEQ ID NO: 1562467
uguauauuccaguagaucc

SEQ ID NO: 1749248 - RNA, 19 nt, Artificial Sequence
  Description of Artificial Sequence: Synthetic oligonucleotide
  Antisense strand to SEQ ID NO: 1749247
ggaucuacuggaauauaca

SEQ ID NO: 1749249 - RNA, 19 nt, Artificial Sequence
  Description of Artificial Sequence: Synthetic oligonucleotide
  Sense strand starting at position 955 of SEQ ID NO: 1562467
uuaauaagagcugggacau

SEQ ID NO: 1749250 - RNA, 19 nt, Artificial Sequence
  Description of Artificial Sequence: Synthetic oligonucleotide
  Antisense strand to SEQ ID NO: 1749249
augucccagcucuuauuaa

SEQ ID NO: 1749251 - RNA, 19 nt, Artificial Sequence
  Description of Artificial Sequence: Synthetic oligonucleotide
  Sense strand starting at position 956 of SEQ ID NO: 1562467
uaauaagagcugggacauu

SEQ ID NO: 1749252 - RNA, 19 nt, Artificial Sequence
  Description of Artificial Sequence: Synthetic oligonucleotide
  Antisense strand to SEQ ID NO: 1749251
aaugucccagcucuuauua

SEQ ID NO: 1749253 - RNA, 19 nt, Artificial Sequence
  Description of Artificial Sequence: Synthetic oligonucleotide
  Sense strand starting at position 1420 of SEQ ID NO: 1562467
cuaugugcugaguaaauca

SEQ ID NO: 1749254 - RNA, 19 nt, Artificial Sequence
  Description of Artificial Sequence: Synthetic oligonucleotide
  Antisense strand to SEQ ID NO: 1749253
ugauuuacucagcacauag

SEQ ID NO: 1749255 - RNA, 19 nt, Artificial Sequence
  Description of Artificial Sequence: Synthetic oligonucleotide
  Sense strand starting at position 1697 of SEQ ID NO: 1562467
gcguccuggcugucaauca

SEQ ID NO: 1749256 - RNA, 19 nt, Artificial Sequence
  Description of Artificial Sequence: Synthetic oligonucleotide
  Antisense strand to SEQ ID NO: 1749255
ugauugacagccaggacgc

SEQ ID NO: 1749257 - RNA, 19 nt, Artificial Sequence
  Description of Artificial Sequence: Synthetic oligonucleotide
  Sense strand starting at position 2106 of SEQ ID NO: 1562467
uaaauuugucaguggcucu

SEQ ID NO: 1749258 - RNA, 19 nt, Artificial Sequence
  Description of Artificial Sequence: Synthetic oligonucleotide
  Antisense strand to SEQ ID NO: 1749257
agagccacugacaaauuua

SEQ ID NO: 1749259 - RNA, 19 nt, Artificial Sequence
  Description of Artificial Sequence: Synthetic oligonucleotide
  Sense strand starting at position 2117 of SEQ ID NO: 1562467
guggcucuccuugaaauug

SEQ ID NO: 1749260 - RNA, 19 nt, Artificial Sequence
  Description of Artificial Sequence: Synthetic oligonucleotide
  Antisense strand to SEQ ID NO: 1749259
caauuucaaggagagccac

SEQ ID NO: 1749261 - RNA, 19 nt, Artificial Sequence
  Description of Artificial Sequence: Synthetic oligonucleotide
  Sense strand starting at position 2128 of SEQ ID NO: 1562467
ugaaauugcuaaguagaca

SEQ ID NO: 1749262 - RNA, 19 nt, Artificial Sequence
  Description of Artificial Sequence: Synthetic oligonucleotide
  Antisense strand to SEQ ID NO: 1749261
ugucuacuuagcaauuuca

SEQ ID NO: 1749263 - RNA, 19 nt, Artificial Sequence
  Description of Artificial Sequence: Synthetic oligonucleotide
  Sense strand starting at position 2149 of SEQ ID NO: 1562467
uguauaauccgugacuauu

SEQ ID NO: 1749264 - RNA, 19 nt, Artificial Sequence
  Description of Artificial Sequence: Synthetic oligonucleotide
  Antisense strand to SEQ ID NO: 1749263
aauagucacggauuauaca

SEQ ID NO: 1749265 - RNA, 19 nt, Artificial Sequence
  Description of Artificial Sequence: Synthetic oligonucleotide
  Sense strand starting at position 2151 of SEQ ID NO: 1562467
uauaauccgugacuauuga

SEQ ID NO: 1749266 - RNA, 19 nt, Artificial Sequence
  Description of Artificial Sequence: Synthetic oligonucleotide
  Antisense strand to SEQ ID NO: 1749265
ucaauagucacggauuaua

SEQ ID NO: 1749267 - RNA, 19 nt, Artificial Sequence
  Description of Artificial Sequence: Synthetic oligonucleotide
  Sense strand starting at position 2248 of SEQ ID NO: 1562467
gacuaaggugaauguucuu

SEQ ID NO: 1749268 - RNA, 19 nt, Artificial Sequence
  Description of Artificial Sequence: Synthetic oligonucleotide
  Antisense strand to SEQ ID NO: 1749267
aagaacauucaccuuaguc

SEQ ID NO: 1749269 - RNA, 19 nt, Artificial Sequence
  Description of Artificial Sequence: Synthetic oligonucleotide
  Sense strand starting at position 2370 of SEQ ID NO: 1562467
agcuuuacgcuauaaagau

SEQ ID NO: 1749270 - RNA, 19 nt, Artificial Sequence
  Description of Artificial Sequence: Synthetic oligonucleotide
  Antisense strand to SEQ ID NO: 1749269
aucuuuauagcguaaagcu

SEQ ID NO: 1749271 - RNA, 19 nt, Artificial Sequence
  Description of Artificial Sequence: Synthetic oligonucleotide
  Sense strand starting at position 2475 of SEQ ID NO: 1562467
gaugaugcgguuuaauaca

SEQ ID NO: 1749272 - RNA, 19 nt, Artificial Sequence
  Description of Artificial Sequence: Synthetic oligonucleotide
  Antisense strand to SEQ ID NO: 1749271
uguauuaaaccgcaucauc

SEQ ID NO: 1749273 - RNA, 19 nt, Artificial Sequence
  Description of Artificial Sequence: Synthetic oligonucleotide
  Sense strand starting at position 2483 of SEQ ID NO: 1562467
gguuuaauacacugcugaa

SEQ ID NO: 1749274 - RNA, 19 nt, Artificial Sequence
  Description of Artificial Sequence: Synthetic oligonucleotide
  Antisense strand to SEQ ID NO: 1749273
uucagcaguguauuaaacc

SEQ ID NO: 1749275 - RNA, 19 nt, Artificial Sequence
  Description of Artificial Sequence: Synthetic oligonucleotide
  Sense strand starting at position 2556 of SEQ ID NO: 1562467
cguuaugugaguuaggaca

SEQ ID NO: 1749276 - RNA, 19 nt, Artificial Sequence
  Description of Artificial Sequence: Synthetic oligonucleotide
  Antisense strand to SEQ ID NO: 1749275
uguccuaacucacauaacg

SEQ ID NO: 1749277 - RNA, 19 nt, Artificial Sequence
  Description of Artificial Sequence: Synthetic oligonucleotide
  Sense strand starting at position 2564 of SEQ ID NO: 1562467
gaguuaggacacuguuucu

SEQ ID NO: 1749278 - RNA, 19 nt, Artificial Sequence
  Description of Artificial Sequence: Synthetic oligonucleotide
  Antisense strand to SEQ ID NO: 1749277
agaaacaguguccuaacuc

SEQ ID NO: 1749279 - RNA, 19 nt, Artificial Sequence
  Description of Artificial Sequence: Synthetic oligonucleotide
  Sense strand starting at position 2634 of SEQ ID NO: 1562467
gugaauggaucuuugaugu

SEQ ID NO: 1749280 - RNA, 19 nt, Artificial Sequence
  Description of Artificial Sequence: Synthetic oligonucleotide
  Antisense strand to SEQ ID NO: 1749279
acaucaaagauccauucac

SEQ ID NO: 1749281 - RNA, 19 nt, Artificial Sequence
  Description of Artificial Sequence: Synthetic oligonucleotide
  Sense strand starting at position 2653 of SEQ ID NO: 1562467
uuuggaacaucuguaaguu

SEQ ID NO: 1749282 - RNA, 19 nt, Artificial Sequence
  Description of Artificial Sequence: Synthetic oligonucleotide
  Antisense strand to SEQ ID NO: 1749281
aacuuacagauguuccaaa

SEQ ID NO: 1749283 - RNA, 19 nt, Artificial Sequence
  Description of Artificial Sequence: Synthetic oligonucleotide
  Sense strand starting at position 2654 of SEQ ID NO: 1562467
uuggaacaucuguaaguua

SEQ ID NO: 1749284 - RNA, 19 nt, Artificial Sequence
  Description of Artificial Sequence: Synthetic oligonucleotide
  Antisense strand to SEQ ID NO: 1749283
uaacuuacagauguuccaa

SEQ ID NO: 1749285 - RNA, 19 nt, Artificial Sequence
  Description of Artificial Sequence: Synthetic oligonucleotide
  Sense strand starting at position 2661 of SEQ ID NO: 1562467
aucuguaaguuauuagacu

SEQ ID NO: 1749286 - RNA, 19 nt, Artificial Sequence
  Description of Artificial Sequence: Synthetic oligonucleotide
  Antisense strand to SEQ ID NO: 1749285
agucuaauaacuuacagau

SEQ ID NO: 1749287 - RNA, 19 nt, Artificial Sequence
  Description of Artificial Sequence: Synthetic oligonucleotide
  Sense strand starting at position 2711 of SEQ ID NO: 1562467
uucugaaauuuguuucgca

SEQ ID NO: 1749288 - RNA, 19 nt, Artificial Sequence
  Description of Artificial Sequence: Synthetic oligonucleotide
  Antisense strand to SEQ ID NO: 1749287
ugcgaaacaaauuucagaa

SEQ ID NO: 1749289 - RNA, 19 nt, Artificial Sequence
  Description of Artificial Sequence: Synthetic oligonucleotide
  Sense strand starting at position 2712 of SEQ ID NO: 1562467
ucugaaauuuguuucgcaa

SEQ ID NO: 1749290 - RNA, 19 nt, Artificial Sequence
  Description of Artificial Sequence: Synthetic oligonucleotide
  Antisense strand to SEQ ID NO: 1749289
uugcgaaacaaauuucaga

SEQ ID NO: 1749291 - RNA, 19 nt, Artificial Sequence
  Description of Artificial Sequence: Synthetic oligonucleotide
  Sense strand starting at position 3227 of SEQ ID NO: 1562467
aaauaagauggauguucuu

SEQ ID NO: 1749292 - RNA, 19 nt, Artificial Sequence
  Description of Artificial Sequence: Synthetic oligonucleotide
  Antisense strand to SEQ ID NO: 1749291
aagaacauccaucuuauuu

SEQ ID NO: 1749293 - RNA, 19 nt, Artificial Sequence
  Description of Artificial Sequence: Synthetic oligonucleotide
  Sense strand starting at position 3233 of SEQ ID NO: 1562467
gauggauguucuuucucua

SEQ ID NO: 1749294 - RNA, 19 nt, Artificial Sequence
  Description of Artificial Sequence: Synthetic oligonucleotide
  Antisense strand to SEQ ID NO: 1749293
uagagaaagaacauccauc

SEQ ID NO: 1749295 - RNA, 19 nt, Artificial Sequence
  Description of Artificial Sequence: Synthetic oligonucleotide
  Sense strand starting at position 3297 of SEQ ID NO: 1562467
ggauuuaguguauguccau

SEQ ID NO: 1749296 - RNA, 19 nt, Artificial Sequence
  Description of Artificial Sequence: Synthetic oligonucleotide
  Antisense strand to SEQ ID NO: 1749295
auggacauacacuaaaucc

SEQ ID NO: 1749297 - RNA, 19 nt, Artificial Sequence
  Description of Artificial Sequence: Synthetic oligonucleotide
  Sense strand starting at position 3377 of SEQ ID NO: 1562467
agcaacauacgguguauuu

SEQ ID NO: 1749298 - RNA, 19 nt, Artificial Sequence
  Description of Artificial Sequence: Synthetic oligonucleotide
  Antisense strand to SEQ ID NO: 1749297
aaauacaccguauguugcu

SEQ ID NO: 1749299 - RNA, 19 nt, Artificial Sequence
  Description of Artificial Sequence: Synthetic oligonucleotide
  Sense strand starting at position 3474 of SEQ ID NO: 1562467
uuugauauaugguuagguu

SEQ ID NO: 1749300 - RNA, 19 nt, Artificial Sequence
  Description of Artificial Sequence: Synthetic oligonucleotide
  Antisense strand to SEQ ID NO: 1749299
aaccuaaccauauaucaaa

SEQ ID NO: 1749301 - RNA, 19 nt, Artificial Sequence
  Description of Artificial Sequence: Synthetic oligonucleotide
  Sense strand starting at position 3475 of SEQ ID NO: 1562467
uugauauaugguuagguua

SEQ ID NO: 1749302 - RNA, 19 nt, Artificial Sequence
  Description of Artificial Sequence: Synthetic oligonucleotide
  Antisense strand to SEQ ID NO: 1749301
uaaccuaaccauauaucaa

SEQ ID NO: 1749303 - RNA, 19 nt, Artificial Sequence
  Description of Artificial Sequence: Synthetic oligonucleotide
  Sense strand starting at position 3816 of SEQ ID NO: 1562467
ccagcugacuucucugaag

SEQ ID NO: 1749304 - RNA, 19 nt, Artificial Sequence
  Description of Artificial Sequence: Synthetic oligonucleotide
  Antisense strand to SEQ ID NO: 1749303
cuucagagaagucagcugg

SEQ ID NO: 1749305 - RNA, 19 nt, Artificial Sequence
  Description of Artificial Sequence: Synthetic oligonucleotide
  Sense strand starting at position 3834 of SEQ ID NO: 1562467
guuauuggugaggaauacu

SEQ ID NO: 1749306 - RNA, 19 nt, Artificial Sequence
  Description of Artificial Sequence: Synthetic oligonucleotide
  Antisense strand to SEQ ID NO: 1749305
aguauuccucaccaauaac

SEQ ID NO: 1749307 - RNA, 19 nt, Artificial Sequence
  Description of Artificial Sequence: Synthetic oligonucleotide
  Sense strand starting at position 3980 of SEQ ID NO: 1562467
aggaauuucuuugacuaca

SEQ ID NO: 1749308 - RNA, 19 nt, Artificial Sequence
  Description of Artificial Sequence: Synthetic oligonucleotide
  Antisense strand to SEQ ID NO: 1749307
uguagucaaagaaauuccu

SEQ ID NO: 1749309 - RNA, 19 nt, Artificial Sequence
  Description of Artificial Sequence: Synthetic oligonucleotide
  Sense strand starting at position 100 of SEQ ID NO: 1562468
cugucuaugcuauaaauga

SEQ ID NO: 1749310 - RNA, 19 nt, Artificial Sequence
  Description of Artificial Sequence: Synthetic oligonucleotide
  Antisense strand to SEQ ID NO: 1749309
ucauuuauagcauagacag

SEQ ID NO: 1749311 - RNA, 19 nt, Artificial Sequence
  Description of Artificial Sequence: Synthetic oligonucleotide
  Sense strand starting at position 171 of SEQ ID NO: 1562468
gacauaugugcaugcugau

SEQ ID NO: 1749312 - RNA, 19 nt, Artificial Sequence
  Description of Artificial Sequence: Synthetic oligonucleotide
  Antisense strand to SEQ ID NO: 1749311
aucagcaugcacauauguc

SEQ ID NO: 1749313 - RNA, 19 nt, Artificial Sequence
  Description of Artificial Sequence: Synthetic oligonucleotide
  Sense strand starting at position 183 of SEQ ID NO: 1562468
ugcugaucuuugcuuaaga

SEQ ID NO: 1749314 - RNA, 19 nt, Artificial Sequence
  Description of Artificial Sequence: Synthetic oligonucleotide
  Antisense strand to SEQ ID NO: 1749313
ucuuaagcaaagaucagca

SEQ ID NO: 1749315 - RNA, 19 nt, Artificial Sequence
  Description of Artificial Sequence: Synthetic oligonucleotide
  Sense strand starting at position 184 of SEQ ID NO: 1562468
gcugaucuuugcuuaagaa

SEQ ID NO: 1749316 - RNA, 19 nt, Artificial Sequence
  Description of Artificial Sequence: Synthetic oligonucleotide
  Antisense strand to SEQ ID NO: 1749315
uucuuaagcaaagaucagc

SEQ ID NO: 1749317 - RNA, 19 nt, Artificial Sequence
  Description of Artificial Sequence: Synthetic oligonucleotide
  Sense strand starting at position 185 of SEQ ID NO: 1562468
cugaucuuugcuuaagaac

SEQ ID NO: 1749318 - RNA, 19 nt, Artificial Sequence
  Description of Artificial Sequence: Synthetic oligonucleotide
  Antisense strand to SEQ ID NO: 1749317
guucuuaagcaaagaucag

SEQ ID NO: 1749319 - RNA, 19 nt, Artificial Sequence
  Description of Artificial Sequence: Synthetic oligonucleotide
  Sense strand starting at position 213 of SEQ ID NO: 1562468
aacgaauugggcuaguauu

SEQ ID NO: 1749320 - RNA, 19 nt, Artificial Sequence
  Description of Artificial Sequence: Synthetic oligonucleotide
  Antisense strand to SEQ ID NO: 1749319
aauacuagcccaauucguu

SEQ ID NO: 1749321 - RNA, 19 nt, Artificial Sequence
  Description of Artificial Sequence: Synthetic oligonucleotide
  Sense strand starting at position 305 of SEQ ID NO: 1562468
agcagaaucuuaucaagac

SEQ ID NO: 1749322 - RNA, 19 nt, Artificial Sequence
  Description of Artificial Sequence: Synthetic oligonucleotide
  Antisense strand to SEQ ID NO: 1749321
gucuugauaagauucugcu

SEQ ID NO: 1749323 - RNA, 19 nt, Artificial Sequence
  Description of Artificial Sequence: Synthetic oligonucleotide
  Sense strand starting at position 473 of SEQ ID NO: 1562468
ccugcugaagaaugauaga

SEQ ID NO: 1749324 - RNA, 19 nt, Artificial Sequence
  Description of Artificial Sequence: Synthetic oligonucleotide
  Antisense strand to SEQ ID NO: 1749323
ucuaucauucuucagcagg

SEQ ID NO: 1749325 - RNA, 19 nt, Artificial Sequence
  Description of Artificial Sequence: Synthetic oligonucleotide
  Sense strand starting at position 514 of SEQ ID NO: 1562468
accaacuucugggcuuaaa

SEQ ID NO: 1749326 - RNA, 19 nt, Artificial Sequence
  Description of Artificial Sequence: Synthetic oligonucleotide
  Antisense strand to SEQ ID NO: 1749325
uuuaagcccagaaguuggu

SEQ ID NO: 1749327 - RNA, 19 nt, Artificial Sequence
  Description of Artificial Sequence: Synthetic oligonucleotide
  Sense strand starting at position 787 of SEQ ID NO: 1562468
guccaaacuugucuggaca

SEQ ID NO: 1749328 - RNA, 19 nt, Artificial Sequence
  Description of Artificial Sequence: Synthetic oligonucleotide
  Antisense strand to SEQ ID NO: 1749327
uguccagacaaguuuggac

SEQ ID NO: 1749329 - RNA, 19 nt, Artificial Sequence
  Description of Artificial Sequence: Synthetic oligonucleotide
  Sense strand starting at position 790 of SEQ ID NO: 1562468
caaacuugucuggacaguu

SEQ ID NO: 1749330 - RNA, 19 nt, Artificial Sequence
  Description of Artificial Sequence: Synthetic oligonucleotide
  Antisense strand to SEQ ID NO: 1749329
aacuguccagacaaguuug

SEQ ID NO: 1749331 - RNA, 19 nt, Artificial Sequence
  Description of Artificial Sequence: Synthetic oligonucleotide
  Sense strand starting at position 839 of SEQ ID NO: 1562468
ucaugugaguguuuacuau

SEQ ID NO: 1749332 - RNA, 19 nt, Artificial Sequence
  Description of Artificial Sequence: Synthetic oligonucleotide
  Antisense strand to SEQ ID NO: 1749331
auaguaaacacucacauga

SEQ ID NO: 1749333 - RNA, 19 nt, Artificial Sequence
  Description of Artificial Sequence: Synthetic oligonucleotide
  Sense strand starting at position 846 of SEQ ID NO: 1562468
aguguuuacuaucuaaaca

SEQ ID NO: 1749334 - RNA, 19 nt, Artificial Sequence
  Description of Artificial Sequence: Synthetic oligonucleotide
  Antisense strand to SEQ ID NO: 1749333
uguuuagauaguaaacacu

SEQ ID NO: 1749335 - RNA, 19 nt, Artificial Sequence
  Description of Artificial Sequence: Synthetic oligonucleotide
  Sense strand starting at position 931 of SEQ ID NO: 1562468
guuauucuaccaggcuauu

SEQ ID NO: 1749336 - RNA, 19 nt, Artificial Sequence
  Description of Artificial Sequence: Synthetic oligonucleotide
  Antisense strand to SEQ ID NO: 1749335
aauagccugguagaauaac

SEQ ID NO: 1749337 - RNA, 19 nt, Artificial Sequence
  Description of Artificial Sequence: Synthetic oligonucleotide
  Sense strand starting at position 1276 of SEQ ID NO: 1562468
ugcaaaugaguuuaacacu

SEQ ID NO: 1749338 - RNA, 19 nt, Artificial Sequence
  Description of Artificial Sequence: Synthetic oligonucleotide
  Antisense strand to SEQ ID NO: 1749337
aguguuaaacucauuugca

SEQ ID NO: 1749339 - RNA, 19 nt, Artificial Sequence
  Description of Artificial Sequence: Synthetic oligonucleotide
  Sense strand starting at position 1282 of SEQ ID NO: 1562468
ugaguuuaacacugauagu

SEQ ID NO: 1749340 - RNA, 19 nt, Artificial Sequence
  Description of Artificial Sequence: Synthetic oligonucleotide
  Antisense strand to SEQ ID NO: 1749339
acuaucaguguuaaacuca

SEQ ID NO: 1749341 - RNA, 19 nt, Artificial Sequence
  Description of Artificial Sequence: Synthetic oligonucleotide
  Sense strand starting at position 1452 of SEQ ID NO: 1562468
uggauauccugcucaccga

SEQ ID NO: 1749342 - RNA, 19 nt, Artificial Sequence
  Description of Artificial Sequence: Synthetic oligonucleotide
  Antisense strand to SEQ ID NO: 1749341
ucggugagcaggauaucca

SEQ ID NO: 1749343 - RNA, 19 nt, Artificial Sequence
  Description of Artificial Sequence: Synthetic oligonucleotide
  Sense strand starting at position 1453 of SEQ ID NO: 1562468
ggauauccugcucaccgau

SEQ ID NO: 1749344 - RNA, 19 nt, Artificial Sequence
  Description of Artificial Sequence: Synthetic oligonucleotide
  Antisense strand to SEQ ID NO: 1749343
aucggugagcaggauaucc

SEQ ID NO: 1749345 - RNA, 19 nt, Artificial Sequence
  Description of Artificial Sequence: Synthetic oligonucleotide
  Sense strand starting at position 2113 of SEQ ID NO: 1562468
gggauucguccgcagugga

SEQ ID NO: 1749346 - RNA, 19 nt, Artificial Sequence
  Description of Artificial Sequence: Synthetic oligonucleotide
  Antisense strand to SEQ ID NO: 1749345
uccacugcggacgaauccc

SEQ ID NO: 1749347 - RNA, 19 nt, Artificial Sequence
  Description of Artificial Sequence: Synthetic oligonucleotide
  Sense strand starting at position 2605 of SEQ ID NO: 1562468
gcaauuguacccuaaaguc

SEQ ID NO: 1749348 - RNA, 19 nt, Artificial Sequence
  Description of Artificial Sequence: Synthetic oligonucleotide
  Antisense strand to SEQ ID NO: 1749347
gacuuuaggguacaauugc

SEQ ID NO: 1749349 - RNA, 19 nt, Artificial Sequence
  Description of Artificial Sequence: Synthetic oligonucleotide
  Sense strand starting at position 2900 of SEQ ID NO: 1562468
acugcaaaugugcaaagau

SEQ ID NO: 1749350 - RNA, 19 nt, Artificial Sequence
  Description of Artificial Sequence: Synthetic oligonucleotide
  Antisense strand to SEQ ID NO: 1749349
aucuuugcacauuugcagu

SEQ ID NO: 1749351 - RNA, 19 nt, Artificial Sequence
  Description of Artificial Sequence: Synthetic oligonucleotide
  Sense strand starting at position 2981 of SEQ ID NO: 1562468
ccgcgugugcgaguguaaa

SEQ ID NO: 1749352 - RNA, 19 nt, Artificial Sequence
  Description of Artificial Sequence: Synthetic oligonucleotide
  Antisense strand to SEQ ID NO: 1749351
uuuacacucgcacacgcgg

SEQ ID NO: 1749353 - RNA, 19 nt, Artificial Sequence
  Description of Artificial Sequence: Synthetic oligonucleotide
  Sense strand starting at position 2983 of SEQ ID NO: 1562468
gcgugugcgaguguaaauu

SEQ ID NO: 1749354 - RNA, 19 nt, Artificial Sequence
  Description of Artificial Sequence: Synthetic oligonucleotide
  Antisense strand to SEQ ID NO: 1749353
aauuuacacucgcacacgc

SEQ ID NO: 1749355 - RNA, 19 nt, Artificial Sequence
  Description of Artificial Sequence: Synthetic oligonucleotide
  Sense strand starting at position 2994 of SEQ ID NO: 1562468
uguaaauugaagugaggga

SEQ ID NO: 1749356 - RNA, 19 nt, Artificial Sequence
  Description of Artificial Sequence: Synthetic oligonucleotide
  Antisense strand to SEQ ID NO: 1749355
ucccucacuucaauuuaca

SEQ ID NO: 1749357 - RNA, 19 nt, Artificial Sequence
  Description of Artificial Sequence: Synthetic oligonucleotide
  Sense strand starting at position 3065 of SEQ ID NO: 1562468
cguuauuucuccuagaagg

SEQ ID NO: 1749358 - RNA, 19 nt, Artificial Sequence
  Description of Artificial Sequence: Synthetic oligonucleotide
  Antisense strand to SEQ ID NO: 1749357
ccuucuaggagaaauaacg

SEQ ID NO: 1749359 - RNA, 19 nt, Artificial Sequence
  Description of Artificial Sequence: Synthetic oligonucleotide
  Sense strand starting at position 3234 of SEQ ID NO: 1562468
cucucuggcuccuuagaaa

SEQ ID NO: 1749360 - RNA, 19 nt, Artificial Sequence
  Description of Artificial Sequence: Synthetic oligonucleotide
  Antisense strand to SEQ ID NO: 1749359
uuucuaaggagccagagag

SEQ ID NO: 1749361 - RNA, 19 nt, Artificial Sequence
  Description of Artificial Sequence: Synthetic oligonucleotide
  Sense strand starting at position 3293 of SEQ ID NO: 1562468
ccuuccuuaucagugagga

SEQ ID NO: 1749362 - RNA, 19 nt, Artificial Sequence
  Description of Artificial Sequence: Synthetic oligonucleotide
  Antisense strand to SEQ ID NO: 1749361
uccucacugauaaggaagg

SEQ ID NO: 1749363 - RNA, 19 nt, Artificial Sequence
  Description of Artificial Sequence: Synthetic oligonucleotide
  Sense strand starting at position 3294 of SEQ ID NO: 1562468
cuuccuuaucagugaggac

SEQ ID NO: 1749364 - RNA, 19 nt, Artificial Sequence
  Description of Artificial Sequence: Synthetic oligonucleotide
  Antisense strand to SEQ ID NO: 1749363
guccucacugauaaggaag

SEQ ID NO: 1749365 - RNA, 19 nt, Artificial Sequence
  Description of Artificial Sequence: Synthetic oligonucleotide
  Sense strand starting at position 3343 of SEQ ID NO: 1562468
gguagaaauguagagcuca

SEQ ID NO: 1749366 - RNA, 19 nt, Artificial Sequence
  Description of Artificial Sequence: Synthetic oligonucleotide
  Antisense strand to SEQ ID NO: 1749365
ugagcucuacauuucuacc

SEQ ID NO: 1749367 - RNA, 19 nt, Artificial Sequence
  Description of Artificial Sequence: Synthetic oligonucleotide
  Sense strand starting at position 3462 of SEQ ID NO: 1562468
gagauaccgucugcgauuu

SEQ ID NO: 1749368 - RNA, 19 nt, Artificial Sequence
  Description of Artificial Sequence: Synthetic oligonucleotide
  Antisense strand to SEQ ID NO: 1749367
aaaucgcagacgguaucuc

SEQ ID NO: 1749369 - RNA, 19 nt, Artificial Sequence
  Description of Artificial Sequence: Synthetic oligonucleotide
  Sense strand starting at position 3491 of SEQ ID NO: 1562468
ggcagagcgcuuuauacag

SEQ ID NO: 1749370 - RNA, 19 nt, Artificial Sequence
  Description of Artificial Sequence: Synthetic oligonucleotide
  Antisense strand to SEQ ID NO: 1749369
cuguauaaagcgcucugcc

SEQ ID NO: 1749371 - RNA, 19 nt, Artificial Sequence
  Description of Artificial Sequence: Synthetic oligonucleotide
  Sense strand starting at position 3497 of SEQ ID NO: 1562468
gcgcuuuauacagaugauu

SEQ ID NO: 1749372 - RNA, 19 nt, Artificial Sequence
  Description of Artificial Sequence: Synthetic oligonucleotide
  Antisense strand to SEQ ID NO: 1749371
aaucaucuguauaaagcgc

SEQ ID NO: 1749373 - RNA, 19 nt, Artificial Sequence
  Description of Artificial Sequence: Synthetic oligonucleotide
  Sense strand starting at position 3499 of SEQ ID NO: 1562468
gcuuuauacagaugauucg

SEQ ID NO: 1749374 - RNA, 19 nt, Artificial Sequence
  Description of Artificial Sequence: Synthetic oligonucleotide
  Antisense strand to SEQ ID NO: 1749373
cgaaucaucuguauaaagc

SEQ ID NO: 1749375 - RNA, 19 nt, Artificial Sequence
  Description of Artificial Sequence: Synthetic oligonucleotide
  Sense strand starting at position 3505 of SEQ ID NO: 1562468
uacagaugauucguccacu

SEQ ID NO: 1749376 - RNA, 19 nt, Artificial Sequence
  Description of Artificial Sequence: Synthetic oligonucleotide
  Antisense strand to SEQ ID NO: 1749375
aguggacgaaucaucugua

SEQ ID NO: 1749377 - RNA, 19 nt, Artificial Sequence
  Description of Artificial Sequence: Synthetic oligonucleotide
  Sense strand starting at position 3506 of SEQ ID NO: 1562468
acagaugauucguccacuu

SEQ ID NO: 1749378 - RNA, 19 nt, Artificial Sequence
  Description of Artificial Sequence: Synthetic oligonucleotide
  Antisense strand to SEQ ID NO: 1749377
aaguggacgaaucaucugu

SEQ ID NO: 1749379 - RNA, 19 nt, Artificial Sequence
  Description of Artificial Sequence: Synthetic oligonucleotide
  Sense strand starting at position 3587 of SEQ ID NO: 1562468
gcugaacugccuuaagcaa

SEQ ID NO: 1749380 - RNA, 19 nt, Artificial Sequence
  Description of Artificial Sequence: Synthetic oligonucleotide
  Antisense strand to SEQ ID NO: 1749379
uugcuuaaggcaguucagc

SEQ ID NO: 1749381 - RNA, 19 nt, Artificial Sequence
  Description of Artificial Sequence: Synthetic oligonucleotide
  Sense strand starting at position 3800 of SEQ ID NO: 1562468
ugugaaagaccgugacuca

SEQ ID NO: 1749382 - RNA, 19 nt, Artificial Sequence
  Description of Artificial Sequence: Synthetic oligonucleotide
  Antisense strand to SEQ ID NO: 1749381
ugagucacggucuuucaca

SEQ ID NO: 1749383 - RNA, 19 nt, Artificial Sequence
  Description of Artificial Sequence: Synthetic oligonucleotide
  Sense strand starting at position 3801 of SEQ ID NO: 1562468
gugaaagaccgugacucau

SEQ ID NO: 1749384 - RNA, 19 nt, Artificial Sequence
  Description of Artificial Sequence: Synthetic oligonucleotide
  Antisense strand to SEQ ID NO: 1749383
augagucacggucuuucac

SEQ ID NO: 1749385 - RNA, 19 nt, Artificial Sequence
  Description of Artificial Sequence: Synthetic oligonucleotide
  Sense strand starting at position 3854 of SEQ ID NO: 1562468
ugauaaaugcuacacagua

SEQ ID NO: 1749386 - RNA, 19 nt, Artificial Sequence
  Description of Artificial Sequence: Synthetic oligonucleotide
  Antisense strand to SEQ ID NO: 1749385
uacuguguagcauuuauca

SEQ ID NO: 1749387 - RNA, 19 nt, Artificial Sequence
  Description of Artificial Sequence: Synthetic oligonucleotide
  Sense strand starting at position 3889 of SEQ ID NO: 1562468
aguucuacauccucagauu

SEQ ID NO: 1749388 - RNA, 19 nt, Artificial Sequence
  Description of Artificial Sequence: Synthetic oligonucleotide
  Antisense strand to SEQ ID NO: 1749387
aaucugaggauguagaacu

SEQ ID NO: 1749389 - RNA, 19 nt, Artificial Sequence
  Description of Artificial Sequence: Synthetic oligonucleotide
  Sense strand starting at position 193 of SEQ ID NO: 1562469
cuauguuucuuucuguaaa

SEQ ID NO: 1749390 - RNA, 19 nt, Artificial Sequence
  Description of Artificial Sequence: Synthetic oligonucleotide
  Antisense strand to SEQ ID NO: 1749389
uuuacagaaagaaacauag

SEQ ID NO: 1749391 - RNA, 19 nt, Artificial Sequence
  Description of Artificial Sequence: Synthetic oligonucleotide
  Sense strand starting at position 358 of SEQ ID NO: 1562469
aggccuauuaagugcuaga

SEQ ID NO: 1749392 - RNA, 19 nt, Artificial Sequence
  Description of Artificial Sequence: Synthetic oligonucleotide
  Antisense strand to SEQ ID NO: 1749391
ucuagcacuuaauaggccu

SEQ ID NO: 1749393 - RNA, 19 nt, Artificial Sequence
  Description of Artificial Sequence: Synthetic oligonucleotide
  Sense strand starting at position 363 of SEQ ID NO: 1562469
uauuaagugcuagacagua

SEQ ID NO: 1749394 - RNA, 19 nt, Artificial Sequence
  Description of Artificial Sequence: Synthetic oligonucleotide
  Antisense strand to SEQ ID NO: 1749393
uacugucuagcacuuaaua

SEQ ID NO: 1749395 - RNA, 19 nt, Artificial Sequence
  Description of Artificial Sequence: Synthetic oligonucleotide
  Sense strand starting at position 376 of SEQ ID NO: 1562469
acaguacaauguucuagau

SEQ ID NO: 1749396 - RNA, 19 nt, Artificial Sequence
  Description of Artificial Sequence: Synthetic oligonucleotide
  Antisense strand to SEQ ID NO: 1749395
aucuagaacauuguacugu

SEQ ID NO: 1749397 - RNA, 19 nt, Artificial Sequence
  Description of Artificial Sequence: Synthetic oligonucleotide
  Sense strand starting at position 386 of SEQ ID NO: 1562469
guucuagaugcuggauaca

SEQ ID NO: 1749398 - RNA, 19 nt, Artificial Sequence
  Description of Artificial Sequence: Synthetic oligonucleotide
  Antisense strand to SEQ ID NO: 1749397
uguauccagcaucuagaac

SEQ ID NO: 1749399 - RNA, 19 nt, Artificial Sequence
  Description of Artificial Sequence: Synthetic oligonucleotide
  Sense strand starting at position 406 of SEQ ID NO: 1562469
aacagaggugccuguaugu

SEQ ID NO: 1749400 - RNA, 19 nt, Artificial Sequence
  Description of Artificial Sequence: Synthetic oligonucleotide
  Antisense strand to SEQ ID NO: 1749399
acauacaggcaccucuguu

SEQ ID NO: 1749401 - RNA, 19 nt, Artificial Sequence
  Description of Artificial Sequence: Synthetic oligonucleotide
  Sense strand starting at position 416 of SEQ ID NO: 1562469
ccuguaugugcacauauaa

SEQ ID NO: 1749402 - RNA, 19 nt, Artificial Sequence
  Description of Artificial Sequence: Synthetic oligonucleotide
  Antisense strand to SEQ ID NO: 1749401
uuauaugugcacauacagg

SEQ ID NO: 1749403 - RNA, 19 nt, Artificial Sequence
  Description of Artificial Sequence: Synthetic oligonucleotide
  Sense strand starting at position 445 of SEQ ID NO: 1562469
guguauguucaugauugua

SEQ ID NO: 1749404 - RNA, 19 nt, Artificial Sequence
  Description of Artificial Sequence: Synthetic oligonucleotide
  Antisense strand to SEQ ID NO: 1749403
uacaaucaugaacauacac

SEQ ID NO: 1749405 - RNA, 19 nt, Artificial Sequence
  Description of Artificial Sequence: Synthetic oligonucleotide
  Sense strand starting at position 457 of SEQ ID NO: 1562469
gauuguaagcaugaguaca

SEQ ID NO: 1749406 - RNA, 19 nt, Artificial Sequence
  Description of Artificial Sequence: Synthetic oligonucleotide
  Antisense strand to SEQ ID NO: 1749405
uguacucaugcuuacaauc

SEQ ID NO: 1749407 - RNA, 19 nt, Artificial Sequence
  Description of Artificial Sequence: Synthetic oligonucleotide
  Sense strand starting at position 473 of SEQ ID NO: 1562469
acaugugcuuaugugaaca

SEQ ID NO: 1749408 - RNA, 19 nt, Artificial Sequence
  Description of Artificial Sequence: Synthetic oligonucleotide
  Antisense strand to SEQ ID NO: 1749407
uguucacauaagcacaugu

SEQ ID NO: 1749409 - RNA, 19 nt, Artificial Sequence
  Description of Artificial Sequence: Synthetic oligonucleotide
  Sense strand starting at position 478 of SEQ ID NO: 1562469
ugcuuaugugaacauauaa

SEQ ID NO: 1749410 - RNA, 19 nt, Artificial Sequence
  Description of Artificial Sequence: Synthetic oligonucleotide
  Antisense strand to SEQ ID NO: 1749409
uuauauguucacauaagca

SEQ ID NO: 1749411 - RNA, 19 nt, Artificial Sequence
  Description of Artificial Sequence: Synthetic oligonucleotide
  Sense strand starting at position 623 of SEQ ID NO: 1562469
gcagaaguugcagggaguu

SEQ ID NO: 1749412 - RNA, 19 nt, Artificial Sequence
  Description of Artificial Sequence: Synthetic oligonucleotide
  Antisense strand to SEQ ID NO: 1749411
aacucccugcaacuucugc

SEQ ID NO: 1749413 - RNA, 19 nt, Artificial Sequence
  Description of Artificial Sequence: Synthetic oligonucleotide
  Sense strand starting at position 969 of SEQ ID NO: 1562469
auauauucugcagggaaua

SEQ ID NO: 1749414 - RNA, 19 nt, Artificial Sequence
  Description of Artificial Sequence: Synthetic oligonucleotide
  Antisense strand to SEQ ID NO: 1749413
uauucccugcagaauauau

SEQ ID NO: 1749415 - RNA, 19 nt, Artificial Sequence
  Description of Artificial Sequence: Synthetic oligonucleotide
  Sense strand starting at position 971 of SEQ ID NO: 1562469
auauucugcagggaauagu

SEQ ID NO: 1749416 - RNA, 19 nt, Artificial Sequence
  Description of Artificial Sequence: Synthetic oligonucleotide
  Antisense strand to SEQ ID NO: 1749415
acuauucccugcagaauau

SEQ ID NO: 1749417 - RNA, 19 nt, Artificial Sequence
  Description of Artificial Sequence: Synthetic oligonucleotide
  Sense strand starting at position 980 of SEQ ID NO: 1562469
agggaauaguuacugcuuu

SEQ ID NO: 1749418 - RNA, 19 nt, Artificial Sequence
  Description of Artificial Sequence: Synthetic oligonucleotide
  Antisense strand to SEQ ID NO: 1749417
aaagcaguaacuauucccu

SEQ ID NO: 1749419 - RNA, 19 nt, Artificial Sequence
  Description of Artificial Sequence: Synthetic oligonucleotide
  Sense strand starting at position 1026 of SEQ ID NO: 1562469
aagagagugaaguggucuu

SEQ ID NO: 1749420 - RNA, 19 nt, Artificial Sequence
  Description of Artificial Sequence: Synthetic oligonucleotide
  Antisense strand to SEQ ID NO: 1749419
aagaccacuucacucucuu

SEQ ID NO: 1749421 - RNA, 19 nt, Artificial Sequence
  Description of Artificial Sequence: Synthetic oligonucleotide
  Sense strand starting at position 1422 of SEQ ID NO: 1562469
aacggcugucaguaaguua

SEQ ID NO: 1749422 - RNA, 19 nt, Artificial Sequence
  Description of Artificial Sequence: Synthetic oligonucleotide
  Antisense strand to SEQ ID NO: 1749421
uaacuuacugacagccguu

SEQ ID NO: 1749423 - RNA, 19 nt, Artificial Sequence
  Description of Artificial Sequence: Synthetic oligonucleotide
  Sense strand starting at position 1429 of SEQ ID NO: 1562469
gucaguaaguuaccaaguu

SEQ ID NO: 1749424 - RNA, 19 nt, Artificial Sequence
  Description of Artificial Sequence: Synthetic oligonucleotide
  Antisense strand to SEQ ID NO: 1749423
aacuugguaacuuacugac

SEQ ID NO: 1749425 - RNA, 19 nt, Artificial Sequence
  Description of Artificial Sequence: Synthetic oligonucleotide
  Sense strand starting at position 1447 of SEQ ID NO: 1562469
uaaccaggucccugaaagu

SEQ ID NO: 1749426 - RNA, 19 nt, Artificial Sequence
  Description of Artificial Sequence: Synthetic oligonucleotide
  Antisense strand to SEQ ID NO: 1749425
acuuucagggaccugguua

SEQ ID NO: 1749427 - RNA, 19 nt, Artificial Sequence
  Description of Artificial Sequence: Synthetic oligonucleotide
  Sense strand starting at position 1491 of SEQ ID NO: 1562469
uggagaagucacuguccuu

SEQ ID NO: 1749428 - RNA, 19 nt, Artificial Sequence
  Description of Artificial Sequence: Synthetic oligonucleotide
  Antisense strand to SEQ ID NO: 1749427
aaggacagugacuucucca

SEQ ID NO: 1749429 - RNA, 19 nt, Artificial Sequence
  Description of Artificial Sequence: Synthetic oligonucleotide
  Sense strand starting at position 2355 of SEQ ID NO: 1562469
gguccuacuugauugauag

SEQ ID NO: 1749430 - RNA, 19 nt, Artificial Sequence
  Description of Artificial Sequence: Synthetic oligonucleotide
  Antisense strand to SEQ ID NO: 1749429
cuaucaaucaaguaggacc

SEQ ID NO: 1749431 - RNA, 19 nt, Artificial Sequence
  Description of Artificial Sequence: Synthetic oligonucleotide
  Sense strand starting at position 2356 of SEQ ID NO: 1562469
guccuacuugauugauagu

SEQ ID NO: 1749432 - RNA, 19 nt, Artificial Sequence
  Description of Artificial Sequence: Synthetic oligonucleotide
  Antisense strand to SEQ ID NO: 1749431
acuaucaaucaaguaggac

SEQ ID NO: 1749433 - RNA, 19 nt, Artificial Sequence
  Description of Artificial Sequence: Synthetic oligonucleotide
  Sense strand starting at position 2506 of SEQ ID NO: 1562469
acgcuaauaccagaguuag

SEQ ID NO: 1749434 - RNA, 19 nt, Artificial Sequence
  Description of Artificial Sequence: Synthetic oligonucleotide
  Antisense strand to SEQ ID NO: 1749433
cuaacucugguauuagcgu

SEQ ID NO: 1749435 - RNA, 19 nt, Artificial Sequence
  Description of Artificial Sequence: Synthetic oligonucleotide
  Sense strand starting at position 2516 of SEQ ID NO: 1562469
cagaguuaggccgauugga

SEQ ID NO: 1749436 - RNA, 19 nt, Artificial Sequence
  Description of Artificial Sequence: Synthetic oligonucleotide
  Antisense strand to SEQ ID NO: 1749435
uccaaucggccuaacucug

SEQ ID NO: 1749437 - RNA, 19 nt, Artificial Sequence
  Description of Artificial Sequence: Synthetic oligonucleotide
  Sense strand starting at position 2558 of SEQ ID NO: 1562469
auguuuauuuagcaaagag

SEQ ID NO: 1749438 - RNA, 19 nt, Artificial Sequence
  Description of Artificial Sequence: Synthetic oligonucleotide
  Antisense strand to SEQ ID NO: 1749437
cucuuugcuaaauaaacau

SEQ ID NO: 1749439 - RNA, 19 nt, Artificial Sequence
  Description of Artificial Sequence: Synthetic oligonucleotide
  Sense strand starting at position 2598 of SEQ ID NO: 1562469
aauuguggagucgguguaa

SEQ ID NO: 1749440 - RNA, 19 nt, Artificial Sequence
  Description of Artificial Sequence: Synthetic oligonucleotide
  Antisense strand to SEQ ID NO: 1749439
uuacaccgacuccacaauu

SEQ ID NO: 1749441 - RNA, 19 nt, Artificial Sequence
  Description of Artificial Sequence: Synthetic oligonucleotide
  Sense strand starting at position 2602 of SEQ ID NO: 1562469
guggagucgguguaauuag

SEQ ID NO: 1749442 - RNA, 19 nt, Artificial Sequence
  Description of Artificial Sequence: Synthetic oligonucleotide
  Antisense strand to SEQ ID NO: 1749441
cuaauuacaccgacuccac

SEQ ID NO: 1749443 - RNA, 19 nt, Artificial Sequence
  Description of Artificial Sequence: Synthetic oligonucleotide
  Sense strand starting at position 2609 of SEQ ID NO: 1562469
cgguguaauuaguuauuag

SEQ ID NO: 1749444 - RNA, 19 nt, Artificial Sequence
  Description of Artificial Sequence: Synthetic oligonucleotide
  Antisense strand to SEQ ID NO: 1749443
cuaauaacuaauuacaccg

SEQ ID NO: 1749445 - RNA, 19 nt, Artificial Sequence
  Description of Artificial Sequence: Synthetic oligonucleotide
  Sense strand starting at position 2610 of SEQ ID NO: 1562469
gguguaauuaguuauuagc

SEQ ID NO: 1749446 - RNA, 19 nt, Artificial Sequence
  Description of Artificial Sequence: Synthetic oligonucleotide
  Antisense strand to SEQ ID NO: 1749445
gcuaauaacuaauuacacc

SEQ ID NO: 1749447 - RNA, 19 nt, Artificial Sequence
  Description of Artificial Sequence: Synthetic oligonucleotide
  Sense strand starting at position 2676 of SEQ ID NO: 1562469
auucgcauuucaucggaga

SEQ ID NO: 1749448 - RNA, 19 nt, Artificial Sequence
  Description of Artificial Sequence: Synthetic oligonucleotide
  Antisense strand to SEQ ID NO: 1749447
ucuccgaugaaaugcgaau

SEQ ID NO: 1749449 - RNA, 19 nt, Artificial Sequence
  Description of Artificial Sequence: Synthetic oligonucleotide
  Sense strand starting at position 2677 of SEQ ID NO: 1562469
uucgcauuucaucggagau

SEQ ID NO: 1749450 - RNA, 19 nt, Artificial Sequence
  Description of Artificial Sequence: Synthetic oligonucleotide
  Antisense strand to SEQ ID NO: 1749449
aucuccgaugaaaugcgaa

SEQ ID NO: 1749451 - RNA, 19 nt, Artificial Sequence
  Description of Artificial Sequence: Synthetic oligonucleotide
  Sense strand starting at position 2784 of SEQ ID NO: 1562469
auucauugagguggcaaga

SEQ ID NO: 1749452 - RNA, 19 nt, Artificial Sequence
  Description of Artificial Sequence: Synthetic oligonucleotide
  Antisense strand to SEQ ID NO: 1749451
ucuugccaccucaaugaau

SEQ ID NO: 1749453 - RNA, 19 nt, Artificial Sequence
  Description of Artificial Sequence: Synthetic oligonucleotide
  Sense strand starting at position 2833 of SEQ ID NO: 1562469
gccuuuaucaaagaggagu

SEQ ID NO: 1749454 - RNA, 19 nt, Artificial Sequence
  Description of Artificial Sequence: Synthetic oligonucleotide
  Antisense strand to SEQ ID NO: 1749453
acuccucuuugauaaaggc

SEQ ID NO: 1749455 - RNA, 19 nt, Artificial Sequence
  Description of Artificial Sequence: Synthetic oligonucleotide
  Sense strand starting at position 2922 of SEQ ID NO: 1562469
uuaggauaaucaugagaag

SEQ ID NO: 1749456 - RNA, 19 nt, Artificial Sequence
  Description of Artificial Sequence: Synthetic oligonucleotide
  Antisense strand to SEQ ID NO: 1749455
cuucucaugauuauccuaa

SEQ ID NO: 1749457 - RNA, 19 nt, Artificial Sequence
  Description of Artificial Sequence: Synthetic oligonucleotide
  Sense strand starting at position 2925 of SEQ ID NO: 1562469
ggauaaucaugagaaggga

SEQ ID NO: 1749458 - RNA, 19 nt, Artificial Sequence
  Description of Artificial Sequence: Synthetic oligonucleotide
  Antisense strand to SEQ ID NO: 1749457
ucccuucucaugauuaucc

SEQ ID NO: 1749459 - RNA, 19 nt, Artificial Sequence
  Description of Artificial Sequence: Synthetic oligonucleotide
  Sense strand starting at position 2938 of SEQ ID NO: 1562469
aagggauccuuugucccua

SEQ ID NO: 1749460 - RNA, 19 nt, Artificial Sequence
  Description of Artificial Sequence: Synthetic oligonucleotide
  Antisense strand to SEQ ID NO: 1749459
uagggacaaaggaucccuu

SEQ ID NO: 1749461 - RNA, 19 nt, Artificial Sequence
  Description of Artificial Sequence: Synthetic oligonucleotide
  Sense strand starting at position 2939 of SEQ ID NO: 1562469
agggauccuuugucccuaa

SEQ ID NO: 1749462 - RNA, 19 nt, Artificial Sequence
  Description of Artificial Sequence: Synthetic oligonucleotide
  Antisense strand to SEQ ID NO: 1749461
uuagggacaaaggaucccu

SEQ ID NO: 1749463 - RNA, 19 nt, Artificial Sequence
  Description of Artificial Sequence: Synthetic oligonucleotide
  Sense strand starting at position 2940 of SEQ ID NO: 1562469
gggauccuuugucccuaaa

SEQ ID NO: 1749464 - RNA, 19 nt, Artificial Sequence
  Description of Artificial Sequence: Synthetic oligonucleotide
  Antisense strand to SEQ ID NO: 1749463
uuuagggacaaaggauccc

SEQ ID NO: 1749465 - RNA, 19 nt, Artificial Sequence
  Description of Artificial Sequence: Synthetic oligonucleotide
  Sense strand starting at position 3624 of SEQ ID NO: 1562469
uucuguuguguccagggaa

SEQ ID NO: 1749466 - RNA, 19 nt, Artificial Sequence
  Description of Artificial Sequence: Synthetic oligonucleotide
  Antisense strand to SEQ ID NO: 1749465
uucccuggacacaacagaa

SEQ ID NO: 1749467 - RNA, 19 nt, Artificial Sequence
  Description of Artificial Sequence: Synthetic oligonucleotide
  Sense strand starting at position 3800 of SEQ ID NO: 1562469
guugacaucuugcuggagu

SEQ ID NO: 1749468 - RNA, 19 nt, Artificial Sequence
  Description of Artificial Sequence: Synthetic oligonucleotide
  Antisense strand to SEQ ID NO: 1749467
acuccagcaagaugucaac

SEQ ID NO: 1749469 - RNA, 19 nt, Artificial Sequence
  Description of Artificial Sequence: Synthetic oligonucleotide
  Sense strand starting at position 34 of SEQ ID NO: 1562470
acuucuuuagugcaaaguu

SEQ ID NO: 1749470 - RNA, 19 nt, Artificial Sequence
  Description of Artificial Sequence: Synthetic oligonucleotide
  Antisense strand to SEQ ID NO: 1749469
aacuuugcacuaaagaagu

SEQ ID NO: 1749471 - RNA, 19 nt, Artificial Sequence
  Description of Artificial Sequence: Synthetic oligonucleotide
  Sense strand starting at position 83 of SEQ ID NO: 1562470
aauccaaguucugcagagu

SEQ ID NO: 1749472 - RNA, 19 nt, Artificial Sequence
  Description of Artificial Sequence: Synthetic oligonucleotide
  Antisense strand to SEQ ID NO: 1749471
acucugcagaacuuggauu

SEQ ID NO: 1749473 - RNA, 19 nt, Artificial Sequence
  Description of Artificial Sequence: Synthetic oligonucleotide
  Sense strand starting at position 84 of SEQ ID NO: 1562470
auccaaguucugcagaguu

SEQ ID NO: 1749474 - RNA, 19 nt, Artificial Sequence
  Description of Artificial Sequence: Synthetic oligonucleotide
  Antisense strand to SEQ ID NO: 1749473
aacucugcagaacuuggau

SEQ ID NO: 1749475 - RNA, 19 nt, Artificial Sequence
  Description of Artificial Sequence: Synthetic oligonucleotide
  Sense strand starting at position 86 of SEQ ID NO: 1562470
ccaaguucugcagaguuua

SEQ ID NO: 1749476 - RNA, 19 nt, Artificial Sequence
  Description of Artificial Sequence: Synthetic oligonucleotide
  Antisense strand to SEQ ID NO: 1749475
uaaacucugcagaacuugg

SEQ ID NO: 1749477 - RNA, 19 nt, Artificial Sequence
  Description of Artificial Sequence: Synthetic oligonucleotide
  Sense strand starting at position 91 of SEQ ID NO: 1562470
uucugcagaguuuagaaau

SEQ ID NO: 1749478 - RNA, 19 nt, Artificial Sequence
  Description of Artificial Sequence: Synthetic oligonucleotide
  Antisense strand to SEQ ID NO: 1749477
auuucuaaacucugcagaa

SEQ ID NO: 1749479 - RNA, 19 nt, Artificial Sequence
  Description of Artificial Sequence: Synthetic oligonucleotide
  Sense strand starting at position 97 of SEQ ID NO: 1562470
agaguuuagaaaugcaugu

SEQ ID NO: 1749480 - RNA, 19 nt, Artificial Sequence
  Description of Artificial Sequence: Synthetic oligonucleotide
  Antisense strand to SEQ ID NO: 1749479
acaugcauuucuaaacucu

SEQ ID NO: 1749481 - RNA, 19 nt, Artificial Sequence
  Description of Artificial Sequence: Synthetic oligonucleotide
  Sense strand starting at position 288 of SEQ ID NO: 1562470
gaggucuuucuccaccaga

SEQ ID NO: 1749482 - RNA, 19 nt, Artificial Sequence
  Description of Artificial Sequence: Synthetic oligonucleotide
  Antisense strand to SEQ ID NO: 1749481
ucugguggagaaagaccuc

SEQ ID NO: 1749483 - RNA, 19 nt, Artificial Sequence
  Description of Artificial Sequence: Synthetic oligonucleotide
  Sense strand starting at position 291 of SEQ ID NO: 1562470
gucuuucuccaccagagua

SEQ ID NO: 1749484 - RNA, 19 nt, Artificial Sequence
  Description of Artificial Sequence: Synthetic oligonucleotide
  Antisense strand to SEQ ID NO: 1749483
uacucugguggagaaagac

SEQ ID NO: 1749485 - RNA, 19 nt, Artificial Sequence
  Description of Artificial Sequence: Synthetic oligonucleotide
  Sense strand starting at position 375 of SEQ ID NO: 1562470
ccuucuuugucucuaggaa

SEQ ID NO: 1749486 - RNA, 19 nt, Artificial Sequence
  Description of Artificial Sequence: Synthetic oligonucleotide
  Antisense strand to SEQ ID NO: 1749485
uuccuagagacaaagaagg

SEQ ID NO: 1749487 - RNA, 19 nt, Artificial Sequence
  Description of Artificial Sequence: Synthetic oligonucleotide
  Sense strand starting at position 376 of SEQ ID NO: 1562470
cuucuuugucucuaggaac

SEQ ID NO: 1749488 - RNA, 19 nt, Artificial Sequence
  Description of Artificial Sequence: Synthetic oligonucleotide
  Antisense strand to SEQ ID NO: 1749487
guuccuagagacaaagaag

SEQ ID NO: 1749489 - RNA, 19 nt, Artificial Sequence
  Description of Artificial Sequence: Synthetic oligonucleotide
  Sense strand starting at position 391 of SEQ ID NO: 1562470
gaacuaugcccaggcagaa

SEQ ID NO: 1749490 - RNA, 19 nt, Artificial Sequence
  Description of Artificial Sequence: Synthetic oligonucleotide
  Antisense strand to SEQ ID NO: 1749489
uucugccugggcauaguuc

SEQ ID NO: 1749491 - RNA, 19 nt, Artificial Sequence
  Description of Artificial Sequence: Synthetic oligonucleotide
  Sense strand starting at position 414 of SEQ ID NO: 1562470
aguuacuguaggugaugaa

SEQ ID NO: 1749492 - RNA, 19 nt, Artificial Sequence
  Description of Artificial Sequence: Synthetic oligonucleotide
  Antisense strand to SEQ ID NO: 1749491
uucaucaccuacaguaacu

SEQ ID NO: 1749493 - RNA, 19 nt, Artificial Sequence
  Description of Artificial Sequence: Synthetic oligonucleotide
  Sense strand starting at position 433 of SEQ ID NO: 1562470
gccagugcucccugaacca

SEQ ID NO: 1749494 - RNA, 19 nt, Artificial Sequence
  Description of Artificial Sequence: Synthetic oligonucleotide
  Antisense strand to SEQ ID NO: 1749493
ugguucagggagcacuggc

SEQ ID NO: 1749495 - RNA, 19 nt, Artificial Sequence
  Description of Artificial Sequence: Synthetic oligonucleotide
  Sense strand starting at position 1000 of SEQ ID NO: 1562470
aagugcuuaucauuccgua

SEQ ID NO: 1749496 - RNA, 19 nt, Artificial Sequence
  Description of Artificial Sequence: Synthetic oligonucleotide
  Antisense strand to SEQ ID NO: 1749495
uacggaaugauaagcacuu

SEQ ID NO: 1749497 - RNA, 19 nt, Artificial Sequence
  Description of Artificial Sequence: Synthetic oligonucleotide
  Sense strand starting at position 1139 of SEQ ID NO: 1562470
guuccuuuguuccuucuga

SEQ ID NO: 1749498 - RNA, 19 nt, Artificial Sequence
  Description of Artificial Sequence: Synthetic oligonucleotide
  Antisense strand to SEQ ID NO: 1749497
ucagaaggaacaaaggaac

SEQ ID NO: 1749499 - RNA, 19 nt, Artificial Sequence
  Description of Artificial Sequence: Synthetic oligonucleotide
  Sense strand starting at position 1146 of SEQ ID NO: 1562470
uguuccuucugacugaaca

SEQ ID NO: 1749500 - RNA, 19 nt, Artificial Sequence
  Description of Artificial Sequence: Synthetic oligonucleotide
  Antisense strand to SEQ ID NO: 1749499
uguucagucagaaggaaca

SEQ ID NO: 1749501 - RNA, 19 nt, Artificial Sequence
  Description of Artificial Sequence: Synthetic oligonucleotide
  Sense strand starting at position 1186 of SEQ ID NO: 1562470
gaaacuacuuuggaaggga

SEQ ID NO: 1749502 - RNA, 19 nt, Artificial Sequence
  Description of Artificial Sequence: Synthetic oligonucleotide
  Antisense strand to SEQ ID NO: 1749501
ucccuuccaaaguaguuuc

SEQ ID NO: 1749503 - RNA, 19 nt, Artificial Sequence
  Description of Artificial Sequence: Synthetic oligonucleotide
  Sense strand starting at position 1204 of SEQ ID NO: 1562470
augggagggucugcagaau

SEQ ID NO: 1749504 - RNA, 19 nt, Artificial Sequence
  Description of Artificial Sequence: Synthetic oligonucleotide
  Antisense strand to SEQ ID NO: 1749503
auucugcagacccucccau

SEQ ID NO: 1749505 - RNA, 19 nt, Artificial Sequence
  Description of Artificial Sequence: Synthetic oligonucleotide
  Sense strand starting at position 1257 of SEQ ID NO: 1562470
ucguaauaagguggacaca

SEQ ID NO: 1749506 - RNA, 19 nt, Artificial Sequence
  Description of Artificial Sequence: Synthetic oligonucleotide
  Antisense strand to SEQ ID NO: 1749505
uguguccaccuuauuacga

SEQ ID NO: 1749507 - RNA, 19 nt, Artificial Sequence
  Description of Artificial Sequence: Synthetic oligonucleotide
  Sense strand starting at position 2791 of SEQ ID NO: 1562470
cuguguguccugcuuuaau

SEQ ID NO: 1749508 - RNA, 19 nt, Artificial Sequence
  Description of Artificial Sequence: Synthetic oligonucleotide
  Antisense strand to SEQ ID NO: 1749507
auuaaagcaggacacacag

SEQ ID NO: 1749509 - RNA, 19 nt, Artificial Sequence
  Description of Artificial Sequence: Synthetic oligonucleotide
  Sense strand starting at position 2793 of SEQ ID NO: 1562470
guguguccugcuuuaaugu

SEQ ID NO: 1749510 - RNA, 19 nt, Artificial Sequence
  Description of Artificial Sequence: Synthetic oligonucleotide
  Antisense strand to SEQ ID NO: 1749509
acauuaaagcaggacacac

SEQ ID NO: 1749511 - RNA, 19 nt, Artificial Sequence
  Description of Artificial Sequence: Synthetic oligonucleotide
  Sense strand starting at position 2985 of SEQ ID NO: 1562470
ugcuuugucacugcgaagu

SEQ ID NO: 1749512 - RNA, 19 nt, Artificial Sequence
  Description of Artificial Sequence: Synthetic oligonucleotide
  Antisense strand to SEQ ID NO: 1749511
acuucgcagugacaaagca

SEQ ID NO: 1749513 - RNA, 19 nt, Artificial Sequence
  Description of Artificial Sequence: Synthetic oligonucleotide
  Sense strand starting at position 2997 of SEQ ID NO: 1562470
gcgaagucuccagcggagu

SEQ ID NO: 1749514 - RNA, 19 nt, Artificial Sequence
  Description of Artificial Sequence: Synthetic oligonucleotide
  Antisense strand to SEQ ID NO: 1749513
acuccgcuggagacuucgc

SEQ ID NO: 1749515 - RNA, 19 nt, Artificial Sequence
  Description of Artificial Sequence: Synthetic oligonucleotide
  Sense strand starting at position 3106 of SEQ ID NO: 1562470
cucgguucggucuccgaau

SEQ ID NO: 1749516 - RNA, 19 nt, Artificial Sequence
  Description of Artificial Sequence: Synthetic oligonucleotide
  Antisense strand to SEQ ID NO: 1749515
auucggagaccgaaccgag

SEQ ID NO: 1749517 - RNA, 19 nt, Artificial Sequence
  Description of Artificial Sequence: Synthetic oligonucleotide
  Sense strand starting at position 3112 of SEQ ID NO: 1562470
ucggucuccgaauaagaaa

SEQ ID NO: 1749518 - RNA, 19 nt, Artificial Sequence
  Description of Artificial Sequence: Synthetic oligonucleotide
  Antisense strand to SEQ ID NO: 1749517
uuucuuauucggagaccga

SEQ ID NO: 1749519 - RNA, 19 nt, Artificial Sequence
  Description of Artificial Sequence: Synthetic oligonucleotide
  Sense strand starting at position 3177 of SEQ ID NO: 1562470
cgguuuccugcagccuaau

SEQ ID NO: 1749520 - RNA, 19 nt, Artificial Sequence
  Description of Artificial Sequence: Synthetic oligonucleotide
  Antisense strand to SEQ ID NO: 1749519
auuaggcugcaggaaaccg

SEQ ID NO: 1749521 - RNA, 19 nt, Artificial Sequence
  Description of Artificial Sequence: Synthetic oligonucleotide
  Sense strand starting at position 3223 of SEQ ID NO: 1562470
gggccacagauuggugaaa

SEQ ID NO: 1749522 - RNA, 19 nt, Artificial Sequence
  Description of Artificial Sequence: Synthetic oligonucleotide
  Antisense strand to SEQ ID NO: 1749521
uuucaccaaucuguggccc

SEQ ID NO: 1749523 - RNA, 19 nt, Artificial Sequence
  Description of Artificial Sequence: Synthetic oligonucleotide
  Sense strand starting at position 3257 of SEQ ID NO: 1562470
aggagagagucauacgaaa

SEQ ID NO: 1749524 - RNA, 19 nt, Artificial Sequence
  Description of Artificial Sequence: Synthetic oligonucleotide
  Antisense strand to SEQ ID NO: 1749523
uuucguaugacucucuccu

SEQ ID NO: 1749525 - RNA, 19 nt, Artificial Sequence
  Description of Artificial Sequence: Synthetic oligonucleotide
  Sense strand starting at position 3415 of SEQ ID NO: 1562470
uuuaguaauucgccaugaa

SEQ ID NO: 1749526 - RNA, 19 nt, Artificial Sequence
  Description of Artificial Sequence: Synthetic oligonucleotide
  Antisense strand to SEQ ID NO: 1749525
uucauggcgaauuacuaaa

SEQ ID NO: 1749527 - RNA, 19 nt, Artificial Sequence
  Description of Artificial Sequence: Synthetic oligonucleotide
  Sense strand starting at position 3416 of SEQ ID NO: 1562470
uuaguaauucgccaugaaa

SEQ ID NO: 1749528 - RNA, 19 nt, Artificial Sequence
  Description of Artificial Sequence: Synthetic oligonucleotide
  Antisense strand to SEQ ID NO: 1749527
uuucauggcgaauuacuaa

SEQ ID NO: 1749529 - RNA, 19 nt, Artificial Sequence
  Description of Artificial Sequence: Synthetic oligonucleotide
  Sense strand starting at position 3451 of SEQ ID NO: 1562470
gcgaguguuguugcugaaa

SEQ ID NO: 1749530 - RNA, 19 nt, Artificial Sequence
  Description of Artificial Sequence: Synthetic oligonucleotide
  Antisense strand to SEQ ID NO: 1749529
uuucagcaacaacacucgc

SEQ ID NO: 1749531 - RNA, 19 nt, Artificial Sequence
  Description of Artificial Sequence: Synthetic oligonucleotide
  Sense strand starting at position 3454 of SEQ ID NO: 1562470
aguguuguugcugaaauug

SEQ ID NO: 1749532 - RNA, 19 nt, Artificial Sequence
  Description of Artificial Sequence: Synthetic oligonucleotide
  Antisense strand to SEQ ID NO: 1749531
caauuucagcaacaacacu

SEQ ID NO: 1749533 - RNA, 19 nt, Artificial Sequence
  Description of Artificial Sequence: Synthetic oligonucleotide
  Sense strand starting at position 3503 of SEQ ID NO: 1562470
agcuuagucucacccgaaa

SEQ ID NO: 1749534 - RNA, 19 nt, Artificial Sequence
  Description of Artificial Sequence: Synthetic oligonucleotide
  Antisense strand to SEQ ID NO: 1749533
uuucgggugagacuaagcu

SEQ ID NO: 1749535 - RNA, 19 nt, Artificial Sequence
  Description of Artificial Sequence: Synthetic oligonucleotide
  Sense strand starting at position 3612 of SEQ ID NO: 1562470
ccugaagaauuugauagca

SEQ ID NO: 1749536 - RNA, 19 nt, Artificial Sequence
  Description of Artificial Sequence: Synthetic oligonucleotide
  Antisense strand to SEQ ID NO: 1749535
ugcuaucaaauucuucagg

SEQ ID NO: 1749537 - RNA, 19 nt, Artificial Sequence
  Description of Artificial Sequence: Synthetic oligonucleotide
  Sense strand starting at position 3622 of SEQ ID NO: 1562470
uugauagcauuuggaaaug

SEQ ID NO: 1749538 - RNA, 19 nt, Artificial Sequence
  Description of Artificial Sequence: Synthetic oligonucleotide
  Antisense strand to SEQ ID NO: 1749537
cauuuccaaaugcuaucaa

SEQ ID NO: 1749539 - RNA, 19 nt, Artificial Sequence
  Description of Artificial Sequence: Synthetic oligonucleotide
  Sense strand starting at position 3633 of SEQ ID NO: 1562470
uggaaaugaaguugcuaau

SEQ ID NO: 1749540 - RNA, 19 nt, Artificial Sequence
  Description of Artificial Sequence: Synthetic oligonucleotide
  Antisense strand to SEQ ID NO: 1749539
auuagcaacuucauuucca

SEQ ID NO: 1749541 - RNA, 19 nt, Artificial Sequence
  Description of Artificial Sequence: Synthetic oligonucleotide
  Sense strand starting at position 3687 of SEQ ID NO: 1562470
cuguauucugugccuguua

SEQ ID NO: 1749542 - RNA, 19 nt, Artificial Sequence
  Description of Artificial Sequence: Synthetic oligonucleotide
  Antisense strand to SEQ ID NO: 1749541
uaacaggcacagaauacag

SEQ ID NO: 1749543 - RNA, 19 nt, Artificial Sequence
  Description of Artificial Sequence: Synthetic oligonucleotide
  Sense strand starting at position 3700 of SEQ ID NO: 1562470
cuguuauguaauggcugua

SEQ ID NO: 1749544 - RNA, 19 nt, Artificial Sequence
  Description of Artificial Sequence: Synthetic oligonucleotide
  Antisense strand to SEQ ID NO: 1749543
uacagccauuacauaacag

SEQ ID NO: 1749545 - RNA, 19 nt, Artificial Sequence
  Description of Artificial Sequence: Synthetic oligonucleotide
  Sense strand starting at position 3910 of SEQ ID NO: 1562470
ucacccuagugauugaacu

SEQ ID NO: 1749546 - RNA, 19 nt, Artificial Sequence
  Description of Artificial Sequence: Synthetic oligonucleotide
  Antisense strand to SEQ ID NO: 1749545
aguucaaucacuaggguga

SEQ ID NO: 1749547 - RNA, 19 nt, Artificial Sequence
  Description of Artificial Sequence: Synthetic oligonucleotide
  Sense strand starting at position 3918 of SEQ ID NO: 1562470
gugauugaacuaugcaauc

SEQ ID NO: 1749548 - RNA, 19 nt, Artificial Sequence
  Description of Artificial Sequence: Synthetic oligonucleotide
  Antisense strand to SEQ ID NO: 1749547
gauugcauaguucaaucac

SEQ ID NO: 1749549 - RNA, 19 nt, Artificial Sequence
  Description of Artificial Sequence: Synthetic oligonucleotide
  Sense strand starting at position 2156 of SEQ ID NO: 1562471
accgcuuuaggagguuauu

SEQ ID NO: 1749550 - RNA, 19 nt, Artificial Sequence
  Description of Artificial Sequence: Synthetic oligonucleotide
  Antisense strand to SEQ ID NO: 1749549
aauaaccuccuaaagcggu

SEQ ID NO: 1749551 - RNA, 19 nt, Artificial Sequence
  Description of Artificial Sequence: Synthetic oligonucleotide
  Sense strand starting at position 2378 of SEQ ID NO: 1562471
accgucuuauguuuagagu

SEQ ID NO: 1749552 - RNA, 19 nt, Artificial Sequence
  Description of Artificial Sequence: Synthetic oligonucleotide
  Antisense strand to SEQ ID NO: 1749551
acucuaaacauaagacggu

SEQ ID NO: 1749553 - RNA, 19 nt, Artificial Sequence
  Description of Artificial Sequence: Synthetic oligonucleotide
  Sense strand starting at position 2379 of SEQ ID NO: 1562471
ccgucuuauguuuagagua

SEQ ID NO: 1749554 - RNA, 19 nt, Artificial Sequence
  Description of Artificial Sequence: Synthetic oligonucleotide
  Antisense strand to SEQ ID NO: 1749553
uacucuaaacauaagacgg

SEQ ID NO: 1749555 - RNA, 19 nt, Artificial Sequence
  Description of Artificial Sequence: Synthetic oligonucleotide
  Sense strand starting at position 2384 of SEQ ID NO: 1562471
uuauguuuagaguacuguu

SEQ ID NO: 1749556 - RNA, 19 nt, Artificial Sequence
  Description of Artificial Sequence: Synthetic oligonucleotide
  Antisense strand to SEQ ID NO: 1749555
aacaguacucuaaacauaa

SEQ ID NO: 1749557 - RNA, 19 nt, Artificial Sequence
  Description of Artificial Sequence: Synthetic oligonucleotide
  Sense strand starting at position 2416 of SEQ ID NO: 1562471
ugcauuagugugcacauua

SEQ ID NO: 1749558 - RNA, 19 nt, Artificial Sequence
  Description of Artificial Sequence: Synthetic oligonucleotide
  Antisense strand to SEQ ID NO: 1749557
uaaugugcacacuaaugca

SEQ ID NO: 1749559 - RNA, 19 nt, Artificial Sequence
  Description of Artificial Sequence: Synthetic oligonucleotide
  Sense strand starting at position 2659 of SEQ ID NO: 1562471
gcauauugucgucaagguu

SEQ ID NO: 1749560 - RNA, 19 nt, Artificial Sequence
  Description of Artificial Sequence: Synthetic oligonucleotide
  Antisense strand to SEQ ID NO: 1749559
aaccuugacgacaauaugc

SEQ ID NO: 1749561 - RNA, 19 nt, Artificial Sequence
  Description of Artificial Sequence: Synthetic oligonucleotide
  Sense strand starting at position 2662 of SEQ ID NO: 1562471
uauugucgucaagguuuau

SEQ ID NO: 1749562 - RNA, 19 nt, Artificial Sequence
  Description of Artificial Sequence: Synthetic oligonucleotide
  Antisense strand to SEQ ID NO: 1749561
auaaaccuugacgacaaua

SEQ ID NO: 1749563 - RNA, 19 nt, Artificial Sequence
  Description of Artificial Sequence: Synthetic oligonucleotide
  Sense strand starting at position 2666 of SEQ ID NO: 1562471
gucgucaagguuuauccau

SEQ ID NO: 1749564 - RNA, 19 nt, Artificial Sequence
  Description of Artificial Sequence: Synthetic oligonucleotide
  Antisense strand to SEQ ID NO: 1749563
auggauaaaccuugacgac

SEQ ID NO: 1749565 - RNA, 19 nt, Artificial Sequence
  Description of Artificial Sequence: Synthetic oligonucleotide
  Sense strand starting at position 2695 of SEQ ID NO: 1562471
guaucaaaguuucuuccuu

SEQ ID NO: 1749566 - RNA, 19 nt, Artificial Sequence
  Description of Artificial Sequence: Synthetic oligonucleotide
  Antisense strand to SEQ ID NO: 1749565
aaggaagaaacuuugauac

SEQ ID NO: 1749567 - RNA, 19 nt, Artificial Sequence
  Description of Artificial Sequence: Synthetic oligonucleotide
  Sense strand starting at position 2768 of SEQ ID NO: 1562471
ucauucguugauggacauu

SEQ ID NO: 1749568 - RNA, 19 nt, Artificial Sequence
  Description of Artificial Sequence: Synthetic oligonucleotide
  Antisense strand to SEQ ID NO: 1749567
aauguccaucaacgaauga

SEQ ID NO: 1749569 - RNA, 19 nt, Artificial Sequence
  Description of Artificial Sequence: Synthetic oligonucleotide
  Sense strand starting at position 2799 of SEQ ID NO: 1562471
gguuguugcgaauuaugcu

SEQ ID NO: 1749570 - RNA, 19 nt, Artificial Sequence
  Description of Artificial Sequence: Synthetic oligonucleotide
  Antisense strand to SEQ ID NO: 1749569
agcauaauucgcaacaacc

SEQ ID NO: 1749571 - RNA, 19 nt, Artificial Sequence
  Description of Artificial Sequence: Synthetic oligonucleotide
  Sense strand starting at position 2872 of SEQ ID NO: 1562471
ccagguucaggucgcuaaa

SEQ ID NO: 1749572 - RNA, 19 nt, Artificial Sequence
  Description of Artificial Sequence: Synthetic oligonucleotide
  Antisense strand to SEQ ID NO: 1749571
uuuagcgaccugaaccugg

SEQ ID NO: 1749573 - RNA, 19 nt, Artificial Sequence
  Description of Artificial Sequence: Synthetic oligonucleotide
  Sense strand starting at position 2874 of SEQ ID NO: 1562471
agguucaggucgcuaaauu

SEQ ID NO: 1749574 - RNA, 19 nt, Artificial Sequence
  Description of Artificial Sequence: Synthetic oligonucleotide
  Antisense strand to SEQ ID NO: 1749573
aauuuagcgaccugaaccu

SEQ ID NO: 1749575 - RNA, 19 nt, Artificial Sequence
  Description of Artificial Sequence: Synthetic oligonucleotide
  Sense strand starting at position 2875 of SEQ ID NO: 1562471
gguucaggucgcuaaauuu

SEQ ID NO: 1749576 - RNA, 19 nt, Artificial Sequence
  Description of Artificial Sequence: Synthetic oligonucleotide
  Antisense strand to SEQ ID NO: 1749575
aaauuuagcgaccugaacc

SEQ ID NO: 1749577 - RNA, 19 nt, Artificial Sequence
  Description of Artificial Sequence: Synthetic oligonucleotide
  Sense strand starting at position 2884 of SEQ ID NO: 1562471
cgcuaaauuucuggacuaa

SEQ ID NO: 1749578 - RNA, 19 nt, Artificial Sequence
  Description of Artificial Sequence: Synthetic oligonucleotide
  Antisense strand to SEQ ID NO: 1749577
uuaguccagaaauuuagcg

SEQ ID NO: 1749579 - RNA, 19 nt, Artificial Sequence
  Description of Artificial Sequence: Synthetic oligonucleotide
  Sense strand starting at position 2954 of SEQ ID NO: 1562471
ccaucccucugauugaaag

SEQ ID NO: 1749580 - RNA, 19 nt, Artificial Sequence
  Description of Artificial Sequence: Synthetic oligonucleotide
  Antisense strand to SEQ ID NO: 1749579
cuuucaaucagagggaugg

SEQ ID NO: 1749581 - RNA, 19 nt, Artificial Sequence
  Description of Artificial Sequence: Synthetic oligonucleotide
  Sense strand starting at position 3016 of SEQ ID NO: 1562471
cccgaaagggauggucuau

SEQ ID NO: 1749582 - RNA, 19 nt, Artificial Sequence
  Description of Artificial Sequence: Synthetic oligonucleotide
  Antisense strand to SEQ ID NO: 1749581
auagaccaucccuuucggg

SEQ ID NO: 1749583 - RNA, 19 nt, Artificial Sequence
  Description of Artificial Sequence: Synthetic oligonucleotide
  Sense strand starting at position 3025 of SEQ ID NO: 1562471
gauggucuaucagcaacuu

SEQ ID NO: 1749584 - RNA, 19 nt, Artificial Sequence
  Description of Artificial Sequence: Synthetic oligonucleotide
  Antisense strand to SEQ ID NO: 1749583
aaguugcugauagaccauc

SEQ ID NO: 1749585 - RNA, 19 nt, Artificial Sequence
  Description of Artificial Sequence: Synthetic oligonucleotide
  Sense strand starting at position 3067 of SEQ ID NO: 1562471
cucagaaauuggccucuua

SEQ ID NO: 1749586 - RNA, 19 nt, Artificial Sequence
  Description of Artificial Sequence: Synthetic oligonucleotide
  Antisense strand to SEQ ID NO: 1749585
uaagaggccaauuucugag

SEQ ID NO: 1749587 - RNA, 19 nt, Artificial Sequence
  Description of Artificial Sequence: Synthetic oligonucleotide
  Sense strand starting at position 3074 of SEQ ID NO: 1562471
auuggccucuuauuagaaa

SEQ ID NO: 1749588 - RNA, 19 nt, Artificial Sequence
  Description of Artificial Sequence: Synthetic oligonucleotide
  Antisense strand to SEQ ID NO: 1749587
uuucuaauaagaggccaau

SEQ ID NO: 1749589 - RNA, 19 nt, Artificial Sequence
  Description of Artificial Sequence: Synthetic oligonucleotide
  Sense strand starting at position 3112 of SEQ ID NO: 1562471
aguccuaucgguugagggu

SEQ ID NO: 1749590 - RNA, 19 nt, Artificial Sequence
  Description of Artificial Sequence: Synthetic oligonucleotide
  Antisense strand to SEQ ID NO: 1749589
acccucaaccgauaggacu

SEQ ID NO: 1749591 - RNA, 19 nt, Artificial Sequence
  Description of Artificial Sequence: Synthetic oligonucleotide
  Sense strand starting at position 3150 of SEQ ID NO: 1562471
ugccaaauagaauagcauu

SEQ ID NO: 1749592 - RNA, 19 nt, Artificial Sequence
  Description of Artificial Sequence: Synthetic oligonucleotide
  Antisense strand to SEQ ID NO: 1749591
aaugcuauucuauuuggca

SEQ ID NO: 1749593 - RNA, 19 nt, Artificial Sequence
  Description of Artificial Sequence: Synthetic oligonucleotide
  Sense strand starting at position 3162 of SEQ ID NO: 1562471
uagcauuacuuggugucua

SEQ ID NO: 1749594 - RNA, 19 nt, Artificial Sequence
  Description of Artificial Sequence: Synthetic oligonucleotide
  Antisense strand to SEQ ID NO: 1749593
uagacaccaaguaaugcua

SEQ ID NO: 1749595 - RNA, 19 nt, Artificial Sequence
  Description of Artificial Sequence: Synthetic oligonucleotide
  Sense strand starting at position 3166 of SEQ ID NO: 1562471
auuacuuggugucuaugga

SEQ ID NO: 1749596 - RNA, 19 nt, Artificial Sequence
  Description of Artificial Sequence: Synthetic oligonucleotide
  Antisense strand to SEQ ID NO: 1749595
uccauagacaccaaguaau

SEQ ID NO: 1749597 - RNA, 19 nt, Artificial Sequence
  Description of Artificial Sequence: Synthetic oligonucleotide
  Sense strand starting at position 3326 of SEQ ID NO: 1562471
cucugaucuuugcuucuga

SEQ ID NO: 1749598 - RNA, 19 nt, Artificial Sequence
  Description of Artificial Sequence: Synthetic oligonucleotide
  Antisense strand to SEQ ID NO: 1749597
ucagaagcaaagaucagag

SEQ ID NO: 1749599 - RNA, 19 nt, Artificial Sequence
  Description of Artificial Sequence: Synthetic oligonucleotide
  Sense strand starting at position 3406 of SEQ ID NO: 1562471
ucuggaagccuuggugauu

SEQ ID NO: 1749600 - RNA, 19 nt, Artificial Sequence
  Description of Artificial Sequence: Synthetic oligonucleotide
  Antisense strand to SEQ ID NO: 1749599
aaucaccaaggcuuccaga

SEQ ID NO: 1749601 - RNA, 19 nt, Artificial Sequence
  Description of Artificial Sequence: Synthetic oligonucleotide
  Sense strand starting at position 3415 of SEQ ID NO: 1562471
cuuggugauuucuccucuu

SEQ ID NO: 1749602 - RNA, 19 nt, Artificial Sequence
  Description of Artificial Sequence: Synthetic oligonucleotide
  Antisense strand to SEQ ID NO: 1749601
aagaggagaaaucaccaag

SEQ ID NO: 1749603 - RNA, 19 nt, Artificial Sequence
  Description of Artificial Sequence: Synthetic oligonucleotide
  Sense strand starting at position 3418 of SEQ ID NO: 1562471
ggugauuucuccucuuccu

SEQ ID NO: 1749604 - RNA, 19 nt, Artificial Sequence
  Description of Artificial Sequence: Synthetic oligonucleotide
  Antisense strand to SEQ ID NO: 1749603
aggaagaggagaaaucacc

SEQ ID NO: 1749605 - RNA, 19 nt, Artificial Sequence
  Description of Artificial Sequence: Synthetic oligonucleotide
  Sense strand starting at position 3485 of SEQ ID NO: 1562471
uuguguuauguagauacca

SEQ ID NO: 1749606 - RNA, 19 nt, Artificial Sequence
  Description of Artificial Sequence: Synthetic oligonucleotide
  Antisense strand to SEQ ID NO: 1749605
ugguaucuacauaacacaa

SEQ ID NO: 1749607 - RNA, 19 nt, Artificial Sequence
  Description of Artificial Sequence: Synthetic oligonucleotide
  Sense strand starting at position 3487 of SEQ ID NO: 1562471
guguuauguagauaccauc

SEQ ID NO: 1749608 - RNA, 19 nt, Artificial Sequence
  Description of Artificial Sequence: Synthetic oligonucleotide
  Antisense strand to SEQ ID NO: 1749607
gaugguaucuacauaacac

SEQ ID NO: 1749609 - RNA, 19 nt, Artificial Sequence
  Description of Artificial Sequence: Synthetic oligonucleotide
  Sense strand starting at position 3505 of SEQ ID NO: 1562471
cucugcauuuggcuaugau

SEQ ID NO: 1749610 - RNA, 19 nt, Artificial Sequence
  Description of Artificial Sequence: Synthetic oligonucleotide
  Antisense strand to SEQ ID NO: 1749609
aucauagccaaaugcagag

SEQ ID NO: 1749611 - RNA, 19 nt, Artificial Sequence
  Description of Artificial Sequence: Synthetic oligonucleotide
  Sense strand starting at position 3508 of SEQ ID NO: 1562471
ugcauuuggcuaugauugu

SEQ ID NO: 1749612 - RNA, 19 nt, Artificial Sequence
  Description of Artificial Sequence: Synthetic oligonucleotide
  Antisense strand to SEQ ID NO: 1749611
acaaucauagccaaaugca

SEQ ID NO: 1749613 - RNA, 19 nt, Artificial Sequence
  Description of Artificial Sequence: Synthetic oligonucleotide
  Sense strand starting at position 3610 of SEQ ID NO: 1562471
cucuaaagauggucugaaa

SEQ ID NO: 1749614 - RNA, 19 nt, Artificial Sequence
  Description of Artificial Sequence: Synthetic oligonucleotide
  Antisense strand to SEQ ID NO: 1749613
uuucagaccaucuuuagag

SEQ ID NO: 1749615 - RNA, 19 nt, Artificial Sequence
  Description of Artificial Sequence: Synthetic oligonucleotide
  Sense strand starting at position 3613 of SEQ ID NO: 1562471
uaaagauggucugaaaucu

SEQ ID NO: 1749616 - RNA, 19 nt, Artificial Sequence
  Description of Artificial Sequence: Synthetic oligonucleotide
  Antisense strand to SEQ ID NO: 1749615
agauuucagaccaucuuua

SEQ ID NO: 1749617 - RNA, 19 nt, Artificial Sequence
  Description of Artificial Sequence: Synthetic oligonucleotide
  Sense strand starting at position 3642 of SEQ ID NO: 1562471
agaggcucaucccuuaaau

SEQ ID NO: 1749618 - RNA, 19 nt, Artificial Sequence
  Description of Artificial Sequence: Synthetic oligonucleotide
  Antisense strand to SEQ ID NO: 1749617
auuuaagggaugagccucu

SEQ ID NO: 1749619 - RNA, 19 nt, Artificial Sequence
  Description of Artificial Sequence: Synthetic oligonucleotide
  Sense strand starting at position 3719 of SEQ ID NO: 1562471
gaaggaaccugguaagauc

SEQ ID NO: 1749620 - RNA, 19 nt, Artificial Sequence
  Description of Artificial Sequence: Synthetic oligonucleotide
  Antisense strand to SEQ ID NO: 1749619
gaucuuaccagguuccuuc

SEQ ID NO: 1749621 - RNA, 19 nt, Artificial Sequence
  Description of Artificial Sequence: Synthetic oligonucleotide
  Sense strand starting at position 3803 of SEQ ID NO: 1562471
gagggaagccuugguagga

SEQ ID NO: 1749622 - RNA, 19 nt, Artificial Sequence
  Description of Artificial Sequence: Synthetic oligonucleotide
  Antisense strand to SEQ ID NO: 1749621
uccuaccaaggcuucccuc

SEQ ID NO: 1749623 - RNA, 19 nt, Artificial Sequence
  Description of Artificial Sequence: Synthetic oligonucleotide
  Sense strand starting at position 3820 of SEQ ID NO: 1562471
gaaggagcugagugcuuaa

SEQ ID NO: 1749624 - RNA, 19 nt, Artificial Sequence
  Description of Artificial Sequence: Synthetic oligonucleotide
  Antisense strand to SEQ ID NO: 1749623
uuaagcacucagcuccuuc

SEQ ID NO: 1749625 - RNA, 19 nt, Artificial Sequence
  Description of Artificial Sequence: Synthetic oligonucleotide
  Sense strand starting at position 3823 of SEQ ID NO: 1562471
ggagcugagugcuuaagca

SEQ ID NO: 1749626 - RNA, 19 nt, Artificial Sequence
  Description of Artificial Sequence: Synthetic oligonucleotide
  Antisense strand to SEQ ID NO: 1749625
ugcuuaagcacucagcucc

SEQ ID NO: 1749627 - RNA, 19 nt, Artificial Sequence
  Description of Artificial Sequence: Synthetic oligonucleotide
  Sense strand starting at position 3830 of SEQ ID NO: 1562471
agugcuuaagcagaaccau

SEQ ID NO: 1749628 - RNA, 19 nt, Artificial Sequence
  Description of Artificial Sequence: Synthetic oligonucleotide
  Antisense strand to SEQ ID NO: 1749627
augguucugcuuaagcacu

SEQ ID NO: 1749629 - RNA, 19 nt, Artificial Sequence
  Description of Artificial Sequence: Synthetic oligonucleotide
  Sense strand starting at position 1338 of SEQ ID NO: 1562472
gcucucaugcaacagguua

SEQ ID NO: 1749630 - RNA, 19 nt, Artificial Sequence
  Description of Artificial Sequence: Synthetic oligonucleotide
  Antisense strand to SEQ ID NO: 1749629
uaaccuguugcaugagagc

SEQ ID NO: 1749631 - RNA, 19 nt, Artificial Sequence
  Description of Artificial Sequence: Synthetic oligonucleotide
  Sense strand starting at position 1351 of SEQ ID NO: 1562472
agguuauuucagggagcgu

SEQ ID NO: 1749632 - RNA, 19 nt, Artificial Sequence
  Description of Artificial Sequence: Synthetic oligonucleotide
  Antisense strand to SEQ ID NO: 1749631
acgcucccugaaauaaccu

SEQ ID NO: 1749633 - RNA, 19 nt, Artificial Sequence
  Description of Artificial Sequence: Synthetic oligonucleotide
  Sense strand starting at position 1389 of SEQ ID NO: 1562472
gguggcauucuagaggcuu

SEQ ID NO: 1749634 - RNA, 19 nt, Artificial Sequence
  Description of Artificial Sequence: Synthetic oligonucleotide
  Antisense strand to SEQ ID NO: 1749633
aagccucuagaaugccacc

SEQ ID NO: 1749635 - RNA, 19 nt, Artificial Sequence
  Description of Artificial Sequence: Synthetic oligonucleotide
  Sense strand starting at position 1414 of SEQ ID NO: 1562472
uucaguuaggugugggaaa

SEQ ID NO: 1749636 - RNA, 19 nt, Artificial Sequence
  Description of Artificial Sequence: Synthetic oligonucleotide
  Antisense strand to SEQ ID NO: 1749635
uuucccacaccuaacugaa

SEQ ID NO: 1749637 - RNA, 19 nt, Artificial Sequence
  Description of Artificial Sequence: Synthetic oligonucleotide
  Sense strand starting at position 1450 of SEQ ID NO: 1562472
gaauaaacgagugggaagu

SEQ ID NO: 1749638 - RNA, 19 nt, Artificial Sequence
  Description of Artificial Sequence: Synthetic oligonucleotide
  Antisense strand to SEQ ID NO: 1749637
acuucccacucguuuauuc

SEQ ID NO: 1749639 - RNA, 19 nt, Artificial Sequence
  Description of Artificial Sequence: Synthetic oligonucleotide
  Sense strand starting at position 1747 of SEQ ID NO: 1562472
aaagucgcucuggagaaau

SEQ ID NO: 1749640 - RNA, 19 nt, Artificial Sequence
  Description of Artificial Sequence: Synthetic oligonucleotide
  Antisense strand to SEQ ID NO: 1749639
auuucuccagagcgacuuu

SEQ ID NO: 1749641 - RNA, 19 nt, Artificial Sequence
  Description of Artificial Sequence: Synthetic oligonucleotide
  Sense strand starting at position 1760 of SEQ ID NO: 1562472
agaaauggcccgcagagua

SEQ ID NO: 1749642 - RNA, 19 nt, Artificial Sequence
  Description of Artificial Sequence: Synthetic oligonucleotide
  Antisense strand to SEQ ID NO: 1749641
uacucugcgggccauuucu

SEQ ID NO: 1749643 - RNA, 19 nt, Artificial Sequence
  Description of Artificial Sequence: Synthetic oligonucleotide
  Sense strand starting at position 1799 of SEQ ID NO: 1562472
cggagcauucugggucaca

SEQ ID NO: 1749644 - RNA, 19 nt, Artificial Sequence
  Description of Artificial Sequence: Synthetic oligonucleotide
  Antisense strand to SEQ ID NO: 1749643
ugugacccagaaugcuccg

SEQ ID NO: 1749645 - RNA, 19 nt, Artificial Sequence
  Description of Artificial Sequence: Synthetic oligonucleotide
  Sense strand starting at position 1800 of SEQ ID NO: 1562472
ggagcauucugggucacag

SEQ ID NO: 1749646 - RNA, 19 nt, Artificial Sequence
  Description of Artificial Sequence: Synthetic oligonucleotide
  Antisense strand to SEQ ID NO: 1749645
cugugacccagaaugcucc

SEQ ID NO: 1749647 - RNA, 19 nt, Artificial Sequence
  Description of Artificial Sequence: Synthetic oligonucleotide
  Sense strand starting at position 1829 of SEQ ID NO: 1562472
gagagucugucccugggau

SEQ ID NO: 1749648 - RNA, 19 nt, Artificial Sequence
  Description of Artificial Sequence: Synthetic oligonucleotide
  Antisense strand to SEQ ID NO: 1749647
aucccagggacagacucuc

SEQ ID NO: 1749649 - RNA, 19 nt, Artificial Sequence
  Description of Artificial Sequence: Synthetic oligonucleotide
  Sense strand starting at position 1875 of SEQ ID NO: 1562472
acacuuacucuggaugcga

SEQ ID NO: 1749650 - RNA, 19 nt, Artificial Sequence
  Description of Artificial Sequence: Synthetic oligonucleotide
  Antisense strand to SEQ ID NO: 1749649
ucgcauccagaguaagugu

SEQ ID NO: 1749651 - RNA, 19 nt, Artificial Sequence
  Description of Artificial Sequence: Synthetic oligonucleotide
  Sense strand starting at position 1877 of SEQ ID NO: 1562472
acuuacucuggaugcgauu

SEQ ID NO: 1749652 - RNA, 19 nt, Artificial Sequence
  Description of Artificial Sequence: Synthetic oligonucleotide
  Antisense strand to SEQ ID NO: 1749651
aaucgcauccagaguaagu

SEQ ID NO: 1749653 - RNA, 19 nt, Artificial Sequence
  Description of Artificial Sequence: Synthetic oligonucleotide
  Sense strand starting at position 2119 of SEQ ID NO: 1562472
gcugaugucauccgggcua

SEQ ID NO: 1749654 - RNA, 19 nt, Artificial Sequence
  Description of Artificial Sequence: Synthetic oligonucleotide
  Antisense strand to SEQ ID NO: 1749653
uagcccggaugacaucagc

SEQ ID NO: 1749655 - RNA, 19 nt, Artificial Sequence
  Description of Artificial Sequence: Synthetic oligonucleotide
  Sense strand starting at position 2121 of SEQ ID NO: 1562472
ugaugucauccgggcuaau

SEQ ID NO: 1749656 - RNA, 19 nt, Artificial Sequence
  Description of Artificial Sequence: Synthetic oligonucleotide
  Antisense strand to SEQ ID NO: 1749655
auuagcccggaugacauca

SEQ ID NO: 1749657 - RNA, 19 nt, Artificial Sequence
  Description of Artificial Sequence: Synthetic oligonucleotide
  Sense strand starting at position 2131 of SEQ ID NO: 1562472
cgggcuaauuccgcucaau

SEQ ID NO: 1749658 - RNA, 19 nt, Artificial Sequence
  Description of Artificial Sequence: Synthetic oligonucleotide
  Antisense strand to SEQ ID NO: 1749657
auugagcggaauuagcccg

SEQ ID NO: 1749659 - RNA, 19 nt, Artificial Sequence
  Description of Artificial Sequence: Synthetic oligonucleotide
  Sense strand starting at position 2134 of SEQ ID NO: 1562472
gcuaauuccgcucaaugaa

SEQ ID NO: 1749660 - RNA, 19 nt, Artificial Sequence
  Description of Artificial Sequence: Synthetic oligonucleotide
  Antisense strand to SEQ ID NO: 1749659
uucauugagcggaauuagc

SEQ ID NO: 1749661 - RNA, 19 nt, Artificial Sequence
  Description of Artificial Sequence: Synthetic oligonucleotide
  Sense strand starting at position 2322 of SEQ ID NO: 1562472
aagggaacguggucaaauu

SEQ ID NO: 1749662 - RNA, 19 nt, Artificial Sequence
  Description of Artificial Sequence: Synthetic oligonucleotide
  Antisense strand to SEQ ID NO: 1749661
aauuugaccacguucccuu

SEQ ID NO: 1749663 - RNA, 19 nt, Artificial Sequence
  Description of Artificial Sequence: Synthetic oligonucleotide
  Sense strand starting at position 2380 of SEQ ID NO: 1562472
augggaugguuuggagacu

SEQ ID NO: 1749664 - RNA, 19 nt, Artificial Sequence
  Description of Artificial Sequence: Synthetic oligonucleotide
  Antisense strand to SEQ ID NO: 1749663
agucuccaaaccaucccau

SEQ ID NO: 1749665 - RNA, 19 nt, Artificial Sequence
  Description of Artificial Sequence: Synthetic oligonucleotide
  Sense strand starting at position 2397 of SEQ ID NO: 1562472
cucugcagagucuaacaaa

SEQ ID NO: 1749666 - RNA, 19 nt, Artificial Sequence
  Description of Artificial Sequence: Synthetic oligonucleotide
  Antisense strand to SEQ ID NO: 1749665
uuuguuagacucugcagag

SEQ ID NO: 1749667 - RNA, 19 nt, Artificial Sequence
  Description of Artificial Sequence: Synthetic oligonucleotide
  Sense strand starting at position 2400 of SEQ ID NO: 1562472
ugcagagucuaacaaacua

SEQ ID NO: 1749668 - RNA, 19 nt, Artificial Sequence
  Description of Artificial Sequence: Synthetic oligonucleotide
  Antisense strand to SEQ ID NO: 1749667
uaguuuguuagacucugca

SEQ ID NO: 1749669 - RNA, 19 nt, Artificial Sequence
  Description of Artificial Sequence: Synthetic oligonucleotide
  Sense strand starting at position 2774 of SEQ ID NO: 1562472
ucuccuuuagguugaggau

SEQ ID NO: 1749670 - RNA, 19 nt, Artificial Sequence
  Description of Artificial Sequence: Synthetic oligonucleotide
  Antisense strand to SEQ ID NO: 1749669
auccucaaccuaaaggaga

SEQ ID NO: 1749671 - RNA, 19 nt, Artificial Sequence
  Description of Artificial Sequence: Synthetic oligonucleotide
  Sense strand starting at position 2809 of SEQ ID NO: 1562472
cgaguuauuuccgcacggu

SEQ ID NO: 1749672 - RNA, 19 nt, Artificial Sequence
  Description of Artificial Sequence: Synthetic oligonucleotide
  Antisense strand to SEQ ID NO: 1749671
accgugcggaaauaacucg

SEQ ID NO: 1749673 - RNA, 19 nt, Artificial Sequence
  Description of Artificial Sequence: Synthetic oligonucleotide
  Sense strand starting at position 2810 of SEQ ID NO: 1562472
gaguuauuuccgcacggua

SEQ ID NO: 1749674 - RNA, 19 nt, Artificial Sequence
  Description of Artificial Sequence: Synthetic oligonucleotide
  Antisense strand to SEQ ID NO: 1749673
uaccgugcggaaauaacuc

SEQ ID NO: 1749675 - RNA, 19 nt, Artificial Sequence
  Description of Artificial Sequence: Synthetic oligonucleotide
  Sense strand starting at position 2812 of SEQ ID NO: 1562472
guuauuuccgcacgguaac

SEQ ID NO: 1749676 - RNA, 19 nt, Artificial Sequence
  Description of Artificial Sequence: Synthetic oligonucleotide
  Antisense strand to SEQ ID NO: 1749675
guuaccgugcggaaauaac

SEQ ID NO: 1749677 - RNA, 19 nt, Artificial Sequence
  Description of Artificial Sequence: Synthetic oligonucleotide
  Sense strand starting at position 2848 of SEQ ID NO: 1562472
agggucgugccuguaguua

SEQ ID NO: 1749678 - RNA, 19 nt, Artificial Sequence
  Description of Artificial Sequence: Synthetic oligonucleotide
  Antisense strand to SEQ ID NO: 1749677
uaacuacaggcacgacccu

SEQ ID NO: 1749679 - RNA, 19 nt, Artificial Sequence
  Description of Artificial Sequence: Synthetic oligonucleotide
  Sense strand starting at position 2852 of SEQ ID NO: 1562472
ucgugccuguaguuaaaca

SEQ ID NO: 1749680 - RNA, 19 nt, Artificial Sequence
  Description of Artificial Sequence: Synthetic oligonucleotide
  Antisense strand to SEQ ID NO: 1749679
uguuuaacuacaggcacga

SEQ ID NO: 1749681 - RNA, 19 nt, Artificial Sequence
  Description of Artificial Sequence: Synthetic oligonucleotide
  Sense strand starting at position 2914 of SEQ ID NO: 1562472
uucagugucgucuuuguga

SEQ ID NO: 1749682 - RNA, 19 nt, Artificial Sequence
  Description of Artificial Sequence: Synthetic oligonucleotide
  Antisense strand to SEQ ID NO: 1749681
ucacaaagacgacacugaa

SEQ ID NO: 1749683 - RNA, 19 nt, Artificial Sequence
  Description of Artificial Sequence: Synthetic oligonucleotide
  Sense strand starting at position 2916 of SEQ ID NO: 1562472
cagugucgucuuugugauc

SEQ ID NO: 1749684 - RNA, 19 nt, Artificial Sequence
  Description of Artificial Sequence: Synthetic oligonucleotide
  Antisense strand to SEQ ID NO: 1749683
gaucacaaagacgacacug

SEQ ID NO: 1749685 - RNA, 19 nt, Artificial Sequence
  Description of Artificial Sequence: Synthetic oligonucleotide
  Sense strand starting at position 2917 of SEQ ID NO: 1562472
agugucgucuuugugauca

SEQ ID NO: 1749686 - RNA, 19 nt, Artificial Sequence
  Description of Artificial Sequence: Synthetic oligonucleotide
  Antisense strand to SEQ ID NO: 1749685
ugaucacaaagacgacacu

SEQ ID NO: 1749687 - RNA, 19 nt, Artificial Sequence
  Description of Artificial Sequence: Synthetic oligonucleotide
  Sense strand starting at position 2922 of SEQ ID NO: 1562472
cgucuuugugaucaccaca

SEQ ID NO: 1749688 - RNA, 19 nt, Artificial Sequence
  Description of Artificial Sequence: Synthetic oligonucleotide
  Antisense strand to SEQ ID NO: 1749687
uguggugaucacaaagacg

SEQ ID NO: 1749689 - RNA, 19 nt, Artificial Sequence
  Description of Artificial Sequence: Synthetic oligonucleotide
  Sense strand starting at position 3170 of SEQ ID NO: 1562472
ucuugacgaugaggaauua

SEQ ID NO: 1749690 - RNA, 19 nt, Artificial Sequence
  Description of Artificial Sequence: Synthetic oligonucleotide
  Antisense strand to SEQ ID NO: 1749689
uaauuccucaucgucaaga

SEQ ID NO: 1749691 - RNA, 19 nt, Artificial Sequence
  Description of Artificial Sequence: Synthetic oligonucleotide
  Sense strand starting at position 3320 of SEQ ID NO: 1562472
cccugcuuggacuacagau

SEQ ID NO: 1749692 - RNA, 19 nt, Artificial Sequence
  Description of Artificial Sequence: Synthetic oligonucleotide
  Antisense strand to SEQ ID NO: 1749691
aucuguaguccaagcaggg

SEQ ID NO: 1749693 - RNA, 19 nt, Artificial Sequence
  Description of Artificial Sequence: Synthetic oligonucleotide
  Sense strand starting at position 3345 of SEQ ID NO: 1562472
guuggcgguuccuuauagu

SEQ ID NO: 1749694 - RNA, 19 nt, Artificial Sequence
  Description of Artificial Sequence: Synthetic oligonucleotide
  Antisense strand to SEQ ID NO: 1749693
acuauaaggaaccgccaac

SEQ ID NO: 1749695 - RNA, 19 nt, Artificial Sequence
  Description of Artificial Sequence: Synthetic oligonucleotide
  Sense strand starting at position 3442 of SEQ ID NO: 1562472
gacauuuguuucugcagau

SEQ ID NO: 1749696 - RNA, 19 nt, Artificial Sequence
  Description of Artificial Sequence: Synthetic oligonucleotide
  Antisense strand to SEQ ID NO: 1749695
aucugcagaaacaaauguc

SEQ ID NO: 1749697 - RNA, 19 nt, Artificial Sequence
  Description of Artificial Sequence: Synthetic oligonucleotide
  Sense strand starting at position 3443 of SEQ ID NO: 1562472
acauuuguuucugcagauc

SEQ ID NO: 1749698 - RNA, 19 nt, Artificial Sequence
  Description of Artificial Sequence: Synthetic oligonucleotide
  Antisense strand to SEQ ID NO: 1749697
gaucugcagaaacaaaugu

SEQ ID NO: 1749699 - RNA, 19 nt, Artificial Sequence
  Description of Artificial Sequence: Synthetic oligonucleotide
  Sense strand starting at position 3661 of SEQ ID NO: 1562472
aagagaaacccacguuauu

SEQ ID NO: 1749700 - RNA, 19 nt, Artificial Sequence
  Description of Artificial Sequence: Synthetic oligonucleotide
  Antisense strand to SEQ ID NO: 1749699
aauaacguggguuucucuu

SEQ ID NO: 1749701 - RNA, 19 nt, Artificial Sequence
  Description of Artificial Sequence: Synthetic oligonucleotide
  Sense strand starting at position 3758 of SEQ ID NO: 1562472
ugccuucuggagcauuauu

SEQ ID NO: 1749702 - RNA, 19 nt, Artificial Sequence
  Description of Artificial Sequence: Synthetic oligonucleotide
  Antisense strand to SEQ ID NO: 1749701
aauaaugcuccagaaggca

SEQ ID NO: 1749703 - RNA, 19 nt, Artificial Sequence
  Description of Artificial Sequence: Synthetic oligonucleotide
  Sense strand starting at position 3807 of SEQ ID NO: 1562472
gcagccauccguuaaauau

SEQ ID NO: 1749704 - RNA, 19 nt, Artificial Sequence
  Description of Artificial Sequence: Synthetic oligonucleotide
  Antisense strand to SEQ ID NO: 1749703
auauuuaacggauggcugc

SEQ ID NO: 1749705 - RNA, 19 nt, Artificial Sequence
  Description of Artificial Sequence: Synthetic oligonucleotide
  Sense strand starting at position 3854 of SEQ ID NO: 1562472
gguguuaugucguccaacg

SEQ ID NO: 1749706 - RNA, 19 nt, Artificial Sequence
  Description of Artificial Sequence: Synthetic oligonucleotide
  Antisense strand to SEQ ID NO: 1749705
cguuggacgacauaacacc

SEQ ID NO: 1749707 - RNA, 19 nt, Artificial Sequence
  Description of Artificial Sequence: Synthetic oligonucleotide
  Sense strand starting at position 3907 of SEQ ID NO: 1562472
gaaucugucacucggacga

SEQ ID NO: 1749708 - RNA, 19 nt, Artificial Sequence
  Description of Artificial Sequence: Synthetic oligonucleotide
  Antisense strand to SEQ ID NO: 1749707
ucguccgagugacagauuc

SEQ ID NO: 1749709 - RNA, 19 nt, Artificial Sequence
  Description of Artificial Sequence: Synthetic oligonucleotide
  Sense strand starting at position 98 of SEQ ID NO: 1562473
uuaaaugaagucuguagca

SEQ ID NO: 1749710 - RNA, 19 nt, Artificial Sequence
  Description of Artificial Sequence: Synthetic oligonucleotide
  Antisense strand to SEQ ID NO: 1749709
ugcuacagacuucauuuaa

SEQ ID NO: 1749711 - RNA, 19 nt, Artificial Sequence
  Description of Artificial Sequence: Synthetic oligonucleotide
  Sense strand starting at position 100 of SEQ ID NO: 1562473
aaaugaagucuguagcaac

SEQ ID NO: 1749712 - RNA, 19 nt, Artificial Sequence
  Description of Artificial Sequence: Synthetic oligonucleotide
  Antisense strand to SEQ ID NO: 1749711
guugcuacagacuucauuu

SEQ ID NO: 1749713 - RNA, 19 nt, Artificial Sequence
  Description of Artificial Sequence: Synthetic oligonucleotide
  Sense strand starting at position 257 of SEQ ID NO: 1562473
ccuaaauuacugugaagua

SEQ ID NO: 1749714 - RNA, 19 nt, Artificial Sequence
  Description of Artificial Sequence: Synthetic oligonucleotide
  Antisense strand to SEQ ID NO: 1749713
uacuucacaguaauuuagg

SEQ ID NO: 1749715 - RNA, 19 nt, Artificial Sequence
  Description of Artificial Sequence: Synthetic oligonucleotide
  Sense strand starting at position 454 of SEQ ID NO: 1562473
ugucaauucugaguaacua

SEQ ID NO: 1749716 - RNA, 19 nt, Artificial Sequence
  Description of Artificial Sequence: Synthetic oligonucleotide
  Antisense strand to SEQ ID NO: 1749715
uaguuacucagaauugaca

SEQ ID NO: 1749717 - RNA, 19 nt, Artificial Sequence
  Description of Artificial Sequence: Synthetic oligonucleotide
  Sense strand starting at position 455 of SEQ ID NO: 1562473
gucaauucugaguaacuac

SEQ ID NO: 1749718 - RNA, 19 nt, Artificial Sequence
  Description of Artificial Sequence: Synthetic oligonucleotide
  Antisense strand to SEQ ID NO: 1749717
guaguuacucagaauugac

SEQ ID NO: 1749719 - RNA, 19 nt, Artificial Sequence
  Description of Artificial Sequence: Synthetic oligonucleotide
  Sense strand starting at position 725 of SEQ ID NO: 1562473
auggaauuaacuggguuau

SEQ ID NO: 1749720 - RNA, 19 nt, Artificial Sequence
  Description of Artificial Sequence: Synthetic oligonucleotide
  Antisense strand to SEQ ID NO: 1749719
auaacccaguuaauuccau

SEQ ID NO: 1749721 - RNA, 19 nt, Artificial Sequence
  Description of Artificial Sequence: Synthetic oligonucleotide
  Sense strand starting at position 726 of SEQ ID NO: 1562473
uggaauuaacuggguuaug

SEQ ID NO: 1749722 - RNA, 19 nt, Artificial Sequence
  Description of Artificial Sequence: Synthetic oligonucleotide
  Antisense strand to SEQ ID NO: 1749721
cauaacccaguuaauucca

SEQ ID NO: 1749723 - RNA, 19 nt, Artificial Sequence
  Description of Artificial Sequence: Synthetic oligonucleotide
  Sense strand starting at position 895 of SEQ ID NO: 1562473
cgaagaaggcuggguaucu

SEQ ID NO: 1749724 - RNA, 19 nt, Artificial Sequence
  Description of Artificial Sequence: Synthetic oligonucleotide
  Antisense strand to SEQ ID NO: 1749723
agauacccagccuucuucg

SEQ ID NO: 1749725 - RNA, 19 nt, Artificial Sequence
  Description of Artificial Sequence: Synthetic oligonucleotide
  Sense strand starting at position 1148 of SEQ ID NO: 1562473
ccaaguuggcccugaaaca

SEQ ID NO: 1749726 - RNA, 19 nt, Artificial Sequence
  Description of Artificial Sequence: Synthetic oligonucleotide
  Antisense strand to SEQ ID NO: 1749725
uguuucagggccaacuugg

SEQ ID NO: 1749727 - RNA, 19 nt, Artificial Sequence
  Description of Artificial Sequence: Synthetic oligonucleotide
  Sense strand starting at position 1218 of SEQ ID NO: 1562473
cucugaaugccugaucuga

SEQ ID NO: 1749728 - RNA, 19 nt, Artificial Sequence
  Description of Artificial Sequence: Synthetic oligonucleotide
  Antisense strand to SEQ ID NO: 1749727
ucagaucaggcauucagag

SEQ ID NO: 1749729 - RNA, 19 nt, Artificial Sequence
  Description of Artificial Sequence: Synthetic oligonucleotide
  Sense strand starting at position 1971 of SEQ ID NO: 1562473
cgcucucaauacuuggaga

SEQ ID NO: 1749730 - RNA, 19 nt, Artificial Sequence
  Description of Artificial Sequence: Synthetic oligonucleotide
  Antisense strand to SEQ ID NO: 1749729
ucuccaaguauugagagcg

SEQ ID NO: 1749731 - RNA, 19 nt, Artificial Sequence
  Description of Artificial Sequence: Synthetic oligonucleotide
  Sense strand starting at position 2177 of SEQ ID NO: 1562473
gucggaguggaguacuauu

SEQ ID NO: 1749732 - RNA, 19 nt, Artificial Sequence
  Description of Artificial Sequence: Synthetic oligonucleotide
  Antisense strand to SEQ ID NO: 1749731
aauaguacuccacuccgac

SEQ ID NO: 1749733 - RNA, 19 nt, Artificial Sequence
  Description of Artificial Sequence: Synthetic oligonucleotide
  Sense strand starting at position 2185 of SEQ ID NO: 1562473
ggaguacuauuagcaugga

SEQ ID NO: 1749734 - RNA, 19 nt, Artificial Sequence
  Description of Artificial Sequence: Synthetic oligonucleotide
  Antisense strand to SEQ ID NO: 1749733
uccaugcuaauaguacucc

SEQ ID NO: 1749735 - RNA, 19 nt, Artificial Sequence
  Description of Artificial Sequence: Synthetic oligonucleotide
  Sense strand starting at position 2188 of SEQ ID NO: 1562473
guacuauuagcauggaacu

SEQ ID NO: 1749736 - RNA, 19 nt, Artificial Sequence
  Description of Artificial Sequence: Synthetic oligonucleotide
  Antisense strand to SEQ ID NO: 1749735
aguuccaugcuaauaguac

SEQ ID NO: 1749737 - RNA, 19 nt, Artificial Sequence
  Description of Artificial Sequence: Synthetic oligonucleotide
  Sense strand starting at position 2228 of SEQ ID NO: 1562473
caaagaggaucauagagau

SEQ ID NO: 1749738 - RNA, 19 nt, Artificial Sequence
  Description of Artificial Sequence: Synthetic oligonucleotide
  Antisense strand to SEQ ID NO: 1749737
aucucuaugauccucuuug

SEQ ID NO: 1749739 - RNA, 19 nt, Artificial Sequence
  Description of Artificial Sequence: Synthetic oligonucleotide
  Sense strand starting at position 2462 of SEQ ID NO: 1562473
gguaauuacuaguuauucu

SEQ ID NO: 1749740 - RNA, 19 nt, Artificial Sequence
  Description of Artificial Sequence: Synthetic oligonucleotide
  Antisense strand to SEQ ID NO: 1749739
agaauaacuaguaauuacc

SEQ ID NO: 1749741 - RNA, 19 nt, Artificial Sequence
  Description of Artificial Sequence: Synthetic oligonucleotide
  Sense strand starting at position 2470 of SEQ ID NO: 1562473
cuaguuauucuugaguaau

SEQ ID NO: 1749742 - RNA, 19 nt, Artificial Sequence
  Description of Artificial Sequence: Synthetic oligonucleotide
  Antisense strand to SEQ ID NO: 1749741
auuacucaagaauaacuag

SEQ ID NO: 1749743 - RNA, 19 nt, Artificial Sequence
  Description of Artificial Sequence: Synthetic oligonucleotide
  Sense strand starting at position 2472 of SEQ ID NO: 1562473
aguuauucuugaguaauac

SEQ ID NO: 1749744 - RNA, 19 nt, Artificial Sequence
  Description of Artificial Sequence: Synthetic oligonucleotide
  Antisense strand to SEQ ID NO: 1749743
guauuacucaagaauaacu

SEQ ID NO: 1749745 - RNA, 19 nt, Artificial Sequence
  Description of Artificial Sequence: Synthetic oligonucleotide
  Sense strand starting at position 2473 of SEQ ID NO: 1562473
guuauucuugaguaauacu

SEQ ID NO: 1749746 - RNA, 19 nt, Artificial Sequence
  Description of Artificial Sequence: Synthetic oligonucleotide
  Antisense strand to SEQ ID NO: 1749745
aguauuacucaagaauaac

SEQ ID NO: 1749747 - RNA, 19 nt, Artificial Sequence
  Description of Artificial Sequence: Synthetic oligonucleotide
  Sense strand starting at position 2502 of SEQ ID NO: 1562473
acagcuuuauagcuacaga

SEQ ID NO: 1749748 - RNA, 19 nt, Artificial Sequence
  Description of Artificial Sequence: Synthetic oligonucleotide
  Antisense strand to SEQ ID NO: 1749747
ucuguagcuauaaagcugu

SEQ ID NO: 1749749 - RNA, 19 nt, Artificial Sequence
  Description of Artificial Sequence: Synthetic oligonucleotide
  Sense strand starting at position 2811 of SEQ ID NO: 1562473
uugugacaguucucagacu

SEQ ID NO: 1749750 - RNA, 19 nt, Artificial Sequence
  Description of Artificial Sequence: Synthetic oligonucleotide
  Antisense strand to SEQ ID NO: 1749749
agucugagaacugucacaa

SEQ ID NO: 1749751 - RNA, 19 nt, Artificial Sequence
  Description of Artificial Sequence: Synthetic oligonucleotide
  Sense strand starting at position 2941 of SEQ ID NO: 1562473
gcaccugugcaugcgaauu

SEQ ID NO: 1749752 - RNA, 19 nt, Artificial Sequence
  Description of Artificial Sequence: Synthetic oligonucleotide
  Antisense strand to SEQ ID NO: 1749751
aauucgcaugcacaggugc

SEQ ID NO: 1749753 - RNA, 19 nt, Artificial Sequence
  Description of Artificial Sequence: Synthetic oligonucleotide
  Sense strand starting at position 2982 of SEQ ID NO: 1562473
aaggguauucgguagagug

SEQ ID NO: 1749754 - RNA, 19 nt, Artificial Sequence
  Description of Artificial Sequence: Synthetic oligonucleotide
  Antisense strand to SEQ ID NO: 1749753
cacucuaccgaauacccuu

SEQ ID NO: 1749755 - RNA, 19 nt, Artificial Sequence
  Description of Artificial Sequence: Synthetic oligonucleotide
  Sense strand starting at position 2984 of SEQ ID NO: 1562473
ggguauucgguagagugaa

SEQ ID NO: 1749756 - RNA, 19 nt, Artificial Sequence
  Description of Artificial Sequence: Synthetic oligonucleotide
  Antisense strand to SEQ ID NO: 1749755
uucacucuaccgaauaccc

SEQ ID NO: 1749757 - RNA, 19 nt, Artificial Sequence
  Description of Artificial Sequence: Synthetic oligonucleotide
  Sense strand starting at position 3049 of SEQ ID NO: 1562473
uguuaacaguuucuuauga

SEQ ID NO: 1749758 - RNA, 19 nt, Artificial Sequence
  Description of Artificial Sequence: Synthetic oligonucleotide
  Antisense strand to SEQ ID NO: 1749757
ucauaagaaacuguuaaca

SEQ ID NO: 1749759 - RNA, 19 nt, Artificial Sequence
  Description of Artificial Sequence: Synthetic oligonucleotide
  Sense strand starting at position 3050 of SEQ ID NO: 1562473
guuaacaguuucuuaugau

SEQ ID NO: 1749760 - RNA, 19 nt, Artificial Sequence
  Description of Artificial Sequence: Synthetic oligonucleotide
  Antisense strand to SEQ ID NO: 1749759
aucauaagaaacuguuaac

SEQ ID NO: 1749761 - RNA, 19 nt, Artificial Sequence
  Description of Artificial Sequence: Synthetic oligonucleotide
  Sense strand starting at position 3056 of SEQ ID NO: 1562473
aguuucuuaugauccucua

SEQ ID NO: 1749762 - RNA, 19 nt, Artificial Sequence
  Description of Artificial Sequence: Synthetic oligonucleotide
  Antisense strand to SEQ ID NO: 1749761
uagaggaucauaagaaacu

SEQ ID NO: 1749763 - RNA, 19 nt, Artificial Sequence
  Description of Artificial Sequence: Synthetic oligonucleotide
  Sense strand starting at position 3070 of SEQ ID NO: 1562473
cucuaaagauguuccauga

SEQ ID NO: 1749764 - RNA, 19 nt, Artificial Sequence
  Description of Artificial Sequence: Synthetic oligonucleotide
  Antisense strand to SEQ ID NO: 1749763
ucauggaacaucuuuagag

SEQ ID NO: 1749765 - RNA, 19 nt, Artificial Sequence
  Description of Artificial Sequence: Synthetic oligonucleotide
  Sense strand starting at position 3177 of SEQ ID NO: 1562473
uggagaucggcccauaucu

SEQ ID NO: 1749766 - RNA, 19 nt, Artificial Sequence
  Description of Artificial Sequence: Synthetic oligonucleotide
  Antisense strand to SEQ ID NO: 1749765
agauaugggccgaucucca

SEQ ID NO: 1749767 - RNA, 19 nt, Artificial Sequence
  Description of Artificial Sequence: Synthetic oligonucleotide
  Sense strand starting at position 3185 of SEQ ID NO: 1562473
ggcccauaucuguauauga

SEQ ID NO: 1749768 - RNA, 19 nt, Artificial Sequence
  Description of Artificial Sequence: Synthetic oligonucleotide
  Antisense strand to SEQ ID NO: 1749767
ucauauacagauaugggcc

SEQ ID NO: 1749769 - RNA, 19 nt, Artificial Sequence
  Description of Artificial Sequence: Synthetic oligonucleotide
  Sense strand starting at position 3243 of SEQ ID NO: 1562473
gacuaaauuucgcucuugu

SEQ ID NO: 1749770 - RNA, 19 nt, Artificial Sequence
  Description of Artificial Sequence: Synthetic oligonucleotide
  Antisense strand to SEQ ID NO: 1749769
acaagagcgaaauuuaguc

SEQ ID NO: 1749771 - RNA, 19 nt, Artificial Sequence
  Description of Artificial Sequence: Synthetic oligonucleotide
  Sense strand starting at position 3538 of SEQ ID NO: 1562473
cugcguagugauucauugu

SEQ ID NO: 1749772 - RNA, 19 nt, Artificial Sequence
  Description of Artificial Sequence: Synthetic oligonucleotide
  Antisense strand to SEQ ID NO: 1749771
acaaugaaucacuacgcag

SEQ ID NO: 1749773 - RNA, 19 nt, Artificial Sequence
  Description of Artificial Sequence: Synthetic oligonucleotide
  Sense strand starting at position 3544 of SEQ ID NO: 1562473
agugauucauuguugggau

SEQ ID NO: 1749774 - RNA, 19 nt, Artificial Sequence
  Description of Artificial Sequence: Synthetic oligonucleotide
  Antisense strand to SEQ ID NO: 1749773
aucccaacaaugaaucacu

SEQ ID NO: 1749775 - RNA, 19 nt, Artificial Sequence
  Description of Artificial Sequence: Synthetic oligonucleotide
  Sense strand starting at position 3621 of SEQ ID NO: 1562473
uaaucagugcuguaaugaa

SEQ ID NO: 1749776 - RNA, 19 nt, Artificial Sequence
  Description of Artificial Sequence: Synthetic oligonucleotide
  Antisense strand to SEQ ID NO: 1749775
uucauuacagcacugauua

SEQ ID NO: 1749777 - RNA, 19 nt, Artificial Sequence
  Description of Artificial Sequence: Synthetic oligonucleotide
  Sense strand starting at position 3652 of SEQ ID NO: 1562473
acuguuacaucuguaggau

SEQ ID NO: 1749778 - RNA, 19 nt, Artificial Sequence
  Description of Artificial Sequence: Synthetic oligonucleotide
  Antisense strand to SEQ ID NO: 1749777
auccuacagauguaacagu

SEQ ID NO: 1749779 - RNA, 19 nt, Artificial Sequence
  Description of Artificial Sequence: Synthetic oligonucleotide
  Sense strand starting at position 3653 of SEQ ID NO: 1562473
cuguuacaucuguaggaug

SEQ ID NO: 1749780 - RNA, 19 nt, Artificial Sequence
  Description of Artificial Sequence: Synthetic oligonucleotide
  Antisense strand to SEQ ID NO: 1749779
cauccuacagauguaacag

SEQ ID NO: 1749781 - RNA, 19 nt, Artificial Sequence
  Description of Artificial Sequence: Synthetic oligonucleotide
  Sense strand starting at position 3655 of SEQ ID NO: 1562473
guuacaucuguaggaugaa

SEQ ID NO: 1749782 - RNA, 19 nt, Artificial Sequence
  Description of Artificial Sequence: Synthetic oligonucleotide
  Antisense strand to SEQ ID NO: 1749781
uucauccuacagauguaac

SEQ ID NO: 1749783 - RNA, 19 nt, Artificial Sequence
  Description of Artificial Sequence: Synthetic oligonucleotide
  Sense strand starting at position 3680 of SEQ ID NO: 1562473
uugaaauugcuagaucuca

SEQ ID NO: 1749784 - RNA, 19 nt, Artificial Sequence
  Description of Artificial Sequence: Synthetic oligonucleotide
  Antisense strand to SEQ ID NO: 1749783
ugagaucuagcaauuucaa

SEQ ID NO: 1749785 - RNA, 19 nt, Artificial Sequence
  Description of Artificial Sequence: Synthetic oligonucleotide
  Sense strand starting at position 3688 of SEQ ID NO: 1562473
gcuagaucucaauauaugc

SEQ ID NO: 1749786 - RNA, 19 nt, Artificial Sequence
  Description of Artificial Sequence: Synthetic oligonucleotide
  Antisense strand to SEQ ID NO: 1749785
gcauauauugagaucuagc

SEQ ID NO: 1749787 - RNA, 19 nt, Artificial Sequence
  Description of Artificial Sequence: Synthetic oligonucleotide
  Sense strand starting at position 3842 of SEQ ID NO: 1562473
guggaagaucccgagcacu

SEQ ID NO: 1749788 - RNA, 19 nt, Artificial Sequence
  Description of Artificial Sequence: Synthetic oligonucleotide
  Antisense strand to SEQ ID NO: 1749787
agugcucgggaucuuccac

SEQ ID NO: 1749789 - RNA, 19 nt, Artificial Sequence
  Description of Artificial Sequence: Synthetic oligonucleotide
  Sense strand starting at position 31 of SEQ ID NO: 1562474
cugaaacaaucuguguaag

SEQ ID NO: 1749790 - RNA, 19 nt, Artificial Sequence
  Description of Artificial Sequence: Synthetic oligonucleotide
  Antisense strand to SEQ ID NO: 1749789
cuuacacagauuguuucag

SEQ ID NO: 1749791 - RNA, 19 nt, Artificial Sequence
  Description of Artificial Sequence: Synthetic oligonucleotide
  Sense strand starting at position 37 of SEQ ID NO: 1562474
caaucuguguaaguuagaa

SEQ ID NO: 1749792 - RNA, 19 nt, Artificial Sequence
  Description of Artificial Sequence: Synthetic oligonucleotide
  Antisense strand to SEQ ID NO: 1749791
uucuaacuuacacagauug

SEQ ID NO: 1749793 - RNA, 19 nt, Artificial Sequence
  Description of Artificial Sequence: Synthetic oligonucleotide
  Sense strand starting at position 57 of SEQ ID NO: 1562474
ucaaguguuccuuaaaguu

SEQ ID NO: 1749794 - RNA, 19 nt, Artificial Sequence
  Description of Artificial Sequence: Synthetic oligonucleotide
  Antisense strand to SEQ ID NO: 1749793
aacuuuaaggaacacuuga

SEQ ID NO: 1749795 - RNA, 19 nt, Artificial Sequence
  Description of Artificial Sequence: Synthetic oligonucleotide
  Sense strand starting at position 63 of SEQ ID NO: 1562474
guuccuuaaaguuagguau

SEQ ID NO: 1749796 - RNA, 19 nt, Artificial Sequence
  Description of Artificial Sequence: Synthetic oligonucleotide
  Antisense strand to SEQ ID NO: 1749795
auaccuaacuuuaaggaac

SEQ ID NO: 1749797 - RNA, 19 nt, Artificial Sequence
  Description of Artificial Sequence: Synthetic oligonucleotide
  Sense strand starting at position 66 of SEQ ID NO: 1562474
ccuuaaaguuagguauaau

SEQ ID NO: 1749798 - RNA, 19 nt, Artificial Sequence
  Description of Artificial Sequence: Synthetic oligonucleotide
  Antisense strand to SEQ ID NO: 1749797
auuauaccuaacuuuaagg

SEQ ID NO: 1749799 - RNA, 19 nt, Artificial Sequence
  Description of Artificial Sequence: Synthetic oligonucleotide
  Sense strand starting at position 119 of SEQ ID NO: 1562474
aauggaagucuuugauugu

SEQ ID NO: 1749800 - RNA, 19 nt, Artificial Sequence
  Description of Artificial Sequence: Synthetic oligonucleotide
  Antisense strand to SEQ ID NO: 1749799
acaaucaaagacuuccauu

SEQ ID NO: 1749801 - RNA, 19 nt, Artificial Sequence
  Description of Artificial Sequence: Synthetic oligonucleotide
  Sense strand starting at position 122 of SEQ ID NO: 1562474
ggaagucuuugauugucac

SEQ ID NO: 1749802 - RNA, 19 nt, Artificial Sequence
  Description of Artificial Sequence: Synthetic oligonucleotide
  Antisense strand to SEQ ID NO: 1749801
gugacaaucaaagacuucc

SEQ ID NO: 1749803 - RNA, 19 nt, Artificial Sequence
  Description of Artificial Sequence: Synthetic oligonucleotide
  Sense strand starting at position 123 of SEQ ID NO: 1562474
gaagucuuugauugucacu

SEQ ID NO: 1749804 - RNA, 19 nt, Artificial Sequence
  Description of Artificial Sequence: Synthetic oligonucleotide
  Antisense strand to SEQ ID NO: 1749803
agugacaaucaaagacuuc

SEQ ID NO: 1749805 - RNA, 19 nt, Artificial Sequence
  Description of Artificial Sequence: Synthetic oligonucleotide
  Sense strand starting at position 125 of SEQ ID NO: 1562474
agucuuugauugucacuua

SEQ ID NO: 1749806 - RNA, 19 nt, Artificial Sequence
  Description of Artificial Sequence: Synthetic oligonucleotide
  Antisense strand to SEQ ID NO: 1749805
uaagugacaaucaaagacu

SEQ ID NO: 1749807 - RNA, 19 nt, Artificial Sequence
  Description of Artificial Sequence: Synthetic oligonucleotide
  Sense strand starting at position 151 of SEQ ID NO: 1562474
uuaguauuauuggcuuauc

SEQ ID NO: 1749808 - RNA, 19 nt, Artificial Sequence
  Description of Artificial Sequence: Synthetic oligonucleotide
  Antisense strand to SEQ ID NO: 1749807
gauaagccaauaauacuaa

SEQ ID NO: 1749809 - RNA, 19 nt, Artificial Sequence
  Description of Artificial Sequence: Synthetic oligonucleotide
  Sense strand starting at position 154 of SEQ ID NO: 1562474
guauuauuggcuuauccaa

SEQ ID NO: 1749810 - RNA, 19 nt, Artificial Sequence
  Description of Artificial Sequence: Synthetic oligonucleotide
  Antisense strand to SEQ ID NO: 1749809
uuggauaagccaauaauac

SEQ ID NO: 1749811 - RNA, 19 nt, Artificial Sequence
  Description of Artificial Sequence: Synthetic oligonucleotide
  Sense strand starting at position 156 of SEQ ID NO: 1562474
auuauuggcuuauccaagu

SEQ ID NO: 1749812 - RNA, 19 nt, Artificial Sequence
  Description of Artificial Sequence: Synthetic oligonucleotide
  Antisense strand to SEQ ID NO: 1749811
acuuggauaagccaauaau

SEQ ID NO: 1749813 - RNA, 19 nt, Artificial Sequence
  Description of Artificial Sequence: Synthetic oligonucleotide
  Sense strand starting at position 246 of SEQ ID NO: 1562474
ucaaauguguuagcauaug

SEQ ID NO: 1749814 - RNA, 19 nt, Artificial Sequence
  Description of Artificial Sequence: Synthetic oligonucleotide
  Antisense strand to SEQ ID NO: 1749813
cauaugcuaacacauuuga

SEQ ID NO: 1749815 - RNA, 19 nt, Artificial Sequence
  Description of Artificial Sequence: Synthetic oligonucleotide
  Sense strand starting at position 287 of SEQ ID NO: 1562474
ucuucuuggcuguaucuau

SEQ ID NO: 1749816 - RNA, 19 nt, Artificial Sequence
  Description of Artificial Sequence: Synthetic oligonucleotide
  Antisense strand to SEQ ID NO: 1749815
auagauacagccaagaaga

SEQ ID NO: 1749817 - RNA, 19 nt, Artificial Sequence
  Description of Artificial Sequence: Synthetic oligonucleotide
  Sense strand starting at position 875 of SEQ ID NO: 1562474
ucagccucuugaguuaauu

SEQ ID NO: 1749818 - RNA, 19 nt, Artificial Sequence
  Description of Artificial Sequence: Synthetic oligonucleotide
  Antisense strand to SEQ ID NO: 1749817
aauuaacucaagaggcuga

SEQ ID NO: 1749819 - RNA, 19 nt, Artificial Sequence
  Description of Artificial Sequence: Synthetic oligonucleotide
  Sense strand starting at position 913 of SEQ ID NO: 1562474
uguuuauagcuacaaaugu

SEQ ID NO: 1749820 - RNA, 19 nt, Artificial Sequence
  Description of Artificial Sequence: Synthetic oligonucleotide
  Antisense strand to SEQ ID NO: 1749819
acauuuguagcuauaaaca

SEQ ID NO: 1749821 - RNA, 19 nt, Artificial Sequence
  Description of Artificial Sequence: Synthetic oligonucleotide
  Sense strand starting at position 945 of SEQ ID NO: 1562474
gcuuuagcugugucaugcu

SEQ ID NO: 1749822 - RNA, 19 nt, Artificial Sequence
  Description of Artificial Sequence: Synthetic oligonucleotide
  Antisense strand to SEQ ID NO: 1749821
agcaugacacagcuaaagc

SEQ ID NO: 1749823 - RNA, 19 nt, Artificial Sequence
  Description of Artificial Sequence: Synthetic oligonucleotide
  Sense strand starting at position 1091 of SEQ ID NO: 1562474
ccaguauaauugccuuaug

SEQ ID NO: 1749824 - RNA, 19 nt, Artificial Sequence
  Description of Artificial Sequence: Synthetic oligonucleotide
  Antisense strand to SEQ ID NO: 1749823
cauaaggcaauuauacugg

SEQ ID NO: 1749825 - RNA, 19 nt, Artificial Sequence
  Description of Artificial Sequence: Synthetic oligonucleotide
  Sense strand starting at position 1119 of SEQ ID NO: 1562474
ugcuguguuauagacagau

SEQ ID NO: 1749826 - RNA, 19 nt, Artificial Sequence
  Description of Artificial Sequence: Synthetic oligonucleotide
  Antisense strand to SEQ ID NO: 1749825
aucugucuauaacacagca

SEQ ID NO: 1749827 - RNA, 19 nt, Artificial Sequence
  Description of Artificial Sequence: Synthetic oligonucleotide
  Sense strand starting at position 1207 of SEQ ID NO: 1562474
cucucuguaugcuuagaaa

SEQ ID NO: 1749828 - RNA, 19 nt, Artificial Sequence
  Description of Artificial Sequence: Synthetic oligonucleotide
  Antisense strand to SEQ ID NO: 1749827
uuucuaagcauacagagag

SEQ ID NO: 1749829 - RNA, 19 nt, Artificial Sequence
  Description of Artificial Sequence: Synthetic oligonucleotide
  Sense strand starting at position 1317 of SEQ ID NO: 1562474
cuacuucuugaagggauau

SEQ ID NO: 1749830 - RNA, 19 nt, Artificial Sequence
  Description of Artificial Sequence: Synthetic oligonucleotide
  Antisense strand to SEQ ID NO: 1749829
auaucccuucaagaaguag

SEQ ID NO: 1749831 - RNA, 19 nt, Artificial Sequence
  Description of Artificial Sequence: Synthetic oligonucleotide
  Sense strand starting at position 1424 of SEQ ID NO: 1562474
cacuaaugucugcagggua

SEQ ID NO: 1749832 - RNA, 19 nt, Artificial Sequence
  Description of Artificial Sequence: Synthetic oligonucleotide
  Antisense strand to SEQ ID NO: 1749831
uacccugcagacauuagug

SEQ ID NO: 1749833 - RNA, 19 nt, Artificial Sequence
  Description of Artificial Sequence: Synthetic oligonucleotide
  Sense strand starting at position 1740 of SEQ ID NO: 1562474
acugaagcagggugaaaua

SEQ ID NO: 1749834 - RNA, 19 nt, Artificial Sequence
  Description of Artificial Sequence: Synthetic oligonucleotide
  Antisense strand to SEQ ID NO: 1749833
uauuucacccugcuucagu

SEQ ID NO: 1749835 - RNA, 19 nt, Artificial Sequence
  Description of Artificial Sequence: Synthetic oligonucleotide
  Sense strand starting at position 1753 of SEQ ID NO: 1562474
gaaauacagcacuguguca

SEQ ID NO: 1749836 - RNA, 19 nt, Artificial Sequence
  Description of Artificial Sequence: Synthetic oligonucleotide
  Antisense strand to SEQ ID NO: 1749835
ugacacagugcuguauuuc

SEQ ID NO: 1749837 - RNA, 19 nt, Artificial Sequence
  Description of Artificial Sequence: Synthetic oligonucleotide
  Sense strand starting at position 1796 of SEQ ID NO: 1562474
ggguaagucugacuuuguu

SEQ ID NO: 1749838 - RNA, 19 nt, Artificial Sequence
  Description of Artificial Sequence: Synthetic oligonucleotide
  Antisense strand to SEQ ID NO: 1749837
aacaaagucagacuuaccc

SEQ ID NO: 1749839 - RNA, 19 nt, Artificial Sequence
  Description of Artificial Sequence: Synthetic oligonucleotide
  Sense strand starting at position 2240 of SEQ ID NO: 1562474
aagugagacgucuacauga

SEQ ID NO: 1749840 - RNA, 19 nt, Artificial Sequence
  Description of Artificial Sequence: Synthetic oligonucleotide
  Antisense strand to SEQ ID NO: 1749839
ucauguagacgucucacuu

SEQ ID NO: 1749841 - RNA, 19 nt, Artificial Sequence
  Description of Artificial Sequence: Synthetic oligonucleotide
  Sense strand starting at position 2242 of SEQ ID NO: 1562474
gugagacgucuacaugaaa

SEQ ID NO: 1749842 - RNA, 19 nt, Artificial Sequence
  Description of Artificial Sequence: Synthetic oligonucleotide
  Antisense strand to SEQ ID NO: 1749841
uuucauguagacgucucac

SEQ ID NO: 1749843 - RNA, 19 nt, Artificial Sequence
  Description of Artificial Sequence: Synthetic oligonucleotide
  Sense strand starting at position 2245 of SEQ ID NO: 1562474
agacgucuacaugaaaugu

SEQ ID NO: 1749844 - RNA, 19 nt, Artificial Sequence
  Description of Artificial Sequence: Synthetic oligonucleotide
  Antisense strand to SEQ ID NO: 1749843
acauuucauguagacgucu

SEQ ID NO: 1749845 - RNA, 19 nt, Artificial Sequence
  Description of Artificial Sequence: Synthetic oligonucleotide
  Sense strand starting at position 2280 of SEQ ID NO: 1562474
uuacuuacguauuuccuua

SEQ ID NO: 1749846 - RNA, 19 nt, Artificial Sequence
  Description of Artificial Sequence: Synthetic oligonucleotide
  Antisense strand to SEQ ID NO: 1749845
uaaggaaauacguaaguaa

SEQ ID NO: 1749847 - RNA, 19 nt, Artificial Sequence
  Description of Artificial Sequence: Synthetic oligonucleotide
  Sense strand starting at position 2284 of SEQ ID NO: 1562474
uuacguauuuccuuauauc

SEQ ID NO: 1749848 - RNA, 19 nt, Artificial Sequence
  Description of Artificial Sequence: Synthetic oligonucleotide
  Antisense strand to SEQ ID NO: 1749847
gauauaaggaaauacguaa

SEQ ID NO: 1749849 - RNA, 19 nt, Artificial Sequence
  Description of Artificial Sequence: Synthetic oligonucleotide
  Sense strand starting at position 3086 of SEQ ID NO: 1562474
gguaaaugauguucuccaa

SEQ ID NO: 1749850 - RNA, 19 nt, Artificial Sequence
  Description of Artificial Sequence: Synthetic oligonucleotide
  Antisense strand to SEQ ID NO: 1749849
uuggagaacaucauuuacc

SEQ ID NO: 1749851 - RNA, 19 nt, Artificial Sequence
  Description of Artificial Sequence: Synthetic oligonucleotide
  Sense strand starting at position 3484 of SEQ ID NO: 1562474
augaaagcuccucagcaau

SEQ ID NO: 1749852 - RNA, 19 nt, Artificial Sequence
  Description of Artificial Sequence: Synthetic oligonucleotide
  Antisense strand to SEQ ID NO: 1749851
auugcugaggagcuuucau

SEQ ID NO: 1749853 - RNA, 19 nt, Artificial Sequence
  Description of Artificial Sequence: Synthetic oligonucleotide
  Sense strand starting at position 3649 of SEQ ID NO: 1562474
aguaaaugacucugacuuc

SEQ ID NO: 1749854 - RNA, 19 nt, Artificial Sequence
  Description of Artificial Sequence: Synthetic oligonucleotide
  Antisense strand to SEQ ID NO: 1749853
gaagucagagucauuuacu

SEQ ID NO: 1749855 - RNA, 19 nt, Artificial Sequence
  Description of Artificial Sequence: Synthetic oligonucleotide
  Sense strand starting at position 3687 of SEQ ID NO: 1562474
cauagaauauucgccaagu

SEQ ID NO: 1749856 - RNA, 19 nt, Artificial Sequence
  Description of Artificial Sequence: Synthetic oligonucleotide
  Antisense strand to SEQ ID NO: 1749855
acuuggcgaauauucuaug

SEQ ID NO: 1749857 - RNA, 19 nt, Artificial Sequence
  Description of Artificial Sequence: Synthetic oligonucleotide
  Sense strand starting at position 3688 of SEQ ID NO: 1562474
auagaauauucgccaagua

SEQ ID NO: 1749858 - RNA, 19 nt, Artificial Sequence
  Description of Artificial Sequence: Synthetic oligonucleotide
  Antisense strand to SEQ ID NO: 1749857
uacuuggcgaauauucuau

SEQ ID NO: 1749859 - RNA, 19 nt, Artificial Sequence
  Description of Artificial Sequence: Synthetic oligonucleotide
  Sense strand starting at position 3855 of SEQ ID NO: 1562474
uccaauccuuuguucgaga

SEQ ID NO: 1749860 - RNA, 19 nt, Artificial Sequence
  Description of Artificial Sequence: Synthetic oligonucleotide
  Antisense strand to SEQ ID NO: 1749859
ucucgaacaaaggauugga

SEQ ID NO: 1749861 - RNA, 19 nt, Artificial Sequence
  Description of Artificial Sequence: Synthetic oligonucleotide
  Sense strand starting at position 3856 of SEQ ID NO: 1562474
ccaauccuuuguucgagau

SEQ ID NO: 1749862 - RNA, 19 nt, Artificial Sequence
  Description of Artificial Sequence: Synthetic oligonucleotide
  Antisense strand to SEQ ID NO: 1749861
aucucgaacaaaggauugg

SEQ ID NO: 1749863 - RNA, 19 nt, Artificial Sequence
  Description of Artificial Sequence: Synthetic oligonucleotide
  Sense strand starting at position 3857 of SEQ ID NO: 1562474
caauccuuuguucgagaug

SEQ ID NO: 1749864 - RNA, 19 nt, Artificial Sequence
  Description of Artificial Sequence: Synthetic oligonucleotide
  Antisense strand to SEQ ID NO: 1749863
caucucgaacaaaggauug

SEQ ID NO: 1749865 - RNA, 19 nt, Artificial Sequence
  Description of Artificial Sequence: Synthetic oligonucleotide
  Sense strand starting at position 3860 of SEQ ID NO: 1562474
uccuuuguucgagaugcca

SEQ ID NO: 1749866 - RNA, 19 nt, Artificial Sequence
  Description of Artificial Sequence: Synthetic oligonucleotide
  Antisense strand to SEQ ID NO: 1749865
uggcaucucgaacaaagga

SEQ ID NO: 1749867 - RNA, 19 nt, Artificial Sequence
  Description of Artificial Sequence: Synthetic oligonucleotide
  Sense strand starting at position 3893 of SEQ ID NO: 1562474
acugguaaugacugcauaa

SEQ ID NO: 1749868 - RNA, 19 nt, Artificial Sequence
  Description of Artificial Sequence: Synthetic oligonucleotide
  Antisense strand to SEQ ID NO: 1749867
uuaugcagucauuaccagu

SEQ ID NO: 1749869 - RNA, 19 nt, Artificial Sequence
  Description of Artificial Sequence: Synthetic oligonucleotide
  Sense strand starting at position 171 of SEQ ID NO: 1562475
agccauagauucugagaca

SEQ ID NO: 1749870 - RNA, 19 nt, Artificial Sequence
  Description of Artificial Sequence: Synthetic oligonucleotide
  Antisense strand to SEQ ID NO: 1749869
ugucucagaaucuauggcu

SEQ ID NO: 1749871 - RNA, 19 nt, Artificial Sequence
  Description of Artificial Sequence: Synthetic oligonucleotide
  Sense strand starting at position 172 of SEQ ID NO: 1562475
gccauagauucugagacaa

SEQ ID NO: 1749872 - RNA, 19 nt, Artificial Sequence
  Description of Artificial Sequence: Synthetic oligonucleotide
  Antisense strand to SEQ ID NO: 1749871
uugucucagaaucuauggc

SEQ ID NO: 1749873 - RNA, 19 nt, Artificial Sequence
  Description of Artificial Sequence: Synthetic oligonucleotide
  Sense strand starting at position 211 of SEQ ID NO: 1562475
uuaauuaagccaggucaau

SEQ ID NO: 1749874 - RNA, 19 nt, Artificial Sequence
  Description of Artificial Sequence: Synthetic oligonucleotide
  Antisense strand to SEQ ID NO: 1749873
auugaccuggcuuaauuaa

SEQ ID NO: 1749875 - RNA, 19 nt, Artificial Sequence
  Description of Artificial Sequence: Synthetic oligonucleotide
  Sense strand starting at position 344 of SEQ ID NO: 1562475
guccucaaauccgagaguu

SEQ ID NO: 1749876 - RNA, 19 nt, Artificial Sequence
  Description of Artificial Sequence: Synthetic oligonucleotide
  Antisense strand to SEQ ID NO: 1749875
aacucucggauuugaggac

SEQ ID NO: 1749877 - RNA, 19 nt, Artificial Sequence
  Description of Artificial Sequence: Synthetic oligonucleotide
  Sense strand starting at position 346 of SEQ ID NO: 1562475
ccucaaauccgagaguuug

SEQ ID NO: 1749878 - RNA, 19 nt, Artificial Sequence
  Description of Artificial Sequence: Synthetic oligonucleotide
  Antisense strand to SEQ ID NO: 1749877
caaacucucggauuugagg

SEQ ID NO: 1749879 - RNA, 19 nt, Artificial Sequence
  Description of Artificial Sequence: Synthetic oligonucleotide
  Sense strand starting at position 352 of SEQ ID NO: 1562475
auccgagaguuugagacua

SEQ ID NO: 1749880 - RNA, 19 nt, Artificial Sequence
  Description of Artificial Sequence: Synthetic oligonucleotide
  Antisense strand to SEQ ID NO: 1749879
uagucucaaacucucggau

SEQ ID NO: 1749881 - RNA, 19 nt, Artificial Sequence
  Description of Artificial Sequence: Synthetic oligonucleotide
  Sense strand starting at position 354 of SEQ ID NO: 1562475
ccgagaguuugagacuaug

SEQ ID NO: 1749882 - RNA, 19 nt, Artificial Sequence
  Description of Artificial Sequence: Synthetic oligonucleotide
  Antisense strand to SEQ ID NO: 1749881
cauagucucaaacucucgg

SEQ ID NO: 1749883 - RNA, 19 nt, Artificial Sequence
  Description of Artificial Sequence: Synthetic oligonucleotide
  Sense strand starting at position 390 of SEQ ID NO: 1562475
gcuaacgucuuacucaaga

SEQ ID NO: 1749884 - RNA, 19 nt, Artificial Sequence
  Description of Artificial Sequence: Synthetic oligonucleotide
  Antisense strand to SEQ ID NO: 1749883
ucuugaguaagacguuagc

SEQ ID NO: 1749885 - RNA, 19 nt, Artificial Sequence
  Description of Artificial Sequence: Synthetic oligonucleotide
  Sense strand starting at position 395 of SEQ ID NO: 1562475
cgucuuacucaagagguau

SEQ ID NO: 1749886 - RNA, 19 nt, Artificial Sequence
  Description of Artificial Sequence: Synthetic oligonucleotide
  Antisense strand to SEQ ID NO: 1749885
auaccucuugaguaagacg

SEQ ID NO: 1749887 - RNA, 19 nt, Artificial Sequence
  Description of Artificial Sequence: Synthetic oligonucleotide
  Sense strand starting at position 464 of SEQ ID NO: 1562475
agacaacuguggccacaaa

SEQ ID NO: 1749888 - RNA, 19 nt, Artificial Sequence
  Description of Artificial Sequence: Synthetic oligonucleotide
  Antisense strand to SEQ ID NO: 1749887
uuuguggccacaguugucu

SEQ ID NO: 1749889 - RNA, 19 nt, Artificial Sequence
  Description of Artificial Sequence: Synthetic oligonucleotide
  Sense strand starting at position 505 of SEQ ID NO: 1562475
uuguguaaaugauaacaca

SEQ ID NO: 1749890 - RNA, 19 nt, Artificial Sequence
  Description of Artificial Sequence: Synthetic oligonucleotide
  Antisense strand to SEQ ID NO: 1749889
uguguuaucauuuacacaa

SEQ ID NO: 1749891 - RNA, 19 nt, Artificial Sequence
  Description of Artificial Sequence: Synthetic oligonucleotide
  Sense strand starting at position 508 of SEQ ID NO: 1562475
uguaaaugauaacacaagu

SEQ ID NO: 1749892 - RNA, 19 nt, Artificial Sequence
  Description of Artificial Sequence: Synthetic oligonucleotide
  Antisense strand to SEQ ID NO: 1749891
acuuguguuaucauuuaca

SEQ ID NO: 1749893 - RNA, 19 nt, Artificial Sequence
  Description of Artificial Sequence: Synthetic oligonucleotide
  Sense strand starting at position 578 of SEQ ID NO: 1562475
auggucucucaaggaaaua

SEQ ID NO: 1749894 - RNA, 19 nt, Artificial Sequence
  Description of Artificial Sequence: Synthetic oligonucleotide
  Antisense strand to SEQ ID NO: 1749893
uauuuccuugagagaccau

SEQ ID NO: 1749895 - RNA, 19 nt, Artificial Sequence
  Description of Artificial Sequence: Synthetic oligonucleotide
  Sense strand starting at position 650 of SEQ ID NO: 1562475
ccuauccaugucgggauau

SEQ ID NO: 1749896 - RNA, 19 nt, Artificial Sequence
  Description of Artificial Sequence: Synthetic oligonucleotide
  Antisense strand to SEQ ID NO: 1749895
auaucccgacauggauagg

SEQ ID NO: 1749897 - RNA, 19 nt, Artificial Sequence
  Description of Artificial Sequence: Synthetic oligonucleotide
  Sense strand starting at position 652 of SEQ ID NO: 1562475
uauccaugucgggauauag

SEQ ID NO: 1749898 - RNA, 19 nt, Artificial Sequence
  Description of Artificial Sequence: Synthetic oligonucleotide
  Antisense strand to SEQ ID NO: 1749897
cuauaucccgacauggaua

SEQ ID NO: 1749899 - RNA, 19 nt, Artificial Sequence
  Description of Artificial Sequence: Synthetic oligonucleotide
  Sense strand starting at position 987 of SEQ ID NO: 1562475
gggcucugcgcgcuuuauu

SEQ ID NO: 1749900 - RNA, 19 nt, Artificial Sequence
  Description of Artificial Sequence: Synthetic oligonucleotide
  Antisense strand to SEQ ID NO: 1749899
aauaaagcgcgcagagccc

SEQ ID NO: 1749901 - RNA, 19 nt, Artificial Sequence
  Description of Artificial Sequence: Synthetic oligonucleotide
  Sense strand starting at position 995 of SEQ ID NO: 1562475
cgcgcuuuauucccacgaa

SEQ ID NO: 1749902 - RNA, 19 nt, Artificial Sequence
  Description of Artificial Sequence: Synthetic oligonucleotide
  Antisense strand to SEQ ID NO: 1749901
uucgugggaauaaagcgcg

SEQ ID NO: 1749903 - RNA, 19 nt, Artificial Sequence
  Description of Artificial Sequence: Synthetic oligonucleotide
  Sense strand starting at position 998 of SEQ ID NO: 1562475
gcuuuauucccacgaaacc

SEQ ID NO: 1749904 - RNA, 19 nt, Artificial Sequence
  Description of Artificial Sequence: Synthetic oligonucleotide
  Antisense strand to SEQ ID NO: 1749903
gguuucgugggaauaaagc

SEQ ID NO: 1749905 - RNA, 19 nt, Artificial Sequence
  Description of Artificial Sequence: Synthetic oligonucleotide
  Sense strand starting at position 2204 of SEQ ID NO: 1562475
cgcugugauuggccgauuu

SEQ ID NO: 1749906 - RNA, 19 nt, Artificial Sequence
  Description of Artificial Sequence: Synthetic oligonucleotide
  Antisense strand to SEQ ID NO: 1749905
aaaucggccaaucacagcg

SEQ ID NO: 1749907 - RNA, 19 nt, Artificial Sequence
  Description of Artificial Sequence: Synthetic oligonucleotide
  Sense strand starting at position 2294 of SEQ ID NO: 1562475
cuuuguguccaccaggaca

SEQ ID NO: 1749908 - RNA, 19 nt, Artificial Sequence
  Description of Artificial Sequence: Synthetic oligonucleotide
  Antisense strand to SEQ ID NO: 1749907
uguccugguggacacaaag

SEQ ID NO: 1749909 - RNA, 19 nt, Artificial Sequence
  Description of Artificial Sequence: Synthetic oligonucleotide
  Sense strand starting at position 2399 of SEQ ID NO: 1562475
ggcauuagucguuggcugu

SEQ ID NO: 1749910 - RNA, 19 nt, Artificial Sequence
  Description of Artificial Sequence: Synthetic oligonucleotide
  Antisense strand to SEQ ID NO: 1749909
acagccaacgacuaaugcc

SEQ ID NO: 1749911 - RNA, 19 nt, Artificial Sequence
  Description of Artificial Sequence: Synthetic oligonucleotide
  Sense strand starting at position 2571 of SEQ ID NO: 1562475
gguccugggucuucagaga

SEQ ID NO: 1749912 - RNA, 19 nt, Artificial Sequence
  Description of Artificial Sequence: Synthetic oligonucleotide
  Antisense strand to SEQ ID NO: 1749911
ucucugaagacccaggacc

SEQ ID NO: 1749913 - RNA, 19 nt, Artificial Sequence
  Description of Artificial Sequence: Synthetic oligonucleotide
  Sense strand starting at position 2598 of SEQ ID NO: 1562475
gccgaaugcggucagaaag

SEQ ID NO: 1749914 - RNA, 19 nt, Artificial Sequence
  Description of Artificial Sequence: Synthetic oligonucleotide
  Antisense strand to SEQ ID NO: 1749913
cuuucugaccgcauucggc

SEQ ID NO: 1749915 - RNA, 19 nt, Artificial Sequence
  Description of Artificial Sequence: Synthetic oligonucleotide
  Sense strand starting at position 2689 of SEQ ID NO: 1562475
ucgugugucucacugaugu

SEQ ID NO: 1749916 - RNA, 19 nt, Artificial Sequence
  Description of Artificial Sequence: Synthetic oligonucleotide
  Antisense strand to SEQ ID NO: 1749915
acaucagugagacacacga

SEQ ID NO: 1749917 - RNA, 19 nt, Artificial Sequence
  Description of Artificial Sequence: Synthetic oligonucleotide
  Sense strand starting at position 2691 of SEQ ID NO: 1562475
gugugucucacugaugucu

SEQ ID NO: 1749918 - RNA, 19 nt, Artificial Sequence
  Description of Artificial Sequence: Synthetic oligonucleotide
  Antisense strand to SEQ ID NO: 1749917
agacaucagugagacacac

SEQ ID NO: 1749919 - RNA, 19 nt, Artificial Sequence
  Description of Artificial Sequence: Synthetic oligonucleotide
  Sense strand starting at position 2825 of SEQ ID NO: 1562475
uugagcucagcggaacaua

SEQ ID NO: 1749920 - RNA, 19 nt, Artificial Sequence
  Description of Artificial Sequence: Synthetic oligonucleotide
  Antisense strand to SEQ ID NO: 1749919
uauguuccgcugagcucaa

SEQ ID NO: 1749921 - RNA, 19 nt, Artificial Sequence
  Description of Artificial Sequence: Synthetic oligonucleotide
  Sense strand starting at position 2990 of SEQ ID NO: 1562475
gguggaacuugggaaacua

SEQ ID NO: 1749922 - RNA, 19 nt, Artificial Sequence
  Description of Artificial Sequence: Synthetic oligonucleotide
  Antisense strand to SEQ ID NO: 1749921
uaguuucccaaguuccacc

SEQ ID NO: 1749923 - RNA, 19 nt, Artificial Sequence
  Description of Artificial Sequence: Synthetic oligonucleotide
  Sense strand starting at position 3061 of SEQ ID NO: 1562475
cguccuuaacuguggagua

SEQ ID NO: 1749924 - RNA, 19 nt, Artificial Sequence
  Description of Artificial Sequence: Synthetic oligonucleotide
  Antisense strand to SEQ ID NO: 1749923
uacuccacaguuaaggacg

SEQ ID NO: 1749925 - RNA, 19 nt, Artificial Sequence
  Description of Artificial Sequence: Synthetic oligonucleotide
  Sense strand starting at position 3063 of SEQ ID NO: 1562475
uccuuaacuguggaguauu

SEQ ID NO: 1749926 - RNA, 19 nt, Artificial Sequence
  Description of Artificial Sequence: Synthetic oligonucleotide
  Antisense strand to SEQ ID NO: 1749925
aauacuccacaguuaagga

SEQ ID NO: 1749927 - RNA, 19 nt, Artificial Sequence
  Description of Artificial Sequence: Synthetic oligonucleotide
  Sense strand starting at position 3198 of SEQ ID NO: 1562475
gcuuguuugcagcaguaac

SEQ ID NO: 1749928 - RNA, 19 nt, Artificial Sequence
  Description of Artificial Sequence: Synthetic oligonucleotide
  Antisense strand to SEQ ID NO: 1749927
guuacugcugcaaacaagc

SEQ ID NO: 1749929 - RNA, 19 nt, Artificial Sequence
  Description of Artificial Sequence: Synthetic oligonucleotide
  Sense strand starting at position 3314 of SEQ ID NO: 1562475
ccuggaaucucgcucagaa

SEQ ID NO: 1749930 - RNA, 19 nt, Artificial Sequence
  Description of Artificial Sequence: Synthetic oligonucleotide
  Antisense strand to SEQ ID NO: 1749929
uucugagcgagauuccagg

SEQ ID NO: 1749931 - RNA, 19 nt, Artificial Sequence
  Description of Artificial Sequence: Synthetic oligonucleotide
  Sense strand starting at position 3316 of SEQ ID NO: 1562475
uggaaucucgcucagaauu

SEQ ID NO: 1749932 - RNA, 19 nt, Artificial Sequence
  Description of Artificial Sequence: Synthetic oligonucleotide
  Antisense strand to SEQ ID NO: 1749931
aauucugagcgagauucca

SEQ ID NO: 1749933 - RNA, 19 nt, Artificial Sequence
  Description of Artificial Sequence: Synthetic oligonucleotide
  Sense strand starting at position 3432 of SEQ ID NO: 1562475
gcucgaccgccagaaacuu

SEQ ID NO: 1749934 - RNA, 19 nt, Artificial Sequence
  Description of Artificial Sequence: Synthetic oligonucleotide
  Antisense strand to SEQ ID NO: 1749933
aaguuucuggcggucgagc

SEQ ID NO: 1749935 - RNA, 19 nt, Artificial Sequence
  Description of Artificial Sequence: Synthetic oligonucleotide
  Sense strand starting at position 3470 of SEQ ID NO: 1562475
acagucuucugugugguga

SEQ ID NO: 1749936 - RNA, 19 nt, Artificial Sequence
  Description of Artificial Sequence: Synthetic oligonucleotide
  Antisense strand to SEQ ID NO: 1749935
ucaccacacagaagacugu

SEQ ID NO: 1749937 - RNA, 19 nt, Artificial Sequence
  Description of Artificial Sequence: Synthetic oligonucleotide
  Sense strand starting at position 3654 of SEQ ID NO: 1562475
gccugaaucucacaacugu

SEQ ID NO: 1749938 - RNA, 19 nt, Artificial Sequence
  Description of Artificial Sequence: Synthetic oligonucleotide
  Antisense strand to SEQ ID NO: 1749937
acaguugugagauucaggc

SEQ ID NO: 1749939 - RNA, 19 nt, Artificial Sequence
  Description of Artificial Sequence: Synthetic oligonucleotide
  Sense strand starting at position 3665 of SEQ ID NO: 1562475
acaacuguuacguguuaca

SEQ ID NO: 1749940 - RNA, 19 nt, Artificial Sequence
  Description of Artificial Sequence: Synthetic oligonucleotide
  Antisense strand to SEQ ID NO: 1749939
uguaacacguaacaguugu

SEQ ID NO: 1749941 - RNA, 19 nt, Artificial Sequence
  Description of Artificial Sequence: Synthetic oligonucleotide
  Sense strand starting at position 3729 of SEQ ID NO: 1562475
uagacuguguuccucagaa

SEQ ID NO: 1749942 - RNA, 19 nt, Artificial Sequence
  Description of Artificial Sequence: Synthetic oligonucleotide
  Antisense strand to SEQ ID NO: 1749941
uucugaggaacacagucua

SEQ ID NO: 1749943 - RNA, 19 nt, Artificial Sequence
  Description of Artificial Sequence: Synthetic oligonucleotide
  Sense strand starting at position 3752 of SEQ ID NO: 1562475
agagucguuucuguggaca

SEQ ID NO: 1749944 - RNA, 19 nt, Artificial Sequence
  Description of Artificial Sequence: Synthetic oligonucleotide
  Antisense strand to SEQ ID NO: 1749943
uguccacagaaacgacucu

SEQ ID NO: 1749945 - RNA, 19 nt, Artificial Sequence
  Description of Artificial Sequence: Synthetic oligonucleotide
  Sense strand starting at position 3774 of SEQ ID NO: 1562475
uagagagguucugcuaaug

SEQ ID NO: 1749946 - RNA, 19 nt, Artificial Sequence
  Description of Artificial Sequence: Synthetic oligonucleotide
  Antisense strand to SEQ ID NO: 1749945
cauuagcagaaccucucua

SEQ ID NO: 1749947 - RNA, 19 nt, Artificial Sequence
  Description of Artificial Sequence: Synthetic oligonucleotide
  Sense strand starting at position 3920 of SEQ ID NO: 1562475
ggugauucuccaugucagc

SEQ ID NO: 1749948 - RNA, 19 nt, Artificial Sequence
  Description of Artificial Sequence: Synthetic oligonucleotide
  Antisense strand to SEQ ID NO: 1749947
gcugacauggagaaucacc

SEQ ID NO: 1749949 - RNA, 19 nt, Artificial Sequence
  Description of Artificial Sequence: Synthetic oligonucleotide
  Sense strand starting at position 86 of SEQ ID NO: 1562476
acaggugagcucuggaaca

SEQ ID NO: 1749950 - RNA, 19 nt, Artificial Sequence
  Description of Artificial Sequence: Synthetic oligonucleotide
  Antisense strand to SEQ ID NO: 1749949
uguuccagagcucaccugu

SEQ ID NO: 1749951 - RNA, 19 nt, Artificial Sequence
  Description of Artificial Sequence: Synthetic oligonucleotide
  Sense strand starting at position 208 of SEQ ID NO: 1562476
cggcaugacugagccagaa

SEQ ID NO: 1749952 - RNA, 19 nt, Artificial Sequence
  Description of Artificial Sequence: Synthetic oligonucleotide
  Antisense strand to SEQ ID NO: 1749951
uucuggcucagucaugccg

SEQ ID NO: 1749953 - RNA, 19 nt, Artificial Sequence
  Description of Artificial Sequence: Synthetic oligonucleotide
  Sense strand starting at position 210 of SEQ ID NO: 1562476
gcaugacugagccagaauc

SEQ ID NO: 1749954 - RNA, 19 nt, Artificial Sequence
  Description of Artificial Sequence: Synthetic oligonucleotide
  Antisense strand to SEQ ID NO: 1749953
gauucuggcucagucaugc

SEQ ID NO: 1749955 - RNA, 19 nt, Artificial Sequence
  Description of Artificial Sequence: Synthetic oligonucleotide
  Sense strand starting at position 285 of SEQ ID NO: 1562476
guccuucuucuauaggaaa

SEQ ID NO: 1749956 - RNA, 19 nt, Artificial Sequence
  Description of Artificial Sequence: Synthetic oligonucleotide
  Antisense strand to SEQ ID NO: 1749955
uuuccuauagaagaaggac

SEQ ID NO: 1749957 - RNA, 19 nt, Artificial Sequence
  Description of Artificial Sequence: Synthetic oligonucleotide
  Sense strand starting at position 296 of SEQ ID NO: 1562476
auaggaaacucuuauugga

SEQ ID NO: 1749958 - RNA, 19 nt, Artificial Sequence
  Description of Artificial Sequence: Synthetic oligonucleotide
  Antisense strand to SEQ ID NO: 1749957
uccaauaagaguuuccuau

SEQ ID NO: 1749959 - RNA, 19 nt, Artificial Sequence
  Description of Artificial Sequence: Synthetic oligonucleotide
  Sense strand starting at position 398 of SEQ ID NO: 1562476
ucugaaauaucuguagagu

SEQ ID NO: 1749960 - RNA, 19 nt, Artificial Sequence
  Description of Artificial Sequence: Synthetic oligonucleotide
  Antisense strand to SEQ ID NO: 1749959
acucuacagauauuucaga

SEQ ID NO: 1749961 - RNA, 19 nt, Artificial Sequence
  Description of Artificial Sequence: Synthetic oligonucleotide
  Sense strand starting at position 399 of SEQ ID NO: 1562476
cugaaauaucuguagaguc

SEQ ID NO: 1749962 - RNA, 19 nt, Artificial Sequence
  Description of Artificial Sequence: Synthetic oligonucleotide
  Antisense strand to SEQ ID NO: 1749961
gacucuacagauauuucag

SEQ ID NO: 1749963 - RNA, 19 nt, Artificial Sequence
  Description of Artificial Sequence: Synthetic oligonucleotide
  Sense strand starting at position 433 of SEQ ID NO: 1562476
ccuccuagcaugugggaaa

SEQ ID NO: 1749964 - RNA, 19 nt, Artificial Sequence
  Description of Artificial Sequence: Synthetic oligonucleotide
  Antisense strand to SEQ ID NO: 1749963
uuucccacaugcuaggagg

SEQ ID NO: 1749965 - RNA, 19 nt, Artificial Sequence
  Description of Artificial Sequence: Synthetic oligonucleotide
  Sense strand starting at position 455 of SEQ ID NO: 1562476
aggucucauccucaucauu

SEQ ID NO: 1749966 - RNA, 19 nt, Artificial Sequence
  Description of Artificial Sequence: Synthetic oligonucleotide
  Antisense strand to SEQ ID NO: 1749965
aaugaugaggaugagaccu

SEQ ID NO: 1749967 - RNA, 19 nt, Artificial Sequence
  Description of Artificial Sequence: Synthetic oligonucleotide
  Sense strand starting at position 956 of SEQ ID NO: 1562476
ucuugucauguuuacauca

SEQ ID NO: 1749968 - RNA, 19 nt, Artificial Sequence
  Description of Artificial Sequence: Synthetic oligonucleotide
  Antisense strand to SEQ ID NO: 1749967
ugauguaaacaugacaaga

SEQ ID NO: 1749969 - RNA, 19 nt, Artificial Sequence
  Description of Artificial Sequence: Synthetic oligonucleotide
  Sense strand starting at position 1144 of SEQ ID NO: 1562476
augcauuuggcucgguuau

SEQ ID NO: 1749970 - RNA, 19 nt, Artificial Sequence
  Description of Artificial Sequence: Synthetic oligonucleotide
  Antisense strand to SEQ ID NO: 1749969
auaaccgagccaaaugcau

SEQ ID NO: 1749971 - RNA, 19 nt, Artificial Sequence
  Description of Artificial Sequence: Synthetic oligonucleotide
  Sense strand starting at position 1145 of SEQ ID NO: 1562476
ugcauuuggcucgguuauu

SEQ ID NO: 1749972 - RNA, 19 nt, Artificial Sequence
  Description of Artificial Sequence: Synthetic oligonucleotide
  Antisense strand to SEQ ID NO: 1749971
aauaaccgagccaaaugca

SEQ ID NO: 1749973 - RNA, 19 nt, Artificial Sequence
  Description of Artificial Sequence: Synthetic oligonucleotide
  Sense strand starting at position 1146 of SEQ ID NO: 1562476
gcauuuggcucgguuauug

SEQ ID NO: 1749974 - RNA, 19 nt, Artificial Sequence
  Description of Artificial Sequence: Synthetic oligonucleotide
  Antisense strand to SEQ ID NO: 1749973
caauaaccgagccaaaugc

SEQ ID NO: 1749975 - RNA, 19 nt, Artificial Sequence
  Description of Artificial Sequence: Synthetic oligonucleotide
  Sense strand starting at position 1154 of SEQ ID NO: 1562476
cucgguuauugaguugaau

SEQ ID NO: 1749976 - RNA, 19 nt, Artificial Sequence
  Description of Artificial Sequence: Synthetic oligonucleotide
  Antisense strand to SEQ ID NO: 1749975
auucaacucaauaaccgag

SEQ ID NO: 1749977 - RNA, 19 nt, Artificial Sequence
  Description of Artificial Sequence: Synthetic oligonucleotide
  Sense strand starting at position 1156 of SEQ ID NO: 1562476
cgguuauugaguugaauua

SEQ ID NO: 1749978 - RNA, 19 nt, Artificial Sequence
  Description of Artificial Sequence: Synthetic oligonucleotide
  Antisense strand to SEQ ID NO: 1749977
uaauucaacucaauaaccg

SEQ ID NO: 1749979 - RNA, 19 nt, Artificial Sequence
  Description of Artificial Sequence: Synthetic oligonucleotide
  Sense strand starting at position 1157 of SEQ ID NO: 1562476
gguuauugaguugaauuag

SEQ ID NO: 1749980 - RNA, 19 nt, Artificial Sequence
  Description of Artificial Sequence: Synthetic oligonucleotide
  Antisense strand to SEQ ID NO: 1749979
cuaauucaacucaauaacc

SEQ ID NO: 1749981 - RNA, 19 nt, Artificial Sequence
  Description of Artificial Sequence: Synthetic oligonucleotide
  Sense strand starting at position 1168 of SEQ ID NO: 1562476
ugaauuagagaaugguguu

SEQ ID NO: 1749982 - RNA, 19 nt, Artificial Sequence
  Description of Artificial Sequence: Synthetic oligonucleotide
  Antisense strand to SEQ ID NO: 1749981
aacaccauucucuaauuca

SEQ ID NO: 1749983 - RNA, 19 nt, Artificial Sequence
  Description of Artificial Sequence: Synthetic oligonucleotide
  Sense strand starting at position 1169 of SEQ ID NO: 1562476
gaauuagagaaugguguug

SEQ ID NO: 1749984 - RNA, 19 nt, Artificial Sequence
  Description of Artificial Sequence: Synthetic oligonucleotide
  Antisense strand to SEQ ID NO: 1749983
caacaccauucucuaauuc

SEQ ID NO: 1749985 - RNA, 19 nt, Artificial Sequence
  Description of Artificial Sequence: Synthetic oligonucleotide
  Sense strand starting at position 1353 of SEQ ID NO: 1562476
cggucuuagagccacagau

SEQ ID NO: 1749986 - RNA, 19 nt, Artificial Sequence
  Description of Artificial Sequence: Synthetic oligonucleotide
  Antisense strand to SEQ ID NO: 1749985
aucuguggcucuaagaccg

SEQ ID NO: 1749987 - RNA, 19 nt, Artificial Sequence
  Description of Artificial Sequence: Synthetic oligonucleotide
  Sense strand starting at position 1355 of SEQ ID NO: 1562476
gucuuagagccacagaucu

SEQ ID NO: 1749988 - RNA, 19 nt, Artificial Sequence
  Description of Artificial Sequence: Synthetic oligonucleotide
  Antisense strand to SEQ ID NO: 1749987
agaucuguggcucuaagac

SEQ ID NO: 1749989 - RNA, 19 nt, Artificial Sequence
  Description of Artificial Sequence: Synthetic oligonucleotide
  Sense strand starting at position 1455 of SEQ ID NO: 1562476
acaacugagccaugaaaug

SEQ ID NO: 1749990 - RNA, 19 nt, Artificial Sequence
  Description of Artificial Sequence: Synthetic oligonucleotide
  Antisense strand to SEQ ID NO: 1749989
cauuucauggcucaguugu

SEQ ID NO: 1749991 - RNA, 19 nt, Artificial Sequence
  Description of Artificial Sequence: Synthetic oligonucleotide
  Sense strand starting at position 1564 of SEQ ID NO: 1562476
aagguaucaccgcgggaau

SEQ ID NO: 1749992 - RNA, 19 nt, Artificial Sequence
  Description of Artificial Sequence: Synthetic oligonucleotide
  Antisense strand to SEQ ID NO: 1749991
auucccgcggugauaccuu

SEQ ID NO: 1749993 - RNA, 19 nt, Artificial Sequence
  Description of Artificial Sequence: Synthetic oligonucleotide
  Sense strand starting at position 1567 of SEQ ID NO: 1562476
guaucaccgcgggaaucau

SEQ ID NO: 1749994 - RNA, 19 nt, Artificial Sequence
  Description of Artificial Sequence: Synthetic oligonucleotide
  Antisense strand to SEQ ID NO: 1749993
augauucccgcggugauac

SEQ ID NO: 1749995 - RNA, 19 nt, Artificial Sequence
  Description of Artificial Sequence: Synthetic oligonucleotide
  Sense strand starting at position 1575 of SEQ ID NO: 1562476
gcgggaaucaugcaaagac

SEQ ID NO: 1749996 - RNA, 19 nt, Artificial Sequence
  Description of Artificial Sequence: Synthetic oligonucleotide
  Antisense strand to SEQ ID NO: 1749995
gucuuugcaugauucccgc

SEQ ID NO: 1749997 - RNA, 19 nt, Artificial Sequence
  Description of Artificial Sequence: Synthetic oligonucleotide
  Sense strand starting at position 1770 of SEQ ID NO: 1562476
cugucaguucuccaagcaa

SEQ ID NO: 1749998 - RNA, 19 nt, Artificial Sequence
  Description of Artificial Sequence: Synthetic oligonucleotide
  Antisense strand to SEQ ID NO: 1749997
uugcuuggagaacugacag

SEQ ID NO: 1749999 - RNA, 19 nt, Artificial Sequence
  Description of Artificial Sequence: Synthetic oligonucleotide
  Sense strand starting at position 2351 of SEQ ID NO: 1562476
aaaugucaaugggaaggau

SEQ ID NO: 1750000 - RNA, 19 nt, Artificial Sequence
  Description of Artificial Sequence: Synthetic oligonucleotide
  Antisense strand to SEQ ID NO: 1749999
auccuucccauugacauuu

SEQ ID NO: 1750001 - RNA, 19 nt, Artificial Sequence
  Description of Artificial Sequence: Synthetic oligonucleotide
  Sense strand starting at position 2478 of SEQ ID NO: 1562476
gcccaaggacuuuaauauc

SEQ ID NO: 1750002 - RNA, 19 nt, Artificial Sequence
  Description of Artificial Sequence: Synthetic oligonucleotide
  Antisense strand to SEQ ID NO: 1750001
gauauuaaaguccuugggc

SEQ ID NO: 1750003 - RNA, 19 nt, Artificial Sequence
  Description of Artificial Sequence: Synthetic oligonucleotide
  Sense strand starting at position 2827 of SEQ ID NO: 1562476
aagcguugugcagacugaa

SEQ ID NO: 1750004 - RNA, 19 nt, Artificial Sequence
  Description of Artificial Sequence: Synthetic oligonucleotide
  Antisense strand to SEQ ID NO: 1750003
uucagucugcacaacgcuu

SEQ ID NO: 1750005 - RNA, 19 nt, Artificial Sequence
  Description of Artificial Sequence: Synthetic oligonucleotide
  Sense strand starting at position 2892 of SEQ ID NO: 1562476
agggucuggcgagaagauu

SEQ ID NO: 1750006 - RNA, 19 nt, Artificial Sequence
  Description of Artificial Sequence: Synthetic oligonucleotide
  Antisense strand to SEQ ID NO: 1750005
aaucuucucgccagacccu

SEQ ID NO: 1750007 - RNA, 19 nt, Artificial Sequence
  Description of Artificial Sequence: Synthetic oligonucleotide
  Sense strand starting at position 3217 of SEQ ID NO: 1562476
agucucauacaugaguuau

SEQ ID NO: 1750008 - RNA, 19 nt, Artificial Sequence
  Description of Artificial Sequence: Synthetic oligonucleotide
  Antisense strand to SEQ ID NO: 1750007
auaacucauguaugagacu

SEQ ID NO: 1750009 - RNA, 19 nt, Artificial Sequence
  Description of Artificial Sequence: Synthetic oligonucleotide
  Sense strand starting at position 3219 of SEQ ID NO: 1562476
ucucauacaugaguuauua

SEQ ID NO: 1750010 - RNA, 19 nt, Artificial Sequence
  Description of Artificial Sequence: Synthetic oligonucleotide
  Antisense strand to SEQ ID NO: 1750009
uaauaacucauguaugaga

SEQ ID NO: 1750011 - RNA, 19 nt, Artificial Sequence
  Description of Artificial Sequence: Synthetic oligonucleotide
  Sense strand starting at position 3297 of SEQ ID NO: 1562476
auguguguuauauucguuu

SEQ ID NO: 1750012 - RNA, 19 nt, Artificial Sequence
  Description of Artificial Sequence: Synthetic oligonucleotide
  Antisense strand to SEQ ID NO: 1750011
aaacgaauauaacacacau

SEQ ID NO: 1750013 - RNA, 19 nt, Artificial Sequence
  Description of Artificial Sequence: Synthetic oligonucleotide
  Sense strand starting at position 3451 of SEQ ID NO: 1562476
gugggaugccuuuaggguu

SEQ ID NO: 1750014 - RNA, 19 nt, Artificial Sequence
  Description of Artificial Sequence: Synthetic oligonucleotide
  Antisense strand to SEQ ID NO: 1750013
aacccuaaaggcaucccac

SEQ ID NO: 1750015 - RNA, 19 nt, Artificial Sequence
  Description of Artificial Sequence: Synthetic oligonucleotide
  Sense strand starting at position 3477 of SEQ ID NO: 1562476
ugguuaguagugggagaga

SEQ ID NO: 1750016 - RNA, 19 nt, Artificial Sequence
  Description of Artificial Sequence: Synthetic oligonucleotide
  Antisense strand to SEQ ID NO: 1750015
ucucucccacuacuaacca

SEQ ID NO: 1750017 - RNA, 19 nt, Artificial Sequence
  Description of Artificial Sequence: Synthetic oligonucleotide
  Sense strand starting at position 3567 of SEQ ID NO: 1562476
gaagaagggugcuugcuua

SEQ ID NO: 1750018 - RNA, 19 nt, Artificial Sequence
  Description of Artificial Sequence: Synthetic oligonucleotide
  Antisense strand to SEQ ID NO: 1750017
uaagcaagcacccuucuuc

SEQ ID NO: 1750019 - RNA, 19 nt, Artificial Sequence
  Description of Artificial Sequence: Synthetic oligonucleotide
  Sense strand starting at position 3592 of SEQ ID NO: 1562476
cuaggagacaccugugauu

SEQ ID NO: 1750020 - RNA, 19 nt, Artificial Sequence
  Description of Artificial Sequence: Synthetic oligonucleotide
  Antisense strand to SEQ ID NO: 1750019
aaucacaggugucuccuag

SEQ ID NO: 1750021 - RNA, 19 nt, Artificial Sequence
  Description of Artificial Sequence: Synthetic oligonucleotide
  Sense strand starting at position 3595 of SEQ ID NO: 1562476
ggagacaccugugauuucu

SEQ ID NO: 1750022 - RNA, 19 nt, Artificial Sequence
  Description of Artificial Sequence: Synthetic oligonucleotide
  Antisense strand to SEQ ID NO: 1750021
agaaaucacaggugucucc

SEQ ID NO: 1750023 - RNA, 19 nt, Artificial Sequence
  Description of Artificial Sequence: Synthetic oligonucleotide
  Sense strand starting at position 3759 of SEQ ID NO: 1562476
ggagaaucagccugugcuc

SEQ ID NO: 1750024 - RNA, 19 nt, Artificial Sequence
  Description of Artificial Sequence: Synthetic oligonucleotide
  Antisense strand to SEQ ID NO: 1750023
gagcacaggcugauucucc

SEQ ID NO: 1750025 - RNA, 19 nt, Artificial Sequence
  Description of Artificial Sequence: Synthetic oligonucleotide
  Sense strand starting at position 3919 of SEQ ID NO: 1562476
ugaggcuuugcuggguaga

SEQ ID NO: 1750026 - RNA, 19 nt, Artificial Sequence
  Description of Artificial Sequence: Synthetic oligonucleotide
  Antisense strand to SEQ ID NO: 1750025
ucuacccagcaaagccuca

SEQ ID NO: 1750027 - RNA, 19 nt, Artificial Sequence
  Description of Artificial Sequence: Synthetic oligonucleotide
  Sense strand starting at position 3930 of SEQ ID NO: 1562476
uggguagacucagcaauuc

SEQ ID NO: 1750028 - RNA, 19 nt, Artificial Sequence
  Description of Artificial Sequence: Synthetic oligonucleotide
  Antisense strand to SEQ ID NO: 1750027
gaauugcugagucuaccca

SEQ ID NO: 1750029 - RNA, 19 nt, Artificial Sequence
  Description of Artificial Sequence: Synthetic oligonucleotide
  Sense strand starting at position 7 of SEQ ID NO: 1562477
gaagaauaaugcucaucgu

SEQ ID NO: 1750030 - RNA, 19 nt, Artificial Sequence
  Description of Artificial Sequence: Synthetic oligonucleotide
  Antisense strand to SEQ ID NO: 1750029
acgaugagcauuauucuuc

SEQ ID NO: 1750031 - RNA, 19 nt, Artificial Sequence
  Description of Artificial Sequence: Synthetic oligonucleotide
  Sense strand starting at position 10 of SEQ ID NO: 1562477
gaauaaugcucaucguguu

SEQ ID NO: 1750032 - RNA, 19 nt, Artificial Sequence
  Description of Artificial Sequence: Synthetic oligonucleotide
  Antisense strand to SEQ ID NO: 1750031
aacacgaugagcauuauuc

SEQ ID NO: 1750033 - RNA, 19 nt, Artificial Sequence
  Description of Artificial Sequence: Synthetic oligonucleotide
  Sense strand starting at position 435 of SEQ ID NO: 1562477
uguugaucuggugacaacu

SEQ ID NO: 1750034 - RNA, 19 nt, Artificial Sequence
  Description of Artificial Sequence: Synthetic oligonucleotide
  Antisense strand to SEQ ID NO: 1750033
aguugucaccagaucaaca

SEQ ID NO: 1750035 - RNA, 19 nt, Artificial Sequence
  Description of Artificial Sequence: Synthetic oligonucleotide
  Sense strand starting at position 444 of SEQ ID NO: 1562477
ggugacaacucacuuuaaa

SEQ ID NO: 1750036 - RNA, 19 nt, Artificial Sequence
  Description of Artificial Sequence: Synthetic oligonucleotide
  Antisense strand to SEQ ID NO: 1750035
uuuaaagugaguugucacc

SEQ ID NO: 1750037 - RNA, 19 nt, Artificial Sequence
  Description of Artificial Sequence: Synthetic oligonucleotide
  Sense strand starting at position 479 of SEQ ID NO: 1562477
aaggcaggucuuugauaca

SEQ ID NO: 1750038 - RNA, 19 nt, Artificial Sequence
  Description of Artificial Sequence: Synthetic oligonucleotide
  Antisense strand to SEQ ID NO: 1750037
uguaucaaagaccugccuu

SEQ ID NO: 1750039 - RNA, 19 nt, Artificial Sequence
  Description of Artificial Sequence: Synthetic oligonucleotide
  Sense strand starting at position 498 of SEQ ID NO: 1562477
uucucaucuaucgggcaga

SEQ ID NO: 1750040 - RNA, 19 nt, Artificial Sequence
  Description of Artificial Sequence: Synthetic oligonucleotide
  Antisense strand to SEQ ID NO: 1750039
ucugcccgauagaugagaa

SEQ ID NO: 1750041 - RNA, 19 nt, Artificial Sequence
  Description of Artificial Sequence: Synthetic oligonucleotide
  Sense strand starting at position 614 of SEQ ID NO: 1562477
augugugagcauuggagca

SEQ ID NO: 1750042 - RNA, 19 nt, Artificial Sequence
  Description of Artificial Sequence: Synthetic oligonucleotide
  Antisense strand to SEQ ID NO: 1750041
ugcuccaaugcucacacau

SEQ ID NO: 1750043 - RNA, 19 nt, Artificial Sequence
  Description of Artificial Sequence: Synthetic oligonucleotide
  Sense strand starting at position 717 of SEQ ID NO: 1562477
guuacagucccaugcaauu

SEQ ID NO: 1750044 - RNA, 19 nt, Artificial Sequence
  Description of Artificial Sequence: Synthetic oligonucleotide
  Antisense strand to SEQ ID NO: 1750043
aauugcaugggacuguaac

SEQ ID NO: 1750045 - RNA, 19 nt, Artificial Sequence
  Description of Artificial Sequence: Synthetic oligonucleotide
  Sense strand starting at position 832 of SEQ ID NO: 1562477
gaccaccuguccuugaaga

SEQ ID NO: 1750046 - RNA, 19 nt, Artificial Sequence
  Description of Artificial Sequence: Synthetic oligonucleotide
  Antisense strand to SEQ ID NO: 1750045
ucuucaaggacaggugguc

SEQ ID NO: 1750047 - RNA, 19 nt, Artificial Sequence
  Description of Artificial Sequence: Synthetic oligonucleotide
  Sense strand starting at position 834 of SEQ ID NO: 1562477
ccaccuguccuugaagaug

SEQ ID NO: 1750048 - RNA, 19 nt, Artificial Sequence
  Description of Artificial Sequence: Synthetic oligonucleotide
  Antisense strand to SEQ ID NO: 1750047
caucuucaaggacaggugg

SEQ ID NO: 1750049 - RNA, 19 nt, Artificial Sequence
  Description of Artificial Sequence: Synthetic oligonucleotide
  Sense strand starting at position 867 of SEQ ID NO: 1562477
uuaucugagucucucaaag

SEQ ID NO: 1750050 - RNA, 19 nt, Artificial Sequence
  Description of Artificial Sequence: Synthetic oligonucleotide
  Antisense strand to SEQ ID NO: 1750049
cuuugagagacucagauaa

SEQ ID NO: 1750051 - RNA, 19 nt, Artificial Sequence
  Description of Artificial Sequence: Synthetic oligonucleotide
  Sense strand starting at position 950 of SEQ ID NO: 1562477
ggaggcuuguuggcuuaaa

SEQ ID NO: 1750052 - RNA, 19 nt, Artificial Sequence
  Description of Artificial Sequence: Synthetic oligonucleotide
  Antisense strand to SEQ ID NO: 1750051
uuuaagccaacaagccucc

SEQ ID NO: 1750053 - RNA, 19 nt, Artificial Sequence
  Description of Artificial Sequence: Synthetic oligonucleotide
  Sense strand starting at position 951 of SEQ ID NO: 1562477
gaggcuuguuggcuuaaau

SEQ ID NO: 1750054 - RNA, 19 nt, Artificial Sequence
  Description of Artificial Sequence: Synthetic oligonucleotide
  Antisense strand to SEQ ID NO: 1750053
auuuaagccaacaagccuc

SEQ ID NO: 1750055 - RNA, 19 nt, Artificial Sequence
  Description of Artificial Sequence: Synthetic oligonucleotide
  Sense strand starting at position 974 of SEQ ID NO: 1562477
ugauuaaacuggccaaaug

SEQ ID NO: 1750056 - RNA, 19 nt, Artificial Sequence
  Description of Artificial Sequence: Synthetic oligonucleotide
  Antisense strand to SEQ ID NO: 1750055
cauuuggccaguuuaauca

SEQ ID NO: 1750057 - RNA, 19 nt, Artificial Sequence
  Description of Artificial Sequence: Synthetic oligonucleotide
  Sense strand starting at position 1064 of SEQ ID NO: 1562477
ggccuccuucaguggagua

SEQ ID NO: 1750058 - RNA, 19 nt, Artificial Sequence
  Description of Artificial Sequence: Synthetic oligonucleotide
  Antisense strand to SEQ ID NO: 1750057
uacuccacugaaggaggcc

SEQ ID NO: 1750059 - RNA, 19 nt, Artificial Sequence
  Description of Artificial Sequence: Synthetic oligonucleotide
  Sense strand starting at position 1077 of SEQ ID NO: 1562477
ggaguacuccgugggcaga

SEQ ID NO: 1750060 - RNA, 19 nt, Artificial Sequence
  Description of Artificial Sequence: Synthetic oligonucleotide
  Antisense strand to SEQ ID NO: 1750059
ucugcccacggaguacucc

SEQ ID NO: 1750061 - RNA, 19 nt, Artificial Sequence
  Description of Artificial Sequence: Synthetic oligonucleotide
  Sense strand starting at position 1078 of SEQ ID NO: 1562477
gaguacuccgugggcagaa

SEQ ID NO: 1750062 - RNA, 19 nt, Artificial Sequence
  Description of Artificial Sequence: Synthetic oligonucleotide
  Antisense strand to SEQ ID NO: 1750061
uucugcccacggaguacuc

SEQ ID NO: 1750063 - RNA, 19 nt, Artificial Sequence
  Description of Artificial Sequence: Synthetic oligonucleotide
  Sense strand starting at position 1134 of SEQ ID NO: 1562477
agcugagguuugagggauu

SEQ ID NO: 1750064 - RNA, 19 nt, Artificial Sequence
  Description of Artificial Sequence: Synthetic oligonucleotide
  Antisense strand to SEQ ID NO: 1750063
aaucccucaaaccucagcu

SEQ ID NO: 1750065 - RNA, 19 nt, Artificial Sequence
  Description of Artificial Sequence: Synthetic oligonucleotide
  Sense strand starting at position 1549 of SEQ ID NO: 1562477
ggccgauccaccggaaauu

SEQ ID NO: 1750066 - RNA, 19 nt, Artificial Sequence
  Description of Artificial Sequence: Synthetic oligonucleotide
  Antisense strand to SEQ ID NO: 1750065
aauuuccgguggaucggcc

SEQ ID NO: 1750067 - RNA, 19 nt, Artificial Sequence
  Description of Artificial Sequence: Synthetic oligonucleotide
  Sense strand starting at position 1550 of SEQ ID NO: 1562477
gccgauccaccggaaauua

SEQ ID NO: 1750068 - RNA, 19 nt, Artificial Sequence
  Description of Artificial Sequence: Synthetic oligonucleotide
  Antisense strand to SEQ ID NO: 1750067
uaauuuccgguggaucggc

SEQ ID NO: 1750069 - RNA, 19 nt, Artificial Sequence
  Description of Artificial Sequence: Synthetic oligonucleotide
  Sense strand starting at position 1579 of SEQ ID NO: 1562477
gugccagcccuugaaugua

SEQ ID NO: 1750070 - RNA, 19 nt, Artificial Sequence
  Description of Artificial Sequence: Synthetic oligonucleotide
  Antisense strand to SEQ ID NO: 1750069
uacauucaagggcuggcac

SEQ ID NO: 1750071 - RNA, 19 nt, Artificial Sequence
  Description of Artificial Sequence: Synthetic oligonucleotide
  Sense strand starting at position 2818 of SEQ ID NO: 1562477
gggcuccuccauugggaau

SEQ ID NO: 1750072 - RNA, 19 nt, Artificial Sequence
  Description of Artificial Sequence: Synthetic oligonucleotide
  Antisense strand to SEQ ID NO: 1750071
auucccaauggaggagccc

SEQ ID NO: 1750073 - RNA, 19 nt, Artificial Sequence
  Description of Artificial Sequence: Synthetic oligonucleotide
  Sense strand starting at position 2899 of SEQ ID NO: 1562477
uuuggaagcaagugucaaa

SEQ ID NO: 1750074 - RNA, 19 nt, Artificial Sequence
  Description of Artificial Sequence: Synthetic oligonucleotide
  Antisense strand to SEQ ID NO: 1750073
uuugacacuugcuuccaaa

SEQ ID NO: 1750075 - RNA, 19 nt, Artificial Sequence
  Description of Artificial Sequence: Synthetic oligonucleotide
  Sense strand starting at position 2936 of SEQ ID NO: 1562477
uauuguuucguuggaagug

SEQ ID NO: 1750076 - RNA, 19 nt, Artificial Sequence
  Description of Artificial Sequence: Synthetic oligonucleotide
  Antisense strand to SEQ ID NO: 1750075
cacuuccaacgaaacaaua

SEQ ID NO: 1750077 - RNA, 19 nt, Artificial Sequence
  Description of Artificial Sequence: Synthetic oligonucleotide
  Sense strand starting at position 3227 of SEQ ID NO: 1562477
ggcaucauccugugaggua

SEQ ID NO: 1750078 - RNA, 19 nt, Artificial Sequence
  Description of Artificial Sequence: Synthetic oligonucleotide
  Antisense strand to SEQ ID NO: 1750077
uaccucacaggaugaugcc

SEQ ID NO: 1750079 - RNA, 19 nt, Artificial Sequence
  Description of Artificial Sequence: Synthetic oligonucleotide
  Sense strand starting at position 3385 of SEQ ID NO: 1562477
ggaguccgugucagagcuu

SEQ ID NO: 1750080 - RNA, 19 nt, Artificial Sequence
  Description of Artificial Sequence: Synthetic oligonucleotide
  Antisense strand to SEQ ID NO: 1750079
aagcucugacacggacucc

SEQ ID NO: 1750081 - RNA, 19 nt, Artificial Sequence
  Description of Artificial Sequence: Synthetic oligonucleotide
  Sense strand starting at position 3390 of SEQ ID NO: 1562477
ccgugucagagcuuuggca

SEQ ID NO: 1750082 - RNA, 19 nt, Artificial Sequence
  Description of Artificial Sequence: Synthetic oligonucleotide
  Antisense strand to SEQ ID NO: 1750081
ugccaaagcucugacacgg

SEQ ID NO: 1750083 - RNA, 19 nt, Artificial Sequence
  Description of Artificial Sequence: Synthetic oligonucleotide
  Sense strand starting at position 3394 of SEQ ID NO: 1562477
gucagagcuuuggcaccau

SEQ ID NO: 1750084 - RNA, 19 nt, Artificial Sequence
  Description of Artificial Sequence: Synthetic oligonucleotide
  Antisense strand to SEQ ID NO: 1750083
auggugccaaagcucugac

SEQ ID NO: 1750085 - RNA, 19 nt, Artificial Sequence
  Description of Artificial Sequence: Synthetic oligonucleotide
  Sense strand starting at position 3398 of SEQ ID NO: 1562477
gagcuuuggcaccaugagu

SEQ ID NO: 1750086 - RNA, 19 nt, Artificial Sequence
  Description of Artificial Sequence: Synthetic oligonucleotide
  Antisense strand to SEQ ID NO: 1750085
acucauggugccaaagcuc

SEQ ID NO: 1750087 - RNA, 19 nt, Artificial Sequence
  Description of Artificial Sequence: Synthetic oligonucleotide
  Sense strand starting at position 3537 of SEQ ID NO: 1562477
cauugaagugagcacuauu

SEQ ID NO: 1750088 - RNA, 19 nt, Artificial Sequence
  Description of Artificial Sequence: Synthetic oligonucleotide
  Antisense strand to SEQ ID NO: 1750087
aauagugcucacuucaaug

SEQ ID NO: 1750089 - RNA, 19 nt, Artificial Sequence
  Description of Artificial Sequence: Synthetic oligonucleotide
  Sense strand starting at position 3540 of SEQ ID NO: 1562477
ugaagugagcacuauuacu

SEQ ID NO: 1750090 - RNA, 19 nt, Artificial Sequence
  Description of Artificial Sequence: Synthetic oligonucleotide
  Antisense strand to SEQ ID NO: 1750089
aguaauagugcucacuuca

SEQ ID NO: 1750091 - RNA, 19 nt, Artificial Sequence
  Description of Artificial Sequence: Synthetic oligonucleotide
  Sense strand starting at position 3598 of SEQ ID NO: 1562477
ggcuaauccagagaucgug

SEQ ID NO: 1750092 - RNA, 19 nt, Artificial Sequence
  Description of Artificial Sequence: Synthetic oligonucleotide
  Antisense strand to SEQ ID NO: 1750091
cacgaucucuggauuagcc

SEQ ID NO: 1750093 - RNA, 19 nt, Artificial Sequence
  Description of Artificial Sequence: Synthetic oligonucleotide
  Sense strand starting at position 3672 of SEQ ID NO: 1562477
uggcuuggcacuuaguuau

SEQ ID NO: 1750094 - RNA, 19 nt, Artificial Sequence
  Description of Artificial Sequence: Synthetic oligonucleotide
  Antisense strand to SEQ ID NO: 1750093
auaacuaagugccaagcca

SEQ ID NO: 1750095 - RNA, 19 nt, Artificial Sequence
  Description of Artificial Sequence: Synthetic oligonucleotide
  Sense strand starting at position 3679 of SEQ ID NO: 1562477
gcacuuaguuauucuccau

SEQ ID NO: 1750096 - RNA, 19 nt, Artificial Sequence
  Description of Artificial Sequence: Synthetic oligonucleotide
  Antisense strand to SEQ ID NO: 1750095
auggagaauaacuaagugc

SEQ ID NO: 1750097 - RNA, 19 nt, Artificial Sequence
  Description of Artificial Sequence: Synthetic oligonucleotide
  Sense strand starting at position 3705 of SEQ ID NO: 1562477
ugucaucuggccuagucuu

SEQ ID NO: 1750098 - RNA, 19 nt, Artificial Sequence
  Description of Artificial Sequence: Synthetic oligonucleotide
  Antisense strand to SEQ ID NO: 1750097
aagacuaggccagaugaca

SEQ ID NO: 1750099 - RNA, 19 nt, Artificial Sequence
  Description of Artificial Sequence: Synthetic oligonucleotide
  Sense strand starting at position 3711 of SEQ ID NO: 1562477
cuggccuagucuucuguaa

SEQ ID NO: 1750100 - RNA, 19 nt, Artificial Sequence
  Description of Artificial Sequence: Synthetic oligonucleotide
  Antisense strand to SEQ ID NO: 1750099
uuacagaagacuaggccag

SEQ ID NO: 1750101 - RNA, 19 nt, Artificial Sequence
  Description of Artificial Sequence: Synthetic oligonucleotide
  Sense strand starting at position 3715 of SEQ ID NO: 1562477
ccuagucuucuguaaccau

SEQ ID NO: 1750102 - RNA, 19 nt, Artificial Sequence
  Description of Artificial Sequence: Synthetic oligonucleotide
  Antisense strand to SEQ ID NO: 1750101
augguuacagaagacuagg

SEQ ID NO: 1750103 - RNA, 19 nt, Artificial Sequence
  Description of Artificial Sequence: Synthetic oligonucleotide
  Sense strand starting at position 3877 of SEQ ID NO: 1562477
ugauucugugcucaggaga

SEQ ID NO: 1750104 - RNA, 19 nt, Artificial Sequence
  Description of Artificial Sequence: Synthetic oligonucleotide
  Antisense strand to SEQ ID NO: 1750103
ucuccugagcacagaauca

SEQ ID NO: 1750105 - RNA, 19 nt, Artificial Sequence
  Description of Artificial Sequence: Synthetic oligonucleotide
  Sense strand starting at position 3880 of SEQ ID NO: 1562477
uucugugcucaggagaaua

SEQ ID NO: 1750106 - RNA, 19 nt, Artificial Sequence
  Description of Artificial Sequence: Synthetic oligonucleotide
  Antisense strand to SEQ ID NO: 1750105
uauucuccugagcacagaa

SEQ ID NO: 1750107 - RNA, 19 nt, Artificial Sequence
  Description of Artificial Sequence: Synthetic oligonucleotide
  Sense strand starting at position 3882 of SEQ ID NO: 1562477
cugugcucaggagaauaau

SEQ ID NO: 1750108 - RNA, 19 nt, Artificial Sequence
  Description of Artificial Sequence: Synthetic oligonucleotide
  Antisense strand to SEQ ID NO: 1750107
auuauucuccugagcacag

SEQ ID NO: 1750109 - RNA, 19 nt, Artificial Sequence
  Description of Artificial Sequence: Synthetic oligonucleotide
  Sense strand starting at position 128 of SEQ ID NO: 1562478
ccucgagucacugggaguu

SEQ ID NO: 1750110 - RNA, 19 nt, Artificial Sequence
  Description of Artificial Sequence: Synthetic oligonucleotide
  Antisense strand to SEQ ID NO: 1750109
aacucccagugacucgagg

SEQ ID NO: 1750111 - RNA, 19 nt, Artificial Sequence
  Description of Artificial Sequence: Synthetic oligonucleotide
  Sense strand starting at position 173 of SEQ ID NO: 1562478
ucccgagugagccaaagaa

SEQ ID NO: 1750112 - RNA, 19 nt, Artificial Sequence
  Description of Artificial Sequence: Synthetic oligonucleotide
  Antisense strand to SEQ ID NO: 1750111
uucuuuggcucacucggga

SEQ ID NO: 1750113 - RNA, 19 nt, Artificial Sequence
  Description of Artificial Sequence: Synthetic oligonucleotide
  Sense strand starting at position 193 of SEQ ID NO: 1562478
gaaacaguuugcccaauga

SEQ ID NO: 1750114 - RNA, 19 nt, Artificial Sequence
  Description of Artificial Sequence: Synthetic oligonucleotide
  Antisense strand to SEQ ID NO: 1750113
ucauugggcaaacuguuuc

SEQ ID NO: 1750115 - RNA, 19 nt, Artificial Sequence
  Description of Artificial Sequence: Synthetic oligonucleotide
  Sense strand starting at position 197 of SEQ ID NO: 1562478
caguuugcccaaugaagua

SEQ ID NO: 1750116 - RNA, 19 nt, Artificial Sequence
  Description of Artificial Sequence: Synthetic oligonucleotide
  Antisense strand to SEQ ID NO: 1750115
uacuucauugggcaaacug

SEQ ID NO: 1750117 - RNA, 19 nt, Artificial Sequence
  Description of Artificial Sequence: Synthetic oligonucleotide
  Sense strand starting at position 259 of SEQ ID NO: 1562478
gcacacuucugccaagaga

SEQ ID NO: 1750118 - RNA, 19 nt, Artificial Sequence
  Description of Artificial Sequence: Synthetic oligonucleotide
  Antisense strand to SEQ ID NO: 1750117
ucucuuggcagaagugugc

SEQ ID NO: 1750119 - RNA, 19 nt, Artificial Sequence
  Description of Artificial Sequence: Synthetic oligonucleotide
  Sense strand starting at position 430 of SEQ ID NO: 1562478
aggagugguccagagcagu

SEQ ID NO: 1750120 - RNA, 19 nt, Artificial Sequence
  Description of Artificial Sequence: Synthetic oligonucleotide
  Antisense strand to SEQ ID NO: 1750119
acugcucuggaccacuccu

SEQ ID NO: 1750121 - RNA, 19 nt, Artificial Sequence
  Description of Artificial Sequence: Synthetic oligonucleotide
  Sense strand starting at position 436 of SEQ ID NO: 1562478
gguccagagcagugcuuaa

SEQ ID NO: 1750122 - RNA, 19 nt, Artificial Sequence
  Description of Artificial Sequence: Synthetic oligonucleotide
  Antisense strand to SEQ ID NO: 1750121
uuaagcacugcucuggacc

SEQ ID NO: 1750123 - RNA, 19 nt, Artificial Sequence
  Description of Artificial Sequence: Synthetic oligonucleotide
  Sense strand starting at position 518 of SEQ ID NO: 1562478
ggaacagggucucaaguaa

SEQ ID NO: 1750124 - RNA, 19 nt, Artificial Sequence
  Description of Artificial Sequence: Synthetic oligonucleotide
  Antisense strand to SEQ ID NO: 1750123
uuacuugagacccuguucc

SEQ ID NO: 1750125 - RNA, 19 nt, Artificial Sequence
  Description of Artificial Sequence: Synthetic oligonucleotide
  Sense strand starting at position 1212 of SEQ ID NO: 1562478
ggcgucuucuuccugacuu

SEQ ID NO: 1750126 - RNA, 19 nt, Artificial Sequence
  Description of Artificial Sequence: Synthetic oligonucleotide
  Antisense strand to SEQ ID NO: 1750125
aagucaggaagaagacgcc

SEQ ID NO: 1750127 - RNA, 19 nt, Artificial Sequence
  Description of Artificial Sequence: Synthetic oligonucleotide
  Sense strand starting at position 1320 of SEQ ID NO: 1562478
gcgugacugcuccgggacu

SEQ ID NO: 1750128 - RNA, 19 nt, Artificial Sequence
  Description of Artificial Sequence: Synthetic oligonucleotide
  Antisense strand to SEQ ID NO: 1750127
agucccggagcagucacgc

SEQ ID NO: 1750129 - RNA, 19 nt, Artificial Sequence
  Description of Artificial Sequence: Synthetic oligonucleotide
  Sense strand starting at position 2838 of SEQ ID NO: 1562478
gccuuuggguuccagacuu

SEQ ID NO: 1750130 - RNA, 19 nt, Artificial Sequence
  Description of Artificial Sequence: Synthetic oligonucleotide
  Antisense strand to SEQ ID NO: 1750129
aagucuggaacccaaaggc

SEQ ID NO: 1750131 - RNA, 19 nt, Artificial Sequence
  Description of Artificial Sequence: Synthetic oligonucleotide
  Sense strand starting at position 2846 of SEQ ID NO: 1562478
guuccagacuugcagacau

SEQ ID NO: 1750132 - RNA, 19 nt, Artificial Sequence
  Description of Artificial Sequence: Synthetic oligonucleotide
  Antisense strand to SEQ ID NO: 1750131
augucugcaagucuggaac

SEQ ID NO: 1750133 - RNA, 19 nt, Artificial Sequence
  Description of Artificial Sequence: Synthetic oligonucleotide
  Sense strand starting at position 2853 of SEQ ID NO: 1562478
acuugcagacauggugauu

SEQ ID NO: 1750134 - RNA, 19 nt, Artificial Sequence
  Description of Artificial Sequence: Synthetic oligonucleotide
  Antisense strand to SEQ ID NO: 1750133
aaucaccaugucugcaagu

SEQ ID NO: 1750135 - RNA, 19 nt, Artificial Sequence
  Description of Artificial Sequence: Synthetic oligonucleotide
  Sense strand starting at position 2882 of SEQ ID NO: 1562478
gggucaguaucaccagacu

SEQ ID NO: 1750136 - RNA, 19 nt, Artificial Sequence
  Description of Artificial Sequence: Synthetic oligonucleotide
  Antisense strand to SEQ ID NO: 1750135
agucuggugauacugaccc

SEQ ID NO: 1750137 - RNA, 19 nt, Artificial Sequence
  Description of Artificial Sequence: Synthetic oligonucleotide
  Sense strand starting at position 2896 of SEQ ID NO: 1562478
agacuaaagucuuggugac

SEQ ID NO: 1750138 - RNA, 19 nt, Artificial Sequence
  Description of Artificial Sequence: Synthetic oligonucleotide
  Antisense strand to SEQ ID NO: 1750137
gucaccaagacuuuagucu

SEQ ID NO: 1750139 - RNA, 19 nt, Artificial Sequence
  Description of Artificial Sequence: Synthetic oligonucleotide
  Sense strand starting at position 2900 of SEQ ID NO: 1562478
uaaagucuuggugaccuaa

SEQ ID NO: 1750140 - RNA, 19 nt, Artificial Sequence
  Description of Artificial Sequence: Synthetic oligonucleotide
  Antisense strand to SEQ ID NO: 1750139
uuaggucaccaagacuuua

SEQ ID NO: 1750141 - RNA, 19 nt, Artificial Sequence
  Description of Artificial Sequence: Synthetic oligonucleotide
  Sense strand starting at position 2902 of SEQ ID NO: 1562478
aagucuuggugaccuaaca

SEQ ID NO: 1750142 - RNA, 19 nt, Artificial Sequence
  Description of Artificial Sequence: Synthetic oligonucleotide
  Antisense strand to SEQ ID NO: 1750141
uguuaggucaccaagacuu

SEQ ID NO: 1750143 - RNA, 19 nt, Artificial Sequence
  Description of Artificial Sequence: Synthetic oligonucleotide
  Sense strand starting at position 2994 of SEQ ID NO: 1562478
agacauuacuuagagaucu

SEQ ID NO: 1750144 - RNA, 19 nt, Artificial Sequence
  Description of Artificial Sequence: Synthetic oligonucleotide
  Antisense strand to SEQ ID NO: 1750143
agaucucuaaguaaugucu

SEQ ID NO: 1750145 - RNA, 19 nt, Artificial Sequence
  Description of Artificial Sequence: Synthetic oligonucleotide
  Sense strand starting at position 3042 of SEQ ID NO: 1562478
agucauaauuguccauuaa

SEQ ID NO: 1750146 - RNA, 19 nt, Artificial Sequence
  Description of Artificial Sequence: Synthetic oligonucleotide
  Antisense strand to SEQ ID NO: 1750145
uuaauggacaauuaugacu

SEQ ID NO: 1750147 - RNA, 19 nt, Artificial Sequence
  Description of Artificial Sequence: Synthetic oligonucleotide
  Sense strand starting at position 3043 of SEQ ID NO: 1562478
gucauaauuguccauuaau

SEQ ID NO: 1750148 - RNA, 19 nt, Artificial Sequence
  Description of Artificial Sequence: Synthetic oligonucleotide
  Antisense strand to SEQ ID NO: 1750147
auuaauggacaauuaugac

SEQ ID NO: 1750149 - RNA, 19 nt, Artificial Sequence
  Description of Artificial Sequence: Synthetic oligonucleotide
  Sense strand starting at position 3579 of SEQ ID NO: 1562478
gcuguaacccuuuguaaga

SEQ ID NO: 1750150 - RNA, 19 nt, Artificial Sequence
  Description of Artificial Sequence: Synthetic oligonucleotide
  Antisense strand to SEQ ID NO: 1750149
ucuuacaaaggguuacagc

SEQ ID NO: 1750151 - RNA, 19 nt, Artificial Sequence
  Description of Artificial Sequence: Synthetic oligonucleotide
  Sense strand starting at position 3580 of SEQ ID NO: 1562478
cuguaacccuuuguaagaa

SEQ ID NO: 1750152 - RNA, 19 nt, Artificial Sequence
  Description of Artificial Sequence: Synthetic oligonucleotide
  Antisense strand to SEQ ID NO: 1750151
uucuuacaaaggguuacag

SEQ ID NO: 1750153 - RNA, 19 nt, Artificial Sequence
  Description of Artificial Sequence: Synthetic oligonucleotide
  Sense strand starting at position 3581 of SEQ ID NO: 1562478
uguaacccuuuguaagaaa

SEQ ID NO: 1750154 - RNA, 19 nt, Artificial Sequence
  Description of Artificial Sequence: Synthetic oligonucleotide
  Antisense strand to SEQ ID NO: 1750153
uuucuuacaaaggguuaca

SEQ ID NO: 1750155 - RNA, 19 nt, Artificial Sequence
  Description of Artificial Sequence: Synthetic oligonucleotide
  Sense strand starting at position 3623 of SEQ ID NO: 1562478
acuuauagauugugaaguu

SEQ ID NO: 1750156 - RNA, 19 nt, Artificial Sequence
  Description of Artificial Sequence: Synthetic oligonucleotide
  Antisense strand to SEQ ID NO: 1750155
aacuucacaaucuauaagu

SEQ ID NO: 1750157 - RNA, 19 nt, Artificial Sequence
  Description of Artificial Sequence: Synthetic oligonucleotide
  Sense strand starting at position 3624 of SEQ ID NO: 1562478
cuuauagauugugaaguua

SEQ ID NO: 1750158 - RNA, 19 nt, Artificial Sequence
  Description of Artificial Sequence: Synthetic oligonucleotide
  Antisense strand to SEQ ID NO: 1750157
uaacuucacaaucuauaag

SEQ ID NO: 1750159 - RNA, 19 nt, Artificial Sequence
  Description of Artificial Sequence: Synthetic oligonucleotide
  Sense strand starting at position 3632 of SEQ ID NO: 1562478
uugugaaguuaacaaacua

SEQ ID NO: 1750160 - RNA, 19 nt, Artificial Sequence
  Description of Artificial Sequence: Synthetic oligonucleotide
  Antisense strand to SEQ ID NO: 1750159
uaguuuguuaacuucacaa

SEQ ID NO: 1750161 - RNA, 19 nt, Artificial Sequence
  Description of Artificial Sequence: Synthetic oligonucleotide
  Sense strand starting at position 3652 of SEQ ID NO: 1562478
ggagaagucagagguuaca

SEQ ID NO: 1750162 - RNA, 19 nt, Artificial Sequence
  Description of Artificial Sequence: Synthetic oligonucleotide
  Antisense strand to SEQ ID NO: 1750161
uguaaccucugacuucucc

SEQ ID NO: 1750163 - RNA, 19 nt, Artificial Sequence
  Description of Artificial Sequence: Synthetic oligonucleotide
  Sense strand starting at position 3665 of SEQ ID NO: 1562478
guuacagaguuggugacaa

SEQ ID NO: 1750164 - RNA, 19 nt, Artificial Sequence
  Description of Artificial Sequence: Synthetic oligonucleotide
  Antisense strand to SEQ ID NO: 1750163
uugucaccaacucuguaac

SEQ ID NO: 1750165 - RNA, 19 nt, Artificial Sequence
  Description of Artificial Sequence: Synthetic oligonucleotide
  Sense strand starting at position 3786 of SEQ ID NO: 1562478
uuaggagcgccugaugaau

SEQ ID NO: 1750166 - RNA, 19 nt, Artificial Sequence
  Description of Artificial Sequence: Synthetic oligonucleotide
  Antisense strand to SEQ ID NO: 1750165
auucaucaggcgcuccuaa

SEQ ID NO: 1750167 - RNA, 19 nt, Artificial Sequence
  Description of Artificial Sequence: Synthetic oligonucleotide
  Sense strand starting at position 3819 of SEQ ID NO: 1562478
uggauuucguccuuccaca

SEQ ID NO: 1750168 - RNA, 19 nt, Artificial Sequence
  Description of Artificial Sequence: Synthetic oligonucleotide
  Antisense strand to SEQ ID NO: 1750167
uguggaaggacgaaaucca

SEQ ID NO: 1750169 - RNA, 19 nt, Artificial Sequence
  Description of Artificial Sequence: Synthetic oligonucleotide
  Sense strand starting at position 3982 of SEQ ID NO: 1562478
gacccuccuucucgacaga

SEQ ID NO: 1750170 - RNA, 19 nt, Artificial Sequence
  Description of Artificial Sequence: Synthetic oligonucleotide
  Antisense strand to SEQ ID NO: 1750169
ucugucgagaaggaggguc

SEQ ID NO: 1750171 - RNA, 19 nt, Artificial Sequence
  Description of Artificial Sequence: Synthetic oligonucleotide
  Sense strand starting at position 128 of SEQ ID NO: 1562479
cucuguuuagucugugcau

SEQ ID NO: 1750172 - RNA, 19 nt, Artificial Sequence
  Description of Artificial Sequence: Synthetic oligonucleotide
  Antisense strand to SEQ ID NO: 1750171
augcacagacuaaacagag

SEQ ID NO: 1750173 - RNA, 19 nt, Artificial Sequence
  Description of Artificial Sequence: Synthetic oligonucleotide
  Sense strand starting at position 372 of SEQ ID NO: 1562479
gggccuuucuugucuaauc

SEQ ID NO: 1750174 - RNA, 19 nt, Artificial Sequence
  Description of Artificial Sequence: Synthetic oligonucleotide
  Antisense strand to SEQ ID NO: 1750173
gauuagacaagaaaggccc

SEQ ID NO: 1750175 - RNA, 19 nt, Artificial Sequence
  Description of Artificial Sequence: Synthetic oligonucleotide
  Sense strand starting at position 373 of SEQ ID NO: 1562479
ggccuuucuugucuaaucu

SEQ ID NO: 1750176 - RNA, 19 nt, Artificial Sequence
  Description of Artificial Sequence: Synthetic oligonucleotide
  Antisense strand to SEQ ID NO: 1750175
agauuagacaagaaaggcc

SEQ ID NO: 1750177 - RNA, 19 nt, Artificial Sequence
  Description of Artificial Sequence: Synthetic oligonucleotide
  Sense strand starting at position 380 of SEQ ID NO: 1562479
cuugucuaaucucauggga

SEQ ID NO: 1750178 - RNA, 19 nt, Artificial Sequence
  Description of Artificial Sequence: Synthetic oligonucleotide
  Antisense strand to SEQ ID NO: 1750177
ucccaugagauuagacaag

SEQ ID NO: 1750179 - RNA, 19 nt, Artificial Sequence
  Description of Artificial Sequence: Synthetic oligonucleotide
  Sense strand starting at position 382 of SEQ ID NO: 1562479
ugucuaaucucaugggaug

SEQ ID NO: 1750180 - RNA, 19 nt, Artificial Sequence
  Description of Artificial Sequence: Synthetic oligonucleotide
  Antisense strand to SEQ ID NO: 1750179
caucccaugagauuagaca

SEQ ID NO: 1750181 - RNA, 19 nt, Artificial Sequence
  Description of Artificial Sequence: Synthetic oligonucleotide
  Sense strand starting at position 2110 of SEQ ID NO: 1562479
ucccgcugugcguuucuaa

SEQ ID NO: 1750182 - RNA, 19 nt, Artificial Sequence
  Description of Artificial Sequence: Synthetic oligonucleotide
  Antisense strand to SEQ ID NO: 1750181
uuagaaacgcacagcggga

SEQ ID NO: 1750183 - RNA, 19 nt, Artificial Sequence
  Description of Artificial Sequence: Synthetic oligonucleotide
  Sense strand starting at position 2111 of SEQ ID NO: 1562479
cccgcugugcguuucuaaa

SEQ ID NO: 1750184 - RNA, 19 nt, Artificial Sequence
  Description of Artificial Sequence: Synthetic oligonucleotide
  Antisense strand to SEQ ID NO: 1750183
uuuagaaacgcacagcggg

SEQ ID NO: 1750185 - RNA, 19 nt, Artificial Sequence
  Description of Artificial Sequence: Synthetic oligonucleotide
  Sense strand starting at position 2122 of SEQ ID NO: 1562479
uuucuaaaccugugcaaug

SEQ ID NO: 1750186 - RNA, 19 nt, Artificial Sequence
  Description of Artificial Sequence: Synthetic oligonucleotide
  Antisense strand to SEQ ID NO: 1750185
cauugcacagguuuagaaa

SEQ ID NO: 1750187 - RNA, 19 nt, Artificial Sequence
  Description of Artificial Sequence: Synthetic oligonucleotide
  Sense strand starting at position 2544 of SEQ ID NO: 1562479
cgguguguucgguuuguga

SEQ ID NO: 1750188 - RNA, 19 nt, Artificial Sequence
  Description of Artificial Sequence: Synthetic oligonucleotide
  Antisense strand to SEQ ID NO: 1750187
ucacaaaccgaacacaccg

SEQ ID NO: 1750189 - RNA, 19 nt, Artificial Sequence
  Description of Artificial Sequence: Synthetic oligonucleotide
  Sense strand starting at position 2545 of SEQ ID NO: 1562479
gguguguucgguuugugaa

SEQ ID NO: 1750190 - RNA, 19 nt, Artificial Sequence
  Description of Artificial Sequence: Synthetic oligonucleotide
  Antisense strand to SEQ ID NO: 1750189
uucacaaaccgaacacacc

SEQ ID NO: 1750191 - RNA, 19 nt, Artificial Sequence
  Description of Artificial Sequence: Synthetic oligonucleotide
  Sense strand starting at position 2546 of SEQ ID NO: 1562479
guguguucgguuugugaaa

SEQ ID NO: 1750192 - RNA, 19 nt, Artificial Sequence
  Description of Artificial Sequence: Synthetic oligonucleotide
  Antisense strand to SEQ ID NO: 1750191
uuucacaaaccgaacacac

SEQ ID NO: 1750193 - RNA, 19 nt, Artificial Sequence
  Description of Artificial Sequence: Synthetic oligonucleotide
  Sense strand starting at position 2547 of SEQ ID NO: 1562479
uguguucgguuugugaaag

SEQ ID NO: 1750194 - RNA, 19 nt, Artificial Sequence
  Description of Artificial Sequence: Synthetic oligonucleotide
  Antisense strand to SEQ ID NO: 1750193
cuuucacaaaccgaacaca

SEQ ID NO: 1750195 - RNA, 19 nt, Artificial Sequence
  Description of Artificial Sequence: Synthetic oligonucleotide
  Sense strand starting at position 2570 of SEQ ID NO: 1562479
gcgggcugaucgcuaggau

SEQ ID NO: 1750196 - RNA, 19 nt, Artificial Sequence
  Description of Artificial Sequence: Synthetic oligonucleotide
  Antisense strand to SEQ ID NO: 1750195
auccuagcgaucagcccgc

SEQ ID NO: 1750197 - RNA, 19 nt, Artificial Sequence
  Description of Artificial Sequence: Synthetic oligonucleotide
  Sense strand starting at position 2571 of SEQ ID NO: 1562479
cgggcugaucgcuaggauu

SEQ ID NO: 1750198 - RNA, 19 nt, Artificial Sequence
  Description of Artificial Sequence: Synthetic oligonucleotide
  Antisense strand to SEQ ID NO: 1750197
aauccuagcgaucagcccg

SEQ ID NO: 1750199 - RNA, 19 nt, Artificial Sequence
  Description of Artificial Sequence: Synthetic oligonucleotide
  Sense strand starting at position 2573 of SEQ ID NO: 1562479
ggcugaucgcuaggauuug

SEQ ID NO: 1750200 - RNA, 19 nt, Artificial Sequence
  Description of Artificial Sequence: Synthetic oligonucleotide
  Antisense strand to SEQ ID NO: 1750199
caaauccuagcgaucagcc

SEQ ID NO: 1750201 - RNA, 19 nt, Artificial Sequence
  Description of Artificial Sequence: Synthetic oligonucleotide
  Sense strand starting at position 2574 of SEQ ID NO: 1562479
gcugaucgcuaggauuuga

SEQ ID NO: 1750202 - RNA, 19 nt, Artificial Sequence
  Description of Artificial Sequence: Synthetic oligonucleotide
  Antisense strand to SEQ ID NO: 1750201
ucaaauccuagcgaucagc

SEQ ID NO: 1750203 - RNA, 19 nt, Artificial Sequence
  Description of Artificial Sequence: Synthetic oligonucleotide
  Sense strand starting at position 2579 of SEQ ID NO: 1562479
ucgcuaggauuugagcauu

SEQ ID NO: 1750204 - RNA, 19 nt, Artificial Sequence
  Description of Artificial Sequence: Synthetic oligonucleotide
  Antisense strand to SEQ ID NO: 1750203
aaugcucaaauccuagcga

SEQ ID NO: 1750205 - RNA, 19 nt, Artificial Sequence
  Description of Artificial Sequence: Synthetic oligonucleotide
  Sense strand starting at position 2603 of SEQ ID NO: 1562479
cuacauauacgguggaaau

SEQ ID NO: 1750206 - RNA, 19 nt, Artificial Sequence
  Description of Artificial Sequence: Synthetic oligonucleotide
  Antisense strand to SEQ ID NO: 1750205
auuuccaccguauauguag

SEQ ID NO: 1750207 - RNA, 19 nt, Artificial Sequence
  Description of Artificial Sequence: Synthetic oligonucleotide
  Sense strand starting at position 2604 of SEQ ID NO: 1562479
uacauauacgguggaaaug

SEQ ID NO: 1750208 - RNA, 19 nt, Artificial Sequence
  Description of Artificial Sequence: Synthetic oligonucleotide
  Antisense strand to SEQ ID NO: 1750207
cauuuccaccguauaugua

SEQ ID NO: 1750209 - RNA, 19 nt, Artificial Sequence
  Description of Artificial Sequence: Synthetic oligonucleotide
  Sense strand starting at position 2615 of SEQ ID NO: 1562479
uggaaaugguggcugugaa

SEQ ID NO: 1750210 - RNA, 19 nt, Artificial Sequence
  Description of Artificial Sequence: Synthetic oligonucleotide
  Antisense strand to SEQ ID NO: 1750209
uucacagccaccauuucca

SEQ ID NO: 1750211 - RNA, 19 nt, Artificial Sequence
  Description of Artificial Sequence: Synthetic oligonucleotide
  Sense strand starting at position 2616 of SEQ ID NO: 1562479
ggaaaugguggcugugaau

SEQ ID NO: 1750212 - RNA, 19 nt, Artificial Sequence
  Description of Artificial Sequence: Synthetic oligonucleotide
  Antisense strand to SEQ ID NO: 1750211
auucacagccaccauuucc

SEQ ID NO: 1750213 - RNA, 19 nt, Artificial Sequence
  Description of Artificial Sequence: Synthetic oligonucleotide
  Sense strand starting at position 2693 of SEQ ID NO: 1562479
gcacauaugcgugggcuaa

SEQ ID NO: 1750214 - RNA, 19 nt, Artificial Sequence
  Description of Artificial Sequence: Synthetic oligonucleotide
  Antisense strand to SEQ ID NO: 1750213
uuagcccacgcauaugugc

SEQ ID NO: 1750215 - RNA, 19 nt, Artificial Sequence
  Description of Artificial Sequence: Synthetic oligonucleotide
  Sense strand starting at position 2694 of SEQ ID NO: 1562479
cacauaugcgugggcuaaa

SEQ ID NO: 1750216 - RNA, 19 nt, Artificial Sequence
  Description of Artificial Sequence: Synthetic oligonucleotide
  Antisense strand to SEQ ID NO: 1750215
uuuagcccacgcauaugug

SEQ ID NO: 1750217 - RNA, 19 nt, Artificial Sequence
  Description of Artificial Sequence: Synthetic oligonucleotide
  Sense strand starting at position 2747 of SEQ ID NO: 1562479
gcauccuugugcugacauu

SEQ ID NO: 1750218 - RNA, 19 nt, Artificial Sequence
  Description of Artificial Sequence: Synthetic oligonucleotide
  Antisense strand to SEQ ID NO: 1750217
aaugucagcacaaggaugc

SEQ ID NO: 1750219 - RNA, 19 nt, Artificial Sequence
  Description of Artificial Sequence: Synthetic oligonucleotide
  Sense strand starting at position 2769 of SEQ ID NO: 1562479
ggucauuauucucucccuu

SEQ ID NO: 1750220 - RNA, 19 nt, Artificial Sequence
  Description of Artificial Sequence: Synthetic oligonucleotide
  Antisense strand to SEQ ID NO: 1750219
aagggagagaauaaugacc

SEQ ID NO: 1750221 - RNA, 19 nt, Artificial Sequence
  Description of Artificial Sequence: Synthetic oligonucleotide
  Sense strand starting at position 2832 of SEQ ID NO: 1562479
guguguaaauucuuaaacg

SEQ ID NO: 1750222 - RNA, 19 nt, Artificial Sequence
  Description of Artificial Sequence: Synthetic oligonucleotide
  Antisense strand to SEQ ID NO: 1750221
cguuuaagaauuuacacac

SEQ ID NO: 1750223 - RNA, 19 nt, Artificial Sequence
  Description of Artificial Sequence: Synthetic oligonucleotide
  Sense strand starting at position 2833 of SEQ ID NO: 1562479
uguguaaauucuuaaacgu

SEQ ID NO: 1750224 - RNA, 19 nt, Artificial Sequence
  Description of Artificial Sequence: Synthetic oligonucleotide
  Antisense strand to SEQ ID NO: 1750223
acguuuaagaauuuacaca

SEQ ID NO: 1750225 - RNA, 19 nt, Artificial Sequence
  Description of Artificial Sequence: Synthetic oligonucleotide
  Sense strand starting at position 3487 of SEQ ID NO: 1562479
ccaggugucugcugaggaa

SEQ ID NO: 1750226 - RNA, 19 nt, Artificial Sequence
  Description of Artificial Sequence: Synthetic oligonucleotide
  Antisense strand to SEQ ID NO: 1750225
uuccucagcagacaccugg

SEQ ID NO: 1750227 - RNA, 19 nt, Artificial Sequence
  Description of Artificial Sequence: Synthetic oligonucleotide
  Sense strand starting at position 3529 of SEQ ID NO: 1562479
ccauccaugugcuggaaua

SEQ ID NO: 1750228 - RNA, 19 nt, Artificial Sequence
  Description of Artificial Sequence: Synthetic oligonucleotide
  Antisense strand to SEQ ID NO: 1750227
uauuccagcacauggaugg

SEQ ID NO: 1750229 - RNA, 19 nt, Artificial Sequence
  Description of Artificial Sequence: Synthetic oligonucleotide
  Sense strand starting at position 3530 of SEQ ID NO: 1562479
cauccaugugcuggaauau

SEQ ID NO: 1750230 - RNA, 19 nt, Artificial Sequence
  Description of Artificial Sequence: Synthetic oligonucleotide
  Antisense strand to SEQ ID NO: 1750229
auauuccagcacauggaug

SEQ ID NO: 1750231 - RNA, 19 nt, Artificial Sequence
  Description of Artificial Sequence: Synthetic oligonucleotide
  Sense strand starting at position 3531 of SEQ ID NO: 1562479
auccaugugcuggaauauu

SEQ ID NO: 1750232 - RNA, 19 nt, Artificial Sequence
  Description of Artificial Sequence: Synthetic oligonucleotide
  Antisense strand to SEQ ID NO: 1750231
aauauuccagcacauggau

SEQ ID NO: 1750233 - RNA, 19 nt, Artificial Sequence
  Description of Artificial Sequence: Synthetic oligonucleotide
  Sense strand starting at position 3540 of SEQ ID NO: 1562479
cuggaauauuacucagccu

SEQ ID NO: 1750234 - RNA, 19 nt, Artificial Sequence
  Description of Artificial Sequence: Synthetic oligonucleotide
  Antisense strand to SEQ ID NO: 1750233
aggcugaguaauauuccag

SEQ ID NO: 1750235 - RNA, 19 nt, Artificial Sequence
  Description of Artificial Sequence: Synthetic oligonucleotide
  Sense strand starting at position 3567 of SEQ ID NO: 1562479
gaagcagauuucggcacau

SEQ ID NO: 1750236 - RNA, 19 nt, Artificial Sequence
  Description of Artificial Sequence: Synthetic oligonucleotide
  Antisense strand to SEQ ID NO: 1750235
augugccgaaaucugcuuc

SEQ ID NO: 1750237 - RNA, 19 nt, Artificial Sequence
  Description of Artificial Sequence: Synthetic oligonucleotide
  Sense strand starting at position 3670 of SEQ ID NO: 1562479
ccaugaggucccuggagaa

SEQ ID NO: 1750238 - RNA, 19 nt, Artificial Sequence
  Description of Artificial Sequence: Synthetic oligonucleotide
  Antisense strand to SEQ ID NO: 1750237
uucuccagggaccucaugg

SEQ ID NO: 1750239 - RNA, 19 nt, Artificial Sequence
  Description of Artificial Sequence: Synthetic oligonucleotide
  Sense strand starting at position 3783 of SEQ ID NO: 1562479
cuggaacagcucugcagau

SEQ ID NO: 1750240 - RNA, 19 nt, Artificial Sequence
  Description of Artificial Sequence: Synthetic oligonucleotide
  Antisense strand to SEQ ID NO: 1750239
aucugcagagcuguuccag

SEQ ID NO: 1750241 - RNA, 19 nt, Artificial Sequence
  Description of Artificial Sequence: Synthetic oligonucleotide
  Sense strand starting at position 3807 of SEQ ID NO: 1562479
uggcaaugguuacaugaga

SEQ ID NO: 1750242 - RNA, 19 nt, Artificial Sequence
  Description of Artificial Sequence: Synthetic oligonucleotide
  Antisense strand to SEQ ID NO: 1750241
ucucauguaaccauugcca

SEQ ID NO: 1750243 - RNA, 19 nt, Artificial Sequence
  Description of Artificial Sequence: Synthetic oligonucleotide
  Sense strand starting at position 3812 of SEQ ID NO: 1562479
augguuacaugagauguga

SEQ ID NO: 1750244 - RNA, 19 nt, Artificial Sequence
  Description of Artificial Sequence: Synthetic oligonucleotide
  Antisense strand to SEQ ID NO: 1750243
ucacaucucauguaaccau

SEQ ID NO: 1750245 - RNA, 19 nt, Artificial Sequence
  Description of Artificial Sequence: Synthetic oligonucleotide
  Sense strand starting at position 3814 of SEQ ID NO: 1562479
gguuacaugagaugugaau

SEQ ID NO: 1750246 - RNA, 19 nt, Artificial Sequence
  Description of Artificial Sequence: Synthetic oligonucleotide
  Antisense strand to SEQ ID NO: 1750245
auucacaucucauguaacc

SEQ ID NO: 1750247 - RNA, 19 nt, Artificial Sequence
  Description of Artificial Sequence: Synthetic oligonucleotide
  Sense strand starting at position 266 of SEQ ID NO: 1562480
gccuuaaagugauugcuuu

SEQ ID NO: 1750248 - RNA, 19 nt, Artificial Sequence
  Description of Artificial Sequence: Synthetic oligonucleotide
  Antisense strand to SEQ ID NO: 1750247
aaagcaaucacuuuaaggc

SEQ ID NO: 1750249 - RNA, 19 nt, Artificial Sequence
  Description of Artificial Sequence: Synthetic oligonucleotide
  Sense strand starting at position 371 of SEQ ID NO: 1562480
uuauuaagucccuaacugu

SEQ ID NO: 1750250 - RNA, 19 nt, Artificial Sequence
  Description of Artificial Sequence: Synthetic oligonucleotide
  Antisense strand to SEQ ID NO: 1750249
acaguuagggacuuaauaa

SEQ ID NO: 1750251 - RNA, 19 nt, Artificial Sequence
  Description of Artificial Sequence: Synthetic oligonucleotide
  Sense strand starting at position 463 of SEQ ID NO: 1562480
agugaagucagccagugua

SEQ ID NO: 1750252 - RNA, 19 nt, Artificial Sequence
  Description of Artificial Sequence: Synthetic oligonucleotide
  Antisense strand to SEQ ID NO: 1750251
uacacuggcugacuucacu

SEQ ID NO: 1750253 - RNA, 19 nt, Artificial Sequence
  Description of Artificial Sequence: Synthetic oligonucleotide
  Sense strand starting at position 466 of SEQ ID NO: 1562480
gaagucagccaguguauuu

SEQ ID NO: 1750254 - RNA, 19 nt, Artificial Sequence
  Description of Artificial Sequence: Synthetic oligonucleotide
  Antisense strand to SEQ ID NO: 1750253
aaauacacuggcugacuuc

SEQ ID NO: 1750255 - RNA, 19 nt, Artificial Sequence
  Description of Artificial Sequence: Synthetic oligonucleotide
  Sense strand starting at position 519 of SEQ ID NO: 1562480
uugcaaucuugagcaaguu

SEQ ID NO: 1750256 - RNA, 19 nt, Artificial Sequence
  Description of Artificial Sequence: Synthetic oligonucleotide
  Antisense strand to SEQ ID NO: 1750255
aacuugcucaagauugcaa

SEQ ID NO: 1750257 - RNA, 19 nt, Artificial Sequence
  Description of Artificial Sequence: Synthetic oligonucleotide
  Sense strand starting at position 547 of SEQ ID NO: 1562480
acaggaugcucaucuuuaa

SEQ ID NO: 1750258 - RNA, 19 nt, Artificial Sequence
  Description of Artificial Sequence: Synthetic oligonucleotide
  Antisense strand to SEQ ID NO: 1750257
uuaaagaugagcauccugu

SEQ ID NO: 1750259 - RNA, 19 nt, Artificial Sequence
  Description of Artificial Sequence: Synthetic oligonucleotide
  Sense strand starting at position 699 of SEQ ID NO: 1562480
auggcuaaucuguggagga

SEQ ID NO: 1750260 - RNA, 19 nt, Artificial Sequence
  Description of Artificial Sequence: Synthetic oligonucleotide
  Antisense strand to SEQ ID NO: 1750259
uccuccacagauuagccau

SEQ ID NO: 1750261 - RNA, 19 nt, Artificial Sequence
  Description of Artificial Sequence: Synthetic oligonucleotide
  Sense strand starting at position 701 of SEQ ID NO: 1562480
ggcuaaucuguggaggagu

SEQ ID NO: 1750262 - RNA, 19 nt, Artificial Sequence
  Description of Artificial Sequence: Synthetic oligonucleotide
  Antisense strand to SEQ ID NO: 1750261
acuccuccacagauuagcc

SEQ ID NO: 1750263 - RNA, 19 nt, Artificial Sequence
  Description of Artificial Sequence: Synthetic oligonucleotide
  Sense strand starting at position 802 of SEQ ID NO: 1562480
gauggugcaggcugauaua

SEQ ID NO: 1750264 - RNA, 19 nt, Artificial Sequence
  Description of Artificial Sequence: Synthetic oligonucleotide
  Antisense strand to SEQ ID NO: 1750263
uauaucagccugcaccauc

SEQ ID NO: 1750265 - RNA, 19 nt, Artificial Sequence
  Description of Artificial Sequence: Synthetic oligonucleotide
  Sense strand starting at position 823 of SEQ ID NO: 1562480
uuaguuaggguucagaagu

SEQ ID NO: 1750266 - RNA, 19 nt, Artificial Sequence
  Description of Artificial Sequence: Synthetic oligonucleotide
  Antisense strand to SEQ ID NO: 1750265
acuucugaacccuaacuaa

SEQ ID NO: 1750267 - RNA, 19 nt, Artificial Sequence
  Description of Artificial Sequence: Synthetic oligonucleotide
  Sense strand starting at position 958 of SEQ ID NO: 1562480
ugggacuugcugugugagu

SEQ ID NO: 1750268 - RNA, 19 nt, Artificial Sequence
  Description of Artificial Sequence: Synthetic oligonucleotide
  Antisense strand to SEQ ID NO: 1750267
acucacacagcaaguccca

SEQ ID NO: 1750269 - RNA, 19 nt, Artificial Sequence
  Description of Artificial Sequence: Synthetic oligonucleotide
  Sense strand starting at position 979 of SEQ ID NO: 1562480
gcauauuagugucuuagug

SEQ ID NO: 1750270 - RNA, 19 nt, Artificial Sequence
  Description of Artificial Sequence: Synthetic oligonucleotide
  Antisense strand to SEQ ID NO: 1750269
cacuaagacacuaauaugc

SEQ ID NO: 1750271 - RNA, 19 nt, Artificial Sequence
  Description of Artificial Sequence: Synthetic oligonucleotide
  Sense strand starting at position 983 of SEQ ID NO: 1562480
auuagugucuuagugagca

SEQ ID NO: 1750272 - RNA, 19 nt, Artificial Sequence
  Description of Artificial Sequence: Synthetic oligonucleotide
  Antisense strand to SEQ ID NO: 1750271
ugcucacuaagacacuaau

SEQ ID NO: 1750273 - RNA, 19 nt, Artificial Sequence
  Description of Artificial Sequence: Synthetic oligonucleotide
  Sense strand starting at position 988 of SEQ ID NO: 1562480
ugucuuagugagcaucagu

SEQ ID NO: 1750274 - RNA, 19 nt, Artificial Sequence
  Description of Artificial Sequence: Synthetic oligonucleotide
  Antisense strand to SEQ ID NO: 1750273
acugaugcucacuaagaca

SEQ ID NO: 1750275 - RNA, 19 nt, Artificial Sequence
  Description of Artificial Sequence: Synthetic oligonucleotide
  Sense strand starting at position 1080 of SEQ ID NO: 1562480
acccgacuucucuggccua

SEQ ID NO: 1750276 - RNA, 19 nt, Artificial Sequence
  Description of Artificial Sequence: Synthetic oligonucleotide
  Antisense strand to SEQ ID NO: 1750275
uaggccagagaagucgggu

SEQ ID NO: 1750277 - RNA, 19 nt, Artificial Sequence
  Description of Artificial Sequence: Synthetic oligonucleotide
  Sense strand starting at position 1083 of SEQ ID NO: 1562480
cgacuucucuggccuacuu

SEQ ID NO: 1750278 - RNA, 19 nt, Artificial Sequence
  Description of Artificial Sequence: Synthetic oligonucleotide
  Antisense strand to SEQ ID NO: 1750277
aaguaggccagagaagucg

SEQ ID NO: 1750279 - RNA, 19 nt, Artificial Sequence
  Description of Artificial Sequence: Synthetic oligonucleotide
  Sense strand starting at position 1239 of SEQ ID NO: 1562480
gggaaaggccucuguagaa

SEQ ID NO: 1750280 - RNA, 19 nt, Artificial Sequence
  Description of Artificial Sequence: Synthetic oligonucleotide
  Antisense strand to SEQ ID NO: 1750279
uucuacagaggccuuuccc

SEQ ID NO: 1750281 - RNA, 19 nt, Artificial Sequence
  Description of Artificial Sequence: Synthetic oligonucleotide
  Sense strand starting at position 1251 of SEQ ID NO: 1562480
uguagaaagccuugacuuu

SEQ ID NO: 1750282 - RNA, 19 nt, Artificial Sequence
  Description of Artificial Sequence: Synthetic oligonucleotide
  Antisense strand to SEQ ID NO: 1750281
aaagucaaggcuuucuaca

SEQ ID NO: 1750283 - RNA, 19 nt, Artificial Sequence
  Description of Artificial Sequence: Synthetic oligonucleotide
  Sense strand starting at position 1252 of SEQ ID NO: 1562480
guagaaagccuugacuuuc

SEQ ID NO: 1750284 - RNA, 19 nt, Artificial Sequence
  Description of Artificial Sequence: Synthetic oligonucleotide
  Antisense strand to SEQ ID NO: 1750283
gaaagucaaggcuuucuac

SEQ ID NO: 1750285 - RNA, 19 nt, Artificial Sequence
  Description of Artificial Sequence: Synthetic oligonucleotide
  Sense strand starting at position 1409 of SEQ ID NO: 1562480
ucgcgucuggugcuguaua

SEQ ID NO: 1750286 - RNA, 19 nt, Artificial Sequence
  Description of Artificial Sequence: Synthetic oligonucleotide
  Antisense strand to SEQ ID NO: 1750285
uauacagcaccagacgcga

SEQ ID NO: 1750287 - RNA, 19 nt, Artificial Sequence
  Description of Artificial Sequence: Synthetic oligonucleotide
  Sense strand starting at position 1411 of SEQ ID NO: 1562480
gcgucuggugcuguauaaa

SEQ ID NO: 1750288 - RNA, 19 nt, Artificial Sequence
  Description of Artificial Sequence: Synthetic oligonucleotide
  Antisense strand to SEQ ID NO: 1750287
uuuauacagcaccagacgc

SEQ ID NO: 1750289 - RNA, 19 nt, Artificial Sequence
  Description of Artificial Sequence: Synthetic oligonucleotide
  Sense strand starting at position 1414 of SEQ ID NO: 1562480
ucuggugcuguauaaauau

SEQ ID NO: 1750290 - RNA, 19 nt, Artificial Sequence
  Description of Artificial Sequence: Synthetic oligonucleotide
  Antisense strand to SEQ ID NO: 1750289
auauuuauacagcaccaga

SEQ ID NO: 1750291 - RNA, 19 nt, Artificial Sequence
  Description of Artificial Sequence: Synthetic oligonucleotide
  Sense strand starting at position 1565 of SEQ ID NO: 1562480
auguauucuucccuuguca

SEQ ID NO: 1750292 - RNA, 19 nt, Artificial Sequence
  Description of Artificial Sequence: Synthetic oligonucleotide
  Antisense strand to SEQ ID NO: 1750291
ugacaagggaagaauacau

SEQ ID NO: 1750293 - RNA, 19 nt, Artificial Sequence
  Description of Artificial Sequence: Synthetic oligonucleotide
  Sense strand starting at position 1567 of SEQ ID NO: 1562480
guauucuucccuugucacu

SEQ ID NO: 1750294 - RNA, 19 nt, Artificial Sequence
  Description of Artificial Sequence: Synthetic oligonucleotide
  Antisense strand to SEQ ID NO: 1750293
agugacaagggaagaauac

SEQ ID NO: 1750295 - RNA, 19 nt, Artificial Sequence
  Description of Artificial Sequence: Synthetic oligonucleotide
  Sense strand starting at position 1607 of SEQ ID NO: 1562480
gccauccaucaggaaagua

SEQ ID NO: 1750296 - RNA, 19 nt, Artificial Sequence
  Description of Artificial Sequence: Synthetic oligonucleotide
  Antisense strand to SEQ ID NO: 1750295
uacuuuccugauggauggc

SEQ ID NO: 1750297 - RNA, 19 nt, Artificial Sequence
  Description of Artificial Sequence: Synthetic oligonucleotide
  Sense strand starting at position 1615 of SEQ ID NO: 1562480
ucaggaaaguacuuacuga

SEQ ID NO: 1750298 - RNA, 19 nt, Artificial Sequence
  Description of Artificial Sequence: Synthetic oligonucleotide
  Antisense strand to SEQ ID NO: 1750297
ucaguaaguacuuuccuga

SEQ ID NO: 1750299 - RNA, 19 nt, Artificial Sequence
  Description of Artificial Sequence: Synthetic oligonucleotide
  Sense strand starting at position 1725 of SEQ ID NO: 1562480
uuuagacaaucuguggaaa

SEQ ID NO: 1750300 - RNA, 19 nt, Artificial Sequence
  Description of Artificial Sequence: Synthetic oligonucleotide
  Antisense strand to SEQ ID NO: 1750299
uuuccacagauugucuaaa

SEQ ID NO: 1750301 - RNA, 19 nt, Artificial Sequence
  Description of Artificial Sequence: Synthetic oligonucleotide
  Sense strand starting at position 2089 of SEQ ID NO: 1562480
ugcccauucguggagacuu

SEQ ID NO: 1750302 - RNA, 19 nt, Artificial Sequence
  Description of Artificial Sequence: Synthetic oligonucleotide
  Antisense strand to SEQ ID NO: 1750301
aagucuccacgaaugggca

SEQ ID NO: 1750303 - RNA, 19 nt, Artificial Sequence
  Description of Artificial Sequence: Synthetic oligonucleotide
  Sense strand starting at position 2097 of SEQ ID NO: 1562480
cguggagacuucuauuucu

SEQ ID NO: 1750304 - RNA, 19 nt, Artificial Sequence
  Description of Artificial Sequence: Synthetic oligonucleotide
  Antisense strand to SEQ ID NO: 1750303
agaaauagaagucuccacg

SEQ ID NO: 1750305 - RNA, 19 nt, Artificial Sequence
  Description of Artificial Sequence: Synthetic oligonucleotide
  Sense strand starting at position 2843 of SEQ ID NO: 1562480
gggugugaguagucccuuu

SEQ ID NO: 1750306 - RNA, 19 nt, Artificial Sequence
  Description of Artificial Sequence: Synthetic oligonucleotide
  Antisense strand to SEQ ID NO: 1750305
aaagggacuacucacaccc

SEQ ID NO: 1750307 - RNA, 19 nt, Artificial Sequence
  Description of Artificial Sequence: Synthetic oligonucleotide
  Sense strand starting at position 2845 of SEQ ID NO: 1562480
gugugaguagucccuuugu

SEQ ID NO: 1750308 - RNA, 19 nt, Artificial Sequence
  Description of Artificial Sequence: Synthetic oligonucleotide
  Antisense strand to SEQ ID NO: 1750307
acaaagggacuacucacac

SEQ ID NO: 1750309 - RNA, 19 nt, Artificial Sequence
  Description of Artificial Sequence: Synthetic oligonucleotide
  Sense strand starting at position 3199 of SEQ ID NO: 1562480
aauucugucgaguggguau

SEQ ID NO: 1750310 - RNA, 19 nt, Artificial Sequence
  Description of Artificial Sequence: Synthetic oligonucleotide
  Antisense strand to SEQ ID NO: 1750309
auacccacucgacagaauu

SEQ ID NO: 1750311 - RNA, 19 nt, Artificial Sequence
  Description of Artificial Sequence: Synthetic oligonucleotide
  Sense strand starting at position 3551 of SEQ ID NO: 1562480
agccgagacguaggugaau

SEQ ID NO: 1750312 - RNA, 19 nt, Artificial Sequence
  Description of Artificial Sequence: Synthetic oligonucleotide
  Antisense strand to SEQ ID NO: 1750311
auucaccuacgucucggcu

SEQ ID NO: 1750313 - RNA, 19 nt, Artificial Sequence
  Description of Artificial Sequence: Synthetic oligonucleotide
  Sense strand starting at position 3552 of SEQ ID NO: 1562480
gccgagacguaggugaauu

SEQ ID NO: 1750314 - RNA, 19 nt, Artificial Sequence
  Description of Artificial Sequence: Synthetic oligonucleotide
  Antisense strand to SEQ ID NO: 1750313
aauucaccuacgucucggc

SEQ ID NO: 1750315 - RNA, 19 nt, Artificial Sequence
  Description of Artificial Sequence: Synthetic oligonucleotide
  Sense strand starting at position 3553 of SEQ ID NO: 1562480
ccgagacguaggugaauuu

SEQ ID NO: 1750316 - RNA, 19 nt, Artificial Sequence
  Description of Artificial Sequence: Synthetic oligonucleotide
  Antisense strand to SEQ ID NO: 1750315
aaauucaccuacgucucgg

SEQ ID NO: 1750317 - RNA, 19 nt, Artificial Sequence
  Description of Artificial Sequence: Synthetic oligonucleotide
  Sense strand starting at position 3684 of SEQ ID NO: 1562480
uuaggcguucuugaugaua

SEQ ID NO: 1750318 - RNA, 19 nt, Artificial Sequence
  Description of Artificial Sequence: Synthetic oligonucleotide
  Antisense strand to SEQ ID NO: 1750317
uaucaucaagaacgccuaa

SEQ ID NO: 1750319 - RNA, 19 nt, Artificial Sequence
  Description of Artificial Sequence: Synthetic oligonucleotide
  Sense strand starting at position 3689 of SEQ ID NO: 1562480
cguucuugaugauauuuaa

SEQ ID NO: 1750320 - RNA, 19 nt, Artificial Sequence
  Description of Artificial Sequence: Synthetic oligonucleotide
  Antisense strand to SEQ ID NO: 1750319
uuaaauaucaucaagaacg

SEQ ID NO: 1750321 - RNA, 19 nt, Artificial Sequence
  Description of Artificial Sequence: Synthetic oligonucleotide
  Sense strand starting at position 3837 of SEQ ID NO: 1562480
gacucuaguuaggacauuu

SEQ ID NO: 1750322 - RNA, 19 nt, Artificial Sequence
  Description of Artificial Sequence: Synthetic oligonucleotide
  Antisense strand to SEQ ID NO: 1750321
aaauguccuaacuagaguc

SEQ ID NO: 1750323 - RNA, 19 nt, Artificial Sequence
  Description of Artificial Sequence: Synthetic oligonucleotide
  Sense strand starting at position 3862 of SEQ ID NO: 1562480
gcaagaaauuugcgauuua

SEQ ID NO: 1750324 - RNA, 19 nt, Artificial Sequence
  Description of Artificial Sequence: Synthetic oligonucleotide
  Antisense strand to SEQ ID NO: 1750323
uaaaucgcaaauuucuugc

SEQ ID NO: 1750325 - RNA, 19 nt, Artificial Sequence
  Description of Artificial Sequence: Synthetic oligonucleotide
  Sense strand starting at position 3872 of SEQ ID NO: 1562480
ugcgauuuauccuaaggaa

SEQ ID NO: 1750326 - RNA, 19 nt, Artificial Sequence
  Description of Artificial Sequence: Synthetic oligonucleotide
  Antisense strand to SEQ ID NO: 1750325
uuccuuaggauaaaucgca

SEQ ID NO: 1750327 - RNA, 19 nt, Artificial Sequence
  Description of Artificial Sequence: Synthetic oligonucleotide
  Sense strand starting at position 16 of SEQ ID NO: 1562481
uuauuaagucccuaacugu

SEQ ID NO: 1750328 - RNA, 19 nt, Artificial Sequence
  Description of Artificial Sequence: Synthetic oligonucleotide
  Antisense strand to SEQ ID NO: 1750327
acaguuagggacuuaauaa

SEQ ID NO: 1750329 - RNA, 19 nt, Artificial Sequence
  Description of Artificial Sequence: Synthetic oligonucleotide
  Sense strand starting at position 108 of SEQ ID NO: 1562481
agugaagucagccagugua

SEQ ID NO: 1750330 - RNA, 19 nt, Artificial Sequence
  Description of Artificial Sequence: Synthetic oligonucleotide
  Antisense strand to SEQ ID NO: 1750329
uacacuggcugacuucacu

SEQ ID NO: 1750331 - RNA, 19 nt, Artificial Sequence
  Description of Artificial Sequence: Synthetic oligonucleotide
  Sense strand starting at position 111 of SEQ ID NO: 1562481
gaagucagccaguguauuu

SEQ ID NO: 1750332 - RNA, 19 nt, Artificial Sequence
  Description of Artificial Sequence: Synthetic oligonucleotide
  Antisense strand to SEQ ID NO: 1750331
aaauacacuggcugacuuc

SEQ ID NO: 1750333 - RNA, 19 nt, Artificial Sequence
  Description of Artificial Sequence: Synthetic oligonucleotide
  Sense strand starting at position 164 of SEQ ID NO: 1562481
uugcaaucuugagcaaguu

SEQ ID NO: 1750334 - RNA, 19 nt, Artificial Sequence
  Description of Artificial Sequence: Synthetic oligonucleotide
  Antisense strand to SEQ ID NO: 1750333
aacuugcucaagauugcaa

SEQ ID NO: 1750335 - RNA, 19 nt, Artificial Sequence
  Description of Artificial Sequence: Synthetic oligonucleotide
  Sense strand starting at position 192 of SEQ ID NO: 1562481
acaggaugcucaucuuuaa

SEQ ID NO: 1750336 - RNA, 19 nt, Artificial Sequence
  Description of Artificial Sequence: Synthetic oligonucleotide
  Antisense strand to SEQ ID NO: 1750335
uuaaagaugagcauccugu

SEQ ID NO: 1750337 - RNA, 19 nt, Artificial Sequence
  Description of Artificial Sequence: Synthetic oligonucleotide
  Sense strand starting at position 344 of SEQ ID NO: 1562481
auggcuaaucuguggagga

SEQ ID NO: 1750338 - RNA, 19 nt, Artificial Sequence
  Description of Artificial Sequence: Synthetic oligonucleotide
  Antisense strand to SEQ ID NO: 1750337
uccuccacagauuagccau

SEQ ID NO: 1750339 - RNA, 19 nt, Artificial Sequence
  Description of Artificial Sequence: Synthetic oligonucleotide
  Sense strand starting at position 346 of SEQ ID NO: 1562481
ggcuaaucuguggaggagu

SEQ ID NO: 1750340 - RNA, 19 nt, Artificial Sequence
  Description of Artificial Sequence: Synthetic oligonucleotide
  Antisense strand to SEQ ID NO: 1750339
acuccuccacagauuagcc

SEQ ID NO: 1750341 - RNA, 19 nt, Artificial Sequence
  Description of Artificial Sequence: Synthetic oligonucleotide
  Sense strand starting at position 447 of SEQ ID NO: 1562481
gauggugcaggcugauaua

SEQ ID NO: 1750342 - RNA, 19 nt, Artificial Sequence
  Description of Artificial Sequence: Synthetic oligonucleotide
  Antisense strand to SEQ ID NO: 1750341
uauaucagccugcaccauc

SEQ ID NO: 1750343 - RNA, 19 nt, Artificial Sequence
  Description of Artificial Sequence: Synthetic oligonucleotide
  Sense strand starting at position 468 of SEQ ID NO: 1562481
uuaguuaggguucagaagu

SEQ ID NO: 1750344 - RNA, 19 nt, Artificial Sequence
  Description of Artificial Sequence: Synthetic oligonucleotide
  Antisense strand to SEQ ID NO: 1750343
acuucugaacccuaacuaa

SEQ ID NO: 1750345 - RNA, 19 nt, Artificial Sequence
  Description of Artificial Sequence: Synthetic oligonucleotide
  Sense strand starting at position 628 of SEQ ID NO: 1562481
auuagugucuuagugagca

SEQ ID NO: 1750346 - RNA, 19 nt, Artificial Sequence
  Description of Artificial Sequence: Synthetic oligonucleotide
  Antisense strand to SEQ ID NO: 1750345
ugcucacuaagacacuaau

SEQ ID NO: 1750347 - RNA, 19 nt, Artificial Sequence
  Description of Artificial Sequence: Synthetic oligonucleotide
  Sense strand starting at position 633 of SEQ ID NO: 1562481
ugucuuagugagcaucagu

SEQ ID NO: 1750348 - RNA, 19 nt, Artificial Sequence
  Description of Artificial Sequence: Synthetic oligonucleotide
  Antisense strand to SEQ ID NO: 1750347
acugaugcucacuaagaca

SEQ ID NO: 1750349 - RNA, 19 nt, Artificial Sequence
  Description of Artificial Sequence: Synthetic oligonucleotide
  Sense strand starting at position 725 of SEQ ID NO: 1562481
acccgacuucucuggccua

SEQ ID NO: 1750350 - RNA, 19 nt, Artificial Sequence
  Description of Artificial Sequence: Synthetic oligonucleotide
  Antisense strand to SEQ ID NO: 1750349
uaggccagagaagucgggu

SEQ ID NO: 1750351 - RNA, 19 nt, Artificial Sequence
  Description of Artificial Sequence: Synthetic oligonucleotide
  Sense strand starting at position 728 of SEQ ID NO: 1562481
cgacuucucuggccuacuu

SEQ ID NO: 1750352 - RNA, 19 nt, Artificial Sequence
  Description of Artificial Sequence: Synthetic oligonucleotide
  Antisense strand to SEQ ID NO: 1750351
aaguaggccagagaagucg

SEQ ID NO: 1750353 - RNA, 19 nt, Artificial Sequence
  Description of Artificial Sequence: Synthetic oligonucleotide
  Sense strand starting at position 884 of SEQ ID NO: 1562481
gggaaaggccucuguagaa

SEQ ID NO: 1750354 - RNA, 19 nt, Artificial Sequence
  Description of Artificial Sequence: Synthetic oligonucleotide
  Antisense strand to SEQ ID NO: 1750353
uucuacagaggccuuuccc

SEQ ID NO: 1750355 - RNA, 19 nt, Artificial Sequence
  Description of Artificial Sequence: Synthetic oligonucleotide
  Sense strand starting at position 896 of SEQ ID NO: 1562481
uguagaaagccuugacuuu

SEQ ID NO: 1750356 - RNA, 19 nt, Artificial Sequence
  Description of Artificial Sequence: Synthetic oligonucleotide
  Antisense strand to SEQ ID NO: 1750355
aaagucaaggcuuucuaca

SEQ ID NO: 1750357 - RNA, 19 nt, Artificial Sequence
  Description of Artificial Sequence: Synthetic oligonucleotide
  Sense strand starting at position 897 of SEQ ID NO: 1562481
guagaaagccuugacuuuc

SEQ ID NO: 1750358 - RNA, 19 nt, Artificial Sequence
  Description of Artificial Sequence: Synthetic oligonucleotide
  Antisense strand to SEQ ID NO: 1750357
gaaagucaaggcuuucuac

SEQ ID NO: 1750359 - RNA, 19 nt, Artificial Sequence
  Description of Artificial Sequence: Synthetic oligonucleotide
  Sense strand starting at position 1054 of SEQ ID NO: 1562481
ucgcgucuggugcuguaua

SEQ ID NO: 1750360 - RNA, 19 nt, Artificial Sequence
  Description of Artificial Sequence: Synthetic oligonucleotide
  Antisense strand to SEQ ID NO: 1750359
uauacagcaccagacgcga

SEQ ID NO: 1750361 - RNA, 19 nt, Artificial Sequence
  Description of Artificial Sequence: Synthetic oligonucleotide
  Sense strand starting at position 1056 of SEQ ID NO: 1562481
gcgucuggugcuguauaaa

SEQ ID NO: 1750362 - RNA, 19 nt, Artificial Sequence
  Description of Artificial Sequence: Synthetic oligonucleotide
  Antisense strand to SEQ ID NO: 1750361
uuuauacagcaccagacgc

SEQ ID NO: 1750363 - RNA, 19 nt, Artificial Sequence
  Description of Artificial Sequence: Synthetic oligonucleotide
  Sense strand starting at position 1059 of SEQ ID NO: 1562481
ucuggugcuguauaaauau

SEQ ID NO: 1750364 - RNA, 19 nt, Artificial Sequence
  Description of Artificial Sequence: Synthetic oligonucleotide
  Antisense strand to SEQ ID NO: 1750363
auauuuauacagcaccaga

SEQ ID NO: 1750365 - RNA, 19 nt, Artificial Sequence
  Description of Artificial Sequence: Synthetic oligonucleotide
  Sense strand starting at position 1210 of SEQ ID NO: 1562481
auguauucuucccuuguca

SEQ ID NO: 1750366 - RNA, 19 nt, Artificial Sequence
  Description of Artificial Sequence: Synthetic oligonucleotide
  Antisense strand to SEQ ID NO: 1750365
ugacaagggaagaauacau

SEQ ID NO: 1750367 - RNA, 19 nt, Artificial Sequence
  Description of Artificial Sequence: Synthetic oligonucleotide
  Sense strand starting at position 1252 of SEQ ID NO: 1562481
gccauccaucaggaaagua

SEQ ID NO: 1750368 - RNA, 19 nt, Artificial Sequence
  Description of Artificial Sequence: Synthetic oligonucleotide
  Antisense strand to SEQ ID NO: 1750367
uacuuuccugauggauggc

SEQ ID NO: 1750369 - RNA, 19 nt, Artificial Sequence
  Description of Artificial Sequence: Synthetic oligonucleotide
  Sense strand starting at position 1260 of SEQ ID NO: 1562481
ucaggaaaguacuuacuga

SEQ ID NO: 1750370 - RNA, 19 nt, Artificial Sequence
  Description of Artificial Sequence: Synthetic oligonucleotide
  Antisense strand to SEQ ID NO: 1750369
ucaguaaguacuuuccuga

SEQ ID NO: 1750371 - RNA, 19 nt, Artificial Sequence
  Description of Artificial Sequence: Synthetic oligonucleotide
  Sense strand starting at position 1370 of SEQ ID NO: 1562481
uuuagacaaucuguggaaa

SEQ ID NO: 1750372 - RNA, 19 nt, Artificial Sequence
  Description of Artificial Sequence: Synthetic oligonucleotide
  Antisense strand to SEQ ID NO: 1750371
uuuccacagauugucuaaa

SEQ ID NO: 1750373 - RNA, 19 nt, Artificial Sequence
  Description of Artificial Sequence: Synthetic oligonucleotide
  Sense strand starting at position 1734 of SEQ ID NO: 1562481
ugcccauucguggagacuu

SEQ ID NO: 1750374 - RNA, 19 nt, Artificial Sequence
  Description of Artificial Sequence: Synthetic oligonucleotide
  Antisense strand to SEQ ID NO: 1750373
aagucuccacgaaugggca

SEQ ID NO: 1750375 - RNA, 19 nt, Artificial Sequence
  Description of Artificial Sequence: Synthetic oligonucleotide
  Sense strand starting at position 1742 of SEQ ID NO: 1562481
cguggagacuucuauuucu

SEQ ID NO: 1750376 - RNA, 19 nt, Artificial Sequence
  Description of Artificial Sequence: Synthetic oligonucleotide
  Antisense strand to SEQ ID NO: 1750375
agaaauagaagucuccacg

SEQ ID NO: 1750377 - RNA, 19 nt, Artificial Sequence
  Description of Artificial Sequence: Synthetic oligonucleotide
  Sense strand starting at position 2490 of SEQ ID NO: 1562481
gugugaguagucccuuugu

SEQ ID NO: 1750378 - RNA, 19 nt, Artificial Sequence
  Description of Artificial Sequence: Synthetic oligonucleotide
  Antisense strand to SEQ ID NO: 1750377
acaaagggacuacucacac

SEQ ID NO: 1750379 - RNA, 19 nt, Artificial Sequence
  Description of Artificial Sequence: Synthetic oligonucleotide
  Sense strand starting at position 2844 of SEQ ID NO: 1562481
aauucugucgaguggguau

SEQ ID NO: 1750380 - RNA, 19 nt, Artificial Sequence
  Description of Artificial Sequence: Synthetic oligonucleotide
  Antisense strand to SEQ ID NO: 1750379
auacccacucgacagaauu

SEQ ID NO: 1750381 - RNA, 19 nt, Artificial Sequence
  Description of Artificial Sequence: Synthetic oligonucleotide
  Sense strand starting at position 3196 of SEQ ID NO: 1562481
agccgagacguaggugaau

SEQ ID NO: 1750382 - RNA, 19 nt, Artificial Sequence
  Description of Artificial Sequence: Synthetic oligonucleotide
  Antisense strand to SEQ ID NO: 1750381
auucaccuacgucucggcu

SEQ ID NO: 1750383 - RNA, 19 nt, Artificial Sequence
  Description of Artificial Sequence: Synthetic oligonucleotide
  Sense strand starting at position 3197 of SEQ ID NO: 1562481
gccgagacguaggugaauu

SEQ ID NO: 1750384 - RNA, 19 nt, Artificial Sequence
  Description of Artificial Sequence: Synthetic oligonucleotide
  Antisense strand to SEQ ID NO: 1750383
aauucaccuacgucucggc

SEQ ID NO: 1750385 - RNA, 19 nt, Artificial Sequence
  Description of Artificial Sequence: Synthetic oligonucleotide
  Sense strand starting at position 3198 of SEQ ID NO: 1562481
ccgagacguaggugaauuu

SEQ ID NO: 1750386 - RNA, 19 nt, Artificial Sequence
  Description of Artificial Sequence: Synthetic oligonucleotide
  Antisense strand to SEQ ID NO: 1750385
aaauucaccuacgucucgg

SEQ ID NO: 1750387 - RNA, 19 nt, Artificial Sequence
  Description of Artificial Sequence: Synthetic oligonucleotide
  Sense strand starting at position 3329 of SEQ ID NO: 1562481
uuaggcguucuugaugaua

SEQ ID NO: 1750388 - RNA, 19 nt, Artificial Sequence
  Description of Artificial Sequence: Synthetic oligonucleotide
  Antisense strand to SEQ ID NO: 1750387
uaucaucaagaacgccuaa

SEQ ID NO: 1750389 - RNA, 19 nt, Artificial Sequence
  Description of Artificial Sequence: Synthetic oligonucleotide
  Sense strand starting at position 3334 of SEQ ID NO: 1562481
cguucuugaugauauuuaa

SEQ ID NO: 1750390 - RNA, 19 nt, Artificial Sequence
  Description of Artificial Sequence: Synthetic oligonucleotide
  Antisense strand to SEQ ID NO: 1750389
uuaaauaucaucaagaacg

SEQ ID NO: 1750391 - RNA, 19 nt, Artificial Sequence
  Description of Artificial Sequence: Synthetic oligonucleotide
  Sense strand starting at position 3482 of SEQ ID NO: 1562481
gacucuaguuaggacauuu

SEQ ID NO: 1750392 - RNA, 19 nt, Artificial Sequence
  Description of Artificial Sequence: Synthetic oligonucleotide
  Antisense strand to SEQ ID NO: 1750391
aaauguccuaacuagaguc

SEQ ID NO: 1750393 - RNA, 19 nt, Artificial Sequence
  Description of Artificial Sequence: Synthetic oligonucleotide
  Sense strand starting at position 3507 of SEQ ID NO: 1562481
gcaagaaauuugcgauuua

SEQ ID NO: 1750394 - RNA, 19 nt, Artificial Sequence
  Description of Artificial Sequence: Synthetic oligonucleotide
  Antisense strand to SEQ ID NO: 1750393
uaaaucgcaaauuucuugc

SEQ ID NO: 1750395 - RNA, 19 nt, Artificial Sequence
  Description of Artificial Sequence: Synthetic oligonucleotide
  Sense strand starting at position 3517 of SEQ ID NO: 1562481
ugcgauuuauccuaaggaa

SEQ ID NO: 1750396 - RNA, 19 nt, Artificial Sequence
  Description of Artificial Sequence: Synthetic oligonucleotide
  Antisense strand to SEQ ID NO: 1750395
uuccuuaggauaaaucgca

SEQ ID NO: 1750397 - RNA, 19 nt, Artificial Sequence
  Description of Artificial Sequence: Synthetic oligonucleotide
  Sense strand starting at position 3874 of SEQ ID NO: 1562481
cugcguugagguuugugua

SEQ ID NO: 1750398 - RNA, 19 nt, Artificial Sequence
  Description of Artificial Sequence: Synthetic oligonucleotide
  Antisense strand to SEQ ID NO: 1750397
uacacaaaccucaacgcag

SEQ ID NO: 1750399 - RNA, 19 nt, Artificial Sequence
  Description of Artificial Sequence: Synthetic oligonucleotide
  Sense strand starting at position 3881 of SEQ ID NO: 1562481
gagguuuguguauaucuuu

SEQ ID NO: 1750400 - RNA, 19 nt, Artificial Sequence
  Description of Artificial Sequence: Synthetic oligonucleotide
  Antisense strand to SEQ ID NO: 1750399
aaagauauacacaaaccuc

SEQ ID NO: 1750401 - RNA, 19 nt, Artificial Sequence
  Description of Artificial Sequence: Synthetic oligonucleotide
  Sense strand starting at position 3890 of SEQ ID NO: 1562481
guauaucuuuacuuugcau

SEQ ID NO: 1750402 - RNA, 19 nt, Artificial Sequence
  Description of Artificial Sequence: Synthetic oligonucleotide
  Antisense strand to SEQ ID NO: 1750401
augcaaaguaaagauauac

SEQ ID NO: 1750403 - RNA, 19 nt, Artificial Sequence
  Description of Artificial Sequence: Synthetic oligonucleotide
  Sense strand starting at position 3911 of SEQ ID NO: 1562481
uuuauacuuugaucaaggu

SEQ ID NO: 1750404 - RNA, 19 nt, Artificial Sequence
  Description of Artificial Sequence: Synthetic oligonucleotide
  Antisense strand to SEQ ID NO: 1750403
accuugaucaaaguauaaa

SEQ ID NO: 1750405 - RNA, 19 nt, Artificial Sequence
  Description of Artificial Sequence: Synthetic oligonucleotide
  Sense strand starting at position 3915 of SEQ ID NO: 1562481
uacuuugaucaaggugaau

SEQ ID NO: 1750406 - RNA, 19 nt, Artificial Sequence
  Description of Artificial Sequence: Synthetic oligonucleotide
  Antisense strand to SEQ ID NO: 1750405
auucaccuugaucaaagua

SEQ ID NO: 1750407 - RNA, 19 nt, Artificial Sequence
  Description of Artificial Sequence: Synthetic oligonucleotide
  Sense strand starting at position 61 of SEQ ID NO: 1562482
ggaguccaucaaugcagua

SEQ ID NO: 1750408 - RNA, 19 nt, Artificial Sequence
  Description of Artificial Sequence: Synthetic oligonucleotide
  Antisense strand to SEQ ID NO: 1750407
uacugcauugauggacucc

SEQ ID NO: 1750409 - RNA, 19 nt, Artificial Sequence
  Description of Artificial Sequence: Synthetic oligonucleotide
  Sense strand starting at position 154 of SEQ ID NO: 1562482
gaggccagauugucaaagu

SEQ ID NO: 1750410 - RNA, 19 nt, Artificial Sequence
  Description of Artificial Sequence: Synthetic oligonucleotide
  Antisense strand to SEQ ID NO: 1750409
acuuugacaaucuggccuc

SEQ ID NO: 1750411 - RNA, 19 nt, Artificial Sequence
  Description of Artificial Sequence: Synthetic oligonucleotide
  Sense strand starting at position 263 of SEQ ID NO: 1562482
agauauaaugcuugcuauu

SEQ ID NO: 1750412 - RNA, 19 nt, Artificial Sequence
  Description of Artificial Sequence: Synthetic oligonucleotide
  Antisense strand to SEQ ID NO: 1750411
aauagcaagcauuauaucu

SEQ ID NO: 1750413 - RNA, 19 nt, Artificial Sequence
  Description of Artificial Sequence: Synthetic oligonucleotide
  Sense strand starting at position 281 of SEQ ID NO: 1562482
ugcacacuuuaaguaguau

SEQ ID NO: 1750414 - RNA, 19 nt, Artificial Sequence
  Description of Artificial Sequence: Synthetic oligonucleotide
  Antisense strand to SEQ ID NO: 1750413
auacuacuuaaagugugca

SEQ ID NO: 1750415 - RNA, 19 nt, Artificial Sequence
  Description of Artificial Sequence: Synthetic oligonucleotide
  Sense strand starting at position 292 of SEQ ID NO: 1562482
aguaguauacuguaauuac

SEQ ID NO: 1750416 - RNA, 19 nt, Artificial Sequence
  Description of Artificial Sequence: Synthetic oligonucleotide
  Antisense strand to SEQ ID NO: 1750415
guaauuacaguauacuacu

SEQ ID NO: 1750417 - RNA, 19 nt, Artificial Sequence
  Description of Artificial Sequence: Synthetic oligonucleotide
  Sense strand starting at position 295 of SEQ ID NO: 1562482
aguauacuguaauuacaac

SEQ ID NO: 1750418 - RNA, 19 nt, Artificial Sequence
  Description of Artificial Sequence: Synthetic oligonucleotide
  Antisense strand to SEQ ID NO: 1750417
guuguaauuacaguauacu

SEQ ID NO: 1750419 - RNA, 19 nt, Artificial Sequence
  Description of Artificial Sequence: Synthetic oligonucleotide
  Sense strand starting at position 378 of SEQ ID NO: 1562482
ugcgguggucuggauuaga

SEQ ID NO: 1750420 - RNA, 19 nt, Artificial Sequence
  Description of Artificial Sequence: Synthetic oligonucleotide
  Antisense strand to SEQ ID NO: 1750419
ucuaauccagaccaccgca
